United States Patent Application Publication US 2005/0255487 A1 - sequence listing, part 62

SEQ ID NO: 1700289 - RNA, 19 nt, Homo sapiens
  misc_RNA (1)...(19): siRNA sense strand
gaaugucccagcggaauug

SEQ ID NO: 1700290 - RNA, 19 nt, Homo sapiens
  misc_RNA (1)...(19): siRNA sense strand
gaggaaaugcuugacauca

SEQ ID NO: 1700291 - RNA, 19 nt, Homo sapiens
  misc_RNA (1)...(19): siRNA sense strand
gauuuacucccaguucuuu

SEQ ID NO: 1700292 - RNA, 19 nt, Homo sapiens
  misc_RNA (1)...(19): siRNA sense strand
gcagauuuacucccaguuc

SEQ ID NO: 1700293 - RNA, 19 nt, Homo sapiens
  misc_RNA (1)...(19): siRNA sense strand
ucaaugaggagaacuucaa

SEQ ID NO: 1700294 - RNA, 19 nt, Homo sapiens
  misc_RNA (1)...(19): siRNA sense strand
gagaacuucaagcagauuu

SEQ ID NO: 1700295 - RNA, 19 nt, Homo sapiens
  misc_RNA (1)...(19): siRNA sense strand
ugaaguccaucuaugacau

SEQ ID NO: 1700296 - RNA, 19 nt, Homo sapiens
  misc_RNA (1)...(19): siRNA sense strand
caucaugaaguccaucuau

SEQ ID NO: 1700297 - RNA, 19 nt, Homo sapiens
  misc_RNA (1)...(19): siRNA sense strand
gaaguccaucuaugacaug

SEQ ID NO: 1700298 - RNA, 19 nt, Homo sapiens
  misc_RNA (1)...(19): siRNA sense strand
aggaauucauugagucuug

SEQ ID NO: 1700299 - RNA, 19 nt, Homo sapiens
  misc_RNA (1)...(19): siRNA sense strand
gaacuucaagcagauuuac

SEQ ID NO: 1700300 - RNA, 19 nt, Homo sapiens
  misc_RNA (1)...(19): siRNA sense strand
ccauugaggaauucauuga

SEQ ID NO: 1700301 - RNA, 19 nt, Homo sapiens
  misc_RNA (1)...(19): siRNA sense strand
gcaggagcaaaccaaauuc

SEQ ID NO: 1700302 - RNA, 19 nt, Homo sapiens
  misc_RNA (1)...(19): siRNA sense strand
cagauuuacucccaguucu

SEQ ID NO: 1700303 - RNA, 19 nt, Homo sapiens
  misc_RNA (1)...(19): siRNA sense strand
ggacagaaacaaggauggu

SEQ ID NO: 1700304 - RNA, 19 nt, Homo sapiens
  misc_RNA (1)...(19): siRNA sense strand
aggaaaugcuugacaucau

SEQ ID NO: 1700305 - RNA, 19 nt, Homo sapiens
  misc_RNA (1)...(19): siRNA sense strand
ggagaacuucaagcagauu

SEQ ID NO: 1700306 - RNA, 19 nt, Homo sapiens
  misc_RNA (1)...(19): siRNA sense strand
ugaauuguccaccgugugu

SEQ ID NO: 1700307 - RNA, 19 nt, Homo sapiens
  misc_RNA (1)...(19): siRNA sense strand
cagaagauggacagaaaca

SEQ ID NO: 1700308 - RNA, 19 nt, Homo sapiens
  misc_RNA (1)...(19): siRNA sense strand
ugcaggagcaaaccaaauu

SEQ ID NO: 1700309 - RNA, 19 nt, Homo sapiens
  misc_RNA (1)...(19): siRNA sense strand
ggugaccauugaggaauuc

SEQ ID NO: 1700310 - RNA, 19 nt, Homo sapiens
  misc_RNA (1)...(19): siRNA sense strand
agaacuucaagcagauuua

SEQ ID NO: 1700311 - RNA, 19 nt, Homo sapiens
  misc_RNA (1)...(19): siRNA sense strand
gcguggacgaugaauuuga

SEQ ID NO: 1700312 - RNA, 19 nt, Homo sapiens
  misc_RNA (1)...(19): siRNA sense strand
gagcagcugcaggagcaaa

SEQ ID NO: 1700313 - RNA, 19 nt, Homo sapiens
  misc_RNA (1)...(19): siRNA sense strand
cagcaccuaugccacuuuu

SEQ ID NO: 1700314 - RNA, 19 nt, Homo sapiens
  misc_RNA (1)...(19): siRNA sense strand
ggaaaugcuugacaucaug

SEQ ID NO: 1700315 - RNA, 19 nt, Homo sapiens
  misc_RNA (1)...(19): siRNA sense strand
cagcguggacgaugaauuu

SEQ ID NO: 1700316 - RNA, 19 nt, Homo sapiens
  misc_RNA (1)...(19): siRNA sense strand
gaagauggacagaaacaag

SEQ ID NO: 1700317 - RNA, 19 nt, Homo sapiens
  misc_RNA (1)...(19): siRNA sense strand
caugauggcucggucaguu

SEQ ID NO: 1700318 - RNA, 19 nt, Homo sapiens
  misc_RNA (1)...(19): siRNA sense strand
gggaacacguggagagcuu

SEQ ID NO: 1700319 - RNA, 19 nt, Homo sapiens
  misc_RNA (1)...(19): siRNA sense strand
gaaaugcuugacaucauga

SEQ ID NO: 1700320 - RNA, 19 nt, Homo sapiens
  misc_RNA (1)...(19): siRNA sense strand
ggaauucauugagucuugu

SEQ ID NO: 1700321 - RNA, 19 nt, Homo sapiens
  misc_RNA (1)...(19): siRNA sense strand
cguggacgaugaauuugaa

SEQ ID NO: 1700322 - RNA, 19 nt, Homo sapiens
  misc_RNA (1)...(19): siRNA sense strand
gaccauugaggaauucauu

SEQ ID NO: 1700323 - RNA, 19 nt, Homo sapiens
  misc_RNA (1)...(19): siRNA sense strand
gaaugucccagcggaauug

SEQ ID NO: 1700324 - RNA, 19 nt, Homo sapiens
  misc_RNA (1)...(19): siRNA sense strand
gaggaaaugcuugacauca

SEQ ID NO: 1700325 - RNA, 19 nt, Homo sapiens
  misc_RNA (1)...(19): siRNA sense strand
gauuuacucccaguucuuu

SEQ ID NO: 1700326 - RNA, 19 nt, Homo sapiens
  misc_RNA (1)...(19): siRNA sense strand
gcagauuuacucccaguuc

SEQ ID NO: 1700327 - RNA, 19 nt, Homo sapiens
  misc_RNA (1)...(19): siRNA sense strand
ucaaugaggagaacuucaa

SEQ ID NO: 1700328 - RNA, 19 nt, Homo sapiens
  misc_RNA (1)...(19): siRNA sense strand
gagaacuucaagcagauuu

SEQ ID NO: 1700329 - RNA, 19 nt, Homo sapiens
  misc_RNA (1)...(19): siRNA sense strand
ugaaguccaucuaugacau

SEQ ID NO: 1700330 - RNA, 19 nt, Homo sapiens
  misc_RNA (1)...(19): siRNA sense strand
caucaugaaguccaucuau

SEQ ID NO: 1700331 - RNA, 19 nt, Homo sapiens
  misc_RNA (1)...(19): siRNA sense strand
gaaguccaucuaugacaug

SEQ ID NO: 1700332 - RNA, 19 nt, Homo sapiens
  misc_RNA (1)...(19): siRNA sense strand
aggaauucauugagucuug

SEQ ID NO: 1700333 - RNA, 19 nt, Homo sapiens
  misc_RNA (1)...(19): siRNA sense strand
gaacuucaagcagauuuac

SEQ ID NO: 1700334 - RNA, 19 nt, Homo sapiens
  misc_RNA (1)...(19): siRNA sense strand
ccauugaggaauucauuga

SEQ ID NO: 1700335 - RNA, 19 nt, Homo sapiens
  misc_RNA (1)...(19): siRNA sense strand
gcaggagcaaaccaaauuc

SEQ ID NO: 1700336 - RNA, 19 nt, Homo sapiens
  misc_RNA (1)...(19): siRNA sense strand
cagauuuacucccaguucu

SEQ ID NO: 1700337 - RNA, 19 nt, Homo sapiens
  misc_RNA (1)...(19): siRNA sense strand
ggacagaaacaaggauggu

SEQ ID NO: 1700338 - RNA, 19 nt, Homo sapiens
  misc_RNA (1)...(19): siRNA sense strand
aggaaaugcuugacaucau

SEQ ID NO: 1700339 - RNA, 19 nt, Homo sapiens
  misc_RNA (1)...(19): siRNA sense strand
ggagaacuucaagcagauu

SEQ ID NO: 1700340 - RNA, 19 nt, Homo sapiens
  misc_RNA (1)...(19): siRNA sense strand
ugaauuguccaccgugugu

SEQ ID NO: 1700341 - RNA, 19 nt, Homo sapiens
  misc_RNA (1)...(19): siRNA sense strand
cagaagauggacagaaaca

SEQ ID NO: 1700342 - RNA, 19 nt, Homo sapiens
  misc_RNA (1)...(19): siRNA sense strand
ugcaggagcaaaccaaauu

SEQ ID NO: 1700343 - RNA, 19 nt, Homo sapiens
  misc_RNA (1)...(19): siRNA sense strand
ggugaccauugaggaauuc

SEQ ID NO: 1700344 - RNA, 19 nt, Homo sapiens
  misc_RNA (1)...(19): siRNA sense strand
agaacuucaagcagauuua

SEQ ID NO: 1700345 - RNA, 19 nt, Homo sapiens
  misc_RNA (1)...(19): siRNA sense strand
gcguggacgaugaauuuga

SEQ ID NO: 1700346 - RNA, 19 nt, Homo sapiens
  misc_RNA (1)...(19): siRNA sense strand
gagcagcugcaggagcaaa

SEQ ID NO: 1700347 - RNA, 19 nt, Homo sapiens
  misc_RNA (1)...(19): siRNA sense strand
cagcaccuaugccacuuuu

SEQ ID NO: 1700348 - RNA, 19 nt, Homo sapiens
  misc_RNA (1)...(19): siRNA sense strand
ggaaaugcuugacaucaug

SEQ ID NO: 1700349 - RNA, 19 nt, Homo sapiens
  misc_RNA (1)...(19): siRNA sense strand
cagcguggacgaugaauuu

SEQ ID NO: 1700350 - RNA, 19 nt, Homo sapiens
  misc_RNA (1)...(19): siRNA sense strand
gaagauggacagaaacaag

SEQ ID NO: 1700351 - RNA, 19 nt, Homo sapiens
  misc_RNA (1)...(19): siRNA sense strand
caugauggcucggucaguu

SEQ ID NO: 1700352 - RNA, 19 nt, Homo sapiens
  misc_RNA (1)...(19): siRNA sense strand
gggaacacguggagagcuu

SEQ ID NO: 1700353 - RNA, 19 nt, Homo sapiens
  misc_RNA (1)...(19): siRNA sense strand
gaaaugcuugacaucauga

SEQ ID NO: 1700354 - RNA, 19 nt, Homo sapiens
  misc_RNA (1)...(19): siRNA sense strand
ggaauucauugagucuugu

SEQ ID NO: 1700355 - RNA, 19 nt, Homo sapiens
  misc_RNA (1)...(19): siRNA sense strand
cguggacgaugaauuugaa

SEQ ID NO: 1700356 - RNA, 19 nt, Homo sapiens
  misc_RNA (1)...(19): siRNA sense strand
gaccauugaggaauucauu

SEQ ID NO: 1700357 - RNA, 19 nt, Homo sapiens
  misc_RNA (1)...(19): siRNA sense strand
gaaugucccagcggaauug

SEQ ID NO: 1700358 - RNA, 19 nt, Homo sapiens
  misc_RNA (1)...(19): siRNA sense strand
gaggaaaugcuugacauca

SEQ ID NO: 1700359 - RNA, 19 nt, Homo sapiens
  misc_RNA (1)...(19): siRNA sense strand
gauuuacucccaguucuuu

SEQ ID NO: 1700360 - RNA, 19 nt, Homo sapiens
  misc_RNA (1)...(19): siRNA sense strand
gcagauuuacucccaguuc

SEQ ID NO: 1700361 - RNA, 19 nt, Homo sapiens
  misc_RNA (1)...(19): siRNA sense strand
ucaaugaggagaacuucaa

SEQ ID NO: 1700362 - RNA, 19 nt, Homo sapiens
  misc_RNA (1)...(19): siRNA sense strand
gagaacuucaagcagauuu

SEQ ID NO: 1700363 - RNA, 19 nt, Homo sapiens
  misc_RNA (1)...(19): siRNA sense strand
ugaaguccaucuaugacau

SEQ ID NO: 1700364 - RNA, 19 nt, Homo sapiens
  misc_RNA (1)...(19): siRNA sense strand
caucaugaaguccaucuau

SEQ ID NO: 1700365 - RNA, 19 nt, Homo sapiens
  misc_RNA (1)...(19): siRNA sense strand
gaaguccaucuaugacaug

SEQ ID NO: 1700366 - RNA, 19 nt, Homo sapiens
  misc_RNA (1)...(19): siRNA sense strand
aggaauucauugagucuug

SEQ ID NO: 1700367 - RNA, 19 nt, Homo sapiens
  misc_RNA (1)...(19): siRNA sense strand
gaacuucaagcagauuuac

SEQ ID NO: 1700368 - RNA, 19 nt, Homo sapiens
  misc_RNA (1)...(19): siRNA sense strand
ccauugaggaauucauuga

SEQ ID NO: 1700369 - RNA, 19 nt, Homo sapiens
  misc_RNA (1)...(19): siRNA sense strand
gcaggagcaaaccaaauuc

SEQ ID NO: 1700370 - RNA, 19 nt, Homo sapiens
  misc_RNA (1)...(19): siRNA sense strand
cagauuuacucccaguucu

SEQ ID NO: 1700371 - RNA, 19 nt, Homo sapiens
  misc_RNA (1)...(19): siRNA sense strand
ggacagaaacaaggauggu

SEQ ID NO: 1700372 - RNA, 19 nt, Homo sapiens
  misc_RNA (1)...(19): siRNA sense strand
aggaaaugcuugacaucau

SEQ ID NO: 1700373 - RNA, 19 nt, Homo sapiens
  misc_RNA (1)...(19): siRNA sense strand
ggagaacuucaagcagauu

SEQ ID NO: 1700374 - RNA, 19 nt, Homo sapiens
  misc_RNA (1)...(19): siRNA sense strand
ugaauuguccaccgugugu

SEQ ID NO: 1700375 - RNA, 19 nt, Homo sapiens
  misc_RNA (1)...(19): siRNA sense strand
cagaagauggacagaaaca

SEQ ID NO: 1700376 - RNA, 19 nt, Homo sapiens
  misc_RNA (1)...(19): siRNA sense strand
ugcaggagcaaaccaaauu

SEQ ID NO: 1700377 - RNA, 19 nt, Homo sapiens
  misc_RNA (1)...(19): siRNA sense strand
ggugaccauugaggaauuc

SEQ ID NO: 1700378 - RNA, 19 nt, Homo sapiens
  misc_RNA (1)...(19): siRNA sense strand
agaacuucaagcagauuua

SEQ ID NO: 1700379 - RNA, 19 nt, Homo sapiens
  misc_RNA (1)...(19): siRNA sense strand
gcguggacgaugaauuuga

SEQ ID NO: 1700380 - RNA, 19 nt, Homo sapiens
  misc_RNA (1)...(19): siRNA sense strand
gagcagcugcaggagcaaa

SEQ ID NO: 1700381 - RNA, 19 nt, Homo sapiens
  misc_RNA (1)...(19): siRNA sense strand
cagcaccuaugccacuuuu

SEQ ID NO: 1700382 - RNA, 19 nt, Homo sapiens
  misc_RNA (1)...(19): siRNA sense strand
ggaaaugcuugacaucaug

SEQ ID NO: 1700383 - RNA, 19 nt, Homo sapiens
  misc_RNA (1)...(19): siRNA sense strand
cagcguggacgaugaauuu

SEQ ID NO: 1700384 - RNA, 19 nt, Homo sapiens
  misc_RNA (1)...(19): siRNA sense strand
gaagauggacagaaacaag

SEQ ID NO: 1700385 - RNA, 19 nt, Homo sapiens
  misc_RNA (1)...(19): siRNA sense strand
caugauggcucggucaguu

SEQ ID NO: 1700386 - RNA, 19 nt, Homo sapiens
  misc_RNA (1)...(19): siRNA sense strand
gggaacacguggagagcuu

SEQ ID NO: 1700387 - RNA, 19 nt, Homo sapiens
  misc_RNA (1)...(19): siRNA sense strand
gaaaugcuugacaucauga

SEQ ID NO: 1700388 - RNA, 19 nt, Homo sapiens
  misc_RNA (1)...(19): siRNA sense strand
ggaauucauugagucuugu

SEQ ID NO: 1700389 - RNA, 19 nt, Homo sapiens
  misc_RNA (1)...(19): siRNA sense strand
cguggacgaugaauuugaa

SEQ ID NO: 1700390 - RNA, 19 nt, Homo sapiens
  misc_RNA (1)...(19): siRNA sense strand
gaccauugaggaauucauu

SEQ ID NO: 1700391 - RNA, 19 nt, Homo sapiens
  misc_RNA (1)...(19): siRNA sense strand
gaaugucccagcggaauug

SEQ ID NO: 1700392 - RNA, 19 nt, Homo sapiens
  misc_RNA (1)...(19): siRNA sense strand
gaggaaaugcuugacauca

SEQ ID NO: 1700393 - RNA, 19 nt, Homo sapiens
  misc_RNA (1)...(19): siRNA sense strand
gauuuacucccaguucuuu

SEQ ID NO: 1700394 - RNA, 19 nt, Homo sapiens
  misc_RNA (1)...(19): siRNA sense strand
gcagauuuacucccaguuc

SEQ ID NO: 1700395 - RNA, 19 nt, Homo sapiens
  misc_RNA (1)...(19): siRNA sense strand
ucaaugaggagaacuucaa

SEQ ID NO: 1700396 - RNA, 19 nt, Homo sapiens
  misc_RNA (1)...(19): siRNA sense strand
gagaacuucaagcagauuu

SEQ ID NO: 1700397 - RNA, 19 nt, Homo sapiens
  misc_RNA (1)...(19): siRNA sense strand
ugaaguccaucuaugacau

SEQ ID NO: 1700398 - RNA, 19 nt, Homo sapiens
  misc_RNA (1)...(19): siRNA sense strand
caucaugaaguccaucuau

SEQ ID NO: 1700399 - RNA, 19 nt, Homo sapiens
  misc_RNA (1)...(19): siRNA sense strand
gaaguccaucuaugacaug

SEQ ID NO: 1700400 - RNA, 19 nt, Homo sapiens
  misc_RNA (1)...(19): siRNA sense strand
aggaauucauugagucuug

SEQ ID NO: 1700401 - RNA, 19 nt, Homo sapiens
  misc_RNA (1)...(19): siRNA sense strand
gaacuucaagcagauuuac

SEQ ID NO: 1700402 - RNA, 19 nt, Homo sapiens
  misc_RNA (1)...(19): siRNA sense strand
ccauugaggaauucauuga

SEQ ID NO: 1700403 - RNA, 19 nt, Homo sapiens
  misc_RNA (1)...(19): siRNA sense strand
gcaggagcaaaccaaauuc

SEQ ID NO: 1700404 - RNA, 19 nt, Homo sapiens
  misc_RNA (1)...(19): siRNA sense strand
cagauuuacucccaguucu

SEQ ID NO: 1700405 - RNA, 19 nt, Homo sapiens
  misc_RNA (1)...(19): siRNA sense strand
ggacagaaacaaggauggu

SEQ ID NO: 1700406 - RNA, 19 nt, Homo sapiens
  misc_RNA (1)...(19): siRNA sense strand
aggaaaugcuugacaucau

SEQ ID NO: 1700407 - RNA, 19 nt, Homo sapiens
  misc_RNA (1)...(19): siRNA sense strand
ggagaacuucaagcagauu

SEQ ID NO: 1700408 - RNA, 19 nt, Homo sapiens
  misc_RNA (1)...(19): siRNA sense strand
ugaauuguccaccgugugu

SEQ ID NO: 1700409 - RNA, 19 nt, Homo sapiens
  misc_RNA (1)...(19): siRNA sense strand
cagaagauggacagaaaca

SEQ ID NO: 1700410 - RNA, 19 nt, Homo sapiens
  misc_RNA (1)...(19): siRNA sense strand
ugcaggagcaaaccaaauu

SEQ ID NO: 1700411 - RNA, 19 nt, Homo sapiens
  misc_RNA (1)...(19): siRNA sense strand
ggugaccauugaggaauuc

SEQ ID NO: 1700412 - RNA, 19 nt, Homo sapiens
  misc_RNA (1)...(19): siRNA sense strand
agaacuucaagcagauuua

SEQ ID NO: 1700413 - RNA, 19 nt, Homo sapiens
  misc_RNA (1)...(19): siRNA sense strand
gcguggacgaugaauuuga

SEQ ID NO: 1700414 - RNA, 19 nt, Homo sapiens
  misc_RNA (1)...(19): siRNA sense strand
gagcagcugcaggagcaaa

SEQ ID NO: 1700415 - RNA, 19 nt, Homo sapiens
  misc_RNA (1)...(19): siRNA sense strand
cagcaccuaugccacuuuu

SEQ ID NO: 1700416 - RNA, 19 nt, Homo sapiens
  misc_RNA (1)...(19): siRNA sense strand
cagcguggacgaugaauuu

SEQ ID NO: 1700417 - RNA, 19 nt, Homo sapiens
  misc_RNA (1)...(19): siRNA sense strand
cguggacgaugaauuugaa

SEQ ID NO: 1700418 - RNA, 19 nt, Homo sapiens
  misc_RNA (1)...(19): siRNA sense strand
gaaugucccagcggaauug

SEQ ID NO: 1700419 - RNA, 19 nt, Homo sapiens
  misc_RNA (1)...(19): siRNA sense strand
gcaggagcaaaccaaauuc

SEQ ID NO: 1700420 - RNA, 19 nt, Homo sapiens
  misc_RNA (1)...(19): siRNA sense strand
ugaauuguccaccgugugu

SEQ ID NO: 1700421 - RNA, 19 nt, Homo sapiens
  misc_RNA (1)...(19): siRNA sense strand
ugcaggagcaaaccaaauu

SEQ ID NO: 1700422 - RNA, 19 nt, Homo sapiens
  misc_RNA (1)...(19): siRNA sense strand
gcguggacgaugaauuuga

SEQ ID NO: 1700423 - RNA, 19 nt, Homo sapiens
  misc_RNA (1)...(19): siRNA sense strand
gagcagcugcaggagcaaa

SEQ ID NO: 1700424 - RNA, 19 nt, Homo sapiens
  misc_RNA (1)...(19): siRNA sense strand
gcaaaggaauguuaaucua

SEQ ID NO: 1700425 - RNA, 19 nt, Homo sapiens
  misc_RNA (1)...(19): siRNA sense strand
gaauggauauuugcagaua

SEQ ID NO: 1700426 - RNA, 19 nt, Homo sapiens
  misc_RNA (1)...(19): siRNA sense strand
cagaaucacugaaagcaaa

SEQ ID NO: 1700427 - RNA, 19 nt, Homo sapiens
  misc_RNA (1)...(19): siRNA sense strand
caucguggcgcauguauua

SEQ ID NO: 1700428 - RNA, 19 nt, Homo sapiens
  misc_RNA (1)...(19): siRNA sense strand
gaagacaauuauucacguu

SEQ ID NO: 1700429 - RNA, 19 nt, Homo sapiens
  misc_RNA (1)...(19): siRNA sense strand
gaaaccaaauccugaucaa

SEQ ID NO: 1700430 - RNA, 19 nt, Homo sapiens
  misc_RNA (1)...(19): siRNA sense strand
caagagcaaaggaauguua

SEQ ID NO: 1700431 - RNA, 19 nt, Homo sapiens
  misc_RNA (1)...(19): siRNA sense strand
ccauuaaaguuacugguuu

SEQ ID NO: 1700432 - RNA, 19 nt, Homo sapiens
  misc_RNA (1)...(19): siRNA sense strand
uaaguacgauguucaagug

SEQ ID NO: 1700433 - RNA, 19 nt, Homo sapiens
  misc_RNA (1)...(19): siRNA sense strand
gaaaauaaacgcuccaaaa

SEQ ID NO: 1700434 - RNA, 19 nt, Homo sapiens
  misc_RNA (1)...(19): siRNA sense strand
gaaaccagaaucacugaaa

SEQ ID NO: 1700435 - RNA, 19 nt, Homo sapiens
  misc_RNA (1)...(19): siRNA sense strand
gaguggagccaaccuauuu

SEQ ID NO: 1700436 - RNA, 19 nt, Homo sapiens
  misc_RNA (1)...(19): siRNA sense strand
gcagaacgaccacucacua

SEQ ID NO: 1700437 - RNA, 19 nt, Homo sapiens
  misc_RNA (1)...(19): siRNA sense strand
caaauaaauccuccacuga

SEQ ID NO: 1700438 - RNA, 19 nt, Homo sapiens
  misc_RNA (1)...(19): siRNA sense strand
ccuggaaccucaauuguga

SEQ ID NO: 1700439 - RNA, 19 nt, Homo sapiens
  misc_RNA (1)...(19): siRNA sense strand
ucacgccauugaucaaaua

SEQ ID NO: 1700440 - RNA, 19 nt, Homo sapiens
  misc_RNA (1)...(19): siRNA sense strand
ccacaaacacuacagaaga

SEQ ID NO: 1700441 - RNA, 19 nt, Homo sapiens
  misc_RNA (1)...(19): siRNA sense strand
ugaaggaacucgucucucu

SEQ ID NO: 1700442 - RNA, 19 nt, Homo sapiens
  misc_RNA (1)...(19): siRNA sense strand
gagccaaccuauuuaugug

SEQ ID NO: 1700443 - RNA, 19 nt, Homo sapiens
  misc_RNA (1)...(19): siRNA sense strand
gaacucgucucucuaucca

SEQ ID NO: 1700444 - RNA, 19 nt, Homo sapiens
  misc_RNA (1)...(19): siRNA sense strand
gaagaugacuaugaaacca

SEQ ID NO: 1700445 - RNA, 19 nt, Homo sapiens
  misc_RNA (1)...(19): siRNA sense strand
ugacuuacuuccugaugaa

SEQ ID NO: 1700446 - RNA, 19 nt, Homo sapiens
  misc_RNA (1)...(19): siRNA sense strand
gaaagcaaauguguaacca

SEQ ID NO: 1700447 - RNA, 19 nt, Homo sapiens
  misc_RNA (1)...(19): siRNA sense strand
gcagggcucuggagugagu

SEQ ID NO: 1700448 - RNA, 19 nt, Homo sapiens
  misc_RNA (1)...(19): siRNA sense strand
gaaugucacagcagagauu

SEQ ID NO: 1700449 - RNA, 19 nt, Homo sapiens
  misc_RNA (1)...(19): siRNA sense strand
uacaaggaauggauauuug

SEQ ID NO: 1700450 - RNA, 19 nt, Homo sapiens
  misc_RNA (1)...(19): siRNA sense strand
guacgauguucaagugaga

SEQ ID NO: 1700451 - RNA, 19 nt, Homo sapiens
  misc_RNA (1)...(19): siRNA sense strand
ccugucaauuucaccauua

SEQ ID NO: 1700452 - RNA, 19 nt, Homo sapiens
  misc_RNA (1)...(19): siRNA sense strand
ggagccaaccuauuuaugu

SEQ ID NO: 1700453 - RNA, 19 nt, Homo sapiens
  misc_RNA (1)...(19): siRNA sense strand
agaaaccagugucugcuuu

SEQ ID NO: 1700454 - RNA, 19 nt, Homo sapiens
  misc_RNA (1)...(19): siRNA sense strand
gaacgaccacucacuacug

SEQ ID NO: 1700455 - RNA, 19 nt, Homo sapiens
  misc_RNA (1)...(19): siRNA sense strand
gaaggaacucgucucucua

SEQ ID NO: 1700456 - RNA, 19 nt, Homo sapiens
  misc_RNA (1)...(19): siRNA sense strand
gauacugcaagcugacuua

SEQ ID NO: 1700457 - RNA, 19 nt, Homo sapiens
  misc_RNA (1)...(19): siRNA sense strand
cuacagaagacaauuauuc

SEQ ID NO: 1700458 - RNA, 19 nt, Homo sapiens
  misc_RNA (1)...(19): siRNA sense strand
ccaaugcauucaucucaau

SEQ ID NO: 1700459 - RNA, 19 nt, Homo sapiens
  misc_RNA (1)...(19): siRNA sense strand
ggaccauccugcagaacga

SEQ ID NO: 1700460 - RNA, 19 nt, Homo sapiens
  misc_RNA (1)...(19): siRNA sense strand
aauaaacgcuccaaaagaa

SEQ ID NO: 1700461 - RNA, 19 nt, Homo sapiens
  misc_RNA (1)...(19): siRNA sense strand
caaaagaagaugacuauga

SEQ ID NO: 1700462 - RNA, 19 nt, Homo sapiens
  misc_RNA (1)...(19): siRNA sense strand
aaauaucgcaugcugguuu

SEQ ID NO: 1700463 - RNA, 19 nt, Homo sapiens
  misc_RNA (1)...(19): siRNA sense strand
aaauaaauccuccacugaa

SEQ ID NO: 1700464 - RNA, 19 nt, Homo sapiens
  misc_RNA (1)...(19): siRNA sense strand
cauuaaaguuacugguuug

SEQ ID NO: 1700465 - RNA, 19 nt, Homo sapiens
  misc_RNA (1)...(19): siRNA sense strand
aauaaauccuccacugaau

SEQ ID NO: 1700466 - RNA, 19 nt, Homo sapiens
  misc_RNA (1)...(19): siRNA sense strand
caaaggaauguuaaucuag

SEQ ID NO: 1700467 - RNA, 19 nt, Homo sapiens
  misc_RNA (1)...(19): siRNA sense strand
cgccauugaucaaauaaau

SEQ ID NO: 1700468 - RNA, 19 nt, Homo sapiens
  misc_RNA (1)...(19): siRNA sense strand
acacuacagaagacaauua

SEQ ID NO: 1700469 - RNA, 19 nt, Homo sapiens
  misc_RNA (1)...(19): siRNA sense strand
ggaaaccaaauccugauca

SEQ ID NO: 1700470 - RNA, 19 nt, Homo sapiens
  misc_RNA (1)...(19): siRNA sense strand
gaucaagagcaaaggaaug

SEQ ID NO: 1700471 - RNA, 19 nt, Homo sapiens
  misc_RNA (1)...(19): siRNA sense strand
ugaagaaugccaagaauac

SEQ ID NO: 1700472 - RNA, 19 nt, Homo sapiens
  misc_RNA (1)...(19): siRNA sense strand
gagcaaaggaauguuaauc

SEQ ID NO: 1700473 - RNA, 19 nt, Homo sapiens
  misc_RNA (1)...(19): siRNA sense strand
gaccaaugcauucaucuca

SEQ ID NO: 1700474 - RNA, 19 nt, Homo sapiens
  misc_RNA (1)...(19): siRNA sense strand
gaagaaugccaagaauaca

SEQ ID NO: 1700475 - RNA, 19 nt, Homo sapiens
  misc_RNA (1)...(19): siRNA sense strand
aaccaaauccugaucaaga

SEQ ID NO: 1700476 - RNA, 19 nt, Homo sapiens
  misc_RNA (1)...(19): siRNA sense strand
acugaaagcaaauguguaa

SEQ ID NO: 1700477 - RNA, 19 nt, Homo sapiens
  misc_RNA (1)...(19): siRNA sense strand
gcaaauguguaaccauccu

SEQ ID NO: 1700478 - RNA, 19 nt, Homo sapiens
  misc_RNA (1)...(19): siRNA sense strand
caagugagagcagcaguga

SEQ ID NO: 1700479 - RNA, 19 nt, Homo sapiens
  misc_RNA (1)...(19): siRNA sense strand
acugcaagcugacuuacuu

SEQ ID NO: 1700480 - RNA, 19 nt, Homo sapiens
  misc_RNA (1)...(19): siRNA sense strand
gcccuuugaucagcuguuu

SEQ ID NO: 1700481 - RNA, 19 nt, Homo sapiens
  misc_RNA (1)...(19): siRNA sense strand
uuaaggucauaccaaguuu

SEQ ID NO: 1700482 - RNA, 19 nt, Homo sapiens
  misc_RNA (1)...(19): siRNA sense strand
aggcagggcucuggaguga

SEQ ID NO: 1700483 - RNA, 19 nt, Homo sapiens
  misc_RNA (1)...(19): siRNA sense strand
ccauugcuuugauuaugaa

SEQ ID NO: 1700484 - RNA, 19 nt, Homo sapiens
  misc_RNA (1)...(19): siRNA sense strand
uaaauccuccacugaaugu

SEQ ID NO: 1700485 - RNA, 19 nt, Homo sapiens
  misc_RNA (1)...(19): siRNA sense strand
ggcuugcggugcuuguuaa

SEQ ID NO: 1700486 - RNA, 19 nt, Homo sapiens
  misc_RNA (1)...(19): siRNA sense strand
ucacuucucccaccuguca

SEQ ID NO: 1700487 - RNA, 19 nt, Homo sapiens
  misc_RNA (1)...(19): siRNA sense strand
cugaggacacgcaguauuu

SEQ ID NO: 1700488 - RNA, 19 nt, Homo sapiens
  misc_RNA (1)...(19): siRNA sense strand
aaaccagaaucacugaaag

SEQ ID NO: 1700489 - RNA, 19 nt, Homo sapiens
  misc_RNA (1)...(19): siRNA sense strand
uaaccauccuccacaaagg

SEQ ID NO: 1700490 - RNA, 19 nt, Homo sapiens
  misc_RNA (1)...(19): siRNA sense strand
ggauauuugcagauagaaa

SEQ ID NO: 1700491 - RNA, 19 nt, Homo sapiens
  misc_RNA (1)...(19): siRNA sense strand
acaauacaaggaauggaua

SEQ ID NO: 1700492 - RNA, 19 nt, Homo sapiens
  misc_RNA (1)...(19): siRNA sense strand
gaucaucguggcgcaugua

SEQ ID NO: 1700493 - RNA, 19 nt, Homo sapiens
  misc_RNA (1)...(19): siRNA sense strand
uccauugcuuugauuauga

SEQ ID NO: 1700494 - RNA, 19 nt, Homo sapiens
  misc_RNA (1)...(19): siRNA sense strand
gagaaaccagugucugcuu

SEQ ID NO: 1700495 - RNA, 19 nt, Homo sapiens
  misc_RNA (1)...(19): siRNA sense strand
ucacugaaagcaaaugugu

SEQ ID NO: 1700496 - RNA, 19 nt, Homo sapiens
  misc_RNA (1)...(19): siRNA sense strand
gcaccacaaacacuacaga

SEQ ID NO: 1700497 - RNA, 19 nt, Homo sapiens
  misc_RNA (1)...(19): siRNA sense strand
caaugcauucaucucaaua

SEQ ID NO: 1700498 - RNA, 19 nt, Homo sapiens
  misc_RNA (1)...(19): siRNA sense strand
gacugaagaaugccaagaa

SEQ ID NO: 1700499 - RNA, 19 nt, Homo sapiens
  misc_RNA (1)...(19): siRNA sense strand
guauggcucuuggacugaa

SEQ ID NO: 1700500 - RNA, 19 nt, Homo sapiens
  misc_RNA (1)...(19): siRNA sense strand
caagaauacagcaaagaca

SEQ ID NO: 1700501 - RNA, 19 nt, Homo sapiens
  misc_RNA (1)...(19): siRNA sense strand
guaaccauccuccacaaag

SEQ ID NO: 1700502 - RNA, 19 nt, Homo sapiens
  misc_RNA (1)...(19): siRNA sense strand
cugaagaaugccaagaaua

SEQ ID NO: 1700503 - RNA, 19 nt, Homo sapiens
  misc_RNA (1)...(19): siRNA sense strand
ucucccaccugucaauuuc

SEQ ID NO: 1700504 - RNA, 19 nt, Homo sapiens
  misc_RNA (1)...(19): siRNA sense strand
cauaccaaguuucccuuca

SEQ ID NO: 1700505 - RNA, 19 nt, Homo sapiens
  misc_RNA (1)...(19): siRNA sense strand
cacaaacacuacagaagac

SEQ ID NO: 1700506 - RNA, 19 nt, Homo sapiens
  misc_RNA (1)...(19): siRNA sense strand
cacugcaccuggcuuguug

SEQ ID NO: 1700507 - RNA, 19 nt, Homo sapiens
  misc_RNA (1)...(19): siRNA sense strand
ggaauggauauuugcagau

SEQ ID NO: 1700508 - RNA, 19 nt, Homo sapiens
  misc_RNA (1)...(19): siRNA sense strand
ggacugaagaaugccaaga

SEQ ID NO: 1700509 - RNA, 19 nt, Homo sapiens
  misc_RNA (1)...(19): siRNA sense strand
acucgucucucuauccaau

SEQ ID NO: 1700510 - RNA, 19 nt, Homo sapiens
  misc_RNA (1)...(19): siRNA sense strand
caauacaaggaauggauau

SEQ ID NO: 1700511 - RNA, 19 nt, Homo sapiens
  misc_RNA (1)...(19): siRNA sense strand
ugguuuggcucaaguucuu

SEQ ID NO: 1700512 - RNA, 19 nt, Homo sapiens
  misc_RNA (1)...(19): siRNA sense strand
acugaagaaugccaagaau

SEQ ID NO: 1700513 - RNA, 19 nt, Homo sapiens
  misc_RNA (1)...(19): siRNA sense strand
cugacuuacuuccugauga

SEQ ID NO: 1700514 - RNA, 19 nt, Homo sapiens
  misc_RNA (1)...(19): siRNA sense strand
gaaauaucgcaugcugguu

SEQ ID NO: 1700515 - RNA, 19 nt, Homo sapiens
  misc_RNA (1)...(19): siRNA sense strand
guguaaccauccuccacaa

SEQ ID NO: 1700516 - RNA, 19 nt, Homo sapiens
  misc_RNA (1)...(19): siRNA sense strand
ggacuuuuauccucagcaa

SEQ ID NO: 1700517 - RNA, 19 nt, Homo sapiens
  misc_RNA (1)...(19): siRNA sense strand
uuuaaggucauaccaaguu

SEQ ID NO: 1700518 - RNA, 19 nt, Homo sapiens
  misc_RNA (1)...(19): siRNA sense strand
gcauguauuacucauccuu

SEQ ID NO: 1700519 - RNA, 19 nt, Homo sapiens
  misc_RNA (1)...(19): siRNA sense strand
uggcuugcggugcuuguua

SEQ ID NO: 1700520 - RNA, 19 nt, Homo sapiens
  misc_RNA (1)...(19): siRNA sense strand
aaacacuacagaagacaau

SEQ ID NO: 1700521 - RNA, 19 nt, Homo sapiens
  misc_RNA (1)...(19): siRNA sense strand
caaacacuacagaagacaa

SEQ ID NO: 1700522 - RNA, 19 nt, Homo sapiens
  misc_RNA (1)...(19): siRNA sense strand
gacuaugaaaccagaauca

SEQ ID NO: 1700523 - RNA, 19 nt, Homo sapiens
  misc_RNA (1)...(19): siRNA sense strand
auggauauuugcagauaga

SEQ ID NO: 1700524 - RNA, 19 nt, Homo sapiens
  misc_RNA (1)...(19): siRNA sense strand
gcaaaggaauguuaaucua

SEQ ID NO: 1700525 - RNA, 19 nt, Homo sapiens
  misc_RNA (1)...(19): siRNA sense strand
gaauggauauuugcagaua

SEQ ID NO: 1700526 - RNA, 19 nt, Homo sapiens
  misc_RNA (1)...(19): siRNA sense strand
cagaaucacugaaagcaaa

SEQ ID NO: 1700527 - RNA, 19 nt, Homo sapiens
  misc_RNA (1)...(19): siRNA sense strand
caucguggcgcauguauua

SEQ ID NO: 1700528 - RNA, 19 nt, Homo sapiens
  misc_RNA (1)...(19): siRNA sense strand
gaagacaauuauucacguu

SEQ ID NO: 1700529 - RNA, 19 nt, Homo sapiens
  misc_RNA (1)...(19): siRNA sense strand
gaaaccaaauccugaucaa

SEQ ID NO: 1700530 - RNA, 19 nt, Homo sapiens
  misc_RNA (1)...(19): siRNA sense strand
caagagcaaaggaauguua

SEQ ID NO: 1700531 - RNA, 19 nt, Homo sapiens
  misc_RNA (1)...(19): siRNA sense strand
ccauuaaaguuacugguuu

SEQ ID NO: 1700532 - RNA, 19 nt, Homo sapiens
  misc_RNA (1)...(19): siRNA sense strand
uaaguacgauguucaagug

SEQ ID NO: 1700533 - RNA, 19 nt, Homo sapiens
  misc_RNA (1)...(19): siRNA sense strand
gaaaauaaacgcuccaaaa

SEQ ID NO: 1700534 - RNA, 19 nt, Homo sapiens
  misc_RNA (1)...(19): siRNA sense strand
gaaaccagaaucacugaaa

SEQ ID NO: 1700535 - RNA, 19 nt, Homo sapiens
  misc_RNA (1)...(19): siRNA sense strand
gaguggagccaaccuauuu

SEQ ID NO: 1700536 - RNA, 19 nt, Homo sapiens
  misc_RNA (1)...(19): siRNA sense strand
gcagaacgaccacucacua

SEQ ID NO: 1700537 - RNA, 19 nt, Homo sapiens
  misc_RNA (1)...(19): siRNA sense strand
caaauaaauccuccacuga

SEQ ID NO: 1700538 - RNA, 19 nt, Homo sapiens
  misc_RNA (1)...(19): siRNA sense strand
ccuggaaccucaauuguga

SEQ ID NO: 1700539 - RNA, 19 nt, Homo sapiens
  misc_RNA (1)...(19): siRNA sense strand
ucacgccauugaucaaaua

SEQ ID NO: 1700540 - RNA, 19 nt, Homo sapiens
  misc_RNA (1)...(19): siRNA sense strand
ccacaaacacuacagaaga

SEQ ID NO: 1700541 - RNA, 19 nt, Homo sapiens
  misc_RNA (1)...(19): siRNA sense strand
ugaaggaacucgucucucu

SEQ ID NO: 1700542 - RNA, 19 nt, Homo sapiens
  misc_RNA (1)...(19): siRNA sense strand
gagccaaccuauuuaugug

SEQ ID NO: 1700543 - RNA, 19 nt, Homo sapiens
  misc_RNA (1)...(19): siRNA sense strand
gaacucgucucucuaucca

SEQ ID NO: 1700544 - RNA, 19 nt, Homo sapiens
  misc_RNA (1)...(19): siRNA sense strand
gaagaugacuaugaaacca

SEQ ID NO: 1700545 - RNA, 19 nt, Homo sapiens
  misc_RNA (1)...(19): siRNA sense strand
ugacuuacuuccugaugaa

SEQ ID NO: 1700546 - RNA, 19 nt, Homo sapiens
  misc_RNA (1)...(19): siRNA sense strand
gaaagcaaauguguaacca

SEQ ID NO: 1700547 - RNA, 19 nt, Homo sapiens
  misc_RNA (1)...(19): siRNA sense strand
gcagggcucuggagugagu

SEQ ID NO: 1700548 - RNA, 19 nt, Homo sapiens
  misc_RNA (1)...(19): siRNA sense strand
gaaugucacagcagagauu

SEQ ID NO: 1700549 - RNA, 19 nt, Homo sapiens
  misc_RNA (1)...(19): siRNA sense strand
uacaaggaauggauauuug

SEQ ID NO: 1700550 - RNA, 19 nt, Homo sapiens
  misc_RNA (1)...(19): siRNA sense strand
guacgauguucaagugaga

SEQ ID NO: 1700551 - RNA, 19 nt, Homo sapiens
  misc_RNA (1)...(19): siRNA sense strand
ccugucaauuucaccauua

SEQ ID NO: 1700552 - RNA, 19 nt, Homo sapiens
  misc_RNA (1)...(19): siRNA sense strand
ggagccaaccuauuuaugu

SEQ ID NO: 1700553 - RNA, 19 nt, Homo sapiens
  misc_RNA (1)...(19): siRNA sense strand
agaaaccagugucugcuuu

SEQ ID NO: 1700554 - RNA, 19 nt, Homo sapiens
  misc_RNA (1)...(19): siRNA sense strand
gaacgaccacucacuacug

SEQ ID NO: 1700555 - RNA, 19 nt, Homo sapiens
  misc_RNA (1)...(19): siRNA sense strand
gaaggaacucgucucucua

SEQ ID NO: 1700556 - RNA, 19 nt, Homo sapiens
  misc_RNA (1)...(19): siRNA sense strand
gauacugcaagcugacuua

SEQ ID NO: 1700557 - RNA, 19 nt, Homo sapiens
  misc_RNA (1)...(19): siRNA sense strand
cuacagaagacaauuauuc

SEQ ID NO: 1700558 - RNA, 19 nt, Homo sapiens
  misc_RNA (1)...(19): siRNA sense strand
ccaaugcauucaucucaau

SEQ ID NO: 1700559 - RNA, 19 nt, Homo sapiens
  misc_RNA (1)...(19): siRNA sense strand
ggaccauccugcagaacga

SEQ ID NO: 1700560 - RNA, 19 nt, Homo sapiens
  misc_RNA (1)...(19): siRNA sense strand
aauaaacgcuccaaaagaa

SEQ ID NO: 1700561 - RNA, 19 nt, Homo sapiens
  misc_RNA (1)...(19): siRNA sense strand
caaaagaagaugacuauga

SEQ ID NO: 1700562 - RNA, 19 nt, Homo sapiens
  misc_RNA (1)...(19): siRNA sense strand
aaauaucgcaugcugguuu

SEQ ID NO: 1700563 - RNA, 19 nt, Homo sapiens
  misc_RNA (1)...(19): siRNA sense strand
aaauaaauccuccacugaa

SEQ ID NO: 1700564 - RNA, 19 nt, Homo sapiens
  misc_RNA (1)...(19): siRNA sense strand
cauuaaaguuacugguuug

SEQ ID NO: 1700565 - RNA, 19 nt, Homo sapiens
  misc_RNA (1)...(19): siRNA sense strand
aauaaauccuccacugaau

SEQ ID NO: 1700566 - RNA, 19 nt, Homo sapiens
  misc_RNA (1)...(19): siRNA sense strand
caaaggaauguuaaucuag

SEQ ID NO: 1700567 - RNA, 19 nt, Homo sapiens
  misc_RNA (1)...(19): siRNA sense strand
cgccauugaucaaauaaau

SEQ ID NO: 1700568 - RNA, 19 nt, Homo sapiens
  misc_RNA (1)...(19): siRNA sense strand
acacuacagaagacaauua

SEQ ID NO: 1700569 - RNA, 19 nt, Homo sapiens
  misc_RNA (1)...(19): siRNA sense strand
ggaaaccaaauccugauca

SEQ ID NO: 1700570 - RNA, 19 nt, Homo sapiens
  misc_RNA (1)...(19): siRNA sense strand
gaucaagagcaaaggaaug

SEQ ID NO: 1700571 - RNA, 19 nt, Homo sapiens
  misc_RNA (1)...(19): siRNA sense strand
ugaagaaugccaagaauac

SEQ ID NO: 1700572 - RNA, 19 nt, Homo sapiens
  misc_RNA (1)...(19): siRNA sense strand
gagcaaaggaauguuaauc

SEQ ID NO: 1700573 - RNA, 19 nt, Homo sapiens
  misc_RNA (1)...(19): siRNA sense strand
gaccaaugcauucaucuca

SEQ ID NO: 1700574 - RNA, 19 nt, Homo sapiens
  misc_RNA (1)...(19): siRNA sense strand
gaagaaugccaagaauaca

SEQ ID NO: 1700575 - RNA, 19 nt, Homo sapiens
  misc_RNA (1)...(19): siRNA sense strand
aaccaaauccugaucaaga

SEQ ID NO: 1700576 - RNA, 19 nt, Homo sapiens
  misc_RNA (1)...(19): siRNA sense strand
acugaaagcaaauguguaa

SEQ ID NO: 1700577 - RNA, 19 nt, Homo sapiens
  misc_RNA (1)...(19): siRNA sense strand
gcaaauguguaaccauccu

SEQ ID NO: 1700578 - RNA, 19 nt, Homo sapiens
  misc_RNA (1)...(19): siRNA sense strand
caagugagagcagcaguga

SEQ ID NO: 1700579 - RNA, 19 nt, Homo sapiens
  misc_RNA (1)...(19): siRNA sense strand
acugcaagcugacuuacuu

SEQ ID NO: 1700580 - RNA, 19 nt, Homo sapiens
  misc_RNA (1)...(19): siRNA sense strand
gcccuuugaucagcuguuu

SEQ ID NO: 1700581 - RNA, 19 nt, Homo sapiens
  misc_RNA (1)...(19): siRNA sense strand
uuaaggucauaccaaguuu

SEQ ID NO: 1700582 - RNA, 19 nt, Homo sapiens
  misc_RNA (1)...(19): siRNA sense strand
aggcagggcucuggaguga

SEQ ID NO: 1700583 - RNA, 19 nt, Homo sapiens
  misc_RNA (1)...(19): siRNA sense strand
ccauugcuuugauuaugaa

SEQ ID NO: 1700584 - RNA, 19 nt, Homo sapiens
  misc_RNA (1)...(19): siRNA sense strand
uaaauccuccacugaaugu

SEQ ID NO: 1700585 - RNA, 19 nt, Homo sapiens
  misc_RNA (1)...(19): siRNA sense strand
ggcuugcggugcuuguuaa

SEQ ID NO: 1700586 - RNA, 19 nt, Homo sapiens
  misc_RNA (1)...(19): siRNA sense strand
ucacuucucccaccuguca

SEQ ID NO: 1700587 - RNA, 19 nt, Homo sapiens
  misc_RNA (1)...(19): siRNA sense strand
cugaggacacgcaguauuu

SEQ ID NO: 1700588 - RNA, 19 nt, Homo sapiens
  misc_RNA (1)...(19): siRNA sense strand
aaaccagaaucacugaaag

SEQ ID NO: 1700589 - RNA, 19 nt, Homo sapiens
  misc_RNA (1)...(19): siRNA sense strand
uaaccauccuccacaaagg

SEQ ID NO: 1700590 - RNA, 19 nt, Homo sapiens
  misc_RNA (1)...(19): siRNA sense strand
ggauauuugcagauagaaa

SEQ ID NO: 1700591 - RNA, 19 nt, Homo sapiens
  misc_RNA (1)...(19): siRNA sense strand
acaauacaaggaauggaua

SEQ ID NO: 1700592 - RNA, 19 nt, Homo sapiens
  misc_RNA (1)...(19): siRNA sense strand
gaucaucguggcgcaugua

SEQ ID NO: 1700593 - RNA, 19 nt, Homo sapiens
  misc_RNA (1)...(19): siRNA sense strand
uccauugcuuugauuauga

SEQ ID NO: 1700594 - RNA, 19 nt, Homo sapiens
  misc_RNA (1)...(19): siRNA sense strand
gagaaaccagugucugcuu

SEQ ID NO: 1700595 - RNA, 19 nt, Homo sapiens
  misc_RNA (1)...(19): siRNA sense strand
ucacugaaagcaaaugugu

SEQ ID NO: 1700596 - RNA, 19 nt, Homo sapiens
  misc_RNA (1)...(19): siRNA sense strand
gcaccacaaacacuacaga

SEQ ID NO: 1700597 - RNA, 19 nt, Homo sapiens
  misc_RNA (1)...(19): siRNA sense strand
caaugcauucaucucaaua

SEQ ID NO: 1700598 - RNA, 19 nt, Homo sapiens
  misc_RNA (1)...(19): siRNA sense strand
gacugaagaaugccaagaa

SEQ ID NO: 1700599 - RNA, 19 nt, Homo sapiens
  misc_RNA (1)...(19): siRNA sense strand
guauggcucuuggacugaa

SEQ ID NO: 1700600 - RNA, 19 nt, Homo sapiens
  misc_RNA (1)...(19): siRNA sense strand
caagaauacagcaaagaca

SEQ ID NO: 1700601 - RNA, 19 nt, Homo sapiens
  misc_RNA (1)...(19): siRNA sense strand
guaaccauccuccacaaag

SEQ ID NO: 1700602 - RNA, 19 nt, Homo sapiens
  misc_RNA (1)...(19): siRNA sense strand
cugaagaaugccaagaaua

SEQ ID NO: 1700603 - RNA, 19 nt, Homo sapiens
  misc_RNA (1)...(19): siRNA sense strand
ucucccaccugucaauuuc

SEQ ID NO: 1700604 - RNA, 19 nt, Homo sapiens
  misc_RNA (1)...(19): siRNA sense strand
cauaccaaguuucccuuca

SEQ ID NO: 1700605 - RNA, 19 nt, Homo sapiens
  misc_RNA (1)...(19): siRNA sense strand
cacaaacacuacagaagac

SEQ ID NO: 1700606 - RNA, 19 nt, Homo sapiens
  misc_RNA (1)...(19): siRNA sense strand
cacugcaccuggcuuguug

SEQ ID NO: 1700607 - RNA, 19 nt, Homo sapiens
  misc_RNA (1)...(19): siRNA sense strand
ggaauggauauuugcagau

SEQ ID NO: 1700608 - RNA, 19 nt, Homo sapiens
  misc_RNA (1)...(19): siRNA sense strand
ggacugaagaaugccaaga

SEQ ID NO: 1700609 - RNA, 19 nt, Homo sapiens
  misc_RNA (1)...(19): siRNA sense strand
acucgucucucuauccaau

SEQ ID NO: 1700610 - RNA, 19 nt, Homo sapiens
  misc_RNA (1)...(19): siRNA sense strand
caauacaaggaauggauau

SEQ ID NO: 1700611 - RNA, 19 nt, Homo sapiens
  misc_RNA (1)...(19): siRNA sense strand
ugguuuggcucaaguucuu

SEQ ID NO: 1700612 - RNA, 19 nt, Homo sapiens
  misc_RNA (1)...(19): siRNA sense strand
acugaagaaugccaagaau

SEQ ID NO: 1700613 - RNA, 19 nt, Homo sapiens
  misc_RNA (1)...(19): siRNA sense strand
cugacuuacuuccugauga

SEQ ID NO: 1700614 - RNA, 19 nt, Homo sapiens
  misc_RNA (1)...(19): siRNA sense strand
gaaauaucgcaugcugguu

SEQ ID NO: 1700615 - RNA, 19 nt, Homo sapiens
  misc_RNA (1)...(19): siRNA sense strand
guguaaccauccuccacaa

SEQ ID NO: 1700616 - RNA, 19 nt, Homo sapiens
  misc_RNA (1)...(19): siRNA sense strand
ggacuuuuauccucagcaa

SEQ ID NO: 1700617 - RNA, 19 nt, Homo sapiens
  misc_RNA (1)...(19): siRNA sense strand
uuuaaggucauaccaaguu

SEQ ID NO: 1700618 - RNA, 19 nt, Homo sapiens
  misc_RNA (1)...(19): siRNA sense strand
gcauguauuacucauccuu

SEQ ID NO: 1700619 - RNA, 19 nt, Homo sapiens
  misc_RNA (1)...(19): siRNA sense strand
uggcuugcggugcuuguua

SEQ ID NO: 1700620 - RNA, 19 nt, Homo sapiens
  misc_RNA (1)...(19): siRNA sense strand
aaacacuacagaagacaau

SEQ ID NO: 1700621 - RNA, 19 nt, Homo sapiens
  misc_RNA (1)...(19): siRNA sense strand
caaacacuacagaagacaa

SEQ ID NO: 1700622 - RNA, 19 nt, Homo sapiens
  misc_RNA (1)...(19): siRNA sense strand
gacuaugaaaccagaauca

SEQ ID NO: 1700623 - RNA, 19 nt, Homo sapiens
  misc_RNA (1)...(19): siRNA sense strand
auggauauuugcagauaga

SEQ ID NO: 1700624 - RNA, 19 nt, Homo sapiens
  misc_RNA (1)...(19): siRNA sense strand
gcaaaggaauguuaaucua

SEQ ID NO: 1700625 - RNA, 19 nt, Homo sapiens
  misc_RNA (1)...(19): siRNA sense strand
gaauggauauuugcagaua

SEQ ID NO: 1700626 - RNA, 19 nt, Homo sapiens
  misc_RNA (1)...(19): siRNA sense strand
cagaaucacugaaagcaaa

SEQ ID NO: 1700627 - RNA, 19 nt, Homo sapiens
  misc_RNA (1)...(19): siRNA sense strand
caucguggcgcauguauua

SEQ ID NO: 1700628 - RNA, 19 nt, Homo sapiens
  misc_RNA (1)...(19): siRNA sense strand
gaagacaauuauucacguu

SEQ ID NO: 1700629 - RNA, 19 nt, Homo sapiens
  misc_RNA (1)...(19): siRNA sense strand
gaaaccaaauccugaucaa

SEQ ID NO: 1700630 - RNA, 19 nt, Homo sapiens
  misc_RNA (1)...(19): siRNA sense strand
caagagcaaaggaauguua

SEQ ID NO: 1700631 - RNA, 19 nt, Homo sapiens
  misc_RNA (1)...(19): siRNA sense strand
ccauuaaaguuacugguuu

SEQ ID NO: 1700632 - RNA, 19 nt, Homo sapiens
  misc_RNA (1)...(19): siRNA sense strand
uaaguacgauguucaagug

SEQ ID NO: 1700633 - RNA, 19 nt, Homo sapiens
  misc_RNA (1)...(19): siRNA sense strand
gaaaauaaacgcuccaaaa

SEQ ID NO: 1700634 - RNA, 19 nt, Homo sapiens
  misc_RNA (1)...(19): siRNA sense strand
gaaaccagaaucacugaaa

SEQ ID NO: 1700635 - RNA, 19 nt, Homo sapiens
  misc_RNA (1)...(19): siRNA sense strand
gaguggagccaaccuauuu

SEQ ID NO: 1700636 - RNA, 19 nt, Homo sapiens
  misc_RNA (1)...(19): siRNA sense strand
gcagaacgaccacucacua

SEQ ID NO: 1700637 - RNA, 19 nt, Homo sapiens
  misc_RNA (1)...(19): siRNA sense strand
caaauaaauccuccacuga

SEQ ID NO: 1700638 - RNA, 19 nt, Homo sapiens
  misc_RNA (1)...(19): siRNA sense strand
ccuggaaccucaauuguga

SEQ ID NO: 1700639 - RNA, 19 nt, Homo sapiens
  misc_RNA (1)...(19): siRNA sense strand
ucacgccauugaucaaaua

SEQ ID NO: 1700640 - RNA, 19 nt, Homo sapiens
  misc_RNA (1)...(19): siRNA sense strand
ccacaaacacuacagaaga

SEQ ID NO: 1700641 - RNA, 19 nt, Homo sapiens
  misc_RNA (1)...(19): siRNA sense strand
ugaaggaacucgucucucu

SEQ ID NO: 1700642 - RNA, 19 nt, Homo sapiens
  misc_RNA (1)...(19): siRNA sense strand
gagccaaccuauuuaugug

SEQ ID NO: 1700643 - RNA, 19 nt, Homo sapiens
  misc_RNA (1)...(19): siRNA sense strand
gaacucgucucucuaucca

SEQ ID NO: 1700644 - RNA, 19 nt, Homo sapiens
  misc_RNA (1)...(19): siRNA sense strand
gaagaugacuaugaaacca

SEQ ID NO: 1700645 - RNA, 19 nt, Homo sapiens
  misc_RNA (1)...(19): siRNA sense strand
ugacuuacuuccugaugaa

SEQ ID NO: 1700646 - RNA, 19 nt, Homo sapiens
  misc_RNA (1)...(19): siRNA sense strand
gaaagcaaauguguaacca

SEQ ID NO: 1700647 - RNA, 19 nt, Homo sapiens
  misc_RNA (1)...(19): siRNA sense strand
gcagggcucuggagugagu

SEQ ID NO: 1700648 - RNA, 19 nt, Homo sapiens
  misc_RNA (1)...(19): siRNA sense strand
gaaugucacagcagagauu

SEQ ID NO: 1700649 - RNA, 19 nt, Homo sapiens
  misc_RNA (1)...(19): siRNA sense strand
uacaaggaauggauauuug

SEQ ID NO: 1700650 - RNA, 19 nt, Homo sapiens
  misc_RNA (1)...(19): siRNA sense strand
guacgauguucaagugaga

SEQ ID NO: 1700651 - RNA, 19 nt, Homo sapiens
  misc_RNA (1)...(19): siRNA sense strand
ccugucaauuucaccauua

SEQ ID NO: 1700652 - RNA, 19 nt, Homo sapiens
  misc_RNA (1)...(19): siRNA sense strand
ggagccaaccuauuuaugu

SEQ ID NO: 1700653 - RNA, 19 nt, Homo sapiens
  misc_RNA (1)...(19): siRNA sense strand
agaaaccagugucugcuuu

SEQ ID NO: 1700654 - RNA, 19 nt, Homo sapiens
  misc_RNA (1)...(19): siRNA sense strand
gaacgaccacucacuacug

SEQ ID NO: 1700655 - RNA, 19 nt, Homo sapiens
  misc_RNA (1)...(19): siRNA sense strand
gaaggaacucgucucucua

SEQ ID NO: 1700656 - RNA, 19 nt, Homo sapiens
  misc_RNA (1)...(19): siRNA sense strand
gauacugcaagcugacuua

SEQ ID NO: 1700657 - RNA, 19 nt, Homo sapiens
  misc_RNA (1)...(19): siRNA sense strand
cuacagaagacaauuauuc

SEQ ID NO: 1700658 - RNA, 19 nt, Homo sapiens
  misc_RNA (1)...(19): siRNA sense strand
ccaaugcauucaucucaau

SEQ ID NO: 1700659 - RNA, 19 nt, Homo sapiens
  misc_RNA (1)...(19): siRNA sense strand
ggaccauccugcagaacga

SEQ ID NO: 1700660 - RNA, 19 nt, Homo sapiens
  misc_RNA (1)...(19): siRNA sense strand
aauaaacgcuccaaaagaa

SEQ ID NO: 1700661 - RNA, 19 nt, Homo sapiens
  misc_RNA (1)...(19): siRNA sense strand
caaaagaagaugacuauga

SEQ ID NO: 1700662 - RNA, 19 nt, Homo sapiens
  misc_RNA (1)...(19): siRNA sense strand
aaauaucgcaugcugguuu

SEQ ID NO: 1700663 - RNA, 19 nt, Homo sapiens
  misc_RNA (1)...(19): siRNA sense strand
aaauaaauccuccacugaa

SEQ ID NO: 1700664 - RNA, 19 nt, Homo sapiens
  misc_RNA (1)...(19): siRNA sense strand
cauuaaaguuacugguuug

SEQ ID NO: 1700665 - RNA, 19 nt, Homo sapiens
  misc_RNA (1)...(19): siRNA sense strand
aauaaauccuccacugaau

SEQ ID NO: 1700666 - RNA, 19 nt, Homo sapiens
  misc_RNA (1)...(19): siRNA sense strand
caaaggaauguuaaucuag

SEQ ID NO: 1700667 - RNA, 19 nt, Homo sapiens
  misc_RNA (1)...(19): siRNA sense strand
cgccauugaucaaauaaau

SEQ ID NO: 1700668 - RNA, 19 nt, Homo sapiens
  misc_RNA (1)...(19): siRNA sense strand
acacuacagaagacaauua

SEQ ID NO: 1700669 - RNA, 19 nt, Homo sapiens
  misc_RNA (1)...(19): siRNA sense strand
ggaaaccaaauccugauca

SEQ ID NO: 1700670 - RNA, 19 nt, Homo sapiens
  misc_RNA (1)...(19): siRNA sense strand
gaucaagagcaaaggaaug

SEQ ID NO: 1700671 - RNA, 19 nt, Homo sapiens
  misc_RNA (1)...(19): siRNA sense strand
ugaagaaugccaagaauac

SEQ ID NO: 1700672 - RNA, 19 nt, Homo sapiens
  misc_RNA (1)...(19): siRNA sense strand
gagcaaaggaauguuaauc

SEQ ID NO: 1700673 - RNA, 19 nt, Homo sapiens
  misc_RNA (1)...(19): siRNA sense strand
gaccaaugcauucaucuca

SEQ ID NO: 1700674 - RNA, 19 nt, Homo sapiens
  misc_RNA (1)...(19): siRNA sense strand
gaagaaugccaagaauaca

SEQ ID NO: 1700675 - RNA, 19 nt, Homo sapiens
  misc_RNA (1)...(19): siRNA sense strand
aaccaaauccugaucaaga

SEQ ID NO: 1700676 - RNA, 19 nt, Homo sapiens
  misc_RNA (1)...(19): siRNA sense strand
acugaaagcaaauguguaa

SEQ ID NO: 1700677 - RNA, 19 nt, Homo sapiens
  misc_RNA (1)...(19): siRNA sense strand
gcaaauguguaaccauccu

SEQ ID NO: 1700678 - RNA, 19 nt, Homo sapiens
  misc_RNA (1)...(19): siRNA sense strand
caagugagagcagcaguga

SEQ ID NO: 1700679 - RNA, 19 nt, Homo sapiens
  misc_RNA (1)...(19): siRNA sense strand
acugcaagcugacuuacuu

SEQ ID NO: 1700680 - RNA, 19 nt, Homo sapiens
  misc_RNA (1)...(19): siRNA sense strand
gcccuuugaucagcuguuu

SEQ ID NO: 1700681 - RNA, 19 nt, Homo sapiens
  misc_RNA (1)...(19): siRNA sense strand
uuaaggucauaccaaguuu

SEQ ID NO: 1700682 - RNA, 19 nt, Homo sapiens
  misc_RNA (1)...(19): siRNA sense strand
aggcagggcucuggaguga

SEQ ID NO: 1700683 - RNA, 19 nt, Homo sapiens
  misc_RNA (1)...(19): siRNA sense strand
ccauugcuuugauuaugaa

SEQ ID NO: 1700684 - RNA, 19 nt, Homo sapiens
  misc_RNA (1)...(19): siRNA sense strand
uaaauccuccacugaaugu

SEQ ID NO: 1700685 - RNA, 19 nt, Homo sapiens
  misc_RNA (1)...(19): siRNA sense strand
ggcuugcggugcuuguuaa

SEQ ID NO: 1700686 - RNA, 19 nt, Homo sapiens
  misc_RNA (1)...(19): siRNA sense strand
ucacuucucccaccuguca

SEQ ID NO: 1700687 - RNA, 19 nt, Homo sapiens
  misc_RNA (1)...(19): siRNA sense strand
cugaggacacgcaguauuu

SEQ ID NO: 1700688 - RNA, 19 nt, Homo sapiens
  misc_RNA (1)...(19): siRNA sense strand
aaaccagaaucacugaaag

SEQ ID NO: 1700689 - RNA, 19 nt, Homo sapiens
  misc_RNA (1)...(19): siRNA sense strand
uaaccauccuccacaaagg

SEQ ID NO: 1700690 - RNA, 19 nt, Homo sapiens
  misc_RNA (1)...(19): siRNA sense strand
ggauauuugcagauagaaa

SEQ ID NO: 1700691 - RNA, 19 nt, Homo sapiens
  misc_RNA (1)...(19): siRNA sense strand
acaauacaaggaauggaua

SEQ ID NO: 1700692 - RNA, 19 nt, Homo sapiens
  misc_RNA (1)...(19): siRNA sense strand
gaucaucguggcgcaugua

SEQ ID NO: 1700693 - RNA, 19 nt, Homo sapiens
  misc_RNA (1)...(19): siRNA sense strand
uccauugcuuugauuauga

SEQ ID NO: 1700694 - RNA, 19 nt, Homo sapiens
  misc_RNA (1)...(19): siRNA sense strand
gagaaaccagugucugcuu

SEQ ID NO: 1700695 - RNA, 19 nt, Homo sapiens
  misc_RNA (1)...(19): siRNA sense strand
ucacugaaagcaaaugugu

SEQ ID NO: 1700696 - RNA, 19 nt, Homo sapiens
  misc_RNA (1)...(19): siRNA sense strand
gcaccacaaacacuacaga

SEQ ID NO: 1700697 - RNA, 19 nt, Homo sapiens
  misc_RNA (1)...(19): siRNA sense strand
caaugcauucaucucaaua

SEQ ID NO: 1700698 - RNA, 19 nt, Homo sapiens
  misc_RNA (1)...(19): siRNA sense strand
gacugaagaaugccaagaa

SEQ ID NO: 1700699 - RNA, 19 nt, Homo sapiens
  misc_RNA (1)...(19): siRNA sense strand
guauggcucuuggacugaa

SEQ ID NO: 1700700 - RNA, 19 nt, Homo sapiens
  misc_RNA (1)...(19): siRNA sense strand
caagaauacagcaaagaca

SEQ ID NO: 1700701 - RNA, 19 nt, Homo sapiens
  misc_RNA (1)...(19): siRNA sense strand
guaaccauccuccacaaag

SEQ ID NO: 1700702 - RNA, 19 nt, Homo sapiens
  misc_RNA (1)...(19): siRNA sense strand
cugaagaaugccaagaaua

SEQ ID NO: 1700703 - RNA, 19 nt, Homo sapiens
  misc_RNA (1)...(19): siRNA sense strand
ucucccaccugucaauuuc

SEQ ID NO: 1700704 - RNA, 19 nt, Homo sapiens
  misc_RNA (1)...(19): siRNA sense strand
cauaccaaguuucccuuca

SEQ ID NO: 1700705 - RNA, 19 nt, Homo sapiens
  misc_RNA (1)...(19): siRNA sense strand
cacaaacacuacagaagac

SEQ ID NO: 1700706 - RNA, 19 nt, Homo sapiens
  misc_RNA (1)...(19): siRNA sense strand
cacugcaccuggcuuguug

SEQ ID NO: 1700707 - RNA, 19 nt, Homo sapiens
  misc_RNA (1)...(19): siRNA sense strand
ggaauggauauuugcagau

SEQ ID NO: 1700708 - RNA, 19 nt, Homo sapiens
  misc_RNA (1)...(19): siRNA sense strand
ggacugaagaaugccaaga

SEQ ID NO: 1700709 - RNA, 19 nt, Homo sapiens
  misc_RNA (1)...(19): siRNA sense strand
acucgucucucuauccaau

SEQ ID NO: 1700710 - RNA, 19 nt, Homo sapiens
  misc_RNA (1)...(19): siRNA sense strand
caauacaaggaauggauau

SEQ ID NO: 1700711 - RNA, 19 nt, Homo sapiens
  misc_RNA (1)...(19): siRNA sense strand
ugguuuggcucaaguucuu

SEQ ID NO: 1700712 - RNA, 19 nt, Homo sapiens
  misc_RNA (1)...(19): siRNA sense strand
acugaagaaugccaagaau

SEQ ID NO: 1700713 - RNA, 19 nt, Homo sapiens
  misc_RNA (1)...(19): siRNA sense strand
cugacuuacuuccugauga

SEQ ID NO: 1700714 - RNA, 19 nt, Homo sapiens
  misc_RNA (1)...(19): siRNA sense strand
gaaauaucgcaugcugguu

SEQ ID NO: 1700715 - RNA, 19 nt, Homo sapiens
  misc_RNA (1)...(19): siRNA sense strand
guguaaccauccuccacaa

SEQ ID NO: 1700716 - RNA, 19 nt, Homo sapiens
  misc_RNA (1)...(19): siRNA sense strand
ggacuuuuauccucagcaa

SEQ ID NO: 1700717 - RNA, 19 nt, Homo sapiens
  misc_RNA (1)...(19): siRNA sense strand
uuuaaggucauaccaaguu

SEQ ID NO: 1700718 - RNA, 19 nt, Homo sapiens
  misc_RNA (1)...(19): siRNA sense strand
gcauguauuacucauccuu

SEQ ID NO: 1700719 - RNA, 19 nt, Homo sapiens
  misc_RNA (1)...(19): siRNA sense strand
uggcuugcggugcuuguua

SEQ ID NO: 1700720 - RNA, 19 nt, Homo sapiens
  misc_RNA (1)...(19): siRNA sense strand
aaacacuacagaagacaau

SEQ ID NO: 1700721 - RNA, 19 nt, Homo sapiens
  misc_RNA (1)...(19): siRNA sense strand
caaacacuacagaagacaa

SEQ ID NO: 1700722 - RNA, 19 nt, Homo sapiens
  misc_RNA (1)...(19): siRNA sense strand
gacuaugaaaccagaauca

SEQ ID NO: 1700723 - RNA, 19 nt, Homo sapiens
  misc_RNA (1)...(19): siRNA sense strand
auggauauuugcagauaga

SEQ ID NO: 1700724 - RNA, 19 nt, Homo sapiens
  misc_RNA (1)...(19): siRNA sense strand
gcaaaggaauguuaaucua

SEQ ID NO: 1700725 - RNA, 19 nt, Homo sapiens
  misc_RNA (1)...(19): siRNA sense strand
gaauggauauuugcagaua

SEQ ID NO: 1700726 - RNA, 19 nt, Homo sapiens
  misc_RNA (1)...(19): siRNA sense strand
cagaaucacugaaagcaaa

SEQ ID NO: 1700727 - RNA, 19 nt, Homo sapiens
  misc_RNA (1)...(19): siRNA sense strand
caucguggcgcauguauua

SEQ ID NO: 1700728 - RNA, 19 nt, Homo sapiens
  misc_RNA (1)...(19): siRNA sense strand
gaagacaauuauucacguu

SEQ ID NO: 1700729 - RNA, 19 nt, Homo sapiens
  misc_RNA (1)...(19): siRNA sense strand
gaaaccaaauccugaucaa

SEQ ID NO: 1700730 - RNA, 19 nt, Homo sapiens
  misc_RNA (1)...(19): siRNA sense strand
caagagcaaaggaauguua

SEQ ID NO: 1700731 - RNA, 19 nt, Homo sapiens
  misc_RNA (1)...(19): siRNA sense strand
ccauuaaaguuacugguuu

SEQ ID NO: 1700732 - RNA, 19 nt, Homo sapiens
  misc_RNA (1)...(19): siRNA sense strand
uaaguacgauguucaagug

SEQ ID NO: 1700733 - RNA, 19 nt, Homo sapiens
  misc_RNA (1)...(19): siRNA sense strand
gaaaauaaacgcuccaaaa

SEQ ID NO: 1700734 - RNA, 19 nt, Homo sapiens
  misc_RNA (1)...(19): siRNA sense strand
gaaaccagaaucacugaaa

SEQ ID NO: 1700735 - RNA, 19 nt, Homo sapiens
  misc_RNA (1)...(19): siRNA sense strand
gaguggagccaaccuauuu

SEQ ID NO: 1700736 - RNA, 19 nt, Homo sapiens
  misc_RNA (1)...(19): siRNA sense strand
gcagaacgaccacucacua

SEQ ID NO: 1700737 - RNA, 19 nt, Homo sapiens
  misc_RNA (1)...(19): siRNA sense strand
caaauaaauccuccacuga

SEQ ID NO: 1700738 - RNA, 19 nt, Homo sapiens
  misc_RNA (1)...(19): siRNA sense strand
ccuggaaccucaauuguga

SEQ ID NO: 1700739 - RNA, 19 nt, Homo sapiens
  misc_RNA (1)...(19): siRNA sense strand
ucacgccauugaucaaaua

SEQ ID NO: 1700740 - RNA, 19 nt, Homo sapiens
  misc_RNA (1)...(19): siRNA sense strand
ccacaaacacuacagaaga

SEQ ID NO: 1700741 - RNA, 19 nt, Homo sapiens
  misc_RNA (1)...(19): siRNA sense strand
ugaaggaacucgucucucu

SEQ ID NO: 1700742 - RNA, 19 nt, Homo sapiens
  misc_RNA (1)...(19): siRNA sense strand
gagccaaccuauuuaugug

SEQ ID NO: 1700743 - RNA, 19 nt, Homo sapiens
  misc_RNA (1)...(19): siRNA sense strand
gaacucgucucucuaucca

SEQ ID NO: 1700744 - RNA, 19 nt, Homo sapiens
  misc_RNA (1)...(19): siRNA sense strand
gaagaugacuaugaaacca

SEQ ID NO: 1700745 - RNA, 19 nt, Homo sapiens
  misc_RNA (1)...(19): siRNA sense strand
ugacuuacuuccugaugaa

SEQ ID NO: 1700746 - RNA, 19 nt, Homo sapiens
  misc_RNA (1)...(19): siRNA sense strand
gaaagcaaauguguaacca

SEQ ID NO: 1700747 - RNA, 19 nt, Homo sapiens
  misc_RNA (1)...(19): siRNA sense strand
gcagggcucuggagugagu

SEQ ID NO: 1700748 - RNA, 19 nt, Homo sapiens
  misc_RNA (1)...(19): siRNA sense strand
gaaugucacagcagagauu

SEQ ID NO: 1700749 - RNA, 19 nt, Homo sapiens
  misc_RNA (1)...(19): siRNA sense strand
uacaaggaauggauauuug

SEQ ID NO: 1700750 - RNA, 19 nt, Homo sapiens
  misc_RNA (1)...(19): siRNA sense strand
guacgauguucaagugaga

SEQ ID NO: 1700751 - RNA, 19 nt, Homo sapiens
  misc_RNA (1)...(19): siRNA sense strand
ccugucaauuucaccauua

SEQ ID NO: 1700752 - RNA, 19 nt, Homo sapiens
  misc_RNA (1)...(19): siRNA sense strand
ggagccaaccuauuuaugu

SEQ ID NO: 1700753 - RNA, 19 nt, Homo sapiens
  misc_RNA (1)...(19): siRNA sense strand
agaaaccagugucugcuuu

SEQ ID NO: 1700754 - RNA, 19 nt, Homo sapiens
  misc_RNA (1)...(19): siRNA sense strand
gaacgaccacucacuacug

SEQ ID NO: 1700755 - RNA, 19 nt, Homo sapiens
  misc_RNA (1)...(19): siRNA sense strand
gaaggaacucgucucucua

SEQ ID NO: 1700756 - RNA, 19 nt, Homo sapiens
  misc_RNA (1)...(19): siRNA sense strand
gauacugcaagcugacuua

SEQ ID NO: 1700757 - RNA, 19 nt, Homo sapiens
  misc_RNA (1)...(19): siRNA sense strand
cuacagaagacaauuauuc

SEQ ID NO: 1700758 - RNA, 19 nt, Homo sapiens
  misc_RNA (1)...(19): siRNA sense strand
ccaaugcauucaucucaau

SEQ ID NO: 1700759 - RNA, 19 nt, Homo sapiens
  misc_RNA (1)...(19): siRNA sense strand
ggaccauccugcagaacga

SEQ ID NO: 1700760 - RNA, 19 nt, Homo sapiens
  misc_RNA (1)...(19): siRNA sense strand
aauaaacgcuccaaaagaa

SEQ ID NO: 1700761 - RNA, 19 nt, Homo sapiens
  misc_RNA (1)...(19): siRNA sense strand
caaaagaagaugacuauga

SEQ ID NO: 1700762 - RNA, 19 nt, Homo sapiens
  misc_RNA (1)...(19): siRNA sense strand
aaauaucgcaugcugguuu

SEQ ID NO: 1700763 - RNA, 19 nt, Homo sapiens
  misc_RNA (1)...(19): siRNA sense strand
aaauaaauccuccacugaa

SEQ ID NO: 1700764 - RNA, 19 nt, Homo sapiens
  misc_RNA (1)...(19): siRNA sense strand
cauuaaaguuacugguuug

SEQ ID NO: 1700765 - RNA, 19 nt, Homo sapiens
  misc_RNA (1)...(19): siRNA sense strand
aauaaauccuccacugaau

SEQ ID NO: 1700766 - RNA, 19 nt, Homo sapiens
  misc_RNA (1)...(19): siRNA sense strand
caaaggaauguuaaucuag

SEQ ID NO: 1700767 - RNA, 19 nt, Homo sapiens
  misc_RNA (1)...(19): siRNA sense strand
cgccauugaucaaauaaau

SEQ ID NO: 1700768 - RNA, 19 nt, Homo sapiens
  misc_RNA (1)...(19): siRNA sense strand
acacuacagaagacaauua

SEQ ID NO: 1700769 - RNA, 19 nt, Homo sapiens
  misc_RNA (1)...(19): siRNA sense strand
ggaaaccaaauccugauca

SEQ ID NO: 1700770 - RNA, 19 nt, Homo sapiens
  misc_RNA (1)...(19): siRNA sense strand
gaucaagagcaaaggaaug

SEQ ID NO: 1700771 - RNA, 19 nt, Homo sapiens
  misc_RNA (1)...(19): siRNA sense strand
ugaagaaugccaagaauac

SEQ ID NO: 1700772 - RNA, 19 nt, Homo sapiens
  misc_RNA (1)...(19): siRNA sense strand
gagcaaaggaauguuaauc

SEQ ID NO: 1700773 - RNA, 19 nt, Homo sapiens
  misc_RNA (1)...(19): siRNA sense strand
gaccaaugcauucaucuca

SEQ ID NO: 1700774 - RNA, 19 nt, Homo sapiens
  misc_RNA (1)...(19): siRNA sense strand
gaagaaugccaagaauaca

SEQ ID NO: 1700775 - RNA, 19 nt, Homo sapiens
  misc_RNA (1)...(19): siRNA sense strand
aaccaaauccugaucaaga

SEQ ID NO: 1700776 - RNA, 19 nt, Homo sapiens
  misc_RNA (1)...(19): siRNA sense strand
acugaaagcaaauguguaa

SEQ ID NO: 1700777 - RNA, 19 nt, Homo sapiens
  misc_RNA (1)...(19): siRNA sense strand
gcaaauguguaaccauccu

SEQ ID NO: 1700778 - RNA, 19 nt, Homo sapiens
  misc_RNA (1)...(19): siRNA sense strand
caagugagagcagcaguga

SEQ ID NO: 1700779 - RNA, 19 nt, Homo sapiens
  misc_RNA (1)...(19): siRNA sense strand
acugcaagcugacuuacuu

SEQ ID NO: 1700780 - RNA, 19 nt, Homo sapiens
  misc_RNA (1)...(19): siRNA sense strand
gcccuuugaucagcuguuu

SEQ ID NO: 1700781 - RNA, 19 nt, Homo sapiens
  misc_RNA (1)...(19): siRNA sense strand
uuaaggucauaccaaguuu

SEQ ID NO: 1700782 - RNA, 19 nt, Homo sapiens
  misc_RNA (1)...(19): siRNA sense strand
aggcagggcucuggaguga

SEQ ID NO: 1700783 - RNA, 19 nt, Homo sapiens
  misc_RNA (1)...(19): siRNA sense strand
ccauugcuuugauuaugaa

SEQ ID NO: 1700784 - RNA, 19 nt, Homo sapiens
  misc_RNA (1)...(19): siRNA sense strand
uaaauccuccacugaaugu

SEQ ID NO: 1700785 - RNA, 19 nt, Homo sapiens
  misc_RNA (1)...(19): siRNA sense strand
ggcuugcggugcuuguuaa

SEQ ID NO: 1700786 - RNA, 19 nt, Homo sapiens
  misc_RNA (1)...(19): siRNA sense strand
ucacuucucccaccuguca

SEQ ID NO: 1700787 - RNA, 19 nt, Homo sapiens
  misc_RNA (1)...(19): siRNA sense strand
cugaggacacgcaguauuu

SEQ ID NO: 1700788 - RNA, 19 nt, Homo sapiens
  misc_RNA (1)...(19): siRNA sense strand
aaaccagaaucacugaaag

SEQ ID NO: 1700789 - RNA, 19 nt, Homo sapiens
  misc_RNA (1)...(19): siRNA sense strand
uaaccauccuccacaaagg

SEQ ID NO: 1700790 - RNA, 19 nt, Homo sapiens
  misc_RNA (1)...(19): siRNA sense strand
ggauauuugcagauagaaa

SEQ ID NO: 1700791 - RNA, 19 nt, Homo sapiens
  misc_RNA (1)...(19): siRNA sense strand
acaauacaaggaauggaua

SEQ ID NO: 1700792 - RNA, 19 nt, Homo sapiens
  misc_RNA (1)...(19): siRNA sense strand
gaucaucguggcgcaugua

SEQ ID NO: 1700793 - RNA, 19 nt, Homo sapiens
  misc_RNA (1)...(19): siRNA sense strand
uccauugcuuugauuauga

SEQ ID NO: 1700794 - RNA, 19 nt, Homo sapiens
  misc_RNA (1)...(19): siRNA sense strand
gagaaaccagugucugcuu

SEQ ID NO: 1700795 - RNA, 19 nt, Homo sapiens
  misc_RNA (1)...(19): siRNA sense strand
ucacugaaagcaaaugugu

SEQ ID NO: 1700796 - RNA, 19 nt, Homo sapiens
  misc_RNA (1)...(19): siRNA sense strand
gcaccacaaacacuacaga

SEQ ID NO: 1700797 - RNA, 19 nt, Homo sapiens
  misc_RNA (1)...(19): siRNA sense strand
caaugcauucaucucaaua

SEQ ID NO: 1700798 - RNA, 19 nt, Homo sapiens
  misc_RNA (1)...(19): siRNA sense strand
gacugaagaaugccaagaa

SEQ ID NO: 1700799 - RNA, 19 nt, Homo sapiens
  misc_RNA (1)...(19): siRNA sense strand
guauggcucuuggacugaa

SEQ ID NO: 1700800 - RNA, 19 nt, Homo sapiens
  misc_RNA (1)...(19): siRNA sense strand
caagaauacagcaaagaca

SEQ ID NO: 1700801 - RNA, 19 nt, Homo sapiens
  misc_RNA (1)...(19): siRNA sense strand
guaaccauccuccacaaag

SEQ ID NO: 1700802 - RNA, 19 nt, Homo sapiens
  misc_RNA (1)...(19): siRNA sense strand
cugaagaaugccaagaaua

SEQ ID NO: 1700803 - RNA, 19 nt, Homo sapiens
  misc_RNA (1)...(19): siRNA sense strand
ucucccaccugucaauuuc

SEQ ID NO: 1700804 - RNA, 19 nt, Homo sapiens
  misc_RNA (1)...(19): siRNA sense strand
cauaccaaguuucccuuca

SEQ ID NO: 1700805 - RNA, 19 nt, Homo sapiens
  misc_RNA (1)...(19): siRNA sense strand
cacaaacacuacagaagac

SEQ ID NO: 1700806 - RNA, 19 nt, Homo sapiens
  misc_RNA (1)...(19): siRNA sense strand
cacugcaccuggcuuguug

SEQ ID NO: 1700807 - RNA, 19 nt, Homo sapiens
  misc_RNA (1)...(19): siRNA sense strand
ggaauggauauuugcagau

SEQ ID NO: 1700808 - RNA, 19 nt, Homo sapiens
  misc_RNA (1)...(19): siRNA sense strand
ggacugaagaaugccaaga

SEQ ID NO: 1700809 - RNA, 19 nt, Homo sapiens
  misc_RNA (1)...(19): siRNA sense strand
acucgucucucuauccaau

SEQ ID NO: 1700810 - RNA, 19 nt, Homo sapiens
  misc_RNA (1)...(19): siRNA sense strand
caauacaaggaauggauau

SEQ ID NO: 1700811 - RNA, 19 nt, Homo sapiens
  misc_RNA (1)...(19): siRNA sense strand
ugguuuggcucaaguucuu

SEQ ID NO: 1700812 - RNA, 19 nt, Homo sapiens
  misc_RNA (1)...(19): siRNA sense strand
acugaagaaugccaagaau

SEQ ID NO: 1700813 - RNA, 19 nt, Homo sapiens
  misc_RNA (1)...(19): siRNA sense strand
cugacuuacuuccugauga

SEQ ID NO: 1700814 - RNA, 19 nt, Homo sapiens
  misc_RNA (1)...(19): siRNA sense strand
gaaauaucgcaugcugguu

SEQ ID NO: 1700815 - RNA, 19 nt, Homo sapiens
  misc_RNA (1)...(19): siRNA sense strand
guguaaccauccuccacaa

SEQ ID NO: 1700816 - RNA, 19 nt, Homo sapiens
  misc_RNA (1)...(19): siRNA sense strand
ggacuuuuauccucagcaa

SEQ ID NO: 1700817 - RNA, 19 nt, Homo sapiens
  misc_RNA (1)...(19): siRNA sense strand
uuuaaggucauaccaaguu

SEQ ID NO: 1700818 - RNA, 19 nt, Homo sapiens
  misc_RNA (1)...(19): siRNA sense strand
gcauguauuacucauccuu

SEQ ID NO: 1700819 - RNA, 19 nt, Homo sapiens
  misc_RNA (1)...(19): siRNA sense strand
uggcuugcggugcuuguua

SEQ ID NO: 1700820 - RNA, 19 nt, Homo sapiens
  misc_RNA (1)...(19): siRNA sense strand
aaacacuacagaagacaau

SEQ ID NO: 1700821 - RNA, 19 nt, Homo sapiens
  misc_RNA (1)...(19): siRNA sense strand
caaacacuacagaagacaa

SEQ ID NO: 1700822 - RNA, 19 nt, Homo sapiens
  misc_RNA (1)...(19): siRNA sense strand
gacuaugaaaccagaauca

SEQ ID NO: 1700823 - RNA, 19 nt, Homo sapiens
  misc_RNA (1)...(19): siRNA sense strand
auggauauuugcagauaga

SEQ ID NO: 1700824 - RNA, 19 nt, Homo sapiens
  misc_RNA (1)...(19): siRNA sense strand
gcaaaggaauguuaaucua

SEQ ID NO: 1700825 - RNA, 19 nt, Homo sapiens
  misc_RNA (1)...(19): siRNA sense strand
gaauggauauuugcagaua

SEQ ID NO: 1700826 - RNA, 19 nt, Homo sapiens
  misc_RNA (1)...(19): siRNA sense strand
cagaaucacugaaagcaaa

SEQ ID NO: 1700827 - RNA, 19 nt, Homo sapiens
  misc_RNA (1)...(19): siRNA sense strand
caucguggcgcauguauua

SEQ ID NO: 1700828 - RNA, 19 nt, Homo sapiens
  misc_RNA (1)...(19): siRNA sense strand
gaagacaauuauucacguu

SEQ ID NO: 1700829 - RNA, 19 nt, Homo sapiens
  misc_RNA (1)...(19): siRNA sense strand
gaaaccaaauccugaucaa

SEQ ID NO: 1700830 - RNA, 19 nt, Homo sapiens
  misc_RNA (1)...(19): siRNA sense strand
caagagcaaaggaauguua

SEQ ID NO: 1700831 - RNA, 19 nt, Homo sapiens
  misc_RNA (1)...(19): siRNA sense strand
ccauuaaaguuacugguuu

SEQ ID NO: 1700832 - RNA, 19 nt, Homo sapiens
  misc_RNA (1)...(19): siRNA sense strand
uaaguacgauguucaagug

SEQ ID NO: 1700833 - RNA, 19 nt, Homo sapiens
  misc_RNA (1)...(19): siRNA sense strand
gaaaauaaacgcuccaaaa

SEQ ID NO: 1700834 - RNA, 19 nt, Homo sapiens
  misc_RNA (1)...(19): siRNA sense strand
gaaaccagaaucacugaaa

SEQ ID NO: 1700835 - RNA, 19 nt, Homo sapiens
  misc_RNA (1)...(19): siRNA sense strand
gaguggagccaaccuauuu

SEQ ID NO: 1700836 - RNA, 19 nt, Homo sapiens
  misc_RNA (1)...(19): siRNA sense strand
gcagaacgaccacucacua

SEQ ID NO: 1700837 - RNA, 19 nt, Homo sapiens
  misc_RNA (1)...(19): siRNA sense strand
caaauaaauccuccacuga

SEQ ID NO: 1700838 - RNA, 19 nt, Homo sapiens
  misc_RNA (1)...(19): siRNA sense strand
ccuggaaccucaauuguga

SEQ ID NO: 1700839 - RNA, 19 nt, Homo sapiens
  misc_RNA (1)...(19): siRNA sense strand
ucacgccauugaucaaaua

SEQ ID NO: 1700840 - RNA, 19 nt, Homo sapiens
  misc_RNA (1)...(19): siRNA sense strand
ccacaaacacuacagaaga

SEQ ID NO: 1700841 - RNA, 19 nt, Homo sapiens
  misc_RNA (1)...(19): siRNA sense strand
ugaaggaacucgucucucu

SEQ ID NO: 1700842 - RNA, 19 nt, Homo sapiens
  misc_RNA (1)...(19): siRNA sense strand
gagccaaccuauuuaugug

SEQ ID NO: 1700843 - RNA, 19 nt, Homo sapiens
  misc_RNA (1)...(19): siRNA sense strand
gaacucgucucucuaucca

SEQ ID NO: 1700844 - RNA, 19 nt, Homo sapiens
  misc_RNA (1)...(19): siRNA sense strand
gaagaugacuaugaaacca

SEQ ID NO: 1700845 - RNA, 19 nt, Homo sapiens
  misc_RNA (1)...(19): siRNA sense strand
ugacuuacuuccugaugaa

SEQ ID NO: 1700846 - RNA, 19 nt, Homo sapiens
  misc_RNA (1)...(19): siRNA sense strand
gaaagcaaauguguaacca

SEQ ID NO: 1700847 - RNA, 19 nt, Homo sapiens
  misc_RNA (1)...(19): siRNA sense strand
gcagggcucuggagugagu

SEQ ID NO: 1700848 - RNA, 19 nt, Homo sapiens
  misc_RNA (1)...(19): siRNA sense strand
gaaugucacagcagagauu

SEQ ID NO: 1700849 - RNA, 19 nt, Homo sapiens
  misc_RNA (1)...(19): siRNA sense strand
uacaaggaauggauauuug

SEQ ID NO: 1700850 - RNA, 19 nt, Homo sapiens
  misc_RNA (1)...(19): siRNA sense strand
guacgauguucaagugaga

SEQ ID NO: 1700851 - RNA, 19 nt, Homo sapiens
  misc_RNA (1)...(19): siRNA sense strand
ccugucaauuucaccauua

SEQ ID NO: 1700852 - RNA, 19 nt, Homo sapiens
  misc_RNA (1)...(19): siRNA sense strand
ggagccaaccuauuuaugu

SEQ ID NO: 1700853 - RNA, 19 nt, Homo sapiens
  misc_RNA (1)...(19): siRNA sense strand
agaaaccagugucugcuuu

SEQ ID NO: 1700854 - RNA, 19 nt, Homo sapiens
  misc_RNA (1)...(19): siRNA sense strand
gaacgaccacucacuacug

SEQ ID NO: 1700855 - RNA, 19 nt, Homo sapiens
  misc_RNA (1)...(19): siRNA sense strand
gaaggaacucgucucucua

SEQ ID NO: 1700856 - RNA, 19 nt, Homo sapiens
  misc_RNA (1)...(19): siRNA sense strand
gauacugcaagcugacuua

SEQ ID NO: 1700857 - RNA, 19 nt, Homo sapiens
  misc_RNA (1)...(19): siRNA sense strand
cuacagaagacaauuauuc

SEQ ID NO: 1700858 - RNA, 19 nt, Homo sapiens
  misc_RNA (1)...(19): siRNA sense strand
ccaaugcauucaucucaau

SEQ ID NO: 1700859 - RNA, 19 nt, Homo sapiens
  misc_RNA (1)...(19): siRNA sense strand
ggaccauccugcagaacga

SEQ ID NO: 1700860 - RNA, 19 nt, Homo sapiens
  misc_RNA (1)...(19): siRNA sense strand
aauaaacgcuccaaaagaa

SEQ ID NO: 1700861 - RNA, 19 nt, Homo sapiens
  misc_RNA (1)...(19): siRNA sense strand
caaaagaagaugacuauga

SEQ ID NO: 1700862 - RNA, 19 nt, Homo sapiens
  misc_RNA (1)...(19): siRNA sense strand
aaauaucgcaugcugguuu

SEQ ID NO: 1700863 - RNA, 19 nt, Homo sapiens
  misc_RNA (1)...(19): siRNA sense strand
aaauaaauccuccacugaa

SEQ ID NO: 1700864 - RNA, 19 nt, Homo sapiens
  misc_RNA (1)...(19): siRNA sense strand
cauuaaaguuacugguuug

SEQ ID NO: 1700865 - RNA, 19 nt, Homo sapiens
  misc_RNA (1)...(19): siRNA sense strand
aauaaauccuccacugaau

SEQ ID NO: 1700866 - RNA, 19 nt, Homo sapiens
  misc_RNA (1)...(19): siRNA sense strand
caaaggaauguuaaucuag

SEQ ID NO: 1700867 - RNA, 19 nt, Homo sapiens
  misc_RNA (1)...(19): siRNA sense strand
cgccauugaucaaauaaau

SEQ ID NO: 1700868 - RNA, 19 nt, Homo sapiens
  misc_RNA (1)...(19): siRNA sense strand
acacuacagaagacaauua

SEQ ID NO: 1700869 - RNA, 19 nt, Homo sapiens
  misc_RNA (1)...(19): siRNA sense strand
ggaaaccaaauccugauca

SEQ ID NO: 1700870 - RNA, 19 nt, Homo sapiens
  misc_RNA (1)...(19): siRNA sense strand
gaucaagagcaaaggaaug

SEQ ID NO: 1700871 - RNA, 19 nt, Homo sapiens
  misc_RNA (1)...(19): siRNA sense strand
ugaagaaugccaagaauac

SEQ ID NO: 1700872 - RNA, 19 nt, Homo sapiens
  misc_RNA (1)...(19): siRNA sense strand
gagcaaaggaauguuaauc

SEQ ID NO: 1700873 - RNA, 19 nt, Homo sapiens
  misc_RNA (1)...(19): siRNA sense strand
gaccaaugcauucaucuca

SEQ ID NO: 1700874 - RNA, 19 nt, Homo sapiens
  misc_RNA (1)...(19): siRNA sense strand
gaagaaugccaagaauaca

SEQ ID NO: 1700875 - RNA, 19 nt, Homo sapiens
  misc_RNA (1)...(19): siRNA sense strand
aaccaaauccugaucaaga

SEQ ID NO: 1700876 - RNA, 19 nt, Homo sapiens
  misc_RNA (1)...(19): siRNA sense strand
acugaaagcaaauguguaa

SEQ ID NO: 1700877 - RNA, 19 nt, Homo sapiens
  misc_RNA (1)...(19): siRNA sense strand
gcaaauguguaaccauccu

SEQ ID NO: 1700878 - RNA, 19 nt, Homo sapiens
  misc_RNA (1)...(19): siRNA sense strand
caagugagagcagcaguga

SEQ ID NO: 1700879 - RNA, 19 nt, Homo sapiens
  misc_RNA (1)...(19): siRNA sense strand
acugcaagcugacuuacuu

SEQ ID NO: 1700880 - RNA, 19 nt, Homo sapiens
  misc_RNA (1)...(19): siRNA sense strand
gcccuuugaucagcuguuu

SEQ ID NO: 1700881 - RNA, 19 nt, Homo sapiens
  misc_RNA (1)...(19): siRNA sense strand
uuaaggucauaccaaguuu

SEQ ID NO: 1700882 - RNA, 19 nt, Homo sapiens
  misc_RNA (1)...(19): siRNA sense strand
aggcagggcucuggaguga

SEQ ID NO: 1700883 - RNA, 19 nt, Homo sapiens
  misc_RNA (1)...(19): siRNA sense strand
ccauugcuuugauuaugaa

SEQ ID NO: 1700884 - RNA, 19 nt, Homo sapiens
  misc_RNA (1)...(19): siRNA sense strand
uaaauccuccacugaaugu

SEQ ID NO: 1700885 - RNA, 19 nt, Homo sapiens
  misc_RNA (1)...(19): siRNA sense strand
ggcuugcggugcuuguuaa

SEQ ID NO: 1700886 - RNA, 19 nt, Homo sapiens
  misc_RNA (1)...(19): siRNA sense strand
ucacuucucccaccuguca

SEQ ID NO: 1700887 - RNA, 19 nt, Homo sapiens
  misc_RNA (1)...(19): siRNA sense strand
cugaggacacgcaguauuu

SEQ ID NO: 1700888 - RNA, 19 nt, Homo sapiens
  misc_RNA (1)...(19): siRNA sense strand
aaaccagaaucacugaaag

SEQ ID NO: 1700889 - RNA, 19 nt, Homo sapiens
  misc_RNA (1)...(19): siRNA sense strand
uaaccauccuccacaaagg

SEQ ID NO: 1700890 - RNA, 19 nt, Homo sapiens
  misc_RNA (1)...(19): siRNA sense strand
ggauauuugcagauagaaa

SEQ ID NO: 1700891 - RNA, 19 nt, Homo sapiens
  misc_RNA (1)...(19): siRNA sense strand
acaauacaaggaauggaua

SEQ ID NO: 1700892 - RNA, 19 nt, Homo sapiens
  misc_RNA (1)...(19): siRNA sense strand
gaucaucguggcgcaugua

SEQ ID NO: 1700893 - RNA, 19 nt, Homo sapiens
  misc_RNA (1)...(19): siRNA sense strand
uccauugcuuugauuauga

SEQ ID NO: 1700894 - RNA, 19 nt, Homo sapiens
  misc_RNA (1)...(19): siRNA sense strand
gagaaaccagugucugcuu

SEQ ID NO: 1700895 - RNA, 19 nt, Homo sapiens
  misc_RNA (1)...(19): siRNA sense strand
ucacugaaagcaaaugugu

SEQ ID NO: 1700896 - RNA, 19 nt, Homo sapiens
  misc_RNA (1)...(19): siRNA sense strand
gcaccacaaacacuacaga

SEQ ID NO: 1700897 - RNA, 19 nt, Homo sapiens
  misc_RNA (1)...(19): siRNA sense strand
caaugcauucaucucaaua

SEQ ID NO: 1700898 - RNA, 19 nt, Homo sapiens
  misc_RNA (1)...(19): siRNA sense strand
gacugaagaaugccaagaa

SEQ ID NO: 1700899 - RNA, 19 nt, Homo sapiens
  misc_RNA (1)...(19): siRNA sense strand
guauggcucuuggacugaa

SEQ ID NO: 1700900 - RNA, 19 nt, Homo sapiens
  misc_RNA (1)...(19): siRNA sense strand
caagaauacagcaaagaca

SEQ ID NO: 1700901 - RNA, 19 nt, Homo sapiens
  misc_RNA (1)...(19): siRNA sense strand
guaaccauccuccacaaag

SEQ ID NO: 1700902 - RNA, 19 nt, Homo sapiens
  misc_RNA (1)...(19): siRNA sense strand
cugaagaaugccaagaaua

SEQ ID NO: 1700903 - RNA, 19 nt, Homo sapiens
  misc_RNA (1)...(19): siRNA sense strand
ucucccaccugucaauuuc

SEQ ID NO: 1700904 - RNA, 19 nt, Homo sapiens
  misc_RNA (1)...(19): siRNA sense strand
cauaccaaguuucccuuca

SEQ ID NO: 1700905 - RNA, 19 nt, Homo sapiens
  misc_RNA (1)...(19): siRNA sense strand
cacaaacacuacagaagac

SEQ ID NO: 1700906 - RNA, 19 nt, Homo sapiens
  misc_RNA (1)...(19): siRNA sense strand
cacugcaccuggcuuguug

SEQ ID NO: 1700907 - RNA, 19 nt, Homo sapiens
  misc_RNA (1)...(19): siRNA sense strand
ggaauggauauuugcagau

SEQ ID NO: 1700908 - RNA, 19 nt, Homo sapiens
  misc_RNA (1)...(19): siRNA sense strand
ggacugaagaaugccaaga

SEQ ID NO: 1700909 - RNA, 19 nt, Homo sapiens
  misc_RNA (1)...(19): siRNA sense strand
acucgucucucuauccaau

SEQ ID NO: 1700910 - RNA, 19 nt, Homo sapiens
  misc_RNA (1)...(19): siRNA sense strand
caauacaaggaauggauau

SEQ ID NO: 1700911 - RNA, 19 nt, Homo sapiens
  misc_RNA (1)...(19): siRNA sense strand
ugguuuggcucaaguucuu

SEQ ID NO: 1700912 - RNA, 19 nt, Homo sapiens
  misc_RNA (1)...(19): siRNA sense strand
acugaagaaugccaagaau

SEQ ID NO: 1700913 - RNA, 19 nt, Homo sapiens
  misc_RNA (1)...(19): siRNA sense strand
cugacuuacuuccugauga

SEQ ID NO: 1700914 - RNA, 19 nt, Homo sapiens
  misc_RNA (1)...(19): siRNA sense strand
gaaauaucgcaugcugguu

SEQ ID NO: 1700915 - RNA, 19 nt, Homo sapiens
  misc_RNA (1)...(19): siRNA sense strand
guguaaccauccuccacaa

SEQ ID NO: 1700916 - RNA, 19 nt, Homo sapiens
  misc_RNA (1)...(19): siRNA sense strand
ggacuuuuauccucagcaa

SEQ ID NO: 1700917 - RNA, 19 nt, Homo sapiens
  misc_RNA (1)...(19): siRNA sense strand
uuuaaggucauaccaaguu

SEQ ID NO: 1700918 - RNA, 19 nt, Homo sapiens
  misc_RNA (1)...(19): siRNA sense strand
gcauguauuacucauccuu

SEQ ID NO: 1700919 - RNA, 19 nt, Homo sapiens
  misc_RNA (1)...(19): siRNA sense strand
uggcuugcggugcuuguua

SEQ ID NO: 1700920 - RNA, 19 nt, Homo sapiens
  misc_RNA (1)...(19): siRNA sense strand
aaacacuacagaagacaau

SEQ ID NO: 1700921 - RNA, 19 nt, Homo sapiens
  misc_RNA (1)...(19): siRNA sense strand
caaacacuacagaagacaa

SEQ ID NO: 1700922 - RNA, 19 nt, Homo sapiens
  misc_RNA (1)...(19): siRNA sense strand
gacuaugaaaccagaauca

SEQ ID NO: 1700923 - RNA, 19 nt, Homo sapiens
  misc_RNA (1)...(19): siRNA sense strand
auggauauuugcagauaga

SEQ ID NO: 1700924 - RNA, 19 nt, Homo sapiens
  misc_RNA (1)...(19): siRNA sense strand
gcaaaggaauguuaaucua

SEQ ID NO: 1700925 - RNA, 19 nt, Homo sapiens
  misc_RNA (1)...(19): siRNA sense strand
gaauggauauuugcagaua

SEQ ID NO: 1700926 - RNA, 19 nt, Homo sapiens
  misc_RNA (1)...(19): siRNA sense strand
cagaaucacugaaagcaaa

SEQ ID NO: 1700927 - RNA, 19 nt, Homo sapiens
  misc_RNA (1)...(19): siRNA sense strand
caucguggcgcauguauua

SEQ ID NO: 1700928 - RNA, 19 nt, Homo sapiens
  misc_RNA (1)...(19): siRNA sense strand
gaagacaauuauucacguu

SEQ ID NO: 1700929 - RNA, 19 nt, Homo sapiens
  misc_RNA (1)...(19): siRNA sense strand
gaaaccaaauccugaucaa

SEQ ID NO: 1700930 - RNA, 19 nt, Homo sapiens
  misc_RNA (1)...(19): siRNA sense strand
caagagcaaaggaauguua

SEQ ID NO: 1700931 - RNA, 19 nt, Homo sapiens
  misc_RNA (1)...(19): siRNA sense strand
ccauuaaaguuacugguuu

SEQ ID NO: 1700932 - RNA, 19 nt, Homo sapiens
  misc_RNA (1)...(19): siRNA sense strand
uaaguacgauguucaagug

SEQ ID NO: 1700933 - RNA, 19 nt, Homo sapiens
  misc_RNA (1)...(19): siRNA sense strand
gaaaauaaacgcuccaaaa

SEQ ID NO: 1700934 - RNA, 19 nt, Homo sapiens
  misc_RNA (1)...(19): siRNA sense strand
gaaaccagaaucacugaaa

SEQ ID NO: 1700935 - RNA, 19 nt, Homo sapiens
  misc_RNA (1)...(19): siRNA sense strand
gaguggagccaaccuauuu

SEQ ID NO: 1700936 - RNA, 19 nt, Homo sapiens
  misc_RNA (1)...(19): siRNA sense strand
gcagaacgaccacucacua

SEQ ID NO: 1700937 - RNA, 19 nt, Homo sapiens
  misc_RNA (1)...(19): siRNA sense strand
caaauaaauccuccacuga

SEQ ID NO: 1700938 - RNA, 19 nt, Homo sapiens
  misc_RNA (1)...(19): siRNA sense strand
ccuggaaccucaauuguga

SEQ ID NO: 1700939 - RNA, 19 nt, Homo sapiens
  misc_RNA (1)...(19): siRNA sense strand
ucacgccauugaucaaaua

SEQ ID NO: 1700940 - RNA, 19 nt, Homo sapiens
  misc_RNA (1)...(19): siRNA sense strand
ccacaaacacuacagaaga

SEQ ID NO: 1700941 - RNA, 19 nt, Homo sapiens
  misc_RNA (1)...(19): siRNA sense strand
ugaaggaacucgucucucu

SEQ ID NO: 1700942 - RNA, 19 nt, Homo sapiens
  misc_RNA (1)...(19): siRNA sense strand
gagccaaccuauuuaugug

SEQ ID NO: 1700943 - RNA, 19 nt, Homo sapiens
  misc_RNA (1)...(19): siRNA sense strand
gaacucgucucucuaucca

SEQ ID NO: 1700944 - RNA, 19 nt, Homo sapiens
  misc_RNA (1)...(19): siRNA sense strand
gaagaugacuaugaaacca

SEQ ID NO: 1700945 - RNA, 19 nt, Homo sapiens
  misc_RNA (1)...(19): siRNA sense strand
ugacuuacuuccugaugaa

SEQ ID NO: 1700946 - RNA, 19 nt, Homo sapiens
  misc_RNA (1)...(19): siRNA sense strand
gaaagcaaauguguaacca

SEQ ID NO: 1700947 - RNA, 19 nt, Homo sapiens
  misc_RNA (1)...(19): siRNA sense strand
gcagggcucuggagugagu

SEQ ID NO: 1700948 - RNA, 19 nt, Homo sapiens
  misc_RNA (1)...(19): siRNA sense strand
gaaugucacagcagagauu

SEQ ID NO: 1700949 - RNA, 19 nt, Homo sapiens
  misc_RNA (1)...(19): siRNA sense strand
uacaaggaauggauauuug

SEQ ID NO: 1700950 - RNA, 19 nt, Homo sapiens
  misc_RNA (1)...(19): siRNA sense strand
guacgauguucaagugaga

SEQ ID NO: 1700951 - RNA, 19 nt, Homo sapiens
  misc_RNA (1)...(19): siRNA sense strand
ccugucaauuucaccauua

SEQ ID NO: 1700952 - RNA, 19 nt, Homo sapiens
  misc_RNA (1)...(19): siRNA sense strand
ggagccaaccuauuuaugu

SEQ ID NO: 1700953 - RNA, 19 nt, Homo sapiens
  misc_RNA (1)...(19): siRNA sense strand
agaaaccagugucugcuuu

SEQ ID NO: 1700954 - RNA, 19 nt, Homo sapiens
  misc_RNA (1)...(19): siRNA sense strand
gaacgaccacucacuacug

SEQ ID NO: 1700955 - RNA, 19 nt, Homo sapiens
  misc_RNA (1)...(19): siRNA sense strand
gaaggaacucgucucucua

SEQ ID NO: 1700956 - RNA, 19 nt, Homo sapiens
  misc_RNA (1)...(19): siRNA sense strand
gauacugcaagcugacuua

SEQ ID NO: 1700957 - RNA, 19 nt, Homo sapiens
  misc_RNA (1)...(19): siRNA sense strand
cuacagaagacaauuauuc

SEQ ID NO: 1700958 - RNA, 19 nt, Homo sapiens
  misc_RNA (1)...(19): siRNA sense strand
ccaaugcauucaucucaau

SEQ ID NO: 1700959 - RNA, 19 nt, Homo sapiens
  misc_RNA (1)...(19): siRNA sense strand
ggaccauccugcagaacga

SEQ ID NO: 1700960 - RNA, 19 nt, Homo sapiens
  misc_RNA (1)...(19): siRNA sense strand
aauaaacgcuccaaaagaa

SEQ ID NO: 1700961 - RNA, 19 nt, Homo sapiens
  misc_RNA (1)...(19): siRNA sense strand
caaaagaagaugacuauga

SEQ ID NO: 1700962 - RNA, 19 nt, Homo sapiens
  misc_RNA (1)...(19): siRNA sense strand
aaauaucgcaugcugguuu

SEQ ID NO: 1700963 - RNA, 19 nt, Homo sapiens
  misc_RNA (1)...(19): siRNA sense strand
aaauaaauccuccacugaa

SEQ ID NO: 1700964 - RNA, 19 nt, Homo sapiens
  misc_RNA (1)...(19): siRNA sense strand
cauuaaaguuacugguuug

SEQ ID NO: 1700965 - RNA, 19 nt, Homo sapiens
  misc_RNA (1)...(19): siRNA sense strand
aauaaauccuccacugaau

SEQ ID NO: 1700966 - RNA, 19 nt, Homo sapiens
  misc_RNA (1)...(19): siRNA sense strand
caaaggaauguuaaucuag

SEQ ID NO: 1700967 - RNA, 19 nt, Homo sapiens
  misc_RNA (1)...(19): siRNA sense strand
cgccauugaucaaauaaau

SEQ ID NO: 1700968 - RNA, 19 nt, Homo sapiens
  misc_RNA (1)...(19): siRNA sense strand
acacuacagaagacaauua

SEQ ID NO: 1700969 - RNA, 19 nt, Homo sapiens
  misc_RNA (1)...(19): siRNA sense strand
ggaaaccaaauccugauca

SEQ ID NO: 1700970 - RNA, 19 nt, Homo sapiens
  misc_RNA (1)...(19): siRNA sense strand
gaucaagagcaaaggaaug

SEQ ID NO: 1700971 - RNA, 19 nt, Homo sapiens
  misc_RNA (1)...(19): siRNA sense strand
ugaagaaugccaagaauac

SEQ ID NO: 1700972 - RNA, 19 nt, Homo sapiens
  misc_RNA (1)...(19): siRNA sense strand
gagcaaaggaauguuaauc

SEQ ID NO: 1700973 - RNA, 19 nt, Homo sapiens
  misc_RNA (1)...(19): siRNA sense strand
gaccaaugcauucaucuca

SEQ ID NO: 1700974 - RNA, 19 nt, Homo sapiens
  misc_RNA (1)...(19): siRNA sense strand
gaagaaugccaagaauaca

SEQ ID NO: 1700975 - RNA, 19 nt, Homo sapiens
  misc_RNA (1)...(19): siRNA sense strand
aaccaaauccugaucaaga

SEQ ID NO: 1700976 - RNA, 19 nt, Homo sapiens
  misc_RNA (1)...(19): siRNA sense strand
acugaaagcaaauguguaa

SEQ ID NO: 1700977 - RNA, 19 nt, Homo sapiens
  misc_RNA (1)...(19): siRNA sense strand
gcaaauguguaaccauccu

SEQ ID NO: 1700978 - RNA, 19 nt, Homo sapiens
  misc_RNA (1)...(19): siRNA sense strand
caagugagagcagcaguga

SEQ ID NO: 1700979 - RNA, 19 nt, Homo sapiens
  misc_RNA (1)...(19): siRNA sense strand
acugcaagcugacuuacuu

SEQ ID NO: 1700980 - RNA, 19 nt, Homo sapiens
  misc_RNA (1)...(19): siRNA sense strand
gcccuuugaucagcuguuu

SEQ ID NO: 1700981 - RNA, 19 nt, Homo sapiens
  misc_RNA (1)...(19): siRNA sense strand
uuaaggucauaccaaguuu

SEQ ID NO: 1700982 - RNA, 19 nt, Homo sapiens
  misc_RNA (1)...(19): siRNA sense strand
aggcagggcucuggaguga

SEQ ID NO: 1700983 - RNA, 19 nt, Homo sapiens
  misc_RNA (1)...(19): siRNA sense strand
ccauugcuuugauuaugaa

SEQ ID NO: 1700984 - RNA, 19 nt, Homo sapiens
  misc_RNA (1)...(19): siRNA sense strand
uaaauccuccacugaaugu

SEQ ID NO: 1700985 - RNA, 19 nt, Homo sapiens
  misc_RNA (1)...(19): siRNA sense strand
ggcuugcggugcuuguuaa

SEQ ID NO: 1700986 - RNA, 19 nt, Homo sapiens
  misc_RNA (1)...(19): siRNA sense strand
ucacuucucccaccuguca

SEQ ID NO: 1700987 - RNA, 19 nt, Homo sapiens
  misc_RNA (1)...(19): siRNA sense strand
cugaggacacgcaguauuu

SEQ ID NO: 1700988 - RNA, 19 nt, Homo sapiens
  misc_RNA (1)...(19): siRNA sense strand
aaaccagaaucacugaaag

SEQ ID NO: 1700989 - RNA, 19 nt, Homo sapiens
  misc_RNA (1)...(19): siRNA sense strand
uaaccauccuccacaaagg

SEQ ID NO: 1700990 - RNA, 19 nt, Homo sapiens
  misc_RNA (1)...(19): siRNA sense strand
ggauauuugcagauagaaa

SEQ ID NO: 1700991 - RNA, 19 nt, Homo sapiens
  misc_RNA (1)...(19): siRNA sense strand
acaauacaaggaauggaua

SEQ ID NO: 1700992 - RNA, 19 nt, Homo sapiens
  misc_RNA (1)...(19): siRNA sense strand
gaucaucguggcgcaugua

SEQ ID NO: 1700993 - RNA, 19 nt, Homo sapiens
  misc_RNA (1)...(19): siRNA sense strand
uccauugcuuugauuauga

SEQ ID NO: 1700994 - RNA, 19 nt, Homo sapiens
  misc_RNA (1)...(19): siRNA sense strand
gagaaaccagugucugcuu

SEQ ID NO: 1700995 - RNA, 19 nt, Homo sapiens
  misc_RNA (1)...(19): siRNA sense strand
ucacugaaagcaaaugugu

SEQ ID NO: 1700996 - RNA, 19 nt, Homo sapiens
  misc_RNA (1)...(19): siRNA sense strand
gcaccacaaacacuacaga

SEQ ID NO: 1700997 - RNA, 19 nt, Homo sapiens
  misc_RNA (1)...(19): siRNA sense strand
caaugcauucaucucaaua

SEQ ID NO: 1700998 - RNA, 19 nt, Homo sapiens
  misc_RNA (1)...(19): siRNA sense strand
gacugaagaaugccaagaa

SEQ ID NO: 1700999 - RNA, 19 nt, Homo sapiens
  misc_RNA (1)...(19): siRNA sense strand
guauggcucuuggacugaa

SEQ ID NO: 1701000 - RNA, 19 nt, Homo sapiens
  misc_RNA (1)...(19): siRNA sense strand
caagaauacagcaaagaca

SEQ ID NO: 1701001 - RNA, 19 nt, Homo sapiens
  misc_RNA (1)...(19): siRNA sense strand
guaaccauccuccacaaag

SEQ ID NO: 1701002 - RNA, 19 nt, Homo sapiens
  misc_RNA (1)...(19): siRNA sense strand
cugaagaaugccaagaaua

SEQ ID NO: 1701003 - RNA, 19 nt, Homo sapiens
  misc_RNA (1)...(19): siRNA sense strand
ucucccaccugucaauuuc

SEQ ID NO: 1701004 - RNA, 19 nt, Homo sapiens
  misc_RNA (1)...(19): siRNA sense strand
cauaccaaguuucccuuca

SEQ ID NO: 1701005 - RNA, 19 nt, Homo sapiens
  misc_RNA (1)...(19): siRNA sense strand
cacaaacacuacagaagac

SEQ ID NO: 1701006 - RNA, 19 nt, Homo sapiens
  misc_RNA (1)...(19): siRNA sense strand
cacugcaccuggcuuguug

SEQ ID NO: 1701007 - RNA, 19 nt, Homo sapiens
  misc_RNA (1)...(19): siRNA sense strand
ggaauggauauuugcagau

SEQ ID NO: 1701008 - RNA, 19 nt, Homo sapiens
  misc_RNA (1)...(19): siRNA sense strand
ggacugaagaaugccaaga

SEQ ID NO: 1701009 - RNA, 19 nt, Homo sapiens
  misc_RNA (1)...(19): siRNA sense strand
acucgucucucuauccaau

SEQ ID NO: 1701010 - RNA, 19 nt, Homo sapiens
  misc_RNA (1)...(19): siRNA sense strand
caauacaaggaauggauau

SEQ ID NO: 1701011 - RNA, 19 nt, Homo sapiens
  misc_RNA (1)...(19): siRNA sense strand
ugguuuggcucaaguucuu

SEQ ID NO: 1701012 - RNA, 19 nt, Homo sapiens
  misc_RNA (1)...(19): siRNA sense strand
acugaagaaugccaagaau

SEQ ID NO: 1701013 - RNA, 19 nt, Homo sapiens
  misc_RNA (1)...(19): siRNA sense strand
cugacuuacuuccugauga

SEQ ID NO: 1701014 - RNA, 19 nt, Homo sapiens
  misc_RNA (1)...(19): siRNA sense strand
gaaauaucgcaugcugguu

SEQ ID NO: 1701015 - RNA, 19 nt, Homo sapiens
  misc_RNA (1)...(19): siRNA sense strand
guguaaccauccuccacaa

SEQ ID NO: 1701016 - RNA, 19 nt, Homo sapiens
  misc_RNA (1)...(19): siRNA sense strand
ggacuuuuauccucagcaa

SEQ ID NO: 1701017 - RNA, 19 nt, Homo sapiens
  misc_RNA (1)...(19): siRNA sense strand
uuuaaggucauaccaaguu

SEQ ID NO: 1701018 - RNA, 19 nt, Homo sapiens
  misc_RNA (1)...(19): siRNA sense strand
gcauguauuacucauccuu

SEQ ID NO: 1701019 - RNA, 19 nt, Homo sapiens
  misc_RNA (1)...(19): siRNA sense strand
uggcuugcggugcuuguua

SEQ ID NO: 1701020 - RNA, 19 nt, Homo sapiens
  misc_RNA (1)...(19): siRNA sense strand
aaacacuacagaagacaau

SEQ ID NO: 1701021 - RNA, 19 nt, Homo sapiens
  misc_RNA (1)...(19): siRNA sense strand
caaacacuacagaagacaa

SEQ ID NO: 1701022 - RNA, 19 nt, Homo sapiens
  misc_RNA (1)...(19): siRNA sense strand
gacuaugaaaccagaauca

SEQ ID NO: 1701023 - RNA, 19 nt, Homo sapiens
  misc_RNA (1)...(19): siRNA sense strand
auggauauuugcagauaga

SEQ ID NO: 1701024 - RNA, 19 nt, Homo sapiens
  misc_RNA (1)...(19): siRNA sense strand
ggaggaagcuguuaccaua

SEQ ID NO: 1701025 - RNA, 19 nt, Homo sapiens
  misc_RNA (1)...(19): siRNA sense strand
gaaaugaaguugauggauu

SEQ ID NO: 1701026 - RNA, 19 nt, Homo sapiens
  misc_RNA (1)...(19): siRNA sense strand
caaguaaugucgauaaaga

SEQ ID NO: 1701027 - RNA, 19 nt, Homo sapiens
  misc_RNA (1)...(19): siRNA sense strand
gcacguauaugccgagauc

SEQ ID NO: 1701028 - RNA, 19 nt, Homo sapiens
  misc_RNA (1)...(19): siRNA sense strand
gaucgaggaugaagaagga

SEQ ID NO: 1701029 - RNA, 19 nt, Homo sapiens
  misc_RNA (1)...(19): siRNA sense strand
gagaugcuguuguaauuuc

SEQ ID NO: 1701030 - RNA, 19 nt, Homo sapiens
  misc_RNA (1)...(19): siRNA sense strand
ucaaggaccucaucaacga

SEQ ID NO: 1701031 - RNA, 19 nt, Homo sapiens
  misc_RNA (1)...(19): siRNA sense strand
caguaugucugcagaugua

SEQ ID NO: 1701032 - RNA, 19 nt, Homo sapiens
  misc_RNA (1)...(19): siRNA sense strand
guugauggauuuagauguu

SEQ ID NO: 1701033 - RNA, 19 nt, Homo sapiens
  misc_RNA (1)...(19): siRNA sense strand
uaccugaacuucuuuacaa

SEQ ID NO: 1701034 - RNA, 19 nt, Homo sapiens
  misc_RNA (1)...(19): siRNA sense strand
aaagaugccuucuggugaa

SEQ ID NO: 1701035 - RNA, 19 nt, Homo sapiens
  misc_RNA (1)...(19): siRNA sense strand
gcacugagguaccugaacu

SEQ ID NO: 1701036 - RNA, 19 nt, Homo sapiens
  misc_RNA (1)...(19): siRNA sense strand
uggagaugcuguuguaauu

SEQ ID NO: 1701037 - RNA, 19 nt, Homo sapiens
  misc_RNA (1)...(19): siRNA sense strand
ugagguaccugaacuucuu

SEQ ID NO: 1701038 - RNA, 19 nt, Homo sapiens
  misc_RNA (1)...(19): siRNA sense strand
uauuggagaugcuguugua

SEQ ID NO: 1701039 - RNA, 19 nt, Homo sapiens
  misc_RNA (1)...(19): siRNA sense strand
caagaucgaggaugaagaa

SEQ ID NO: 1701040 - RNA, 19 nt, Homo sapiens
  misc_RNA (1)...(19): siRNA sense strand
ugaaguugauggauuuaga

SEQ ID NO: 1701041 - RNA, 19 nt, Homo sapiens
  misc_RNA (1)...(19): siRNA sense strand
gaggccugcugggauauua

SEQ ID NO: 1701042 - RNA, 19 nt, Homo sapiens
  misc_RNA (1)...(19): siRNA sense strand
gaugccuucuggugaauuu

SEQ ID NO: 1701043 - RNA, 19 nt, Homo sapiens
  misc_RNA (1)...(19): siRNA sense strand
cgagaucucagccauauug

SEQ ID NO: 1701044 - RNA, 19 nt, Homo sapiens
  misc_RNA (1)...(19): siRNA sense strand
gccgagaucucagccauau

SEQ ID NO: 1701045 - RNA, 19 nt, Homo sapiens
  misc_RNA (1)...(19): siRNA sense strand
agagaugaaugaaccaguu

SEQ ID NO: 1701046 - RNA, 19 nt, Homo sapiens
  misc_RNA (1)...(19): siRNA sense strand
ggagaugcuguuguaauuu

SEQ ID NO: 1701047 - RNA, 19 nt, Homo sapiens
  misc_RNA (1)...(19): siRNA sense strand
guggagaacuuggaaaugg

SEQ ID NO: 1701048 - RNA, 19 nt, Homo sapiens
  misc_RNA (1)...(19): siRNA sense strand
uaccuuggcgcuaguauuu

SEQ ID NO: 1701049 - RNA, 19 nt, Homo sapiens
  misc_RNA (1)...(19): siRNA sense strand
gcggauaugggacacuuaa

SEQ ID NO: 1701050 - RNA, 19 nt, Homo sapiens
  misc_RNA (1)...(19): siRNA sense strand
gaaguugauggauuuagau

SEQ ID NO: 1701051 - RNA, 19 nt, Homo sapiens
  misc_RNA (1)...(19): siRNA sense strand
gaacuuggaaauggaaaca

SEQ ID NO: 1701052 - RNA, 19 nt, Homo sapiens
  misc_RNA (1)...(19): siRNA sense strand
aacgaggccugcugggaua

SEQ ID NO: 1701053 - RNA, 19 nt, Homo sapiens
  misc_RNA (1)...(19): siRNA sense strand
ggagaacuuggaaauggaa

SEQ ID NO: 1701054 - RNA, 19 nt, Homo sapiens
  misc_RNA (1)...(19): siRNA sense strand
acacuaagggccgaagaua

SEQ ID NO: 1701055 - RNA, 19 nt, Homo sapiens
  misc_RNA (1)...(19): siRNA sense strand
ccuuggcgcuaguauuuga

SEQ ID NO: 1701056 - RNA, 19 nt, Homo sapiens
  misc_RNA (1)...(19): siRNA sense strand
ccacuccacucucuucaac

SEQ ID NO: 1701057 - RNA, 19 nt, Homo sapiens
  misc_RNA (1)...(19): siRNA sense strand
aggaagcuguuaccauaga

SEQ ID NO: 1701058 - RNA, 19 nt, Homo sapiens
  misc_RNA (1)...(19): siRNA sense strand
guuguaauuuccugugcaa

SEQ ID NO: 1701059 - RNA, 19 nt, Homo sapiens
  misc_RNA (1)...(19): siRNA sense strand
caacggugacacucaguau

SEQ ID NO: 1701060 - RNA, 19 nt, Homo sapiens
  misc_RNA (1)...(19): siRNA sense strand
caacuaacuuuugcacuga

SEQ ID NO: 1701061 - RNA, 19 nt, Homo sapiens
  misc_RNA (1)...(19): siRNA sense strand
gcuguuaccauagagauga

SEQ ID NO: 1701062 - RNA, 19 nt, Homo sapiens
  misc_RNA (1)...(19): siRNA sense strand
uaaagaggaggaagcuguu

SEQ ID NO: 1701063 - RNA, 19 nt, Homo sapiens
  misc_RNA (1)...(19): siRNA sense strand
gaagauaacgcggauaccu

SEQ ID NO: 1701064 - RNA, 19 nt, Homo sapiens
  misc_RNA (1)...(19): siRNA sense strand
caaaagacggagugaaauu

SEQ ID NO: 1701065 - RNA, 19 nt, Homo sapiens
  misc_RNA (1)...(19): siRNA sense strand
caccaaaccaggagaaagu

SEQ ID NO: 1701066 - RNA, 19 nt, Homo sapiens
  misc_RNA (1)...(19): siRNA sense strand
ugauggauuuagauguuga

SEQ ID NO: 1701067 - RNA, 19 nt, Homo sapiens
  misc_RNA (1)...(19): siRNA sense strand
ggauaugggacacuuaaaa

SEQ ID NO: 1701068 - RNA, 19 nt, Homo sapiens
  misc_RNA (1)...(19): siRNA sense strand
cucccaagaucgaggauga

SEQ ID NO: 1701069 - RNA, 19 nt, Homo sapiens
  misc_RNA (1)...(19): siRNA sense strand
cacuaagggccgaagauaa

SEQ ID NO: 1701070 - RNA, 19 nt, Homo sapiens
  misc_RNA (1)...(19): siRNA sense strand
uggugaauuugcacguaua

SEQ ID NO: 1701071 - RNA, 19 nt, Homo sapiens
  misc_RNA (1)...(19): siRNA sense strand
gcacucaaggaccucauca

SEQ ID NO: 1701072 - RNA, 19 nt, Homo sapiens
  misc_RNA (1)...(19): siRNA sense strand
gcuccauccucaagaaggu

SEQ ID NO: 1701073 - RNA, 19 nt, Homo sapiens
  misc_RNA (1)...(19): siRNA sense strand
ggaagcuguuaccauagag

SEQ ID NO: 1701074 - RNA, 19 nt, Homo sapiens
  misc_RNA (1)...(19): siRNA sense strand
uggagaacuuggaaaugga

SEQ ID NO: 1701075 - RNA, 19 nt, Homo sapiens
  misc_RNA (1)...(19): siRNA sense strand
gaagcuguuaccauagaga

SEQ ID NO: 1701076 - RNA, 19 nt, Homo sapiens
  misc_RNA (1)...(19): siRNA sense strand
guaccugaacuucuuuaca

SEQ ID NO: 1701077 - RNA, 19 nt, Homo sapiens
  misc_RNA (1)...(19): siRNA sense strand
gaauuccagaacaggagua

SEQ ID NO: 1701078 - RNA, 19 nt, Homo sapiens
  misc_RNA (1)...(19): siRNA sense strand
aaagaggaggaagcuguua

SEQ ID NO: 1701079 - RNA, 19 nt, Homo sapiens
  misc_RNA (1)...(19): siRNA sense strand
gcaccaaaccaggagaaag

SEQ ID NO: 1701080 - RNA, 19 nt, Homo sapiens
  misc_RNA (1)...(19): siRNA sense strand
gcagauguaccccuuguug

SEQ ID NO: 1701081 - RNA, 19 nt, Homo sapiens
  misc_RNA (1)...(19): siRNA sense strand
ugaauuugcacguauaugc

SEQ ID NO: 1701082 - RNA, 19 nt, Homo sapiens
  misc_RNA (1)...(19): siRNA sense strand
cagacuaugaaaugaaguu

SEQ ID NO: 1701083 - RNA, 19 nt, Homo sapiens
  misc_RNA (1)...(19): siRNA sense strand
gagguaccugaacuucuuu

SEQ ID NO: 1701084 - RNA, 19 nt, Homo sapiens
  misc_RNA (1)...(19): siRNA sense strand
ucuggugaauuugcacgua

SEQ ID NO: 1701085 - RNA, 19 nt, Homo sapiens
  misc_RNA (1)...(19): siRNA sense strand
guaguaaagaugccuucug

SEQ ID NO: 1701086 - RNA, 19 nt, Homo sapiens
  misc_RNA (1)...(19): siRNA sense strand
gacuaugaaaugaaguuga

SEQ ID NO: 1701087 - RNA, 19 nt, Homo sapiens
  misc_RNA (1)...(19): siRNA sense strand
gaggaagcuguuaccauag

SEQ ID NO: 1701088 - RNA, 19 nt, Homo sapiens
  misc_RNA (1)...(19): siRNA sense strand
gauaugggacacuuaaaau

SEQ ID NO: 1701089 - RNA, 19 nt, Homo sapiens
  misc_RNA (1)...(19): siRNA sense strand
ucaacggugacacucagua

SEQ ID NO: 1701090 - RNA, 19 nt, Homo sapiens
  misc_RNA (1)...(19): siRNA sense strand
aagauaacgcggauaccuu

SEQ ID NO: 1701091 - RNA, 19 nt, Homo sapiens
  misc_RNA (1)...(19): siRNA sense strand
ggugaauuugcacguauau

SEQ ID NO: 1701092 - RNA, 19 nt, Homo sapiens
  misc_RNA (1)...(19): siRNA sense strand
cuggugaauuugcacguau

SEQ ID NO: 1701093 - RNA, 19 nt, Homo sapiens
  misc_RNA (1)...(19): siRNA sense strand
ggaggaagcuguuaccaua

SEQ ID NO: 1701094 - RNA, 19 nt, Homo sapiens
  misc_RNA (1)...(19): siRNA sense strand
gaaaugaaguugauggauu

SEQ ID NO: 1701095 - RNA, 19 nt, Homo sapiens
  misc_RNA (1)...(19): siRNA sense strand
caaguaaugucgauaaaga

SEQ ID NO: 1701096 - RNA, 19 nt, Homo sapiens
  misc_RNA (1)...(19): siRNA sense strand
gcacguauaugccgagauc

SEQ ID NO: 1701097 - RNA, 19 nt, Homo sapiens
  misc_RNA (1)...(19): siRNA sense strand
gaucgaggaugaagaagga

SEQ ID NO: 1701098 - RNA, 19 nt, Homo sapiens
  misc_RNA (1)...(19): siRNA sense strand
gagaugcuguuguaauuuc

SEQ ID NO: 1701099 - RNA, 19 nt, Homo sapiens
  misc_RNA (1)...(19): siRNA sense strand
ucaaggaccucaucaacga

SEQ ID NO: 1701100 - RNA, 19 nt, Homo sapiens
  misc_RNA (1)...(19): siRNA sense strand
caguaugucugcagaugua

SEQ ID NO: 1701101 - RNA, 19 nt, Homo sapiens
  misc_RNA (1)...(19): siRNA sense strand
guugauggauuuagauguu

SEQ ID NO: 1701102 - RNA, 19 nt, Homo sapiens
  misc_RNA (1)...(19): siRNA sense strand
uaccugaacuucuuuacaa

SEQ ID NO: 1701103 - RNA, 19 nt, Homo sapiens
  misc_RNA (1)...(19): siRNA sense strand
aaagaugccuucuggugaa

SEQ ID NO: 1701104 - RNA, 19 nt, Homo sapiens
  misc_RNA (1)...(19): siRNA sense strand
gcacugagguaccugaacu

SEQ ID NO: 1701105 - RNA, 19 nt, Homo sapiens
  misc_RNA (1)...(19): siRNA sense strand
uggagaugcuguuguaauu

SEQ ID NO: 1701106 - RNA, 19 nt, Homo sapiens
  misc_RNA (1)...(19): siRNA sense strand
ugagguaccugaacuucuu

SEQ ID NO: 1701107 - RNA, 19 nt, Homo sapiens
  misc_RNA (1)...(19): siRNA sense strand
uauuggagaugcuguugua

SEQ ID NO: 1701108 - RNA, 19 nt, Homo sapiens
  misc_RNA (1)...(19): siRNA sense strand
caagaucgaggaugaagaa

SEQ ID NO: 1701109 - RNA, 19 nt, Homo sapiens
  misc_RNA (1)...(19): siRNA sense strand
ugaaguugauggauuuaga

SEQ ID NO: 1701110 - RNA, 19 nt, Homo sapiens
  misc_RNA (1)...(19): siRNA sense strand
gaggccugcugggauauua

SEQ ID NO: 1701111 - RNA, 19 nt, Homo sapiens
  misc_RNA (1)...(19): siRNA sense strand
gaugccuucuggugaauuu

SEQ ID NO: 1701112 - RNA, 19 nt, Homo sapiens
  misc_RNA (1)...(19): siRNA sense strand
cgagaucucagccauauug

SEQ ID NO: 1701113 - RNA, 19 nt, Homo sapiens
  misc_RNA (1)...(19): siRNA sense strand
gccgagaucucagccauau

SEQ ID NO: 1701114 - RNA, 19 nt, Homo sapiens
  misc_RNA (1)...(19): siRNA sense strand
agagaugaaugaaccaguu

SEQ ID NO: 1701115 - RNA, 19 nt, Homo sapiens
  misc_RNA (1)...(19): siRNA sense strand
ggagaugcuguuguaauuu

SEQ ID NO: 1701116 - RNA, 19 nt, Homo sapiens
  misc_RNA (1)...(19): siRNA sense strand
guggagaacuuggaaaugg

SEQ ID NO: 1701117 - RNA, 19 nt, Homo sapiens
  misc_RNA (1)...(19): siRNA sense strand
uaccuuggcgcuaguauuu

SEQ ID NO: 1701118 - RNA, 19 nt, Homo sapiens
  misc_RNA (1)...(19): siRNA sense strand
gcggauaugggacacuuaa

SEQ ID NO: 1701119 - RNA, 19 nt, Homo sapiens
  misc_RNA (1)...(19): siRNA sense strand
gaaguugauggauuuagau

SEQ ID NO: 1701120 - RNA, 19 nt, Homo sapiens
  misc_RNA (1)...(19): siRNA sense strand
gaacuuggaaauggaaaca

SEQ ID NO: 1701121 - RNA, 19 nt, Homo sapiens
  misc_RNA (1)...(19): siRNA sense strand
aacgaggccugcugggaua

SEQ ID NO: 1701122 - RNA, 19 nt, Homo sapiens
  misc_RNA (1)...(19): siRNA sense strand
ggagaacuuggaaauggaa

SEQ ID NO: 1701123 - RNA, 19 nt, Homo sapiens
  misc_RNA (1)...(19): siRNA sense strand
acacuaagggccgaagaua

SEQ ID NO: 1701124 - RNA, 19 nt, Homo sapiens
  misc_RNA (1)...(19): siRNA sense strand
ccuuggcgcuaguauuuga

SEQ ID NO: 1701125 - RNA, 19 nt, Homo sapiens
  misc_RNA (1)...(19): siRNA sense strand
ccacuccacucucuucaac

SEQ ID NO: 1701126 - RNA, 19 nt, Homo sapiens
  misc_RNA (1)...(19): siRNA sense strand
aggaagcuguuaccauaga

SEQ ID NO: 1701127 - RNA, 19 nt, Homo sapiens
  misc_RNA (1)...(19): siRNA sense strand
guuguaauuuccugugcaa

SEQ ID NO: 1701128 - RNA, 19 nt, Homo sapiens
  misc_RNA (1)...(19): siRNA sense strand
caacggugacacucaguau

SEQ ID NO: 1701129 - RNA, 19 nt, Homo sapiens
  misc_RNA (1)...(19): siRNA sense strand
caacuaacuuuugcacuga

SEQ ID NO: 1701130 - RNA, 19 nt, Homo sapiens
  misc_RNA (1)...(19): siRNA sense strand
gcuguuaccauagagauga

SEQ ID NO: 1701131 - RNA, 19 nt, Homo sapiens
  misc_RNA (1)...(19): siRNA sense strand
uaaagaggaggaagcuguu

SEQ ID NO: 1701132 - RNA, 19 nt, Homo sapiens
  misc_RNA (1)...(19): siRNA sense strand
gaagauaacgcggauaccu

SEQ ID NO: 1701133 - RNA, 19 nt, Homo sapiens
  misc_RNA (1)...(19): siRNA sense strand
caaaagacggagugaaauu

SEQ ID NO: 1701134 - RNA, 19 nt, Homo sapiens
  misc_RNA (1)...(19): siRNA sense strand
caccaaaccaggagaaagu

SEQ ID NO: 1701135 - RNA, 19 nt, Homo sapiens
  misc_RNA (1)...(19): siRNA sense strand
ugauggauuuagauguuga

SEQ ID NO: 1701136 - RNA, 19 nt, Homo sapiens
  misc_RNA (1)...(19): siRNA sense strand
ggauaugggacacuuaaaa

SEQ ID NO: 1701137 - RNA, 19 nt, Homo sapiens
  misc_RNA (1)...(19): siRNA sense strand
cucccaagaucgaggauga

SEQ ID NO: 1701138 - RNA, 19 nt, Homo sapiens
  misc_RNA (1)...(19): siRNA sense strand
cacuaagggccgaagauaa

SEQ ID NO: 1701139 - RNA, 19 nt, Homo sapiens
  misc_RNA (1)...(19): siRNA sense strand
uggugaauuugcacguaua

SEQ ID NO: 1701140 - RNA, 19 nt, Homo sapiens
  misc_RNA (1)...(19): siRNA sense strand
gcacucaaggaccucauca

SEQ ID NO: 1701141 - RNA, 19 nt, Homo sapiens
  misc_RNA (1)...(19): siRNA sense strand
gcuccauccucaagaaggu

SEQ ID NO: 1701142 - RNA, 19 nt, Homo sapiens
  misc_RNA (1)...(19): siRNA sense strand
ggaagcuguuaccauagag

SEQ ID NO: 1701143 - RNA, 19 nt, Homo sapiens
  misc_RNA (1)...(19): siRNA sense strand
uggagaacuuggaaaugga

SEQ ID NO: 1701144 - RNA, 19 nt, Homo sapiens
  misc_RNA (1)...(19): siRNA sense strand
gaagcuguuaccauagaga

SEQ ID NO: 1701145 - RNA, 19 nt, Homo sapiens
  misc_RNA (1)...(19): siRNA sense strand
guaccugaacuucuuuaca

SEQ ID NO: 1701146 - RNA, 19 nt, Homo sapiens
  misc_RNA (1)...(19): siRNA sense strand
gaauuccagaacaggagua

SEQ ID NO: 1701147 - RNA, 19 nt, Homo sapiens
  misc_RNA (1)...(19): siRNA sense strand
aaagaggaggaagcuguua

SEQ ID NO: 1701148 - RNA, 19 nt, Homo sapiens
  misc_RNA (1)...(19): siRNA sense strand
gcaccaaaccaggagaaag

SEQ ID NO: 1701149 - RNA, 19 nt, Homo sapiens
  misc_RNA (1)...(19): siRNA sense strand
gcagauguaccccuuguug

SEQ ID NO: 1701150 - RNA, 19 nt, Homo sapiens
  misc_RNA (1)...(19): siRNA sense strand
ugaauuugcacguauaugc

SEQ ID NO: 1701151 - RNA, 19 nt, Homo sapiens
  misc_RNA (1)...(19): siRNA sense strand
cagacuaugaaaugaaguu

SEQ ID NO: 1701152 - RNA, 19 nt, Homo sapiens
  misc_RNA (1)...(19): siRNA sense strand
gagguaccugaacuucuuu

SEQ ID NO: 1701153 - RNA, 19 nt, Homo sapiens
  misc_RNA (1)...(19): siRNA sense strand
ucuggugaauuugcacgua

SEQ ID NO: 1701154 - RNA, 19 nt, Homo sapiens
  misc_RNA (1)...(19): siRNA sense strand
guaguaaagaugccuucug

SEQ ID NO: 1701155 - RNA, 19 nt, Homo sapiens
  misc_RNA (1)...(19): siRNA sense strand
gacuaugaaaugaaguuga

SEQ ID NO: 1701156 - RNA, 19 nt, Homo sapiens
  misc_RNA (1)...(19): siRNA sense strand
gaggaagcuguuaccauag

SEQ ID NO: 1701157 - RNA, 19 nt, Homo sapiens
  misc_RNA (1)...(19): siRNA sense strand
gauaugggacacuuaaaau

SEQ ID NO: 1701158 - RNA, 19 nt, Homo sapiens
  misc_RNA (1)...(19): siRNA sense strand
ucaacggugacacucagua

SEQ ID NO: 1701159 - RNA, 19 nt, Homo sapiens
  misc_RNA (1)...(19): siRNA sense strand
aagauaacgcggauaccuu

SEQ ID NO: 1701160 - RNA, 19 nt, Homo sapiens
  misc_RNA (1)...(19): siRNA sense strand
ggugaauuugcacguauau

SEQ ID NO: 1701161 - RNA, 19 nt, Homo sapiens
  misc_RNA (1)...(19): siRNA sense strand
cuggugaauuugcacguau

SEQ ID NO: 1701162 - RNA, 19 nt, Homo sapiens
  misc_RNA (1)...(19): siRNA sense strand
caaagaaguugcucaggua

SEQ ID NO: 1701163 - RNA, 19 nt, Homo sapiens
  misc_RNA (1)...(19): siRNA sense strand
gcaacuagcacugguauua

SEQ ID NO: 1701164 - RNA, 19 nt, Homo sapiens
  misc_RNA (1)...(19): siRNA sense strand
gaaagucaguuugucuuaa

SEQ ID NO: 1701165 - RNA, 19 nt, Homo sapiens
  misc_RNA (1)...(19): siRNA sense strand
gaacaacugcgagcaaaua

SEQ ID NO: 1701166 - RNA, 19 nt, Homo sapiens
  misc_RNA (1)...(19): siRNA sense strand
gguagaagcuaacaaugaa

SEQ ID NO: 1701167 - RNA, 19 nt, Homo sapiens
  misc_RNA (1)...(19): siRNA sense strand
gcagauacaugguguucaa

SEQ ID NO: 1701168 - RNA, 19 nt, Homo sapiens
  misc_RNA (1)...(19): siRNA sense strand
ggaccuagguacucucuau

SEQ ID NO: 1701169 - RNA, 19 nt, Homo sapiens
  misc_RNA (1)...(19): siRNA sense strand
ggaagguguuauucaagua

SEQ ID NO: 1701170 - RNA, 19 nt, Homo sapiens
  misc_RNA (1)...(19): siRNA sense strand
ggaaguaucauucugcaaa

SEQ ID NO: 1701171 - RNA, 19 nt, Homo sapiens
  misc_RNA (1)...(19): siRNA sense strand
ucaagggacuuucuaauca

SEQ ID NO: 1701172 - RNA, 19 nt, Homo sapiens
  misc_RNA (1)...(19): siRNA sense strand
gaacauaugguagaaguga

SEQ ID NO: 1701173 - RNA, 19 nt, Homo sapiens
  misc_RNA (1)...(19): siRNA sense strand
caagauguccuuuauguug

SEQ ID NO: 1701174 - RNA, 19 nt, Homo sapiens
  misc_RNA (1)...(19): siRNA sense strand
caauagaucucauacuaca

SEQ ID NO: 1701175 - RNA, 19 nt, Homo sapiens
  misc_RNA (1)...(19): siRNA sense strand
ugcuggagcucuuaaauua

SEQ ID NO: 1701176 - RNA, 19 nt, Homo sapiens
  misc_RNA (1)...(19): siRNA sense strand
gaaauuacagcacuuggaa

SEQ ID NO: 1701177 - RNA, 19 nt, Homo sapiens
  misc_RNA (1)...(19): siRNA sense strand
gaaagcaauagaucucaua

SEQ ID NO: 1701178 - RNA, 19 nt, Homo sapiens
  misc_RNA (1)...(19): siRNA sense strand
uaauauggaucuaguagga

SEQ ID NO: 1701179 - RNA, 19 nt, Homo sapiens
  misc_RNA (1)...(19): siRNA sense strand
uaaacgugaugcuuucuuu

SEQ ID NO: 1701180 - RNA, 19 nt, Homo sapiens
  misc_RNA (1)...(19): siRNA sense strand
ggaggcauaugaacaacuu

SEQ ID NO: 1701181 - RNA, 19 nt, Homo sapiens
  misc_RNA (1)...(19): siRNA sense strand
gcucuuaaauuagaucuug

SEQ ID NO: 1701182 - RNA, 19 nt, Homo sapiens
  misc_RNA (1)...(19): siRNA sense strand
gaacuacuggaauucauaa

SEQ ID NO: 1701183 - RNA, 19 nt, Homo sapiens
  misc_RNA (1)...(19): siRNA sense strand
caauagguguguuguauca

SEQ ID NO: 1701184 - RNA, 19 nt, Homo sapiens
  misc_RNA (1)...(19): siRNA sense strand
gcaaaugagacacaaagaa

SEQ ID NO: 1701185 - RNA, 19 nt, Homo sapiens
  misc_RNA (1)...(19): siRNA sense strand
gaaacaagcaggcauacug

SEQ ID NO: 1701186 - RNA, 19 nt, Homo sapiens
  misc_RNA (1)...(19): siRNA sense strand
gaagugaaaguaauggaaa

SEQ ID NO: 1701187 - RNA, 19 nt, Homo sapiens
  misc_RNA (1)...(19): siRNA sense strand
gguacgaacuacuggaauu

SEQ ID NO: 1701188 - RNA, 19 nt, Homo sapiens
  misc_RNA (1)...(19): siRNA sense strand
ccaauuaggucacuucaac

SEQ ID NO: 1701189 - RNA, 19 nt, Homo sapiens
  misc_RNA (1)...(19): siRNA sense strand
agcaauagaucucauacua

SEQ ID NO: 1701190 - RNA, 19 nt, Homo sapiens
  misc_RNA (1)...(19): siRNA sense strand
gagcagagaagcauaaaca

SEQ ID NO: 1701191 - RNA, 19 nt, Homo sapiens
  misc_RNA (1)...(19): siRNA sense strand
gaagcaaacguuguaguaa

SEQ ID NO: 1701192 - RNA, 19 nt, Homo sapiens
  misc_RNA (1)...(19): siRNA sense strand
gggcucauguucaaaguga

SEQ ID NO: 1701193 - RNA, 19 nt, Homo sapiens
  misc_RNA (1)...(19): siRNA sense strand
gaagauggcgccagaacga

SEQ ID NO: 1701194 - RNA, 19 nt, Homo sapiens
  misc_RNA (1)...(19): siRNA sense strand
gaaaauggcggaaggaaaa

SEQ ID NO: 1701195 - RNA, 19 nt, Homo sapiens
  misc_RNA (1)...(19): siRNA sense strand
uagguuggaugcaucauaa

SEQ ID NO: 1701196 - RNA, 19 nt, Homo sapiens
  misc_RNA (1)...(19): siRNA sense strand
aaaccuuccugcacaagua

SEQ ID NO: 1701197 - RNA, 19 nt, Homo sapiens
  misc_RNA (1)...(19): siRNA sense strand
cuacaagucuaguuuaaag

SEQ ID NO: 1701198 - RNA, 19 nt, Homo sapiens
  misc_RNA (1)...(19): siRNA sense strand
gaucuuaccaucaauguca

SEQ ID NO: 1701199 - RNA, 19 nt, Homo sapiens
  misc_RNA (1)...(19): siRNA sense strand
ucucagaucuuaccaucaa

SEQ ID NO: 1701200 - RNA, 19 nt, Homo sapiens
  misc_RNA (1)...(19): siRNA sense strand
gaaaacagcuaucuaacuc

SEQ ID NO: 1701201 - RNA, 19 nt, Homo sapiens
  misc_RNA (1)...(19): siRNA sense strand
gcuaggcaguaauuguaua

SEQ ID NO: 1701202 - RNA, 19 nt, Homo sapiens
  misc_RNA (1)...(19): siRNA sense strand
ggaggcagauccuaauucu

SEQ ID NO: 1701203 - RNA, 19 nt, Homo sapiens
  misc_RNA (1)...(19): siRNA sense strand
ggaaagcuaugcuauucag

SEQ ID NO: 1701204 - RNA, 19 nt, Homo sapiens
  misc_RNA (1)...(19): siRNA sense strand
ggacaacaaggcauuaugu

SEQ ID NO: 1701205 - RNA, 19 nt, Homo sapiens
  misc_RNA (1)...(19): siRNA sense strand
gcuagaagcaaacguugua

SEQ ID NO: 1701206 - RNA, 19 nt, Homo sapiens
  misc_RNA (1)...(19): siRNA sense strand
gauacaugguguucaauag

SEQ ID NO: 1701207 - RNA, 19 nt, Homo sapiens
  misc_RNA (1)...(19): siRNA sense strand
gcaacaccuucuccuaaau

SEQ ID NO: 1701208 - RNA, 19 nt, Homo sapiens
  misc_RNA (1)...(19): siRNA sense strand
gcauuauguuuaccaaaga

SEQ ID NO: 1701209 - RNA, 19 nt, Homo sapiens
  misc_RNA (1)...(19): siRNA sense strand
agacaaagccacaaaggaa

SEQ ID NO: 1701210 - RNA, 19 nt, Homo sapiens
  misc_RNA (1)...(19): siRNA sense strand
gaagcuaacaaugaacaua

SEQ ID NO: 1701211 - RNA, 19 nt, Homo sapiens
  misc_RNA (1)...(19): siRNA sense strand
ucacagagcucuacaaaag

SEQ ID NO: 1701212 - RNA, 19 nt, Homo sapiens
  misc_RNA (1)...(19): siRNA sense strand
ccauggagauucaccaaau

SEQ ID NO: 1701213 - RNA, 19 nt, Homo sapiens
  misc_RNA (1)...(19): siRNA sense strand
guaauggaaaugugccuua

SEQ ID NO: 1701214 - RNA, 19 nt, Homo sapiens
  misc_RNA (1)...(19): siRNA sense strand
gcaaggcuguucgcugcua

SEQ ID NO: 1701215 - RNA, 19 nt, Homo sapiens
  misc_RNA (1)...(19): siRNA sense strand
aaacuuugguagaagcuaa

SEQ ID NO: 1701216 - RNA, 19 nt, Homo sapiens
  misc_RNA (1)...(19): siRNA sense strand
cuacaaacucugucucuaa

SEQ ID NO: 1701217 - RNA, 19 nt, Homo sapiens
  misc_RNA (1)...(19): siRNA sense strand
agcaaacguuguaguaaua

SEQ ID NO: 1701218 - RNA, 19 nt, Homo sapiens
  misc_RNA (1)...(19): siRNA sense strand
caggaugccuuuauaucuu

SEQ ID NO: 1701219 - RNA, 19 nt, Homo sapiens
  misc_RNA (1)...(19): siRNA sense strand
gaaguaucauucugcaaag

SEQ ID NO: 1701220 - RNA, 19 nt, Homo sapiens
  misc_RNA (1)...(19): siRNA sense strand
ggagaaaacagcuaucuaa

SEQ ID NO: 1701221 - RNA, 19 nt, Homo sapiens
  misc_RNA (1)...(19): siRNA sense strand
cagcaacaccuucuccuaa

SEQ ID NO: 1701222 - RNA, 19 nt, Homo sapiens
  misc_RNA (1)...(19): siRNA sense strand
cuaaucauguucaucaguu

SEQ ID NO: 1701223 - RNA, 19 nt, Homo sapiens
  misc_RNA (1)...(19): siRNA sense strand
gcaauuaaagcauuucaag

SEQ ID NO: 1701224 - RNA, 19 nt, Homo sapiens
  misc_RNA (1)...(19): siRNA sense strand
aaauaaacgugaugcuuuc

SEQ ID NO: 1701225 - RNA, 19 nt, Homo sapiens
  misc_RNA (1)...(19): siRNA sense strand
guauuaagaaggcgaauga

SEQ ID NO: 1701226 - RNA, 19 nt, Homo sapiens
  misc_RNA (1)...(19): siRNA sense strand
gucaggaccuaaugaagaa

SEQ ID NO: 1701227 - RNA, 19 nt, Homo sapiens
  misc_RNA (1)...(19): siRNA sense strand
gccagagucuuucacauca

SEQ ID NO: 1701228 - RNA, 19 nt, Homo sapiens
  misc_RNA (1)...(19): siRNA sense strand
gcuaugcuauucaguaucu

SEQ ID NO: 1701229 - RNA, 19 nt, Homo sapiens
  misc_RNA (1)...(19): siRNA sense strand
aaggaaagcuaugcuauuc

SEQ ID NO: 1701230 - RNA, 19 nt, Homo sapiens
  misc_RNA (1)...(19): siRNA sense strand
caaugucagugucuauaug

SEQ ID NO: 1701231 - RNA, 19 nt, Homo sapiens
  misc_RNA (1)...(19): siRNA sense strand
cuuaaaagcugaaggaaaa

SEQ ID NO: 1701232 - RNA, 19 nt, Homo sapiens
  misc_RNA (1)...(19): siRNA sense strand
ggagauucaccaaauuuau

SEQ ID NO: 1701233 - RNA, 19 nt, Homo sapiens
  misc_RNA (1)...(19): siRNA sense strand
agucaccucuccugucaua

SEQ ID NO: 1701234 - RNA, 19 nt, Homo sapiens
  misc_RNA (1)...(19): siRNA sense strand
caaaggaaagcuaugcuau

SEQ ID NO: 1701235 - RNA, 19 nt, Homo sapiens
  misc_RNA (1)...(19): siRNA sense strand
ucacccagcuguucauaca

SEQ ID NO: 1701236 - RNA, 19 nt, Homo sapiens
  misc_RNA (1)...(19): siRNA sense strand
caacuagcacugguauuaa

SEQ ID NO: 1701237 - RNA, 19 nt, Homo sapiens
  misc_RNA (1)...(19): siRNA sense strand
ggaagugaaaguaauggaa

SEQ ID NO: 1701238 - RNA, 19 nt, Homo sapiens
  misc_RNA (1)...(19): siRNA sense strand
caaaugagacacaaagaag

SEQ ID NO: 1701239 - RNA, 19 nt, Homo sapiens
  misc_RNA (1)...(19): siRNA sense strand
aaaugcagcuagaagcaaa

SEQ ID NO: 1701240 - RNA, 19 nt, Homo sapiens
  misc_RNA (1)...(19): siRNA sense strand
gcuauucaguaucuccaaa

SEQ ID NO: 1701241 - RNA, 19 nt, Homo sapiens
  misc_RNA (1)...(19): siRNA sense strand
caaaggaggcauaugaaca

SEQ ID NO: 1701242 - RNA, 19 nt, Homo sapiens
  misc_RNA (1)...(19): siRNA sense strand
auacaaagacugaucauuc

SEQ ID NO: 1701243 - RNA, 19 nt, Homo sapiens
  misc_RNA (1)...(19): siRNA sense strand
ucagcucucugcuuuguug

SEQ ID NO: 1701244 - RNA, 19 nt, Homo sapiens
  misc_RNA (1)...(19): siRNA sense strand
ggcauuauguuuaccaaag

SEQ ID NO: 1701245 - RNA, 19 nt, Homo sapiens
  misc_RNA (1)...(19): siRNA sense strand
ugacuucuuuugccaauua

SEQ ID NO: 1701246 - RNA, 19 nt, Homo sapiens
  misc_RNA (1)...(19): siRNA sense strand
aagcaaacguuguaguaau

SEQ ID NO: 1701247 - RNA, 19 nt, Homo sapiens
  misc_RNA (1)...(19): siRNA sense strand
aggaugccuuuauaucuua

SEQ ID NO: 1701248 - RNA, 19 nt, Homo sapiens
  misc_RNA (1)...(19): siRNA sense strand
gcaaguuuauucguugugu

SEQ ID NO: 1701249 - RNA, 19 nt, Homo sapiens
  misc_RNA (1)...(19): siRNA sense strand
caaugaacauaugguagaa

SEQ ID NO: 1701250 - RNA, 19 nt, Homo sapiens
  misc_RNA (1)...(19): siRNA sense strand
uaaauccacugagcagaga

SEQ ID NO: 1701251 - RNA, 19 nt, Homo sapiens
  misc_RNA (1)...(19): siRNA sense strand
cagaagagccauggagaaa

SEQ ID NO: 1701252 - RNA, 19 nt, Homo sapiens
  misc_RNA (1)...(19): siRNA sense strand
agaagcaaacguuguagua

SEQ ID NO: 1701253 - RNA, 19 nt, Homo sapiens
  misc_RNA (1)...(19): siRNA sense strand
cauggagauucaccaaauu

SEQ ID NO: 1701254 - RNA, 19 nt, Homo sapiens
  misc_RNA (1)...(19): siRNA sense strand
aaagucagaguucauguuu

SEQ ID NO: 1701255 - RNA, 19 nt, Homo sapiens
  misc_RNA (1)...(19): siRNA sense strand
ugaaaguaauggaaaugug

SEQ ID NO: 1701256 - RNA, 19 nt, Homo sapiens
  misc_RNA (1)...(19): siRNA sense strand
gacaaagccacaaaggaaa

SEQ ID NO: 1701257 - RNA, 19 nt, Homo sapiens
  misc_RNA (1)...(19): siRNA sense strand
ccacccacaccuaguauuu

SEQ ID NO: 1701258 - RNA, 19 nt, Homo sapiens
  misc_RNA (1)...(19): siRNA sense strand
gcucucugcuuuguugauu

SEQ ID NO: 1701259 - RNA, 19 nt, Homo sapiens
  misc_RNA (1)...(19): siRNA sense strand
uacaaacucugucucuaau

SEQ ID NO: 1701260 - RNA, 19 nt, Homo sapiens
  misc_RNA (1)...(19): siRNA sense strand
auucaucacugccuacaaa

SEQ ID NO: 1701261 - RNA, 19 nt, Homo sapiens
  misc_RNA (1)...(19): siRNA sense strand
gaagguguuauucaaguau

SEQ ID NO: 1701262 - RNA, 19 nt, Homo sapiens
  misc_RNA (1)...(19): siRNA sense strand
caaagaaguugcucaggua

SEQ ID NO: 1701263 - RNA, 19 nt, Homo sapiens
  misc_RNA (1)...(19): siRNA sense strand
gcaacuagcacugguauua

SEQ ID NO: 1701264 - RNA, 19 nt, Homo sapiens
  misc_RNA (1)...(19): siRNA sense strand
gaaagucaguuugucuuaa

SEQ ID NO: 1701265 - RNA, 19 nt, Homo sapiens
  misc_RNA (1)...(19): siRNA sense strand
gaacaacugcgagcaaaua

SEQ ID NO: 1701266 - RNA, 19 nt, Homo sapiens
  misc_RNA (1)...(19): siRNA sense strand
gguagaagcuaacaaugaa

SEQ ID NO: 1701267 - RNA, 19 nt, Homo sapiens
  misc_RNA (1)...(19): siRNA sense strand
gcagauacaugguguucaa

SEQ ID NO: 1701268 - RNA, 19 nt, Homo sapiens
  misc_RNA (1)...(19): siRNA sense strand
ggaccuagguacucucuau

SEQ ID NO: 1701269 - RNA, 19 nt, Homo sapiens
  misc_RNA (1)...(19): siRNA sense strand
ggaagguguuauucaagua

SEQ ID NO: 1701270 - RNA, 19 nt, Homo sapiens
  misc_RNA (1)...(19): siRNA sense strand
ggaaguaucauucugcaaa

SEQ ID NO: 1701271 - RNA, 19 nt, Homo sapiens
  misc_RNA (1)...(19): siRNA sense strand
ucaagggacuuucuaauca

SEQ ID NO: 1701272 - RNA, 19 nt, Homo sapiens
  misc_RNA (1)...(19): siRNA sense strand
gaacauaugguagaaguga

SEQ ID NO: 1701273 - RNA, 19 nt, Homo sapiens
  misc_RNA (1)...(19): siRNA sense strand
caagauguccuuuauguug

SEQ ID NO: 1701274 - RNA, 19 nt, Homo sapiens
  misc_RNA (1)...(19): siRNA sense strand
caauagaucucauacuaca

SEQ ID NO: 1701275 - RNA, 19 nt, Homo sapiens
  misc_RNA (1)...(19): siRNA sense strand
ugcuggagcucuuaaauua

SEQ ID NO: 1701276 - RNA, 19 nt, Homo sapiens
  misc_RNA (1)...(19): siRNA sense strand
gaaauuacagcacuuggaa

SEQ ID NO: 1701277 - RNA, 19 nt, Homo sapiens
  misc_RNA (1)...(19): siRNA sense strand
gaaagcaauagaucucaua

SEQ ID NO: 1701278 - RNA, 19 nt, Homo sapiens
  misc_RNA (1)...(19): siRNA sense strand
uaauauggaucuaguagga

SEQ ID NO: 1701279 - RNA, 19 nt, Homo sapiens
  misc_RNA (1)...(19): siRNA sense strand
uaaacgugaugcuuucuuu

SEQ ID NO: 1701280 - RNA, 19 nt, Homo sapiens
  misc_RNA (1)...(19): siRNA sense strand
ggaggcauaugaacaacuu

SEQ ID NO: 1701281 - RNA, 19 nt, Homo sapiens
  misc_RNA (1)...(19): siRNA sense strand
gcucuuaaauuagaucuug

SEQ ID NO: 1701282 - RNA, 19 nt, Homo sapiens
  misc_RNA (1)...(19): siRNA sense strand
gaacuacuggaauucauaa

SEQ ID NO: 1701283 - RNA, 19 nt, Homo sapiens
  misc_RNA (1)...(19): siRNA sense strand
caauagguguguuguauca

SEQ ID NO: 1701284 - RNA, 19 nt, Homo sapiens
  misc_RNA (1)...(19): siRNA sense strand
gcaaaugagacacaaagaa

SEQ ID NO: 1701285 - RNA, 19 nt, Homo sapiens
  misc_RNA (1)...(19): siRNA sense strand
gaaacaagcaggcauacug

SEQ ID NO: 1701286 - RNA, 19 nt, Homo sapiens
  misc_RNA (1)...(19): siRNA sense strand
gaagugaaaguaauggaaa

SEQ ID NO: 1701287 - RNA, 19 nt, Homo sapiens
  misc_RNA (1)...(19): siRNA sense strand
gguacgaacuacuggaauu

SEQ ID NO: 1701288 - RNA, 19 nt, Homo sapiens
  misc_RNA (1)...(19): siRNA sense strand
ccaauuaggucacuucaac

SEQ ID NO: 1701289 - RNA, 19 nt, Homo sapiens
  misc_RNA (1)...(19): siRNA sense strand
agcaauagaucucauacua

SEQ ID NO: 1701290 - RNA, 19 nt, Homo sapiens
  misc_RNA (1)...(19): siRNA sense strand
gagcagagaagcauaaaca

SEQ ID NO: 1701291 - RNA, 19 nt, Homo sapiens
  misc_RNA (1)...(19): siRNA sense strand
gaagcaaacguuguaguaa

SEQ ID NO: 1701292 - RNA, 19 nt, Homo sapiens
  misc_RNA (1)...(19): siRNA sense strand
gggcucauguucaaaguga

SEQ ID NO: 1701293 - RNA, 19 nt, Homo sapiens
  misc_RNA (1)...(19): siRNA sense strand
gaagauggcgccagaacga

SEQ ID NO: 1701294 - RNA, 19 nt, Homo sapiens
  misc_RNA (1)...(19): siRNA sense strand
gaaaauggcggaaggaaaa

SEQ ID NO: 1701295 - RNA, 19 nt, Homo sapiens
  misc_RNA (1)...(19): siRNA sense strand
uagguuggaugcaucauaa

SEQ ID NO: 1701296 - RNA, 19 nt, Homo sapiens
  misc_RNA (1)...(19): siRNA sense strand
aaaccuuccugcacaagua

SEQ ID NO: 1701297 - RNA, 19 nt, Homo sapiens
  misc_RNA (1)...(19): siRNA sense strand
cuacaagucuaguuuaaag

SEQ ID NO: 1701298 - RNA, 19 nt, Homo sapiens
  misc_RNA (1)...(19): siRNA sense strand
gaucuuaccaucaauguca

SEQ ID NO: 1701299 - RNA, 19 nt, Homo sapiens
  misc_RNA (1)...(19): siRNA sense strand
ucucagaucuuaccaucaa

SEQ ID NO: 1701300 - RNA, 19 nt, Homo sapiens
  misc_RNA (1)...(19): siRNA sense strand
gaaaacagcuaucuaacuc

SEQ ID NO: 1701301 - RNA, 19 nt, Homo sapiens
  misc_RNA (1)...(19): siRNA sense strand
gcuaggcaguaauuguaua

SEQ ID NO: 1701302 - RNA, 19 nt, Homo sapiens
  misc_RNA (1)...(19): siRNA sense strand
ggaggcagauccuaauucu

SEQ ID NO: 1701303 - RNA, 19 nt, Homo sapiens
  misc_RNA (1)...(19): siRNA sense strand
ggaaagcuaugcuauucag

SEQ ID NO: 1701304 - RNA, 19 nt, Homo sapiens
  misc_RNA (1)...(19): siRNA sense strand
ggacaacaaggcauuaugu

SEQ ID NO: 1701305 - RNA, 19 nt, Homo sapiens
  misc_RNA (1)...(19): siRNA sense strand
gcuagaagcaaacguugua

SEQ ID NO: 1701306 - RNA, 19 nt, Homo sapiens
  misc_RNA (1)...(19): siRNA sense strand
gauacaugguguucaauag

SEQ ID NO: 1701307 - RNA, 19 nt, Homo sapiens
  misc_RNA (1)...(19): siRNA sense strand
gcaacaccuucuccuaaau

SEQ ID NO: 1701308 - RNA, 19 nt, Homo sapiens
  misc_RNA (1)...(19): siRNA sense strand
gcauuauguuuaccaaaga

SEQ ID NO: 1701309 - RNA, 19 nt, Homo sapiens
  misc_RNA (1)...(19): siRNA sense strand
agacaaagccacaaaggaa

SEQ ID NO: 1701310 - RNA, 19 nt, Homo sapiens
  misc_RNA (1)...(19): siRNA sense strand
gaagcuaacaaugaacaua

SEQ ID NO: 1701311 - RNA, 19 nt, Homo sapiens
  misc_RNA (1)...(19): siRNA sense strand
ucacagagcucuacaaaag

SEQ ID NO: 1701312 - RNA, 19 nt, Homo sapiens
  misc_RNA (1)...(19): siRNA sense strand
ccauggagauucaccaaau

SEQ ID NO: 1701313 - RNA, 19 nt, Homo sapiens
  misc_RNA (1)...(19): siRNA sense strand
guaauggaaaugugccuua

SEQ ID NO: 1701314 - RNA, 19 nt, Homo sapiens
  misc_RNA (1)...(19): siRNA sense strand
gcaaggcuguucgcugcua

SEQ ID NO: 1701315 - RNA, 19 nt, Homo sapiens
  misc_RNA (1)...(19): siRNA sense strand
aaacuuugguagaagcuaa

SEQ ID NO: 1701316 - RNA, 19 nt, Homo sapiens
  misc_RNA (1)...(19): siRNA sense strand
cuacaaacucugucucuaa

SEQ ID NO: 1701317 - RNA, 19 nt, Homo sapiens
  misc_RNA (1)...(19): siRNA sense strand
agcaaacguuguaguaaua

SEQ ID NO: 1701318 - RNA, 19 nt, Homo sapiens
  misc_RNA (1)...(19): siRNA sense strand
caggaugccuuuauaucuu

SEQ ID NO: 1701319 - RNA, 19 nt, Homo sapiens
  misc_RNA (1)...(19): siRNA sense strand
gaaguaucauucugcaaag

SEQ ID NO: 1701320 - RNA, 19 nt, Homo sapiens
  misc_RNA (1)...(19): siRNA sense strand
ggagaaaacagcuaucuaa

SEQ ID NO: 1701321 - RNA, 19 nt, Homo sapiens
  misc_RNA (1)...(19): siRNA sense strand
cagcaacaccuucuccuaa

SEQ ID NO: 1701322 - RNA, 19 nt, Homo sapiens
  misc_RNA (1)...(19): siRNA sense strand
cuaaucauguucaucaguu

SEQ ID NO: 1701323 - RNA, 19 nt, Homo sapiens
  misc_RNA (1)...(19): siRNA sense strand
gcaauuaaagcauuucaag

SEQ ID NO: 1701324 - RNA, 19 nt, Homo sapiens
  misc_RNA (1)...(19): siRNA sense strand
aaauaaacgugaugcuuuc

SEQ ID NO: 1701325 - RNA, 19 nt, Homo sapiens
  misc_RNA (1)...(19): siRNA sense strand
guauuaagaaggcgaauga

SEQ ID NO: 1701326 - RNA, 19 nt, Homo sapiens
  misc_RNA (1)...(19): siRNA sense strand
gucaggaccuaaugaagaa

SEQ ID NO: 1701327 - RNA, 19 nt, Homo sapiens
  misc_RNA (1)...(19): siRNA sense strand
gccagagucuuucacauca

SEQ ID NO: 1701328 - RNA, 19 nt, Homo sapiens
  misc_RNA (1)...(19): siRNA sense strand
gcuaugcuauucaguaucu

SEQ ID NO: 1701329 - RNA, 19 nt, Homo sapiens
  misc_RNA (1)...(19): siRNA sense strand
aaggaaagcuaugcuauuc

SEQ ID NO: 1701330 - RNA, 19 nt, Homo sapiens
  misc_RNA (1)...(19): siRNA sense strand
caaugucagugucuauaug

SEQ ID NO: 1701331 - RNA, 19 nt, Homo sapiens
  misc_RNA (1)...(19): siRNA sense strand
cuuaaaagcugaaggaaaa

SEQ ID NO: 1701332 - RNA, 19 nt, Homo sapiens
  misc_RNA (1)...(19): siRNA sense strand
ggagauucaccaaauuuau

SEQ ID NO: 1701333 - RNA, 19 nt, Homo sapiens
  misc_RNA (1)...(19): siRNA sense strand
agucaccucuccugucaua

SEQ ID NO: 1701334 - RNA, 19 nt, Homo sapiens
  misc_RNA (1)...(19): siRNA sense strand
caaaggaaagcuaugcuau

SEQ ID NO: 1701335 - RNA, 19 nt, Homo sapiens
  misc_RNA (1)...(19): siRNA sense strand
ucacccagcuguucauaca

SEQ ID NO: 1701336 - RNA, 19 nt, Homo sapiens
  misc_RNA (1)...(19): siRNA sense strand
caacuagcacugguauuaa

SEQ ID NO: 1701337 - RNA, 19 nt, Homo sapiens
  misc_RNA (1)...(19): siRNA sense strand
ggaagugaaaguaauggaa

SEQ ID NO: 1701338 - RNA, 19 nt, Homo sapiens
  misc_RNA (1)...(19): siRNA sense strand
caaaugagacacaaagaag

SEQ ID NO: 1701339 - RNA, 19 nt, Homo sapiens
  misc_RNA (1)...(19): siRNA sense strand
aaaugcagcuagaagcaaa

SEQ ID NO: 1701340 - RNA, 19 nt, Homo sapiens
  misc_RNA (1)...(19): siRNA sense strand
gcuauucaguaucuccaaa

SEQ ID NO: 1701341 - RNA, 19 nt, Homo sapiens
  misc_RNA (1)...(19): siRNA sense strand
caaaggaggcauaugaaca

SEQ ID NO: 1701342 - RNA, 19 nt, Homo sapiens
  misc_RNA (1)...(19): siRNA sense strand
auacaaagacugaucauuc

SEQ ID NO: 1701343 - RNA, 19 nt, Homo sapiens
  misc_RNA (1)...(19): siRNA sense strand
ucagcucucugcuuuguug

SEQ ID NO: 1701344 - RNA, 19 nt, Homo sapiens
  misc_RNA (1)...(19): siRNA sense strand
ggcauuauguuuaccaaag

SEQ ID NO: 1701345 - RNA, 19 nt, Homo sapiens
  misc_RNA (1)...(19): siRNA sense strand
ugacuucuuuugccaauua

SEQ ID NO: 1701346 - RNA, 19 nt, Homo sapiens
  misc_RNA (1)...(19): siRNA sense strand
aagcaaacguuguaguaau

SEQ ID NO: 1701347 - RNA, 19 nt, Homo sapiens
  misc_RNA (1)...(19): siRNA sense strand
aggaugccuuuauaucuua

SEQ ID NO: 1701348 - RNA, 19 nt, Homo sapiens
  misc_RNA (1)...(19): siRNA sense strand
gcaaguuuauucguugugu

SEQ ID NO: 1701349 - RNA, 19 nt, Homo sapiens
  misc_RNA (1)...(19): siRNA sense strand
caaugaacauaugguagaa

SEQ ID NO: 1701350 - RNA, 19 nt, Homo sapiens
  misc_RNA (1)...(19): siRNA sense strand
uaaauccacugagcagaga

SEQ ID NO: 1701351 - RNA, 19 nt, Homo sapiens
  misc_RNA (1)...(19): siRNA sense strand
cagaagagccauggagaaa

SEQ ID NO: 1701352 - RNA, 19 nt, Homo sapiens
  misc_RNA (1)...(19): siRNA sense strand
agaagcaaacguuguagua

SEQ ID NO: 1701353 - RNA, 19 nt, Homo sapiens
  misc_RNA (1)...(19): siRNA sense strand
cauggagauucaccaaauu

SEQ ID NO: 1701354 - RNA, 19 nt, Homo sapiens
  misc_RNA (1)...(19): siRNA sense strand
aaagucagaguucauguuu

SEQ ID NO: 1701355 - RNA, 19 nt, Homo sapiens
  misc_RNA (1)...(19): siRNA sense strand
ugaaaguaauggaaaugug

SEQ ID NO: 1701356 - RNA, 19 nt, Homo sapiens
  misc_RNA (1)...(19): siRNA sense strand
gacaaagccacaaaggaaa

SEQ ID NO: 1701357 - RNA, 19 nt, Homo sapiens
  misc_RNA (1)...(19): siRNA sense strand
ccacccacaccuaguauuu

SEQ ID NO: 1701358 - RNA, 19 nt, Homo sapiens
  misc_RNA (1)...(19): siRNA sense strand
gcucucugcuuuguugauu

SEQ ID NO: 1701359 - RNA, 19 nt, Homo sapiens
  misc_RNA (1)...(19): siRNA sense strand
uacaaacucugucucuaau

SEQ ID NO: 1701360 - RNA, 19 nt, Homo sapiens
  misc_RNA (1)...(19): siRNA sense strand
auucaucacugccuacaaa

SEQ ID NO: 1701361 - RNA, 19 nt, Homo sapiens
  misc_RNA (1)...(19): siRNA sense strand
gaagguguuauucaaguau

SEQ ID NO: 1701362 - RNA, 19 nt, Homo sapiens
  misc_RNA (1)...(19): siRNA sense strand
caaagaaguugcucaggua

SEQ ID NO: 1701363 - RNA, 19 nt, Homo sapiens
  misc_RNA (1)...(19): siRNA sense strand
gcaacuagcacugguauua

SEQ ID NO: 1701364 - RNA, 19 nt, Homo sapiens
  misc_RNA (1)...(19): siRNA sense strand
gaaagucaguuugucuuaa

SEQ ID NO: 1701365 - RNA, 19 nt, Homo sapiens
  misc_RNA (1)...(19): siRNA sense strand
gaacaacugcgagcaaaua

SEQ ID NO: 1701366 - RNA, 19 nt, Homo sapiens
  misc_RNA (1)...(19): siRNA sense strand
gguagaagcuaacaaugaa

SEQ ID NO: 1701367 - RNA, 19 nt, Homo sapiens
  misc_RNA (1)...(19): siRNA sense strand
gcagauacaugguguucaa

SEQ ID NO: 1701368 - RNA, 19 nt, Homo sapiens
  misc_RNA (1)...(19): siRNA sense strand
ggaccuagguacucucuau

SEQ ID NO: 1701369 - RNA, 19 nt, Homo sapiens
  misc_RNA (1)...(19): siRNA sense strand
ggaagguguuauucaagua

SEQ ID NO: 1701370 - RNA, 19 nt, Homo sapiens
  misc_RNA (1)...(19): siRNA sense strand
ggaaguaucauucugcaaa

SEQ ID NO: 1701371 - RNA, 19 nt, Homo sapiens
  misc_RNA (1)...(19): siRNA sense strand
ucaagggacuuucuaauca

SEQ ID NO: 1701372 - RNA, 19 nt, Homo sapiens
  misc_RNA (1)...(19): siRNA sense strand
gaacauaugguagaaguga

SEQ ID NO: 1701373 - RNA, 19 nt, Homo sapiens
  misc_RNA (1)...(19): siRNA sense strand
caagauguccuuuauguug

SEQ ID NO: 1701374 - RNA, 19 nt, Homo sapiens
  misc_RNA (1)...(19): siRNA sense strand
caauagaucucauacuaca

SEQ ID NO: 1701375 - RNA, 19 nt, Homo sapiens
  misc_RNA (1)...(19): siRNA sense strand
ugcuggagcucuuaaauua

SEQ ID NO: 1701376 - RNA, 19 nt, Homo sapiens
  misc_RNA (1)...(19): siRNA sense strand
gaaauuacagcacuuggaa

SEQ ID NO: 1701377 - RNA, 19 nt, Homo sapiens
  misc_RNA (1)...(19): siRNA sense strand
gaaagcaauagaucucaua

SEQ ID NO: 1701378 - RNA, 19 nt, Homo sapiens
  misc_RNA (1)...(19): siRNA sense strand
uaauauggaucuaguagga

SEQ ID NO: 1701379 - RNA, 19 nt, Homo sapiens
  misc_RNA (1)...(19): siRNA sense strand
uaaacgugaugcuuucuuu

SEQ ID NO: 1701380 - RNA, 19 nt, Homo sapiens
  misc_RNA (1)...(19): siRNA sense strand
ggaggcauaugaacaacuu

SEQ ID NO: 1701381 - RNA, 19 nt, Homo sapiens
  misc_RNA (1)...(19): siRNA sense strand
gcucuuaaauuagaucuug

SEQ ID NO: 1701382 - RNA, 19 nt, Homo sapiens
  misc_RNA (1)...(19): siRNA sense strand
gaacuacuggaauucauaa

SEQ ID NO: 1701383 - RNA, 19 nt, Homo sapiens
  misc_RNA (1)...(19): siRNA sense strand
caauagguguguuguauca

SEQ ID NO: 1701384 - RNA, 19 nt, Homo sapiens
  misc_RNA (1)...(19): siRNA sense strand
gcaaaugagacacaaagaa

SEQ ID NO: 1701385 - RNA, 19 nt, Homo sapiens
  misc_RNA (1)...(19): siRNA sense strand
gaaacaagcaggcauacug

SEQ ID NO: 1701386 - RNA, 19 nt, Homo sapiens
  misc_RNA (1)...(19): siRNA sense strand
gaagugaaaguaauggaaa

SEQ ID NO: 1701387 - RNA, 19 nt, Homo sapiens
  misc_RNA (1)...(19): siRNA sense strand
gguacgaacuacuggaauu

SEQ ID NO: 1701388 - RNA, 19 nt, Homo sapiens
  misc_RNA (1)...(19): siRNA sense strand
ccaauuaggucacuucaac

SEQ ID NO: 1701389 - RNA, 19 nt, Homo sapiens
  misc_RNA (1)...(19): siRNA sense strand
agcaauagaucucauacua

SEQ ID NO: 1701390 - RNA, 19 nt, Homo sapiens
  misc_RNA (1)...(19): siRNA sense strand
gagcagagaagcauaaaca

SEQ ID NO: 1701391 - RNA, 19 nt, Homo sapiens
  misc_RNA (1)...(19): siRNA sense strand
gaagcaaacguuguaguaa

SEQ ID NO: 1701392 - RNA, 19 nt, Homo sapiens
  misc_RNA (1)...(19): siRNA sense strand
gggcucauguucaaaguga

SEQ ID NO: 1701393 - RNA, 19 nt, Homo sapiens
  misc_RNA (1)...(19): siRNA sense strand
gaagauggcgccagaacga

SEQ ID NO: 1701394 - RNA, 19 nt, Homo sapiens
  misc_RNA (1)...(19): siRNA sense strand
gaaaauggcggaaggaaaa

SEQ ID NO: 1701395 - RNA, 19 nt, Homo sapiens
  misc_RNA (1)...(19): siRNA sense strand
uagguuggaugcaucauaa

SEQ ID NO: 1701396 - RNA, 19 nt, Homo sapiens
  misc_RNA (1)...(19): siRNA sense strand
aaaccuuccugcacaagua

SEQ ID NO: 1701397 - RNA, 19 nt, Homo sapiens
  misc_RNA (1)...(19): siRNA sense strand
cuacaagucuaguuuaaag

SEQ ID NO: 1701398 - RNA, 19 nt, Homo sapiens
  misc_RNA (1)...(19): siRNA sense strand
gaucuuaccaucaauguca

SEQ ID NO: 1701399 - RNA, 19 nt, Homo sapiens
  misc_RNA (1)...(19): siRNA sense strand
ucucagaucuuaccaucaa

SEQ ID NO: 1701400 - RNA, 19 nt, Homo sapiens
  misc_RNA (1)...(19): siRNA sense strand
gaaaacagcuaucuaacuc

SEQ ID NO: 1701401 - RNA, 19 nt, Homo sapiens
  misc_RNA (1)...(19): siRNA sense strand
gcuaggcaguaauuguaua

SEQ ID NO: 1701402 - RNA, 19 nt, Homo sapiens
  misc_RNA (1)...(19): siRNA sense strand
ggaggcagauccuaauucu

SEQ ID NO: 1701403 - RNA, 19 nt, Homo sapiens
  misc_RNA (1)...(19): siRNA sense strand
ggaaagcuaugcuauucag

SEQ ID NO: 1701404 - RNA, 19 nt, Homo sapiens
  misc_RNA (1)...(19): siRNA sense strand
ggacaacaaggcauuaugu

SEQ ID NO: 1701405 - RNA, 19 nt, Homo sapiens
  misc_RNA (1)...(19): siRNA sense strand
gcuagaagcaaacguugua

SEQ ID NO: 1701406 - RNA, 19 nt, Homo sapiens
  misc_RNA (1)...(19): siRNA sense strand
gauacaugguguucaauag

SEQ ID NO: 1701407 - RNA, 19 nt, Homo sapiens
  misc_RNA (1)...(19): siRNA sense strand
gcaacaccuucuccuaaau

SEQ ID NO: 1701408 - RNA, 19 nt, Homo sapiens
  misc_RNA (1)...(19): siRNA sense strand
gcauuauguuuaccaaaga

SEQ ID NO: 1701409 - RNA, 19 nt, Homo sapiens
  misc_RNA (1)...(19): siRNA sense strand
agacaaagccacaaaggaa

SEQ ID NO: 1701410 - RNA, 19 nt, Homo sapiens
  misc_RNA (1)...(19): siRNA sense strand
gaagcuaacaaugaacaua

SEQ ID NO: 1701411 - RNA, 19 nt, Homo sapiens
  misc_RNA (1)...(19): siRNA sense strand
ucacagagcucuacaaaag

SEQ ID NO: 1701412 - RNA, 19 nt, Homo sapiens
  misc_RNA (1)...(19): siRNA sense strand
ccauggagauucaccaaau

SEQ ID NO: 1701413 - RNA, 19 nt, Homo sapiens
  misc_RNA (1)...(19): siRNA sense strand
guaauggaaaugugccuua

SEQ ID NO: 1701414 - RNA, 19 nt, Homo sapiens
  misc_RNA (1)...(19): siRNA sense strand
gcaaggcuguucgcugcua

SEQ ID NO: 1701415 - RNA, 19 nt, Homo sapiens
  misc_RNA (1)...(19): siRNA sense strand
aaacuuugguagaagcuaa

SEQ ID NO: 1701416 - RNA, 19 nt, Homo sapiens
  misc_RNA (1)...(19): siRNA sense strand
cuacaaacucugucucuaa

SEQ ID NO: 1701417 - RNA, 19 nt, Homo sapiens
  misc_RNA (1)...(19): siRNA sense strand
agcaaacguuguaguaaua

SEQ ID NO: 1701418 - RNA, 19 nt, Homo sapiens
  misc_RNA (1)...(19): siRNA sense strand
caggaugccuuuauaucuu

SEQ ID NO: 1701419 - RNA, 19 nt, Homo sapiens
  misc_RNA (1)...(19): siRNA sense strand
gaaguaucauucugcaaag

SEQ ID NO: 1701420 - RNA, 19 nt, Homo sapiens
  misc_RNA (1)...(19): siRNA sense strand
ggagaaaacagcuaucuaa

SEQ ID NO: 1701421 - RNA, 19 nt, Homo sapiens
  misc_RNA (1)...(19): siRNA sense strand
cagcaacaccuucuccuaa

SEQ ID NO: 1701422 - RNA, 19 nt, Homo sapiens
  misc_RNA (1)...(19): siRNA sense strand
cuaaucauguucaucaguu

SEQ ID NO: 1701423 - RNA, 19 nt, Homo sapiens
  misc_RNA (1)...(19): siRNA sense strand
gcaauuaaagcauuucaag

SEQ ID NO: 1701424 - RNA, 19 nt, Homo sapiens
  misc_RNA (1)...(19): siRNA sense strand
aaauaaacgugaugcuuuc

SEQ ID NO: 1701425 - RNA, 19 nt, Homo sapiens
  misc_RNA (1)...(19): siRNA sense strand
guauuaagaaggcgaauga

SEQ ID NO: 1701426 - RNA, 19 nt, Homo sapiens
  misc_RNA (1)...(19): siRNA sense strand
gucaggaccuaaugaagaa

SEQ ID NO: 1701427 - RNA, 19 nt, Homo sapiens
  misc_RNA (1)...(19): siRNA sense strand
gccagagucuuucacauca

SEQ ID NO: 1701428 - RNA, 19 nt, Homo sapiens
  misc_RNA (1)...(19): siRNA sense strand
gcuaugcuauucaguaucu

SEQ ID NO: 1701429 - RNA, 19 nt, Homo sapiens
  misc_RNA (1)...(19): siRNA sense strand
aaggaaagcuaugcuauuc

SEQ ID NO: 1701430 - RNA, 19 nt, Homo sapiens
  misc_RNA (1)...(19): siRNA sense strand
caaugucagugucuauaug

SEQ ID NO: 1701431 - RNA, 19 nt, Homo sapiens
  misc_RNA (1)...(19): siRNA sense strand
cuuaaaagcugaaggaaaa

SEQ ID NO: 1701432 - RNA, 19 nt, Homo sapiens
  misc_RNA (1)...(19): siRNA sense strand
ggagauucaccaaauuuau

SEQ ID NO: 1701433 - RNA, 19 nt, Homo sapiens
  misc_RNA (1)...(19): siRNA sense strand
agucaccucuccugucaua

SEQ ID NO: 1701434 - RNA, 19 nt, Homo sapiens
  misc_RNA (1)...(19): siRNA sense strand
caaaggaaagcuaugcuau

SEQ ID NO: 1701435 - RNA, 19 nt, Homo sapiens
  misc_RNA (1)...(19): siRNA sense strand
ucacccagcuguucauaca

SEQ ID NO: 1701436 - RNA, 19 nt, Homo sapiens
  misc_RNA (1)...(19): siRNA sense strand
caacuagcacugguauuaa

SEQ ID NO: 1701437 - RNA, 19 nt, Homo sapiens
  misc_RNA (1)...(19): siRNA sense strand
ggaagugaaaguaauggaa

SEQ ID NO: 1701438 - RNA, 19 nt, Homo sapiens
  misc_RNA (1)...(19): siRNA sense strand
caaaugagacacaaagaag

SEQ ID NO: 1701439 - RNA, 19 nt, Homo sapiens
  misc_RNA (1)...(19): siRNA sense strand
aaaugcagcuagaagcaaa

SEQ ID NO: 1701440 - RNA, 19 nt, Homo sapiens
  misc_RNA (1)...(19): siRNA sense strand
gcuauucaguaucuccaaa

SEQ ID NO: 1701441 - RNA, 19 nt, Homo sapiens
  misc_RNA (1)...(19): siRNA sense strand
caaaggaggcauaugaaca

SEQ ID NO: 1701442 - RNA, 19 nt, Homo sapiens
  misc_RNA (1)...(19): siRNA sense strand
auacaaagacugaucauuc

SEQ ID NO: 1701443 - RNA, 19 nt, Homo sapiens
  misc_RNA (1)...(19): siRNA sense strand
ucagcucucugcuuuguug

SEQ ID NO: 1701444 - RNA, 19 nt, Homo sapiens
  misc_RNA (1)...(19): siRNA sense strand
ggcauuauguuuaccaaag

SEQ ID NO: 1701445 - RNA, 19 nt, Homo sapiens
  misc_RNA (1)...(19): siRNA sense strand
ugacuucuuuugccaauua

SEQ ID NO: 1701446 - RNA, 19 nt, Homo sapiens
  misc_RNA (1)...(19): siRNA sense strand
aagcaaacguuguaguaau

SEQ ID NO: 1701447 - RNA, 19 nt, Homo sapiens
  misc_RNA (1)...(19): siRNA sense strand
aggaugccuuuauaucuua

SEQ ID NO: 1701448 - RNA, 19 nt, Homo sapiens
  misc_RNA (1)...(19): siRNA sense strand
gcaaguuuauucguugugu

SEQ ID NO: 1701449 - RNA, 19 nt, Homo sapiens
  misc_RNA (1)...(19): siRNA sense strand
caaugaacauaugguagaa

SEQ ID NO: 1701450 - RNA, 19 nt, Homo sapiens
  misc_RNA (1)...(19): siRNA sense strand
uaaauccacugagcagaga

SEQ ID NO: 1701451 - RNA, 19 nt, Homo sapiens
  misc_RNA (1)...(19): siRNA sense strand
cagaagagccauggagaaa

SEQ ID NO: 1701452 - RNA, 19 nt, Homo sapiens
  misc_RNA (1)...(19): siRNA sense strand
agaagcaaacguuguagua

SEQ ID NO: 1701453 - RNA, 19 nt, Homo sapiens
  misc_RNA (1)...(19): siRNA sense strand
cauggagauucaccaaauu

SEQ ID NO: 1701454 - RNA, 19 nt, Homo sapiens
  misc_RNA (1)...(19): siRNA sense strand
aaagucagaguucauguuu

SEQ ID NO: 1701455 - RNA, 19 nt, Homo sapiens
  misc_RNA (1)...(19): siRNA sense strand
ugaaaguaauggaaaugug

SEQ ID NO: 1701456 - RNA, 19 nt, Homo sapiens
  misc_RNA (1)...(19): siRNA sense strand
gacaaagccacaaaggaaa

SEQ ID NO: 1701457 - RNA, 19 nt, Homo sapiens
  misc_RNA (1)...(19): siRNA sense strand
ccacccacaccuaguauuu

SEQ ID NO: 1701458 - RNA, 19 nt, Homo sapiens
  misc_RNA (1)...(19): siRNA sense strand
gcucucugcuuuguugauu

SEQ ID NO: 1701459 - RNA, 19 nt, Homo sapiens
  misc_RNA (1)...(19): siRNA sense strand
uacaaacucugucucuaau

SEQ ID NO: 1701460 - RNA, 19 nt, Homo sapiens
  misc_RNA (1)...(19): siRNA sense strand
auucaucacugccuacaaa

SEQ ID NO: 1701461 - RNA, 19 nt, Homo sapiens
  misc_RNA (1)...(19): siRNA sense strand
gaagguguuauucaaguau

SEQ ID NO: 1701462 - RNA, 19 nt, Homo sapiens
  misc_RNA (1)...(19): siRNA sense strand
caaagaaguugcucaggua

SEQ ID NO: 1701463 - RNA, 19 nt, Homo sapiens
  misc_RNA (1)...(19): siRNA sense strand
gcaacuagcacugguauua

SEQ ID NO: 1701464 - RNA, 19 nt, Homo sapiens
  misc_RNA (1)...(19): siRNA sense strand
gaaagucaguuugucuuaa

SEQ ID NO: 1701465 - RNA, 19 nt, Homo sapiens
  misc_RNA (1)...(19): siRNA sense strand
gaacaacugcgagcaaaua

SEQ ID NO: 1701466 - RNA, 19 nt, Homo sapiens
  misc_RNA (1)...(19): siRNA sense strand
gguagaagcuaacaaugaa

SEQ ID NO: 1701467 - RNA, 19 nt, Homo sapiens
  misc_RNA (1)...(19): siRNA sense strand
gcagauacaugguguucaa

SEQ ID NO: 1701468 - RNA, 19 nt, Homo sapiens
  misc_RNA (1)...(19): siRNA sense strand
ggaccuagguacucucuau

SEQ ID NO: 1701469 - RNA, 19 nt, Homo sapiens
  misc_RNA (1)...(19): siRNA sense strand
ggaagguguuauucaagua

SEQ ID NO: 1701470 - RNA, 19 nt, Homo sapiens
  misc_RNA (1)...(19): siRNA sense strand
ggaaguaucauucugcaaa

SEQ ID NO: 1701471 - RNA, 19 nt, Homo sapiens
  misc_RNA (1)...(19): siRNA sense strand
ucaagggacuuucuaauca

SEQ ID NO: 1701472 - RNA, 19 nt, Homo sapiens
  misc_RNA (1)...(19): siRNA sense strand
gaacauaugguagaaguga

SEQ ID NO: 1701473 - RNA, 19 nt, Homo sapiens
  misc_RNA (1)...(19): siRNA sense strand
caagauguccuuuauguug

SEQ ID NO: 1701474 - RNA, 19 nt, Homo sapiens
  misc_RNA (1)...(19): siRNA sense strand
caauagaucucauacuaca

SEQ ID NO: 1701475 - RNA, 19 nt, Homo sapiens
  misc_RNA (1)...(19): siRNA sense strand
ugcuggagcucuuaaauua

SEQ ID NO: 1701476 - RNA, 19 nt, Homo sapiens
  misc_RNA (1)...(19): siRNA sense strand
gaaauuacagcacuuggaa

SEQ ID NO: 1701477 - RNA, 19 nt, Homo sapiens
  misc_RNA (1)...(19): siRNA sense strand
gaaagcaauagaucucaua

SEQ ID NO: 1701478 - RNA, 19 nt, Homo sapiens
  misc_RNA (1)...(19): siRNA sense strand
uaauauggaucuaguagga

SEQ ID NO: 1701479 - RNA, 19 nt, Homo sapiens
  misc_RNA (1)...(19): siRNA sense strand
uaaacgugaugcuuucuuu

SEQ ID NO: 1701480 - RNA, 19 nt, Homo sapiens
  misc_RNA (1)...(19): siRNA sense strand
ggaggcauaugaacaacuu

SEQ ID NO: 1701481 - RNA, 19 nt, Homo sapiens
  misc_RNA (1)...(19): siRNA sense strand
gcucuuaaauuagaucuug

SEQ ID NO: 1701482 - RNA, 19 nt, Homo sapiens
  misc_RNA (1)...(19): siRNA sense strand
gaacuacuggaauucauaa

SEQ ID NO: 1701483 - RNA, 19 nt, Homo sapiens
  misc_RNA (1)...(19): siRNA sense strand
caauagguguguuguauca

SEQ ID NO: 1701484 - RNA, 19 nt, Homo sapiens
  misc_RNA (1)...(19): siRNA sense strand
gcaaaugagacacaaagaa

SEQ ID NO: 1701485 - RNA, 19 nt, Homo sapiens
  misc_RNA (1)...(19): siRNA sense strand
gaaacaagcaggcauacug

SEQ ID NO: 1701486 - RNA, 19 nt, Homo sapiens
  misc_RNA (1)...(19): siRNA sense strand
gaagugaaaguaauggaaa

SEQ ID NO: 1701487 - RNA, 19 nt, Homo sapiens
  misc_RNA (1)...(19): siRNA sense strand
gguacgaacuacuggaauu

SEQ ID NO: 1701488 - RNA, 19 nt, Homo sapiens
  misc_RNA (1)...(19): siRNA sense strand
ccaauuaggucacuucaac

SEQ ID NO: 1701489 - RNA, 19 nt, Homo sapiens
  misc_RNA (1)...(19): siRNA sense strand
agcaauagaucucauacua

SEQ ID NO: 1701490 - RNA, 19 nt, Homo sapiens
  misc_RNA (1)...(19): siRNA sense strand
gagcagagaagcauaaaca

SEQ ID NO: 1701491 - RNA, 19 nt, Homo sapiens
  misc_RNA (1)...(19): siRNA sense strand
gaagcaaacguuguaguaa

SEQ ID NO: 1701492 - RNA, 19 nt, Homo sapiens
  misc_RNA (1)...(19): siRNA sense strand
gggcucauguucaaaguga

SEQ ID NO: 1701493 - RNA, 19 nt, Homo sapiens
  misc_RNA (1)...(19): siRNA sense strand
gaagauggcgccagaacga

SEQ ID NO: 1701494 - RNA, 19 nt, Homo sapiens
  misc_RNA (1)...(19): siRNA sense strand
gaaaauggcggaaggaaaa

SEQ ID NO: 1701495 - RNA, 19 nt, Homo sapiens
  misc_RNA (1)...(19): siRNA sense strand
uagguuggaugcaucauaa

SEQ ID NO: 1701496 - RNA, 19 nt, Homo sapiens
  misc_RNA (1)...(19): siRNA sense strand
aaaccuuccugcacaagua

SEQ ID NO: 1701497 - RNA, 19 nt, Homo sapiens
  misc_RNA (1)...(19): siRNA sense strand
cuacaagucuaguuuaaag

SEQ ID NO: 1701498 - RNA, 19 nt, Homo sapiens
  misc_RNA (1)...(19): siRNA sense strand
gaucuuaccaucaauguca

SEQ ID NO: 1701499 - RNA, 19 nt, Homo sapiens
  misc_RNA (1)...(19): siRNA sense strand
ucucagaucuuaccaucaa

SEQ ID NO: 1701500 - RNA, 19 nt, Homo sapiens
  misc_RNA (1)...(19): siRNA sense strand
gaaaacagcuaucuaacuc

SEQ ID NO: 1701501 - RNA, 19 nt, Homo sapiens
  misc_RNA (1)...(19): siRNA sense strand
gcuaggcaguaauuguaua

SEQ ID NO: 1701502 - RNA, 19 nt, Homo sapiens
  misc_RNA (1)...(19): siRNA sense strand
ggaggcagauccuaauucu

SEQ ID NO: 1701503 - RNA, 19 nt, Homo sapiens
  misc_RNA (1)...(19): siRNA sense strand
ggaaagcuaugcuauucag

SEQ ID NO: 1701504 - RNA, 19 nt, Homo sapiens
  misc_RNA (1)...(19): siRNA sense strand
ggacaacaaggcauuaugu

SEQ ID NO: 1701505 - RNA, 19 nt, Homo sapiens
  misc_RNA (1)...(19): siRNA sense strand
gcuagaagcaaacguugua

SEQ ID NO: 1701506 - RNA, 19 nt, Homo sapiens
  misc_RNA (1)...(19): siRNA sense strand
gauacaugguguucaauag

SEQ ID NO: 1701507 - RNA, 19 nt, Homo sapiens
  misc_RNA (1)...(19): siRNA sense strand
gcaacaccuucuccuaaau

SEQ ID NO: 1701508 - RNA, 19 nt, Homo sapiens
  misc_RNA (1)...(19): siRNA sense strand
gcauuauguuuaccaaaga

SEQ ID NO: 1701509 - RNA, 19 nt, Homo sapiens
  misc_RNA (1)...(19): siRNA sense strand
agacaaagccacaaaggaa

SEQ ID NO: 1701510 - RNA, 19 nt, Homo sapiens
  misc_RNA (1)...(19): siRNA sense strand
gaagcuaacaaugaacaua

SEQ ID NO: 1701511 - RNA, 19 nt, Homo sapiens
  misc_RNA (1)...(19): siRNA sense strand
ucacagagcucuacaaaag

SEQ ID NO: 1701512 - RNA, 19 nt, Homo sapiens
  misc_RNA (1)...(19): siRNA sense strand
ccauggagauucaccaaau

SEQ ID NO: 1701513 - RNA, 19 nt, Homo sapiens
  misc_RNA (1)...(19): siRNA sense strand
guaauggaaaugugccuua

SEQ ID NO: 1701514 - RNA, 19 nt, Homo sapiens
  misc_RNA (1)...(19): siRNA sense strand
gcaaggcuguucgcugcua

SEQ ID NO: 1701515 - RNA, 19 nt, Homo sapiens
  misc_RNA (1)...(19): siRNA sense strand
aaacuuugguagaagcuaa

SEQ ID NO: 1701516 - RNA, 19 nt, Homo sapiens
  misc_RNA (1)...(19): siRNA sense strand
cuacaaacucugucucuaa

SEQ ID NO: 1701517 - RNA, 19 nt, Homo sapiens
  misc_RNA (1)...(19): siRNA sense strand
agcaaacguuguaguaaua

SEQ ID NO: 1701518 - RNA, 19 nt, Homo sapiens
  misc_RNA (1)...(19): siRNA sense strand
caggaugccuuuauaucuu

SEQ ID NO: 1701519 - RNA, 19 nt, Homo sapiens
  misc_RNA (1)...(19): siRNA sense strand
gaaguaucauucugcaaag

SEQ ID NO: 1701520 - RNA, 19 nt, Homo sapiens
  misc_RNA (1)...(19): siRNA sense strand
ggagaaaacagcuaucuaa

SEQ ID NO: 1701521 - RNA, 19 nt, Homo sapiens
  misc_RNA (1)...(19): siRNA sense strand
cagcaacaccuucuccuaa

SEQ ID NO: 1701522 - RNA, 19 nt, Homo sapiens
  misc_RNA (1)...(19): siRNA sense strand
cuaaucauguucaucaguu

SEQ ID NO: 1701523 - RNA, 19 nt, Homo sapiens
  misc_RNA (1)...(19): siRNA sense strand
gcaauuaaagcauuucaag

SEQ ID NO: 1701524 - RNA, 19 nt, Homo sapiens
  misc_RNA (1)...(19): siRNA sense strand
aaauaaacgugaugcuuuc

SEQ ID NO: 1701525 - RNA, 19 nt, Homo sapiens
  misc_RNA (1)...(19): siRNA sense strand
guauuaagaaggcgaauga

SEQ ID NO: 1701526 - RNA, 19 nt, Homo sapiens
  misc_RNA (1)...(19): siRNA sense strand
gucaggaccuaaugaagaa

SEQ ID NO: 1701527 - RNA, 19 nt, Homo sapiens
  misc_RNA (1)...(19): siRNA sense strand
gccagagucuuucacauca

SEQ ID NO: 1701528 - RNA, 19 nt, Homo sapiens
  misc_RNA (1)...(19): siRNA sense strand
gcuaugcuauucaguaucu

SEQ ID NO: 1701529 - RNA, 19 nt, Homo sapiens
  misc_RNA (1)...(19): siRNA sense strand
aaggaaagcuaugcuauuc

SEQ ID NO: 1701530 - RNA, 19 nt, Homo sapiens
  misc_RNA (1)...(19): siRNA sense strand
caaugucagugucuauaug

SEQ ID NO: 1701531 - RNA, 19 nt, Homo sapiens
  misc_RNA (1)...(19): siRNA sense strand
cuuaaaagcugaaggaaaa

SEQ ID NO: 1701532 - RNA, 19 nt, Homo sapiens
  misc_RNA (1)...(19): siRNA sense strand
ggagauucaccaaauuuau

SEQ ID NO: 1701533 - RNA, 19 nt, Homo sapiens
  misc_RNA (1)...(19): siRNA sense strand
agucaccucuccugucaua

SEQ ID NO: 1701534 - RNA, 19 nt, Homo sapiens
  misc_RNA (1)...(19): siRNA sense strand
caaaggaaagcuaugcuau

SEQ ID NO: 1701535 - RNA, 19 nt, Homo sapiens
  misc_RNA (1)...(19): siRNA sense strand
ucacccagcuguucauaca

SEQ ID NO: 1701536 - RNA, 19 nt, Homo sapiens
  misc_RNA (1)...(19): siRNA sense strand
caacuagcacugguauuaa

SEQ ID NO: 1701537 - RNA, 19 nt, Homo sapiens
  misc_RNA (1)...(19): siRNA sense strand
ggaagugaaaguaauggaa

SEQ ID NO: 1701538 - RNA, 19 nt, Homo sapiens
  misc_RNA (1)...(19): siRNA sense strand
caaaugagacacaaagaag

SEQ ID NO: 1701539 - RNA, 19 nt, Homo sapiens
  misc_RNA (1)...(19): siRNA sense strand
aaaugcagcuagaagcaaa

SEQ ID NO: 1701540 - RNA, 19 nt, Homo sapiens
  misc_RNA (1)...(19): siRNA sense strand
gcuauucaguaucuccaaa

SEQ ID NO: 1701541 - RNA, 19 nt, Homo sapiens
  misc_RNA (1)...(19): siRNA sense strand
caaaggaggcauaugaaca

SEQ ID NO: 1701542 - RNA, 19 nt, Homo sapiens
  misc_RNA (1)...(19): siRNA sense strand
auacaaagacugaucauuc

SEQ ID NO: 1701543 - RNA, 19 nt, Homo sapiens
  misc_RNA (1)...(19): siRNA sense strand
ucagcucucugcuuuguug

SEQ ID NO: 1701544 - RNA, 19 nt, Homo sapiens
  misc_RNA (1)...(19): siRNA sense strand
ggcauuauguuuaccaaag

SEQ ID NO: 1701545 - RNA, 19 nt, Homo sapiens
  misc_RNA (1)...(19): siRNA sense strand
ugacuucuuuugccaauua

SEQ ID NO: 1701546 - RNA, 19 nt, Homo sapiens
  misc_RNA (1)...(19): siRNA sense strand
aagcaaacguuguaguaau

SEQ ID NO: 1701547 - RNA, 19 nt, Homo sapiens
  misc_RNA (1)...(19): siRNA sense strand
aggaugccuuuauaucuua

SEQ ID NO: 1701548 - RNA, 19 nt, Homo sapiens
  misc_RNA (1)...(19): siRNA sense strand
gcaaguuuauucguugugu

SEQ ID NO: 1701549 - RNA, 19 nt, Homo sapiens
  misc_RNA (1)...(19): siRNA sense strand
caaugaacauaugguagaa

SEQ ID NO: 1701550 - RNA, 19 nt, Homo sapiens
  misc_RNA (1)...(19): siRNA sense strand
uaaauccacugagcagaga

SEQ ID NO: 1701551 - RNA, 19 nt, Homo sapiens
  misc_RNA (1)...(19): siRNA sense strand
cagaagagccauggagaaa

SEQ ID NO: 1701552 - RNA, 19 nt, Homo sapiens
  misc_RNA (1)...(19): siRNA sense strand
agaagcaaacguuguagua

SEQ ID NO: 1701553 - RNA, 19 nt, Homo sapiens
  misc_RNA (1)...(19): siRNA sense strand
cauggagauucaccaaauu

SEQ ID NO: 1701554 - RNA, 19 nt, Homo sapiens
  misc_RNA (1)...(19): siRNA sense strand
aaagucagaguucauguuu

SEQ ID NO: 1701555 - RNA, 19 nt, Homo sapiens
  misc_RNA (1)...(19): siRNA sense strand
ugaaaguaauggaaaugug

SEQ ID NO: 1701556 - RNA, 19 nt, Homo sapiens
  misc_RNA (1)...(19): siRNA sense strand
gacaaagccacaaaggaaa

SEQ ID NO: 1701557 - RNA, 19 nt, Homo sapiens
  misc_RNA (1)...(19): siRNA sense strand
ccacccacaccuaguauuu

SEQ ID NO: 1701558 - RNA, 19 nt, Homo sapiens
  misc_RNA (1)...(19): siRNA sense strand
gcucucugcuuuguugauu

SEQ ID NO: 1701559 - RNA, 19 nt, Homo sapiens
  misc_RNA (1)...(19): siRNA sense strand
uacaaacucugucucuaau

SEQ ID NO: 1701560 - RNA, 19 nt, Homo sapiens
  misc_RNA (1)...(19): siRNA sense strand
auucaucacugccuacaaa

SEQ ID NO: 1701561 - RNA, 19 nt, Homo sapiens
  misc_RNA (1)...(19): siRNA sense strand
gaagguguuauucaaguau

SEQ ID NO: 1701562 - RNA, 19 nt, Homo sapiens
  misc_RNA (1)...(19): siRNA sense strand
caaagaaguugcucaggua

SEQ ID NO: 1701563 - RNA, 19 nt, Homo sapiens
  misc_RNA (1)...(19): siRNA sense strand
gcaacuagcacugguauua

SEQ ID NO: 1701564 - RNA, 19 nt, Homo sapiens
  misc_RNA (1)...(19): siRNA sense strand
gaaagucaguuugucuuaa

SEQ ID NO: 1701565 - RNA, 19 nt, Homo sapiens
  misc_RNA (1)...(19): siRNA sense strand
gaacaacugcgagcaaaua

SEQ ID NO: 1701566 - RNA, 19 nt, Homo sapiens
  misc_RNA (1)...(19): siRNA sense strand
gguagaagcuaacaaugaa

SEQ ID NO: 1701567 - RNA, 19 nt, Homo sapiens
  misc_RNA (1)...(19): siRNA sense strand
gcagauacaugguguucaa

SEQ ID NO: 1701568 - RNA, 19 nt, Homo sapiens
  misc_RNA (1)...(19): siRNA sense strand
ggaccuagguacucucuau

SEQ ID NO: 1701569 - RNA, 19 nt, Homo sapiens
  misc_RNA (1)...(19): siRNA sense strand
ggaagguguuauucaagua

SEQ ID NO: 1701570 - RNA, 19 nt, Homo sapiens
  misc_RNA (1)...(19): siRNA sense strand
ggaaguaucauucugcaaa

SEQ ID NO: 1701571 - RNA, 19 nt, Homo sapiens
  misc_RNA (1)...(19): siRNA sense strand
ucaagggacuuucuaauca

SEQ ID NO: 1701572 - RNA, 19 nt, Homo sapiens
  misc_RNA (1)...(19): siRNA sense strand
gaacauaugguagaaguga

SEQ ID NO: 1701573 - RNA, 19 nt, Homo sapiens
  misc_RNA (1)...(19): siRNA sense strand
caagauguccuuuauguug

SEQ ID NO: 1701574 - RNA, 19 nt, Homo sapiens
  misc_RNA (1)...(19): siRNA sense strand
caauagaucucauacuaca

SEQ ID NO: 1701575 - RNA, 19 nt, Homo sapiens
  misc_RNA (1)...(19): siRNA sense strand
ugcuggagcucuuaaauua

SEQ ID NO: 1701576 - RNA, 19 nt, Homo sapiens
  misc_RNA (1)...(19): siRNA sense strand
gaaauuacagcacuuggaa

SEQ ID NO: 1701577 - RNA, 19 nt, Homo sapiens
  misc_RNA (1)...(19): siRNA sense strand
gaaagcaauagaucucaua

SEQ ID NO: 1701578 - RNA, 19 nt, Homo sapiens
  misc_RNA (1)...(19): siRNA sense strand
uaauauggaucuaguagga

SEQ ID NO: 1701579 - RNA, 19 nt, Homo sapiens
  misc_RNA (1)...(19): siRNA sense strand
uaaacgugaugcuuucuuu

SEQ ID NO: 1701580 - RNA, 19 nt, Homo sapiens
  misc_RNA (1)...(19): siRNA sense strand
ggaggcauaugaacaacuu

SEQ ID NO: 1701581 - RNA, 19 nt, Homo sapiens
  misc_RNA (1)...(19): siRNA sense strand
gcucuuaaauuagaucuug

SEQ ID NO: 1701582 - RNA, 19 nt, Homo sapiens
  misc_RNA (1)...(19): siRNA sense strand
gaacuacuggaauucauaa

SEQ ID NO: 1701583 - RNA, 19 nt, Homo sapiens
  misc_RNA (1)...(19): siRNA sense strand
caauagguguguuguauca

SEQ ID NO: 1701584 - RNA, 19 nt, Homo sapiens
  misc_RNA (1)...(19): siRNA sense strand
gcaaaugagacacaaagaa

SEQ ID NO: 1701585 - RNA, 19 nt, Homo sapiens
  misc_RNA (1)...(19): siRNA sense strand
gaaacaagcaggcauacug

SEQ ID NO: 1701586 - RNA, 19 nt, Homo sapiens
  misc_RNA (1)...(19): siRNA sense strand
gaagugaaaguaauggaaa

SEQ ID NO: 1701587 - RNA, 19 nt, Homo sapiens
  misc_RNA (1)...(19): siRNA sense strand
gguacgaacuacuggaauu

SEQ ID NO: 1701588 - RNA, 19 nt, Homo sapiens
  misc_RNA (1)...(19): siRNA sense strand
ccaauuaggucacuucaac

SEQ ID NO: 1701589 - RNA, 19 nt, Homo sapiens
  misc_RNA (1)...(19): siRNA sense strand
agcaauagaucucauacua

SEQ ID NO: 1701590 - RNA, 19 nt, Homo sapiens
  misc_RNA (1)...(19): siRNA sense strand
gagcagagaagcauaaaca

SEQ ID NO: 1701591 - RNA, 19 nt, Homo sapiens
  misc_RNA (1)...(19): siRNA sense strand
gaagcaaacguuguaguaa

SEQ ID NO: 1701592 - RNA, 19 nt, Homo sapiens
  misc_RNA (1)...(19): siRNA sense strand
gggcucauguucaaaguga

SEQ ID NO: 1701593 - RNA, 19 nt, Homo sapiens
  misc_RNA (1)...(19): siRNA sense strand
gaagauggcgccagaacga

SEQ ID NO: 1701594 - RNA, 19 nt, Homo sapiens
  misc_RNA (1)...(19): siRNA sense strand
gaaaauggcggaaggaaaa

SEQ ID NO: 1701595 - RNA, 19 nt, Homo sapiens
  misc_RNA (1)...(19): siRNA sense strand
uagguuggaugcaucauaa

SEQ ID NO: 1701596 - RNA, 19 nt, Homo sapiens
  misc_RNA (1)...(19): siRNA sense strand
aaaccuuccugcacaagua

SEQ ID NO: 1701597 - RNA, 19 nt, Homo sapiens
  misc_RNA (1)...(19): siRNA sense strand
cuacaagucuaguuuaaag

SEQ ID NO: 1701598 - RNA, 19 nt, Homo sapiens
  misc_RNA (1)...(19): siRNA sense strand
gaucuuaccaucaauguca

SEQ ID NO: 1701599 - RNA, 19 nt, Homo sapiens
  misc_RNA (1)...(19): siRNA sense strand
ucucagaucuuaccaucaa

SEQ ID NO: 1701600 - RNA, 19 nt, Homo sapiens
  misc_RNA (1)...(19): siRNA sense strand
gaaaacagcuaucuaacuc

SEQ ID NO: 1701601 - RNA, 19 nt, Homo sapiens
  misc_RNA (1)...(19): siRNA sense strand
gcuaggcaguaauuguaua

SEQ ID NO: 1701602 - RNA, 19 nt, Homo sapiens
  misc_RNA (1)...(19): siRNA sense strand
ggaggcagauccuaauucu

SEQ ID NO: 1701603 - RNA, 19 nt, Homo sapiens
  misc_RNA (1)...(19): siRNA sense strand
ggaaagcuaugcuauucag

SEQ ID NO: 1701604 - RNA, 19 nt, Homo sapiens
  misc_RNA (1)...(19): siRNA sense strand
ggacaacaaggcauuaugu

SEQ ID NO: 1701605 - RNA, 19 nt, Homo sapiens
  misc_RNA (1)...(19): siRNA sense strand
gcuagaagcaaacguugua

SEQ ID NO: 1701606 - RNA, 19 nt, Homo sapiens
  misc_RNA (1)...(19): siRNA sense strand
gauacaugguguucaauag

SEQ ID NO: 1701607 - RNA, 19 nt, Homo sapiens
  misc_RNA (1)...(19): siRNA sense strand
gcaacaccuucuccuaaau

SEQ ID NO: 1701608 - RNA, 19 nt, Homo sapiens
  misc_RNA (1)...(19): siRNA sense strand
gcauuauguuuaccaaaga

SEQ ID NO: 1701609 - RNA, 19 nt, Homo sapiens
  misc_RNA (1)...(19): siRNA sense strand
agacaaagccacaaaggaa

SEQ ID NO: 1701610 - RNA, 19 nt, Homo sapiens
  misc_RNA (1)...(19): siRNA sense strand
gaagcuaacaaugaacaua

SEQ ID NO: 1701611 - RNA, 19 nt, Homo sapiens
  misc_RNA (1)...(19): siRNA sense strand
ucacagagcucuacaaaag

SEQ ID NO: 1701612 - RNA, 19 nt, Homo sapiens
  misc_RNA (1)...(19): siRNA sense strand
ccauggagauucaccaaau

SEQ ID NO: 1701613 - RNA, 19 nt, Homo sapiens
  misc_RNA (1)...(19): siRNA sense strand
guaauggaaaugugccuua

SEQ ID NO: 1701614 - RNA, 19 nt, Homo sapiens
  misc_RNA (1)...(19): siRNA sense strand
gcaaggcuguucgcugcua

SEQ ID NO: 1701615 - RNA, 19 nt, Homo sapiens
  misc_RNA (1)...(19): siRNA sense strand
aaacuuugguagaagcuaa

SEQ ID NO: 1701616 - RNA, 19 nt, Homo sapiens
  misc_RNA (1)...(19): siRNA sense strand
cuacaaacucugucucuaa

SEQ ID NO: 1701617 - RNA, 19 nt, Homo sapiens
  misc_RNA (1)...(19): siRNA sense strand
agcaaacguuguaguaaua

SEQ ID NO: 1701618 - RNA, 19 nt, Homo sapiens
  misc_RNA (1)...(19): siRNA sense strand
caggaugccuuuauaucuu

SEQ ID NO: 1701619 - RNA, 19 nt, Homo sapiens
  misc_RNA (1)...(19): siRNA sense strand
gaaguaucauucugcaaag

SEQ ID NO: 1701620 - RNA, 19 nt, Homo sapiens
  misc_RNA (1)...(19): siRNA sense strand
ggagaaaacagcuaucuaa

SEQ ID NO: 1701621 - RNA, 19 nt, Homo sapiens
  misc_RNA (1)...(19): siRNA sense strand
cagcaacaccuucuccuaa

SEQ ID NO: 1701622 - RNA, 19 nt, Homo sapiens
  misc_RNA (1)...(19): siRNA sense strand
cuaaucauguucaucaguu

SEQ ID NO: 1701623 - RNA, 19 nt, Homo sapiens
  misc_RNA (1)...(19): siRNA sense strand
gcaauuaaagcauuucaag

SEQ ID NO: 1701624 - RNA, 19 nt, Homo sapiens
  misc_RNA (1)...(19): siRNA sense strand
aaauaaacgugaugcuuuc

SEQ ID NO: 1701625 - RNA, 19 nt, Homo sapiens
  misc_RNA (1)...(19): siRNA sense strand
guauuaagaaggcgaauga

SEQ ID NO: 1701626 - RNA, 19 nt, Homo sapiens
  misc_RNA (1)...(19): siRNA sense strand
gucaggaccuaaugaagaa

SEQ ID NO: 1701627 - RNA, 19 nt, Homo sapiens
  misc_RNA (1)...(19): siRNA sense strand
gccagagucuuucacauca

SEQ ID NO: 1701628 - RNA, 19 nt, Homo sapiens
  misc_RNA (1)...(19): siRNA sense strand
gcuaugcuauucaguaucu

SEQ ID NO: 1701629 - RNA, 19 nt, Homo sapiens
  misc_RNA (1)...(19): siRNA sense strand
aaggaaagcuaugcuauuc

SEQ ID NO: 1701630 - RNA, 19 nt, Homo sapiens
  misc_RNA (1)...(19): siRNA sense strand
caaugucagugucuauaug

SEQ ID NO: 1701631 - RNA, 19 nt, Homo sapiens
  misc_RNA (1)...(19): siRNA sense strand
cuuaaaagcugaaggaaaa

SEQ ID NO: 1701632 - RNA, 19 nt, Homo sapiens
  misc_RNA (1)...(19): siRNA sense strand
ggagauucaccaaauuuau

SEQ ID NO: 1701633 - RNA, 19 nt, Homo sapiens
  misc_RNA (1)...(19): siRNA sense strand
agucaccucuccugucaua

SEQ ID NO: 1701634 - RNA, 19 nt, Homo sapiens
  misc_RNA (1)...(19): siRNA sense strand
caaaggaaagcuaugcuau

SEQ ID NO: 1701635 - RNA, 19 nt, Homo sapiens
  misc_RNA (1)...(19): siRNA sense strand
ucacccagcuguucauaca

SEQ ID NO: 1701636 - RNA, 19 nt, Homo sapiens
  misc_RNA (1)...(19): siRNA sense strand
caacuagcacugguauuaa

SEQ ID NO: 1701637 - RNA, 19 nt, Homo sapiens
  misc_RNA (1)...(19): siRNA sense strand
ggaagugaaaguaauggaa

SEQ ID NO: 1701638 - RNA, 19 nt, Homo sapiens
  misc_RNA (1)...(19): siRNA sense strand
caaaugagacacaaagaag

SEQ ID NO: 1701639 - RNA, 19 nt, Homo sapiens
  misc_RNA (1)...(19): siRNA sense strand
aaaugcagcuagaagcaaa

SEQ ID NO: 1701640 - RNA, 19 nt, Homo sapiens
  misc_RNA (1)...(19): siRNA sense strand
gcuauucaguaucuccaaa

SEQ ID NO: 1701641 - RNA, 19 nt, Homo sapiens
  misc_RNA (1)...(19): siRNA sense strand
caaaggaggcauaugaaca

SEQ ID NO: 1701642 - RNA, 19 nt, Homo sapiens
  misc_RNA (1)...(19): siRNA sense strand
auacaaagacugaucauuc

SEQ ID NO: 1701643 - RNA, 19 nt, Homo sapiens
  misc_RNA (1)...(19): siRNA sense strand
ucagcucucugcuuuguug

SEQ ID NO: 1701644 - RNA, 19 nt, Homo sapiens
  misc_RNA (1)...(19): siRNA sense strand
ggcauuauguuuaccaaag

SEQ ID NO: 1701645 - RNA, 19 nt, Homo sapiens
  misc_RNA (1)...(19): siRNA sense strand
ugacuucuuuugccaauua

SEQ ID NO: 1701646 - RNA, 19 nt, Homo sapiens
  misc_RNA (1)...(19): siRNA sense strand
aagcaaacguuguaguaau

SEQ ID NO: 1701647 - RNA, 19 nt, Homo sapiens
  misc_RNA (1)...(19): siRNA sense strand
aggaugccuuuauaucuua

SEQ ID NO: 1701648 - RNA, 19 nt, Homo sapiens
  misc_RNA (1)...(19): siRNA sense strand
gcaaguuuauucguugugu

SEQ ID NO: 1701649 - RNA, 19 nt, Homo sapiens
  misc_RNA (1)...(19): siRNA sense strand
caaugaacauaugguagaa

SEQ ID NO: 1701650 - RNA, 19 nt, Homo sapiens
  misc_RNA (1)...(19): siRNA sense strand
uaaauccacugagcagaga

SEQ ID NO: 1701651 - RNA, 19 nt, Homo sapiens
  misc_RNA (1)...(19): siRNA sense strand
cagaagagccauggagaaa

SEQ ID NO: 1701652 - RNA, 19 nt, Homo sapiens
  misc_RNA (1)...(19): siRNA sense strand
agaagcaaacguuguagua

SEQ ID NO: 1701653 - RNA, 19 nt, Homo sapiens
  misc_RNA (1)...(19): siRNA sense strand
cauggagauucaccaaauu

SEQ ID NO: 1701654 - RNA, 19 nt, Homo sapiens
  misc_RNA (1)...(19): siRNA sense strand
aaagucagaguucauguuu

SEQ ID NO: 1701655 - RNA, 19 nt, Homo sapiens
  misc_RNA (1)...(19): siRNA sense strand
ugaaaguaauggaaaugug

SEQ ID NO: 1701656 - RNA, 19 nt, Homo sapiens
  misc_RNA (1)...(19): siRNA sense strand
gacaaagccacaaaggaaa

SEQ ID NO: 1701657 - RNA, 19 nt, Homo sapiens
  misc_RNA (1)...(19): siRNA sense strand
ccacccacaccuaguauuu

SEQ ID NO: 1701658 - RNA, 19 nt, Homo sapiens
  misc_RNA (1)...(19): siRNA sense strand
gcucucugcuuuguugauu

SEQ ID NO: 1701659 - RNA, 19 nt, Homo sapiens
  misc_RNA (1)...(19): siRNA sense strand
uacaaacucugucucuaau

SEQ ID NO: 1701660 - RNA, 19 nt, Homo sapiens
  misc_RNA (1)...(19): siRNA sense strand
auucaucacugccuacaaa

SEQ ID NO: 1701661 - RNA, 19 nt, Homo sapiens
  misc_RNA (1)...(19): siRNA sense strand
gaagguguuauucaaguau

SEQ ID NO: 1701662 - RNA, 19 nt, Homo sapiens
  misc_RNA (1)...(19): siRNA sense strand
caaagaaguugcucaggua

SEQ ID NO: 1701663 - RNA, 19 nt, Homo sapiens
  misc_RNA (1)...(19): siRNA sense strand
gcaacuagcacugguauua

SEQ ID NO: 1701664 - RNA, 19 nt, Homo sapiens
  misc_RNA (1)...(19): siRNA sense strand
gaaagucaguuugucuuaa

SEQ ID NO: 1701665 - RNA, 19 nt, Homo sapiens
  misc_RNA (1)...(19): siRNA sense strand
gaacaacugcgagcaaaua

SEQ ID NO: 1701666 - RNA, 19 nt, Homo sapiens
  misc_RNA (1)...(19): siRNA sense strand
gguagaagcuaacaaugaa

SEQ ID NO: 1701667 - RNA, 19 nt, Homo sapiens
  misc_RNA (1)...(19): siRNA sense strand
gcagauacaugguguucaa

SEQ ID NO: 1701668 - RNA, 19 nt, Homo sapiens
  misc_RNA (1)...(19): siRNA sense strand
ggaccuagguacucucuau

SEQ ID NO: 1701669 - RNA, 19 nt, Homo sapiens
  misc_RNA (1)...(19): siRNA sense strand
ggaagguguuauucaagua

SEQ ID NO: 1701670 - RNA, 19 nt, Homo sapiens
  misc_RNA (1)...(19): siRNA sense strand
ggaaguaucauucugcaaa

SEQ ID NO: 1701671 - RNA, 19 nt, Homo sapiens
  misc_RNA (1)...(19): siRNA sense strand
ucaagggacuuucuaauca

SEQ ID NO: 1701672 - RNA, 19 nt, Homo sapiens
  misc_RNA (1)...(19): siRNA sense strand
gaacauaugguagaaguga

SEQ ID NO: 1701673 - RNA, 19 nt, Homo sapiens
  misc_RNA (1)...(19): siRNA sense strand
caagauguccuuuauguug

SEQ ID NO: 1701674 - RNA, 19 nt, Homo sapiens
  misc_RNA (1)...(19): siRNA sense strand
caauagaucucauacuaca

SEQ ID NO: 1701675 - RNA, 19 nt, Homo sapiens
  misc_RNA (1)...(19): siRNA sense strand
ugcuggagcucuuaaauua

SEQ ID NO: 1701676 - RNA, 19 nt, Homo sapiens
  misc_RNA (1)...(19): siRNA sense strand
gaaauuacagcacuuggaa

SEQ ID NO: 1701677 - RNA, 19 nt, Homo sapiens
  misc_RNA (1)...(19): siRNA sense strand
gaaagcaauagaucucaua

SEQ ID NO: 1701678 - RNA, 19 nt, Homo sapiens
  misc_RNA (1)...(19): siRNA sense strand
uaauauggaucuaguagga

SEQ ID NO: 1701679 - RNA, 19 nt, Homo sapiens
  misc_RNA (1)...(19): siRNA sense strand
uaaacgugaugcuuucuuu

SEQ ID NO: 1701680 - RNA, 19 nt, Homo sapiens
  misc_RNA (1)...(19): siRNA sense strand
ggaggcauaugaacaacuu

SEQ ID NO: 1701681 - RNA, 19 nt, Homo sapiens
  misc_RNA (1)...(19): siRNA sense strand
gcucuuaaauuagaucuug

SEQ ID NO: 1701682 - RNA, 19 nt, Homo sapiens
  misc_RNA (1)...(19): siRNA sense strand
gaacuacuggaauucauaa

SEQ ID NO: 1701683 - RNA, 19 nt, Homo sapiens
  misc_RNA (1)...(19): siRNA sense strand
caauagguguguuguauca

SEQ ID NO: 1701684 - RNA, 19 nt, Homo sapiens
  misc_RNA (1)...(19): siRNA sense strand
gcaaaugagacacaaagaa

SEQ ID NO: 1701685 - RNA, 19 nt, Homo sapiens
  misc_RNA (1)...(19): siRNA sense strand
gaaacaagcaggcauacug

SEQ ID NO: 1701686 - RNA, 19 nt, Homo sapiens
  misc_RNA (1)...(19): siRNA sense strand
gaagugaaaguaauggaaa

SEQ ID NO: 1701687 - RNA, 19 nt, Homo sapiens
  misc_RNA (1)...(19): siRNA sense strand
gguacgaacuacuggaauu

SEQ ID NO: 1701688 - RNA, 19 nt, Homo sapiens
  misc_RNA (1)...(19): siRNA sense strand
ccaauuaggucacuucaac

SEQ ID NO: 1701689 - RNA, 19 nt, Homo sapiens
  misc_RNA (1)...(19): siRNA sense strand
agcaauagaucucauacua

SEQ ID NO: 1701690 - RNA, 19 nt, Homo sapiens
  misc_RNA (1)...(19): siRNA sense strand
gagcagagaagcauaaaca

SEQ ID NO: 1701691 - RNA, 19 nt, Homo sapiens
  misc_RNA (1)...(19): siRNA sense strand
gaagcaaacguuguaguaa

SEQ ID NO: 1701692 - RNA, 19 nt, Homo sapiens
  misc_RNA (1)...(19): siRNA sense strand
gggcucauguucaaaguga

SEQ ID NO: 1701693 - RNA, 19 nt, Homo sapiens
  misc_RNA (1)...(19): siRNA sense strand
gaagauggcgccagaacga

SEQ ID NO: 1701694 - RNA, 19 nt, Homo sapiens
  misc_RNA (1)...(19): siRNA sense strand
gaaaauggcggaaggaaaa

SEQ ID NO: 1701695 - RNA, 19 nt, Homo sapiens
  misc_RNA (1)...(19): siRNA sense strand
uagguuggaugcaucauaa

SEQ ID NO: 1701696 - RNA, 19 nt, Homo sapiens
  misc_RNA (1)...(19): siRNA sense strand
aaaccuuccugcacaagua

SEQ ID NO: 1701697 - RNA, 19 nt, Homo sapiens
  misc_RNA (1)...(19): siRNA sense strand
cuacaagucuaguuuaaag

SEQ ID NO: 1701698 - RNA, 19 nt, Homo sapiens
  misc_RNA (1)...(19): siRNA sense strand
gaucuuaccaucaauguca

SEQ ID NO: 1701699 - RNA, 19 nt, Homo sapiens
  misc_RNA (1)...(19): siRNA sense strand
ucucagaucuuaccaucaa

SEQ ID NO: 1701700 - RNA, 19 nt, Homo sapiens
  misc_RNA (1)...(19): siRNA sense strand
gaaaacagcuaucuaacuc

SEQ ID NO: 1701701 - RNA, 19 nt, Homo sapiens
  misc_RNA (1)...(19): siRNA sense strand
gcuaggcaguaauuguaua

SEQ ID NO: 1701702 - RNA, 19 nt, Homo sapiens
  misc_RNA (1)...(19): siRNA sense strand
ggaggcagauccuaauucu

SEQ ID NO: 1701703 - RNA, 19 nt, Homo sapiens
  misc_RNA (1)...(19): siRNA sense strand
ggaaagcuaugcuauucag

SEQ ID NO: 1701704 - RNA, 19 nt, Homo sapiens
  misc_RNA (1)...(19): siRNA sense strand
ggacaacaaggcauuaugu

SEQ ID NO: 1701705 - RNA, 19 nt, Homo sapiens
  misc_RNA (1)...(19): siRNA sense strand
gcuagaagcaaacguugua

SEQ ID NO: 1701706 - RNA, 19 nt, Homo sapiens
  misc_RNA (1)...(19): siRNA sense strand
gauacaugguguucaauag

SEQ ID NO: 1701707 - RNA, 19 nt, Homo sapiens
  misc_RNA (1)...(19): siRNA sense strand
gcaacaccuucuccuaaau

SEQ ID NO: 1701708 - RNA, 19 nt, Homo sapiens
  misc_RNA (1)...(19): siRNA sense strand
gcauuauguuuaccaaaga

SEQ ID NO: 1701709 - RNA, 19 nt, Homo sapiens
  misc_RNA (1)...(19): siRNA sense strand
agacaaagccacaaaggaa

SEQ ID NO: 1701710 - RNA, 19 nt, Homo sapiens
  misc_RNA (1)...(19): siRNA sense strand
gaagcuaacaaugaacaua

SEQ ID NO: 1701711 - RNA, 19 nt, Homo sapiens
  misc_RNA (1)...(19): siRNA sense strand
ucacagagcucuacaaaag

SEQ ID NO: 1701712 - RNA, 19 nt, Homo sapiens
  misc_RNA (1)...(19): siRNA sense strand
ccauggagauucaccaaau

SEQ ID NO: 1701713 - RNA, 19 nt, Homo sapiens
  misc_RNA (1)...(19): siRNA sense strand
guaauggaaaugugccuua

SEQ ID NO: 1701714 - RNA, 19 nt, Homo sapiens
  misc_RNA (1)...(19): siRNA sense strand
gcaaggcuguucgcugcua

SEQ ID NO: 1701715 - RNA, 19 nt, Homo sapiens
  misc_RNA (1)...(19): siRNA sense strand
aaacuuugguagaagcuaa

SEQ ID NO: 1701716 - RNA, 19 nt, Homo sapiens
  misc_RNA (1)...(19): siRNA sense strand
cuacaaacucugucucuaa

SEQ ID NO: 1701717 - RNA, 19 nt, Homo sapiens
  misc_RNA (1)...(19): siRNA sense strand
agcaaacguuguaguaaua

SEQ ID NO: 1701718 - RNA, 19 nt, Homo sapiens
  misc_RNA (1)...(19): siRNA sense strand
caggaugccuuuauaucuu

SEQ ID NO: 1701719 - RNA, 19 nt, Homo sapiens
  misc_RNA (1)...(19): siRNA sense strand
gaaguaucauucugcaaag

SEQ ID NO: 1701720 - RNA, 19 nt, Homo sapiens
  misc_RNA (1)...(19): siRNA sense strand
ggagaaaacagcuaucuaa

SEQ ID NO: 1701721 - RNA, 19 nt, Homo sapiens
  misc_RNA (1)...(19): siRNA sense strand
cagcaacaccuucuccuaa

SEQ ID NO: 1701722 - RNA, 19 nt, Homo sapiens
  misc_RNA (1)...(19): siRNA sense strand
cuaaucauguucaucaguu

SEQ ID NO: 1701723 - RNA, 19 nt, Homo sapiens
  misc_RNA (1)...(19): siRNA sense strand
gcaauuaaagcauuucaag

SEQ ID NO: 1701724 - RNA, 19 nt, Homo sapiens
  misc_RNA (1)...(19): siRNA sense strand
aaauaaacgugaugcuuuc

SEQ ID NO: 1701725 - RNA, 19 nt, Homo sapiens
  misc_RNA (1)...(19): siRNA sense strand
guauuaagaaggcgaauga

SEQ ID NO: 1701726 - RNA, 19 nt, Homo sapiens
  misc_RNA (1)...(19): siRNA sense strand
gucaggaccuaaugaagaa

SEQ ID NO: 1701727 - RNA, 19 nt, Homo sapiens
  misc_RNA (1)...(19): siRNA sense strand
gccagagucuuucacauca

SEQ ID NO: 1701728 - RNA, 19 nt, Homo sapiens
  misc_RNA (1)...(19): siRNA sense strand
gcuaugcuauucaguaucu

SEQ ID NO: 1701729 - RNA, 19 nt, Homo sapiens
  misc_RNA (1)...(19): siRNA sense strand
aaggaaagcuaugcuauuc

SEQ ID NO: 1701730 - RNA, 19 nt, Homo sapiens
  misc_RNA (1)...(19): siRNA sense strand
caaugucagugucuauaug

SEQ ID NO: 1701731 - RNA, 19 nt, Homo sapiens
  misc_RNA (1)...(19): siRNA sense strand
cuuaaaagcugaaggaaaa

SEQ ID NO: 1701732 - RNA, 19 nt, Homo sapiens
  misc_RNA (1)...(19): siRNA sense strand
ggagauucaccaaauuuau

SEQ ID NO: 1701733 - RNA, 19 nt, Homo sapiens
  misc_RNA (1)...(19): siRNA sense strand
agucaccucuccugucaua

SEQ ID NO: 1701734 - RNA, 19 nt, Homo sapiens
  misc_RNA (1)...(19): siRNA sense strand
caaaggaaagcuaugcuau

SEQ ID NO: 1701735 - RNA, 19 nt, Homo sapiens
  misc_RNA (1)...(19): siRNA sense strand
ucacccagcuguucauaca

SEQ ID NO: 1701736 - RNA, 19 nt, Homo sapiens
  misc_RNA (1)...(19): siRNA sense strand
caacuagcacugguauuaa

SEQ ID NO: 1701737 - RNA, 19 nt, Homo sapiens
  misc_RNA (1)...(19): siRNA sense strand
ggaagugaaaguaauggaa

SEQ ID NO: 1701738 - RNA, 19 nt, Homo sapiens
  misc_RNA (1)...(19): siRNA sense strand
caaaugagacacaaagaag

SEQ ID NO: 1701739 - RNA, 19 nt, Homo sapiens
  misc_RNA (1)...(19): siRNA sense strand
aaaugcagcuagaagcaaa

SEQ ID NO: 1701740 - RNA, 19 nt, Homo sapiens
  misc_RNA (1)...(19): siRNA sense strand
gcuauucaguaucuccaaa

SEQ ID NO: 1701741 - RNA, 19 nt, Homo sapiens
  misc_RNA (1)...(19): siRNA sense strand
caaaggaggcauaugaaca

SEQ ID NO: 1701742 - RNA, 19 nt, Homo sapiens
  misc_RNA (1)...(19): siRNA sense strand
auacaaagacugaucauuc

SEQ ID NO: 1701743 - RNA, 19 nt, Homo sapiens
  misc_RNA (1)...(19): siRNA sense strand
ucagcucucugcuuuguug

SEQ ID NO: 1701744 - RNA, 19 nt, Homo sapiens
  misc_RNA (1)...(19): siRNA sense strand
ggcauuauguuuaccaaag

SEQ ID NO: 1701745 - RNA, 19 nt, Homo sapiens
  misc_RNA (1)...(19): siRNA sense strand
ugacuucuuuugccaauua

SEQ ID NO: 1701746 - RNA, 19 nt, Homo sapiens
  misc_RNA (1)...(19): siRNA sense strand
aagcaaacguuguaguaau

SEQ ID NO: 1701747 - RNA, 19 nt, Homo sapiens
  misc_RNA (1)...(19): siRNA sense strand
aggaugccuuuauaucuua

SEQ ID NO: 1701748 - RNA, 19 nt, Homo sapiens
  misc_RNA (1)...(19): siRNA sense strand
gcaaguuuauucguugugu

SEQ ID NO: 1701749 - RNA, 19 nt, Homo sapiens
  misc_RNA (1)...(19): siRNA sense strand
caaugaacauaugguagaa

SEQ ID NO: 1701750 - RNA, 19 nt, Homo sapiens
  misc_RNA (1)...(19): siRNA sense strand
uaaauccacugagcagaga

SEQ ID NO: 1701751 - RNA, 19 nt, Homo sapiens
  misc_RNA (1)...(19): siRNA sense strand
cagaagagccauggagaaa

SEQ ID NO: 1701752 - RNA, 19 nt, Homo sapiens
  misc_RNA (1)...(19): siRNA sense strand
agaagcaaacguuguagua

SEQ ID NO: 1701753 - RNA, 19 nt, Homo sapiens
  misc_RNA (1)...(19): siRNA sense strand
cauggagauucaccaaauu

SEQ ID NO: 1701754 - RNA, 19 nt, Homo sapiens
  misc_RNA (1)...(19): siRNA sense strand
aaagucagaguucauguuu

SEQ ID NO: 1701755 - RNA, 19 nt, Homo sapiens
  misc_RNA (1)...(19): siRNA sense strand
ugaaaguaauggaaaugug

SEQ ID NO: 1701756 - RNA, 19 nt, Homo sapiens
  misc_RNA (1)...(19): siRNA sense strand
gacaaagccacaaaggaaa

SEQ ID NO: 1701757 - RNA, 19 nt, Homo sapiens
  misc_RNA (1)...(19): siRNA sense strand
ccacccacaccuaguauuu

SEQ ID NO: 1701758 - RNA, 19 nt, Homo sapiens
  misc_RNA (1)...(19): siRNA sense strand
gcucucugcuuuguugauu

SEQ ID NO: 1701759 - RNA, 19 nt, Homo sapiens
  misc_RNA (1)...(19): siRNA sense strand
uacaaacucugucucuaau

SEQ ID NO: 1701760 - RNA, 19 nt, Homo sapiens
  misc_RNA (1)...(19): siRNA sense strand
auucaucacugccuacaaa

SEQ ID NO: 1701761 - RNA, 19 nt, Homo sapiens
  misc_RNA (1)...(19): siRNA sense strand
gaagguguuauucaaguau

SEQ ID NO: 1701762 - RNA, 19 nt, Homo sapiens
  misc_RNA (1)...(19): siRNA sense strand
gucaagaaauuccaguuua

SEQ ID NO: 1701763 - RNA, 19 nt, Homo sapiens
  misc_RNA (1)...(19): siRNA sense strand
cgaagcacauggaggauga

SEQ ID NO: 1701764 - RNA, 19 nt, Homo sapiens
  misc_RNA (1)...(19): siRNA sense strand
ucaagaaauuccaguuuac

SEQ ID NO: 1701765 - RNA, 19 nt, Homo sapiens
  misc_RNA (1)...(19): siRNA sense strand
ccagcugguucgacucuuu

SEQ ID NO: 1701766 - RNA, 19 nt, Homo sapiens
  misc_RNA (1)...(19): siRNA sense strand
gaagcgcuuugggcacauu

SEQ ID NO: 1701767 - RNA, 19 nt, Homo sapiens
  misc_RNA (1)...(19): siRNA sense strand
cacgaggaauugaagagaa

SEQ ID NO: 1701768 - RNA, 19 nt, Homo sapiens
  misc_RNA (1)...(19): siRNA sense strand
gcacgaggaauugaagaga

SEQ ID NO: 1701769 - RNA, 19 nt, Homo sapiens
  misc_RNA (1)...(19): siRNA sense strand
cgucaagaaauuccaguuu

SEQ ID NO: 1701770 - RNA, 19 nt, Homo sapiens
  misc_RNA (1)...(19): siRNA sense strand
uuuaucgcgucaagaaauu

SEQ ID NO: 1701771 - RNA, 19 nt, Homo sapiens
  misc_RNA (1)...(19): siRNA sense strand
ugaaguuuaucgcgucaag

SEQ ID NO: 1701772 - RNA, 19 nt, Homo sapiens
  misc_RNA (1)...(19): siRNA sense strand
acgaggaauugaagagaau

SEQ ID NO: 1701773 - RNA, 19 nt, Homo sapiens
  misc_RNA (1)...(19): siRNA sense strand
guuuaucgcgucaagaaau

SEQ ID NO: 1701774 - RNA, 19 nt, Homo sapiens
  misc_RNA (1)...(19): siRNA sense strand
aaguuuaucgcgucaagaa

SEQ ID NO: 1701775 - RNA, 19 nt, Homo sapiens
  misc_RNA (1)...(19): siRNA sense strand
gaaguuuaucgcgucaaga

SEQ ID NO: 1701776 - RNA, 19 nt, Homo sapiens
  misc_RNA (1)...(19): siRNA sense strand
guaaagcacuggcaaguuu

SEQ ID NO: 1701777 - RNA, 19 nt, Homo sapiens
  misc_RNA (1)...(19): siRNA sense strand
gcaaguuuguuacuguuaa

SEQ ID NO: 1701778 - RNA, 19 nt, Homo sapiens
  misc_RNA (1)...(19): siRNA sense strand
acacugaguucucuauauu

SEQ ID NO: 1701779 - RNA, 19 nt, Homo sapiens
  misc_RNA (1)...(19): siRNA sense strand
uguacuacguccuuguuua

SEQ ID NO: 1701780 - RNA, 19 nt, Homo sapiens
  misc_RNA (1)...(19): siRNA sense strand
ugucaaauaccaaugcuuu

SEQ ID NO: 1701781 - RNA, 19 nt, Homo sapiens
  misc_RNA (1)...(19): siRNA sense strand
guacacgugguccagauuu

SEQ ID NO: 1701782 - RNA, 19 nt, Homo sapiens
  misc_RNA (1)...(19): siRNA sense strand
uaaacugcgucucggaugu

SEQ ID NO: 1701783 - RNA, 19 nt, Homo sapiens
  misc_RNA (1)...(19): siRNA sense strand
gaacaucuuguccuuuuaa

SEQ ID NO: 1701784 - RNA, 19 nt, Homo sapiens
  misc_RNA (1)...(19): siRNA sense strand
uaccaaugcuuuauaucga

SEQ ID NO: 1701785 - RNA, 19 nt, Homo sapiens
  misc_RNA (1)...(19): siRNA sense strand
cacacugaguucucuauau

SEQ ID NO: 1701786 - RNA, 19 nt, Homo sapiens
  misc_RNA (1)...(19): siRNA sense strand
ggaagcuggcaguguguaa

SEQ ID NO: 1701787 - RNA, 19 nt, Homo sapiens
  misc_RNA (1)...(19): siRNA sense strand
guacuacguccuuguuuag

SEQ ID NO: 1701788 - RNA, 19 nt, Homo sapiens
  misc_RNA (1)...(19): siRNA sense strand
gaagcuggcaguguguaaa

SEQ ID NO: 1701789 - RNA, 19 nt, Homo sapiens
  misc_RNA (1)...(19): siRNA sense strand
gucaaauaccaaugcuuua

SEQ ID NO: 1701790 - RNA, 19 nt, Homo sapiens
  misc_RNA (1)...(19): siRNA sense strand
gcaugaccuuggcgucugu

SEQ ID NO: 1701791 - RNA, 19 nt, Homo sapiens
  misc_RNA (1)...(19): siRNA sense strand
cagauuuguccuugucuuu

SEQ ID NO: 1701792 - RNA, 19 nt, Homo sapiens
  misc_RNA (1)...(19): siRNA sense strand
ggcaaguuuguuacuguua

SEQ ID NO: 1701793 - RNA, 19 nt, Homo sapiens
  misc_RNA (1)...(19): siRNA sense strand
uauugaacaucuuguccuu

SEQ ID NO: 1701794 - RNA, 19 nt, Homo sapiens
  misc_RNA (1)...(19): siRNA sense strand
ucacacugaguucucuaua

SEQ ID NO: 1701795 - RNA, 19 nt, Homo sapiens
  misc_RNA (1)...(19): siRNA sense strand
ccagauuuguccuugucuu

SEQ ID NO: 1701796 - RNA, 19 nt, Homo sapiens
  misc_RNA (1)...(19): siRNA sense strand
uggcaaguuuguuacuguu

SEQ ID NO: 1701797 - RNA, 19 nt, Homo sapiens
  misc_RNA (1)...(19): siRNA sense strand
cuccacaccugccucauca

SEQ ID NO: 1701798 - RNA, 19 nt, Homo sapiens
  misc_RNA (1)...(19): siRNA sense strand
guccagauuuguccuuguc

SEQ ID NO: 1701799 - RNA, 19 nt, Homo sapiens
  misc_RNA (1)...(19): siRNA sense strand
gcacuggcaaguuuguuac

SEQ ID NO: 1701800 - RNA, 19 nt, Homo sapiens
  misc_RNA (1)...(19): siRNA sense strand
uaucgacgcgaagugcuua

SEQ ID NO: 1701801 - RNA, 19 nt, Homo sapiens
  misc_RNA (1)...(19): siRNA sense strand
uaaagcacuggcaaguuug

SEQ ID NO: 1701802 - RNA, 19 nt, Homo sapiens
  misc_RNA (1)...(19): siRNA sense strand
uugaacaucuuguccuuuu

SEQ ID NO: 1701803 - RNA, 19 nt, Homo sapiens
  misc_RNA (1)...(19): siRNA sense strand
gaccuuggcgucuguucug

SEQ ID NO: 1701804 - RNA, 19 nt, Homo sapiens
  misc_RNA (1)...(19): siRNA sense strand
gguccagauuuguccuugu

SEQ ID NO: 1701805 - RNA, 19 nt, Homo sapiens
  misc_RNA (1)...(19): siRNA sense strand
gggcaccccucaauugugu

SEQ ID NO: 1701806 - RNA, 19 nt, Homo sapiens
  misc_RNA (1)...(19): siRNA sense strand
gcggcgaggcuacgacaau

SEQ ID NO: 1701807 - RNA, 19 nt, Homo sapiens
  misc_RNA (1)...(19): siRNA sense strand
gcaacguggcccugcuuca

SEQ ID NO: 1701808 - RNA, 19 nt, Homo sapiens
  misc_RNA (1)...(19): siRNA sense strand
uacacgugguccagauuug

SEQ ID NO: 1701809 - RNA, 19 nt, Homo sapiens
  misc_RNA (1)...(19): siRNA sense strand
ugaacaucuuguccuuuua

SEQ ID NO: 1701810 - RNA, 19 nt, Homo sapiens
  misc_RNA (1)...(19): siRNA sense strand
ccucaauuguguacuacgu

SEQ ID NO: 1701811 - RNA, 19 nt, Homo sapiens
  misc_RNA (1)...(19): siRNA sense strand
cgucucggaugucugucuu

SEQ ID NO: 1701812 - RNA, 19 nt, Homo sapiens
  misc_RNA (1)...(19): siRNA sense strand
uuaagccagaguaguguaa

SEQ ID NO: 1701813 - RNA, 19 nt, Homo sapiens
  misc_RNA (1)...(19): siRNA sense strand
gucaagaaauuccaguuua

SEQ ID NO: 1701814 - RNA, 19 nt, Homo sapiens
  misc_RNA (1)...(19): siRNA sense strand
cgaagcacauggaggauga

SEQ ID NO: 1701815 - RNA, 19 nt, Homo sapiens
  misc_RNA (1)...(19): siRNA sense strand
ucaagaaauuccaguuuac

SEQ ID NO: 1701816 - RNA, 19 nt, Homo sapiens
  misc_RNA (1)...(19): siRNA sense strand
ccagcugguucgacucuuu

SEQ ID NO: 1701817 - RNA, 19 nt, Homo sapiens
  misc_RNA (1)...(19): siRNA sense strand
gaagcgcuuugggcacauu

SEQ ID NO: 1701818 - RNA, 19 nt, Homo sapiens
  misc_RNA (1)...(19): siRNA sense strand
cacgaggaauugaagagaa

SEQ ID NO: 1701819 - RNA, 19 nt, Homo sapiens
  misc_RNA (1)...(19): siRNA sense strand
gcacgaggaauugaagaga

SEQ ID NO: 1701820 - RNA, 19 nt, Homo sapiens
  misc_RNA (1)...(19): siRNA sense strand
cgucaagaaauuccaguuu

SEQ ID NO: 1701821 - RNA, 19 nt, Homo sapiens
  misc_RNA (1)...(19): siRNA sense strand
uuuaucgcgucaagaaauu

SEQ ID NO: 1701822 - RNA, 19 nt, Homo sapiens
  misc_RNA (1)...(19): siRNA sense strand
ugaaguuuaucgcgucaag

SEQ ID NO: 1701823 - RNA, 19 nt, Homo sapiens
  misc_RNA (1)...(19): siRNA sense strand
acgaggaauugaagagaau

SEQ ID NO: 1701824 - RNA, 19 nt, Homo sapiens
  misc_RNA (1)...(19): siRNA sense strand
guuuaucgcgucaagaaau

SEQ ID NO: 1701825 - RNA, 19 nt, Homo sapiens
  misc_RNA (1)...(19): siRNA sense strand
aaguuuaucgcgucaagaa

SEQ ID NO: 1701826 - RNA, 19 nt, Homo sapiens
  misc_RNA (1)...(19): siRNA sense strand
gaaguuuaucgcgucaaga

SEQ ID NO: 1701827 - RNA, 19 nt, Homo sapiens
  misc_RNA (1)...(19): siRNA sense strand
guaaagcacuggcaaguuu

SEQ ID NO: 1701828 - RNA, 19 nt, Homo sapiens
  misc_RNA (1)...(19): siRNA sense strand
gcaaguuuguuacuguuaa

SEQ ID NO: 1701829 - RNA, 19 nt, Homo sapiens
  misc_RNA (1)...(19): siRNA sense strand
acacugaguucucuauauu

SEQ ID NO: 1701830 - RNA, 19 nt, Homo sapiens
  misc_RNA (1)...(19): siRNA sense strand
uguacuacguccuuguuua

SEQ ID NO: 1701831 - RNA, 19 nt, Homo sapiens
  misc_RNA (1)...(19): siRNA sense strand
ugucaaauaccaaugcuuu

SEQ ID NO: 1701832 - RNA, 19 nt, Homo sapiens
  misc_RNA (1)...(19): siRNA sense strand
guacacgugguccagauuu

SEQ ID NO: 1701833 - RNA, 19 nt, Homo sapiens
  misc_RNA (1)...(19): siRNA sense strand
uaaacugcgucucggaugu

SEQ ID NO: 1701834 - RNA, 19 nt, Homo sapiens
  misc_RNA (1)...(19): siRNA sense strand
gaacaucuuguccuuuuaa

SEQ ID NO: 1701835 - RNA, 19 nt, Homo sapiens
  misc_RNA (1)...(19): siRNA sense strand
uaccaaugcuuuauaucga

SEQ ID NO: 1701836 - RNA, 19 nt, Homo sapiens
  misc_RNA (1)...(19): siRNA sense strand
cacacugaguucucuauau

SEQ ID NO: 1701837 - RNA, 19 nt, Homo sapiens
  misc_RNA (1)...(19): siRNA sense strand
ggaagcuggcaguguguaa

SEQ ID NO: 1701838 - RNA, 19 nt, Homo sapiens
  misc_RNA (1)...(19): siRNA sense strand
guacuacguccuuguuuag

SEQ ID NO: 1701839 - RNA, 19 nt, Homo sapiens
  misc_RNA (1)...(19): siRNA sense strand
gaagcuggcaguguguaaa

SEQ ID NO: 1701840 - RNA, 19 nt, Homo sapiens
  misc_RNA (1)...(19): siRNA sense strand
gucaaauaccaaugcuuua

SEQ ID NO: 1701841 - RNA, 19 nt, Homo sapiens
  misc_RNA (1)...(19): siRNA sense strand
gcaugaccuuggcgucugu

SEQ ID NO: 1701842 - RNA, 19 nt, Homo sapiens
  misc_RNA (1)...(19): siRNA sense strand
cagauuuguccuugucuuu

SEQ ID NO: 1701843 - RNA, 19 nt, Homo sapiens
  misc_RNA (1)...(19): siRNA sense strand
ggcaaguuuguuacuguua

SEQ ID NO: 1701844 - RNA, 19 nt, Homo sapiens
  misc_RNA (1)...(19): siRNA sense strand
uauugaacaucuuguccuu

SEQ ID NO: 1701845 - RNA, 19 nt, Homo sapiens
  misc_RNA (1)...(19): siRNA sense strand
ucacacugaguucucuaua

SEQ ID NO: 1701846 - RNA, 19 nt, Homo sapiens
  misc_RNA (1)...(19): siRNA sense strand
ccagauuuguccuugucuu

SEQ ID NO: 1701847 - RNA, 19 nt, Homo sapiens
  misc_RNA (1)...(19): siRNA sense strand
uggcaaguuuguuacuguu

SEQ ID NO: 1701848 - RNA, 19 nt, Homo sapiens
  misc_RNA (1)...(19): siRNA sense strand
cuccacaccugccucauca

SEQ ID NO: 1701849 - RNA, 19 nt, Homo sapiens
  misc_RNA (1)...(19): siRNA sense strand
guccagauuuguccuuguc

SEQ ID NO: 1701850 - RNA, 19 nt, Homo sapiens
  misc_RNA (1)...(19): siRNA sense strand
gcacuggcaaguuuguuac

SEQ ID NO: 1701851 - RNA, 19 nt, Homo sapiens
  misc_RNA (1)...(19): siRNA sense strand
uaucgacgcgaagugcuua

SEQ ID NO: 1701852 - RNA, 19 nt, Homo sapiens
  misc_RNA (1)...(19): siRNA sense strand
uaaagcacuggcaaguuug

SEQ ID NO: 1701853 - RNA, 19 nt, Homo sapiens
  misc_RNA (1)...(19): siRNA sense strand
uugaacaucuuguccuuuu

SEQ ID NO: 1701854 - RNA, 19 nt, Homo sapiens
  misc_RNA (1)...(19): siRNA sense strand
gaccuuggcgucuguucug

SEQ ID NO: 1701855 - RNA, 19 nt, Homo sapiens
  misc_RNA (1)...(19): siRNA sense strand
gguccagauuuguccuugu

SEQ ID NO: 1701856 - RNA, 19 nt, Homo sapiens
  misc_RNA (1)...(19): siRNA sense strand
gggcaccccucaauugugu

SEQ ID NO: 1701857 - RNA, 19 nt, Homo sapiens
  misc_RNA (1)...(19): siRNA sense strand
gcggcgaggcuacgacaau

SEQ ID NO: 1701858 - RNA, 19 nt, Homo sapiens
  misc_RNA (1)...(19): siRNA sense strand
gcaacguggcccugcuuca

SEQ ID NO: 1701859 - RNA, 19 nt, Homo sapiens
  misc_RNA (1)...(19): siRNA sense strand
uacacgugguccagauuug

SEQ ID NO: 1701860 - RNA, 19 nt, Homo sapiens
  misc_RNA (1)...(19): siRNA sense strand
ugaacaucuuguccuuuua

SEQ ID NO: 1701861 - RNA, 19 nt, Homo sapiens
  misc_RNA (1)...(19): siRNA sense strand
ccucaauuguguacuacgu

SEQ ID NO: 1701862 - RNA, 19 nt, Homo sapiens
  misc_RNA (1)...(19): siRNA sense strand
cgucucggaugucugucuu

SEQ ID NO: 1701863 - RNA, 19 nt, Homo sapiens
  misc_RNA (1)...(19): siRNA sense strand
uuaagccagaguaguguaa

SEQ ID NO: 1701864 - RNA, 19 nt, Homo sapiens
  misc_RNA (1)...(19): siRNA sense strand
ggaguuaucuguuuagcaa

SEQ ID NO: 1701865 - RNA, 19 nt, Homo sapiens
  misc_RNA (1)...(19): siRNA sense strand
ccaauaagguaucaagaaa

SEQ ID NO: 1701866 - RNA, 19 nt, Homo sapiens
  misc_RNA (1)...(19): siRNA sense strand
gggcugcuauucuuucuua

SEQ ID NO: 1701867 - RNA, 19 nt, Homo sapiens
  misc_RNA (1)...(19): siRNA sense strand
ucaguuacauucugguuua

SEQ ID NO: 1701868 - RNA, 19 nt, Homo sapiens
  misc_RNA (1)...(19): siRNA sense strand
gaaaagaacucaggcauga

SEQ ID NO: 1701869 - RNA, 19 nt, Homo sapiens
  misc_RNA (1)...(19): siRNA sense strand
guaaugagaccaugccaua

SEQ ID NO: 1701870 - RNA, 19 nt, Homo sapiens
  misc_RNA (1)...(19): siRNA sense strand
uuaaggagauguucaaaug

SEQ ID NO: 1701871 - RNA, 19 nt, Homo sapiens
  misc_RNA (1)...(19): siRNA sense strand
gaugaugguugguguaaau

SEQ ID NO: 1701872 - RNA, 19 nt, Homo sapiens
  misc_RNA (1)...(19): siRNA sense strand
caggagaaauuguugcuuu

SEQ ID NO: 1701873 - RNA, 19 nt, Homo sapiens
  misc_RNA (1)...(19): siRNA sense strand
ccacucagaugacuuacuu

SEQ ID NO: 1701874 - RNA, 19 nt, Homo sapiens
  misc_RNA (1)...(19): siRNA sense strand
ggauauagccauucuuguu

SEQ ID NO: 1701875 - RNA, 19 nt, Homo sapiens
  misc_RNA (1)...(19): siRNA sense strand
gaucaucaaugcagaagca

SEQ ID NO: 1701876 - RNA, 19 nt, Homo sapiens
  misc_RNA (1)...(19): siRNA sense strand
uguuugaccucuacacuua

SEQ ID NO: 1701877 - RNA, 19 nt, Homo sapiens
  misc_RNA (1)...(19): siRNA sense strand
gcaaauccacccaaugcua

SEQ ID NO: 1701878 - RNA, 19 nt, Homo sapiens
  misc_RNA (1)...(19): siRNA sense strand
ccaaauaucgaacaaagaa

SEQ ID NO: 1701879 - RNA, 19 nt, Homo sapiens
  misc_RNA (1)...(19): siRNA sense strand
caugugaacccucuuuaua

SEQ ID NO: 1701880 - RNA, 19 nt, Homo sapiens
  misc_RNA (1)...(19): siRNA sense strand
ggacaugaaauaaaugaga

SEQ ID NO: 1701881 - RNA, 19 nt, Homo sapiens
  misc_RNA (1)...(19): siRNA sense strand
ucugauaucuucuuugaug

SEQ ID NO: 1701882 - RNA, 19 nt, Homo sapiens
  misc_RNA (1)...(19): siRNA sense strand
cagcuuugcuaccuaguuu

SEQ ID NO: 1701883 - RNA, 19 nt, Homo sapiens
  misc_RNA (1)...(19): siRNA sense strand
uaacugagguagccagcaa

SEQ ID NO: 1701884 - RNA, 19 nt, Homo sapiens
  misc_RNA (1)...(19): siRNA sense strand
gaagguggcaucugcuuau

SEQ ID NO: 1701885 - RNA, 19 nt, Homo sapiens
  misc_RNA (1)...(19): siRNA sense strand
cuaaguggauaggaaauaa

SEQ ID NO: 1701886 - RNA, 19 nt, Homo sapiens
  misc_RNA (1)...(19): siRNA sense strand
uaaaugagaggaaagagaa

SEQ ID NO: 1701887 - RNA, 19 nt, Homo sapiens
  misc_RNA (1)...(19): siRNA sense strand
gauauagccauucuuguug

SEQ ID NO: 1701888 - RNA, 19 nt, Homo sapiens
  misc_RNA (1)...(19): siRNA sense strand
cagcauggcuaauaauucu

SEQ ID NO: 1701889 - RNA, 19 nt, Homo sapiens
  misc_RNA (1)...(19): siRNA sense strand
caagcaagguggaguugga

SEQ ID NO: 1701890 - RNA, 19 nt, Homo sapiens
  misc_RNA (1)...(19): siRNA sense strand
gguuaaagcuggacuuggu

SEQ ID NO: 1701891 - RNA, 19 nt, Homo sapiens
  misc_RNA (1)...(19): siRNA sense strand
ugugaacccucuuuauauu

SEQ ID NO: 1701892 - RNA, 19 nt, Homo sapiens
  misc_RNA (1)...(19): siRNA sense strand
gguggcaucugcuuauuuc

SEQ ID NO: 1701893 - RNA, 19 nt, Homo sapiens
  misc_RNA (1)...(19): siRNA sense strand
gcuaccuaguuuaauguua

SEQ ID NO: 1701894 - RNA, 19 nt, Homo sapiens
  misc_RNA (1)...(19): siRNA sense strand
uuaccagcauggcuaauaa

SEQ ID NO: 1701895 - RNA, 19 nt, Homo sapiens
  misc_RNA (1)...(19): siRNA sense strand
ugauuacucuccacugauu

SEQ ID NO: 1701896 - RNA, 19 nt, Homo sapiens
  misc_RNA (1)...(19): siRNA sense strand
ggaauuugcacaagagaau

SEQ ID NO: 1701897 - RNA, 19 nt, Homo sapiens
  misc_RNA (1)...(19): siRNA sense strand
cagcuaagacacugacuaa

SEQ ID NO: 1701898 - RNA, 19 nt, Homo sapiens
  misc_RNA (1)...(19): siRNA sense strand
uaauggcucugcuaugguu

SEQ ID NO: 1701899 - RNA, 19 nt, Homo sapiens
  misc_RNA (1)...(19): siRNA sense strand
uauaauggcucugcuaugg

SEQ ID NO: 1701900 - RNA, 19 nt, Homo sapiens
  misc_RNA (1)...(19): siRNA sense strand
ccuuaucauucuacucuua

SEQ ID NO: 1701901 - RNA, 19 nt, Homo sapiens
  misc_RNA (1)...(19): siRNA sense strand
caauaaugauacagggaaa

SEQ ID NO: 1701902 - RNA, 19 nt, Homo sapiens
  misc_RNA (1)...(19): siRNA sense strand
ggacuuggugucaacauug

SEQ ID NO: 1701903 - RNA, 19 nt, Homo sapiens
  misc_RNA (1)...(19): siRNA sense strand
cugcuuauuucaaggauuu

SEQ ID NO: 1701904 - RNA, 19 nt, Homo sapiens
  misc_RNA (1)...(19): siRNA sense strand
cauauguacuuggauugua

SEQ ID NO: 1701905 - RNA, 19 nt, Homo sapiens
  misc_RNA (1)...(19): siRNA sense strand
gacuagaaauugaugaaag

SEQ ID NO: 1701906 - RNA, 19 nt, Homo sapiens
  misc_RNA (1)...(19): siRNA sense strand
caaccacggacuagaaauu

SEQ ID NO: 1701907 - RNA, 19 nt, Homo sapiens
  misc_RNA (1)...(19): siRNA sense strand
ucagaugacuuacuucaac

SEQ ID NO: 1701908 - RNA, 19 nt, Homo sapiens
  misc_RNA (1)...(19): siRNA sense strand
ugaggagucuggauuaucu

SEQ ID NO: 1701909 - RNA, 19 nt, Homo sapiens
  misc_RNA (1)...(19): siRNA sense strand
guaacagcuuugcuaccua

SEQ ID NO: 1701910 - RNA, 19 nt, Homo sapiens
  misc_RNA (1)...(19): siRNA sense strand
ccaaaacaguccaacaaaa

SEQ ID NO: 1701911 - RNA, 19 nt, Homo sapiens
  misc_RNA (1)...(19): siRNA sense strand
gccaauaagguaucaagaa

SEQ ID NO: 1701912 - RNA, 19 nt, Homo sapiens
  misc_RNA (1)...(19): siRNA sense strand
uuagcaacauccauagaaa

SEQ ID NO: 1701913 - RNA, 19 nt, Homo sapiens
  misc_RNA (1)...(19): siRNA sense strand
caaauccacccaaugcuau

SEQ ID NO: 1701914 - RNA, 19 nt, Homo sapiens
  misc_RNA (1)...(19): siRNA sense strand
gcucugcuaugguuuaguc

SEQ ID NO: 1701915 - RNA, 19 nt, Homo sapiens
  misc_RNA (1)...(19): siRNA sense strand
caacuuuggaucaugguuu

SEQ ID NO: 1701916 - RNA, 19 nt, Homo sapiens
  misc_RNA (1)...(19): siRNA sense strand
caaaaccaguuccaggaua

SEQ ID NO: 1701917 - RNA, 19 nt, Homo sapiens
  misc_RNA (1)...(19): siRNA sense strand
gagaauugcucugaaaaug

SEQ ID NO: 1701918 - RNA, 19 nt, Homo sapiens
  misc_RNA (1)...(19): siRNA sense strand
uggcauauguacuuggauu

SEQ ID NO: 1701919 - RNA, 19 nt, Homo sapiens
  misc_RNA (1)...(19): siRNA sense strand
ggacuagaaauugaugaaa

SEQ ID NO: 1701920 - RNA, 19 nt, Homo sapiens
  misc_RNA (1)...(19): siRNA sense strand
cgauuucucuucgugguuu

SEQ ID NO: 1701921 - RNA, 19 nt, Homo sapiens
  misc_RNA (1)...(19): siRNA sense strand
ugaugaaaguguuaaugga

SEQ ID NO: 1701922 - RNA, 19 nt, Homo sapiens
  misc_RNA (1)...(19): siRNA sense strand
gagucuggauuaucuaagu

SEQ ID NO: 1701923 - RNA, 19 nt, Homo sapiens
  misc_RNA (1)...(19): siRNA sense strand
cagcugcccuuaucauucu

SEQ ID NO: 1701924 - RNA, 19 nt, Homo sapiens
  misc_RNA (1)...(19): siRNA sense strand
gaucaugguuuacguuuuc

SEQ ID NO: 1701925 - RNA, 19 nt, Homo sapiens
  misc_RNA (1)...(19): siRNA sense strand
gaaccaaauaucgaacaaa

SEQ ID NO: 1701926 - RNA, 19 nt, Homo sapiens
  misc_RNA (1)...(19): siRNA sense strand
guuccaggauacaauaaug

SEQ ID NO: 1701927 - RNA, 19 nt, Homo sapiens
  misc_RNA (1)...(19): siRNA sense strand
ggauuguacccauguuuga

SEQ ID NO: 1701928 - RNA, 19 nt, Homo sapiens
  misc_RNA (1)...(19): siRNA sense strand
gagaaauuguugcuuuuga

SEQ ID NO: 1701929 - RNA, 19 nt, Homo sapiens
  misc_RNA (1)...(19): siRNA sense strand
gaaauaaaugagaggaaag

SEQ ID NO: 1701930 - RNA, 19 nt, Homo sapiens
  misc_RNA (1)...(19): siRNA sense strand
gcuauugucuuuucauaug

SEQ ID NO: 1701931 - RNA, 19 nt, Homo sapiens
  misc_RNA (1)...(19): siRNA sense strand
uugguccucuucauuauaa

SEQ ID NO: 1701932 - RNA, 19 nt, Homo sapiens
  misc_RNA (1)...(19): siRNA sense strand
aaggagauguucaaaugug

SEQ ID NO: 1701933 - RNA, 19 nt, Homo sapiens
  misc_RNA (1)...(19): siRNA sense strand
gggaucaugccuucuaaga

SEQ ID NO: 1701934 - RNA, 19 nt, Homo sapiens
  misc_RNA (1)...(19): siRNA sense strand
gcuaagacacugacuaaaa

SEQ ID NO: 1701935 - RNA, 19 nt, Homo sapiens
  misc_RNA (1)...(19): siRNA sense strand
ccaguuccaggauacaaua

SEQ ID NO: 1701936 - RNA, 19 nt, Homo sapiens
  misc_RNA (1)...(19): siRNA sense strand
gauuuucacuuacugcuaa

SEQ ID NO: 1701937 - RNA, 19 nt, Homo sapiens
  misc_RNA (1)...(19): siRNA sense strand
aaccaaauaucgaacaaag

SEQ ID NO: 1701938 - RNA, 19 nt, Homo sapiens
  misc_RNA (1)...(19): siRNA sense strand
caauccagcuaccauuaca

SEQ ID NO: 1701939 - RNA, 19 nt, Homo sapiens
  misc_RNA (1)...(19): siRNA sense strand
aacuuuggaucaugguuua

SEQ ID NO: 1701940 - RNA, 19 nt, Homo sapiens
  misc_RNA (1)...(19): siRNA sense strand
gcccugggauauagccauu

SEQ ID NO: 1701941 - RNA, 19 nt, Homo sapiens
  misc_RNA (1)...(19): siRNA sense strand
gcauggcuaauaauucuga

SEQ ID NO: 1701942 - RNA, 19 nt, Homo sapiens
  misc_RNA (1)...(19): siRNA sense strand
gcagaucaucaaugcagaa

SEQ ID NO: 1701943 - RNA, 19 nt, Homo sapiens
  misc_RNA (1)...(19): siRNA sense strand
cuaccuaguuuaauguuac

SEQ ID NO: 1701944 - RNA, 19 nt, Homo sapiens
  misc_RNA (1)...(19): siRNA sense strand
acucuccacugauuacuug

SEQ ID NO: 1701945 - RNA, 19 nt, Homo sapiens
  misc_RNA (1)...(19): siRNA sense strand
ugaacccucuuuauauucu

SEQ ID NO: 1701946 - RNA, 19 nt, Homo sapiens
  misc_RNA (1)...(19): siRNA sense strand
ggucgaggccacucagaug

SEQ ID NO: 1701947 - RNA, 19 nt, Homo sapiens
  misc_RNA (1)...(19): siRNA sense strand
gggcuccugcuaugaguaa

SEQ ID NO: 1701948 - RNA, 19 nt, Homo sapiens
  misc_RNA (1)...(19): siRNA sense strand
cagcuaccauuacacucuu

SEQ ID NO: 1701949 - RNA, 19 nt, Homo sapiens
  misc_RNA (1)...(19): siRNA sense strand
uaucuccucuggguucauu

SEQ ID NO: 1701950 - RNA, 19 nt, Homo sapiens
  misc_RNA (1)...(19): siRNA sense strand
gcuuugcuaccuaguuuaa

SEQ ID NO: 1701951 - RNA, 19 nt, Homo sapiens
  misc_RNA (1)...(19): siRNA sense strand
ugccuacucuucuaccauu

SEQ ID NO: 1701952 - RNA, 19 nt, Homo sapiens
  misc_RNA (1)...(19): siRNA sense strand
ccaggauacaauaaugaua

SEQ ID NO: 1701953 - RNA, 19 nt, Homo sapiens
  misc_RNA (1)...(19): siRNA sense strand
ggcaucugcuuauuucaag

SEQ ID NO: 1701954 - RNA, 19 nt, Homo sapiens
  misc_RNA (1)...(19): siRNA sense strand
gcuaauuggaguuaucugu

SEQ ID NO: 1701955 - RNA, 19 nt, Homo sapiens
  misc_RNA (1)...(19): siRNA sense strand
uacacucuuucucccaaua

SEQ ID NO: 1701956 - RNA, 19 nt, Homo sapiens
  misc_RNA (1)...(19): siRNA sense strand
cugauuacuuggaaagaau

SEQ ID NO: 1701957 - RNA, 19 nt, Homo sapiens
  misc_RNA (1)...(19): siRNA sense strand
uuugauuacucuccacuga

SEQ ID NO: 1701958 - RNA, 19 nt, Homo sapiens
  misc_RNA (1)...(19): siRNA sense strand
agaaccaaauaucgaacaa

SEQ ID NO: 1701959 - RNA, 19 nt, Homo sapiens
  misc_RNA (1)...(19): siRNA sense strand
gacuuggugucaacauugu

SEQ ID NO: 1701960 - RNA, 19 nt, Homo sapiens
  misc_RNA (1)...(19): siRNA sense strand
gauguucaaauguggcaaa

SEQ ID NO: 1701961 - RNA, 19 nt, Homo sapiens
  misc_RNA (1)...(19): siRNA sense strand
gaagcagaaugugccuaca

SEQ ID NO: 1701962 - RNA, 19 nt, Homo sapiens
  misc_RNA (1)...(19): siRNA sense strand
gaucuuugcagaguauuuc

SEQ ID NO: 1701963 - RNA, 19 nt, Homo sapiens
  misc_RNA (1)...(19): siRNA sense strand
cauauggucaucugaaagu

SEQ ID NO: 1701964 - RNA, 19 nt, Homo sapiens
  misc_RNA (1)...(19): siRNA sense strand
caggaaagcuuuaagaaua

SEQ ID NO: 1701965 - RNA, 19 nt, Homo sapiens
  misc_RNA (1)...(19): siRNA sense strand
gcaaugagcuucuugaauc

SEQ ID NO: 1701966 - RNA, 19 nt, Homo sapiens
  misc_RNA (1)...(19): siRNA sense strand
gcuaagagcucaacaggaa

SEQ ID NO: 1701967 - RNA, 19 nt, Homo sapiens
  misc_RNA (1)...(19): siRNA sense strand
aaacauguaugcccaaaua

SEQ ID NO: 1701968 - RNA, 19 nt, Homo sapiens
  misc_RNA (1)...(19): siRNA sense strand
gaaaucaauugcaaaggua

SEQ ID NO: 1701969 - RNA, 19 nt, Homo sapiens
  misc_RNA (1)...(19): siRNA sense strand
gcacaaggcucuggaagaa

SEQ ID NO: 1701970 - RNA, 19 nt, Homo sapiens
  misc_RNA (1)...(19): siRNA sense strand
gcacugaccucaauacugu

SEQ ID NO: 1701971 - RNA, 19 nt, Homo sapiens
  misc_RNA (1)...(19): siRNA sense strand
gaauguagaucaagcuauu

SEQ ID NO: 1701972 - RNA, 19 nt, Homo sapiens
  misc_RNA (1)...(19): siRNA sense strand
gaacugauguuaaagaaag

SEQ ID NO: 1701973 - RNA, 19 nt, Homo sapiens
  misc_RNA (1)...(19): siRNA sense strand
gaacacaaaccucauauug

SEQ ID NO: 1701974 - RNA, 19 nt, Homo sapiens
  misc_RNA (1)...(19): siRNA sense strand
caaaggaacuggcagagaa

SEQ ID NO: 1701975 - RNA, 19 nt, Homo sapiens
  misc_RNA (1)...(19): siRNA sense strand
gaauagugcugcugacauu

SEQ ID NO: 1701976 - RNA, 19 nt, Homo sapiens
  misc_RNA (1)...(19): siRNA sense strand
caacaaagcuggcaaugag

SEQ ID NO: 1701977 - RNA, 19 nt, Homo sapiens
  misc_RNA (1)...(19): siRNA sense strand
gaaaguagauggacugaac

SEQ ID NO: 1701978 - RNA, 19 nt, Homo sapiens
  misc_RNA (1)...(19): siRNA sense strand
ggaagagacuuauaaucaa

SEQ ID NO: 1701979 - RNA, 19 nt, Homo sapiens
  misc_RNA (1)...(19): siRNA sense strand
gcaagcagccuguguauga

SEQ ID NO: 1701980 - RNA, 19 nt, Homo sapiens
  misc_RNA (1)...(19): siRNA sense strand
caaaggcuaugcugaauga

SEQ ID NO: 1701981 - RNA, 19 nt, Homo sapiens
  misc_RNA (1)...(19): siRNA sense strand
caaagaaccaucagaaauu

SEQ ID NO: 1701982 - RNA, 19 nt, Homo sapiens
  misc_RNA (1)...(19): siRNA sense strand
gaaagaagaauguagauca

SEQ ID NO: 1701983 - RNA, 19 nt, Homo sapiens
  misc_RNA (1)...(19): siRNA sense strand
gaagcagagugucgacaua

SEQ ID NO: 1701984 - RNA, 19 nt, Homo sapiens
  misc_RNA (1)...(19): siRNA sense strand
gaacauugaccgaguuaaa

SEQ ID NO: 1701985 - RNA, 19 nt, Homo sapiens
  misc_RNA (1)...(19): siRNA sense strand
gaagacaguuaaagagaga

SEQ ID NO: 1701986 - RNA, 19 nt, Homo sapiens
  misc_RNA (1)...(19): siRNA sense strand
ccacacagauuacagaguu

SEQ ID NO: 1701987 - RNA, 19 nt, Homo sapiens
  misc_RNA (1)...(19): siRNA sense strand
gagaagggcuggauaaacu

SEQ ID NO: 1701988 - RNA, 19 nt, Homo sapiens
  misc_RNA (1)...(19): siRNA sense strand
ggaccugguuggaugauaa

SEQ ID NO: 1701989 - RNA, 19 nt, Homo sapiens
  misc_RNA (1)...(19): siRNA sense strand
gcaguaagauggaagaaag

SEQ ID NO: 1701990 - RNA, 19 nt, Homo sapiens
  misc_RNA (1)...(19): siRNA sense strand
aaaaguagcucgugacaua

SEQ ID NO: 1701991 - RNA, 19 nt, Homo sapiens
  misc_RNA (1)...(19): siRNA sense strand
gaacaaacaguguggcaaa

SEQ ID NO: 1701992 - RNA, 19 nt, Homo sapiens
  misc_RNA (1)...(19): siRNA sense strand
gaaaucagccagaucaaga

SEQ ID NO: 1701993 - RNA, 19 nt, Homo sapiens
  misc_RNA (1)...(19): siRNA sense strand
agaaagagcuggagaacau

SEQ ID NO: 1701994 - RNA, 19 nt, Homo sapiens
  misc_RNA (1)...(19): siRNA sense strand
gaagauagucagaaacuug

SEQ ID NO: 1701995 - RNA, 19 nt, Homo sapiens
  misc_RNA (1)...(19): siRNA sense strand
gggaacagcuugauacaca

SEQ ID NO: 1701996 - RNA, 19 nt, Homo sapiens
  misc_RNA (1)...(19): siRNA sense strand
gaagagcauugaugagaug

SEQ ID NO: 1701997 - RNA, 19 nt, Homo sapiens
  misc_RNA (1)...(19): siRNA sense strand
ugacggagauccaguguga

SEQ ID NO: 1701998 - RNA, 19 nt, Homo sapiens
  misc_RNA (1)...(19): siRNA sense strand
gcaaagaaccaucagaaau

SEQ ID NO: 1701999 - RNA, 19 nt, Homo sapiens
  misc_RNA (1)...(19): siRNA sense strand
gcucauagccaaucagaaa

SEQ ID NO: 1702000 - RNA, 19 nt, Homo sapiens
  misc_RNA (1)...(19): siRNA sense strand
ggacucagaacuagagaua

SEQ ID NO: 1702001 - RNA, 19 nt, Homo sapiens
  misc_RNA (1)...(19): siRNA sense strand
ccacaggcauguucaagaa

SEQ ID NO: 1702002 - RNA, 19 nt, Homo sapiens
  misc_RNA (1)...(19): siRNA sense strand
gauaacacgucaggaguuu

SEQ ID NO: 1702003 - RNA, 19 nt, Homo sapiens
  misc_RNA (1)...(19): siRNA sense strand
gccgagagcugauugagaa

SEQ ID NO: 1702004 - RNA, 19 nt, Homo sapiens
  misc_RNA (1)...(19): siRNA sense strand
ccaccaagccugauucuaa

SEQ ID NO: 1702005 - RNA, 19 nt, Homo sapiens
  misc_RNA (1)...(19): siRNA sense strand
gauagaagauuguaaagcu

SEQ ID NO: 1702006 - RNA, 19 nt, Homo sapiens
  misc_RNA (1)...(19): siRNA sense strand
ggaccaggaugggaagaua

SEQ ID NO: 1702007 - RNA, 19 nt, Homo sapiens
  misc_RNA (1)...(19): siRNA sense strand
gaucaaugcucgauggaau

SEQ ID NO: 1702008 - RNA, 19 nt, Homo sapiens
  misc_RNA (1)...(19): siRNA sense strand
caaaggagacuugagauuu

SEQ ID NO: 1702009 - RNA, 19 nt, Homo sapiens
  misc_RNA (1)...(19): siRNA sense strand
acacaaagauucaauggau

SEQ ID NO: 1702010 - RNA, 19 nt, Homo sapiens
  misc_RNA (1)...(19): siRNA sense strand
ccaccuggcuuuaaaugaa

SEQ ID NO: 1702011 - RNA, 19 nt, Homo sapiens
  misc_RNA (1)...(19): siRNA sense strand
ggaagagaccagugaaauu

SEQ ID NO: 1702012 - RNA, 19 nt, Homo sapiens
  misc_RNA (1)...(19): siRNA sense strand
guacauccaugccaucuuc

SEQ ID NO: 1702013 - RNA, 19 nt, Homo sapiens
  misc_RNA (1)...(19): siRNA sense strand
gaacuuagagagaaauuca

SEQ ID NO: 1702014 - RNA, 19 nt, Homo sapiens
  misc_RNA (1)...(19): siRNA sense strand
ugucagaacugguggcuaa

SEQ ID NO: 1702015 - RNA, 19 nt, Homo sapiens
  misc_RNA (1)...(19): siRNA sense strand
cagaaaugguugaaagaaa

SEQ ID NO: 1702016 - RNA, 19 nt, Homo sapiens
  misc_RNA (1)...(19): siRNA sense strand
ggaggaagcccugcucuuu

SEQ ID NO: 1702017 - RNA, 19 nt, Homo sapiens
  misc_RNA (1)...(19): siRNA sense strand
gacaaaggguggaugaaau

SEQ ID NO: 1702018 - RNA, 19 nt, Homo sapiens
  misc_RNA (1)...(19): siRNA sense strand
gaagagaccagugaaauuc

SEQ ID NO: 1702019 - RNA, 19 nt, Homo sapiens
  misc_RNA (1)...(19): siRNA sense strand
aaaggagacuugagauuug

SEQ ID NO: 1702020 - RNA, 19 nt, Homo sapiens
  misc_RNA (1)...(19): siRNA sense strand
gagcagaucggagagaaua

SEQ ID NO: 1702021 - RNA, 19 nt, Homo sapiens
  misc_RNA (1)...(19): siRNA sense strand
ugaaagaauuugccaacuu

SEQ ID NO: 1702022 - RNA, 19 nt, Homo sapiens
  misc_RNA (1)...(19): siRNA sense strand
ggacagagacauuauacga

SEQ ID NO: 1702023 - RNA, 19 nt, Homo sapiens
  misc_RNA (1)...(19): siRNA sense strand
ggaauuaaacccugaggaa

SEQ ID NO: 1702024 - RNA, 19 nt, Homo sapiens
  misc_RNA (1)...(19): siRNA sense strand
gaucaaaggcuaugcugaa

SEQ ID NO: 1702025 - RNA, 19 nt, Homo sapiens
  misc_RNA (1)...(19): siRNA sense strand
caagacagguuccauacug

SEQ ID NO: 1702026 - RNA, 19 nt, Homo sapiens
  misc_RNA (1)...(19): siRNA sense strand
gaacucugguggaagaaau

SEQ ID NO: 1702027 - RNA, 19 nt, Homo sapiens
  misc_RNA (1)...(19): siRNA sense strand
uaaagaaagcuacugauga

SEQ ID NO: 1702028 - RNA, 19 nt, Homo sapiens
  misc_RNA (1)...(19): siRNA sense strand
acaaggaucuggcugcaaa

SEQ ID NO: 1702029 - RNA, 19 nt, Homo sapiens
  misc_RNA (1)...(19): siRNA sense strand
cagcugagccuauuucuga

SEQ ID NO: 1702030 - RNA, 19 nt, Homo sapiens
  misc_RNA (1)...(19): siRNA sense strand
uggcagaccuggaugauga

SEQ ID NO: 1702031 - RNA, 19 nt, Homo sapiens
  misc_RNA (1)...(19): siRNA sense strand
caacagaugcugcaacaga

SEQ ID NO: 1702032 - RNA, 19 nt, Homo sapiens
  misc_RNA (1)...(19): siRNA sense strand
cauaaggaauucaugaaga

SEQ ID NO: 1702033 - RNA, 19 nt, Homo sapiens
  misc_RNA (1)...(19): siRNA sense strand
ccaaggaagagacuuauaa

SEQ ID NO: 1702034 - RNA, 19 nt, Homo sapiens
  misc_RNA (1)...(19): siRNA sense strand
gaacagcuugauacacaua

SEQ ID NO: 1702035 - RNA, 19 nt, Homo sapiens
  misc_RNA (1)...(19): siRNA sense strand
gcauugaugagaugaauaa

SEQ ID NO: 1702036 - RNA, 19 nt, Homo sapiens
  misc_RNA (1)...(19): siRNA sense strand
ggaagagcauugaugagau

SEQ ID NO: 1702037 - RNA, 19 nt, Homo sapiens
  misc_RNA (1)...(19): siRNA sense strand
aaagauaggcccacaacua

SEQ ID NO: 1702038 - RNA, 19 nt, Homo sapiens
  misc_RNA (1)...(19): siRNA sense strand
ggacaaaggguggaugaaa

SEQ ID NO: 1702039 - RNA, 19 nt, Homo sapiens
  misc_RNA (1)...(19): siRNA sense strand
ccucagaacuuuagagcaa

SEQ ID NO: 1702040 - RNA, 19 nt, Homo sapiens
  misc_RNA (1)...(19): siRNA sense strand
ggaaagggccacugagguu

SEQ ID NO: 1702041 - RNA, 19 nt, Homo sapiens
  misc_RNA (1)...(19): siRNA sense strand
gaaccuagauacucuugag

SEQ ID NO: 1702042 - RNA, 19 nt, Homo sapiens
  misc_RNA (1)...(19): siRNA sense strand
ucacugaacugagcucuug

SEQ ID NO: 1702043 - RNA, 19 nt, Homo sapiens
  misc_RNA (1)...(19): siRNA sense strand
gaaagagggcgaucacuag

SEQ ID NO: 1702044 - RNA, 19 nt, Homo sapiens
  misc_RNA (1)...(19): siRNA sense strand
gccauuagccuacucaauu

SEQ ID NO: 1702045 - RNA, 19 nt, Homo sapiens
  misc_RNA (1)...(19): siRNA sense strand
gcagagacagaaggaauua

SEQ ID NO: 1702046 - RNA, 19 nt, Homo sapiens
  misc_RNA (1)...(19): siRNA sense strand
ccaaggcccucagaacuuu

SEQ ID NO: 1702047 - RNA, 19 nt, Homo sapiens
  misc_RNA (1)...(19): siRNA sense strand
gaaaaggacucuacaaaac

SEQ ID NO: 1702048 - RNA, 19 nt, Homo sapiens
  misc_RNA (1)...(19): siRNA sense strand
gaaagggccacugagguua

SEQ ID NO: 1702049 - RNA, 19 nt, Homo sapiens
  misc_RNA (1)...(19): siRNA sense strand
gaaggcccgucaccaagaa

SEQ ID NO: 1702050 - RNA, 19 nt, Homo sapiens
  misc_RNA (1)...(19): siRNA sense strand
ggagaugacucgcaaacag

SEQ ID NO: 1702051 - RNA, 19 nt, Homo sapiens
  misc_RNA (1)...(19): siRNA sense strand
gcagaacauugaccgaguu

SEQ ID NO: 1702052 - RNA, 19 nt, Homo sapiens
  misc_RNA (1)...(19): siRNA sense strand
gcagagcacugaaagaaaa

SEQ ID NO: 1702053 - RNA, 19 nt, Homo sapiens
  misc_RNA (1)...(19): siRNA sense strand
gcuagaagaugcagagagu

SEQ ID NO: 1702054 - RNA, 19 nt, Homo sapiens
  misc_RNA (1)...(19): siRNA sense strand
gaagagacuuauaaucaac

SEQ ID NO: 1702055 - RNA, 19 nt, Homo sapiens
  misc_RNA (1)...(19): siRNA sense strand
gcaauuaagggaaucuauu

SEQ ID NO: 1702056 - RNA, 19 nt, Homo sapiens
  misc_RNA (1)...(19): siRNA sense strand
gaggaaaugaggcaauuaa

SEQ ID NO: 1702057 - RNA, 19 nt, Homo sapiens
  misc_RNA (1)...(19): siRNA sense strand
ugaaauugaugcugcuauu

SEQ ID NO: 1702058 - RNA, 19 nt, Homo sapiens
  misc_RNA (1)...(19): siRNA sense strand
gccuauuucugacuucuua

SEQ ID NO: 1702059 - RNA, 19 nt, Homo sapiens
  misc_RNA (1)...(19): siRNA sense strand
acaaagaauugcacagcua

SEQ ID NO: 1702060 - RNA, 19 nt, Homo sapiens
  misc_RNA (1)...(19): siRNA sense strand
gaucugacuuggagcaguu

SEQ ID NO: 1702061 - RNA, 19 nt, Homo sapiens
  misc_RNA (1)...(19): siRNA sense strand
ggcauugguugacugguua

SEQ ID NO: 1702062 - RNA, 19 nt, Homo sapiens
  misc_RNA (1)...(19): siRNA sense strand
caacaaccgaugcagauaa

SEQ ID NO: 1702063 - RNA, 19 nt, Homo sapiens
  misc_RNA (1)...(19): siRNA sense strand
caaaggaaacugaaugaug

SEQ ID NO: 1702064 - RNA, 19 nt, Homo sapiens
  misc_RNA (1)...(19): siRNA sense strand
caggaaagcuuuaagaaua

SEQ ID NO: 1702065 - RNA, 19 nt, Homo sapiens
  misc_RNA (1)...(19): siRNA sense strand
gcaaugagcuucuugaauc

SEQ ID NO: 1702066 - RNA, 19 nt, Homo sapiens
  misc_RNA (1)...(19): siRNA sense strand
gcuaagagcucaacaggaa

SEQ ID NO: 1702067 - RNA, 19 nt, Homo sapiens
  misc_RNA (1)...(19): siRNA sense strand
aaacauguaugcccaaaua

SEQ ID NO: 1702068 - RNA, 19 nt, Homo sapiens
  misc_RNA (1)...(19): siRNA sense strand
gaaaucaauugcaaaggua

SEQ ID NO: 1702069 - RNA, 19 nt, Homo sapiens
  misc_RNA (1)...(19): siRNA sense strand
gcacaaggcucuggaagaa

SEQ ID NO: 1702070 - RNA, 19 nt, Homo sapiens
  misc_RNA (1)...(19): siRNA sense strand
gcacugaccucaauacugu

SEQ ID NO: 1702071 - RNA, 19 nt, Homo sapiens
  misc_RNA (1)...(19): siRNA sense strand
gaauguagaucaagcuauu

SEQ ID NO: 1702072 - RNA, 19 nt, Homo sapiens
  misc_RNA (1)...(19): siRNA sense strand
gaacugauguuaaagaaag

SEQ ID NO: 1702073 - RNA, 19 nt, Homo sapiens
  misc_RNA (1)...(19): siRNA sense strand
gaacacaaaccucauauug

SEQ ID NO: 1702074 - RNA, 19 nt, Homo sapiens
  misc_RNA (1)...(19): siRNA sense strand
caaaggaacuggcagagaa

SEQ ID NO: 1702075 - RNA, 19 nt, Homo sapiens
  misc_RNA (1)...(19): siRNA sense strand
gaauagugcugcugacauu

SEQ ID NO: 1702076 - RNA, 19 nt, Homo sapiens
  misc_RNA (1)...(19): siRNA sense strand
caacaaagcuggcaaugag

SEQ ID NO: 1702077 - RNA, 19 nt, Homo sapiens
  misc_RNA (1)...(19): siRNA sense strand
gaaaguagauggacugaac

SEQ ID NO: 1702078 - RNA, 19 nt, Homo sapiens
  misc_RNA (1)...(19): siRNA sense strand
ggaagagacuuauaaucaa

SEQ ID NO: 1702079 - RNA, 19 nt, Homo sapiens
  misc_RNA (1)...(19): siRNA sense strand
gcaagcagccuguguauga

SEQ ID NO: 1702080 - RNA, 19 nt, Homo sapiens
  misc_RNA (1)...(19): siRNA sense strand
caaaggcuaugcugaauga

SEQ ID NO: 1702081 - RNA, 19 nt, Homo sapiens
  misc_RNA (1)...(19): siRNA sense strand
caaagaaccaucagaaauu

SEQ ID NO: 1702082 - RNA, 19 nt, Homo sapiens
  misc_RNA (1)...(19): siRNA sense strand
gaaagaagaauguagauca

SEQ ID NO: 1702083 - RNA, 19 nt, Homo sapiens
  misc_RNA (1)...(19): siRNA sense strand
gaagcagagugucgacaua

SEQ ID NO: 1702084 - RNA, 19 nt, Homo sapiens
  misc_RNA (1)...(19): siRNA sense strand
gaacauugaccgaguuaaa

SEQ ID NO: 1702085 - RNA, 19 nt, Homo sapiens
  misc_RNA (1)...(19): siRNA sense strand
gaagacaguuaaagagaga

SEQ ID NO: 1702086 - RNA, 19 nt, Homo sapiens
  misc_RNA (1)...(19): siRNA sense strand
ccacacagauuacagaguu

SEQ ID NO: 1702087 - RNA, 19 nt, Homo sapiens
  misc_RNA (1)...(19): siRNA sense strand
gagaagggcuggauaaacu

SEQ ID NO: 1702088 - RNA, 19 nt, Homo sapiens
  misc_RNA (1)...(19): siRNA sense strand
ggaccugguuggaugauaa

SEQ ID NO: 1702089 - RNA, 19 nt, Homo sapiens
  misc_RNA (1)...(19): siRNA sense strand
gcaguaagauggaagaaag

SEQ ID NO: 1702090 - RNA, 19 nt, Homo sapiens
  misc_RNA (1)...(19): siRNA sense strand
aaaaguagcucgugacaua

SEQ ID NO: 1702091 - RNA, 19 nt, Homo sapiens
  misc_RNA (1)...(19): siRNA sense strand
gaacaaacaguguggcaaa

SEQ ID NO: 1702092 - RNA, 19 nt, Homo sapiens
  misc_RNA (1)...(19): siRNA sense strand
gaaaucagccagaucaaga

SEQ ID NO: 1702093 - RNA, 19 nt, Homo sapiens
  misc_RNA (1)...(19): siRNA sense strand
agaaagagcuggagaacau

SEQ ID NO: 1702094 - RNA, 19 nt, Homo sapiens
  misc_RNA (1)...(19): siRNA sense strand
gaagauagucagaaacuug

SEQ ID NO: 1702095 - RNA, 19 nt, Homo sapiens
  misc_RNA (1)...(19): siRNA sense strand
gggaacagcuugauacaca

SEQ ID NO: 1702096 - RNA, 19 nt, Homo sapiens
  misc_RNA (1)...(19): siRNA sense strand
gaagagcauugaugagaug

SEQ ID NO: 1702097 - RNA, 19 nt, Homo sapiens
  misc_RNA (1)...(19): siRNA sense strand
ugacggagauccaguguga

SEQ ID NO: 1702098 - RNA, 19 nt, Homo sapiens
  misc_RNA (1)...(19): siRNA sense strand
gcaaagaaccaucagaaau

SEQ ID NO: 1702099 - RNA, 19 nt, Homo sapiens
  misc_RNA (1)...(19): siRNA sense strand
gcucauagccaaucagaaa

SEQ ID NO: 1702100 - RNA, 19 nt, Homo sapiens
  misc_RNA (1)...(19): siRNA sense strand
ggacucagaacuagagaua

SEQ ID NO: 1702101 - RNA, 19 nt, Homo sapiens
  misc_RNA (1)...(19): siRNA sense strand
ccacaggcauguucaagaa

SEQ ID NO: 1702102 - RNA, 19 nt, Homo sapiens
  misc_RNA (1)...(19): siRNA sense strand
gauaacacgucaggaguuu

SEQ ID NO: 1702103 - RNA, 19 nt, Homo sapiens
  misc_RNA (1)...(19): siRNA sense strand
gccgagagcugauugagaa

SEQ ID NO: 1702104 - RNA, 19 nt, Homo sapiens
  misc_RNA (1)...(19): siRNA sense strand
ccaccaagccugauucuaa

SEQ ID NO: 1702105 - RNA, 19 nt, Homo sapiens
  misc_RNA (1)...(19): siRNA sense strand
gauagaagauuguaaagcu

SEQ ID NO: 1702106 - RNA, 19 nt, Homo sapiens
  misc_RNA (1)...(19): siRNA sense strand
ggaccaggaugggaagaua

SEQ ID NO: 1702107 - RNA, 19 nt, Homo sapiens
  misc_RNA (1)...(19): siRNA sense strand
gaucaaugcucgauggaau

SEQ ID NO: 1702108 - RNA, 19 nt, Homo sapiens
  misc_RNA (1)...(19): siRNA sense strand
caaaggagacuugagauuu

SEQ ID NO: 1702109 - RNA, 19 nt, Homo sapiens
  misc_RNA (1)...(19): siRNA sense strand
acacaaagauucaauggau

SEQ ID NO: 1702110 - RNA, 19 nt, Homo sapiens
  misc_RNA (1)...(19): siRNA sense strand
ccaccuggcuuuaaaugaa

SEQ ID NO: 1702111 - RNA, 19 nt, Homo sapiens
  misc_RNA (1)...(19): siRNA sense strand
ggaagagaccagugaaauu

SEQ ID NO: 1702112 - RNA, 19 nt, Homo sapiens
  misc_RNA (1)...(19): siRNA sense strand
guacauccaugccaucuuc

SEQ ID NO: 1702113 - RNA, 19 nt, Homo sapiens
  misc_RNA (1)...(19): siRNA sense strand
gaacuuagagagaaauuca

SEQ ID NO: 1702114 - RNA, 19 nt, Homo sapiens
  misc_RNA (1)...(19): siRNA sense strand
ugucagaacugguggcuaa

SEQ ID NO: 1702115 - RNA, 19 nt, Homo sapiens
  misc_RNA (1)...(19): siRNA sense strand
cagaaaugguugaaagaaa

SEQ ID NO: 1702116 - RNA, 19 nt, Homo sapiens
  misc_RNA (1)...(19): siRNA sense strand
ggaggaagcccugcucuuu

SEQ ID NO: 1702117 - RNA, 19 nt, Homo sapiens
  misc_RNA (1)...(19): siRNA sense strand
gacaaaggguggaugaaau

SEQ ID NO: 1702118 - RNA, 19 nt, Homo sapiens
  misc_RNA (1)...(19): siRNA sense strand
gaagagaccagugaaauuc

SEQ ID NO: 1702119 - RNA, 19 nt, Homo sapiens
  misc_RNA (1)...(19): siRNA sense strand
aaaggagacuugagauuug

SEQ ID NO: 1702120 - RNA, 19 nt, Homo sapiens
  misc_RNA (1)...(19): siRNA sense strand
gagcagaucggagagaaua

SEQ ID NO: 1702121 - RNA, 19 nt, Homo sapiens
  misc_RNA (1)...(19): siRNA sense strand
ugaaagaauuugccaacuu

SEQ ID NO: 1702122 - RNA, 19 nt, Homo sapiens
  misc_RNA (1)...(19): siRNA sense strand
ggacagagacauuauacga

SEQ ID NO: 1702123 - RNA, 19 nt, Homo sapiens
  misc_RNA (1)...(19): siRNA sense strand
ggaauuaaacccugaggaa

SEQ ID NO: 1702124 - RNA, 19 nt, Homo sapiens
  misc_RNA (1)...(19): siRNA sense strand
gaucaaaggcuaugcugaa

SEQ ID NO: 1702125 - RNA, 19 nt, Homo sapiens
  misc_RNA (1)...(19): siRNA sense strand
caagacagguuccauacug

SEQ ID NO: 1702126 - RNA, 19 nt, Homo sapiens
  misc_RNA (1)...(19): siRNA sense strand
gaacucugguggaagaaau

SEQ ID NO: 1702127 - RNA, 19 nt, Homo sapiens
  misc_RNA (1)...(19): siRNA sense strand
uaaagaaagcuacugauga

SEQ ID NO: 1702128 - RNA, 19 nt, Homo sapiens
  misc_RNA (1)...(19): siRNA sense strand
acaaggaucuggcugcaaa

SEQ ID NO: 1702129 - RNA, 19 nt, Homo sapiens
  misc_RNA (1)...(19): siRNA sense strand
cagcugagccuauuucuga

SEQ ID NO: 1702130 - RNA, 19 nt, Homo sapiens
  misc_RNA (1)...(19): siRNA sense strand
uggcagaccuggaugauga

SEQ ID NO: 1702131 - RNA, 19 nt, Homo sapiens
  misc_RNA (1)...(19): siRNA sense strand
caacagaugcugcaacaga

SEQ ID NO: 1702132 - RNA, 19 nt, Homo sapiens
  misc_RNA (1)...(19): siRNA sense strand
cauaaggaauucaugaaga

SEQ ID NO: 1702133 - RNA, 19 nt, Homo sapiens
  misc_RNA (1)...(19): siRNA sense strand
ccaaggaagagacuuauaa

SEQ ID NO: 1702134 - RNA, 19 nt, Homo sapiens
  misc_RNA (1)...(19): siRNA sense strand
gaacagcuugauacacaua

SEQ ID NO: 1702135 - RNA, 19 nt, Homo sapiens
  misc_RNA (1)...(19): siRNA sense strand
gcauugaugagaugaauaa

SEQ ID NO: 1702136 - RNA, 19 nt, Homo sapiens
  misc_RNA (1)...(19): siRNA sense strand
ggaagagcauugaugagau

SEQ ID NO: 1702137 - RNA, 19 nt, Homo sapiens
  misc_RNA (1)...(19): siRNA sense strand
aaagauaggcccacaacua

SEQ ID NO: 1702138 - RNA, 19 nt, Homo sapiens
  misc_RNA (1)...(19): siRNA sense strand
ggacaaaggguggaugaaa

SEQ ID NO: 1702139 - RNA, 19 nt, Homo sapiens
  misc_RNA (1)...(19): siRNA sense strand
ccucagaacuuuagagcaa

SEQ ID NO: 1702140 - RNA, 19 nt, Homo sapiens
  misc_RNA (1)...(19): siRNA sense strand
ggaaagggccacugagguu

SEQ ID NO: 1702141 - RNA, 19 nt, Homo sapiens
  misc_RNA (1)...(19): siRNA sense strand
gaaccuagauacucuugag

SEQ ID NO: 1702142 - RNA, 19 nt, Homo sapiens
  misc_RNA (1)...(19): siRNA sense strand
ucacugaacugagcucuug

SEQ ID NO: 1702143 - RNA, 19 nt, Homo sapiens
  misc_RNA (1)...(19): siRNA sense strand
gaaagagggcgaucacuag

SEQ ID NO: 1702144 - RNA, 19 nt, Homo sapiens
  misc_RNA (1)...(19): siRNA sense strand
gccauuagccuacucaauu

SEQ ID NO: 1702145 - RNA, 19 nt, Homo sapiens
  misc_RNA (1)...(19): siRNA sense strand
gcagagacagaaggaauua

SEQ ID NO: 1702146 - RNA, 19 nt, Homo sapiens
  misc_RNA (1)...(19): siRNA sense strand
ccaaggcccucagaacuuu

SEQ ID NO: 1702147 - RNA, 19 nt, Homo sapiens
  misc_RNA (1)...(19): siRNA sense strand
gaaaaggacucuacaaaac

SEQ ID NO: 1702148 - RNA, 19 nt, Homo sapiens
  misc_RNA (1)...(19): siRNA sense strand
gaaagggccacugagguua

SEQ ID NO: 1702149 - RNA, 19 nt, Homo sapiens
  misc_RNA (1)...(19): siRNA sense strand
gaaggcccgucaccaagaa

SEQ ID NO: 1702150 - RNA, 19 nt, Homo sapiens
  misc_RNA (1)...(19): siRNA sense strand
ggagaugacucgcaaacag

SEQ ID NO: 1702151 - RNA, 19 nt, Homo sapiens
  misc_RNA (1)...(19): siRNA sense strand
gcagaacauugaccgaguu

SEQ ID NO: 1702152 - RNA, 19 nt, Homo sapiens
  misc_RNA (1)...(19): siRNA sense strand
gcagagcacugaaagaaaa

SEQ ID NO: 1702153 - RNA, 19 nt, Homo sapiens
  misc_RNA (1)...(19): siRNA sense strand
gcuagaagaugcagagagu

SEQ ID NO: 1702154 - RNA, 19 nt, Homo sapiens
  misc_RNA (1)...(19): siRNA sense strand
gaagagacuuauaaucaac

SEQ ID NO: 1702155 - RNA, 19 nt, Homo sapiens
  misc_RNA (1)...(19): siRNA sense strand
gcaauuaagggaaucuauu

SEQ ID NO: 1702156 - RNA, 19 nt, Homo sapiens
  misc_RNA (1)...(19): siRNA sense strand
gaggaaaugaggcaauuaa

SEQ ID NO: 1702157 - RNA, 19 nt, Homo sapiens
  misc_RNA (1)...(19): siRNA sense strand
ugaaauugaugcugcuauu

SEQ ID NO: 1702158 - RNA, 19 nt, Homo sapiens
  misc_RNA (1)...(19): siRNA sense strand
gccuauuucugacuucuua

SEQ ID NO: 1702159 - RNA, 19 nt, Homo sapiens
  misc_RNA (1)...(19): siRNA sense strand
acaaagaauugcacagcua

SEQ ID NO: 1702160 - RNA, 19 nt, Homo sapiens
  misc_RNA (1)...(19): siRNA sense strand
gaucugacuuggagcaguu

SEQ ID NO: 1702161 - RNA, 19 nt, Homo sapiens
  misc_RNA (1)...(19): siRNA sense strand
ggcauugguugacugguua

SEQ ID NO: 1702162 - RNA, 19 nt, Homo sapiens
  misc_RNA (1)...(19): siRNA sense strand
caacaaccgaugcagauaa

SEQ ID NO: 1702163 - RNA, 19 nt, Homo sapiens
  misc_RNA (1)...(19): siRNA sense strand
caaaggaaacugaaugaug

SEQ ID NO: 1702164 - RNA, 19 nt, Homo sapiens
  misc_RNA (1)...(19): siRNA sense strand
ccacugggcugcaacauua

SEQ ID NO: 1702165 - RNA, 19 nt, Homo sapiens
  misc_RNA (1)...(19): siRNA sense strand
gaccaugacugacauauug

SEQ ID NO: 1702166 - RNA, 19 nt, Homo sapiens
  misc_RNA (1)...(19): siRNA sense strand
ggaaagaccauccaauuug

SEQ ID NO: 1702167 - RNA, 19 nt, Homo sapiens
  misc_RNA (1)...(19): siRNA sense strand
gagaagagaugaugaagag

SEQ ID NO: 1702168 - RNA, 19 nt, Homo sapiens
  misc_RNA (1)...(19): siRNA sense strand
gguauuagcacaacuuaua

SEQ ID NO: 1702169 - RNA, 19 nt, Homo sapiens
  misc_RNA (1)...(19): siRNA sense strand
ucuaugagcuugcaagaaa

SEQ ID NO: 1702170 - RNA, 19 nt, Homo sapiens
  misc_RNA (1)...(19): siRNA sense strand
caacauuucuuuccaugga

SEQ ID NO: 1702171 - RNA, 19 nt, Homo sapiens
  misc_RNA (1)...(19): siRNA sense strand
gagauaauguccuccuaga

SEQ ID NO: 1702172 - RNA, 19 nt, Homo sapiens
  misc_RNA (1)...(19): siRNA sense strand
gauaauguccuccuagaug

SEQ ID NO: 1702173 - RNA, 19 nt, Homo sapiens
  misc_RNA (1)...(19): siRNA sense strand
gcagacaagugguuaacug

SEQ ID NO: 1702174 - RNA, 19 nt, Homo sapiens
  misc_RNA (1)...(19): siRNA sense strand
gaaacucauuaaccaguga

SEQ ID NO: 1702175 - RNA, 19 nt, Homo sapiens
  misc_RNA (1)...(19): siRNA sense strand
gcaacaacccuacuggaaa

SEQ ID NO: 1702176 - RNA, 19 nt, Homo sapiens
  misc_RNA (1)...(19): siRNA sense strand
agagagcacuucaguauuc

SEQ ID NO: 1702177 - RNA, 19 nt, Homo sapiens
  misc_RNA (1)...(19): siRNA sense strand
cauacaaguuucaacauug

SEQ ID NO: 1702178 - RNA, 19 nt, Homo sapiens
  misc_RNA (1)...(19): siRNA sense strand
uagacaggguuauugauuu

SEQ ID NO: 1702179 - RNA, 19 nt, Homo sapiens
  misc_RNA (1)...(19): siRNA sense strand
gaagaugauccuuacuauu

SEQ ID NO: 1702180 - RNA, 19 nt, Homo sapiens
  misc_RNA (1)...(19): siRNA sense strand
ggauguggccuuccaggua

SEQ ID NO: 1702181 - RNA, 19 nt, Homo sapiens
  misc_RNA (1)...(19): siRNA sense strand
gacaagugguuaacugguu

SEQ ID NO: 1702182 - RNA, 19 nt, Homo sapiens
  misc_RNA (1)...(19): siRNA sense strand
ccagaaggaugcaauacug

SEQ ID NO: 1702183 - RNA, 19 nt, Homo sapiens
  misc_RNA (1)...(19): siRNA sense strand
gauguggccuuccagguau

SEQ ID NO: 1702184 - RNA, 19 nt, Homo sapiens
  misc_RNA (1)...(19): siRNA sense strand
caacaacccuacuggaaac

SEQ ID NO: 1702185 - RNA, 19 nt, Homo sapiens
  misc_RNA (1)...(19): siRNA sense strand
guagacaggguuauugauu

SEQ ID NO: 1702186 - RNA, 19 nt, Homo sapiens
  misc_RNA (1)...(19): siRNA sense strand
gaucauuaauccuggagau

SEQ ID NO: 1702187 - RNA, 19 nt, Homo sapiens
  misc_RNA (1)...(19): siRNA sense strand
ggaaaucuaugagcuugca

SEQ ID NO: 1702188 - RNA, 19 nt, Homo sapiens
  misc_RNA (1)...(19): siRNA sense strand
gagacauacuuuccagaug

SEQ ID NO: 1702189 - RNA, 19 nt, Homo sapiens
  misc_RNA (1)...(19): siRNA sense strand
uagaugaaccugcuuauuc

SEQ ID NO: 1702190 - RNA, 19 nt, Homo sapiens
  misc_RNA (1)...(19): siRNA sense strand
agaagaugauccuuacuau

SEQ ID NO: 1702191 - RNA, 19 nt, Homo sapiens
  misc_RNA (1)...(19): siRNA sense strand
gcuccuagcccuuacuuga

SEQ ID NO: 1702192 - RNA, 19 nt, Homo sapiens
  misc_RNA (1)...(19): siRNA sense strand
ccaaaacccuuaauagaga

SEQ ID NO: 1702193 - RNA, 19 nt, Homo sapiens
  misc_RNA (1)...(19): siRNA sense strand
uaacugguuuggcagaaug

SEQ ID NO: 1702194 - RNA, 19 nt, Homo sapiens
  misc_RNA (1)...(19): siRNA sense strand
gcucagcuccuagcccuua

SEQ ID NO: 1702195 - RNA, 19 nt, Homo sapiens
  misc_RNA (1)...(19): siRNA sense strand
caaaaucgaugaucuccuu

SEQ ID NO: 1702196 - RNA, 19 nt, Homo sapiens
  misc_RNA (1)...(19): siRNA sense strand
cuccuuggcugguggcuua

SEQ ID NO: 1702197 - RNA, 19 nt, Homo sapiens
  misc_RNA (1)...(19): siRNA sense strand
ggacaaauggaucuaugug

SEQ ID NO: 1702198 - RNA, 19 nt, Homo sapiens
  misc_RNA (1)...(19): siRNA sense strand
uagaagaugauccuuacua

SEQ ID NO: 1702199 - RNA, 19 nt, Homo sapiens
  misc_RNA (1)...(19): siRNA sense strand
caggaacucuucaaagucu

SEQ ID NO: 1702200 - RNA, 19 nt, Homo sapiens
  misc_RNA (1)...(19): siRNA sense strand
uguaagguguuugaaauga

SEQ ID NO: 1702201 - RNA, 19 nt, Homo sapiens
  misc_RNA (1)...(19): siRNA sense strand
ggagaagagaugaugaaga

SEQ ID NO: 1702202 - RNA, 19 nt, Homo sapiens
  misc_RNA (1)...(19): siRNA sense strand
ggaccaugacugacauauu

SEQ ID NO: 1702203 - RNA, 19 nt, Homo sapiens
  misc_RNA (1)...(19): siRNA sense strand
gaugaaagugggauuguuc

SEQ ID NO: 1702204 - RNA, 19 nt, Homo sapiens
  misc_RNA (1)...(19): siRNA sense strand
uuauuaauguugccaguga

SEQ ID NO: 1702205 - RNA, 19 nt, Homo sapiens
  misc_RNA (1)...(19): siRNA sense strand
guaagguguuugaaaugau

SEQ ID NO: 1702206 - RNA, 19 nt, Homo sapiens
  misc_RNA (1)...(19): siRNA sense strand
acaagugguuaacugguuu

SEQ ID NO: 1702207 - RNA, 19 nt, Homo sapiens
  misc_RNA (1)...(19): siRNA sense strand
agacaggguuauugauuuc

SEQ ID NO: 1702208 - RNA, 19 nt, Homo sapiens
  misc_RNA (1)...(19): siRNA sense strand
uuaaccagcucaugauauc

SEQ ID NO: 1702209 - RNA, 19 nt, Homo sapiens
  misc_RNA (1)...(19): siRNA sense strand
auaauguccuccuagauga

SEQ ID NO: 1702210 - RNA, 19 nt, Homo sapiens
  misc_RNA (1)...(19): siRNA sense strand
aauagaagaugauccuuac

SEQ ID NO: 1702211 - RNA, 19 nt, Homo sapiens
  misc_RNA (1)...(19): siRNA sense strand
uauuaaugcucccuggaaa

SEQ ID NO: 1702212 - RNA, 19 nt, Homo sapiens
  misc_RNA (1)...(19): siRNA sense strand
gggagaagaagguuucaug

SEQ ID NO: 1702213 - RNA, 19 nt, Homo sapiens
  misc_RNA (1)...(19): siRNA sense strand
guaccaacauuucuuucca

SEQ ID NO: 1702214 - RNA, 19 nt, Homo sapiens
  misc_RNA (1)...(19): siRNA sense strand
gaaaccagaagaugcaaag

SEQ ID NO: 1702215 - RNA, 19 nt, Homo sapiens
  misc_RNA (1)...(19): siRNA sense strand
uaaccagaaggaugcaaua

SEQ ID NO: 1702216 - RNA, 19 nt, Homo sapiens
  misc_RNA (1)...(19): siRNA sense strand
uaagguguuugaaaugauc

SEQ ID NO: 1702217 - RNA, 19 nt, Homo sapiens
  misc_RNA (1)...(19): siRNA sense strand
gcucauguagacaggguua

SEQ ID NO: 1702218 - RNA, 19 nt, Homo sapiens
  misc_RNA (1)...(19): siRNA sense strand
caacccuacuggaaacuca

SEQ ID NO: 1702219 - RNA, 19 nt, Homo sapiens
  misc_RNA (1)...(19): siRNA sense strand
ucauuaauccuggagauaa

SEQ ID NO: 1702220 - RNA, 19 nt, Homo sapiens
  misc_RNA (1)...(19): siRNA sense strand
caaauggaucuauguguca

SEQ ID NO: 1702221 - RNA, 19 nt, Homo sapiens
  misc_RNA (1)...(19): siRNA sense strand
ggcaacaacccuacuggaa

SEQ ID NO: 1702222 - RNA, 19 nt, Homo sapiens
  misc_RNA (1)...(19): siRNA sense strand
gcaaagaauccccagaaaa

SEQ ID NO: 1702223 - RNA, 19 nt, Homo sapiens
  misc_RNA (1)...(19): siRNA sense strand
cguaaucacuguagaaaau

SEQ ID NO: 1702224 - RNA, 19 nt, Homo sapiens
  misc_RNA (1)...(19): siRNA sense strand
guucaggguaccaacauuu

SEQ ID NO: 1702225 - RNA, 19 nt, Homo sapiens
  misc_RNA (1)...(19): siRNA sense strand
uaccaaauccaaacauguu

SEQ ID NO: 1702226 - RNA, 19 nt, Homo sapiens
  misc_RNA (1)...(19): siRNA sense strand
guauuaaugcucccuggaa

SEQ ID NO: 1702227 - RNA, 19 nt, Homo sapiens
  misc_RNA (1)...(19): siRNA sense strand
accagaagaugcaaagaau

SEQ ID NO: 1702228 - RNA, 19 nt, Homo sapiens
  misc_RNA (1)...(19): siRNA sense strand
ggaaaccagaagaugcaaa

SEQ ID NO: 1702229 - RNA, 19 nt, Homo sapiens
  misc_RNA (1)...(19): siRNA sense strand
acaggguuauugauuucua

SEQ ID NO: 1702230 - RNA, 19 nt, Homo sapiens
  misc_RNA (1)...(19): siRNA sense strand
acacauacaaguuucaaca

SEQ ID NO: 1702231 - RNA, 19 nt, Homo sapiens
  misc_RNA (1)...(19): siRNA sense strand
caugauaucacagcuucua

SEQ ID NO: 1702232 - RNA, 19 nt, Homo sapiens
  misc_RNA (1)...(19): siRNA sense strand
uucaggaacucuucaaagu

SEQ ID NO: 1702233 - RNA, 19 nt, Homo sapiens
  misc_RNA (1)...(19): siRNA sense strand
aaggacaaauggaucuaug

SEQ ID NO: 1702234 - RNA, 19 nt, Homo sapiens
  misc_RNA (1)...(19): siRNA sense strand
ggaccaaaaucgaugaucu

SEQ ID NO: 1702235 - RNA, 19 nt, Homo sapiens
  misc_RNA (1)...(19): siRNA sense strand
ugaugaaagugggauuguu

SEQ ID NO: 1702236 - RNA, 19 nt, Homo sapiens
  misc_RNA (1)...(19): siRNA sense strand
gaauuacgcacgguucauc

SEQ ID NO: 1702237 - RNA, 19 nt, Homo sapiens
  misc_RNA (1)...(19): siRNA sense strand
gacaaauggaucuaugugu

SEQ ID NO: 1702238 - RNA, 19 nt, Homo sapiens
  misc_RNA (1)...(19): siRNA sense strand
agacugccguaaucacugu

SEQ ID NO: 1702239 - RNA, 19 nt, Homo sapiens
  misc_RNA (1)...(19): siRNA sense strand
acuggaaacucauuaacca

SEQ ID NO: 1702240 - RNA, 19 nt, Homo sapiens
  misc_RNA (1)...(19): siRNA sense strand
cagguauuagcacaacuua

SEQ ID NO: 1702241 - RNA, 19 nt, Homo sapiens
  misc_RNA (1)...(19): siRNA sense strand
caggguuauugauuucuau

SEQ ID NO: 1702242 - RNA, 19 nt, Homo sapiens
  misc_RNA (1)...(19): siRNA sense strand
gagagcacuucaguauucu

SEQ ID NO: 1702243 - RNA, 19 nt, Homo sapiens
  misc_RNA (1)...(19): siRNA sense strand
gaagaaaaggccguuaaga

SEQ ID NO: 1702244 - RNA, 19 nt, Homo sapiens
  misc_RNA (1)...(19): siRNA sense strand
ccagauggaaaccagaaga

SEQ ID NO: 1702245 - RNA, 19 nt, Homo sapiens
  misc_RNA (1)...(19): siRNA sense strand
ccagauucccuaagagaca

SEQ ID NO: 1702246 - RNA, 19 nt, Homo sapiens
  misc_RNA (1)...(19): siRNA sense strand
gagcuuuuguccuggcuaa

SEQ ID NO: 1702247 - RNA, 19 nt, Homo sapiens
  misc_RNA (1)...(19): siRNA sense strand
guuaacugguuuggcagaa

SEQ ID NO: 1702248 - RNA, 19 nt, Homo sapiens
  misc_RNA (1)...(19): siRNA sense strand
aaaggaaaucuaugagcuu

SEQ ID NO: 1702249 - RNA, 19 nt, Homo sapiens
  misc_RNA (1)...(19): siRNA sense strand
aaccagaagaugcaaagaa

SEQ ID NO: 1702250 - RNA, 19 nt, Homo sapiens
  misc_RNA (1)...(19): siRNA sense strand
uuuauacuguuccaaaugg

SEQ ID NO: 1702251 - RNA, 19 nt, Homo sapiens
  misc_RNA (1)...(19): siRNA sense strand
agaaaaggccguuaagaug

SEQ ID NO: 1702252 - RNA, 19 nt, Homo sapiens
  misc_RNA (1)...(19): siRNA sense strand
gcauccuucucuucagcuu

SEQ ID NO: 1702253 - RNA, 19 nt, Homo sapiens
  misc_RNA (1)...(19): siRNA sense strand
uuaaugcucccuggaaaug

SEQ ID NO: 1702254 - RNA, 19 nt, Homo sapiens
  misc_RNA (1)...(19): siRNA sense strand
uaauguugccagugaugaa

SEQ ID NO: 1702255 - RNA, 19 nt, Homo sapiens
  misc_RNA (1)...(19): siRNA sense strand
guaaccagaaggaugcaau

SEQ ID NO: 1702256 - RNA, 19 nt, Homo sapiens
  misc_RNA (1)...(19): siRNA sense strand
gccguaaucacuguagaaa

SEQ ID NO: 1702257 - RNA, 19 nt, Homo sapiens
  misc_RNA (1)...(19): siRNA sense strand
caaggacaaauggaucuau

SEQ ID NO: 1702258 - RNA, 19 nt, Homo sapiens
  misc_RNA (1)...(19): siRNA sense strand
ccagguauuagcacaacuu

SEQ ID NO: 1702259 - RNA, 19 nt, Homo sapiens
  misc_RNA (1)...(19): siRNA sense strand
uccuagcccuuacuugaga

SEQ ID NO: 1702260 - RNA, 19 nt, Homo sapiens
  misc_RNA (1)...(19): siRNA sense strand
cauguagacaggguuauug

SEQ ID NO: 1702261 - RNA, 19 nt, Homo sapiens
  misc_RNA (1)...(19): siRNA sense strand
auacaaguuucaacauugc

SEQ ID NO: 1702262 - RNA, 19 nt, Homo sapiens
  misc_RNA (1)...(19): siRNA sense strand
cuuaccaaauccaaacaug

SEQ ID NO: 1702263 - RNA, 19 nt, Homo sapiens
  misc_RNA (1)...(19): siRNA sense strand
cuagaugaaccugcuuauu

SEQ ID NO: 1702264 - RNA, 19 nt, Homo sapiens
  misc_RNA (1)...(19): siRNA sense strand
ccacugggcugcaacauua

SEQ ID NO: 1702265 - RNA, 19 nt, Homo sapiens
  misc_RNA (1)...(19): siRNA sense strand
gaccaugacugacauauug

SEQ ID NO: 1702266 - RNA, 19 nt, Homo sapiens
  misc_RNA (1)...(19): siRNA sense strand
ggaaagaccauccaauuug

SEQ ID NO: 1702267 - RNA, 19 nt, Homo sapiens
  misc_RNA (1)...(19): siRNA sense strand
gagaagagaugaugaagag

SEQ ID NO: 1702268 - RNA, 19 nt, Homo sapiens
  misc_RNA (1)...(19): siRNA sense strand
gguauuagcacaacuuaua

SEQ ID NO: 1702269 - RNA, 19 nt, Homo sapiens
  misc_RNA (1)...(19): siRNA sense strand
ucuaugagcuugcaagaaa

SEQ ID NO: 1702270 - RNA, 19 nt, Homo sapiens
  misc_RNA (1)...(19): siRNA sense strand
caacauuucuuuccaugga

SEQ ID NO: 1702271 - RNA, 19 nt, Homo sapiens
  misc_RNA (1)...(19): siRNA sense strand
gagauaauguccuccuaga

SEQ ID NO: 1702272 - RNA, 19 nt, Homo sapiens
  misc_RNA (1)...(19): siRNA sense strand
gauaauguccuccuagaug

SEQ ID NO: 1702273 - RNA, 19 nt, Homo sapiens
  misc_RNA (1)...(19): siRNA sense strand
gcagacaagugguuaacug

SEQ ID NO: 1702274 - RNA, 19 nt, Homo sapiens
  misc_RNA (1)...(19): siRNA sense strand
gaaacucauuaaccaguga

SEQ ID NO: 1702275 - RNA, 19 nt, Homo sapiens
  misc_RNA (1)...(19): siRNA sense strand
gcaacaacccuacuggaaa

SEQ ID NO: 1702276 - RNA, 19 nt, Homo sapiens
  misc_RNA (1)...(19): siRNA sense strand
agagagcacuucaguauuc

SEQ ID NO: 1702277 - RNA, 19 nt, Homo sapiens
  misc_RNA (1)...(19): siRNA sense strand
cauacaaguuucaacauug

SEQ ID NO: 1702278 - RNA, 19 nt, Homo sapiens
  misc_RNA (1)...(19): siRNA sense strand
uagacaggguuauugauuu

SEQ ID NO: 1702279 - RNA, 19 nt, Homo sapiens
  misc_RNA (1)...(19): siRNA sense strand
gaagaugauccuuacuauu

SEQ ID NO: 1702280 - RNA, 19 nt, Homo sapiens
  misc_RNA (1)...(19): siRNA sense strand
ggauguggccuuccaggua

SEQ ID NO: 1702281 - RNA, 19 nt, Homo sapiens
  misc_RNA (1)...(19): siRNA sense strand
gacaagugguuaacugguu

SEQ ID NO: 1702282 - RNA, 19 nt, Homo sapiens
  misc_RNA (1)...(19): siRNA sense strand
ccagaaggaugcaauacug

SEQ ID NO: 1702283 - RNA, 19 nt, Homo sapiens
  misc_RNA (1)...(19): siRNA sense strand
gauguggccuuccagguau

SEQ ID NO: 1702284 - RNA, 19 nt, Homo sapiens
  misc_RNA (1)...(19): siRNA sense strand
caacaacccuacuggaaac

SEQ ID NO: 1702285 - RNA, 19 nt, Homo sapiens
  misc_RNA (1)...(19): siRNA sense strand
guagacaggguuauugauu

SEQ ID NO: 1702286 - RNA, 19 nt, Homo sapiens
  misc_RNA (1)...(19): siRNA sense strand
gaucauuaauccuggagau

SEQ ID NO: 1702287 - RNA, 19 nt, Homo sapiens
  misc_RNA (1)...(19): siRNA sense strand
ggaaaucuaugagcuugca

SEQ ID NO: 1702288 - RNA, 19 nt, Homo sapiens
  misc_RNA (1)...(19): siRNA sense strand
gagacauacuuuccagaug

SEQ ID NO: 1702289 - RNA, 19 nt, Homo sapiens
  misc_RNA (1)...(19): siRNA sense strand
uagaugaaccugcuuauuc

SEQ ID NO: 1702290 - RNA, 19 nt, Homo sapiens
  misc_RNA (1)...(19): siRNA sense strand
agaagaugauccuuacuau

SEQ ID NO: 1702291 - RNA, 19 nt, Homo sapiens
  misc_RNA (1)...(19): siRNA sense strand
gcuccuagcccuuacuuga

SEQ ID NO: 1702292 - RNA, 19 nt, Homo sapiens
  misc_RNA (1)...(19): siRNA sense strand
ccaaaacccuuaauagaga

SEQ ID NO: 1702293 - RNA, 19 nt, Homo sapiens
  misc_RNA (1)...(19): siRNA sense strand
uaacugguuuggcagaaug

SEQ ID NO: 1702294 - RNA, 19 nt, Homo sapiens
  misc_RNA (1)...(19): siRNA sense strand
gcucagcuccuagcccuua

SEQ ID NO: 1702295 - RNA, 19 nt, Homo sapiens
  misc_RNA (1)...(19): siRNA sense strand
caaaaucgaugaucuccuu

SEQ ID NO: 1702296 - RNA, 19 nt, Homo sapiens
  misc_RNA (1)...(19): siRNA sense strand
cuccuuggcugguggcuua

SEQ ID NO: 1702297 - RNA, 19 nt, Homo sapiens
  misc_RNA (1)...(19): siRNA sense strand
ggacaaauggaucuaugug

SEQ ID NO: 1702298 - RNA, 19 nt, Homo sapiens
  misc_RNA (1)...(19): siRNA sense strand
uagaagaugauccuuacua

SEQ ID NO: 1702299 - RNA, 19 nt, Homo sapiens
  misc_RNA (1)...(19): siRNA sense strand
caggaacucuucaaagucu

SEQ ID NO: 1702300 - RNA, 19 nt, Homo sapiens
  misc_RNA (1)...(19): siRNA sense strand
uguaagguguuugaaauga

SEQ ID NO: 1702301 - RNA, 19 nt, Homo sapiens
  misc_RNA (1)...(19): siRNA sense strand
ggagaagagaugaugaaga

SEQ ID NO: 1702302 - RNA, 19 nt, Homo sapiens
  misc_RNA (1)...(19): siRNA sense strand
ggaccaugacugacauauu

SEQ ID NO: 1702303 - RNA, 19 nt, Homo sapiens
  misc_RNA (1)...(19): siRNA sense strand
gaugaaagugggauuguuc

SEQ ID NO: 1702304 - RNA, 19 nt, Homo sapiens
  misc_RNA (1)...(19): siRNA sense strand
uuauuaauguugccaguga

SEQ ID NO: 1702305 - RNA, 19 nt, Homo sapiens
  misc_RNA (1)...(19): siRNA sense strand
guaagguguuugaaaugau

SEQ ID NO: 1702306 - RNA, 19 nt, Homo sapiens
  misc_RNA (1)...(19): siRNA sense strand
acaagugguuaacugguuu

SEQ ID NO: 1702307 - RNA, 19 nt, Homo sapiens
  misc_RNA (1)...(19): siRNA sense strand
agacaggguuauugauuuc

SEQ ID NO: 1702308 - RNA, 19 nt, Homo sapiens
  misc_RNA (1)...(19): siRNA sense strand
uuaaccagcucaugauauc

SEQ ID NO: 1702309 - RNA, 19 nt, Homo sapiens
  misc_RNA (1)...(19): siRNA sense strand
auaauguccuccuagauga

SEQ ID NO: 1702310 - RNA, 19 nt, Homo sapiens
  misc_RNA (1)...(19): siRNA sense strand
aauagaagaugauccuuac

SEQ ID NO: 1702311 - RNA, 19 nt, Homo sapiens
  misc_RNA (1)...(19): siRNA sense strand
uauuaaugcucccuggaaa

SEQ ID NO: 1702312 - RNA, 19 nt, Homo sapiens
  misc_RNA (1)...(19): siRNA sense strand
gggagaagaagguuucaug

SEQ ID NO: 1702313 - RNA, 19 nt, Homo sapiens
  misc_RNA (1)...(19): siRNA sense strand
guaccaacauuucuuucca

SEQ ID NO: 1702314 - RNA, 19 nt, Homo sapiens
  misc_RNA (1)...(19): siRNA sense strand
gaaaccagaagaugcaaag

SEQ ID NO: 1702315 - RNA, 19 nt, Homo sapiens
  misc_RNA (1)...(19): siRNA sense strand
uaaccagaaggaugcaaua

SEQ ID NO: 1702316 - RNA, 19 nt, Homo sapiens
  misc_RNA (1)...(19): siRNA sense strand
uaagguguuugaaaugauc

SEQ ID NO: 1702317 - RNA, 19 nt, Homo sapiens
  misc_RNA (1)...(19): siRNA sense strand
gcucauguagacaggguua

SEQ ID NO: 1702318 - RNA, 19 nt, Homo sapiens
  misc_RNA (1)...(19): siRNA sense strand
caacccuacuggaaacuca

SEQ ID NO: 1702319 - RNA, 19 nt, Homo sapiens
  misc_RNA (1)...(19): siRNA sense strand
ucauuaauccuggagauaa

SEQ ID NO: 1702320 - RNA, 19 nt, Homo sapiens
  misc_RNA (1)...(19): siRNA sense strand
caaauggaucuauguguca

SEQ ID NO: 1702321 - RNA, 19 nt, Homo sapiens
  misc_RNA (1)...(19): siRNA sense strand
ggcaacaacccuacuggaa

SEQ ID NO: 1702322 - RNA, 19 nt, Homo sapiens
  misc_RNA (1)...(19): siRNA sense strand
gcaaagaauccccagaaaa

SEQ ID NO: 1702323 - RNA, 19 nt, Homo sapiens
  misc_RNA (1)...(19): siRNA sense strand
cguaaucacuguagaaaau

SEQ ID NO: 1702324 - RNA, 19 nt, Homo sapiens
  misc_RNA (1)...(19): siRNA sense strand
guucaggguaccaacauuu

SEQ ID NO: 1702325 - RNA, 19 nt, Homo sapiens
  misc_RNA (1)...(19): siRNA sense strand
uaccaaauccaaacauguu

SEQ ID NO: 1702326 - RNA, 19 nt, Homo sapiens
  misc_RNA (1)...(19): siRNA sense strand
guauuaaugcucccuggaa

SEQ ID NO: 1702327 - RNA, 19 nt, Homo sapiens
  misc_RNA (1)...(19): siRNA sense strand
accagaagaugcaaagaau

SEQ ID NO: 1702328 - RNA, 19 nt, Homo sapiens
  misc_RNA (1)...(19): siRNA sense strand
ggaaaccagaagaugcaaa

SEQ ID NO: 1702329 - RNA, 19 nt, Homo sapiens
  misc_RNA (1)...(19): siRNA sense strand
acaggguuauugauuucua

SEQ ID NO: 1702330 - RNA, 19 nt, Homo sapiens
  misc_RNA (1)...(19): siRNA sense strand
acacauacaaguuucaaca

SEQ ID NO: 1702331 - RNA, 19 nt, Homo sapiens
  misc_RNA (1)...(19): siRNA sense strand
caugauaucacagcuucua

SEQ ID NO: 1702332 - RNA, 19 nt, Homo sapiens
  misc_RNA (1)...(19): siRNA sense strand
uucaggaacucuucaaagu

SEQ ID NO: 1702333 - RNA, 19 nt, Homo sapiens
  misc_RNA (1)...(19): siRNA sense strand
aaggacaaauggaucuaug

SEQ ID NO: 1702334 - RNA, 19 nt, Homo sapiens
  misc_RNA (1)...(19): siRNA sense strand
ggaccaaaaucgaugaucu

SEQ ID NO: 1702335 - RNA, 19 nt, Homo sapiens
  misc_RNA (1)...(19): siRNA sense strand
ugaugaaagugggauuguu

SEQ ID NO: 1702336 - RNA, 19 nt, Homo sapiens
  misc_RNA (1)...(19): siRNA sense strand
gaauuacgcacgguucauc

SEQ ID NO: 1702337 - RNA, 19 nt, Homo sapiens
  misc_RNA (1)...(19): siRNA sense strand
gacaaauggaucuaugugu

SEQ ID NO: 1702338 - RNA, 19 nt, Homo sapiens
  misc_RNA (1)...(19): siRNA sense strand
agacugccguaaucacugu

SEQ ID NO: 1702339 - RNA, 19 nt, Homo sapiens
  misc_RNA (1)...(19): siRNA sense strand
acuggaaacucauuaacca

SEQ ID NO: 1702340 - RNA, 19 nt, Homo sapiens
  misc_RNA (1)...(19): siRNA sense strand
cagguauuagcacaacuua

SEQ ID NO: 1702341 - RNA, 19 nt, Homo sapiens
  misc_RNA (1)...(19): siRNA sense strand
caggguuauugauuucuau

SEQ ID NO: 1702342 - RNA, 19 nt, Homo sapiens
  misc_RNA (1)...(19): siRNA sense strand
gagagcacuucaguauucu

SEQ ID NO: 1702343 - RNA, 19 nt, Homo sapiens
  misc_RNA (1)...(19): siRNA sense strand
gaagaaaaggccguuaaga

SEQ ID NO: 1702344 - RNA, 19 nt, Homo sapiens
  misc_RNA (1)...(19): siRNA sense strand
ccagauggaaaccagaaga

SEQ ID NO: 1702345 - RNA, 19 nt, Homo sapiens
  misc_RNA (1)...(19): siRNA sense strand
ccagauucccuaagagaca

SEQ ID NO: 1702346 - RNA, 19 nt, Homo sapiens
  misc_RNA (1)...(19): siRNA sense strand
gagcuuuuguccuggcuaa

SEQ ID NO: 1702347 - RNA, 19 nt, Homo sapiens
  misc_RNA (1)...(19): siRNA sense strand
guuaacugguuuggcagaa

SEQ ID NO: 1702348 - RNA, 19 nt, Homo sapiens
  misc_RNA (1)...(19): siRNA sense strand
aaaggaaaucuaugagcuu

SEQ ID NO: 1702349 - RNA, 19 nt, Homo sapiens
  misc_RNA (1)...(19): siRNA sense strand
aaccagaagaugcaaagaa

SEQ ID NO: 1702350 - RNA, 19 nt, Homo sapiens
  misc_RNA (1)...(19): siRNA sense strand
uuuauacuguuccaaaugg

SEQ ID NO: 1702351 - RNA, 19 nt, Homo sapiens
  misc_RNA (1)...(19): siRNA sense strand
agaaaaggccguuaagaug

SEQ ID NO: 1702352 - RNA, 19 nt, Homo sapiens
  misc_RNA (1)...(19): siRNA sense strand
gcauccuucucuucagcuu

SEQ ID NO: 1702353 - RNA, 19 nt, Homo sapiens
  misc_RNA (1)...(19): siRNA sense strand
uuaaugcucccuggaaaug

SEQ ID NO: 1702354 - RNA, 19 nt, Homo sapiens
  misc_RNA (1)...(19): siRNA sense strand
uaauguugccagugaugaa

SEQ ID NO: 1702355 - RNA, 19 nt, Homo sapiens
  misc_RNA (1)...(19): siRNA sense strand
guaaccagaaggaugcaau

SEQ ID NO: 1702356 - RNA, 19 nt, Homo sapiens
  misc_RNA (1)...(19): siRNA sense strand
gccguaaucacuguagaaa

SEQ ID NO: 1702357 - RNA, 19 nt, Homo sapiens
  misc_RNA (1)...(19): siRNA sense strand
caaggacaaauggaucuau

SEQ ID NO: 1702358 - RNA, 19 nt, Homo sapiens
  misc_RNA (1)...(19): siRNA sense strand
ccagguauuagcacaacuu

SEQ ID NO: 1702359 - RNA, 19 nt, Homo sapiens
  misc_RNA (1)...(19): siRNA sense strand
uccuagcccuuacuugaga

SEQ ID NO: 1702360 - RNA, 19 nt, Homo sapiens
  misc_RNA (1)...(19): siRNA sense strand
cauguagacaggguuauug

SEQ ID NO: 1702361 - RNA, 19 nt, Homo sapiens
  misc_RNA (1)...(19): siRNA sense strand
auacaaguuucaacauugc

SEQ ID NO: 1702362 - RNA, 19 nt, Homo sapiens
  misc_RNA (1)...(19): siRNA sense strand
cuuaccaaauccaaacaug

SEQ ID NO: 1702363 - RNA, 19 nt, Homo sapiens
  misc_RNA (1)...(19): siRNA sense strand
cuagaugaaccugcuuauu

SEQ ID NO: 1702364 - RNA, 19 nt, Homo sapiens
  misc_RNA (1)...(19): siRNA sense strand
gacaauagcugcaaagaua

SEQ ID NO: 1702365 - RNA, 19 nt, Homo sapiens
  misc_RNA (1)...(19): siRNA sense strand
gcaagacggguuacuauuu

SEQ ID NO: 1702366 - RNA, 19 nt, Homo sapiens
  misc_RNA (1)...(19): siRNA sense strand
cuaggcaacuguauugaua

SEQ ID NO: 1702367 - RNA, 19 nt, Homo sapiens
  misc_RNA (1)...(19): siRNA sense strand
gugcaagaguggcuuuaua

SEQ ID NO: 1702368 - RNA, 19 nt, Homo sapiens
  misc_RNA (1)...(19): siRNA sense strand
gugaagaggugcugccauu

SEQ ID NO: 1702369 - RNA, 19 nt, Homo sapiens
  misc_RNA (1)...(19): siRNA sense strand
gugaagaugucaaugaaug

SEQ ID NO: 1702370 - RNA, 19 nt, Homo sapiens
  misc_RNA (1)...(19): siRNA sense strand
caagaggacccauaucuga

SEQ ID NO: 1702371 - RNA, 19 nt, Homo sapiens
  misc_RNA (1)...(19): siRNA sense strand
ggagaauccugcaucaaca

SEQ ID NO: 1702372 - RNA, 19 nt, Homo sapiens
  misc_RNA (1)...(19): siRNA sense strand
ggaacgcgcuguguugaug

SEQ ID NO: 1702373 - RNA, 19 nt, Homo sapiens
  misc_RNA (1)...(19): siRNA sense strand
ggacaucgcugcgugaacu

SEQ ID NO: 1702374 - RNA, 19 nt, Homo sapiens
  misc_RNA (1)...(19): siRNA sense strand
ggaacaagaggacccauau

SEQ ID NO: 1702375 - RNA, 19 nt, Homo sapiens
  misc_RNA (1)...(19): siRNA sense strand
gacccaagcuacagugcaa

SEQ ID NO: 1702376 - RNA, 19 nt, Homo sapiens
  misc_RNA (1)...(19): siRNA sense strand
gauggugucuccugugaag

SEQ ID NO: 1702377 - RNA, 19 nt, Homo sapiens
  misc_RNA (1)...(19): siRNA sense strand
caagacggguuacuauuuu

SEQ ID NO: 1702378 - RNA, 19 nt, Homo sapiens
  misc_RNA (1)...(19): siRNA sense strand
aaacggauaagaucauuga

SEQ ID NO: 1702379 - RNA, 19 nt, Homo sapiens
  misc_RNA (1)...(19): siRNA sense strand
gauggcaggucaugugaag

SEQ ID NO: 1702380 - RNA, 19 nt, Homo sapiens
  misc_RNA (1)...(19): siRNA sense strand
aagaguggcuuuauacaag

SEQ ID NO: 1702381 - RNA, 19 nt, Homo sapiens
  misc_RNA (1)...(19): siRNA sense strand
caagaguggcuuuauacaa

SEQ ID NO: 1702382 - RNA, 19 nt, Homo sapiens
  misc_RNA (1)...(19): siRNA sense strand
gcgaaugcaagacggguua

SEQ ID NO: 1702383 - RNA, 19 nt, Homo sapiens
  misc_RNA (1)...(19): siRNA sense strand
gcucuaggcaacuguauug

SEQ ID NO: 1702384 - RNA, 19 nt, Homo sapiens
  misc_RNA (1)...(19): siRNA sense strand
ggacaauagcugcaaagau

SEQ ID NO: 1702385 - RNA, 19 nt, Homo sapiens
  misc_RNA (1)...(19): siRNA sense strand
auacaugcaucaacacaga

SEQ ID NO: 1702386 - RNA, 19 nt, Homo sapiens
  misc_RNA (1)...(19): siRNA sense strand
ccaagaaacggauaagauc

SEQ ID NO: 1702387 - RNA, 19 nt, Homo sapiens
  misc_RNA (1)...(19): siRNA sense strand
gaagaacgugcccaacugu

SEQ ID NO: 1702388 - RNA, 19 nt, Homo sapiens
  misc_RNA (1)...(19): siRNA sense strand
caaagauauugacgagugu

SEQ ID NO: 1702389 - RNA, 19 nt, Homo sapiens
  misc_RNA (1)...(19): siRNA sense strand
gcucagcgauguggaugga

SEQ ID NO: 1702390 - RNA, 19 nt, Homo sapiens
  misc_RNA (1)...(19): siRNA sense strand
ggccagagcugcgaguaca

SEQ ID NO: 1702391 - RNA, 19 nt, Homo sapiens
  misc_RNA (1)...(19): siRNA sense strand
ggccguggcuaccaucuca

SEQ ID NO: 1702392 - RNA, 19 nt, Homo sapiens
  misc_RNA (1)...(19): siRNA sense strand
agaagaacgugcccaacug

SEQ ID NO: 1702393 - RNA, 19 nt, Homo sapiens
  misc_RNA (1)...(19): siRNA sense strand
caagaaacggauaagauca

SEQ ID NO: 1702394 - RNA, 19 nt, Homo sapiens
  misc_RNA (1)...(19): siRNA sense strand
gagggaacgcgcuguguug

SEQ ID NO: 1702395 - RNA, 19 nt, Homo sapiens
  misc_RNA (1)...(19): siRNA sense strand
gcuacggaauccaaagaau

SEQ ID NO: 1702396 - RNA, 19 nt, Homo sapiens
  misc_RNA (1)...(19): siRNA sense strand
gaacaagaggacccauauc

SEQ ID NO: 1702397 - RNA, 19 nt, Homo sapiens
  misc_RNA (1)...(19): siRNA sense strand
agaaacggauaagaucauu

SEQ ID NO: 1702398 - RNA, 19 nt, Homo sapiens
  misc_RNA (1)...(19): siRNA sense strand
ggagggaacgcgcuguguu

SEQ ID NO: 1702399 - RNA, 19 nt, Homo sapiens
  misc_RNA (1)...(19): siRNA sense strand
gaggacccauaucugaaug

SEQ ID NO: 1702400 - RNA, 19 nt, Homo sapiens
  misc_RNA (1)...(19): siRNA sense strand
ccaggagaccggagauuug

SEQ ID NO: 1702401 - RNA, 19 nt, Homo sapiens
  misc_RNA (1)...(19): siRNA sense strand
gcuaccagcucagcgaugu

SEQ ID NO: 1702402 - RNA, 19 nt, Homo sapiens
  misc_RNA (1)...(19): siRNA sense strand
ggaugugugucgaugucaa

SEQ ID NO: 1702403 - RNA, 19 nt, Homo sapiens
  misc_RNA (1)...(19): siRNA sense strand
gaccggagauuuggauguc

SEQ ID NO: 1702404 - RNA, 19 nt, Homo sapiens
  misc_RNA (1)...(19): siRNA sense strand
ugacuggcauccacaacug

SEQ ID NO: 1702405 - RNA, 19 nt, Homo sapiens
  misc_RNA (1)...(19): siRNA sense strand
gauauugacgagugugaga

SEQ ID NO: 1702406 - RNA, 19 nt, Homo sapiens
  misc_RNA (1)...(19): siRNA sense strand
gcaucagccuggccaacga

SEQ ID NO: 1702407 - RNA, 19 nt, Homo sapiens
  misc_RNA (1)...(19): siRNA sense strand
ggacugcucgcugccauau

SEQ ID NO: 1702408 - RNA, 19 nt, Homo sapiens
  misc_RNA (1)...(19): siRNA sense strand
gcaagaguggcuuuauaca

SEQ ID NO: 1702409 - RNA, 19 nt, Homo sapiens
  misc_RNA (1)...(19): siRNA sense strand
ucaacacagugggcucuuu

SEQ ID NO: 1702410 - RNA, 19 nt, Homo sapiens
  misc_RNA (1)...(19): siRNA sense strand
ugugagagugguauucaua

SEQ ID NO: 1702411 - RNA, 19 nt, Homo sapiens
  misc_RNA (1)...(19): siRNA sense strand
agaacacgcugggcuccua

SEQ ID NO: 1702412 - RNA, 19 nt, Homo sapiens
  misc_RNA (1)...(19): siRNA sense strand
gaagaggugcugccauugc

SEQ ID NO: 1702413 - RNA, 19 nt, Homo sapiens
  misc_RNA (1)...(19): siRNA sense strand
agaauacucugggauccuu

SEQ ID NO: 1702414 - RNA, 19 nt, Homo sapiens
  misc_RNA (1)...(19): siRNA sense strand
aacgagaccugcuucaaca

SEQ ID NO: 1702415 - RNA, 19 nt, Homo sapiens
  misc_RNA (1)...(19): siRNA sense strand
caacgagaccugcuucaac

SEQ ID NO: 1702416 - RNA, 19 nt, Homo sapiens
  misc_RNA (1)...(19): siRNA sense strand
gccaggagaccggagauuu

SEQ ID NO: 1702417 - RNA, 19 nt, Homo sapiens
  misc_RNA (1)...(19): siRNA sense strand
gaaacggauaagaucauug

SEQ ID NO: 1702418 - RNA, 19 nt, Homo sapiens
  misc_RNA (1)...(19): siRNA sense strand
aaugaguguuugaguauca

SEQ ID NO: 1702419 - RNA, 19 nt, Homo sapiens
  misc_RNA (1)...(19): siRNA sense strand
gugagagugguauucauaa

SEQ ID NO: 1702420 - RNA, 19 nt, Homo sapiens
  misc_RNA (1)...(19): siRNA sense strand
caacacagugggcucuuuc

SEQ ID NO: 1702421 - RNA, 19 nt, Homo sapiens
  misc_RNA (1)...(19): siRNA sense strand
cugugaagaugucaaugaa

SEQ ID NO: 1702422 - RNA, 19 nt, Homo sapiens
  misc_RNA (1)...(19): siRNA sense strand
ugauaucaaugaguguuug

SEQ ID NO: 1702423 - RNA, 19 nt, Homo sapiens
  misc_RNA (1)...(19): siRNA sense strand
agagugguauucauaacug

SEQ ID NO: 1702424 - RNA, 19 nt, Homo sapiens
  misc_RNA (1)...(19): siRNA sense strand
agaguggcuuuauacaaga

SEQ ID NO: 1702425 - RNA, 19 nt, Homo sapiens
  misc_RNA (1)...(19): siRNA sense strand
cugauggugucuccuguga

SEQ ID NO: 1702426 - RNA, 19 nt, Homo sapiens
  misc_RNA (1)...(19): siRNA sense strand
auaagaucauugagguuga

SEQ ID NO: 1702427 - RNA, 19 nt, Homo sapiens
  misc_RNA (1)...(19): siRNA sense strand
ucgagugcccugagaacua

SEQ ID NO: 1702428 - RNA, 19 nt, Homo sapiens
  misc_RNA (1)...(19): siRNA sense strand
cuacggaauccaaagaaug

SEQ ID NO: 1702429 - RNA, 19 nt, Homo sapiens
  misc_RNA (1)...(19): siRNA sense strand
gacaccggauggccacuca

SEQ ID NO: 1702430 - RNA, 19 nt, Homo sapiens
  misc_RNA (1)...(19): siRNA sense strand
ccugugaagaugucaauga

SEQ ID NO: 1702431 - RNA, 19 nt, Homo sapiens
  misc_RNA (1)...(19): siRNA sense strand
cgagugcccugagaacuac

SEQ ID NO: 1702432 - RNA, 19 nt, Homo sapiens
  misc_RNA (1)...(19): siRNA sense strand
ggauaagaucauugagguu

SEQ ID NO: 1702433 - RNA, 19 nt, Homo sapiens
  misc_RNA (1)...(19): siRNA sense strand
caggaugugugucgauguc

SEQ ID NO: 1702434 - RNA, 19 nt, Homo sapiens
  misc_RNA (1)...(19): siRNA sense strand
ggagaccggagauuuggau

SEQ ID NO: 1702435 - RNA, 19 nt, Homo sapiens
  misc_RNA (1)...(19): siRNA sense strand
agaggacaauagcugcaaa

SEQ ID NO: 1702436 - RNA, 19 nt, Homo sapiens
  misc_RNA (1)...(19): siRNA sense strand
gaagaugucaaugaaugca

SEQ ID NO: 1702437 - RNA, 19 nt, Homo sapiens
  misc_RNA (1)...(19): siRNA sense strand
cuacggcuccuaccagugu

SEQ ID NO: 1702438 - RNA, 19 nt, Homo sapiens
  misc_RNA (1)...(19): siRNA sense strand
aagcagcagugccgagaca

SEQ ID NO: 1702439 - RNA, 19 nt, Homo sapiens
  misc_RNA (1)...(19): siRNA sense strand
gaacgcgcuguguugaugu

SEQ ID NO: 1702440 - RNA, 19 nt, Homo sapiens
  misc_RNA (1)...(19): siRNA sense strand
gagcucacagaggacaaua

SEQ ID NO: 1702441 - RNA, 19 nt, Homo sapiens
  misc_RNA (1)...(19): siRNA sense strand
gagagugguauucauaacu

SEQ ID NO: 1702442 - RNA, 19 nt, Homo sapiens
  misc_RNA (1)...(19): siRNA sense strand
cgaguacagccucaugguu

SEQ ID NO: 1702443 - RNA, 19 nt, Homo sapiens
  misc_RNA (1)...(19): siRNA sense strand
ggagugugccaacgucuac

SEQ ID NO: 1702444 - RNA, 19 nt, Homo sapiens
  misc_RNA (1)...(19): siRNA sense strand
cagaagaacgugcccaacu

SEQ ID NO: 1702445 - RNA, 19 nt, Homo sapiens
  misc_RNA (1)...(19): siRNA sense strand
gaguggcuuuauacaagau

SEQ ID NO: 1702446 - RNA, 19 nt, Homo sapiens
  misc_RNA (1)...(19): siRNA sense strand
ccacaacugcuccaucaac

SEQ ID NO: 1702447 - RNA, 19 nt, Homo sapiens
  misc_RNA (1)...(19): siRNA sense strand
cauaugcuacggaauccaa

SEQ ID NO: 1702448 - RNA, 19 nt, Homo sapiens
  misc_RNA (1)...(19): siRNA sense strand
caaugaguguuugaguauc

SEQ ID NO: 1702449 - RNA, 19 nt, Homo sapiens
  misc_RNA (1)...(19): siRNA sense strand
ugagagugguauucauaac

SEQ ID NO: 1702450 - RNA, 19 nt, Homo sapiens
  misc_RNA (1)...(19): siRNA sense strand
ggacccauaucugaaugac

SEQ ID NO: 1702451 - RNA, 19 nt, Homo sapiens
  misc_RNA (1)...(19): siRNA sense strand
ggccacaagugcgagaaca

SEQ ID NO: 1702452 - RNA, 19 nt, Homo sapiens
  misc_RNA (1)...(19): siRNA sense strand
uaagaucauugagguugag

SEQ ID NO: 1702453 - RNA, 19 nt, Homo sapiens
  misc_RNA (1)...(19): siRNA sense strand
aagaggacccauaucugaa

SEQ ID NO: 1702454 - RNA, 19 nt, Homo sapiens
  misc_RNA (1)...(19): siRNA sense strand
auccacaacugcuccauca

SEQ ID NO: 1702455 - RNA, 19 nt, Homo sapiens
  misc_RNA (1)...(19): siRNA sense strand
uccaagaaacggauaagau

SEQ ID NO: 1702456 - RNA, 19 nt, Homo sapiens
  misc_RNA (1)...(19): siRNA sense strand
aggcaacuguauugauauc

SEQ ID NO: 1702457 - RNA, 19 nt, Homo sapiens
  misc_RNA (1)...(19): siRNA sense strand
guggauggcaggucaugug

SEQ ID NO: 1702458 - RNA, 19 nt, Homo sapiens
  misc_RNA (1)...(19): siRNA sense strand
gaugcucuaggcaacugua

SEQ ID NO: 1702459 - RNA, 19 nt, Homo sapiens
  misc_RNA (1)...(19): siRNA sense strand
gacaauagcugcaaagaua

SEQ ID NO: 1702460 - RNA, 19 nt, Homo sapiens
  misc_RNA (1)...(19): siRNA sense strand
gcaagacggguuacuauuu

SEQ ID NO: 1702461 - RNA, 19 nt, Homo sapiens
  misc_RNA (1)...(19): siRNA sense strand
cuaggcaacuguauugaua

SEQ ID NO: 1702462 - RNA, 19 nt, Homo sapiens
  misc_RNA (1)...(19): siRNA sense strand
gugcaagaguggcuuuaua

SEQ ID NO: 1702463 - RNA, 19 nt, Homo sapiens
  misc_RNA (1)...(19): siRNA sense strand
gugaagaggugcugccauu

SEQ ID NO: 1702464 - RNA, 19 nt, Homo sapiens
  misc_RNA (1)...(19): siRNA sense strand
gugaagaugucaaugaaug

SEQ ID NO: 1702465 - RNA, 19 nt, Homo sapiens
  misc_RNA (1)...(19): siRNA sense strand
caagaggacccauaucuga

SEQ ID NO: 1702466 - RNA, 19 nt, Homo sapiens
  misc_RNA (1)...(19): siRNA sense strand
ggagaauccugcaucaaca

SEQ ID NO: 1702467 - RNA, 19 nt, Homo sapiens
  misc_RNA (1)...(19): siRNA sense strand
ggaacgcgcuguguugaug

SEQ ID NO: 1702468 - RNA, 19 nt, Homo sapiens
  misc_RNA (1)...(19): siRNA sense strand
ggacaucgcugcgugaacu

SEQ ID NO: 1702469 - RNA, 19 nt, Homo sapiens
  misc_RNA (1)...(19): siRNA sense strand
ggaacaagaggacccauau

SEQ ID NO: 1702470 - RNA, 19 nt, Homo sapiens
  misc_RNA (1)...(19): siRNA sense strand
gacccaagcuacagugcaa

SEQ ID NO: 1702471 - RNA, 19 nt, Homo sapiens
  misc_RNA (1)...(19): siRNA sense strand
gauggugucuccugugaag

SEQ ID NO: 1702472 - RNA, 19 nt, Homo sapiens
  misc_RNA (1)...(19): siRNA sense strand
caagacggguuacuauuuu

SEQ ID NO: 1702473 - RNA, 19 nt, Homo sapiens
  misc_RNA (1)...(19): siRNA sense strand
aaacggauaagaucauuga

SEQ ID NO: 1702474 - RNA, 19 nt, Homo sapiens
  misc_RNA (1)...(19): siRNA sense strand
gauggcaggucaugugaag

SEQ ID NO: 1702475 - RNA, 19 nt, Homo sapiens
  misc_RNA (1)...(19): siRNA sense strand
aagaguggcuuuauacaag

SEQ ID NO: 1702476 - RNA, 19 nt, Homo sapiens
  misc_RNA (1)...(19): siRNA sense strand
caagaguggcuuuauacaa

SEQ ID NO: 1702477 - RNA, 19 nt, Homo sapiens
  misc_RNA (1)...(19): siRNA sense strand
gcgaaugcaagacggguua

SEQ ID NO: 1702478 - RNA, 19 nt, Homo sapiens
  misc_RNA (1)...(19): siRNA sense strand
gcucuaggcaacuguauug

SEQ ID NO: 1702479 - RNA, 19 nt, Homo sapiens
  misc_RNA (1)...(19): siRNA sense strand
ggacaauagcugcaaagau

SEQ ID NO: 1702480 - RNA, 19 nt, Homo sapiens
  misc_RNA (1)...(19): siRNA sense strand
auacaugcaucaacacaga

SEQ ID NO: 1702481 - RNA, 19 nt, Homo sapiens
  misc_RNA (1)...(19): siRNA sense strand
ccaagaaacggauaagauc

SEQ ID NO: 1702482 - RNA, 19 nt, Homo sapiens
  misc_RNA (1)...(19): siRNA sense strand
gaagaacgugcccaacugu

SEQ ID NO: 1702483 - RNA, 19 nt, Homo sapiens
  misc_RNA (1)...(19): siRNA sense strand
caaagauauugacgagugu

SEQ ID NO: 1702484 - RNA, 19 nt, Homo sapiens
  misc_RNA (1)...(19): siRNA sense strand
gcucagcgauguggaugga

SEQ ID NO: 1702485 - RNA, 19 nt, Homo sapiens
  misc_RNA (1)...(19): siRNA sense strand
ggccagagcugcgaguaca

SEQ ID NO: 1702486 - RNA, 19 nt, Homo sapiens
  misc_RNA (1)...(19): siRNA sense strand
ggccguggcuaccaucuca

SEQ ID NO: 1702487 - RNA, 19 nt, Homo sapiens
  misc_RNA (1)...(19): siRNA sense strand
agaagaacgugcccaacug

SEQ ID NO: 1702488 - RNA, 19 nt, Homo sapiens
  misc_RNA (1)...(19): siRNA sense strand
caagaaacggauaagauca

SEQ ID NO: 1702489 - RNA, 19 nt, Homo sapiens
  misc_RNA (1)...(19): siRNA sense strand
gagggaacgcgcuguguug

SEQ ID NO: 1702490 - RNA, 19 nt, Homo sapiens
  misc_RNA (1)...(19): siRNA sense strand
gcuacggaauccaaagaau

SEQ ID NO: 1702491 - RNA, 19 nt, Homo sapiens
  misc_RNA (1)...(19): siRNA sense strand
gaacaagaggacccauauc

SEQ ID NO: 1702492 - RNA, 19 nt, Homo sapiens
  misc_RNA (1)...(19): siRNA sense strand
agaaacggauaagaucauu

SEQ ID NO: 1702493 - RNA, 19 nt, Homo sapiens
  misc_RNA (1)...(19): siRNA sense strand
ggagggaacgcgcuguguu

SEQ ID NO: 1702494 - RNA, 19 nt, Homo sapiens
  misc_RNA (1)...(19): siRNA sense strand
gaggacccauaucugaaug

SEQ ID NO: 1702495 - RNA, 19 nt, Homo sapiens
  misc_RNA (1)...(19): siRNA sense strand
ccaggagaccggagauuug

SEQ ID NO: 1702496 - RNA, 19 nt, Homo sapiens
  misc_RNA (1)...(19): siRNA sense strand
gcuaccagcucagcgaugu

SEQ ID NO: 1702497 - RNA, 19 nt, Homo sapiens
  misc_RNA (1)...(19): siRNA sense strand
ggaugugugucgaugucaa

SEQ ID NO: 1702498 - RNA, 19 nt, Homo sapiens
  misc_RNA (1)...(19): siRNA sense strand
gaccggagauuuggauguc

SEQ ID NO: 1702499 - RNA, 19 nt, Homo sapiens
  misc_RNA (1)...(19): siRNA sense strand
ugacuggcauccacaacug

SEQ ID NO: 1702500 - RNA, 19 nt, Homo sapiens
  misc_RNA (1)...(19): siRNA sense strand
gauauugacgagugugaga

SEQ ID NO: 1702501 - RNA, 19 nt, Homo sapiens
  misc_RNA (1)...(19): siRNA sense strand
gcaucagccuggccaacga

SEQ ID NO: 1702502 - RNA, 19 nt, Homo sapiens
  misc_RNA (1)...(19): siRNA sense strand
ggacugcucgcugccauau

SEQ ID NO: 1702503 - RNA, 19 nt, Homo sapiens
  misc_RNA (1)...(19): siRNA sense strand
gcaagaguggcuuuauaca

SEQ ID NO: 1702504 - RNA, 19 nt, Homo sapiens
  misc_RNA (1)...(19): siRNA sense strand
ucaacacagugggcucuuu

SEQ ID NO: 1702505 - RNA, 19 nt, Homo sapiens
  misc_RNA (1)...(19): siRNA sense strand
ugugagagugguauucaua

SEQ ID NO: 1702506 - RNA, 19 nt, Homo sapiens
  misc_RNA (1)...(19): siRNA sense strand
agaacacgcugggcuccua

SEQ ID NO: 1702507 - RNA, 19 nt, Homo sapiens
  misc_RNA (1)...(19): siRNA sense strand
gaagaggugcugccauugc

SEQ ID NO: 1702508 - RNA, 19 nt, Homo sapiens
  misc_RNA (1)...(19): siRNA sense strand
agaauacucugggauccuu

SEQ ID NO: 1702509 - RNA, 19 nt, Homo sapiens
  misc_RNA (1)...(19): siRNA sense strand
aacgagaccugcuucaaca

SEQ ID NO: 1702510 - RNA, 19 nt, Homo sapiens
  misc_RNA (1)...(19): siRNA sense strand
caacgagaccugcuucaac

SEQ ID NO: 1702511 - RNA, 19 nt, Homo sapiens
  misc_RNA (1)...(19): siRNA sense strand
gccaggagaccggagauuu

SEQ ID NO: 1702512 - RNA, 19 nt, Homo sapiens
  misc_RNA (1)...(19): siRNA sense strand
gaaacggauaagaucauug

SEQ ID NO: 1702513 - RNA, 19 nt, Homo sapiens
  misc_RNA (1)...(19): siRNA sense strand
aaugaguguuugaguauca

SEQ ID NO: 1702514 - RNA, 19 nt, Homo sapiens
  misc_RNA (1)...(19): siRNA sense strand
gugagagugguauucauaa

SEQ ID NO: 1702515 - RNA, 19 nt, Homo sapiens
  misc_RNA (1)...(19): siRNA sense strand
caacacagugggcucuuuc

SEQ ID NO: 1702516 - RNA, 19 nt, Homo sapiens
  misc_RNA (1)...(19): siRNA sense strand
cugugaagaugucaaugaa

SEQ ID NO: 1702517 - RNA, 19 nt, Homo sapiens
  misc_RNA (1)...(19): siRNA sense strand
ugauaucaaugaguguuug

SEQ ID NO: 1702518 - RNA, 19 nt, Homo sapiens
  misc_RNA (1)...(19): siRNA sense strand
agagugguauucauaacug

SEQ ID NO: 1702519 - RNA, 19 nt, Homo sapiens
  misc_RNA (1)...(19): siRNA sense strand
agaguggcuuuauacaaga

SEQ ID NO: 1702520 - RNA, 19 nt, Homo sapiens
  misc_RNA (1)...(19): siRNA sense strand
cugauggugucuccuguga

SEQ ID NO: 1702521 - RNA, 19 nt, Homo sapiens
  misc_RNA (1)...(19): siRNA sense strand
auaagaucauugagguuga

SEQ ID NO: 1702522 - RNA, 19 nt, Homo sapiens
  misc_RNA (1)...(19): siRNA sense strand
ucgagugcccugagaacua

SEQ ID NO: 1702523 - RNA, 19 nt, Homo sapiens
  misc_RNA (1)...(19): siRNA sense strand
cuacggaauccaaagaaug

SEQ ID NO: 1702524 - RNA, 19 nt, Homo sapiens
  misc_RNA (1)...(19): siRNA sense strand
gacaccggauggccacuca

SEQ ID NO: 1702525 - RNA, 19 nt, Homo sapiens
  misc_RNA (1)...(19): siRNA sense strand
ccugugaagaugucaauga

SEQ ID NO: 1702526 - RNA, 19 nt, Homo sapiens
  misc_RNA (1)...(19): siRNA sense strand
cgagugcccugagaacuac

SEQ ID NO: 1702527 - RNA, 19 nt, Homo sapiens
  misc_RNA (1)...(19): siRNA sense strand
ggauaagaucauugagguu

SEQ ID NO: 1702528 - RNA, 19 nt, Homo sapiens
  misc_RNA (1)...(19): siRNA sense strand
caggaugugugucgauguc

SEQ ID NO: 1702529 - RNA, 19 nt, Homo sapiens
  misc_RNA (1)...(19): siRNA sense strand
ggagaccggagauuuggau

SEQ ID NO: 1702530 - RNA, 19 nt, Homo sapiens
  misc_RNA (1)...(19): siRNA sense strand
agaggacaauagcugcaaa

SEQ ID NO: 1702531 - RNA, 19 nt, Homo sapiens
  misc_RNA (1)...(19): siRNA sense strand
gaagaugucaaugaaugca

SEQ ID NO: 1702532 - RNA, 19 nt, Homo sapiens
  misc_RNA (1)...(19): siRNA sense strand
cuacggcuccuaccagugu

SEQ ID NO: 1702533 - RNA, 19 nt, Homo sapiens
  misc_RNA (1)...(19): siRNA sense strand
aagcagcagugccgagaca

SEQ ID NO: 1702534 - RNA, 19 nt, Homo sapiens
  misc_RNA (1)...(19): siRNA sense strand
gaacgcgcuguguugaugu

SEQ ID NO: 1702535 - RNA, 19 nt, Homo sapiens
  misc_RNA (1)...(19): siRNA sense strand
gagcucacagaggacaaua

SEQ ID NO: 1702536 - RNA, 19 nt, Homo sapiens
  misc_RNA (1)...(19): siRNA sense strand
gagagugguauucauaacu

SEQ ID NO: 1702537 - RNA, 19 nt, Homo sapiens
  misc_RNA (1)...(19): siRNA sense strand
cgaguacagccucaugguu

SEQ ID NO: 1702538 - RNA, 19 nt, Homo sapiens
  misc_RNA (1)...(19): siRNA sense strand
ggagugugccaacgucuac

SEQ ID NO: 1702539 - RNA, 19 nt, Homo sapiens
  misc_RNA (1)...(19): siRNA sense strand
cagaagaacgugcccaacu

SEQ ID NO: 1702540 - RNA, 19 nt, Homo sapiens
  misc_RNA (1)...(19): siRNA sense strand
gaguggcuuuauacaagau

SEQ ID NO: 1702541 - RNA, 19 nt, Homo sapiens
  misc_RNA (1)...(19): siRNA sense strand
ccacaacugcuccaucaac

SEQ ID NO: 1702542 - RNA, 19 nt, Homo sapiens
  misc_RNA (1)...(19): siRNA sense strand
cauaugcuacggaauccaa

SEQ ID NO: 1702543 - RNA, 19 nt, Homo sapiens
  misc_RNA (1)...(19): siRNA sense strand
caaugaguguuugaguauc

SEQ ID NO: 1702544 - RNA, 19 nt, Homo sapiens
  misc_RNA (1)...(19): siRNA sense strand
ugagagugguauucauaac

SEQ ID NO: 1702545 - RNA, 19 nt, Homo sapiens
  misc_RNA (1)...(19): siRNA sense strand
ggacccauaucugaaugac

SEQ ID NO: 1702546 - RNA, 19 nt, Homo sapiens
  misc_RNA (1)...(19): siRNA sense strand
ggccacaagugcgagaaca

SEQ ID NO: 1702547 - RNA, 19 nt, Homo sapiens
  misc_RNA (1)...(19): siRNA sense strand
uaagaucauugagguugag

SEQ ID NO: 1702548 - RNA, 19 nt, Homo sapiens
  misc_RNA (1)...(19): siRNA sense strand
aagaggacccauaucugaa

SEQ ID NO: 1702549 - RNA, 19 nt, Homo sapiens
  misc_RNA (1)...(19): siRNA sense strand
auccacaacugcuccauca

SEQ ID NO: 1702550 - RNA, 19 nt, Homo sapiens
  misc_RNA (1)...(19): siRNA sense strand
uccaagaaacggauaagau

SEQ ID NO: 1702551 - RNA, 19 nt, Homo sapiens
  misc_RNA (1)...(19): siRNA sense strand
aggcaacuguauugauauc

SEQ ID NO: 1702552 - RNA, 19 nt, Homo sapiens
  misc_RNA (1)...(19): siRNA sense strand
guggauggcaggucaugug

SEQ ID NO: 1702553 - RNA, 19 nt, Homo sapiens
  misc_RNA (1)...(19): siRNA sense strand
gaugcucuaggcaacugua

SEQ ID NO: 1702554 - RNA, 19 nt, Homo sapiens
  misc_RNA (1)...(19): siRNA sense strand
gacaauagcugcaaagaua

SEQ ID NO: 1702555 - RNA, 19 nt, Homo sapiens
  misc_RNA (1)...(19): siRNA sense strand
gcaagacggguuacuauuu

SEQ ID NO: 1702556 - RNA, 19 nt, Homo sapiens
  misc_RNA (1)...(19): siRNA sense strand
cuaggcaacuguauugaua

SEQ ID NO: 1702557 - RNA, 19 nt, Homo sapiens
  misc_RNA (1)...(19): siRNA sense strand
gugcaagaguggcuuuaua

SEQ ID NO: 1702558 - RNA, 19 nt, Homo sapiens
  misc_RNA (1)...(19): siRNA sense strand
gugaagaggugcugccauu

SEQ ID NO: 1702559 - RNA, 19 nt, Homo sapiens
  misc_RNA (1)...(19): siRNA sense strand
gugaagaugucaaugaaug

SEQ ID NO: 1702560 - RNA, 19 nt, Homo sapiens
  misc_RNA (1)...(19): siRNA sense strand
caagaggacccauaucuga

SEQ ID NO: 1702561 - RNA, 19 nt, Homo sapiens
  misc_RNA (1)...(19): siRNA sense strand
ggagaauccugcaucaaca

SEQ ID NO: 1702562 - RNA, 19 nt, Homo sapiens
  misc_RNA (1)...(19): siRNA sense strand
ggaacgcgcuguguugaug

SEQ ID NO: 1702563 - RNA, 19 nt, Homo sapiens
  misc_RNA (1)...(19): siRNA sense strand
ggacaucgcugcgugaacu

SEQ ID NO: 1702564 - RNA, 19 nt, Homo sapiens
  misc_RNA (1)...(19): siRNA sense strand
ggaacaagaggacccauau

SEQ ID NO: 1702565 - RNA, 19 nt, Homo sapiens
  misc_RNA (1)...(19): siRNA sense strand
gacccaagcuacagugcaa

SEQ ID NO: 1702566 - RNA, 19 nt, Homo sapiens
  misc_RNA (1)...(19): siRNA sense strand
gauggugucuccugugaag

SEQ ID NO: 1702567 - RNA, 19 nt, Homo sapiens
  misc_RNA (1)...(19): siRNA sense strand
caagacggguuacuauuuu

SEQ ID NO: 1702568 - RNA, 19 nt, Homo sapiens
  misc_RNA (1)...(19): siRNA sense strand
aaacggauaagaucauuga

SEQ ID NO: 1702569 - RNA, 19 nt, Homo sapiens
  misc_RNA (1)...(19): siRNA sense strand
gauggcaggucaugugaag

SEQ ID NO: 1702570 - RNA, 19 nt, Homo sapiens
  misc_RNA (1)...(19): siRNA sense strand
aagaguggcuuuauacaag

SEQ ID NO: 1702571 - RNA, 19 nt, Homo sapiens
  misc_RNA (1)...(19): siRNA sense strand
caagaguggcuuuauacaa

SEQ ID NO: 1702572 - RNA, 19 nt, Homo sapiens
  misc_RNA (1)...(19): siRNA sense strand
gcgaaugcaagacggguua

SEQ ID NO: 1702573 - RNA, 19 nt, Homo sapiens
  misc_RNA (1)...(19): siRNA sense strand
gcucuaggcaacuguauug

SEQ ID NO: 1702574 - RNA, 19 nt, Homo sapiens
  misc_RNA (1)...(19): siRNA sense strand
ggacaauagcugcaaagau

SEQ ID NO: 1702575 - RNA, 19 nt, Homo sapiens
  misc_RNA (1)...(19): siRNA sense strand
auacaugcaucaacacaga

SEQ ID NO: 1702576 - RNA, 19 nt, Homo sapiens
  misc_RNA (1)...(19): siRNA sense strand
ccaagaaacggauaagauc

SEQ ID NO: 1702577 - RNA, 19 nt, Homo sapiens
  misc_RNA (1)...(19): siRNA sense strand
gaagaacgugcccaacugu

SEQ ID NO: 1702578 - RNA, 19 nt, Homo sapiens
  misc_RNA (1)...(19): siRNA sense strand
caaagauauugacgagugu

SEQ ID NO: 1702579 - RNA, 19 nt, Homo sapiens
  misc_RNA (1)...(19): siRNA sense strand
gcucagcgauguggaugga

SEQ ID NO: 1702580 - RNA, 19 nt, Homo sapiens
  misc_RNA (1)...(19): siRNA sense strand
ggccagagcugcgaguaca

SEQ ID NO: 1702581 - RNA, 19 nt, Homo sapiens
  misc_RNA (1)...(19): siRNA sense strand
ggccguggcuaccaucuca

SEQ ID NO: 1702582 - RNA, 19 nt, Homo sapiens
  misc_RNA (1)...(19): siRNA sense strand
agaagaacgugcccaacug

SEQ ID NO: 1702583 - RNA, 19 nt, Homo sapiens
  misc_RNA (1)...(19): siRNA sense strand
caagaaacggauaagauca

SEQ ID NO: 1702584 - RNA, 19 nt, Homo sapiens
  misc_RNA (1)...(19): siRNA sense strand
gagggaacgcgcuguguug

SEQ ID NO: 1702585 - RNA, 19 nt, Homo sapiens
  misc_RNA (1)...(19): siRNA sense strand
gcuacggaauccaaagaau

SEQ ID NO: 1702586 - RNA, 19 nt, Homo sapiens
  misc_RNA (1)...(19): siRNA sense strand
gaacaagaggacccauauc

SEQ ID NO: 1702587 - RNA, 19 nt, Homo sapiens
  misc_RNA (1)...(19): siRNA sense strand
agaaacggauaagaucauu

SEQ ID NO: 1702588 - RNA, 19 nt, Homo sapiens
  misc_RNA (1)...(19): siRNA sense strand
ggagggaacgcgcuguguu

SEQ ID NO: 1702589 - RNA, 19 nt, Homo sapiens
  misc_RNA (1)...(19): siRNA sense strand
gaggacccauaucugaaug

SEQ ID NO: 1702590 - RNA, 19 nt, Homo sapiens
  misc_RNA (1)...(19): siRNA sense strand
ccaggagaccggagauuug

SEQ ID NO: 1702591 - RNA, 19 nt, Homo sapiens
  misc_RNA (1)...(19): siRNA sense strand
gcuaccagcucagcgaugu

SEQ ID NO: 1702592 - RNA, 19 nt, Homo sapiens
  misc_RNA (1)...(19): siRNA sense strand
ggaugugugucgaugucaa

SEQ ID NO: 1702593 - RNA, 19 nt, Homo sapiens
  misc_RNA (1)...(19): siRNA sense strand
gaccggagauuuggauguc

SEQ ID NO: 1702594 - RNA, 19 nt, Homo sapiens
  misc_RNA (1)...(19): siRNA sense strand
ugacuggcauccacaacug

SEQ ID NO: 1702595 - RNA, 19 nt, Homo sapiens
  misc_RNA (1)...(19): siRNA sense strand
gauauugacgagugugaga

SEQ ID NO: 1702596 - RNA, 19 nt, Homo sapiens
  misc_RNA (1)...(19): siRNA sense strand
gcaucagccuggccaacga

SEQ ID NO: 1702597 - RNA, 19 nt, Homo sapiens
  misc_RNA (1)...(19): siRNA sense strand
ggacugcucgcugccauau

SEQ ID NO: 1702598 - RNA, 19 nt, Homo sapiens
  misc_RNA (1)...(19): siRNA sense strand
gcaagaguggcuuuauaca

SEQ ID NO: 1702599 - RNA, 19 nt, Homo sapiens
  misc_RNA (1)...(19): siRNA sense strand
ucaacacagugggcucuuu

SEQ ID NO: 1702600 - RNA, 19 nt, Homo sapiens
  misc_RNA (1)...(19): siRNA sense strand
ugugagagugguauucaua

SEQ ID NO: 1702601 - RNA, 19 nt, Homo sapiens
  misc_RNA (1)...(19): siRNA sense strand
agaacacgcugggcuccua

SEQ ID NO: 1702602 - RNA, 19 nt, Homo sapiens
  misc_RNA (1)...(19): siRNA sense strand
gaagaggugcugccauugc

SEQ ID NO: 1702603 - RNA, 19 nt, Homo sapiens
  misc_RNA (1)...(19): siRNA sense strand
agaauacucugggauccuu

SEQ ID NO: 1702604 - RNA, 19 nt, Homo sapiens
  misc_RNA (1)...(19): siRNA sense strand
aacgagaccugcuucaaca

SEQ ID NO: 1702605 - RNA, 19 nt, Homo sapiens
  misc_RNA (1)...(19): siRNA sense strand
caacgagaccugcuucaac

SEQ ID NO: 1702606 - RNA, 19 nt, Homo sapiens
  misc_RNA (1)...(19): siRNA sense strand
gccaggagaccggagauuu

SEQ ID NO: 1702607 - RNA, 19 nt, Homo sapiens
  misc_RNA (1)...(19): siRNA sense strand
gaaacggauaagaucauug

SEQ ID NO: 1702608 - RNA, 19 nt, Homo sapiens
  misc_RNA (1)...(19): siRNA sense strand
aaugaguguuugaguauca

SEQ ID NO: 1702609 - RNA, 19 nt, Homo sapiens
  misc_RNA (1)...(19): siRNA sense strand
gugagagugguauucauaa

SEQ ID NO: 1702610 - RNA, 19 nt, Homo sapiens
  misc_RNA (1)...(19): siRNA sense strand
caacacagugggcucuuuc

SEQ ID NO: 1702611 - RNA, 19 nt, Homo sapiens
  misc_RNA (1)...(19): siRNA sense strand
cugugaagaugucaaugaa

SEQ ID NO: 1702612 - RNA, 19 nt, Homo sapiens
  misc_RNA (1)...(19): siRNA sense strand
ugauaucaaugaguguuug

SEQ ID NO: 1702613 - RNA, 19 nt, Homo sapiens
  misc_RNA (1)...(19): siRNA sense strand
agagugguauucauaacug

SEQ ID NO: 1702614 - RNA, 19 nt, Homo sapiens
  misc_RNA (1)...(19): siRNA sense strand
agaguggcuuuauacaaga

SEQ ID NO: 1702615 - RNA, 19 nt, Homo sapiens
  misc_RNA (1)...(19): siRNA sense strand
cugauggugucuccuguga

SEQ ID NO: 1702616 - RNA, 19 nt, Homo sapiens
  misc_RNA (1)...(19): siRNA sense strand
auaagaucauugagguuga

SEQ ID NO: 1702617 - RNA, 19 nt, Homo sapiens
  misc_RNA (1)...(19): siRNA sense strand
ucgagugcccugagaacua

SEQ ID NO: 1702618 - RNA, 19 nt, Homo sapiens
  misc_RNA (1)...(19): siRNA sense strand
cuacggaauccaaagaaug

SEQ ID NO: 1702619 - RNA, 19 nt, Homo sapiens
  misc_RNA (1)...(19): siRNA sense strand
gacaccggauggccacuca

SEQ ID NO: 1702620 - RNA, 19 nt, Homo sapiens
  misc_RNA (1)...(19): siRNA sense strand
ccugugaagaugucaauga

SEQ ID NO: 1702621 - RNA, 19 nt, Homo sapiens
  misc_RNA (1)...(19): siRNA sense strand
cgagugcccugagaacuac

SEQ ID NO: 1702622 - RNA, 19 nt, Homo sapiens
  misc_RNA (1)...(19): siRNA sense strand
ggauaagaucauugagguu

SEQ ID NO: 1702623 - RNA, 19 nt, Homo sapiens
  misc_RNA (1)...(19): siRNA sense strand
caggaugugugucgauguc

SEQ ID NO: 1702624 - RNA, 19 nt, Homo sapiens
  misc_RNA (1)...(19): siRNA sense strand
ggagaccggagauuuggau

SEQ ID NO: 1702625 - RNA, 19 nt, Homo sapiens
  misc_RNA (1)...(19): siRNA sense strand
agaggacaauagcugcaaa

SEQ ID NO: 1702626 - RNA, 19 nt, Homo sapiens
  misc_RNA (1)...(19): siRNA sense strand
gaagaugucaaugaaugca

SEQ ID NO: 1702627 - RNA, 19 nt, Homo sapiens
  misc_RNA (1)...(19): siRNA sense strand
cuacggcuccuaccagugu

SEQ ID NO: 1702628 - RNA, 19 nt, Homo sapiens
  misc_RNA (1)...(19): siRNA sense strand
aagcagcagugccgagaca

SEQ ID NO: 1702629 - RNA, 19 nt, Homo sapiens
  misc_RNA (1)...(19): siRNA sense strand
gaacgcgcuguguugaugu

SEQ ID NO: 1702630 - RNA, 19 nt, Homo sapiens
  misc_RNA (1)...(19): siRNA sense strand
gagcucacagaggacaaua

SEQ ID NO: 1702631 - RNA, 19 nt, Homo sapiens
  misc_RNA (1)...(19): siRNA sense strand
gagagugguauucauaacu

SEQ ID NO: 1702632 - RNA, 19 nt, Homo sapiens
  misc_RNA (1)...(19): siRNA sense strand
cgaguacagccucaugguu

SEQ ID NO: 1702633 - RNA, 19 nt, Homo sapiens
  misc_RNA (1)...(19): siRNA sense strand
ggagugugccaacgucuac

SEQ ID NO: 1702634 - RNA, 19 nt, Homo sapiens
  misc_RNA (1)...(19): siRNA sense strand
cagaagaacgugcccaacu

SEQ ID NO: 1702635 - RNA, 19 nt, Homo sapiens
  misc_RNA (1)...(19): siRNA sense strand
gaguggcuuuauacaagau

SEQ ID NO: 1702636 - RNA, 19 nt, Homo sapiens
  misc_RNA (1)...(19): siRNA sense strand
ccacaacugcuccaucaac

SEQ ID NO: 1702637 - RNA, 19 nt, Homo sapiens
  misc_RNA (1)...(19): siRNA sense strand
cauaugcuacggaauccaa

SEQ ID NO: 1702638 - RNA, 19 nt, Homo sapiens
  misc_RNA (1)...(19): siRNA sense strand
caaugaguguuugaguauc

SEQ ID NO: 1702639 - RNA, 19 nt, Homo sapiens
  misc_RNA (1)...(19): siRNA sense strand
ugagagugguauucauaac

SEQ ID NO: 1702640 - RNA, 19 nt, Homo sapiens
  misc_RNA (1)...(19): siRNA sense strand
ggacccauaucugaaugac

SEQ ID NO: 1702641 - RNA, 19 nt, Homo sapiens
  misc_RNA (1)...(19): siRNA sense strand
ggccacaagugcgagaaca

SEQ ID NO: 1702642 - RNA, 19 nt, Homo sapiens
  misc_RNA (1)...(19): siRNA sense strand
uaagaucauugagguugag

SEQ ID NO: 1702643 - RNA, 19 nt, Homo sapiens
  misc_RNA (1)...(19): siRNA sense strand
aagaggacccauaucugaa

SEQ ID NO: 1702644 - RNA, 19 nt, Homo sapiens
  misc_RNA (1)...(19): siRNA sense strand
auccacaacugcuccauca

SEQ ID NO: 1702645 - RNA, 19 nt, Homo sapiens
  misc_RNA (1)...(19): siRNA sense strand
uccaagaaacggauaagau

SEQ ID NO: 1702646 - RNA, 19 nt, Homo sapiens
  misc_RNA (1)...(19): siRNA sense strand
aggcaacuguauugauauc

SEQ ID NO: 1702647 - RNA, 19 nt, Homo sapiens
  misc_RNA (1)...(19): siRNA sense strand
guggauggcaggucaugug

SEQ ID NO: 1702648 - RNA, 19 nt, Homo sapiens
  misc_RNA (1)...(19): siRNA sense strand
gaugcucuaggcaacugua

SEQ ID NO: 1702649 - RNA, 19 nt, Homo sapiens
  misc_RNA (1)...(19): siRNA sense strand
gacaauagcugcaaagaua

SEQ ID NO: 1702650 - RNA, 19 nt, Homo sapiens
  misc_RNA (1)...(19): siRNA sense strand
gcaagacggguuacuauuu

SEQ ID NO: 1702651 - RNA, 19 nt, Homo sapiens
  misc_RNA (1)...(19): siRNA sense strand
cuaggcaacuguauugaua

SEQ ID NO: 1702652 - RNA, 19 nt, Homo sapiens
  misc_RNA (1)...(19): siRNA sense strand
gugcaagaguggcuuuaua

SEQ ID NO: 1702653 - RNA, 19 nt, Homo sapiens
  misc_RNA (1)...(19): siRNA sense strand
gugaagaggugcugccauu

SEQ ID NO: 1702654 - RNA, 19 nt, Homo sapiens
  misc_RNA (1)...(19): siRNA sense strand
gugaagaugucaaugaaug

SEQ ID NO: 1702655 - RNA, 19 nt, Homo sapiens
  misc_RNA (1)...(19): siRNA sense strand
caagaggacccauaucuga

SEQ ID NO: 1702656 - RNA, 19 nt, Homo sapiens
  misc_RNA (1)...(19): siRNA sense strand
ggagaauccugcaucaaca

SEQ ID NO: 1702657 - RNA, 19 nt, Homo sapiens
  misc_RNA (1)...(19): siRNA sense strand
ggaacgcgcuguguugaug

SEQ ID NO: 1702658 - RNA, 19 nt, Homo sapiens
  misc_RNA (1)...(19): siRNA sense strand
ggacaucgcugcgugaacu

SEQ ID NO: 1702659 - RNA, 19 nt, Homo sapiens
  misc_RNA (1)...(19): siRNA sense strand
ggaacaagaggacccauau

SEQ ID NO: 1702660 - RNA, 19 nt, Homo sapiens
  misc_RNA (1)...(19): siRNA sense strand
gacccaagcuacagugcaa

SEQ ID NO: 1702661 - RNA, 19 nt, Homo sapiens
  misc_RNA (1)...(19): siRNA sense strand
gauggugucuccugugaag

SEQ ID NO: 1702662 - RNA, 19 nt, Homo sapiens
  misc_RNA (1)...(19): siRNA sense strand
caagacggguuacuauuuu

SEQ ID NO: 1702663 - RNA, 19 nt, Homo sapiens
  misc_RNA (1)...(19): siRNA sense strand
aaacggauaagaucauuga

SEQ ID NO: 1702664 - RNA, 19 nt, Homo sapiens
  misc_RNA (1)...(19): siRNA sense strand
gauggcaggucaugugaag

SEQ ID NO: 1702665 - RNA, 19 nt, Homo sapiens
  misc_RNA (1)...(19): siRNA sense strand
aagaguggcuuuauacaag

SEQ ID NO: 1702666 - RNA, 19 nt, Homo sapiens
  misc_RNA (1)...(19): siRNA sense strand
caagaguggcuuuauacaa

SEQ ID NO: 1702667 - RNA, 19 nt, Homo sapiens
  misc_RNA (1)...(19): siRNA sense strand
gcgaaugcaagacggguua

SEQ ID NO: 1702668 - RNA, 19 nt, Homo sapiens
  misc_RNA (1)...(19): siRNA sense strand
gcucuaggcaacuguauug

SEQ ID NO: 1702669 - RNA, 19 nt, Homo sapiens
  misc_RNA (1)...(19): siRNA sense strand
ggacaauagcugcaaagau

SEQ ID NO: 1702670 - RNA, 19 nt, Homo sapiens
  misc_RNA (1)...(19): siRNA sense strand
auacaugcaucaacacaga

SEQ ID NO: 1702671 - RNA, 19 nt, Homo sapiens
  misc_RNA (1)...(19): siRNA sense strand
ccaagaaacggauaagauc

SEQ ID NO: 1702672 - RNA, 19 nt, Homo sapiens
  misc_RNA (1)...(19): siRNA sense strand
gaagaacgugcccaacugu

SEQ ID NO: 1702673 - RNA, 19 nt, Homo sapiens
  misc_RNA (1)...(19): siRNA sense strand
caaagauauugacgagugu

SEQ ID NO: 1702674 - RNA, 19 nt, Homo sapiens
  misc_RNA (1)...(19): siRNA sense strand
gcucagcgauguggaugga

SEQ ID NO: 1702675 - RNA, 19 nt, Homo sapiens
  misc_RNA (1)...(19): siRNA sense strand
ggccagagcugcgaguaca

SEQ ID NO: 1702676 - RNA, 19 nt, Homo sapiens
  misc_RNA (1)...(19): siRNA sense strand
ggccguggcuaccaucuca

SEQ ID NO: 1702677 - RNA, 19 nt, Homo sapiens
  misc_RNA (1)...(19): siRNA sense strand
agaagaacgugcccaacug

SEQ ID NO: 1702678 - RNA, 19 nt, Homo sapiens
  misc_RNA (1)...(19): siRNA sense strand
caagaaacggauaagauca

SEQ ID NO: 1702679 - RNA, 19 nt, Homo sapiens
  misc_RNA (1)...(19): siRNA sense strand
gagggaacgcgcuguguug

SEQ ID NO: 1702680 - RNA, 19 nt, Homo sapiens
  misc_RNA (1)...(19): siRNA sense strand
gcuacggaauccaaagaau

SEQ ID NO: 1702681 - RNA, 19 nt, Homo sapiens
  misc_RNA (1)...(19): siRNA sense strand
gaacaagaggacccauauc

SEQ ID NO: 1702682 - RNA, 19 nt, Homo sapiens
  misc_RNA (1)...(19): siRNA sense strand
agaaacggauaagaucauu

SEQ ID NO: 1702683 - RNA, 19 nt, Homo sapiens
  misc_RNA (1)...(19): siRNA sense strand
ggagggaacgcgcuguguu

SEQ ID NO: 1702684 - RNA, 19 nt, Homo sapiens
  misc_RNA (1)...(19): siRNA sense strand
gaggacccauaucugaaug

SEQ ID NO: 1702685 - RNA, 19 nt, Homo sapiens
  misc_RNA (1)...(19): siRNA sense strand
ccaggagaccggagauuug

SEQ ID NO: 1702686 - RNA, 19 nt, Homo sapiens
  misc_RNA (1)...(19): siRNA sense strand
gcuaccagcucagcgaugu

SEQ ID NO: 1702687 - RNA, 19 nt, Homo sapiens
  misc_RNA (1)...(19): siRNA sense strand
ggaugugugucgaugucaa

SEQ ID NO: 1702688 - RNA, 19 nt, Homo sapiens
  misc_RNA (1)...(19): siRNA sense strand
gaccggagauuuggauguc

SEQ ID NO: 1702689 - RNA, 19 nt, Homo sapiens
  misc_RNA (1)...(19): siRNA sense strand
ugacuggcauccacaacug

SEQ ID NO: 1702690 - RNA, 19 nt, Homo sapiens
  misc_RNA (1)...(19): siRNA sense strand
gauauugacgagugugaga

SEQ ID NO: 1702691 - RNA, 19 nt, Homo sapiens
  misc_RNA (1)...(19): siRNA sense strand
gcaucagccuggccaacga

SEQ ID NO: 1702692 - RNA, 19 nt, Homo sapiens
  misc_RNA (1)...(19): siRNA sense strand
ggacugcucgcugccauau

SEQ ID NO: 1702693 - RNA, 19 nt, Homo sapiens
  misc_RNA (1)...(19): siRNA sense strand
gcaagaguggcuuuauaca

SEQ ID NO: 1702694 - RNA, 19 nt, Homo sapiens
  misc_RNA (1)...(19): siRNA sense strand
ucaacacagugggcucuuu

SEQ ID NO: 1702695 - RNA, 19 nt, Homo sapiens
  misc_RNA (1)...(19): siRNA sense strand
ugugagagugguauucaua

SEQ ID NO: 1702696 - RNA, 19 nt, Homo sapiens
  misc_RNA (1)...(19): siRNA sense strand
agaacacgcugggcuccua

SEQ ID NO: 1702697 - RNA, 19 nt, Homo sapiens
  misc_RNA (1)...(19): siRNA sense strand
gaagaggugcugccauugc

SEQ ID NO: 1702698 - RNA, 19 nt, Homo sapiens
  misc_RNA (1)...(19): siRNA sense strand
agaauacucugggauccuu

SEQ ID NO: 1702699 - RNA, 19 nt, Homo sapiens
  misc_RNA (1)...(19): siRNA sense strand
aacgagaccugcuucaaca

SEQ ID NO: 1702700 - RNA, 19 nt, Homo sapiens
  misc_RNA (1)...(19): siRNA sense strand
caacgagaccugcuucaac

SEQ ID NO: 1702701 - RNA, 19 nt, Homo sapiens
  misc_RNA (1)...(19): siRNA sense strand
gccaggagaccggagauuu

SEQ ID NO: 1702702 - RNA, 19 nt, Homo sapiens
  misc_RNA (1)...(19): siRNA sense strand
gaaacggauaagaucauug

SEQ ID NO: 1702703 - RNA, 19 nt, Homo sapiens
  misc_RNA (1)...(19): siRNA sense strand
aaugaguguuugaguauca

SEQ ID NO: 1702704 - RNA, 19 nt, Homo sapiens
  misc_RNA (1)...(19): siRNA sense strand
gugagagugguauucauaa

SEQ ID NO: 1702705 - RNA, 19 nt, Homo sapiens
  misc_RNA (1)...(19): siRNA sense strand
caacacagugggcucuuuc

SEQ ID NO: 1702706 - RNA, 19 nt, Homo sapiens
  misc_RNA (1)...(19): siRNA sense strand
cugugaagaugucaaugaa

SEQ ID NO: 1702707 - RNA, 19 nt, Homo sapiens
  misc_RNA (1)...(19): siRNA sense strand
ugauaucaaugaguguuug

SEQ ID NO: 1702708 - RNA, 19 nt, Homo sapiens
  misc_RNA (1)...(19): siRNA sense strand
agagugguauucauaacug

SEQ ID NO: 1702709 - RNA, 19 nt, Homo sapiens
  misc_RNA (1)...(19): siRNA sense strand
agaguggcuuuauacaaga

SEQ ID NO: 1702710 - RNA, 19 nt, Homo sapiens
  misc_RNA (1)...(19): siRNA sense strand
cugauggugucuccuguga

SEQ ID NO: 1702711 - RNA, 19 nt, Homo sapiens
  misc_RNA (1)...(19): siRNA sense strand
auaagaucauugagguuga

SEQ ID NO: 1702712 - RNA, 19 nt, Homo sapiens
  misc_RNA (1)...(19): siRNA sense strand
ucgagugcccugagaacua

SEQ ID NO: 1702713 - RNA, 19 nt, Homo sapiens
  misc_RNA (1)...(19): siRNA sense strand
cuacggaauccaaagaaug

SEQ ID NO: 1702714 - RNA, 19 nt, Homo sapiens
  misc_RNA (1)...(19): siRNA sense strand
gacaccggauggccacuca

SEQ ID NO: 1702715 - RNA, 19 nt, Homo sapiens
  misc_RNA (1)...(19): siRNA sense strand
ccugugaagaugucaauga

SEQ ID NO: 1702716 - RNA, 19 nt, Homo sapiens
  misc_RNA (1)...(19): siRNA sense strand
cgagugcccugagaacuac

SEQ ID NO: 1702717 - RNA, 19 nt, Homo sapiens
  misc_RNA (1)...(19): siRNA sense strand
ggauaagaucauugagguu

SEQ ID NO: 1702718 - RNA, 19 nt, Homo sapiens
  misc_RNA (1)...(19): siRNA sense strand
caggaugugugucgauguc

SEQ ID NO: 1702719 - RNA, 19 nt, Homo sapiens
  misc_RNA (1)...(19): siRNA sense strand
ggagaccggagauuuggau

SEQ ID NO: 1702720 - RNA, 19 nt, Homo sapiens
  misc_RNA (1)...(19): siRNA sense strand
agaggacaauagcugcaaa

SEQ ID NO: 1702721 - RNA, 19 nt, Homo sapiens
  misc_RNA (1)...(19): siRNA sense strand
gaagaugucaaugaaugca

SEQ ID NO: 1702722 - RNA, 19 nt, Homo sapiens
  misc_RNA (1)...(19): siRNA sense strand
cuacggcuccuaccagugu

SEQ ID NO: 1702723 - RNA, 19 nt, Homo sapiens
  misc_RNA (1)...(19): siRNA sense strand
aagcagcagugccgagaca

SEQ ID NO: 1702724 - RNA, 19 nt, Homo sapiens
  misc_RNA (1)...(19): siRNA sense strand
gaacgcgcuguguugaugu

SEQ ID NO: 1702725 - RNA, 19 nt, Homo sapiens
  misc_RNA (1)...(19): siRNA sense strand
gagcucacagaggacaaua

SEQ ID NO: 1702726 - RNA, 19 nt, Homo sapiens
  misc_RNA (1)...(19): siRNA sense strand
gagagugguauucauaacu

SEQ ID NO: 1702727 - RNA, 19 nt, Homo sapiens
  misc_RNA (1)...(19): siRNA sense strand
cgaguacagccucaugguu

SEQ ID NO: 1702728 - RNA, 19 nt, Homo sapiens
  misc_RNA (1)...(19): siRNA sense strand
ggagugugccaacgucuac

SEQ ID NO: 1702729 - RNA, 19 nt, Homo sapiens
  misc_RNA (1)...(19): siRNA sense strand
cagaagaacgugcccaacu

SEQ ID NO: 1702730 - RNA, 19 nt, Homo sapiens
  misc_RNA (1)...(19): siRNA sense strand
gaguggcuuuauacaagau

SEQ ID NO: 1702731 - RNA, 19 nt, Homo sapiens
  misc_RNA (1)...(19): siRNA sense strand
ccacaacugcuccaucaac

SEQ ID NO: 1702732 - RNA, 19 nt, Homo sapiens
  misc_RNA (1)...(19): siRNA sense strand
cauaugcuacggaauccaa

SEQ ID NO: 1702733 - RNA, 19 nt, Homo sapiens
  misc_RNA (1)...(19): siRNA sense strand
caaugaguguuugaguauc

SEQ ID NO: 1702734 - RNA, 19 nt, Homo sapiens
  misc_RNA (1)...(19): siRNA sense strand
ugagagugguauucauaac

SEQ ID NO: 1702735 - RNA, 19 nt, Homo sapiens
  misc_RNA (1)...(19): siRNA sense strand
ggacccauaucugaaugac

SEQ ID NO: 1702736 - RNA, 19 nt, Homo sapiens
  misc_RNA (1)...(19): siRNA sense strand
ggccacaagugcgagaaca

SEQ ID NO: 1702737 - RNA, 19 nt, Homo sapiens
  misc_RNA (1)...(19): siRNA sense strand
uaagaucauugagguugag

SEQ ID NO: 1702738 - RNA, 19 nt, Homo sapiens
  misc_RNA (1)...(19): siRNA sense strand
aagaggacccauaucugaa

SEQ ID NO: 1702739 - RNA, 19 nt, Homo sapiens
  misc_RNA (1)...(19): siRNA sense strand
auccacaacugcuccauca

SEQ ID NO: 1702740 - RNA, 19 nt, Homo sapiens
  misc_RNA (1)...(19): siRNA sense strand
uccaagaaacggauaagau

SEQ ID NO: 1702741 - RNA, 19 nt, Homo sapiens
  misc_RNA (1)...(19): siRNA sense strand
aggcaacuguauugauauc

SEQ ID NO: 1702742 - RNA, 19 nt, Homo sapiens
  misc_RNA (1)...(19): siRNA sense strand
guggauggcaggucaugug

SEQ ID NO: 1702743 - RNA, 19 nt, Homo sapiens
  misc_RNA (1)...(19): siRNA sense strand
gaugcucuaggcaacugua

SEQ ID NO: 1702744 - RNA, 19 nt, Homo sapiens
  misc_RNA (1)...(19): siRNA sense strand
gacaauagcugcaaagaua

SEQ ID NO: 1702745 - RNA, 19 nt, Homo sapiens
  misc_RNA (1)...(19): siRNA sense strand
gcaagacggguuacuauuu

SEQ ID NO: 1702746 - RNA, 19 nt, Homo sapiens
  misc_RNA (1)...(19): siRNA sense strand
cuaggcaacuguauugaua

SEQ ID NO: 1702747 - RNA, 19 nt, Homo sapiens
  misc_RNA (1)...(19): siRNA sense strand
gugcaagaguggcuuuaua

SEQ ID NO: 1702748 - RNA, 19 nt, Homo sapiens
  misc_RNA (1)...(19): siRNA sense strand
gugaagaggugcugccauu

SEQ ID NO: 1702749 - RNA, 19 nt, Homo sapiens
  misc_RNA (1)...(19): siRNA sense strand
gugaagaugucaaugaaug

SEQ ID NO: 1702750 - RNA, 19 nt, Homo sapiens
  misc_RNA (1)...(19): siRNA sense strand
caagaggacccauaucuga

SEQ ID NO: 1702751 - RNA, 19 nt, Homo sapiens
  misc_RNA (1)...(19): siRNA sense strand
ggagaauccugcaucaaca

SEQ ID NO: 1702752 - RNA, 19 nt, Homo sapiens
  misc_RNA (1)...(19): siRNA sense strand
ggaacgcgcuguguugaug

SEQ ID NO: 1702753 - RNA, 19 nt, Homo sapiens
  misc_RNA (1)...(19): siRNA sense strand
ggacaucgcugcgugaacu

SEQ ID NO: 1702754 - RNA, 19 nt, Homo sapiens
  misc_RNA (1)...(19): siRNA sense strand
ggaacaagaggacccauau

SEQ ID NO: 1702755 - RNA, 19 nt, Homo sapiens
  misc_RNA (1)...(19): siRNA sense strand
gacccaagcuacagugcaa

SEQ ID NO: 1702756 - RNA, 19 nt, Homo sapiens
  misc_RNA (1)...(19): siRNA sense strand
gauggugucuccugugaag

SEQ ID NO: 1702757 - RNA, 19 nt, Homo sapiens
  misc_RNA (1)...(19): siRNA sense strand
caagacggguuacuauuuu

SEQ ID NO: 1702758 - RNA, 19 nt, Homo sapiens
  misc_RNA (1)...(19): siRNA sense strand
aaacggauaagaucauuga

SEQ ID NO: 1702759 - RNA, 19 nt, Homo sapiens
  misc_RNA (1)...(19): siRNA sense strand
gauggcaggucaugugaag

SEQ ID NO: 1702760 - RNA, 19 nt, Homo sapiens
  misc_RNA (1)...(19): siRNA sense strand
aagaguggcuuuauacaag

SEQ ID NO: 1702761 - RNA, 19 nt, Homo sapiens
  misc_RNA (1)...(19): siRNA sense strand
caagaguggcuuuauacaa

SEQ ID NO: 1702762 - RNA, 19 nt, Homo sapiens
  misc_RNA (1)...(19): siRNA sense strand
gcgaaugcaagacggguua

SEQ ID NO: 1702763 - RNA, 19 nt, Homo sapiens
  misc_RNA (1)...(19): siRNA sense strand
gcucuaggcaacuguauug

SEQ ID NO: 1702764 - RNA, 19 nt, Homo sapiens
  misc_RNA (1)...(19): siRNA sense strand
ggacaauagcugcaaagau

SEQ ID NO: 1702765 - RNA, 19 nt, Homo sapiens
  misc_RNA (1)...(19): siRNA sense strand
auacaugcaucaacacaga

SEQ ID NO: 1702766 - RNA, 19 nt, Homo sapiens
  misc_RNA (1)...(19): siRNA sense strand
ccaagaaacggauaagauc

SEQ ID NO: 1702767 - RNA, 19 nt, Homo sapiens
  misc_RNA (1)...(19): siRNA sense strand
gaagaacgugcccaacugu

SEQ ID NO: 1702768 - RNA, 19 nt, Homo sapiens
  misc_RNA (1)...(19): siRNA sense strand
caaagauauugacgagugu

SEQ ID NO: 1702769 - RNA, 19 nt, Homo sapiens
  misc_RNA (1)...(19): siRNA sense strand
gcucagcgauguggaugga

SEQ ID NO: 1702770 - RNA, 19 nt, Homo sapiens
  misc_RNA (1)...(19): siRNA sense strand
ggccagagcugcgaguaca

SEQ ID NO: 1702771 - RNA, 19 nt, Homo sapiens
  misc_RNA (1)...(19): siRNA sense strand
ggccguggcuaccaucuca

SEQ ID NO: 1702772 - RNA, 19 nt, Homo sapiens
  misc_RNA (1)...(19): siRNA sense strand
agaagaacgugcccaacug

SEQ ID NO: 1702773 - RNA, 19 nt, Homo sapiens
  misc_RNA (1)...(19): siRNA sense strand
caagaaacggauaagauca

SEQ ID NO: 1702774 - RNA, 19 nt, Homo sapiens
  misc_RNA (1)...(19): siRNA sense strand
gagggaacgcgcuguguug

SEQ ID NO: 1702775 - RNA, 19 nt, Homo sapiens
  misc_RNA (1)...(19): siRNA sense strand
gcuacggaauccaaagaau

SEQ ID NO: 1702776 - RNA, 19 nt, Homo sapiens
  misc_RNA (1)...(19): siRNA sense strand
gaacaagaggacccauauc

SEQ ID NO: 1702777 - RNA, 19 nt, Homo sapiens
  misc_RNA (1)...(19): siRNA sense strand
agaaacggauaagaucauu

SEQ ID NO: 1702778 - RNA, 19 nt, Homo sapiens
  misc_RNA (1)...(19): siRNA sense strand
ggagggaacgcgcuguguu

SEQ ID NO: 1702779 - RNA, 19 nt, Homo sapiens
  misc_RNA (1)...(19): siRNA sense strand
gaggacccauaucugaaug

SEQ ID NO: 1702780 - RNA, 19 nt, Homo sapiens
  misc_RNA (1)...(19): siRNA sense strand
ccaggagaccggagauuug

SEQ ID NO: 1702781 - RNA, 19 nt, Homo sapiens
  misc_RNA (1)...(19): siRNA sense strand
gcuaccagcucagcgaugu

SEQ ID NO: 1702782 - RNA, 19 nt, Homo sapiens
  misc_RNA (1)...(19): siRNA sense strand
ggaugugugucgaugucaa

SEQ ID NO: 1702783 - RNA, 19 nt, Homo sapiens
  misc_RNA (1)...(19): siRNA sense strand
gaccggagauuuggauguc

SEQ ID NO: 1702784 - RNA, 19 nt, Homo sapiens
  misc_RNA (1)...(19): siRNA sense strand
ugacuggcauccacaacug

SEQ ID NO: 1702785 - RNA, 19 nt, Homo sapiens
  misc_RNA (1)...(19): siRNA sense strand
gauauugacgagugugaga

SEQ ID NO: 1702786 - RNA, 19 nt, Homo sapiens
  misc_RNA (1)...(19): siRNA sense strand
gcaucagccuggccaacga

SEQ ID NO: 1702787 - RNA, 19 nt, Homo sapiens
  misc_RNA (1)...(19): siRNA sense strand
ggacugcucgcugccauau

SEQ ID NO: 1702788 - RNA, 19 nt, Homo sapiens
  misc_RNA (1)...(19): siRNA sense strand
gcaagaguggcuuuauaca

SEQ ID NO: 1702789 - RNA, 19 nt, Homo sapiens
  misc_RNA (1)...(19): siRNA sense strand
ucaacacagugggcucuuu

SEQ ID NO: 1702790 - RNA, 19 nt, Homo sapiens
  misc_RNA (1)...(19): siRNA sense strand
ugugagagugguauucaua

SEQ ID NO: 1702791 - RNA, 19 nt, Homo sapiens
  misc_RNA (1)...(19): siRNA sense strand
agaacacgcugggcuccua

SEQ ID NO: 1702792 - RNA, 19 nt, Homo sapiens
  misc_RNA (1)...(19): siRNA sense strand
gaagaggugcugccauugc

SEQ ID NO: 1702793 - RNA, 19 nt, Homo sapiens
  misc_RNA (1)...(19): siRNA sense strand
agaauacucugggauccuu

SEQ ID NO: 1702794 - RNA, 19 nt, Homo sapiens
  misc_RNA (1)...(19): siRNA sense strand
aacgagaccugcuucaaca

SEQ ID NO: 1702795 - RNA, 19 nt, Homo sapiens
  misc_RNA (1)...(19): siRNA sense strand
caacgagaccugcuucaac

SEQ ID NO: 1702796 - RNA, 19 nt, Homo sapiens
  misc_RNA (1)...(19): siRNA sense strand
gccaggagaccggagauuu

SEQ ID NO: 1702797 - RNA, 19 nt, Homo sapiens
  misc_RNA (1)...(19): siRNA sense strand
gaaacggauaagaucauug

SEQ ID NO: 1702798 - RNA, 19 nt, Homo sapiens
  misc_RNA (1)...(19): siRNA sense strand
aaugaguguuugaguauca

SEQ ID NO: 1702799 - RNA, 19 nt, Homo sapiens
  misc_RNA (1)...(19): siRNA sense strand
gugagagugguauucauaa

SEQ ID NO: 1702800 - RNA, 19 nt, Homo sapiens
  misc_RNA (1)...(19): siRNA sense strand
caacacagugggcucuuuc

SEQ ID NO: 1702801 - RNA, 19 nt, Homo sapiens
  misc_RNA (1)...(19): siRNA sense strand
cugugaagaugucaaugaa

SEQ ID NO: 1702802 - RNA, 19 nt, Homo sapiens
  misc_RNA (1)...(19): siRNA sense strand
ugauaucaaugaguguuug

SEQ ID NO: 1702803 - RNA, 19 nt, Homo sapiens
  misc_RNA (1)...(19): siRNA sense strand
agagugguauucauaacug

SEQ ID NO: 1702804 - RNA, 19 nt, Homo sapiens
  misc_RNA (1)...(19): siRNA sense strand
agaguggcuuuauacaaga

SEQ ID NO: 1702805 - RNA, 19 nt, Homo sapiens
  misc_RNA (1)...(19): siRNA sense strand
cugauggugucuccuguga

SEQ ID NO: 1702806 - RNA, 19 nt, Homo sapiens
  misc_RNA (1)...(19): siRNA sense strand
auaagaucauugagguuga

SEQ ID NO: 1702807 - RNA, 19 nt, Homo sapiens
  misc_RNA (1)...(19): siRNA sense strand
ucgagugcccugagaacua

SEQ ID NO: 1702808 - RNA, 19 nt, Homo sapiens
  misc_RNA (1)...(19): siRNA sense strand
cuacggaauccaaagaaug

SEQ ID NO: 1702809 - RNA, 19 nt, Homo sapiens
  misc_RNA (1)...(19): siRNA sense strand
gacaccggauggccacuca

SEQ ID NO: 1702810 - RNA, 19 nt, Homo sapiens
  misc_RNA (1)...(19): siRNA sense strand
ccugugaagaugucaauga

SEQ ID NO: 1702811 - RNA, 19 nt, Homo sapiens
  misc_RNA (1)...(19): siRNA sense strand
cgagugcccugagaacuac

SEQ ID NO: 1702812 - RNA, 19 nt, Homo sapiens
  misc_RNA (1)...(19): siRNA sense strand
ggauaagaucauugagguu

SEQ ID NO: 1702813 - RNA, 19 nt, Homo sapiens
  misc_RNA (1)...(19): siRNA sense strand
caggaugugugucgauguc

SEQ ID NO: 1702814 - RNA, 19 nt, Homo sapiens
  misc_RNA (1)...(19): siRNA sense strand
ggagaccggagauuuggau

SEQ ID NO: 1702815 - RNA, 19 nt, Homo sapiens
  misc_RNA (1)...(19): siRNA sense strand
agaggacaauagcugcaaa

SEQ ID NO: 1702816 - RNA, 19 nt, Homo sapiens
  misc_RNA (1)...(19): siRNA sense strand
gaagaugucaaugaaugca

SEQ ID NO: 1702817 - RNA, 19 nt, Homo sapiens
  misc_RNA (1)...(19): siRNA sense strand
cuacggcuccuaccagugu

SEQ ID NO: 1702818 - RNA, 19 nt, Homo sapiens
  misc_RNA (1)...(19): siRNA sense strand
aagcagcagugccgagaca

SEQ ID NO: 1702819 - RNA, 19 nt, Homo sapiens
  misc_RNA (1)...(19): siRNA sense strand
gaacgcgcuguguugaugu

SEQ ID NO: 1702820 - RNA, 19 nt, Homo sapiens
  misc_RNA (1)...(19): siRNA sense strand
gagcucacagaggacaaua

SEQ ID NO: 1702821 - RNA, 19 nt, Homo sapiens
  misc_RNA (1)...(19): siRNA sense strand
gagagugguauucauaacu

SEQ ID NO: 1702822 - RNA, 19 nt, Homo sapiens
  misc_RNA (1)...(19): siRNA sense strand
cgaguacagccucaugguu

SEQ ID NO: 1702823 - RNA, 19 nt, Homo sapiens
  misc_RNA (1)...(19): siRNA sense strand
ggagugugccaacgucuac

SEQ ID NO: 1702824 - RNA, 19 nt, Homo sapiens
  misc_RNA (1)...(19): siRNA sense strand
cagaagaacgugcccaacu

SEQ ID NO: 1702825 - RNA, 19 nt, Homo sapiens
  misc_RNA (1)...(19): siRNA sense strand
gaguggcuuuauacaagau

SEQ ID NO: 1702826 - RNA, 19 nt, Homo sapiens
  misc_RNA (1)...(19): siRNA sense strand
ccacaacugcuccaucaac

SEQ ID NO: 1702827 - RNA, 19 nt, Homo sapiens
  misc_RNA (1)...(19): siRNA sense strand
cauaugcuacggaauccaa

SEQ ID NO: 1702828 - RNA, 19 nt, Homo sapiens
  misc_RNA (1)...(19): siRNA sense strand
caaugaguguuugaguauc

SEQ ID NO: 1702829 - RNA, 19 nt, Homo sapiens
  misc_RNA (1)...(19): siRNA sense strand
ugagagugguauucauaac

SEQ ID NO: 1702830 - RNA, 19 nt, Homo sapiens
  misc_RNA (1)...(19): siRNA sense strand
ggacccauaucugaaugac

SEQ ID NO: 1702831 - RNA, 19 nt, Homo sapiens
  misc_RNA (1)...(19): siRNA sense strand
ggccacaagugcgagaaca

SEQ ID NO: 1702832 - RNA, 19 nt, Homo sapiens
  misc_RNA (1)...(19): siRNA sense strand
uaagaucauugagguugag

SEQ ID NO: 1702833 - RNA, 19 nt, Homo sapiens
  misc_RNA (1)...(19): siRNA sense strand
aagaggacccauaucugaa

SEQ ID NO: 1702834 - RNA, 19 nt, Homo sapiens
  misc_RNA (1)...(19): siRNA sense strand
auccacaacugcuccauca

SEQ ID NO: 1702835 - RNA, 19 nt, Homo sapiens
  misc_RNA (1)...(19): siRNA sense strand
uccaagaaacggauaagau

SEQ ID NO: 1702836 - RNA, 19 nt, Homo sapiens
  misc_RNA (1)...(19): siRNA sense strand
aggcaacuguauugauauc

SEQ ID NO: 1702837 - RNA, 19 nt, Homo sapiens
  misc_RNA (1)...(19): siRNA sense strand
guggauggcaggucaugug

SEQ ID NO: 1702838 - RNA, 19 nt, Homo sapiens
  misc_RNA (1)...(19): siRNA sense strand
gaugcucuaggcaacugua

SEQ ID NO: 1702839 - RNA, 19 nt, Homo sapiens
  misc_RNA (1)...(19): siRNA sense strand
gacaauagcugcaaagaua

SEQ ID NO: 1702840 - RNA, 19 nt, Homo sapiens
  misc_RNA (1)...(19): siRNA sense strand
gcaagacggguuacuauuu

SEQ ID NO: 1702841 - RNA, 19 nt, Homo sapiens
  misc_RNA (1)...(19): siRNA sense strand
cuaggcaacuguauugaua

SEQ ID NO: 1702842 - RNA, 19 nt, Homo sapiens
  misc_RNA (1)...(19): siRNA sense strand
gugcaagaguggcuuuaua

SEQ ID NO: 1702843 - RNA, 19 nt, Homo sapiens
  misc_RNA (1)...(19): siRNA sense strand
gugaagaggugcugccauu

SEQ ID NO: 1702844 - RNA, 19 nt, Homo sapiens
  misc_RNA (1)...(19): siRNA sense strand
gugaagaugucaaugaaug

SEQ ID NO: 1702845 - RNA, 19 nt, Homo sapiens
  misc_RNA (1)...(19): siRNA sense strand
caagaggacccauaucuga

SEQ ID NO: 1702846 - RNA, 19 nt, Homo sapiens
  misc_RNA (1)...(19): siRNA sense strand
ggagaauccugcaucaaca

SEQ ID NO: 1702847 - RNA, 19 nt, Homo sapiens
  misc_RNA (1)...(19): siRNA sense strand
ggaacgcgcuguguugaug

SEQ ID NO: 1702848 - RNA, 19 nt, Homo sapiens
  misc_RNA (1)...(19): siRNA sense strand
ggacaucgcugcgugaacu

SEQ ID NO: 1702849 - RNA, 19 nt, Homo sapiens
  misc_RNA (1)...(19): siRNA sense strand
ggaacaagaggacccauau

SEQ ID NO: 1702850 - RNA, 19 nt, Homo sapiens
  misc_RNA (1)...(19): siRNA sense strand
gacccaagcuacagugcaa

SEQ ID NO: 1702851 - RNA, 19 nt, Homo sapiens
  misc_RNA (1)...(19): siRNA sense strand
gauggugucuccugugaag

SEQ ID NO: 1702852 - RNA, 19 nt, Homo sapiens
  misc_RNA (1)...(19): siRNA sense strand
caagacggguuacuauuuu

SEQ ID NO: 1702853 - RNA, 19 nt, Homo sapiens
  misc_RNA (1)...(19): siRNA sense strand
aaacggauaagaucauuga

SEQ ID NO: 1702854 - RNA, 19 nt, Homo sapiens
  misc_RNA (1)...(19): siRNA sense strand
gauggcaggucaugugaag

SEQ ID NO: 1702855 - RNA, 19 nt, Homo sapiens
  misc_RNA (1)...(19): siRNA sense strand
aagaguggcuuuauacaag

SEQ ID NO: 1702856 - RNA, 19 nt, Homo sapiens
  misc_RNA (1)...(19): siRNA sense strand
caagaguggcuuuauacaa

SEQ ID NO: 1702857 - RNA, 19 nt, Homo sapiens
  misc_RNA (1)...(19): siRNA sense strand
gcgaaugcaagacggguua

SEQ ID NO: 1702858 - RNA, 19 nt, Homo sapiens
  misc_RNA (1)...(19): siRNA sense strand
gcucuaggcaacuguauug

SEQ ID NO: 1702859 - RNA, 19 nt, Homo sapiens
  misc_RNA (1)...(19): siRNA sense strand
ggacaauagcugcaaagau

SEQ ID NO: 1702860 - RNA, 19 nt, Homo sapiens
  misc_RNA (1)...(19): siRNA sense strand
auacaugcaucaacacaga

SEQ ID NO: 1702861 - RNA, 19 nt, Homo sapiens
  misc_RNA (1)...(19): siRNA sense strand
ccaagaaacggauaagauc

SEQ ID NO: 1702862 - RNA, 19 nt, Homo sapiens
  misc_RNA (1)...(19): siRNA sense strand
gaagaacgugcccaacugu

SEQ ID NO: 1702863 - RNA, 19 nt, Homo sapiens
  misc_RNA (1)...(19): siRNA sense strand
caaagauauugacgagugu

SEQ ID NO: 1702864 - RNA, 19 nt, Homo sapiens
  misc_RNA (1)...(19): siRNA sense strand
gcucagcgauguggaugga

SEQ ID NO: 1702865 - RNA, 19 nt, Homo sapiens
  misc_RNA (1)...(19): siRNA sense strand
ggccagagcugcgaguaca

SEQ ID NO: 1702866 - RNA, 19 nt, Homo sapiens
  misc_RNA (1)...(19): siRNA sense strand
ggccguggcuaccaucuca

SEQ ID NO: 1702867 - RNA, 19 nt, Homo sapiens
  misc_RNA (1)...(19): siRNA sense strand
agaagaacgugcccaacug

SEQ ID NO: 1702868 - RNA, 19 nt, Homo sapiens
  misc_RNA (1)...(19): siRNA sense strand
caagaaacggauaagauca

SEQ ID NO: 1702869 - RNA, 19 nt, Homo sapiens
  misc_RNA (1)...(19): siRNA sense strand
gagggaacgcgcuguguug

SEQ ID NO: 1702870 - RNA, 19 nt, Homo sapiens
  misc_RNA (1)...(19): siRNA sense strand
gcuacggaauccaaagaau

SEQ ID NO: 1702871 - RNA, 19 nt, Homo sapiens
  misc_RNA (1)...(19): siRNA sense strand
gaacaagaggacccauauc

SEQ ID NO: 1702872 - RNA, 19 nt, Homo sapiens
  misc_RNA (1)...(19): siRNA sense strand
agaaacggauaagaucauu

SEQ ID NO: 1702873 - RNA, 19 nt, Homo sapiens
  misc_RNA (1)...(19): siRNA sense strand
ggagggaacgcgcuguguu

SEQ ID NO: 1702874 - RNA, 19 nt, Homo sapiens
  misc_RNA (1)...(19): siRNA sense strand
gaggacccauaucugaaug

SEQ ID NO: 1702875 - RNA, 19 nt, Homo sapiens
  misc_RNA (1)...(19): siRNA sense strand
ccaggagaccggagauuug

SEQ ID NO: 1702876 - RNA, 19 nt, Homo sapiens
  misc_RNA (1)...(19): siRNA sense strand
gcuaccagcucagcgaugu

SEQ ID NO: 1702877 - RNA, 19 nt, Homo sapiens
  misc_RNA (1)...(19): siRNA sense strand
ggaugugugucgaugucaa

SEQ ID NO: 1702878 - RNA, 19 nt, Homo sapiens
  misc_RNA (1)...(19): siRNA sense strand
gaccggagauuuggauguc

SEQ ID NO: 1702879 - RNA, 19 nt, Homo sapiens
  misc_RNA (1)...(19): siRNA sense strand
ugacuggcauccacaacug

SEQ ID NO: 1702880 - RNA, 19 nt, Homo sapiens
  misc_RNA (1)...(19): siRNA sense strand
gauauugacgagugugaga

SEQ ID NO: 1702881 - RNA, 19 nt, Homo sapiens
  misc_RNA (1)...(19): siRNA sense strand
gcaucagccuggccaacga

SEQ ID NO: 1702882 - RNA, 19 nt, Homo sapiens
  misc_RNA (1)...(19): siRNA sense strand
ggacugcucgcugccauau

SEQ ID NO: 1702883 - RNA, 19 nt, Homo sapiens
  misc_RNA (1)...(19): siRNA sense strand
gcaagaguggcuuuauaca

SEQ ID NO: 1702884 - RNA, 19 nt, Homo sapiens
  misc_RNA (1)...(19): siRNA sense strand
ucaacacagugggcucuuu

SEQ ID NO: 1702885 - RNA, 19 nt, Homo sapiens
  misc_RNA (1)...(19): siRNA sense strand
ugugagagugguauucaua

SEQ ID NO: 1702886 - RNA, 19 nt, Homo sapiens
  misc_RNA (1)...(19): siRNA sense strand
agaacacgcugggcuccua

SEQ ID NO: 1702887 - RNA, 19 nt, Homo sapiens
  misc_RNA (1)...(19): siRNA sense strand
gaagaggugcugccauugc

SEQ ID NO: 1702888 - RNA, 19 nt, Homo sapiens
  misc_RNA (1)...(19): siRNA sense strand
agaauacucugggauccuu

SEQ ID NO: 1702889 - RNA, 19 nt, Homo sapiens
  misc_RNA (1)...(19): siRNA sense strand
aacgagaccugcuucaaca

SEQ ID NO: 1702890 - RNA, 19 nt, Homo sapiens
  misc_RNA (1)...(19): siRNA sense strand
caacgagaccugcuucaac

SEQ ID NO: 1702891 - RNA, 19 nt, Homo sapiens
  misc_RNA (1)...(19): siRNA sense strand
gccaggagaccggagauuu

SEQ ID NO: 1702892 - RNA, 19 nt, Homo sapiens
  misc_RNA (1)...(19): siRNA sense strand
gaaacggauaagaucauug

SEQ ID NO: 1702893 - RNA, 19 nt, Homo sapiens
  misc_RNA (1)...(19): siRNA sense strand
aaugaguguuugaguauca

SEQ ID NO: 1702894 - RNA, 19 nt, Homo sapiens
  misc_RNA (1)...(19): siRNA sense strand
gugagagugguauucauaa

SEQ ID NO: 1702895 - RNA, 19 nt, Homo sapiens
  misc_RNA (1)...(19): siRNA sense strand
caacacagugggcucuuuc

SEQ ID NO: 1702896 - RNA, 19 nt, Homo sapiens
  misc_RNA (1)...(19): siRNA sense strand
cugugaagaugucaaugaa

SEQ ID NO: 1702897 - RNA, 19 nt, Homo sapiens
  misc_RNA (1)...(19): siRNA sense strand
ugauaucaaugaguguuug

SEQ ID NO: 1702898 - RNA, 19 nt, Homo sapiens
  misc_RNA (1)...(19): siRNA sense strand
agagugguauucauaacug

SEQ ID NO: 1702899 - RNA, 19 nt, Homo sapiens
  misc_RNA (1)...(19): siRNA sense strand
agaguggcuuuauacaaga

SEQ ID NO: 1702900 - RNA, 19 nt, Homo sapiens
  misc_RNA (1)...(19): siRNA sense strand
cugauggugucuccuguga

SEQ ID NO: 1702901 - RNA, 19 nt, Homo sapiens
  misc_RNA (1)...(19): siRNA sense strand
auaagaucauugagguuga

SEQ ID NO: 1702902 - RNA, 19 nt, Homo sapiens
  misc_RNA (1)...(19): siRNA sense strand
ucgagugcccugagaacua

SEQ ID NO: 1702903 - RNA, 19 nt, Homo sapiens
  misc_RNA (1)...(19): siRNA sense strand
cuacggaauccaaagaaug

SEQ ID NO: 1702904 - RNA, 19 nt, Homo sapiens
  misc_RNA (1)...(19): siRNA sense strand
gacaccggauggccacuca

SEQ ID NO: 1702905 - RNA, 19 nt, Homo sapiens
  misc_RNA (1)...(19): siRNA sense strand
ccugugaagaugucaauga

SEQ ID NO: 1702906 - RNA, 19 nt, Homo sapiens
  misc_RNA (1)...(19): siRNA sense strand
cgagugcccugagaacuac

SEQ ID NO: 1702907 - RNA, 19 nt, Homo sapiens
  misc_RNA (1)...(19): siRNA sense strand
ggauaagaucauugagguu

SEQ ID NO: 1702908 - RNA, 19 nt, Homo sapiens
  misc_RNA (1)...(19): siRNA sense strand
caggaugugugucgauguc

SEQ ID NO: 1702909 - RNA, 19 nt, Homo sapiens
  misc_RNA (1)...(19): siRNA sense strand
ggagaccggagauuuggau

SEQ ID NO: 1702910 - RNA, 19 nt, Homo sapiens
  misc_RNA (1)...(19): siRNA sense strand
agaggacaauagcugcaaa

SEQ ID NO: 1702911 - RNA, 19 nt, Homo sapiens
  misc_RNA (1)...(19): siRNA sense strand
gaagaugucaaugaaugca

SEQ ID NO: 1702912 - RNA, 19 nt, Homo sapiens
  misc_RNA (1)...(19): siRNA sense strand
cuacggcuccuaccagugu

SEQ ID NO: 1702913 - RNA, 19 nt, Homo sapiens
  misc_RNA (1)...(19): siRNA sense strand
aagcagcagugccgagaca

SEQ ID NO: 1702914 - RNA, 19 nt, Homo sapiens
  misc_RNA (1)...(19): siRNA sense strand
gaacgcgcuguguugaugu

SEQ ID NO: 1702915 - RNA, 19 nt, Homo sapiens
  misc_RNA (1)...(19): siRNA sense strand
gagcucacagaggacaaua

SEQ ID NO: 1702916 - RNA, 19 nt, Homo sapiens
  misc_RNA (1)...(19): siRNA sense strand
gagagugguauucauaacu

SEQ ID NO: 1702917 - RNA, 19 nt, Homo sapiens
  misc_RNA (1)...(19): siRNA sense strand
cgaguacagccucaugguu

SEQ ID NO: 1702918 - RNA, 19 nt, Homo sapiens
  misc_RNA (1)...(19): siRNA sense strand
ggagugugccaacgucuac

SEQ ID NO: 1702919 - RNA, 19 nt, Homo sapiens
  misc_RNA (1)...(19): siRNA sense strand
cagaagaacgugcccaacu

SEQ ID NO: 1702920 - RNA, 19 nt, Homo sapiens
  misc_RNA (1)...(19): siRNA sense strand
gaguggcuuuauacaagau

SEQ ID NO: 1702921 - RNA, 19 nt, Homo sapiens
  misc_RNA (1)...(19): siRNA sense strand
ccacaacugcuccaucaac

SEQ ID NO: 1702922 - RNA, 19 nt, Homo sapiens
  misc_RNA (1)...(19): siRNA sense strand
cauaugcuacggaauccaa

SEQ ID NO: 1702923 - RNA, 19 nt, Homo sapiens
  misc_RNA (1)...(19): siRNA sense strand
caaugaguguuugaguauc

SEQ ID NO: 1702924 - RNA, 19 nt, Homo sapiens
  misc_RNA (1)...(19): siRNA sense strand
ugagagugguauucauaac

SEQ ID NO: 1702925 - RNA, 19 nt, Homo sapiens
  misc_RNA (1)...(19): siRNA sense strand
ggacccauaucugaaugac

SEQ ID NO: 1702926 - RNA, 19 nt, Homo sapiens
  misc_RNA (1)...(19): siRNA sense strand
ggccacaagugcgagaaca

SEQ ID NO: 1702927 - RNA, 19 nt, Homo sapiens
  misc_RNA (1)...(19): siRNA sense strand
uaagaucauugagguugag

SEQ ID NO: 1702928 - RNA, 19 nt, Homo sapiens
  misc_RNA (1)...(19): siRNA sense strand
aagaggacccauaucugaa

SEQ ID NO: 1702929 - RNA, 19 nt, Homo sapiens
  misc_RNA (1)...(19): siRNA sense strand
auccacaacugcuccauca

SEQ ID NO: 1702930 - RNA, 19 nt, Homo sapiens
  misc_RNA (1)...(19): siRNA sense strand
uccaagaaacggauaagau

SEQ ID NO: 1702931 - RNA, 19 nt, Homo sapiens
  misc_RNA (1)...(19): siRNA sense strand
aggcaacuguauugauauc

SEQ ID NO: 1702932 - RNA, 19 nt, Homo sapiens
  misc_RNA (1)...(19): siRNA sense strand
guggauggcaggucaugug

SEQ ID NO: 1702933 - RNA, 19 nt, Homo sapiens
  misc_RNA (1)...(19): siRNA sense strand
gaugcucuaggcaacugua

SEQ ID NO: 1702934 - RNA, 19 nt, Homo sapiens
  misc_RNA (1)...(19): siRNA sense strand
gacaauagcugcaaagaua

SEQ ID NO: 1702935 - RNA, 19 nt, Homo sapiens
  misc_RNA (1)...(19): siRNA sense strand
gcaagacggguuacuauuu

SEQ ID NO: 1702936 - RNA, 19 nt, Homo sapiens
  misc_RNA (1)...(19): siRNA sense strand
cuaggcaacuguauugaua

SEQ ID NO: 1702937 - RNA, 19 nt, Homo sapiens
  misc_RNA (1)...(19): siRNA sense strand
gugcaagaguggcuuuaua

SEQ ID NO: 1702938 - RNA, 19 nt, Homo sapiens
  misc_RNA (1)...(19): siRNA sense strand
gugaagaggugcugccauu

SEQ ID NO: 1702939 - RNA, 19 nt, Homo sapiens
  misc_RNA (1)...(19): siRNA sense strand
gugaagaugucaaugaaug

SEQ ID NO: 1702940 - RNA, 19 nt, Homo sapiens
  misc_RNA (1)...(19): siRNA sense strand
caagaggacccauaucuga

SEQ ID NO: 1702941 - RNA, 19 nt, Homo sapiens
  misc_RNA (1)...(19): siRNA sense strand
ggagaauccugcaucaaca

SEQ ID NO: 1702942 - RNA, 19 nt, Homo sapiens
  misc_RNA (1)...(19): siRNA sense strand
ggaacgcgcuguguugaug

SEQ ID NO: 1702943 - RNA, 19 nt, Homo sapiens
  misc_RNA (1)...(19): siRNA sense strand
ggacaucgcugcgugaacu

SEQ ID NO: 1702944 - RNA, 19 nt, Homo sapiens
  misc_RNA (1)...(19): siRNA sense strand
ggaacaagaggacccauau

SEQ ID NO: 1702945 - RNA, 19 nt, Homo sapiens
  misc_RNA (1)...(19): siRNA sense strand
gacccaagcuacagugcaa

SEQ ID NO: 1702946 - RNA, 19 nt, Homo sapiens
  misc_RNA (1)...(19): siRNA sense strand
gauggugucuccugugaag

SEQ ID NO: 1702947 - RNA, 19 nt, Homo sapiens
  misc_RNA (1)...(19): siRNA sense strand
caagacggguuacuauuuu

SEQ ID NO: 1702948 - RNA, 19 nt, Homo sapiens
  misc_RNA (1)...(19): siRNA sense strand
aaacggauaagaucauuga

SEQ ID NO: 1702949 - RNA, 19 nt, Homo sapiens
  misc_RNA (1)...(19): siRNA sense strand
gauggcaggucaugugaag

SEQ ID NO: 1702950 - RNA, 19 nt, Homo sapiens
  misc_RNA (1)...(19): siRNA sense strand
aagaguggcuuuauacaag

SEQ ID NO: 1702951 - RNA, 19 nt, Homo sapiens
  misc_RNA (1)...(19): siRNA sense strand
caagaguggcuuuauacaa

SEQ ID NO: 1702952 - RNA, 19 nt, Homo sapiens
  misc_RNA (1)...(19): siRNA sense strand
gcgaaugcaagacggguua

SEQ ID NO: 1702953 - RNA, 19 nt, Homo sapiens
  misc_RNA (1)...(19): siRNA sense strand
gcucuaggcaacuguauug

SEQ ID NO: 1702954 - RNA, 19 nt, Homo sapiens
  misc_RNA (1)...(19): siRNA sense strand
ggacaauagcugcaaagau

SEQ ID NO: 1702955 - RNA, 19 nt, Homo sapiens
  misc_RNA (1)...(19): siRNA sense strand
auacaugcaucaacacaga

SEQ ID NO: 1702956 - RNA, 19 nt, Homo sapiens
  misc_RNA (1)...(19): siRNA sense strand
ccaagaaacggauaagauc

SEQ ID NO: 1702957 - RNA, 19 nt, Homo sapiens
  misc_RNA (1)...(19): siRNA sense strand
gaagaacgugcccaacugu

SEQ ID NO: 1702958 - RNA, 19 nt, Homo sapiens
  misc_RNA (1)...(19): siRNA sense strand
caaagauauugacgagugu

SEQ ID NO: 1702959 - RNA, 19 nt, Homo sapiens
  misc_RNA (1)...(19): siRNA sense strand
gcucagcgauguggaugga

SEQ ID NO: 1702960 - RNA, 19 nt, Homo sapiens
  misc_RNA (1)...(19): siRNA sense strand
ggccagagcugcgaguaca

SEQ ID NO: 1702961 - RNA, 19 nt, Homo sapiens
  misc_RNA (1)...(19): siRNA sense strand
ggccguggcuaccaucuca

SEQ ID NO: 1702962 - RNA, 19 nt, Homo sapiens
  misc_RNA (1)...(19): siRNA sense strand
agaagaacgugcccaacug

SEQ ID NO: 1702963 - RNA, 19 nt, Homo sapiens
  misc_RNA (1)...(19): siRNA sense strand
caagaaacggauaagauca

SEQ ID NO: 1702964 - RNA, 19 nt, Homo sapiens
  misc_RNA (1)...(19): siRNA sense strand
gagggaacgcgcuguguug

SEQ ID NO: 1702965 - RNA, 19 nt, Homo sapiens
  misc_RNA (1)...(19): siRNA sense strand
gcuacggaauccaaagaau

SEQ ID NO: 1702966 - RNA, 19 nt, Homo sapiens
  misc_RNA (1)...(19): siRNA sense strand
gaacaagaggacccauauc

SEQ ID NO: 1702967 - RNA, 19 nt, Homo sapiens
  misc_RNA (1)...(19): siRNA sense strand
agaaacggauaagaucauu

SEQ ID NO: 1702968 - RNA, 19 nt, Homo sapiens
  misc_RNA (1)...(19): siRNA sense strand
ggagggaacgcgcuguguu

SEQ ID NO: 1702969 - RNA, 19 nt, Homo sapiens
  misc_RNA (1)...(19): siRNA sense strand
gaggacccauaucugaaug

SEQ ID NO: 1702970 - RNA, 19 nt, Homo sapiens
  misc_RNA (1)...(19): siRNA sense strand
ccaggagaccggagauuug

SEQ ID NO: 1702971 - RNA, 19 nt, Homo sapiens
  misc_RNA (1)...(19): siRNA sense strand
gcuaccagcucagcgaugu

SEQ ID NO: 1702972 - RNA, 19 nt, Homo sapiens
  misc_RNA (1)...(19): siRNA sense strand
ggaugugugucgaugucaa

SEQ ID NO: 1702973 - RNA, 19 nt, Homo sapiens
  misc_RNA (1)...(19): siRNA sense strand
gaccggagauuuggauguc

SEQ ID NO: 1702974 - RNA, 19 nt, Homo sapiens
  misc_RNA (1)...(19): siRNA sense strand
ugacuggcauccacaacug

SEQ ID NO: 1702975 - RNA, 19 nt, Homo sapiens
  misc_RNA (1)...(19): siRNA sense strand
gauauugacgagugugaga

SEQ ID NO: 1702976 - RNA, 19 nt, Homo sapiens
  misc_RNA (1)...(19): siRNA sense strand
gcaucagccuggccaacga

SEQ ID NO: 1702977 - RNA, 19 nt, Homo sapiens
  misc_RNA (1)...(19): siRNA sense strand
ggacugcucgcugccauau

SEQ ID NO: 1702978 - RNA, 19 nt, Homo sapiens
  misc_RNA (1)...(19): siRNA sense strand
gcaagaguggcuuuauaca

SEQ ID NO: 1702979 - RNA, 19 nt, Homo sapiens
  misc_RNA (1)...(19): siRNA sense strand
ucaacacagugggcucuuu

SEQ ID NO: 1702980 - RNA, 19 nt, Homo sapiens
  misc_RNA (1)...(19): siRNA sense strand
ugugagagugguauucaua

SEQ ID NO: 1702981 - RNA, 19 nt, Homo sapiens
  misc_RNA (1)...(19): siRNA sense strand
agaacacgcugggcuccua

SEQ ID NO: 1702982 - RNA, 19 nt, Homo sapiens
  misc_RNA (1)...(19): siRNA sense strand
gaagaggugcugccauugc

SEQ ID NO: 1702983 - RNA, 19 nt, Homo sapiens
  misc_RNA (1)...(19): siRNA sense strand
agaauacucugggauccuu

SEQ ID NO: 1702984 - RNA, 19 nt, Homo sapiens
  misc_RNA (1)...(19): siRNA sense strand
aacgagaccugcuucaaca

SEQ ID NO: 1702985 - RNA, 19 nt, Homo sapiens
  misc_RNA (1)...(19): siRNA sense strand
caacgagaccugcuucaac

SEQ ID NO: 1702986 - RNA, 19 nt, Homo sapiens
  misc_RNA (1)...(19): siRNA sense strand
gccaggagaccggagauuu

SEQ ID NO: 1702987 - RNA, 19 nt, Homo sapiens
  misc_RNA (1)...(19): siRNA sense strand
gaaacggauaagaucauug

SEQ ID NO: 1702988 - RNA, 19 nt, Homo sapiens
  misc_RNA (1)...(19): siRNA sense strand
aaugaguguuugaguauca

SEQ ID NO: 1702989 - RNA, 19 nt, Homo sapiens
  misc_RNA (1)...(19): siRNA sense strand
gugagagugguauucauaa

SEQ ID NO: 1702990 - RNA, 19 nt, Homo sapiens
  misc_RNA (1)...(19): siRNA sense strand
caacacagugggcucuuuc

SEQ ID NO: 1702991 - RNA, 19 nt, Homo sapiens
  misc_RNA (1)...(19): siRNA sense strand
cugugaagaugucaaugaa

SEQ ID NO: 1702992 - RNA, 19 nt, Homo sapiens
  misc_RNA (1)...(19): siRNA sense strand
ugauaucaaugaguguuug

SEQ ID NO: 1702993 - RNA, 19 nt, Homo sapiens
  misc_RNA (1)...(19): siRNA sense strand
agagugguauucauaacug

SEQ ID NO: 1702994 - RNA, 19 nt, Homo sapiens
  misc_RNA (1)...(19): siRNA sense strand
agaguggcuuuauacaaga

SEQ ID NO: 1702995 - RNA, 19 nt, Homo sapiens
  misc_RNA (1)...(19): siRNA sense strand
cugauggugucuccuguga

SEQ ID NO: 1702996 - RNA, 19 nt, Homo sapiens
  misc_RNA (1)...(19): siRNA sense strand
auaagaucauugagguuga

SEQ ID NO: 1702997 - RNA, 19 nt, Homo sapiens
  misc_RNA (1)...(19): siRNA sense strand
ucgagugcccugagaacua

SEQ ID NO: 1702998 - RNA, 19 nt, Homo sapiens
  misc_RNA (1)...(19): siRNA sense strand
cuacggaauccaaagaaug

SEQ ID NO: 1702999 - RNA, 19 nt, Homo sapiens
  misc_RNA (1)...(19): siRNA sense strand
gacaccggauggccacuca

SEQ ID NO: 1703000 - RNA, 19 nt, Homo sapiens
  misc_RNA (1)...(19): siRNA sense strand
ccugugaagaugucaauga

SEQ ID NO: 1703001 - RNA, 19 nt, Homo sapiens
  misc_RNA (1)...(19): siRNA sense strand
cgagugcccugagaacuac

SEQ ID NO: 1703002 - RNA, 19 nt, Homo sapiens
  misc_RNA (1)...(19): siRNA sense strand
ggauaagaucauugagguu

SEQ ID NO: 1703003 - RNA, 19 nt, Homo sapiens
  misc_RNA (1)...(19): siRNA sense strand
caggaugugugucgauguc

SEQ ID NO: 1703004 - RNA, 19 nt, Homo sapiens
  misc_RNA (1)...(19): siRNA sense strand
ggagaccggagauuuggau

SEQ ID NO: 1703005 - RNA, 19 nt, Homo sapiens
  misc_RNA (1)...(19): siRNA sense strand
agaggacaauagcugcaaa

SEQ ID NO: 1703006 - RNA, 19 nt, Homo sapiens
  misc_RNA (1)...(19): siRNA sense strand
gaagaugucaaugaaugca

SEQ ID NO: 1703007 - RNA, 19 nt, Homo sapiens
  misc_RNA (1)...(19): siRNA sense strand
cuacggcuccuaccagugu

SEQ ID NO: 1703008 - RNA, 19 nt, Homo sapiens
  misc_RNA (1)...(19): siRNA sense strand
aagcagcagugccgagaca

SEQ ID NO: 1703009 - RNA, 19 nt, Homo sapiens
  misc_RNA (1)...(19): siRNA sense strand
gaacgcgcuguguugaugu

SEQ ID NO: 1703010 - RNA, 19 nt, Homo sapiens
  misc_RNA (1)...(19): siRNA sense strand
gagcucacagaggacaaua

SEQ ID NO: 1703011 - RNA, 19 nt, Homo sapiens
  misc_RNA (1)...(19): siRNA sense strand
gagagugguauucauaacu

SEQ ID NO: 1703012 - RNA, 19 nt, Homo sapiens
  misc_RNA (1)...(19): siRNA sense strand
cgaguacagccucaugguu

SEQ ID NO: 1703013 - RNA, 19 nt, Homo sapiens
  misc_RNA (1)...(19): siRNA sense strand
ggagugugccaacgucuac

SEQ ID NO: 1703014 - RNA, 19 nt, Homo sapiens
  misc_RNA (1)...(19): siRNA sense strand
cagaagaacgugcccaacu

SEQ ID NO: 1703015 - RNA, 19 nt, Homo sapiens
  misc_RNA (1)...(19): siRNA sense strand
gaguggcuuuauacaagau

SEQ ID NO: 1703016 - RNA, 19 nt, Homo sapiens
  misc_RNA (1)...(19): siRNA sense strand
ccacaacugcuccaucaac

SEQ ID NO: 1703017 - RNA, 19 nt, Homo sapiens
  misc_RNA (1)...(19): siRNA sense strand
cauaugcuacggaauccaa

SEQ ID NO: 1703018 - RNA, 19 nt, Homo sapiens
  misc_RNA (1)...(19): siRNA sense strand
caaugaguguuugaguauc

SEQ ID NO: 1703019 - RNA, 19 nt, Homo sapiens
  misc_RNA (1)...(19): siRNA sense strand
ugagagugguauucauaac

SEQ ID NO: 1703020 - RNA, 19 nt, Homo sapiens
  misc_RNA (1)...(19): siRNA sense strand
ggacccauaucugaaugac

SEQ ID NO: 1703021 - RNA, 19 nt, Homo sapiens
  misc_RNA (1)...(19): siRNA sense strand
ggccacaagugcgagaaca

SEQ ID NO: 1703022 - RNA, 19 nt, Homo sapiens
  misc_RNA (1)...(19): siRNA sense strand
uaagaucauugagguugag

SEQ ID NO: 1703023 - RNA, 19 nt, Homo sapiens
  misc_RNA (1)...(19): siRNA sense strand
aagaggacccauaucugaa

SEQ ID NO: 1703024 - RNA, 19 nt, Homo sapiens
  misc_RNA (1)...(19): siRNA sense strand
auccacaacugcuccauca

SEQ ID NO: 1703025 - RNA, 19 nt, Homo sapiens
  misc_RNA (1)...(19): siRNA sense strand
uccaagaaacggauaagau

SEQ ID NO: 1703026 - RNA, 19 nt, Homo sapiens
  misc_RNA (1)...(19): siRNA sense strand
aggcaacuguauugauauc

SEQ ID NO: 1703027 - RNA, 19 nt, Homo sapiens
  misc_RNA (1)...(19): siRNA sense strand
guggauggcaggucaugug

SEQ ID NO: 1703028 - RNA, 19 nt, Homo sapiens
  misc_RNA (1)...(19): siRNA sense strand
gaugcucuaggcaacugua

SEQ ID NO: 1703029 - RNA, 19 nt, Homo sapiens
  misc_RNA (1)...(19): siRNA sense strand
gacaauagcugcaaagaua

SEQ ID NO: 1703030 - RNA, 19 nt, Homo sapiens
  misc_RNA (1)...(19): siRNA sense strand
gcaagacggguuacuauuu

SEQ ID NO: 1703031 - RNA, 19 nt, Homo sapiens
  misc_RNA (1)...(19): siRNA sense strand
cuaggcaacuguauugaua

SEQ ID NO: 1703032 - RNA, 19 nt, Homo sapiens
  misc_RNA (1)...(19): siRNA sense strand
gugcaagaguggcuuuaua

SEQ ID NO: 1703033 - RNA, 19 nt, Homo sapiens
  misc_RNA (1)...(19): siRNA sense strand
gugaagaggugcugccauu

SEQ ID NO: 1703034 - RNA, 19 nt, Homo sapiens
  misc_RNA (1)...(19): siRNA sense strand
gugaagaugucaaugaaug

SEQ ID NO: 1703035 - RNA, 19 nt, Homo sapiens
  misc_RNA (1)...(19): siRNA sense strand
caagaggacccauaucuga

SEQ ID NO: 1703036 - RNA, 19 nt, Homo sapiens
  misc_RNA (1)...(19): siRNA sense strand
ggagaauccugcaucaaca

SEQ ID NO: 1703037 - RNA, 19 nt, Homo sapiens
  misc_RNA (1)...(19): siRNA sense strand
ggaacgcgcuguguugaug

SEQ ID NO: 1703038 - RNA, 19 nt, Homo sapiens
  misc_RNA (1)...(19): siRNA sense strand
ggacaucgcugcgugaacu

SEQ ID NO: 1703039 - RNA, 19 nt, Homo sapiens
  misc_RNA (1)...(19): siRNA sense strand
ggaacaagaggacccauau

SEQ ID NO: 1703040 - RNA, 19 nt, Homo sapiens
  misc_RNA (1)...(19): siRNA sense strand
gacccaagcuacagugcaa

SEQ ID NO: 1703041 - RNA, 19 nt, Homo sapiens
  misc_RNA (1)...(19): siRNA sense strand
gauggugucuccugugaag

SEQ ID NO: 1703042 - RNA, 19 nt, Homo sapiens
  misc_RNA (1)...(19): siRNA sense strand
caagacggguuacuauuuu

SEQ ID NO: 1703043 - RNA, 19 nt, Homo sapiens
  misc_RNA (1)...(19): siRNA sense strand
aaacggauaagaucauuga

SEQ ID NO: 1703044 - RNA, 19 nt, Homo sapiens
  misc_RNA (1)...(19): siRNA sense strand
gauggcaggucaugugaag

SEQ ID NO: 1703045 - RNA, 19 nt, Homo sapiens
  misc_RNA (1)...(19): siRNA sense strand
aagaguggcuuuauacaag

SEQ ID NO: 1703046 - RNA, 19 nt, Homo sapiens
  misc_RNA (1)...(19): siRNA sense strand
caagaguggcuuuauacaa

SEQ ID NO: 1703047 - RNA, 19 nt, Homo sapiens
  misc_RNA (1)...(19): siRNA sense strand
gcgaaugcaagacggguua

SEQ ID NO: 1703048 - RNA, 19 nt, Homo sapiens
  misc_RNA (1)...(19): siRNA sense strand
gcucuaggcaacuguauug

SEQ ID NO: 1703049 - RNA, 19 nt, Homo sapiens
  misc_RNA (1)...(19): siRNA sense strand
ggacaauagcugcaaagau

SEQ ID NO: 1703050 - RNA, 19 nt, Homo sapiens
  misc_RNA (1)...(19): siRNA sense strand
auacaugcaucaacacaga

SEQ ID NO: 1703051 - RNA, 19 nt, Homo sapiens
  misc_RNA (1)...(19): siRNA sense strand
ccaagaaacggauaagauc

SEQ ID NO: 1703052 - RNA, 19 nt, Homo sapiens
  misc_RNA (1)...(19): siRNA sense strand
gaagaacgugcccaacugu

SEQ ID NO: 1703053 - RNA, 19 nt, Homo sapiens
  misc_RNA (1)...(19): siRNA sense strand
caaagauauugacgagugu

SEQ ID NO: 1703054 - RNA, 19 nt, Homo sapiens
  misc_RNA (1)...(19): siRNA sense strand
gcucagcgauguggaugga

SEQ ID NO: 1703055 - RNA, 19 nt, Homo sapiens
  misc_RNA (1)...(19): siRNA sense strand
ggccagagcugcgaguaca

SEQ ID NO: 1703056 - RNA, 19 nt, Homo sapiens
  misc_RNA (1)...(19): siRNA sense strand
ggccguggcuaccaucuca

SEQ ID NO: 1703057 - RNA, 19 nt, Homo sapiens
  misc_RNA (1)...(19): siRNA sense strand
agaagaacgugcccaacug

SEQ ID NO: 1703058 - RNA, 19 nt, Homo sapiens
  misc_RNA (1)...(19): siRNA sense strand
caagaaacggauaagauca

SEQ ID NO: 1703059 - RNA, 19 nt, Homo sapiens
  misc_RNA (1)...(19): siRNA sense strand
gagggaacgcgcuguguug

SEQ ID NO: 1703060 - RNA, 19 nt, Homo sapiens
  misc_RNA (1)...(19): siRNA sense strand
gcuacggaauccaaagaau

SEQ ID NO: 1703061 - RNA, 19 nt, Homo sapiens
  misc_RNA (1)...(19): siRNA sense strand
gaacaagaggacccauauc

SEQ ID NO: 1703062 - RNA, 19 nt, Homo sapiens
  misc_RNA (1)...(19): siRNA sense strand
agaaacggauaagaucauu

SEQ ID NO: 1703063 - RNA, 19 nt, Homo sapiens
  misc_RNA (1)...(19): siRNA sense strand
ggagggaacgcgcuguguu

SEQ ID NO: 1703064 - RNA, 19 nt, Homo sapiens
  misc_RNA (1)...(19): siRNA sense strand
gaggacccauaucugaaug

SEQ ID NO: 1703065 - RNA, 19 nt, Homo sapiens
  misc_RNA (1)...(19): siRNA sense strand
ccaggagaccggagauuug

SEQ ID NO: 1703066 - RNA, 19 nt, Homo sapiens
  misc_RNA (1)...(19): siRNA sense strand
gcuaccagcucagcgaugu

SEQ ID NO: 1703067 - RNA, 19 nt, Homo sapiens
  misc_RNA (1)...(19): siRNA sense strand
ggaugugugucgaugucaa

SEQ ID NO: 1703068 - RNA, 19 nt, Homo sapiens
  misc_RNA (1)...(19): siRNA sense strand
gaccggagauuuggauguc

SEQ ID NO: 1703069 - RNA, 19 nt, Homo sapiens
  misc_RNA (1)...(19): siRNA sense strand
ugacuggcauccacaacug

SEQ ID NO: 1703070 - RNA, 19 nt, Homo sapiens
  misc_RNA (1)...(19): siRNA sense strand
gauauugacgagugugaga

SEQ ID NO: 1703071 - RNA, 19 nt, Homo sapiens
  misc_RNA (1)...(19): siRNA sense strand
gcaucagccuggccaacga

SEQ ID NO: 1703072 - RNA, 19 nt, Homo sapiens
  misc_RNA (1)...(19): siRNA sense strand
ggacugcucgcugccauau

SEQ ID NO: 1703073 - RNA, 19 nt, Homo sapiens
  misc_RNA (1)...(19): siRNA sense strand
gcaagaguggcuuuauaca

SEQ ID NO: 1703074 - RNA, 19 nt, Homo sapiens
  misc_RNA (1)...(19): siRNA sense strand
ucaacacagugggcucuuu

SEQ ID NO: 1703075 - RNA, 19 nt, Homo sapiens
  misc_RNA (1)...(19): siRNA sense strand
ugugagagugguauucaua

SEQ ID NO: 1703076 - RNA, 19 nt, Homo sapiens
  misc_RNA (1)...(19): siRNA sense strand
agaacacgcugggcuccua

SEQ ID NO: 1703077 - RNA, 19 nt, Homo sapiens
  misc_RNA (1)...(19): siRNA sense strand
gaagaggugcugccauugc

SEQ ID NO: 1703078 - RNA, 19 nt, Homo sapiens
  misc_RNA (1)...(19): siRNA sense strand
agaauacucugggauccuu

SEQ ID NO: 1703079 - RNA, 19 nt, Homo sapiens
  misc_RNA (1)...(19): siRNA sense strand
aacgagaccugcuucaaca

SEQ ID NO: 1703080 - RNA, 19 nt, Homo sapiens
  misc_RNA (1)...(19): siRNA sense strand
caacgagaccugcuucaac

SEQ ID NO: 1703081 - RNA, 19 nt, Homo sapiens
  misc_RNA (1)...(19): siRNA sense strand
gccaggagaccggagauuu

SEQ ID NO: 1703082 - RNA, 19 nt, Homo sapiens
  misc_RNA (1)...(19): siRNA sense strand
gaaacggauaagaucauug

SEQ ID NO: 1703083 - RNA, 19 nt, Homo sapiens
  misc_RNA (1)...(19): siRNA sense strand
aaugaguguuugaguauca

SEQ ID NO: 1703084 - RNA, 19 nt, Homo sapiens
  misc_RNA (1)...(19): siRNA sense strand
gugagagugguauucauaa

SEQ ID NO: 1703085 - RNA, 19 nt, Homo sapiens
  misc_RNA (1)...(19): siRNA sense strand
caacacagugggcucuuuc

SEQ ID NO: 1703086 - RNA, 19 nt, Homo sapiens
  misc_RNA (1)...(19): siRNA sense strand
cugugaagaugucaaugaa

SEQ ID NO: 1703087 - RNA, 19 nt, Homo sapiens
  misc_RNA (1)...(19): siRNA sense strand
ugauaucaaugaguguuug

SEQ ID NO: 1703088 - RNA, 19 nt, Homo sapiens
  misc_RNA (1)...(19): siRNA sense strand
agagugguauucauaacug

SEQ ID NO: 1703089 - RNA, 19 nt, Homo sapiens
  misc_RNA (1)...(19): siRNA sense strand
agaguggcuuuauacaaga

SEQ ID NO: 1703090 - RNA, 19 nt, Homo sapiens
  misc_RNA (1)...(19): siRNA sense strand
cugauggugucuccuguga

SEQ ID NO: 1703091 - RNA, 19 nt, Homo sapiens
  misc_RNA (1)...(19): siRNA sense strand
auaagaucauugagguuga

SEQ ID NO: 1703092 - RNA, 19 nt, Homo sapiens
  misc_RNA (1)...(19): siRNA sense strand
ucgagugcccugagaacua

SEQ ID NO: 1703093 - RNA, 19 nt, Homo sapiens
  misc_RNA (1)...(19): siRNA sense strand
cuacggaauccaaagaaug

SEQ ID NO: 1703094 - RNA, 19 nt, Homo sapiens
  misc_RNA (1)...(19): siRNA sense strand
gacaccggauggccacuca

SEQ ID NO: 1703095 - RNA, 19 nt, Homo sapiens
  misc_RNA (1)...(19): siRNA sense strand
ccugugaagaugucaauga

SEQ ID NO: 1703096 - RNA, 19 nt, Homo sapiens
  misc_RNA (1)...(19): siRNA sense strand
cgagugcccugagaacuac

SEQ ID NO: 1703097 - RNA, 19 nt, Homo sapiens
  misc_RNA (1)...(19): siRNA sense strand
ggauaagaucauugagguu

SEQ ID NO: 1703098 - RNA, 19 nt, Homo sapiens
  misc_RNA (1)...(19): siRNA sense strand
caggaugugugucgauguc

SEQ ID NO: 1703099 - RNA, 19 nt, Homo sapiens
  misc_RNA (1)...(19): siRNA sense strand
ggagaccggagauuuggau

SEQ ID NO: 1703100 - RNA, 19 nt, Homo sapiens
  misc_RNA (1)...(19): siRNA sense strand
agaggacaauagcugcaaa

SEQ ID NO: 1703101 - RNA, 19 nt, Homo sapiens
  misc_RNA (1)...(19): siRNA sense strand
gaagaugucaaugaaugca

SEQ ID NO: 1703102 - RNA, 19 nt, Homo sapiens
  misc_RNA (1)...(19): siRNA sense strand
cuacggcuccuaccagugu

SEQ ID NO: 1703103 - RNA, 19 nt, Homo sapiens
  misc_RNA (1)...(19): siRNA sense strand
aagcagcagugccgagaca

SEQ ID NO: 1703104 - RNA, 19 nt, Homo sapiens
  misc_RNA (1)...(19): siRNA sense strand
gaacgcgcuguguugaugu

SEQ ID NO: 1703105 - RNA, 19 nt, Homo sapiens
  misc_RNA (1)...(19): siRNA sense strand
gagcucacagaggacaaua

SEQ ID NO: 1703106 - RNA, 19 nt, Homo sapiens
  misc_RNA (1)...(19): siRNA sense strand
gagagugguauucauaacu

SEQ ID NO: 1703107 - RNA, 19 nt, Homo sapiens
  misc_RNA (1)...(19): siRNA sense strand
cgaguacagccucaugguu

SEQ ID NO: 1703108 - RNA, 19 nt, Homo sapiens
  misc_RNA (1)...(19): siRNA sense strand
ggagugugccaacgucuac

SEQ ID NO: 1703109 - RNA, 19 nt, Homo sapiens
  misc_RNA (1)...(19): siRNA sense strand
cagaagaacgugcccaacu

SEQ ID NO: 1703110 - RNA, 19 nt, Homo sapiens
  misc_RNA (1)...(19): siRNA sense strand
gaguggcuuuauacaagau

SEQ ID NO: 1703111 - RNA, 19 nt, Homo sapiens
  misc_RNA (1)...(19): siRNA sense strand
ccacaacugcuccaucaac

SEQ ID NO: 1703112 - RNA, 19 nt, Homo sapiens
  misc_RNA (1)...(19): siRNA sense strand
cauaugcuacggaauccaa

SEQ ID NO: 1703113 - RNA, 19 nt, Homo sapiens
  misc_RNA (1)...(19): siRNA sense strand
caaugaguguuugaguauc

SEQ ID NO: 1703114 - RNA, 19 nt, Homo sapiens
  misc_RNA (1)...(19): siRNA sense strand
ugagagugguauucauaac

SEQ ID NO: 1703115 - RNA, 19 nt, Homo sapiens
  misc_RNA (1)...(19): siRNA sense strand
ggacccauaucugaaugac

SEQ ID NO: 1703116 - RNA, 19 nt, Homo sapiens
  misc_RNA (1)...(19): siRNA sense strand
ggccacaagugcgagaaca

SEQ ID NO: 1703117 - RNA, 19 nt, Homo sapiens
  misc_RNA (1)...(19): siRNA sense strand
uaagaucauugagguugag

SEQ ID NO: 1703118 - RNA, 19 nt, Homo sapiens
  misc_RNA (1)...(19): siRNA sense strand
aagaggacccauaucugaa

SEQ ID NO: 1703119 - RNA, 19 nt, Homo sapiens
  misc_RNA (1)...(19): siRNA sense strand
auccacaacugcuccauca

SEQ ID NO: 1703120 - RNA, 19 nt, Homo sapiens
  misc_RNA (1)...(19): siRNA sense strand
uccaagaaacggauaagau

SEQ ID NO: 1703121 - RNA, 19 nt, Homo sapiens
  misc_RNA (1)...(19): siRNA sense strand
aggcaacuguauugauauc

SEQ ID NO: 1703122 - RNA, 19 nt, Homo sapiens
  misc_RNA (1)...(19): siRNA sense strand
guggauggcaggucaugug

SEQ ID NO: 1703123 - RNA, 19 nt, Homo sapiens
  misc_RNA (1)...(19): siRNA sense strand
gaugcucuaggcaacugua

SEQ ID NO: 1703124 - RNA, 19 nt, Homo sapiens
  misc_RNA (1)...(19): siRNA sense strand
ugacuagucuucugcacuu

SEQ ID NO: 1703125 - RNA, 19 nt, Homo sapiens
  misc_RNA (1)...(19): siRNA sense strand
cguaguggcugccuuccua

SEQ ID NO: 1703126 - RNA, 19 nt, Homo sapiens
  misc_RNA (1)...(19): siRNA sense strand
gaccagagcaagacagugu

SEQ ID NO: 1703127 - RNA, 19 nt, Homo sapiens
  misc_RNA (1)...(19): siRNA sense strand
gccgagagaggcucaauga

SEQ ID NO: 1703128 - RNA, 19 nt, Homo sapiens
  misc_RNA (1)...(19): siRNA sense strand
gcagaucagaggcagaaga

SEQ ID NO: 1703129 - RNA, 19 nt, Homo sapiens
  misc_RNA (1)...(19): siRNA sense strand
ugccaggccugcacugaaa

SEQ ID NO: 1703130 - RNA, 19 nt, Homo sapiens
  misc_RNA (1)...(19): siRNA sense strand
uguguacucugcuguauag

SEQ ID NO: 1703131 - RNA, 19 nt, Homo sapiens
  misc_RNA (1)...(19): siRNA sense strand
ggaagaagugugucaucug

SEQ ID NO: 1703132 - RNA, 19 nt, Homo sapiens
  misc_RNA (1)...(19): siRNA sense strand
gcuuugugcuugucaaucu

SEQ ID NO: 1703133 - RNA, 19 nt, Homo sapiens
  misc_RNA (1)...(19): siRNA sense strand
ccugguggcuuaugugauc

SEQ ID NO: 1703134 - RNA, 19 nt, Homo sapiens
  misc_RNA (1)...(19): siRNA sense strand
ucaacagccuggucaacau

SEQ ID NO: 1703135 - RNA, 19 nt, Homo sapiens
  misc_RNA (1)...(19): siRNA sense strand
gaggaugacggacguagug

SEQ ID NO: 1703136 - RNA, 19 nt, Homo sapiens
  misc_RNA (1)...(19): siRNA sense strand
gcggagucuugcuuucauu

SEQ ID NO: 1703137 - RNA, 19 nt, Homo sapiens
  misc_RNA (1)...(19): siRNA sense strand
gccaggaccaucagaguga

SEQ ID NO: 1703138 - RNA, 19 nt, Homo sapiens
  misc_RNA (1)...(19): siRNA sense strand
ugugacaucugugccauug

SEQ ID NO: 1703139 - RNA, 19 nt, Homo sapiens
  misc_RNA (1)...(19): siRNA sense strand
gcgcagaucagaggcagaa

SEQ ID NO: 1703140 - RNA, 19 nt, Homo sapiens
  misc_RNA (1)...(19): siRNA sense strand
gaggaggccaggaccauca

SEQ ID NO: 1703141 - RNA, 19 nt, Homo sapiens
  misc_RNA (1)...(19): siRNA sense strand
aagaggagcggaagaagug

SEQ ID NO: 1703142 - RNA, 19 nt, Homo sapiens
  misc_RNA (1)...(19): siRNA sense strand
ccauggccauccuccuuug

SEQ ID NO: 1703143 - RNA, 19 nt, Homo sapiens
  misc_RNA (1)...(19): siRNA sense strand
caagaggagcggaagaagu

SEQ ID NO: 1703144 - RNA, 19 nt, Homo sapiens
  misc_RNA (1)...(19): siRNA sense strand
gucugcagcuggcgaguug

SEQ ID NO: 1703145 - RNA, 19 nt, Homo sapiens
  misc_RNA (1)...(19): siRNA sense strand
gguacugacuagucuucug

SEQ ID NO: 1703146 - RNA, 19 nt, Homo sapiens
  misc_RNA (1)...(19): siRNA sense strand
cggaagaagugugucaucu

SEQ ID NO: 1703147 - RNA, 19 nt, Homo sapiens
  misc_RNA (1)...(19): siRNA sense strand
acacgguacugacuagucu

SEQ ID NO: 1703148 - RNA, 19 nt, Homo sapiens
  misc_RNA (1)...(19): siRNA sense strand
ccaggccugugacaucugu

SEQ ID NO: 1703149 - RNA, 19 nt, Homo sapiens
  misc_RNA (1)...(19): siRNA sense strand
gagcggaagaaguguguca

SEQ ID NO: 1703150 - RNA, 19 nt, Homo sapiens
  misc_RNA (1)...(19): siRNA sense strand
uuucauugcuggccuugau

SEQ ID NO: 1703151 - RNA, 19 nt, Homo sapiens
  misc_RNA (1)...(19): siRNA sense strand
uggcuuaugugaucaacag

SEQ ID NO: 1703152 - RNA, 19 nt, Homo sapiens
  misc_RNA (1)...(19): siRNA sense strand
gagcaagaggagcggaaga

SEQ ID NO: 1703153 - RNA, 19 nt, Homo sapiens
  misc_RNA (1)...(19): siRNA sense strand
gccauggccauccuccuuu

SEQ ID NO: 1703154 - RNA, 19 nt, Homo sapiens
  misc_RNA (1)...(19): siRNA sense strand
caacagccuggucaacauc

SEQ ID NO: 1703155 - RNA, 19 nt, Homo sapiens
  misc_RNA (1)...(19): siRNA sense strand
gcuccuggccuucgucuac

SEQ ID NO: 1703156 - RNA, 19 nt, Homo sapiens
  misc_RNA (1)...(19): siRNA sense strand
cuuggaaauugcugaagga

SEQ ID NO: 1703157 - RNA, 19 nt, Homo sapiens
  misc_RNA (1)...(19): siRNA sense strand
ggucaacaucugccucauc

SEQ ID NO: 1703158 - RNA, 19 nt, Homo sapiens
  misc_RNA (1)...(19): siRNA sense strand
ccucaaugucuaccucuga

SEQ ID NO: 1703159 - RNA, 19 nt, Homo sapiens
  misc_RNA (1)...(19): siRNA sense strand
ccagagcaagacaguguug

SEQ ID NO: 1703160 - RNA, 19 nt, Homo sapiens
  misc_RNA (1)...(19): siRNA sense strand
gcaagaggagcggaagaag

SEQ ID NO: 1703161 - RNA, 19 nt, Homo sapiens
  misc_RNA (1)...(19): siRNA sense strand
uggacacccugccaacuag

SEQ ID NO: 1703162 - RNA, 19 nt, Homo sapiens
  misc_RNA (1)...(19): siRNA sense strand
uugcaggccuuguguacuc

SEQ ID NO: 1703163 - RNA, 19 nt, Homo sapiens
  misc_RNA (1)...(19): siRNA sense strand
gccuagcacugggcucaga

SEQ ID NO: 1703164 - RNA, 19 nt, Homo sapiens
  misc_RNA (1)...(19): siRNA sense strand
gcacucagaaccucuuuuc

SEQ ID NO: 1703165 - RNA, 19 nt, Homo sapiens
  misc_RNA (1)...(19): siRNA sense strand
gugguccgguucacaugug

SEQ ID NO: 1703166 - RNA, 19 nt, Homo sapiens
  misc_RNA (1)...(19): siRNA sense strand
gacggugacuguguugcau

SEQ ID NO: 1703167 - RNA, 19 nt, Homo sapiens
  misc_RNA (1)...(19): siRNA sense strand
aaacagagcugcagcaaug

SEQ ID NO: 1703168 - RNA, 19 nt, Homo sapiens
  misc_RNA (1)...(19): siRNA sense strand
gaaagaaagcgaaguagaa

SEQ ID NO: 1703169 - RNA, 19 nt, Homo sapiens
  misc_RNA (1)...(19): siRNA sense strand
gaaaguauccagcugauga

SEQ ID NO: 1703170 - RNA, 19 nt, Homo sapiens
  misc_RNA (1)...(19): siRNA sense strand
ggaaaggacuggaauugau

SEQ ID NO: 1703171 - RNA, 19 nt, Homo sapiens
  misc_RNA (1)...(19): siRNA sense strand
caagggauauggauuuauu

SEQ ID NO: 1703172 - RNA, 19 nt, Homo sapiens
  misc_RNA (1)...(19): siRNA sense strand
gauaacagcagcauaugua

SEQ ID NO: 1703173 - RNA, 19 nt, Homo sapiens
  misc_RNA (1)...(19): siRNA sense strand
gagagaaccuauugauaau

SEQ ID NO: 1703174 - RNA, 19 nt, Homo sapiens
  misc_RNA (1)...(19): siRNA sense strand
gauuaaggaugaugugauu

SEQ ID NO: 1703175 - RNA, 19 nt, Homo sapiens
  misc_RNA (1)...(19): siRNA sense strand
ugagagaaccuauugauaa

SEQ ID NO: 1703176 - RNA, 19 nt, Homo sapiens
  misc_RNA (1)...(19): siRNA sense strand
ggaacaacuuaauggauuu

SEQ ID NO: 1703177 - RNA, 19 nt, Homo sapiens
  misc_RNA (1)...(19): siRNA sense strand
ccaaaggaauugcuuaugu

SEQ ID NO: 1703178 - RNA, 19 nt, Homo sapiens
  misc_RNA (1)...(19): siRNA sense strand
ccucauagcaucaaauuaa

SEQ ID NO: 1703179 - RNA, 19 nt, Homo sapiens
  misc_RNA (1)...(19): siRNA sense strand
gcaggugguuugcugguaa

SEQ ID NO: 1703180 - RNA, 19 nt, Homo sapiens
  misc_RNA (1)...(19): siRNA sense strand
ccaacucucuaacauguuu

SEQ ID NO: 1703181 - RNA, 19 nt, Homo sapiens
  misc_RNA (1)...(19): siRNA sense strand
gaaaggacuggaauugauu

SEQ ID NO: 1703182 - RNA, 19 nt, Homo sapiens
  misc_RNA (1)...(19): siRNA sense strand
caaaggaauugcuuaugug

SEQ ID NO: 1703183 - RNA, 19 nt, Homo sapiens
  misc_RNA (1)...(19): siRNA sense strand
gaagcgaaguagagacaga

SEQ ID NO: 1703184 - RNA, 19 nt, Homo sapiens
  misc_RNA (1)...(19): siRNA sense strand
gaaaguuggucauguuacu

SEQ ID NO: 1703185 - RNA, 19 nt, Homo sapiens
  misc_RNA (1)...(19): siRNA sense strand
aagauuggguugccucaua

SEQ ID NO: 1703186 - RNA, 19 nt, Homo sapiens
  misc_RNA (1)...(19): siRNA sense strand
caagggauuuggaagaguu

SEQ ID NO: 1703187 - RNA, 19 nt, Homo sapiens
  misc_RNA (1)...(19): siRNA sense strand
gaugggauaccgagauuaa

SEQ ID NO: 1703188 - RNA, 19 nt, Homo sapiens
  misc_RNA (1)...(19): siRNA sense strand
caagagcccugugagagaa

SEQ ID NO: 1703189 - RNA, 19 nt, Homo sapiens
  misc_RNA (1)...(19): siRNA sense strand
uggaacaacuuaauggauu

SEQ ID NO: 1703190 - RNA, 19 nt, Homo sapiens
  misc_RNA (1)...(19): siRNA sense strand
gacagaaauucaagacguu

SEQ ID NO: 1703191 - RNA, 19 nt, Homo sapiens
  misc_RNA (1)...(19): siRNA sense strand
gaacggaagcgaaguagag

SEQ ID NO: 1703192 - RNA, 19 nt, Homo sapiens
  misc_RNA (1)...(19): siRNA sense strand
gaagaaguuggaugggaua

SEQ ID NO: 1703193 - RNA, 19 nt, Homo sapiens
  misc_RNA (1)...(19): siRNA sense strand
gggaagugcuggaccuaug

SEQ ID NO: 1703194 - RNA, 19 nt, Homo sapiens
  misc_RNA (1)...(19): siRNA sense strand
gagcagaagucguagucau

SEQ ID NO: 1703195 - RNA, 19 nt, Homo sapiens
  misc_RNA (1)...(19): siRNA sense strand
auaccgagauuaaggauga

SEQ ID NO: 1703196 - RNA, 19 nt, Homo sapiens
  misc_RNA (1)...(19): siRNA sense strand
acagcaagcucuacagaug

SEQ ID NO: 1703197 - RNA, 19 nt, Homo sapiens
  misc_RNA (1)...(19): siRNA sense strand
gggaacaacuggucgucuu

SEQ ID NO: 1703198 - RNA, 19 nt, Homo sapiens
  misc_RNA (1)...(19): siRNA sense strand
ggaauugauuugggaacaa

SEQ ID NO: 1703199 - RNA, 19 nt, Homo sapiens
  misc_RNA (1)...(19): siRNA sense strand
gcaggaagaccaaugaaag

SEQ ID NO: 1703200 - RNA, 19 nt, Homo sapiens
  misc_RNA (1)...(19): siRNA sense strand
caacuuaccacaaccuguu

SEQ ID NO: 1703201 - RNA, 19 nt, Homo sapiens
  misc_RNA (1)...(19): siRNA sense strand
ucaaacagaagaagaaguu

SEQ ID NO: 1703202 - RNA, 19 nt, Homo sapiens
  misc_RNA (1)...(19): siRNA sense strand
gaguggcucuuuggcauuu

SEQ ID NO: 1703203 - RNA, 19 nt, Homo sapiens
  misc_RNA (1)...(19): siRNA sense strand
ggaagaccaaugaaaguug

SEQ ID NO: 1703204 - RNA, 19 nt, Homo sapiens
  misc_RNA (1)...(19): siRNA sense strand
gaacuggaaaggacuggaa

SEQ ID NO: 1703205 - RNA, 19 nt, Homo sapiens
  misc_RNA (1)...(19): siRNA sense strand
gugaagugcccaucaauug

SEQ ID NO: 1703206 - RNA, 19 nt, Homo sapiens
  misc_RNA (1)...(19): siRNA sense strand
cgaaguagaagcaaagaga

SEQ ID NO: 1703207 - RNA, 19 nt, Homo sapiens
  misc_RNA (1)...(19): siRNA sense strand
gcacagcaagcucuacaga

SEQ ID NO: 1703208 - RNA, 19 nt, Homo sapiens
  misc_RNA (1)...(19): siRNA sense strand
gcagaagucguagucauga

SEQ ID NO: 1703209 - RNA, 19 nt, Homo sapiens
  misc_RNA (1)...(19): siRNA sense strand
cgaaagagaagcaaaagua

SEQ ID NO: 1703210 - RNA, 19 nt, Homo sapiens
  misc_RNA (1)...(19): siRNA sense strand
cagcaauggcaaacaauuu

SEQ ID NO: 1703211 - RNA, 19 nt, Homo sapiens
  misc_RNA (1)...(19): siRNA sense strand
gugagagaaccuauugaua

SEQ ID NO: 1703212 - RNA, 19 nt, Homo sapiens
  misc_RNA (1)...(19): siRNA sense strand
gaacuagcaggaagaccaa

SEQ ID NO: 1703213 - RNA, 19 nt, Homo sapiens
  misc_RNA (1)...(19): siRNA sense strand
ggaagugcuggaccuauga

SEQ ID NO: 1703214 - RNA, 19 nt, Homo sapiens
  misc_RNA (1)...(19): siRNA sense strand
gcagcuggcggcaagaauu

SEQ ID NO: 1703215 - RNA, 19 nt, Homo sapiens
  misc_RNA (1)...(19): siRNA sense strand
ggaaagguucgagauguga

SEQ ID NO: 1703216 - RNA, 19 nt, Homo sapiens
  misc_RNA (1)...(19): siRNA sense strand
gaaagagaagcaaaaguaa

SEQ ID NO: 1703217 - RNA, 19 nt, Homo sapiens
  misc_RNA (1)...(19): siRNA sense strand
gcagcaauggcaaacaauu

SEQ ID NO: 1703218 - RNA, 19 nt, Homo sapiens
  misc_RNA (1)...(19): siRNA sense strand
cucagugccucuagcaaua

SEQ ID NO: 1703219 - RNA, 19 nt, Homo sapiens
  misc_RNA (1)...(19): siRNA sense strand
gaacgaaagagaagcaaaa

SEQ ID NO: 1703220 - RNA, 19 nt, Homo sapiens
  misc_RNA (1)...(19): siRNA sense strand
ggguacagguuugcagauu

SEQ ID NO: 1703221 - RNA, 19 nt, Homo sapiens
  misc_RNA (1)...(19): siRNA sense strand
caacggccaugaagaacgu

SEQ ID NO: 1703222 - RNA, 19 nt, Homo sapiens
  misc_RNA (1)...(19): siRNA sense strand
cgagaugugaggaugauuu

SEQ ID NO: 1703223 - RNA, 19 nt, Homo sapiens
  misc_RNA (1)...(19): siRNA sense strand
uaggaaagguucgagaugu

SEQ ID NO: 1703224 - RNA, 19 nt, Homo sapiens
  misc_RNA (1)...(19): siRNA sense strand
gcaaaaguccauucagaaa

SEQ ID NO: 1703225 - RNA, 19 nt, Homo sapiens
  misc_RNA (1)...(19): siRNA sense strand
gcaaaagccgugaaagaaa

SEQ ID NO: 1703226 - RNA, 19 nt, Homo sapiens
  misc_RNA (1)...(19): siRNA sense strand
cacaaccuguuuccugauu

SEQ ID NO: 1703227 - RNA, 19 nt, Homo sapiens
  misc_RNA (1)...(19): siRNA sense strand
acagaugaguggcucuuug

SEQ ID NO: 1703228 - RNA, 19 nt, Homo sapiens
  misc_RNA (1)...(19): siRNA sense strand
gguacagguuugcagauuc

SEQ ID NO: 1703229 - RNA, 19 nt, Homo sapiens
  misc_RNA (1)...(19): siRNA sense strand
ggaccuaugaggcuuuaug

SEQ ID NO: 1703230 - RNA, 19 nt, Homo sapiens
  misc_RNA (1)...(19): siRNA sense strand
aggaugaugugauugaaga

SEQ ID NO: 1703231 - RNA, 19 nt, Homo sapiens
  misc_RNA (1)...(19): siRNA sense strand
uaacauguuuaacccucaa

SEQ ID NO: 1703232 - RNA, 19 nt, Homo sapiens
  misc_RNA (1)...(19): siRNA sense strand
aaauuaagcagacgacguu

SEQ ID NO: 1703233 - RNA, 19 nt, Homo sapiens
  misc_RNA (1)...(19): siRNA sense strand
uaaggaugaugugauugaa

SEQ ID NO: 1703234 - RNA, 19 nt, Homo sapiens
  misc_RNA (1)...(19): siRNA sense strand
uaauggauuugaacuagca

SEQ ID NO: 1703235 - RNA, 19 nt, Homo sapiens
  misc_RNA (1)...(19): siRNA sense strand
gaacaacuuaauggauuug

SEQ ID NO: 1703236 - RNA, 19 nt, Homo sapiens
  misc_RNA (1)...(19): siRNA sense strand
aaagcgaaguagaagcaaa

SEQ ID NO: 1703237 - RNA, 19 nt, Homo sapiens
  misc_RNA (1)...(19): siRNA sense strand
ugaaagaaagcgaaguaga

SEQ ID NO: 1703238 - RNA, 19 nt, Homo sapiens
  misc_RNA (1)...(19): siRNA sense strand
aggauuaacuggccaacga

SEQ ID NO: 1703239 - RNA, 19 nt, Homo sapiens
  misc_RNA (1)...(19): siRNA sense strand
gcaaacaauuuacaaaagg

SEQ ID NO: 1703240 - RNA, 19 nt, Homo sapiens
  misc_RNA (1)...(19): siRNA sense strand
gcauauguaccucuuccaa

SEQ ID NO: 1703241 - RNA, 19 nt, Homo sapiens
  misc_RNA (1)...(19): siRNA sense strand
cgugaaagaaagcgaagua

SEQ ID NO: 1703242 - RNA, 19 nt, Homo sapiens
  misc_RNA (1)...(19): siRNA sense strand
gaacaacuggucgucuuca

SEQ ID NO: 1703243 - RNA, 19 nt, Homo sapiens
  misc_RNA (1)...(19): siRNA sense strand
aaugauaacagcagcauau

SEQ ID NO: 1703244 - RNA, 19 nt, Homo sapiens
  misc_RNA (1)...(19): siRNA sense strand
gcucagugccucuagcaau

SEQ ID NO: 1703245 - RNA, 19 nt, Homo sapiens
  misc_RNA (1)...(19): siRNA sense strand
uaugugaagugcccaucaa

SEQ ID NO: 1703246 - RNA, 19 nt, Homo sapiens
  misc_RNA (1)...(19): siRNA sense strand
gauuugcaaacaagacuuu

SEQ ID NO: 1703247 - RNA, 19 nt, Homo sapiens
  misc_RNA (1)...(19): siRNA sense strand
gagcaaaagccgugaaaga

SEQ ID NO: 1703248 - RNA, 19 nt, Homo sapiens
  misc_RNA (1)...(19): siRNA sense strand
gaauugauuugggaacaac

SEQ ID NO: 1703249 - RNA, 19 nt, Homo sapiens
  misc_RNA (1)...(19): siRNA sense strand
agcaauggcaaacaauuua

SEQ ID NO: 1703250 - RNA, 19 nt, Homo sapiens
  misc_RNA (1)...(19): siRNA sense strand
agcaagagcagaagucgua

SEQ ID NO: 1703251 - RNA, 19 nt, Homo sapiens
  misc_RNA (1)...(19): siRNA sense strand
uuaaggaugaugugauuga

SEQ ID NO: 1703252 - RNA, 19 nt, Homo sapiens
  misc_RNA (1)...(19): siRNA sense strand
uggaugggauaccgagauu

SEQ ID NO: 1703253 - RNA, 19 nt, Homo sapiens
  misc_RNA (1)...(19): siRNA sense strand
cuuaauggauuugaacuag

SEQ ID NO: 1703254 - RNA, 19 nt, Homo sapiens
  misc_RNA (1)...(19): siRNA sense strand
agaauucgaccaagggauu

SEQ ID NO: 1703255 - RNA, 19 nt, Homo sapiens
  misc_RNA (1)...(19): siRNA sense strand
gaauucgaccaagggauuu

SEQ ID NO: 1703256 - RNA, 19 nt, Homo sapiens
  misc_RNA (1)...(19): siRNA sense strand
caaccuguuuccugauucu

SEQ ID NO: 1703257 - RNA, 19 nt, Homo sapiens
  misc_RNA (1)...(19): siRNA sense strand
auguaccucuuccaacuua

SEQ ID NO: 1703258 - RNA, 19 nt, Homo sapiens
  misc_RNA (1)...(19): siRNA sense strand
caaaagccgugaaagaaag

SEQ ID NO: 1703259 - RNA, 19 nt, Homo sapiens
  misc_RNA (1)...(19): siRNA sense strand
cagaagucguagucaugaa

SEQ ID NO: 1703260 - RNA, 19 nt, Homo sapiens
  misc_RNA (1)...(19): siRNA sense strand
uggaagaauugaaaguauc

SEQ ID NO: 1703261 - RNA, 19 nt, Homo sapiens
  misc_RNA (1)...(19): siRNA sense strand
uaugugggcucauuacacu

SEQ ID NO: 1703262 - RNA, 19 nt, Homo sapiens
  misc_RNA (1)...(19): siRNA sense strand
cugcagcaauggcaaacaa

SEQ ID NO: 1703263 - RNA, 19 nt, Homo sapiens
  misc_RNA (1)...(19): siRNA sense strand
guaggaaagguucgagaug

SEQ ID NO: 1703264 - RNA, 19 nt, Homo sapiens
  misc_RNA (1)...(19): siRNA sense strand
gagauuaaggaugauguga

SEQ ID NO: 1703265 - RNA, 19 nt, Homo sapiens
  misc_RNA (1)...(19): siRNA sense strand
gcaauguguaugugaagug

SEQ ID NO: 1703266 - RNA, 19 nt, Homo sapiens
  misc_RNA (1)...(19): siRNA sense strand
ugaugugauugaagaaugu

SEQ ID NO: 1703267 - RNA, 19 nt, Homo sapiens
  misc_RNA (1)...(19): siRNA sense strand
aaacagagcugcagcaaug

SEQ ID NO: 1703268 - RNA, 19 nt, Homo sapiens
  misc_RNA (1)...(19): siRNA sense strand
gaaagaaagcgaaguagaa

SEQ ID NO: 1703269 - RNA, 19 nt, Homo sapiens
  misc_RNA (1)...(19): siRNA sense strand
gaaaguauccagcugauga

SEQ ID NO: 1703270 - RNA, 19 nt, Homo sapiens
  misc_RNA (1)...(19): siRNA sense strand
ggaaaggacuggaauugau

SEQ ID NO: 1703271 - RNA, 19 nt, Homo sapiens
  misc_RNA (1)...(19): siRNA sense strand
caagggauauggauuuauu

SEQ ID NO: 1703272 - RNA, 19 nt, Homo sapiens
  misc_RNA (1)...(19): siRNA sense strand
gauaacagcagcauaugua

SEQ ID NO: 1703273 - RNA, 19 nt, Homo sapiens
  misc_RNA (1)...(19): siRNA sense strand
gagagaaccuauugauaau

SEQ ID NO: 1703274 - RNA, 19 nt, Homo sapiens
  misc_RNA (1)...(19): siRNA sense strand
gauuaaggaugaugugauu

SEQ ID NO: 1703275 - RNA, 19 nt, Homo sapiens
  misc_RNA (1)...(19): siRNA sense strand
ugagagaaccuauugauaa

SEQ ID NO: 1703276 - RNA, 19 nt, Homo sapiens
  misc_RNA (1)...(19): siRNA sense strand
ggaacaacuuaauggauuu

SEQ ID NO: 1703277 - RNA, 19 nt, Homo sapiens
  misc_RNA (1)...(19): siRNA sense strand
ccaaaggaauugcuuaugu

SEQ ID NO: 1703278 - RNA, 19 nt, Homo sapiens
  misc_RNA (1)...(19): siRNA sense strand
ccucauagcaucaaauuaa

SEQ ID NO: 1703279 - RNA, 19 nt, Homo sapiens
  misc_RNA (1)...(19): siRNA sense strand
gcaggugguuugcugguaa

SEQ ID NO: 1703280 - RNA, 19 nt, Homo sapiens
  misc_RNA (1)...(19): siRNA sense strand
ccaacucucuaacauguuu

SEQ ID NO: 1703281 - RNA, 19 nt, Homo sapiens
  misc_RNA (1)...(19): siRNA sense strand
gaaaggacuggaauugauu

SEQ ID NO: 1703282 - RNA, 19 nt, Homo sapiens
  misc_RNA (1)...(19): siRNA sense strand
caaaggaauugcuuaugug

SEQ ID NO: 1703283 - RNA, 19 nt, Homo sapiens
  misc_RNA (1)...(19): siRNA sense strand
gaagcgaaguagagacaga

SEQ ID NO: 1703284 - RNA, 19 nt, Homo sapiens
  misc_RNA (1)...(19): siRNA sense strand
gaaaguuggucauguuacu

SEQ ID NO: 1703285 - RNA, 19 nt, Homo sapiens
  misc_RNA (1)...(19): siRNA sense strand
aagauuggguugccucaua

SEQ ID NO: 1703286 - RNA, 19 nt, Homo sapiens
  misc_RNA (1)...(19): siRNA sense strand
caagggauuuggaagaguu

SEQ ID NO: 1703287 - RNA, 19 nt, Homo sapiens
  misc_RNA (1)...(19): siRNA sense strand
gaugggauaccgagauuaa

SEQ ID NO: 1703288 - RNA, 19 nt, Homo sapiens
  misc_RNA (1)...(19): siRNA sense strand
caagagcccugugagagaa

SEQ ID NO: 1703289 - RNA, 19 nt, Homo sapiens
  misc_RNA (1)...(19): siRNA sense strand
uggaacaacuuaauggauu

SEQ ID NO: 1703290 - RNA, 19 nt, Homo sapiens
  misc_RNA (1)...(19): siRNA sense strand
gacagaaauucaagacguu

SEQ ID NO: 1703291 - RNA, 19 nt, Homo sapiens
  misc_RNA (1)...(19): siRNA sense strand
gaacggaagcgaaguagag

SEQ ID NO: 1703292 - RNA, 19 nt, Homo sapiens
  misc_RNA (1)...(19): siRNA sense strand
gaagaaguuggaugggaua

SEQ ID NO: 1703293 - RNA, 19 nt, Homo sapiens
  misc_RNA (1)...(19): siRNA sense strand
gggaagugcuggaccuaug

SEQ ID NO: 1703294 - RNA, 19 nt, Homo sapiens
  misc_RNA (1)...(19): siRNA sense strand
gagcagaagucguagucau

SEQ ID NO: 1703295 - RNA, 19 nt, Homo sapiens
  misc_RNA (1)...(19): siRNA sense strand
auaccgagauuaaggauga

SEQ ID NO: 1703296 - RNA, 19 nt, Homo sapiens
  misc_RNA (1)...(19): siRNA sense strand
acagcaagcucuacagaug

SEQ ID NO: 1703297 - RNA, 19 nt, Homo sapiens
  misc_RNA (1)...(19): siRNA sense strand
gggaacaacuggucgucuu

SEQ ID NO: 1703298 - RNA, 19 nt, Homo sapiens
  misc_RNA (1)...(19): siRNA sense strand
ggaauugauuugggaacaa

SEQ ID NO: 1703299 - RNA, 19 nt, Homo sapiens
  misc_RNA (1)...(19): siRNA sense strand
gcaggaagaccaaugaaag

SEQ ID NO: 1703300 - RNA, 19 nt, Homo sapiens
  misc_RNA (1)...(19): siRNA sense strand
caacuuaccacaaccuguu

SEQ ID NO: 1703301 - RNA, 19 nt, Homo sapiens
  misc_RNA (1)...(19): siRNA sense strand
ucaaacagaagaagaaguu

SEQ ID NO: 1703302 - RNA, 19 nt, Homo sapiens
  misc_RNA (1)...(19): siRNA sense strand
gaguggcucuuuggcauuu

SEQ ID NO: 1703303 - RNA, 19 nt, Homo sapiens
  misc_RNA (1)...(19): siRNA sense strand
ggaagaccaaugaaaguug

SEQ ID NO: 1703304 - RNA, 19 nt, Homo sapiens
  misc_RNA (1)...(19): siRNA sense strand
gaacuggaaaggacuggaa

SEQ ID NO: 1703305 - RNA, 19 nt, Homo sapiens
  misc_RNA (1)...(19): siRNA sense strand
gugaagugcccaucaauug

SEQ ID NO: 1703306 - RNA, 19 nt, Homo sapiens
  misc_RNA (1)...(19): siRNA sense strand
cgaaguagaagcaaagaga

SEQ ID NO: 1703307 - RNA, 19 nt, Homo sapiens
  misc_RNA (1)...(19): siRNA sense strand
gcacagcaagcucuacaga

SEQ ID NO: 1703308 - RNA, 19 nt, Homo sapiens
  misc_RNA (1)...(19): siRNA sense strand
gcagaagucguagucauga

SEQ ID NO: 1703309 - RNA, 19 nt, Homo sapiens
  misc_RNA (1)...(19): siRNA sense strand
cgaaagagaagcaaaagua

SEQ ID NO: 1703310 - RNA, 19 nt, Homo sapiens
  misc_RNA (1)...(19): siRNA sense strand
cagcaauggcaaacaauuu

SEQ ID NO: 1703311 - RNA, 19 nt, Homo sapiens
  misc_RNA (1)...(19): siRNA sense strand
gugagagaaccuauugaua

SEQ ID NO: 1703312 - RNA, 19 nt, Homo sapiens
  misc_RNA (1)...(19): siRNA sense strand
gaacuagcaggaagaccaa

SEQ ID NO: 1703313 - RNA, 19 nt, Homo sapiens
  misc_RNA (1)...(19): siRNA sense strand
ggaagugcuggaccuauga

SEQ ID NO: 1703314 - RNA, 19 nt, Homo sapiens
  misc_RNA (1)...(19): siRNA sense strand
gcagcuggcggcaagaauu

SEQ ID NO: 1703315 - RNA, 19 nt, Homo sapiens
  misc_RNA (1)...(19): siRNA sense strand
ggaaagguucgagauguga

SEQ ID NO: 1703316 - RNA, 19 nt, Homo sapiens
  misc_RNA (1)...(19): siRNA sense strand
gaaagagaagcaaaaguaa

SEQ ID NO: 1703317 - RNA, 19 nt, Homo sapiens
  misc_RNA (1)...(19): siRNA sense strand
gcagcaauggcaaacaauu

SEQ ID NO: 1703318 - RNA, 19 nt, Homo sapiens
  misc_RNA (1)...(19): siRNA sense strand
cucagugccucuagcaaua

SEQ ID NO: 1703319 - RNA, 19 nt, Homo sapiens
  misc_RNA (1)...(19): siRNA sense strand
gaacgaaagagaagcaaaa

SEQ ID NO: 1703320 - RNA, 19 nt, Homo sapiens
  misc_RNA (1)...(19): siRNA sense strand
ggguacagguuugcagauu

SEQ ID NO: 1703321 - RNA, 19 nt, Homo sapiens
  misc_RNA (1)...(19): siRNA sense strand
caacggccaugaagaacgu

SEQ ID NO: 1703322 - RNA, 19 nt, Homo sapiens
  misc_RNA (1)...(19): siRNA sense strand
cgagaugugaggaugauuu

SEQ ID NO: 1703323 - RNA, 19 nt, Homo sapiens
  misc_RNA (1)...(19): siRNA sense strand
uaggaaagguucgagaugu

SEQ ID NO: 1703324 - RNA, 19 nt, Homo sapiens
  misc_RNA (1)...(19): siRNA sense strand
gcaaaaguccauucagaaa

SEQ ID NO: 1703325 - RNA, 19 nt, Homo sapiens
  misc_RNA (1)...(19): siRNA sense strand
gcaaaagccgugaaagaaa

SEQ ID NO: 1703326 - RNA, 19 nt, Homo sapiens
  misc_RNA (1)...(19): siRNA sense strand
cacaaccuguuuccugauu

SEQ ID NO: 1703327 - RNA, 19 nt, Homo sapiens
  misc_RNA (1)...(19): siRNA sense strand
acagaugaguggcucuuug

SEQ ID NO: 1703328 - RNA, 19 nt, Homo sapiens
  misc_RNA (1)...(19): siRNA sense strand
gguacagguuugcagauuc

SEQ ID NO: 1703329 - RNA, 19 nt, Homo sapiens
  misc_RNA (1)...(19): siRNA sense strand
ggaccuaugaggcuuuaug

SEQ ID NO: 1703330 - RNA, 19 nt, Homo sapiens
  misc_RNA (1)...(19): siRNA sense strand
aggaugaugugauugaaga

SEQ ID NO: 1703331 - RNA, 19 nt, Homo sapiens
  misc_RNA (1)...(19): siRNA sense strand
uaacauguuuaacccucaa

SEQ ID NO: 1703332 - RNA, 19 nt, Homo sapiens
  misc_RNA (1)...(19): siRNA sense strand
aaauuaagcagacgacguu

SEQ ID NO: 1703333 - RNA, 19 nt, Homo sapiens
  misc_RNA (1)...(19): siRNA sense strand
uaaggaugaugugauugaa

SEQ ID NO: 1703334 - RNA, 19 nt, Homo sapiens
  misc_RNA (1)...(19): siRNA sense strand
uaauggauuugaacuagca

SEQ ID NO: 1703335 - RNA, 19 nt, Homo sapiens
  misc_RNA (1)...(19): siRNA sense strand
gaacaacuuaauggauuug

SEQ ID NO: 1703336 - RNA, 19 nt, Homo sapiens
  misc_RNA (1)...(19): siRNA sense strand
aaagcgaaguagaagcaaa

SEQ ID NO: 1703337 - RNA, 19 nt, Homo sapiens
  misc_RNA (1)...(19): siRNA sense strand
ugaaagaaagcgaaguaga

SEQ ID NO: 1703338 - RNA, 19 nt, Homo sapiens
  misc_RNA (1)...(19): siRNA sense strand
aggauuaacuggccaacga

SEQ ID NO: 1703339 - RNA, 19 nt, Homo sapiens
  misc_RNA (1)...(19): siRNA sense strand
gcaaacaauuuacaaaagg

SEQ ID NO: 1703340 - RNA, 19 nt, Homo sapiens
  misc_RNA (1)...(19): siRNA sense strand
gcauauguaccucuuccaa

SEQ ID NO: 1703341 - RNA, 19 nt, Homo sapiens
  misc_RNA (1)...(19): siRNA sense strand
cgugaaagaaagcgaagua

SEQ ID NO: 1703342 - RNA, 19 nt, Homo sapiens
  misc_RNA (1)...(19): siRNA sense strand
gaacaacuggucgucuuca

SEQ ID NO: 1703343 - RNA, 19 nt, Homo sapiens
  misc_RNA (1)...(19): siRNA sense strand
aaugauaacagcagcauau

SEQ ID NO: 1703344 - RNA, 19 nt, Homo sapiens
  misc_RNA (1)...(19): siRNA sense strand
gcucagugccucuagcaau

SEQ ID NO: 1703345 - RNA, 19 nt, Homo sapiens
  misc_RNA (1)...(19): siRNA sense strand
uaugugaagugcccaucaa

SEQ ID NO: 1703346 - RNA, 19 nt, Homo sapiens
  misc_RNA (1)...(19): siRNA sense strand
gauuugcaaacaagacuuu

SEQ ID NO: 1703347 - RNA, 19 nt, Homo sapiens
  misc_RNA (1)...(19): siRNA sense strand
gagcaaaagccgugaaaga

SEQ ID NO: 1703348 - RNA, 19 nt, Homo sapiens
  misc_RNA (1)...(19): siRNA sense strand
gaauugauuugggaacaac

SEQ ID NO: 1703349 - RNA, 19 nt, Homo sapiens
  misc_RNA (1)...(19): siRNA sense strand
agcaauggcaaacaauuua

SEQ ID NO: 1703350 - RNA, 19 nt, Homo sapiens
  misc_RNA (1)...(19): siRNA sense strand
agcaagagcagaagucgua

SEQ ID NO: 1703351 - RNA, 19 nt, Homo sapiens
  misc_RNA (1)...(19): siRNA sense strand
uuaaggaugaugugauuga

SEQ ID NO: 1703352 - RNA, 19 nt, Homo sapiens
  misc_RNA (1)...(19): siRNA sense strand
uggaugggauaccgagauu

SEQ ID NO: 1703353 - RNA, 19 nt, Homo sapiens
  misc_RNA (1)...(19): siRNA sense strand
cuuaauggauuugaacuag

SEQ ID NO: 1703354 - RNA, 19 nt, Homo sapiens
  misc_RNA (1)...(19): siRNA sense strand
agaauucgaccaagggauu

SEQ ID NO: 1703355 - RNA, 19 nt, Homo sapiens
  misc_RNA (1)...(19): siRNA sense strand
gaauucgaccaagggauuu

SEQ ID NO: 1703356 - RNA, 19 nt, Homo sapiens
  misc_RNA (1)...(19): siRNA sense strand
caaccuguuuccugauucu

SEQ ID NO: 1703357 - RNA, 19 nt, Homo sapiens
  misc_RNA (1)...(19): siRNA sense strand
auguaccucuuccaacuua

SEQ ID NO: 1703358 - RNA, 19 nt, Homo sapiens
  misc_RNA (1)...(19): siRNA sense strand
caaaagccgugaaagaaag

SEQ ID NO: 1703359 - RNA, 19 nt, Homo sapiens
  misc_RNA (1)...(19): siRNA sense strand
cagaagucguagucaugaa

SEQ ID NO: 1703360 - RNA, 19 nt, Homo sapiens
  misc_RNA (1)...(19): siRNA sense strand
uggaagaauugaaaguauc

SEQ ID NO: 1703361 - RNA, 19 nt, Homo sapiens
  misc_RNA (1)...(19): siRNA sense strand
uaugugggcucauuacacu

SEQ ID NO: 1703362 - RNA, 19 nt, Homo sapiens
  misc_RNA (1)...(19): siRNA sense strand
cugcagcaauggcaaacaa

SEQ ID NO: 1703363 - RNA, 19 nt, Homo sapiens
  misc_RNA (1)...(19): siRNA sense strand
guaggaaagguucgagaug

SEQ ID NO: 1703364 - RNA, 19 nt, Homo sapiens
  misc_RNA (1)...(19): siRNA sense strand
gagauuaaggaugauguga

SEQ ID NO: 1703365 - RNA, 19 nt, Homo sapiens
  misc_RNA (1)...(19): siRNA sense strand
gcaauguguaugugaagug

SEQ ID NO: 1703366 - RNA, 19 nt, Homo sapiens
  misc_RNA (1)...(19): siRNA sense strand
ugaugugauugaagaaugu

SEQ ID NO: 1703367 - RNA, 19 nt, Homo sapiens
  misc_RNA (1)...(19): siRNA sense strand
aaacagagcugcagcaaug

SEQ ID NO: 1703368 - RNA, 19 nt, Homo sapiens
  misc_RNA (1)...(19): siRNA sense strand
gaaaguauccagcugauga

SEQ ID NO: 1703369 - RNA, 19 nt, Homo sapiens
  misc_RNA (1)...(19): siRNA sense strand
ggaaaggacuggaauugau

SEQ ID NO: 1703370 - RNA, 19 nt, Homo sapiens
  misc_RNA (1)...(19): siRNA sense strand
caagggauauggauuuauu

SEQ ID NO: 1703371 - RNA, 19 nt, Homo sapiens
  misc_RNA (1)...(19): siRNA sense strand
gauaacagcagcauaugua

SEQ ID NO: 1703372 - RNA, 19 nt, Homo sapiens
  misc_RNA (1)...(19): siRNA sense strand
gauuaaggaugaugugauu

SEQ ID NO: 1703373 - RNA, 19 nt, Homo sapiens
  misc_RNA (1)...(19): siRNA sense strand
ggaacaacuuaauggauuu

SEQ ID NO: 1703374 - RNA, 19 nt, Homo sapiens
  misc_RNA (1)...(19): siRNA sense strand
ccaaaggaauugcuuaugu

SEQ ID NO: 1703375 - RNA, 19 nt, Homo sapiens
  misc_RNA (1)...(19): siRNA sense strand
gcaggugguuugcugguaa

SEQ ID NO: 1703376 - RNA, 19 nt, Homo sapiens
  misc_RNA (1)...(19): siRNA sense strand
ccaacucucuaacauguuu

SEQ ID NO: 1703377 - RNA, 19 nt, Homo sapiens
  misc_RNA (1)...(19): siRNA sense strand
gaaaggacuggaauugauu

SEQ ID NO: 1703378 - RNA, 19 nt, Homo sapiens
  misc_RNA (1)...(19): siRNA sense strand
caaaggaauugcuuaugug

SEQ ID NO: 1703379 - RNA, 19 nt, Homo sapiens
  misc_RNA (1)...(19): siRNA sense strand
gaaaguuggucauguuacu

SEQ ID NO: 1703380 - RNA, 19 nt, Homo sapiens
  misc_RNA (1)...(19): siRNA sense strand
gaugggauaccgagauuaa

SEQ ID NO: 1703381 - RNA, 19 nt, Homo sapiens
  misc_RNA (1)...(19): siRNA sense strand
caagggauuuggaagaguu

SEQ ID NO: 1703382 - RNA, 19 nt, Homo sapiens
  misc_RNA (1)...(19): siRNA sense strand
uggaacaacuuaauggauu

SEQ ID NO: 1703383 - RNA, 19 nt, Homo sapiens
  misc_RNA (1)...(19): siRNA sense strand
gacagaaauucaagacguu

SEQ ID NO: 1703384 - RNA, 19 nt, Homo sapiens
  misc_RNA (1)...(19): siRNA sense strand
gaagaaguuggaugggaua

SEQ ID NO: 1703385 - RNA, 19 nt, Homo sapiens
  misc_RNA (1)...(19): siRNA sense strand
gggaagugcuggaccuaug

SEQ ID NO: 1703386 - RNA, 19 nt, Homo sapiens
  misc_RNA (1)...(19): siRNA sense strand
gggaacaacuggucgucuu

SEQ ID NO: 1703387 - RNA, 19 nt, Homo sapiens
  misc_RNA (1)...(19): siRNA sense strand
auaccgagauuaaggauga

SEQ ID NO: 1703388 - RNA, 19 nt, Homo sapiens
  misc_RNA (1)...(19): siRNA sense strand
acagcaagcucuacagaug

SEQ ID NO: 1703389 - RNA, 19 nt, Homo sapiens
  misc_RNA (1)...(19): siRNA sense strand
ggaauugauuugggaacaa

SEQ ID NO: 1703390 - RNA, 19 nt, Homo sapiens
  misc_RNA (1)...(19): siRNA sense strand
gcaggaagaccaaugaaag

SEQ ID NO: 1703391 - RNA, 19 nt, Homo sapiens
  misc_RNA (1)...(19): siRNA sense strand
caacuuaccacaaccuguu

SEQ ID NO: 1703392 - RNA, 19 nt, Homo sapiens
  misc_RNA (1)...(19): siRNA sense strand
ucaaacagaagaagaaguu

SEQ ID NO: 1703393 - RNA, 19 nt, Homo sapiens
  misc_RNA (1)...(19): siRNA sense strand
gaguggcucuuuggcauuu

SEQ ID NO: 1703394 - RNA, 19 nt, Homo sapiens
  misc_RNA (1)...(19): siRNA sense strand
ggaagaccaaugaaaguug

SEQ ID NO: 1703395 - RNA, 19 nt, Homo sapiens
  misc_RNA (1)...(19): siRNA sense strand
gaacuggaaaggacuggaa

SEQ ID NO: 1703396 - RNA, 19 nt, Homo sapiens
  misc_RNA (1)...(19): siRNA sense strand
gugaagugcccaucaauug

SEQ ID NO: 1703397 - RNA, 19 nt, Homo sapiens
  misc_RNA (1)...(19): siRNA sense strand
gcacagcaagcucuacaga

SEQ ID NO: 1703398 - RNA, 19 nt, Homo sapiens
  misc_RNA (1)...(19): siRNA sense strand
cagcaauggcaaacaauuu

SEQ ID NO: 1703399 - RNA, 19 nt, Homo sapiens
  misc_RNA (1)...(19): siRNA sense strand
gcagcuggcggcaagaauu

SEQ ID NO: 1703400 - RNA, 19 nt, Homo sapiens
  misc_RNA (1)...(19): siRNA sense strand
gaacuagcaggaagaccaa

SEQ ID NO: 1703401 - RNA, 19 nt, Homo sapiens
  misc_RNA (1)...(19): siRNA sense strand
ggaagugcuggaccuauga

SEQ ID NO: 1703402 - RNA, 19 nt, Homo sapiens
  misc_RNA (1)...(19): siRNA sense strand
cucagugccucuagcaaua

SEQ ID NO: 1703403 - RNA, 19 nt, Homo sapiens
  misc_RNA (1)...(19): siRNA sense strand
ggaaagguucgagauguga

SEQ ID NO: 1703404 - RNA, 19 nt, Homo sapiens
  misc_RNA (1)...(19): siRNA sense strand
gcagcaauggcaaacaauu

SEQ ID NO: 1703405 - RNA, 19 nt, Homo sapiens
  misc_RNA (1)...(19): siRNA sense strand
cgagaugugaggaugauuu

SEQ ID NO: 1703406 - RNA, 19 nt, Homo sapiens
  misc_RNA (1)...(19): siRNA sense strand
uaggaaagguucgagaugu

SEQ ID NO: 1703407 - RNA, 19 nt, Homo sapiens
  misc_RNA (1)...(19): siRNA sense strand
ggguacagguuugcagauu

SEQ ID NO: 1703408 - RNA, 19 nt, Homo sapiens
  misc_RNA (1)...(19): siRNA sense strand
gguacagguuugcagauuc

SEQ ID NO: 1703409 - RNA, 19 nt, Homo sapiens
  misc_RNA (1)...(19): siRNA sense strand
cacaaccuguuuccugauu

SEQ ID NO: 1703410 - RNA, 19 nt, Homo sapiens
  misc_RNA (1)...(19): siRNA sense strand
acagaugaguggcucuuug

SEQ ID NO: 1703411 - RNA, 19 nt, Homo sapiens
  misc_RNA (1)...(19): siRNA sense strand
ggaccuaugaggcuuuaug

SEQ ID NO: 1703412 - RNA, 19 nt, Homo sapiens
  misc_RNA (1)...(19): siRNA sense strand
aggaugaugugauugaaga

SEQ ID NO: 1703413 - RNA, 19 nt, Homo sapiens
  misc_RNA (1)...(19): siRNA sense strand
uaacauguuuaacccucaa

SEQ ID NO: 1703414 - RNA, 19 nt, Homo sapiens
  misc_RNA (1)...(19): siRNA sense strand
gaacaacuuaauggauuug

SEQ ID NO: 1703415 - RNA, 19 nt, Homo sapiens
  misc_RNA (1)...(19): siRNA sense strand
uaaggaugaugugauugaa

SEQ ID NO: 1703416 - RNA, 19 nt, Homo sapiens
  misc_RNA (1)...(19): siRNA sense strand
uaauggauuugaacuagca

SEQ ID NO: 1703417 - RNA, 19 nt, Homo sapiens
  misc_RNA (1)...(19): siRNA sense strand
aggauuaacuggccaacga

SEQ ID NO: 1703418 - RNA, 19 nt, Homo sapiens
  misc_RNA (1)...(19): siRNA sense strand
gcaaacaauuuacaaaagg

SEQ ID NO: 1703419 - RNA, 19 nt, Homo sapiens
  misc_RNA (1)...(19): siRNA sense strand
gcauauguaccucuuccaa

SEQ ID NO: 1703420 - RNA, 19 nt, Homo sapiens
  misc_RNA (1)...(19): siRNA sense strand
gaacaacuggucgucuuca

SEQ ID NO: 1703421 - RNA, 19 nt, Homo sapiens
  misc_RNA (1)...(19): siRNA sense strand
aaugauaacagcagcauau

SEQ ID NO: 1703422 - RNA, 19 nt, Homo sapiens
  misc_RNA (1)...(19): siRNA sense strand
agcaauggcaaacaauuua

SEQ ID NO: 1703423 - RNA, 19 nt, Homo sapiens
  misc_RNA (1)...(19): siRNA sense strand
uaugugaagugcccaucaa

SEQ ID NO: 1703424 - RNA, 19 nt, Homo sapiens
  misc_RNA (1)...(19): siRNA sense strand
gauuugcaaacaagacuuu

SEQ ID NO: 1703425 - RNA, 19 nt, Homo sapiens
  misc_RNA (1)...(19): siRNA sense strand
gaauugauuugggaacaac

SEQ ID NO: 1703426 - RNA, 19 nt, Homo sapiens
  misc_RNA (1)...(19): siRNA sense strand
gcucagugccucuagcaau

SEQ ID NO: 1703427 - RNA, 19 nt, Homo sapiens
  misc_RNA (1)...(19): siRNA sense strand
cuuaauggauuugaacuag

SEQ ID NO: 1703428 - RNA, 19 nt, Homo sapiens
  misc_RNA (1)...(19): siRNA sense strand
uuaaggaugaugugauuga

SEQ ID NO: 1703429 - RNA, 19 nt, Homo sapiens
  misc_RNA (1)...(19): siRNA sense strand
agaauucgaccaagggauu

SEQ ID NO: 1703430 - RNA, 19 nt, Homo sapiens
  misc_RNA (1)...(19): siRNA sense strand
uggaugggauaccgagauu

SEQ ID NO: 1703431 - RNA, 19 nt, Homo sapiens
  misc_RNA (1)...(19): siRNA sense strand
cugcagcaauggcaaacaa

SEQ ID NO: 1703432 - RNA, 19 nt, Homo sapiens
  misc_RNA (1)...(19): siRNA sense strand
caaccuguuuccugauucu

SEQ ID NO: 1703433 - RNA, 19 nt, Homo sapiens
  misc_RNA (1)...(19): siRNA sense strand
auguaccucuuccaacuua

SEQ ID NO: 1703434 - RNA, 19 nt, Homo sapiens
  misc_RNA (1)...(19): siRNA sense strand
guaggaaagguucgagaug

SEQ ID NO: 1703435 - RNA, 19 nt, Homo sapiens
  misc_RNA (1)...(19): siRNA sense strand
gaauucgaccaagggauuu

SEQ ID NO: 1703436 - RNA, 19 nt, Homo sapiens
  misc_RNA (1)...(19): siRNA sense strand
uggaagaauugaaaguauc

SEQ ID NO: 1703437 - RNA, 19 nt, Homo sapiens
  misc_RNA (1)...(19): siRNA sense strand
uaugugggcucauuacacu

SEQ ID NO: 1703438 - RNA, 19 nt, Homo sapiens
  misc_RNA (1)...(19): siRNA sense strand
gccucuagcaauaggauua

SEQ ID NO: 1703439 - RNA, 19 nt, Homo sapiens
  misc_RNA (1)...(19): siRNA sense strand
gcaauguguaugugaagug

SEQ ID NO: 1703440 - RNA, 19 nt, Homo sapiens
  misc_RNA (1)...(19): siRNA sense strand
ugaugugauugaagaaugu

SEQ ID NO: 1703441 - RNA, 19 nt, Homo sapiens
  misc_RNA (1)...(19): siRNA sense strand
gagauuaaggaugauguga

SEQ ID NO: 1703442 - RNA, 19 nt, Homo sapiens
  misc_RNA (1)...(19): siRNA sense strand
cagcaagcucuacagauga

SEQ ID NO: 1703443 - RNA, 19 nt, Homo sapiens
  misc_RNA (1)...(19): siRNA sense strand
ugacucagaaugugccaaa

SEQ ID NO: 1703444 - RNA, 19 nt, Homo sapiens
  misc_RNA (1)...(19): siRNA sense strand
cucauuacacuucaacaua

SEQ ID NO: 1703445 - RNA, 19 nt, Homo sapiens
  misc_RNA (1)...(19): siRNA sense strand
gagaugugaggaugauuuc

SEQ ID NO: 1703446 - RNA, 19 nt, Homo sapiens
  misc_RNA (1)...(19): siRNA sense strand
gaugugaggaugauuucug

SEQ ID NO: 1703447 - RNA, 19 nt, Homo sapiens
  misc_RNA (1)...(19): siRNA sense strand
acacaauguuuccaacucu

SEQ ID NO: 1703448 - RNA, 19 nt, Homo sapiens
  misc_RNA (1)...(19): siRNA sense strand
guacagguuugcagauucc

SEQ ID NO: 1703449 - RNA, 19 nt, Homo sapiens
  misc_RNA (1)...(19): siRNA sense strand
uucaagacguuccaaagga

SEQ ID NO: 1703450 - RNA, 19 nt, Homo sapiens
  misc_RNA (1)...(19): siRNA sense strand
aaauucagcucagggcaau

SEQ ID NO: 1703451 - RNA, 19 nt, Homo sapiens
  misc_RNA (1)...(19): siRNA sense strand
uuccaacucucuaacaugu

SEQ ID NO: 1703452 - RNA, 19 nt, Homo sapiens
  misc_RNA (1)...(19): siRNA sense strand
ggaacaacuggucgucuuc

SEQ ID NO: 1703453 - RNA, 19 nt, Homo sapiens
  misc_RNA (1)...(19): siRNA sense strand
gaugauggacagugaaacu

SEQ ID NO: 1703454 - RNA, 19 nt, Homo sapiens
  misc_RNA (1)...(19): siRNA sense strand
ggcaggugguuugcuggua

SEQ ID NO: 1703455 - RNA, 19 nt, Homo sapiens
  misc_RNA (1)...(19): siRNA sense strand
gagcugcagcaauggcaaa

SEQ ID NO: 1703456 - RNA, 19 nt, Homo sapiens
  misc_RNA (1)...(19): siRNA sense strand
gaauugcuuauguggaguu

SEQ ID NO: 1703457 - RNA, 19 nt, Homo sapiens
  misc_RNA (1)...(19): siRNA sense strand
caacuuaauggauuugaac

SEQ ID NO: 1703458 - RNA, 19 nt, Homo sapiens
  misc_RNA (1)...(19): siRNA sense strand
cagcucagggcaaugugua

SEQ ID NO: 1703459 - RNA, 19 nt, Homo sapiens
  misc_RNA (1)...(19): siRNA sense strand
caggugguuugcugguaaa

SEQ ID NO: 1703460 - RNA, 19 nt, Homo sapiens
  misc_RNA (1)...(19): siRNA sense strand
gcaauggcaaacaauuuac

SEQ ID NO: 1703461 - RNA, 19 nt, Homo sapiens
  misc_RNA (1)...(19): siRNA sense strand
gaagugcccaucaauugcu

SEQ ID NO: 1703462 - RNA, 19 nt, Homo sapiens
  misc_RNA (1)...(19): siRNA sense strand
aaaggacuggaauugauuu

SEQ ID NO: 1703463 - RNA, 19 nt, Homo sapiens
  misc_RNA (1)...(19): siRNA sense strand
gaaauucaagacguuccaa

SEQ ID NO: 1703464 - RNA, 19 nt, Homo sapiens
  misc_RNA (1)...(19): siRNA sense strand
caggaagaccaaugaaagu

SEQ ID NO: 1703465 - RNA, 19 nt, Homo sapiens
  misc_RNA (1)...(19): siRNA sense strand
uugcagaggguacagguuu

SEQ ID NO: 1703466 - RNA, 19 nt, Homo sapiens
  misc_RNA (1)...(19): siRNA sense strand
uucgagugcuaguucauuu

SEQ ID NO: 1703467 - RNA, 19 nt, Homo sapiens
  misc_RNA (1)...(19): siRNA sense strand
aaacagagcugcagcaaug

SEQ ID NO: 1703468 - RNA, 19 nt, Homo sapiens
  misc_RNA (1)...(19): siRNA sense strand
gaaaguauccagcugauga

SEQ ID NO: 1703469 - RNA, 19 nt, Homo sapiens
  misc_RNA (1)...(19): siRNA sense strand
ggaaaggacuggaauugau

SEQ ID NO: 1703470 - RNA, 19 nt, Homo sapiens
  misc_RNA (1)...(19): siRNA sense strand
caagggauauggauuuauu

SEQ ID NO: 1703471 - RNA, 19 nt, Homo sapiens
  misc_RNA (1)...(19): siRNA sense strand
gauaacagcagcauaugua

SEQ ID NO: 1703472 - RNA, 19 nt, Homo sapiens
  misc_RNA (1)...(19): siRNA sense strand
gauuaaggaugaugugauu

SEQ ID NO: 1703473 - RNA, 19 nt, Homo sapiens
  misc_RNA (1)...(19): siRNA sense strand
ggaacaacuuaauggauuu

SEQ ID NO: 1703474 - RNA, 19 nt, Homo sapiens
  misc_RNA (1)...(19): siRNA sense strand
ccaaaggaauugcuuaugu

SEQ ID NO: 1703475 - RNA, 19 nt, Homo sapiens
  misc_RNA (1)...(19): siRNA sense strand
gcaggugguuugcugguaa

SEQ ID NO: 1703476 - RNA, 19 nt, Homo sapiens
  misc_RNA (1)...(19): siRNA sense strand
ccaacucucuaacauguuu

SEQ ID NO: 1703477 - RNA, 19 nt, Homo sapiens
  misc_RNA (1)...(19): siRNA sense strand
gaaaggacuggaauugauu

SEQ ID NO: 1703478 - RNA, 19 nt, Homo sapiens
  misc_RNA (1)...(19): siRNA sense strand
caaaggaauugcuuaugug

SEQ ID NO: 1703479 - RNA, 19 nt, Homo sapiens
  misc_RNA (1)...(19): siRNA sense strand
gaaaguuggucauguuacu

SEQ ID NO: 1703480 - RNA, 19 nt, Homo sapiens
  misc_RNA (1)...(19): siRNA sense strand
gaugggauaccgagauuaa

SEQ ID NO: 1703481 - RNA, 19 nt, Homo sapiens
  misc_RNA (1)...(19): siRNA sense strand
caagggauuuggaagaguu

SEQ ID NO: 1703482 - RNA, 19 nt, Homo sapiens
  misc_RNA (1)...(19): siRNA sense strand
uggaacaacuuaauggauu

SEQ ID NO: 1703483 - RNA, 19 nt, Homo sapiens
  misc_RNA (1)...(19): siRNA sense strand
gacagaaauucaagacguu

SEQ ID NO: 1703484 - RNA, 19 nt, Homo sapiens
  misc_RNA (1)...(19): siRNA sense strand
gaagaaguuggaugggaua

SEQ ID NO: 1703485 - RNA, 19 nt, Homo sapiens
  misc_RNA (1)...(19): siRNA sense strand
gggaagugcuggaccuaug

SEQ ID NO: 1703486 - RNA, 19 nt, Homo sapiens
  misc_RNA (1)...(19): siRNA sense strand
gggaacaacuggucgucuu

SEQ ID NO: 1703487 - RNA, 19 nt, Homo sapiens
  misc_RNA (1)...(19): siRNA sense strand
auaccgagauuaaggauga

SEQ ID NO: 1703488 - RNA, 19 nt, Homo sapiens
  misc_RNA (1)...(19): siRNA sense strand
acagcaagcucuacagaug

SEQ ID NO: 1703489 - RNA, 19 nt, Homo sapiens
  misc_RNA (1)...(19): siRNA sense strand
ggaauugauuugggaacaa

SEQ ID NO: 1703490 - RNA, 19 nt, Homo sapiens
  misc_RNA (1)...(19): siRNA sense strand
gcaggaagaccaaugaaag

SEQ ID NO: 1703491 - RNA, 19 nt, Homo sapiens
  misc_RNA (1)...(19): siRNA sense strand
caacuuaccacaaccuguu

SEQ ID NO: 1703492 - RNA, 19 nt, Homo sapiens
  misc_RNA (1)...(19): siRNA sense strand
ucaaacagaagaagaaguu

SEQ ID NO: 1703493 - RNA, 19 nt, Homo sapiens
  misc_RNA (1)...(19): siRNA sense strand
gaguggcucuuuggcauuu

SEQ ID NO: 1703494 - RNA, 19 nt, Homo sapiens
  misc_RNA (1)...(19): siRNA sense strand
ggaagaccaaugaaaguug

SEQ ID NO: 1703495 - RNA, 19 nt, Homo sapiens
  misc_RNA (1)...(19): siRNA sense strand
gaacuggaaaggacuggaa

SEQ ID NO: 1703496 - RNA, 19 nt, Homo sapiens
  misc_RNA (1)...(19): siRNA sense strand
gugaagugcccaucaauug

SEQ ID NO: 1703497 - RNA, 19 nt, Homo sapiens
  misc_RNA (1)...(19): siRNA sense strand
gcacagcaagcucuacaga

SEQ ID NO: 1703498 - RNA, 19 nt, Homo sapiens
  misc_RNA (1)...(19): siRNA sense strand
cagcaauggcaaacaauuu

SEQ ID NO: 1703499 - RNA, 19 nt, Homo sapiens
  misc_RNA (1)...(19): siRNA sense strand
gcagcuggcggcaagaauu

SEQ ID NO: 1703500 - RNA, 19 nt, Homo sapiens
  misc_RNA (1)...(19): siRNA sense strand
gaacuagcaggaagaccaa

SEQ ID NO: 1703501 - RNA, 19 nt, Homo sapiens
  misc_RNA (1)...(19): siRNA sense strand
ggaagugcuggaccuauga

SEQ ID NO: 1703502 - RNA, 19 nt, Homo sapiens
  misc_RNA (1)...(19): siRNA sense strand
cucagugccucuagcaaua

SEQ ID NO: 1703503 - RNA, 19 nt, Homo sapiens
  misc_RNA (1)...(19): siRNA sense strand
ggaaagguucgagauguga

SEQ ID NO: 1703504 - RNA, 19 nt, Homo sapiens
  misc_RNA (1)...(19): siRNA sense strand
gcagcaauggcaaacaauu

SEQ ID NO: 1703505 - RNA, 19 nt, Homo sapiens
  misc_RNA (1)...(19): siRNA sense strand
cgagaugugaggaugauuu

SEQ ID NO: 1703506 - RNA, 19 nt, Homo sapiens
  misc_RNA (1)...(19): siRNA sense strand
uaggaaagguucgagaugu

SEQ ID NO: 1703507 - RNA, 19 nt, Homo sapiens
  misc_RNA (1)...(19): siRNA sense strand
ggguacagguuugcagauu

SEQ ID NO: 1703508 - RNA, 19 nt, Homo sapiens
  misc_RNA (1)...(19): siRNA sense strand
gguacagguuugcagauuc

SEQ ID NO: 1703509 - RNA, 19 nt, Homo sapiens
  misc_RNA (1)...(19): siRNA sense strand
cacaaccuguuuccugauu

SEQ ID NO: 1703510 - RNA, 19 nt, Homo sapiens
  misc_RNA (1)...(19): siRNA sense strand
acagaugaguggcucuuug

SEQ ID NO: 1703511 - RNA, 19 nt, Homo sapiens
  misc_RNA (1)...(19): siRNA sense strand
ggaccuaugaggcuuuaug

SEQ ID NO: 1703512 - RNA, 19 nt, Homo sapiens
  misc_RNA (1)...(19): siRNA sense strand
aggaugaugugauugaaga

SEQ ID NO: 1703513 - RNA, 19 nt, Homo sapiens
  misc_RNA (1)...(19): siRNA sense strand
uaacauguuuaacccucaa

SEQ ID NO: 1703514 - RNA, 19 nt, Homo sapiens
  misc_RNA (1)...(19): siRNA sense strand
gaacaacuuaauggauuug

SEQ ID NO: 1703515 - RNA, 19 nt, Homo sapiens
  misc_RNA (1)...(19): siRNA sense strand
uaaggaugaugugauugaa

SEQ ID NO: 1703516 - RNA, 19 nt, Homo sapiens
  misc_RNA (1)...(19): siRNA sense strand
uaauggauuugaacuagca

SEQ ID NO: 1703517 - RNA, 19 nt, Homo sapiens
  misc_RNA (1)...(19): siRNA sense strand
aggauuaacuggccaacga

SEQ ID NO: 1703518 - RNA, 19 nt, Homo sapiens
  misc_RNA (1)...(19): siRNA sense strand
gcaaacaauuuacaaaagg

SEQ ID NO: 1703519 - RNA, 19 nt, Homo sapiens
  misc_RNA (1)...(19): siRNA sense strand
gcauauguaccucuuccaa

SEQ ID NO: 1703520 - RNA, 19 nt, Homo sapiens
  misc_RNA (1)...(19): siRNA sense strand
gaacaacuggucgucuuca

SEQ ID NO: 1703521 - RNA, 19 nt, Homo sapiens
  misc_RNA (1)...(19): siRNA sense strand
aaugauaacagcagcauau

SEQ ID NO: 1703522 - RNA, 19 nt, Homo sapiens
  misc_RNA (1)...(19): siRNA sense strand
agcaauggcaaacaauuua

SEQ ID NO: 1703523 - RNA, 19 nt, Homo sapiens
  misc_RNA (1)...(19): siRNA sense strand
uaugugaagugcccaucaa

SEQ ID NO: 1703524 - RNA, 19 nt, Homo sapiens
  misc_RNA (1)...(19): siRNA sense strand
gauuugcaaacaagacuuu

SEQ ID NO: 1703525 - RNA, 19 nt, Homo sapiens
  misc_RNA (1)...(19): siRNA sense strand
gaauugauuugggaacaac

SEQ ID NO: 1703526 - RNA, 19 nt, Homo sapiens
  misc_RNA (1)...(19): siRNA sense strand
gcucagugccucuagcaau

SEQ ID NO: 1703527 - RNA, 19 nt, Homo sapiens
  misc_RNA (1)...(19): siRNA sense strand
cuuaauggauuugaacuag

SEQ ID NO: 1703528 - RNA, 19 nt, Homo sapiens
  misc_RNA (1)...(19): siRNA sense strand
uuaaggaugaugugauuga

SEQ ID NO: 1703529 - RNA, 19 nt, Homo sapiens
  misc_RNA (1)...(19): siRNA sense strand
agaauucgaccaagggauu

SEQ ID NO: 1703530 - RNA, 19 nt, Homo sapiens
  misc_RNA (1)...(19): siRNA sense strand
uggaugggauaccgagauu

SEQ ID NO: 1703531 - RNA, 19 nt, Homo sapiens
  misc_RNA (1)...(19): siRNA sense strand
cugcagcaauggcaaacaa

SEQ ID NO: 1703532 - RNA, 19 nt, Homo sapiens
  misc_RNA (1)...(19): siRNA sense strand
caaccuguuuccugauucu

SEQ ID NO: 1703533 - RNA, 19 nt, Homo sapiens
  misc_RNA (1)...(19): siRNA sense strand
auguaccucuuccaacuua

SEQ ID NO: 1703534 - RNA, 19 nt, Homo sapiens
  misc_RNA (1)...(19): siRNA sense strand
guaggaaagguucgagaug

SEQ ID NO: 1703535 - RNA, 19 nt, Homo sapiens
  misc_RNA (1)...(19): siRNA sense strand
gaauucgaccaagggauuu

SEQ ID NO: 1703536 - RNA, 19 nt, Homo sapiens
  misc_RNA (1)...(19): siRNA sense strand
uggaagaauugaaaguauc

SEQ ID NO: 1703537 - RNA, 19 nt, Homo sapiens
  misc_RNA (1)...(19): siRNA sense strand
uaugugggcucauuacacu

SEQ ID NO: 1703538 - RNA, 19 nt, Homo sapiens
  misc_RNA (1)...(19): siRNA sense strand
gccucuagcaauaggauua

SEQ ID NO: 1703539 - RNA, 19 nt, Homo sapiens
  misc_RNA (1)...(19): siRNA sense strand
gcaauguguaugugaagug

SEQ ID NO: 1703540 - RNA, 19 nt, Homo sapiens
  misc_RNA (1)...(19): siRNA sense strand
ugaugugauugaagaaugu

SEQ ID NO: 1703541 - RNA, 19 nt, Homo sapiens
  misc_RNA (1)...(19): siRNA sense strand
gagauuaaggaugauguga

SEQ ID NO: 1703542 - RNA, 19 nt, Homo sapiens
  misc_RNA (1)...(19): siRNA sense strand
cagcaagcucuacagauga

SEQ ID NO: 1703543 - RNA, 19 nt, Homo sapiens
  misc_RNA (1)...(19): siRNA sense strand
ugacucagaaugugccaaa

SEQ ID NO: 1703544 - RNA, 19 nt, Homo sapiens
  misc_RNA (1)...(19): siRNA sense strand
cucauuacacuucaacaua

SEQ ID NO: 1703545 - RNA, 19 nt, Homo sapiens
  misc_RNA (1)...(19): siRNA sense strand
gagaugugaggaugauuuc

SEQ ID NO: 1703546 - RNA, 19 nt, Homo sapiens
  misc_RNA (1)...(19): siRNA sense strand
gaugugaggaugauuucug

SEQ ID NO: 1703547 - RNA, 19 nt, Homo sapiens
  misc_RNA (1)...(19): siRNA sense strand
acacaauguuuccaacucu

SEQ ID NO: 1703548 - RNA, 19 nt, Homo sapiens
  misc_RNA (1)...(19): siRNA sense strand
guacagguuugcagauucc

SEQ ID NO: 1703549 - RNA, 19 nt, Homo sapiens
  misc_RNA (1)...(19): siRNA sense strand
uucaagacguuccaaagga

SEQ ID NO: 1703550 - RNA, 19 nt, Homo sapiens
  misc_RNA (1)...(19): siRNA sense strand
aaauucagcucagggcaau

SEQ ID NO: 1703551 - RNA, 19 nt, Homo sapiens
  misc_RNA (1)...(19): siRNA sense strand
uuccaacucucuaacaugu

SEQ ID NO: 1703552 - RNA, 19 nt, Homo sapiens
  misc_RNA (1)...(19): siRNA sense strand
ggaacaacuggucgucuuc

SEQ ID NO: 1703553 - RNA, 19 nt, Homo sapiens
  misc_RNA (1)...(19): siRNA sense strand
gaugauggacagugaaacu

SEQ ID NO: 1703554 - RNA, 19 nt, Homo sapiens
  misc_RNA (1)...(19): siRNA sense strand
ggcaggugguuugcuggua

SEQ ID NO: 1703555 - RNA, 19 nt, Homo sapiens
  misc_RNA (1)...(19): siRNA sense strand
gagcugcagcaauggcaaa

SEQ ID NO: 1703556 - RNA, 19 nt, Homo sapiens
  misc_RNA (1)...(19): siRNA sense strand
gaauugcuuauguggaguu

SEQ ID NO: 1703557 - RNA, 19 nt, Homo sapiens
  misc_RNA (1)...(19): siRNA sense strand
caacuuaauggauuugaac

SEQ ID NO: 1703558 - RNA, 19 nt, Homo sapiens
  misc_RNA (1)...(19): siRNA sense strand
cagcucagggcaaugugua

SEQ ID NO: 1703559 - RNA, 19 nt, Homo sapiens
  misc_RNA (1)...(19): siRNA sense strand
caggugguuugcugguaaa

SEQ ID NO: 1703560 - RNA, 19 nt, Homo sapiens
  misc_RNA (1)...(19): siRNA sense strand
gcaauggcaaacaauuuac

SEQ ID NO: 1703561 - RNA, 19 nt, Homo sapiens
  misc_RNA (1)...(19): siRNA sense strand
gaagugcccaucaauugcu

SEQ ID NO: 1703562 - RNA, 19 nt, Homo sapiens
  misc_RNA (1)...(19): siRNA sense strand
aaaggacuggaauugauuu

SEQ ID NO: 1703563 - RNA, 19 nt, Homo sapiens
  misc_RNA (1)...(19): siRNA sense strand
gaaauucaagacguuccaa

SEQ ID NO: 1703564 - RNA, 19 nt, Homo sapiens
  misc_RNA (1)...(19): siRNA sense strand
caggaagaccaaugaaagu

SEQ ID NO: 1703565 - RNA, 19 nt, Homo sapiens
  misc_RNA (1)...(19): siRNA sense strand
uugcagaggguacagguuu

SEQ ID NO: 1703566 - RNA, 19 nt, Homo sapiens
  misc_RNA (1)...(19): siRNA sense strand
uucgagugcuaguucauuu

SEQ ID NO: 1703567 - RNA, 19 nt, Homo sapiens
  misc_RNA (1)...(19): siRNA sense strand
aaacagagcugcagcaaug

SEQ ID NO: 1703568 - RNA, 19 nt, Homo sapiens
  misc_RNA (1)...(19): siRNA sense strand
gaaaguauccagcugauga

SEQ ID NO: 1703569 - RNA, 19 nt, Homo sapiens
  misc_RNA (1)...(19): siRNA sense strand
ggaaaggacuggaauugau

SEQ ID NO: 1703570 - RNA, 19 nt, Homo sapiens
  misc_RNA (1)...(19): siRNA sense strand
caagggauauggauuuauu

SEQ ID NO: 1703571 - RNA, 19 nt, Homo sapiens
  misc_RNA (1)...(19): siRNA sense strand
gauaacagcagcauaugua

SEQ ID NO: 1703572 - RNA, 19 nt, Homo sapiens
  misc_RNA (1)...(19): siRNA sense strand
gauuaaggaugaugugauu

SEQ ID NO: 1703573 - RNA, 19 nt, Homo sapiens
  misc_RNA (1)...(19): siRNA sense strand
ggaacaacuuaauggauuu

SEQ ID NO: 1703574 - RNA, 19 nt, Homo sapiens
  misc_RNA (1)...(19): siRNA sense strand
ccaaaggaauugcuuaugu

SEQ ID NO: 1703575 - RNA, 19 nt, Homo sapiens
  misc_RNA (1)...(19): siRNA sense strand
gcaggugguuugcugguaa

SEQ ID NO: 1703576 - RNA, 19 nt, Homo sapiens
  misc_RNA (1)...(19): siRNA sense strand
ccaacucucuaacauguuu

SEQ ID NO: 1703577 - RNA, 19 nt, Homo sapiens
  misc_RNA (1)...(19): siRNA sense strand
gaaaggacuggaauugauu

SEQ ID NO: 1703578 - RNA, 19 nt, Homo sapiens
  misc_RNA (1)...(19): siRNA sense strand
caaaggaauugcuuaugug

SEQ ID NO: 1703579 - RNA, 19 nt, Homo sapiens
  misc_RNA (1)...(19): siRNA sense strand
gaaaguuggucauguuacu

SEQ ID NO: 1703580 - RNA, 19 nt, Homo sapiens
  misc_RNA (1)...(19): siRNA sense strand
gaugggauaccgagauuaa

SEQ ID NO: 1703581 - RNA, 19 nt, Homo sapiens
  misc_RNA (1)...(19): siRNA sense strand
caagggauuuggaagaguu

SEQ ID NO: 1703582 - RNA, 19 nt, Homo sapiens
  misc_RNA (1)...(19): siRNA sense strand
uggaacaacuuaauggauu

SEQ ID NO: 1703583 - RNA, 19 nt, Homo sapiens
  misc_RNA (1)...(19): siRNA sense strand
gacagaaauucaagacguu

SEQ ID NO: 1703584 - RNA, 19 nt, Homo sapiens
  misc_RNA (1)...(19): siRNA sense strand
gaagaaguuggaugggaua

SEQ ID NO: 1703585 - RNA, 19 nt, Homo sapiens
  misc_RNA (1)...(19): siRNA sense strand
gggaagugcuggaccuaug

SEQ ID NO: 1703586 - RNA, 19 nt, Homo sapiens
  misc_RNA (1)...(19): siRNA sense strand
gggaacaacuggucgucuu

SEQ ID NO: 1703587 - RNA, 19 nt, Homo sapiens
  misc_RNA (1)...(19): siRNA sense strand
auaccgagauuaaggauga

SEQ ID NO: 1703588 - RNA, 19 nt, Homo sapiens
  misc_RNA (1)...(19): siRNA sense strand
acagcaagcucuacagaug

SEQ ID NO: 1703589 - RNA, 19 nt, Homo sapiens
  misc_RNA (1)...(19): siRNA sense strand
ggaauugauuugggaacaa

SEQ ID NO: 1703590 - RNA, 19 nt, Homo sapiens
  misc_RNA (1)...(19): siRNA sense strand
gcaggaagaccaaugaaag

SEQ ID NO: 1703591 - RNA, 19 nt, Homo sapiens
  misc_RNA (1)...(19): siRNA sense strand
caacuuaccacaaccuguu

SEQ ID NO: 1703592 - RNA, 19 nt, Homo sapiens
  misc_RNA (1)...(19): siRNA sense strand
ucaaacagaagaagaaguu

SEQ ID NO: 1703593 - RNA, 19 nt, Homo sapiens
  misc_RNA (1)...(19): siRNA sense strand
gaguggcucuuuggcauuu

SEQ ID NO: 1703594 - RNA, 19 nt, Homo sapiens
  misc_RNA (1)...(19): siRNA sense strand
ggaagaccaaugaaaguug

SEQ ID NO: 1703595 - RNA, 19 nt, Homo sapiens
  misc_RNA (1)...(19): siRNA sense strand
gaacuggaaaggacuggaa

SEQ ID NO: 1703596 - RNA, 19 nt, Homo sapiens
  misc_RNA (1)...(19): siRNA sense strand
gugaagugcccaucaauug

SEQ ID NO: 1703597 - RNA, 19 nt, Homo sapiens
  misc_RNA (1)...(19): siRNA sense strand
gcacagcaagcucuacaga

SEQ ID NO: 1703598 - RNA, 19 nt, Homo sapiens
  misc_RNA (1)...(19): siRNA sense strand
cagcaauggcaaacaauuu

SEQ ID NO: 1703599 - RNA, 19 nt, Homo sapiens
  misc_RNA (1)...(19): siRNA sense strand
gcagcuggcggcaagaauu

SEQ ID NO: 1703600 - RNA, 19 nt, Homo sapiens
  misc_RNA (1)...(19): siRNA sense strand
gaacuagcaggaagaccaa

SEQ ID NO: 1703601 - RNA, 19 nt, Homo sapiens
  misc_RNA (1)...(19): siRNA sense strand
ggaagugcuggaccuauga

SEQ ID NO: 1703602 - RNA, 19 nt, Homo sapiens
  misc_RNA (1)...(19): siRNA sense strand
cucagugccucuagcaaua

SEQ ID NO: 1703603 - RNA, 19 nt, Homo sapiens
  misc_RNA (1)...(19): siRNA sense strand
ggaaagguucgagauguga

SEQ ID NO: 1703604 - RNA, 19 nt, Homo sapiens
  misc_RNA (1)...(19): siRNA sense strand
gcagcaauggcaaacaauu

SEQ ID NO: 1703605 - RNA, 19 nt, Homo sapiens
  misc_RNA (1)...(19): siRNA sense strand
cgagaugugaggaugauuu

SEQ ID NO: 1703606 - RNA, 19 nt, Homo sapiens
  misc_RNA (1)...(19): siRNA sense strand
uaggaaagguucgagaugu

SEQ ID NO: 1703607 - RNA, 19 nt, Homo sapiens
  misc_RNA (1)...(19): siRNA sense strand
ggguacagguuugcagauu

SEQ ID NO: 1703608 - RNA, 19 nt, Homo sapiens
  misc_RNA (1)...(19): siRNA sense strand
gguacagguuugcagauuc

SEQ ID NO: 1703609 - RNA, 19 nt, Homo sapiens
  misc_RNA (1)...(19): siRNA sense strand
cacaaccuguuuccugauu

SEQ ID NO: 1703610 - RNA, 19 nt, Homo sapiens
  misc_RNA (1)...(19): siRNA sense strand
acagaugaguggcucuuug

SEQ ID NO: 1703611 - RNA, 19 nt, Homo sapiens
  misc_RNA (1)...(19): siRNA sense strand
ggaccuaugaggcuuuaug

SEQ ID NO: 1703612 - RNA, 19 nt, Homo sapiens
  misc_RNA (1)...(19): siRNA sense strand
aggaugaugugauugaaga

SEQ ID NO: 1703613 - RNA, 19 nt, Homo sapiens
  misc_RNA (1)...(19): siRNA sense strand
uaacauguuuaacccucaa

SEQ ID NO: 1703614 - RNA, 19 nt, Homo sapiens
  misc_RNA (1)...(19): siRNA sense strand
gaacaacuuaauggauuug

SEQ ID NO: 1703615 - RNA, 19 nt, Homo sapiens
  misc_RNA (1)...(19): siRNA sense strand
uaaggaugaugugauugaa

SEQ ID NO: 1703616 - RNA, 19 nt, Homo sapiens
  misc_RNA (1)...(19): siRNA sense strand
uaauggauuugaacuagca

SEQ ID NO: 1703617 - RNA, 19 nt, Homo sapiens
  misc_RNA (1)...(19): siRNA sense strand
aggauuaacuggccaacga

SEQ ID NO: 1703618 - RNA, 19 nt, Homo sapiens
  misc_RNA (1)...(19): siRNA sense strand
gcaaacaauuuacaaaagg

SEQ ID NO: 1703619 - RNA, 19 nt, Homo sapiens
  misc_RNA (1)...(19): siRNA sense strand
gcauauguaccucuuccaa

SEQ ID NO: 1703620 - RNA, 19 nt, Homo sapiens
  misc_RNA (1)...(19): siRNA sense strand
gaacaacuggucgucuuca

SEQ ID NO: 1703621 - RNA, 19 nt, Homo sapiens
  misc_RNA (1)...(19): siRNA sense strand
aaugauaacagcagcauau

SEQ ID NO: 1703622 - RNA, 19 nt, Homo sapiens
  misc_RNA (1)...(19): siRNA sense strand
agcaauggcaaacaauuua

SEQ ID NO: 1703623 - RNA, 19 nt, Homo sapiens
  misc_RNA (1)...(19): siRNA sense strand
uaugugaagugcccaucaa

SEQ ID NO: 1703624 - RNA, 19 nt, Homo sapiens
  misc_RNA (1)...(19): siRNA sense strand
gauuugcaaacaagacuuu

SEQ ID NO: 1703625 - RNA, 19 nt, Homo sapiens
  misc_RNA (1)...(19): siRNA sense strand
gaauugauuugggaacaac

SEQ ID NO: 1703626 - RNA, 19 nt, Homo sapiens
  misc_RNA (1)...(19): siRNA sense strand
gcucagugccucuagcaau

SEQ ID NO: 1703627 - RNA, 19 nt, Homo sapiens
  misc_RNA (1)...(19): siRNA sense strand
cuuaauggauuugaacuag

SEQ ID NO: 1703628 - RNA, 19 nt, Homo sapiens
  misc_RNA (1)...(19): siRNA sense strand
uuaaggaugaugugauuga

SEQ ID NO: 1703629 - RNA, 19 nt, Homo sapiens
  misc_RNA (1)...(19): siRNA sense strand
agaauucgaccaagggauu

SEQ ID NO: 1703630 - RNA, 19 nt, Homo sapiens
  misc_RNA (1)...(19): siRNA sense strand
uggaugggauaccgagauu

SEQ ID NO: 1703631 - RNA, 19 nt, Homo sapiens
  misc_RNA (1)...(19): siRNA sense strand
cugcagcaauggcaaacaa

SEQ ID NO: 1703632 - RNA, 19 nt, Homo sapiens
  misc_RNA (1)...(19): siRNA sense strand
caaccuguuuccugauucu

SEQ ID NO: 1703633 - RNA, 19 nt, Homo sapiens
  misc_RNA (1)...(19): siRNA sense strand
auguaccucuuccaacuua

SEQ ID NO: 1703634 - RNA, 19 nt, Homo sapiens
  misc_RNA (1)...(19): siRNA sense strand
guaggaaagguucgagaug

SEQ ID NO: 1703635 - RNA, 19 nt, Homo sapiens
  misc_RNA (1)...(19): siRNA sense strand
gaauucgaccaagggauuu

SEQ ID NO: 1703636 - RNA, 19 nt, Homo sapiens
  misc_RNA (1)...(19): siRNA sense strand
uggaagaauugaaaguauc

SEQ ID NO: 1703637 - RNA, 19 nt, Homo sapiens
  misc_RNA (1)...(19): siRNA sense strand
uaugugggcucauuacacu

SEQ ID NO: 1703638 - RNA, 19 nt, Homo sapiens
  misc_RNA (1)...(19): siRNA sense strand
gccucuagcaauaggauua

SEQ ID NO: 1703639 - RNA, 19 nt, Homo sapiens
  misc_RNA (1)...(19): siRNA sense strand
gcaauguguaugugaagug

SEQ ID NO: 1703640 - RNA, 19 nt, Homo sapiens
  misc_RNA (1)...(19): siRNA sense strand
ugaugugauugaagaaugu

SEQ ID NO: 1703641 - RNA, 19 nt, Homo sapiens
  misc_RNA (1)...(19): siRNA sense strand
gagauuaaggaugauguga

SEQ ID NO: 1703642 - RNA, 19 nt, Homo sapiens
  misc_RNA (1)...(19): siRNA sense strand
cagcaagcucuacagauga

SEQ ID NO: 1703643 - RNA, 19 nt, Homo sapiens
  misc_RNA (1)...(19): siRNA sense strand
ugacucagaaugugccaaa

SEQ ID NO: 1703644 - RNA, 19 nt, Homo sapiens
  misc_RNA (1)...(19): siRNA sense strand
cucauuacacuucaacaua

SEQ ID NO: 1703645 - RNA, 19 nt, Homo sapiens
  misc_RNA (1)...(19): siRNA sense strand
gagaugugaggaugauuuc

SEQ ID NO: 1703646 - RNA, 19 nt, Homo sapiens
  misc_RNA (1)...(19): siRNA sense strand
gaugugaggaugauuucug

SEQ ID NO: 1703647 - RNA, 19 nt, Homo sapiens
  misc_RNA (1)...(19): siRNA sense strand
acacaauguuuccaacucu

SEQ ID NO: 1703648 - RNA, 19 nt, Homo sapiens
  misc_RNA (1)...(19): siRNA sense strand
guacagguuugcagauucc

SEQ ID NO: 1703649 - RNA, 19 nt, Homo sapiens
  misc_RNA (1)...(19): siRNA sense strand
uucaagacguuccaaagga

SEQ ID NO: 1703650 - RNA, 19 nt, Homo sapiens
  misc_RNA (1)...(19): siRNA sense strand
aaauucagcucagggcaau

SEQ ID NO: 1703651 - RNA, 19 nt, Homo sapiens
  misc_RNA (1)...(19): siRNA sense strand
uuccaacucucuaacaugu

SEQ ID NO: 1703652 - RNA, 19 nt, Homo sapiens
  misc_RNA (1)...(19): siRNA sense strand
ggaacaacuggucgucuuc

SEQ ID NO: 1703653 - RNA, 19 nt, Homo sapiens
  misc_RNA (1)...(19): siRNA sense strand
gaugauggacagugaaacu

SEQ ID NO: 1703654 - RNA, 19 nt, Homo sapiens
  misc_RNA (1)...(19): siRNA sense strand
ggcaggugguuugcuggua

SEQ ID NO: 1703655 - RNA, 19 nt, Homo sapiens
  misc_RNA (1)...(19): siRNA sense strand
gagcugcagcaauggcaaa

SEQ ID NO: 1703656 - RNA, 19 nt, Homo sapiens
  misc_RNA (1)...(19): siRNA sense strand
gaauugcuuauguggaguu

SEQ ID NO: 1703657 - RNA, 19 nt, Homo sapiens
  misc_RNA (1)...(19): siRNA sense strand
caacuuaauggauuugaac

SEQ ID NO: 1703658 - RNA, 19 nt, Homo sapiens
  misc_RNA (1)...(19): siRNA sense strand
cagcucagggcaaugugua

SEQ ID NO: 1703659 - RNA, 19 nt, Homo sapiens
  misc_RNA (1)...(19): siRNA sense strand
caggugguuugcugguaaa

SEQ ID NO: 1703660 - RNA, 19 nt, Homo sapiens
  misc_RNA (1)...(19): siRNA sense strand
gcaauggcaaacaauuuac

SEQ ID NO: 1703661 - RNA, 19 nt, Homo sapiens
  misc_RNA (1)...(19): siRNA sense strand
gaagugcccaucaauugcu

SEQ ID NO: 1703662 - RNA, 19 nt, Homo sapiens
  misc_RNA (1)...(19): siRNA sense strand
aaaggacuggaauugauuu

SEQ ID NO: 1703663 - RNA, 19 nt, Homo sapiens
  misc_RNA (1)...(19): siRNA sense strand
gaaauucaagacguuccaa

SEQ ID NO: 1703664 - RNA, 19 nt, Homo sapiens
  misc_RNA (1)...(19): siRNA sense strand
caggaagaccaaugaaagu

SEQ ID NO: 1703665 - RNA, 19 nt, Homo sapiens
  misc_RNA (1)...(19): siRNA sense strand
uugcagaggguacagguuu

SEQ ID NO: 1703666 - RNA, 19 nt, Homo sapiens
  misc_RNA (1)...(19): siRNA sense strand
uucgagugcuaguucauuu

SEQ ID NO: 1703667 - RNA, 19 nt, Homo sapiens
  misc_RNA (1)...(19): siRNA sense strand
aaacagagcugcagcaaug

SEQ ID NO: 1703668 - RNA, 19 nt, Homo sapiens
  misc_RNA (1)...(19): siRNA sense strand
gaaagaaagcgaaguagaa

SEQ ID NO: 1703669 - RNA, 19 nt, Homo sapiens
  misc_RNA (1)...(19): siRNA sense strand
gaaaguauccagcugauga

SEQ ID NO: 1703670 - RNA, 19 nt, Homo sapiens
  misc_RNA (1)...(19): siRNA sense strand
ggaaaggacuggaauugau

SEQ ID NO: 1703671 - RNA, 19 nt, Homo sapiens
  misc_RNA (1)...(19): siRNA sense strand
caagggauauggauuuauu

SEQ ID NO: 1703672 - RNA, 19 nt, Homo sapiens
  misc_RNA (1)...(19): siRNA sense strand
gauaacagcagcauaugua

SEQ ID NO: 1703673 - RNA, 19 nt, Homo sapiens
  misc_RNA (1)...(19): siRNA sense strand
gagagaaccuauugauaau

SEQ ID NO: 1703674 - RNA, 19 nt, Homo sapiens
  misc_RNA (1)...(19): siRNA sense strand
gauuaaggaugaugugauu

SEQ ID NO: 1703675 - RNA, 19 nt, Homo sapiens
  misc_RNA (1)...(19): siRNA sense strand
ugagagaaccuauugauaa

SEQ ID NO: 1703676 - RNA, 19 nt, Homo sapiens
  misc_RNA (1)...(19): siRNA sense strand
ggaacaacuuaauggauuu

SEQ ID NO: 1703677 - RNA, 19 nt, Homo sapiens
  misc_RNA (1)...(19): siRNA sense strand
ccaaaggaauugcuuaugu

SEQ ID NO: 1703678 - RNA, 19 nt, Homo sapiens
  misc_RNA (1)...(19): siRNA sense strand
ccucauagcaucaaauuaa

SEQ ID NO: 1703679 - RNA, 19 nt, Homo sapiens
  misc_RNA (1)...(19): siRNA sense strand
gcaggugguuugcugguaa

SEQ ID NO: 1703680 - RNA, 19 nt, Homo sapiens
  misc_RNA (1)...(19): siRNA sense strand
ccaacucucuaacauguuu

SEQ ID NO: 1703681 - RNA, 19 nt, Homo sapiens
  misc_RNA (1)...(19): siRNA sense strand
gaaaggacuggaauugauu

SEQ ID NO: 1703682 - RNA, 19 nt, Homo sapiens
  misc_RNA (1)...(19): siRNA sense strand
caaaggaauugcuuaugug

SEQ ID NO: 1703683 - RNA, 19 nt, Homo sapiens
  misc_RNA (1)...(19): siRNA sense strand
gaagcgaaguagagacaga

SEQ ID NO: 1703684 - RNA, 19 nt, Homo sapiens
  misc_RNA (1)...(19): siRNA sense strand
gaaaguuggucauguuacu

SEQ ID NO: 1703685 - RNA, 19 nt, Homo sapiens
  misc_RNA (1)...(19): siRNA sense strand
aagauuggguugccucaua

SEQ ID NO: 1703686 - RNA, 19 nt, Homo sapiens
  misc_RNA (1)...(19): siRNA sense strand
caagggauuuggaagaguu

SEQ ID NO: 1703687 - RNA, 19 nt, Homo sapiens
  misc_RNA (1)...(19): siRNA sense strand
gaugggauaccgagauuaa

SEQ ID NO: 1703688 - RNA, 19 nt, Homo sapiens
  misc_RNA (1)...(19): siRNA sense strand
caagagcccugugagagaa

SEQ ID NO: 1703689 - RNA, 19 nt, Homo sapiens
  misc_RNA (1)...(19): siRNA sense strand
uggaacaacuuaauggauu

SEQ ID NO: 1703690 - RNA, 19 nt, Homo sapiens
  misc_RNA (1)...(19): siRNA sense strand
gacagaaauucaagacguu

SEQ ID NO: 1703691 - RNA, 19 nt, Homo sapiens
  misc_RNA (1)...(19): siRNA sense strand
gaacggaagcgaaguagag

SEQ ID NO: 1703692 - RNA, 19 nt, Homo sapiens
  misc_RNA (1)...(19): siRNA sense strand
gaagaaguuggaugggaua

SEQ ID NO: 1703693 - RNA, 19 nt, Homo sapiens
  misc_RNA (1)...(19): siRNA sense strand
gggaagugcuggaccuaug

SEQ ID NO: 1703694 - RNA, 19 nt, Homo sapiens
  misc_RNA (1)...(19): siRNA sense strand
gagcagaagucguagucau

SEQ ID NO: 1703695 - RNA, 19 nt, Homo sapiens
  misc_RNA (1)...(19): siRNA sense strand
auaccgagauuaaggauga

SEQ ID NO: 1703696 - RNA, 19 nt, Homo sapiens
  misc_RNA (1)...(19): siRNA sense strand
acagcaagcucuacagaug

SEQ ID NO: 1703697 - RNA, 19 nt, Homo sapiens
  misc_RNA (1)...(19): siRNA sense strand
gggaacaacuggucgucuu

SEQ ID NO: 1703698 - RNA, 19 nt, Homo sapiens
  misc_RNA (1)...(19): siRNA sense strand
ggaauugauuugggaacaa

SEQ ID NO: 1703699 - RNA, 19 nt, Homo sapiens
  misc_RNA (1)...(19): siRNA sense strand
gcaggaagaccaaugaaag

SEQ ID NO: 1703700 - RNA, 19 nt, Homo sapiens
  misc_RNA (1)...(19): siRNA sense strand
caacuuaccacaaccuguu

SEQ ID NO: 1703701 - RNA, 19 nt, Homo sapiens
  misc_RNA (1)...(19): siRNA sense strand
ucaaacagaagaagaaguu

SEQ ID NO: 1703702 - RNA, 19 nt, Homo sapiens
  misc_RNA (1)...(19): siRNA sense strand
gaguggcucuuuggcauuu

SEQ ID NO: 1703703 - RNA, 19 nt, Homo sapiens
  misc_RNA (1)...(19): siRNA sense strand
ggaagaccaaugaaaguug

SEQ ID NO: 1703704 - RNA, 19 nt, Homo sapiens
  misc_RNA (1)...(19): siRNA sense strand
gaacuggaaaggacuggaa

SEQ ID NO: 1703705 - RNA, 19 nt, Homo sapiens
  misc_RNA (1)...(19): siRNA sense strand
gugaagugcccaucaauug

SEQ ID NO: 1703706 - RNA, 19 nt, Homo sapiens
  misc_RNA (1)...(19): siRNA sense strand
cgaaguagaagcaaagaga

SEQ ID NO: 1703707 - RNA, 19 nt, Homo sapiens
  misc_RNA (1)...(19): siRNA sense strand
gcacagcaagcucuacaga

SEQ ID NO: 1703708 - RNA, 19 nt, Homo sapiens
  misc_RNA (1)...(19): siRNA sense strand
gcagaagucguagucauga

SEQ ID NO: 1703709 - RNA, 19 nt, Homo sapiens
  misc_RNA (1)...(19): siRNA sense strand
cgaaagagaagcaaaagua

SEQ ID NO: 1703710 - RNA, 19 nt, Homo sapiens
  misc_RNA (1)...(19): siRNA sense strand
cagcaauggcaaacaauuu

SEQ ID NO: 1703711 - RNA, 19 nt, Homo sapiens
  misc_RNA (1)...(19): siRNA sense strand
gugagagaaccuauugaua

SEQ ID NO: 1703712 - RNA, 19 nt, Homo sapiens
  misc_RNA (1)...(19): siRNA sense strand
gaacuagcaggaagaccaa

SEQ ID NO: 1703713 - RNA, 19 nt, Homo sapiens
  misc_RNA (1)...(19): siRNA sense strand
ggaagugcuggaccuauga

SEQ ID NO: 1703714 - RNA, 19 nt, Homo sapiens
  misc_RNA (1)...(19): siRNA sense strand
gcagcuggcggcaagaauu

SEQ ID NO: 1703715 - RNA, 19 nt, Homo sapiens
  misc_RNA (1)...(19): siRNA sense strand
ggaaagguucgagauguga

SEQ ID NO: 1703716 - RNA, 19 nt, Homo sapiens
  misc_RNA (1)...(19): siRNA sense strand
gaaagagaagcaaaaguaa

SEQ ID NO: 1703717 - RNA, 19 nt, Homo sapiens
  misc_RNA (1)...(19): siRNA sense strand
gcagcaauggcaaacaauu

SEQ ID NO: 1703718 - RNA, 19 nt, Homo sapiens
  misc_RNA (1)...(19): siRNA sense strand
cucagugccucuagcaaua

SEQ ID NO: 1703719 - RNA, 19 nt, Homo sapiens
  misc_RNA (1)...(19): siRNA sense strand
gaacgaaagagaagcaaaa

SEQ ID NO: 1703720 - RNA, 19 nt, Homo sapiens
  misc_RNA (1)...(19): siRNA sense strand
ggguacagguuugcagauu

SEQ ID NO: 1703721 - RNA, 19 nt, Homo sapiens
  misc_RNA (1)...(19): siRNA sense strand
caacggccaugaagaacgu

SEQ ID NO: 1703722 - RNA, 19 nt, Homo sapiens
  misc_RNA (1)...(19): siRNA sense strand
cgagaugugaggaugauuu

SEQ ID NO: 1703723 - RNA, 19 nt, Homo sapiens
  misc_RNA (1)...(19): siRNA sense strand
uaggaaagguucgagaugu

SEQ ID NO: 1703724 - RNA, 19 nt, Homo sapiens
  misc_RNA (1)...(19): siRNA sense strand
gcaaaaguccauucagaaa

SEQ ID NO: 1703725 - RNA, 19 nt, Homo sapiens
  misc_RNA (1)...(19): siRNA sense strand
gcaaaagccgugaaagaaa

SEQ ID NO: 1703726 - RNA, 19 nt, Homo sapiens
  misc_RNA (1)...(19): siRNA sense strand
cacaaccuguuuccugauu

SEQ ID NO: 1703727 - RNA, 19 nt, Homo sapiens
  misc_RNA (1)...(19): siRNA sense strand
acagaugaguggcucuuug

SEQ ID NO: 1703728 - RNA, 19 nt, Homo sapiens
  misc_RNA (1)...(19): siRNA sense strand
gguacagguuugcagauuc

SEQ ID NO: 1703729 - RNA, 19 nt, Homo sapiens
  misc_RNA (1)...(19): siRNA sense strand
ggaccuaugaggcuuuaug

SEQ ID NO: 1703730 - RNA, 19 nt, Homo sapiens
  misc_RNA (1)...(19): siRNA sense strand
aggaugaugugauugaaga

SEQ ID NO: 1703731 - RNA, 19 nt, Homo sapiens
  misc_RNA (1)...(19): siRNA sense strand
uaacauguuuaacccucaa

SEQ ID NO: 1703732 - RNA, 19 nt, Homo sapiens
  misc_RNA (1)...(19): siRNA sense strand
aaauuaagcagacgacguu

SEQ ID NO: 1703733 - RNA, 19 nt, Homo sapiens
  misc_RNA (1)...(19): siRNA sense strand
uaaggaugaugugauugaa

SEQ ID NO: 1703734 - RNA, 19 nt, Homo sapiens
  misc_RNA (1)...(19): siRNA sense strand
uaauggauuugaacuagca

SEQ ID NO: 1703735 - RNA, 19 nt, Homo sapiens
  misc_RNA (1)...(19): siRNA sense strand
gaacaacuuaauggauuug

SEQ ID NO: 1703736 - RNA, 19 nt, Homo sapiens
  misc_RNA (1)...(19): siRNA sense strand
aaagcgaaguagaagcaaa

SEQ ID NO: 1703737 - RNA, 19 nt, Homo sapiens
  misc_RNA (1)...(19): siRNA sense strand
ugaaagaaagcgaaguaga

SEQ ID NO: 1703738 - RNA, 19 nt, Homo sapiens
  misc_RNA (1)...(19): siRNA sense strand
aggauuaacuggccaacga

SEQ ID NO: 1703739 - RNA, 19 nt, Homo sapiens
  misc_RNA (1)...(19): siRNA sense strand
gcaaacaauuuacaaaagg

SEQ ID NO: 1703740 - RNA, 19 nt, Homo sapiens
  misc_RNA (1)...(19): siRNA sense strand
gcauauguaccucuuccaa

SEQ ID NO: 1703741 - RNA, 19 nt, Homo sapiens
  misc_RNA (1)...(19): siRNA sense strand
cgugaaagaaagcgaagua

SEQ ID NO: 1703742 - RNA, 19 nt, Homo sapiens
  misc_RNA (1)...(19): siRNA sense strand
gaacaacuggucgucuuca

SEQ ID NO: 1703743 - RNA, 19 nt, Homo sapiens
  misc_RNA (1)...(19): siRNA sense strand
aaugauaacagcagcauau

SEQ ID NO: 1703744 - RNA, 19 nt, Homo sapiens
  misc_RNA (1)...(19): siRNA sense strand
gcucagugccucuagcaau

SEQ ID NO: 1703745 - RNA, 19 nt, Homo sapiens
  misc_RNA (1)...(19): siRNA sense strand
uaugugaagugcccaucaa

SEQ ID NO: 1703746 - RNA, 19 nt, Homo sapiens
  misc_RNA (1)...(19): siRNA sense strand
gauuugcaaacaagacuuu

SEQ ID NO: 1703747 - RNA, 19 nt, Homo sapiens
  misc_RNA (1)...(19): siRNA sense strand
gagcaaaagccgugaaaga

SEQ ID NO: 1703748 - RNA, 19 nt, Homo sapiens
  misc_RNA (1)...(19): siRNA sense strand
gaauugauuugggaacaac

SEQ ID NO: 1703749 - RNA, 19 nt, Homo sapiens
  misc_RNA (1)...(19): siRNA sense strand
agcaauggcaaacaauuua

SEQ ID NO: 1703750 - RNA, 19 nt, Homo sapiens
  misc_RNA (1)...(19): siRNA sense strand
agcaagagcagaagucgua

SEQ ID NO: 1703751 - RNA, 19 nt, Homo sapiens
  misc_RNA (1)...(19): siRNA sense strand
uuaaggaugaugugauuga

SEQ ID NO: 1703752 - RNA, 19 nt, Homo sapiens
  misc_RNA (1)...(19): siRNA sense strand
uggaugggauaccgagauu

SEQ ID NO: 1703753 - RNA, 19 nt, Homo sapiens
  misc_RNA (1)...(19): siRNA sense strand
cuuaauggauuugaacuag

SEQ ID NO: 1703754 - RNA, 19 nt, Homo sapiens
  misc_RNA (1)...(19): siRNA sense strand
agaauucgaccaagggauu

SEQ ID NO: 1703755 - RNA, 19 nt, Homo sapiens
  misc_RNA (1)...(19): siRNA sense strand
gaauucgaccaagggauuu

SEQ ID NO: 1703756 - RNA, 19 nt, Homo sapiens
  misc_RNA (1)...(19): siRNA sense strand
caaccuguuuccugauucu

SEQ ID NO: 1703757 - RNA, 19 nt, Homo sapiens
  misc_RNA (1)...(19): siRNA sense strand
auguaccucuuccaacuua

SEQ ID NO: 1703758 - RNA, 19 nt, Homo sapiens
  misc_RNA (1)...(19): siRNA sense strand
caaaagccgugaaagaaag

SEQ ID NO: 1703759 - RNA, 19 nt, Homo sapiens
  misc_RNA (1)...(19): siRNA sense strand
cagaagucguagucaugaa

SEQ ID NO: 1703760 - RNA, 19 nt, Homo sapiens
  misc_RNA (1)...(19): siRNA sense strand
uggaagaauugaaaguauc

SEQ ID NO: 1703761 - RNA, 19 nt, Homo sapiens
  misc_RNA (1)...(19): siRNA sense strand
uaugugggcucauuacacu

SEQ ID NO: 1703762 - RNA, 19 nt, Homo sapiens
  misc_RNA (1)...(19): siRNA sense strand
cugcagcaauggcaaacaa

SEQ ID NO: 1703763 - RNA, 19 nt, Homo sapiens
  misc_RNA (1)...(19): siRNA sense strand
guaggaaagguucgagaug

SEQ ID NO: 1703764 - RNA, 19 nt, Homo sapiens
  misc_RNA (1)...(19): siRNA sense strand
gagauuaaggaugauguga

SEQ ID NO: 1703765 - RNA, 19 nt, Homo sapiens
  misc_RNA (1)...(19): siRNA sense strand
gcaauguguaugugaagug

SEQ ID NO: 1703766 - RNA, 19 nt, Homo sapiens
  misc_RNA (1)...(19): siRNA sense strand
ugaugugauugaagaaugu

SEQ ID NO: 1703767 - RNA, 19 nt, Homo sapiens
  misc_RNA (1)...(19): siRNA sense strand
aaacagagcugcagcaaug

SEQ ID NO: 1703768 - RNA, 19 nt, Homo sapiens
  misc_RNA (1)...(19): siRNA sense strand
gaaagaaagcgaaguagaa

SEQ ID NO: 1703769 - RNA, 19 nt, Homo sapiens
  misc_RNA (1)...(19): siRNA sense strand
gaaaguauccagcugauga

SEQ ID NO: 1703770 - RNA, 19 nt, Homo sapiens
  misc_RNA (1)...(19): siRNA sense strand
ggaaaggacuggaauugau

SEQ ID NO: 1703771 - RNA, 19 nt, Homo sapiens
  misc_RNA (1)...(19): siRNA sense strand
caagggauauggauuuauu

SEQ ID NO: 1703772 - RNA, 19 nt, Homo sapiens
  misc_RNA (1)...(19): siRNA sense strand
gauaacagcagcauaugua

SEQ ID NO: 1703773 - RNA, 19 nt, Homo sapiens
  misc_RNA (1)...(19): siRNA sense strand
gagagaaccuauugauaau

SEQ ID NO: 1703774 - RNA, 19 nt, Homo sapiens
  misc_RNA (1)...(19): siRNA sense strand
gauuaaggaugaugugauu

SEQ ID NO: 1703775 - RNA, 19 nt, Homo sapiens
  misc_RNA (1)...(19): siRNA sense strand
ugagagaaccuauugauaa

SEQ ID NO: 1703776 - RNA, 19 nt, Homo sapiens
  misc_RNA (1)...(19): siRNA sense strand
ggaacaacuuaauggauuu

SEQ ID NO: 1703777 - RNA, 19 nt, Homo sapiens
  misc_RNA (1)...(19): siRNA sense strand
ccaaaggaauugcuuaugu

SEQ ID NO: 1703778 - RNA, 19 nt, Homo sapiens
  misc_RNA (1)...(19): siRNA sense strand
ccucauagcaucaaauuaa

SEQ ID NO: 1703779 - RNA, 19 nt, Homo sapiens
  misc_RNA (1)...(19): siRNA sense strand
gcaggugguuugcugguaa

SEQ ID NO: 1703780 - RNA, 19 nt, Homo sapiens
  misc_RNA (1)...(19): siRNA sense strand
ccaacucucuaacauguuu

SEQ ID NO: 1703781 - RNA, 19 nt, Homo sapiens
  misc_RNA (1)...(19): siRNA sense strand
gaaaggacuggaauugauu

SEQ ID NO: 1703782 - RNA, 19 nt, Homo sapiens
  misc_RNA (1)...(19): siRNA sense strand
caaaggaauugcuuaugug

SEQ ID NO: 1703783 - RNA, 19 nt, Homo sapiens
  misc_RNA (1)...(19): siRNA sense strand
gaagcgaaguagagacaga

SEQ ID NO: 1703784 - RNA, 19 nt, Homo sapiens
  misc_RNA (1)...(19): siRNA sense strand
gaaaguuggucauguuacu

SEQ ID NO: 1703785 - RNA, 19 nt, Homo sapiens
  misc_RNA (1)...(19): siRNA sense strand
aagauuggguugccucaua

SEQ ID NO: 1703786 - RNA, 19 nt, Homo sapiens
  misc_RNA (1)...(19): siRNA sense strand
caagggauuuggaagaguu

SEQ ID NO: 1703787 - RNA, 19 nt, Homo sapiens
  misc_RNA (1)...(19): siRNA sense strand
gaugggauaccgagauuaa

SEQ ID NO: 1703788 - RNA, 19 nt, Homo sapiens
  misc_RNA (1)...(19): siRNA sense strand
caagagcccugugagagaa

SEQ ID NO: 1703789 - RNA, 19 nt, Homo sapiens
  misc_RNA (1)...(19): siRNA sense strand
uggaacaacuuaauggauu

SEQ ID NO: 1703790 - RNA, 19 nt, Homo sapiens
  misc_RNA (1)...(19): siRNA sense strand
gacagaaauucaagacguu

SEQ ID NO: 1703791 - RNA, 19 nt, Homo sapiens
  misc_RNA (1)...(19): siRNA sense strand
gaacggaagcgaaguagag

SEQ ID NO: 1703792 - RNA, 19 nt, Homo sapiens
  misc_RNA (1)...(19): siRNA sense strand
gaagaaguuggaugggaua

SEQ ID NO: 1703793 - RNA, 19 nt, Homo sapiens
  misc_RNA (1)...(19): siRNA sense strand
gggaagugcuggaccuaug

SEQ ID NO: 1703794 - RNA, 19 nt, Homo sapiens
  misc_RNA (1)...(19): siRNA sense strand
gagcagaagucguagucau

SEQ ID NO: 1703795 - RNA, 19 nt, Homo sapiens
  misc_RNA (1)...(19): siRNA sense strand
auaccgagauuaaggauga

SEQ ID NO: 1703796 - RNA, 19 nt, Homo sapiens
  misc_RNA (1)...(19): siRNA sense strand
acagcaagcucuacagaug

SEQ ID NO: 1703797 - RNA, 19 nt, Homo sapiens
  misc_RNA (1)...(19): siRNA sense strand
gggaacaacuggucgucuu

SEQ ID NO: 1703798 - RNA, 19 nt, Homo sapiens
  misc_RNA (1)...(19): siRNA sense strand
ggaauugauuugggaacaa

SEQ ID NO: 1703799 - RNA, 19 nt, Homo sapiens
  misc_RNA (1)...(19): siRNA sense strand
gcaggaagaccaaugaaag

SEQ ID NO: 1703800 - RNA, 19 nt, Homo sapiens
  misc_RNA (1)...(19): siRNA sense strand
caacuuaccacaaccuguu

SEQ ID NO: 1703801 - RNA, 19 nt, Homo sapiens
  misc_RNA (1)...(19): siRNA sense strand
ucaaacagaagaagaaguu

SEQ ID NO: 1703802 - RNA, 19 nt, Homo sapiens
  misc_RNA (1)...(19): siRNA sense strand
gaguggcucuuuggcauuu

SEQ ID NO: 1703803 - RNA, 19 nt, Homo sapiens
  misc_RNA (1)...(19): siRNA sense strand
ggaagaccaaugaaaguug

SEQ ID NO: 1703804 - RNA, 19 nt, Homo sapiens
  misc_RNA (1)...(19): siRNA sense strand
gaacuggaaaggacuggaa

SEQ ID NO: 1703805 - RNA, 19 nt, Homo sapiens
  misc_RNA (1)...(19): siRNA sense strand
gugaagugcccaucaauug

SEQ ID NO: 1703806 - RNA, 19 nt, Homo sapiens
  misc_RNA (1)...(19): siRNA sense strand
cgaaguagaagcaaagaga

SEQ ID NO: 1703807 - RNA, 19 nt, Homo sapiens
  misc_RNA (1)...(19): siRNA sense strand
gcacagcaagcucuacaga

SEQ ID NO: 1703808 - RNA, 19 nt, Homo sapiens
  misc_RNA (1)...(19): siRNA sense strand
gcagaagucguagucauga

SEQ ID NO: 1703809 - RNA, 19 nt, Homo sapiens
  misc_RNA (1)...(19): siRNA sense strand
cgaaagagaagcaaaagua

SEQ ID NO: 1703810 - RNA, 19 nt, Homo sapiens
  misc_RNA (1)...(19): siRNA sense strand
cagcaauggcaaacaauuu

SEQ ID NO: 1703811 - RNA, 19 nt, Homo sapiens
  misc_RNA (1)...(19): siRNA sense strand
gugagagaaccuauugaua

SEQ ID NO: 1703812 - RNA, 19 nt, Homo sapiens
  misc_RNA (1)...(19): siRNA sense strand
gaacuagcaggaagaccaa

SEQ ID NO: 1703813 - RNA, 19 nt, Homo sapiens
  misc_RNA (1)...(19): siRNA sense strand
ggaagugcuggaccuauga

SEQ ID NO: 1703814 - RNA, 19 nt, Homo sapiens
  misc_RNA (1)...(19): siRNA sense strand
gcagcuggcggcaagaauu

SEQ ID NO: 1703815 - RNA, 19 nt, Homo sapiens
  misc_RNA (1)...(19): siRNA sense strand
ggaaagguucgagauguga

SEQ ID NO: 1703816 - RNA, 19 nt, Homo sapiens
  misc_RNA (1)...(19): siRNA sense strand
gaaagagaagcaaaaguaa

SEQ ID NO: 1703817 - RNA, 19 nt, Homo sapiens
  misc_RNA (1)...(19): siRNA sense strand
gcagcaauggcaaacaauu

SEQ ID NO: 1703818 - RNA, 19 nt, Homo sapiens
  misc_RNA (1)...(19): siRNA sense strand
cucagugccucuagcaaua

SEQ ID NO: 1703819 - RNA, 19 nt, Homo sapiens
  misc_RNA (1)...(19): siRNA sense strand
gaacgaaagagaagcaaaa

SEQ ID NO: 1703820 - RNA, 19 nt, Homo sapiens
  misc_RNA (1)...(19): siRNA sense strand
ggguacagguuugcagauu

SEQ ID NO: 1703821 - RNA, 19 nt, Homo sapiens
  misc_RNA (1)...(19): siRNA sense strand
caacggccaugaagaacgu

SEQ ID NO: 1703822 - RNA, 19 nt, Homo sapiens
  misc_RNA (1)...(19): siRNA sense strand
cgagaugugaggaugauuu

SEQ ID NO: 1703823 - RNA, 19 nt, Homo sapiens
  misc_RNA (1)...(19): siRNA sense strand
uaggaaagguucgagaugu

SEQ ID NO: 1703824 - RNA, 19 nt, Homo sapiens
  misc_RNA (1)...(19): siRNA sense strand
gcaaaaguccauucagaaa

SEQ ID NO: 1703825 - RNA, 19 nt, Homo sapiens
  misc_RNA (1)...(19): siRNA sense strand
gcaaaagccgugaaagaaa

SEQ ID NO: 1703826 - RNA, 19 nt, Homo sapiens
  misc_RNA (1)...(19): siRNA sense strand
cacaaccuguuuccugauu

SEQ ID NO: 1703827 - RNA, 19 nt, Homo sapiens
  misc_RNA (1)...(19): siRNA sense strand
acagaugaguggcucuuug

SEQ ID NO: 1703828 - RNA, 19 nt, Homo sapiens
  misc_RNA (1)...(19): siRNA sense strand
gguacagguuugcagauuc

SEQ ID NO: 1703829 - RNA, 19 nt, Homo sapiens
  misc_RNA (1)...(19): siRNA sense strand
ggaccuaugaggcuuuaug

SEQ ID NO: 1703830 - RNA, 19 nt, Homo sapiens
  misc_RNA (1)...(19): siRNA sense strand
aggaugaugugauugaaga

SEQ ID NO: 1703831 - RNA, 19 nt, Homo sapiens
  misc_RNA (1)...(19): siRNA sense strand
uaacauguuuaacccucaa

SEQ ID NO: 1703832 - RNA, 19 nt, Homo sapiens
  misc_RNA (1)...(19): siRNA sense strand
aaauuaagcagacgacguu

SEQ ID NO: 1703833 - RNA, 19 nt, Homo sapiens
  misc_RNA (1)...(19): siRNA sense strand
uaaggaugaugugauugaa

SEQ ID NO: 1703834 - RNA, 19 nt, Homo sapiens
  misc_RNA (1)...(19): siRNA sense strand
uaauggauuugaacuagca

SEQ ID NO: 1703835 - RNA, 19 nt, Homo sapiens
  misc_RNA (1)...(19): siRNA sense strand
gaacaacuuaauggauuug

SEQ ID NO: 1703836 - RNA, 19 nt, Homo sapiens
  misc_RNA (1)...(19): siRNA sense strand
aaagcgaaguagaagcaaa

SEQ ID NO: 1703837 - RNA, 19 nt, Homo sapiens
  misc_RNA (1)...(19): siRNA sense strand
ugaaagaaagcgaaguaga

SEQ ID NO: 1703838 - RNA, 19 nt, Homo sapiens
  misc_RNA (1)...(19): siRNA sense strand
aggauuaacuggccaacga

SEQ ID NO: 1703839 - RNA, 19 nt, Homo sapiens
  misc_RNA (1)...(19): siRNA sense strand
gcaaacaauuuacaaaagg

SEQ ID NO: 1703840 - RNA, 19 nt, Homo sapiens
  misc_RNA (1)...(19): siRNA sense strand
gcauauguaccucuuccaa

SEQ ID NO: 1703841 - RNA, 19 nt, Homo sapiens
  misc_RNA (1)...(19): siRNA sense strand
cgugaaagaaagcgaagua

SEQ ID NO: 1703842 - RNA, 19 nt, Homo sapiens
  misc_RNA (1)...(19): siRNA sense strand
gaacaacuggucgucuuca

SEQ ID NO: 1703843 - RNA, 19 nt, Homo sapiens
  misc_RNA (1)...(19): siRNA sense strand
aaugauaacagcagcauau

SEQ ID NO: 1703844 - RNA, 19 nt, Homo sapiens
  misc_RNA (1)...(19): siRNA sense strand
gcucagugccucuagcaau

SEQ ID NO: 1703845 - RNA, 19 nt, Homo sapiens
  misc_RNA (1)...(19): siRNA sense strand
uaugugaagugcccaucaa

SEQ ID NO: 1703846 - RNA, 19 nt, Homo sapiens
  misc_RNA (1)...(19): siRNA sense strand
gauuugcaaacaagacuuu

SEQ ID NO: 1703847 - RNA, 19 nt, Homo sapiens
  misc_RNA (1)...(19): siRNA sense strand
gagcaaaagccgugaaaga

SEQ ID NO: 1703848 - RNA, 19 nt, Homo sapiens
  misc_RNA (1)...(19): siRNA sense strand
gaauugauuugggaacaac

SEQ ID NO: 1703849 - RNA, 19 nt, Homo sapiens
  misc_RNA (1)...(19): siRNA sense strand
agcaauggcaaacaauuua

SEQ ID NO: 1703850 - RNA, 19 nt, Homo sapiens
  misc_RNA (1)...(19): siRNA sense strand
agcaagagcagaagucgua

SEQ ID NO: 1703851 - RNA, 19 nt, Homo sapiens
  misc_RNA (1)...(19): siRNA sense strand
uuaaggaugaugugauuga

SEQ ID NO: 1703852 - RNA, 19 nt, Homo sapiens
  misc_RNA (1)...(19): siRNA sense strand
uggaugggauaccgagauu

SEQ ID NO: 1703853 - RNA, 19 nt, Homo sapiens
  misc_RNA (1)...(19): siRNA sense strand
cuuaauggauuugaacuag

SEQ ID NO: 1703854 - RNA, 19 nt, Homo sapiens
  misc_RNA (1)...(19): siRNA sense strand
agaauucgaccaagggauu

SEQ ID NO: 1703855 - RNA, 19 nt, Homo sapiens
  misc_RNA (1)...(19): siRNA sense strand
gaauucgaccaagggauuu

SEQ ID NO: 1703856 - RNA, 19 nt, Homo sapiens
  misc_RNA (1)...(19): siRNA sense strand
caaccuguuuccugauucu

SEQ ID NO: 1703857 - RNA, 19 nt, Homo sapiens
  misc_RNA (1)...(19): siRNA sense strand
auguaccucuuccaacuua

SEQ ID NO: 1703858 - RNA, 19 nt, Homo sapiens
  misc_RNA (1)...(19): siRNA sense strand
caaaagccgugaaagaaag

SEQ ID NO: 1703859 - RNA, 19 nt, Homo sapiens
  misc_RNA (1)...(19): siRNA sense strand
cagaagucguagucaugaa

SEQ ID NO: 1703860 - RNA, 19 nt, Homo sapiens
  misc_RNA (1)...(19): siRNA sense strand
uggaagaauugaaaguauc

SEQ ID NO: 1703861 - RNA, 19 nt, Homo sapiens
  misc_RNA (1)...(19): siRNA sense strand
uaugugggcucauuacacu

SEQ ID NO: 1703862 - RNA, 19 nt, Homo sapiens
  misc_RNA (1)...(19): siRNA sense strand
cugcagcaauggcaaacaa

SEQ ID NO: 1703863 - RNA, 19 nt, Homo sapiens
  misc_RNA (1)...(19): siRNA sense strand
guaggaaagguucgagaug

SEQ ID NO: 1703864 - RNA, 19 nt, Homo sapiens
  misc_RNA (1)...(19): siRNA sense strand
gagauuaaggaugauguga

SEQ ID NO: 1703865 - RNA, 19 nt, Homo sapiens
  misc_RNA (1)...(19): siRNA sense strand
gcaauguguaugugaagug

SEQ ID NO: 1703866 - RNA, 19 nt, Homo sapiens
  misc_RNA (1)...(19): siRNA sense strand
ugaugugauugaagaaugu

SEQ ID NO: 1703867 - RNA, 19 nt, Homo sapiens
  misc_RNA (1)...(19): siRNA sense strand
aaacagagcugcagcaaug

SEQ ID NO: 1703868 - RNA, 19 nt, Homo sapiens
  misc_RNA (1)...(19): siRNA sense strand
gaaaguauccagcugauga

SEQ ID NO: 1703869 - RNA, 19 nt, Homo sapiens
  misc_RNA (1)...(19): siRNA sense strand
ggaaaggacuggaauugau

SEQ ID NO: 1703870 - RNA, 19 nt, Homo sapiens
  misc_RNA (1)...(19): siRNA sense strand
caagggauauggauuuauu

SEQ ID NO: 1703871 - RNA, 19 nt, Homo sapiens
  misc_RNA (1)...(19): siRNA sense strand
gauaacagcagcauaugua

SEQ ID NO: 1703872 - RNA, 19 nt, Homo sapiens
  misc_RNA (1)...(19): siRNA sense strand
gauuaaggaugaugugauu

SEQ ID NO: 1703873 - RNA, 19 nt, Homo sapiens
  misc_RNA (1)...(19): siRNA sense strand
ggaacaacuuaauggauuu

SEQ ID NO: 1703874 - RNA, 19 nt, Homo sapiens
  misc_RNA (1)...(19): siRNA sense strand
ccaaaggaauugcuuaugu

SEQ ID NO: 1703875 - RNA, 19 nt, Homo sapiens
  misc_RNA (1)...(19): siRNA sense strand
gcaggugguuugcugguaa

SEQ ID NO: 1703876 - RNA, 19 nt, Homo sapiens
  misc_RNA (1)...(19): siRNA sense strand
ccaacucucuaacauguuu

SEQ ID NO: 1703877 - RNA, 19 nt, Homo sapiens
  misc_RNA (1)...(19): siRNA sense strand
gaaaggacuggaauugauu

SEQ ID NO: 1703878 - RNA, 19 nt, Homo sapiens
  misc_RNA (1)...(19): siRNA sense strand
caaaggaauugcuuaugug

SEQ ID NO: 1703879 - RNA, 19 nt, Homo sapiens
  misc_RNA (1)...(19): siRNA sense strand
gaaaguuggucauguuacu

SEQ ID NO: 1703880 - RNA, 19 nt, Homo sapiens
  misc_RNA (1)...(19): siRNA sense strand
gaugggauaccgagauuaa

SEQ ID NO: 1703881 - RNA, 19 nt, Homo sapiens
  misc_RNA (1)...(19): siRNA sense strand
caagggauuuggaagaguu

SEQ ID NO: 1703882 - RNA, 19 nt, Homo sapiens
  misc_RNA (1)...(19): siRNA sense strand
uggaacaacuuaauggauu

SEQ ID NO: 1703883 - RNA, 19 nt, Homo sapiens
  misc_RNA (1)...(19): siRNA sense strand
gacagaaauucaagacguu

SEQ ID NO: 1703884 - RNA, 19 nt, Homo sapiens
  misc_RNA (1)...(19): siRNA sense strand
gaagaaguuggaugggaua

SEQ ID NO: 1703885 - RNA, 19 nt, Homo sapiens
  misc_RNA (1)...(19): siRNA sense strand
gggaagugcuggaccuaug

SEQ ID NO: 1703886 - RNA, 19 nt, Homo sapiens
  misc_RNA (1)...(19): siRNA sense strand
gggaacaacuggucgucuu

SEQ ID NO: 1703887 - RNA, 19 nt, Homo sapiens
  misc_RNA (1)...(19): siRNA sense strand
auaccgagauuaaggauga

SEQ ID NO: 1703888 - RNA, 19 nt, Homo sapiens
  misc_RNA (1)...(19): siRNA sense strand
acagcaagcucuacagaug

SEQ ID NO: 1703889 - RNA, 19 nt, Homo sapiens
  misc_RNA (1)...(19): siRNA sense strand
ggaauugauuugggaacaa

SEQ ID NO: 1703890 - RNA, 19 nt, Homo sapiens
  misc_RNA (1)...(19): siRNA sense strand
gcaggaagaccaaugaaag

SEQ ID NO: 1703891 - RNA, 19 nt, Homo sapiens
  misc_RNA (1)...(19): siRNA sense strand
caacuuaccacaaccuguu

SEQ ID NO: 1703892 - RNA, 19 nt, Homo sapiens
  misc_RNA (1)...(19): siRNA sense strand
ucaaacagaagaagaaguu

SEQ ID NO: 1703893 - RNA, 19 nt, Homo sapiens
  misc_RNA (1)...(19): siRNA sense strand
gaguggcucuuuggcauuu

SEQ ID NO: 1703894 - RNA, 19 nt, Homo sapiens
  misc_RNA (1)...(19): siRNA sense strand
ggaagaccaaugaaaguug

SEQ ID NO: 1703895 - RNA, 19 nt, Homo sapiens
  misc_RNA (1)...(19): siRNA sense strand
gaacuggaaaggacuggaa

SEQ ID NO: 1703896 - RNA, 19 nt, Homo sapiens
  misc_RNA (1)...(19): siRNA sense strand
gugaagugcccaucaauug

SEQ ID NO: 1703897 - RNA, 19 nt, Homo sapiens
  misc_RNA (1)...(19): siRNA sense strand
gcacagcaagcucuacaga

SEQ ID NO: 1703898 - RNA, 19 nt, Homo sapiens
  misc_RNA (1)...(19): siRNA sense strand
cagcaauggcaaacaauuu

SEQ ID NO: 1703899 - RNA, 19 nt, Homo sapiens
  misc_RNA (1)...(19): siRNA sense strand
gcagcuggcggcaagaauu

SEQ ID NO: 1703900 - RNA, 19 nt, Homo sapiens
  misc_RNA (1)...(19): siRNA sense strand
gaacuagcaggaagaccaa

SEQ ID NO: 1703901 - RNA, 19 nt, Homo sapiens
  misc_RNA (1)...(19): siRNA sense strand
ggaagugcuggaccuauga

SEQ ID NO: 1703902 - RNA, 19 nt, Homo sapiens
  misc_RNA (1)...(19): siRNA sense strand
cucagugccucuagcaaua

SEQ ID NO: 1703903 - RNA, 19 nt, Homo sapiens
  misc_RNA (1)...(19): siRNA sense strand
ggaaagguucgagauguga

SEQ ID NO: 1703904 - RNA, 19 nt, Homo sapiens
  misc_RNA (1)...(19): siRNA sense strand
gcagcaauggcaaacaauu

SEQ ID NO: 1703905 - RNA, 19 nt, Homo sapiens
  misc_RNA (1)...(19): siRNA sense strand
cgagaugugaggaugauuu

SEQ ID NO: 1703906 - RNA, 19 nt, Homo sapiens
  misc_RNA (1)...(19): siRNA sense strand
uaggaaagguucgagaugu

SEQ ID NO: 1703907 - RNA, 19 nt, Homo sapiens
  misc_RNA (1)...(19): siRNA sense strand
ggguacagguuugcagauu

SEQ ID NO: 1703908 - RNA, 19 nt, Homo sapiens
  misc_RNA (1)...(19): siRNA sense strand
gguacagguuugcagauuc

SEQ ID NO: 1703909 - RNA, 19 nt, Homo sapiens
  misc_RNA (1)...(19): siRNA sense strand
cacaaccuguuuccugauu

SEQ ID NO: 1703910 - RNA, 19 nt, Homo sapiens
  misc_RNA (1)...(19): siRNA sense strand
acagaugaguggcucuuug

SEQ ID NO: 1703911 - RNA, 19 nt, Homo sapiens
  misc_RNA (1)...(19): siRNA sense strand
ggaccuaugaggcuuuaug

SEQ ID NO: 1703912 - RNA, 19 nt, Homo sapiens
  misc_RNA (1)...(19): siRNA sense strand
aggaugaugugauugaaga

SEQ ID NO: 1703913 - RNA, 19 nt, Homo sapiens
  misc_RNA (1)...(19): siRNA sense strand
uaacauguuuaacccucaa

SEQ ID NO: 1703914 - RNA, 19 nt, Homo sapiens
  misc_RNA (1)...(19): siRNA sense strand
gaacaacuuaauggauuug

SEQ ID NO: 1703915 - RNA, 19 nt, Homo sapiens
  misc_RNA (1)...(19): siRNA sense strand
uaaggaugaugugauugaa

SEQ ID NO: 1703916 - RNA, 19 nt, Homo sapiens
  misc_RNA (1)...(19): siRNA sense strand
uaauggauuugaacuagca

SEQ ID NO: 1703917 - RNA, 19 nt, Homo sapiens
  misc_RNA (1)...(19): siRNA sense strand
aggauuaacuggccaacga

SEQ ID NO: 1703918 - RNA, 19 nt, Homo sapiens
  misc_RNA (1)...(19): siRNA sense strand
gcaaacaauuuacaaaagg

SEQ ID NO: 1703919 - RNA, 19 nt, Homo sapiens
  misc_RNA (1)...(19): siRNA sense strand
gcauauguaccucuuccaa

SEQ ID NO: 1703920 - RNA, 19 nt, Homo sapiens
  misc_RNA (1)...(19): siRNA sense strand
gaacaacuggucgucuuca

SEQ ID NO: 1703921 - RNA, 19 nt, Homo sapiens
  misc_RNA (1)...(19): siRNA sense strand
aaugauaacagcagcauau

SEQ ID NO: 1703922 - RNA, 19 nt, Homo sapiens
  misc_RNA (1)...(19): siRNA sense strand
agcaauggcaaacaauuua

SEQ ID NO: 1703923 - RNA, 19 nt, Homo sapiens
  misc_RNA (1)...(19): siRNA sense strand
uaugugaagugcccaucaa

SEQ ID NO: 1703924 - RNA, 19 nt, Homo sapiens
  misc_RNA (1)...(19): siRNA sense strand
gauuugcaaacaagacuuu

SEQ ID NO: 1703925 - RNA, 19 nt, Homo sapiens
  misc_RNA (1)...(19): siRNA sense strand
gaauugauuugggaacaac

SEQ ID NO: 1703926 - RNA, 19 nt, Homo sapiens
  misc_RNA (1)...(19): siRNA sense strand
gcucagugccucuagcaau

SEQ ID NO: 1703927 - RNA, 19 nt, Homo sapiens
  misc_RNA (1)...(19): siRNA sense strand
cuuaauggauuugaacuag

SEQ ID NO: 1703928 - RNA, 19 nt, Homo sapiens
  misc_RNA (1)...(19): siRNA sense strand
uuaaggaugaugugauuga

SEQ ID NO: 1703929 - RNA, 19 nt, Homo sapiens
  misc_RNA (1)...(19): siRNA sense strand
agaauucgaccaagggauu

SEQ ID NO: 1703930 - RNA, 19 nt, Homo sapiens
  misc_RNA (1)...(19): siRNA sense strand
uggaugggauaccgagauu

SEQ ID NO: 1703931 - RNA, 19 nt, Homo sapiens
  misc_RNA (1)...(19): siRNA sense strand
cugcagcaauggcaaacaa

SEQ ID NO: 1703932 - RNA, 19 nt, Homo sapiens
  misc_RNA (1)...(19): siRNA sense strand
caaccuguuuccugauucu

SEQ ID NO: 1703933 - RNA, 19 nt, Homo sapiens
  misc_RNA (1)...(19): siRNA sense strand
auguaccucuuccaacuua

SEQ ID NO: 1703934 - RNA, 19 nt, Homo sapiens
  misc_RNA (1)...(19): siRNA sense strand
guaggaaagguucgagaug

SEQ ID NO: 1703935 - RNA, 19 nt, Homo sapiens
  misc_RNA (1)...(19): siRNA sense strand
gaauucgaccaagggauuu

SEQ ID NO: 1703936 - RNA, 19 nt, Homo sapiens
  misc_RNA (1)...(19): siRNA sense strand
uggaagaauugaaaguauc

SEQ ID NO: 1703937 - RNA, 19 nt, Homo sapiens
  misc_RNA (1)...(19): siRNA sense strand
uaugugggcucauuacacu

SEQ ID NO: 1703938 - RNA, 19 nt, Homo sapiens
  misc_RNA (1)...(19): siRNA sense strand
gccucuagcaauaggauua

SEQ ID NO: 1703939 - RNA, 19 nt, Homo sapiens
  misc_RNA (1)...(19): siRNA sense strand
gcaauguguaugugaagug

SEQ ID NO: 1703940 - RNA, 19 nt, Homo sapiens
  misc_RNA (1)...(19): siRNA sense strand
ugaugugauugaagaaugu

SEQ ID NO: 1703941 - RNA, 19 nt, Homo sapiens
  misc_RNA (1)...(19): siRNA sense strand
gagauuaaggaugauguga

SEQ ID NO: 1703942 - RNA, 19 nt, Homo sapiens
  misc_RNA (1)...(19): siRNA sense strand
cagcaagcucuacagauga

SEQ ID NO: 1703943 - RNA, 19 nt, Homo sapiens
  misc_RNA (1)...(19): siRNA sense strand
ugacucagaaugugccaaa

SEQ ID NO: 1703944 - RNA, 19 nt, Homo sapiens
  misc_RNA (1)...(19): siRNA sense strand
cucauuacacuucaacaua

SEQ ID NO: 1703945 - RNA, 19 nt, Homo sapiens
  misc_RNA (1)...(19): siRNA sense strand
gagaugugaggaugauuuc

SEQ ID NO: 1703946 - RNA, 19 nt, Homo sapiens
  misc_RNA (1)...(19): siRNA sense strand
gaugugaggaugauuucug

SEQ ID NO: 1703947 - RNA, 19 nt, Homo sapiens
  misc_RNA (1)...(19): siRNA sense strand
acacaauguuuccaacucu

SEQ ID NO: 1703948 - RNA, 19 nt, Homo sapiens
  misc_RNA (1)...(19): siRNA sense strand
guacagguuugcagauucc

SEQ ID NO: 1703949 - RNA, 19 nt, Homo sapiens
  misc_RNA (1)...(19): siRNA sense strand
uucaagacguuccaaagga

SEQ ID NO: 1703950 - RNA, 19 nt, Homo sapiens
  misc_RNA (1)...(19): siRNA sense strand
aaauucagcucagggcaau

SEQ ID NO: 1703951 - RNA, 19 nt, Homo sapiens
  misc_RNA (1)...(19): siRNA sense strand
uuccaacucucuaacaugu

SEQ ID NO: 1703952 - RNA, 19 nt, Homo sapiens
  misc_RNA (1)...(19): siRNA sense strand
ggaacaacuggucgucuuc

SEQ ID NO: 1703953 - RNA, 19 nt, Homo sapiens
  misc_RNA (1)...(19): siRNA sense strand
gaugauggacagugaaacu

SEQ ID NO: 1703954 - RNA, 19 nt, Homo sapiens
  misc_RNA (1)...(19): siRNA sense strand
ggcaggugguuugcuggua

SEQ ID NO: 1703955 - RNA, 19 nt, Homo sapiens
  misc_RNA (1)...(19): siRNA sense strand
gagcugcagcaauggcaaa

SEQ ID NO: 1703956 - RNA, 19 nt, Homo sapiens
  misc_RNA (1)...(19): siRNA sense strand
gaauugcuuauguggaguu

SEQ ID NO: 1703957 - RNA, 19 nt, Homo sapiens
  misc_RNA (1)...(19): siRNA sense strand
caacuuaauggauuugaac

SEQ ID NO: 1703958 - RNA, 19 nt, Homo sapiens
  misc_RNA (1)...(19): siRNA sense strand
cagcucagggcaaugugua

SEQ ID NO: 1703959 - RNA, 19 nt, Homo sapiens
  misc_RNA (1)...(19): siRNA sense strand
caggugguuugcugguaaa

SEQ ID NO: 1703960 - RNA, 19 nt, Homo sapiens
  misc_RNA (1)...(19): siRNA sense strand
gcaauggcaaacaauuuac

SEQ ID NO: 1703961 - RNA, 19 nt, Homo sapiens
  misc_RNA (1)...(19): siRNA sense strand
gaagugcccaucaauugcu

SEQ ID NO: 1703962 - RNA, 19 nt, Homo sapiens
  misc_RNA (1)...(19): siRNA sense strand
aaaggacuggaauugauuu

SEQ ID NO: 1703963 - RNA, 19 nt, Homo sapiens
  misc_RNA (1)...(19): siRNA sense strand
gaaauucaagacguuccaa

SEQ ID NO: 1703964 - RNA, 19 nt, Homo sapiens
  misc_RNA (1)...(19): siRNA sense strand
caggaagaccaaugaaagu

SEQ ID NO: 1703965 - RNA, 19 nt, Homo sapiens
  misc_RNA (1)...(19): siRNA sense strand
uugcagaggguacagguuu

SEQ ID NO: 1703966 - RNA, 19 nt, Homo sapiens
  misc_RNA (1)...(19): siRNA sense strand
uucgagugcuaguucauuu

SEQ ID NO: 1703967 - RNA, 19 nt, Homo sapiens
  misc_RNA (1)...(19): siRNA sense strand
aaacagagcugcagcaaug

SEQ ID NO: 1703968 - RNA, 19 nt, Homo sapiens
  misc_RNA (1)...(19): siRNA sense strand
gaaaguauccagcugauga

SEQ ID NO: 1703969 - RNA, 19 nt, Homo sapiens
  misc_RNA (1)...(19): siRNA sense strand
ggaaaggacuggaauugau

SEQ ID NO: 1703970 - RNA, 19 nt, Homo sapiens
  misc_RNA (1)...(19): siRNA sense strand
caagggauauggauuuauu

SEQ ID NO: 1703971 - RNA, 19 nt, Homo sapiens
  misc_RNA (1)...(19): siRNA sense strand
gauaacagcagcauaugua

SEQ ID NO: 1703972 - RNA, 19 nt, Homo sapiens
  misc_RNA (1)...(19): siRNA sense strand
gauuaaggaugaugugauu

SEQ ID NO: 1703973 - RNA, 19 nt, Homo sapiens
  misc_RNA (1)...(19): siRNA sense strand
ggaacaacuuaauggauuu

SEQ ID NO: 1703974 - RNA, 19 nt, Homo sapiens
  misc_RNA (1)...(19): siRNA sense strand
ccaaaggaauugcuuaugu

SEQ ID NO: 1703975 - RNA, 19 nt, Homo sapiens
  misc_RNA (1)...(19): siRNA sense strand
gcaggugguuugcugguaa

SEQ ID NO: 1703976 - RNA, 19 nt, Homo sapiens
  misc_RNA (1)...(19): siRNA sense strand
ccaacucucuaacauguuu

SEQ ID NO: 1703977 - RNA, 19 nt, Homo sapiens
  misc_RNA (1)...(19): siRNA sense strand
gaaaggacuggaauugauu

SEQ ID NO: 1703978 - RNA, 19 nt, Homo sapiens
  misc_RNA (1)...(19): siRNA sense strand
caaaggaauugcuuaugug

SEQ ID NO: 1703979 - RNA, 19 nt, Homo sapiens
  misc_RNA (1)...(19): siRNA sense strand
gaaaguuggucauguuacu

SEQ ID NO: 1703980 - RNA, 19 nt, Homo sapiens
  misc_RNA (1)...(19): siRNA sense strand
gaugggauaccgagauuaa

SEQ ID NO: 1703981 - RNA, 19 nt, Homo sapiens
  misc_RNA (1)...(19): siRNA sense strand
caagggauuuggaagaguu

SEQ ID NO: 1703982 - RNA, 19 nt, Homo sapiens
  misc_RNA (1)...(19): siRNA sense strand
uggaacaacuuaauggauu

SEQ ID NO: 1703983 - RNA, 19 nt, Homo sapiens
  misc_RNA (1)...(19): siRNA sense strand
gacagaaauucaagacguu

SEQ ID NO: 1703984 - RNA, 19 nt, Homo sapiens
  misc_RNA (1)...(19): siRNA sense strand
gaagaaguuggaugggaua

SEQ ID NO: 1703985 - RNA, 19 nt, Homo sapiens
  misc_RNA (1)...(19): siRNA sense strand
gggaagugcuggaccuaug

SEQ ID NO: 1703986 - RNA, 19 nt, Homo sapiens
  misc_RNA (1)...(19): siRNA sense strand
gggaacaacuggucgucuu

SEQ ID NO: 1703987 - RNA, 19 nt, Homo sapiens
  misc_RNA (1)...(19): siRNA sense strand
auaccgagauuaaggauga

SEQ ID NO: 1703988 - RNA, 19 nt, Homo sapiens
  misc_RNA (1)...(19): siRNA sense strand
acagcaagcucuacagaug

SEQ ID NO: 1703989 - RNA, 19 nt, Homo sapiens
  misc_RNA (1)...(19): siRNA sense strand
ggaauugauuugggaacaa

SEQ ID NO: 1703990 - RNA, 19 nt, Homo sapiens
  misc_RNA (1)...(19): siRNA sense strand
gcaggaagaccaaugaaag

SEQ ID NO: 1703991 - RNA, 19 nt, Homo sapiens
  misc_RNA (1)...(19): siRNA sense strand
caacuuaccacaaccuguu

SEQ ID NO: 1703992 - RNA, 19 nt, Homo sapiens
  misc_RNA (1)...(19): siRNA sense strand
ucaaacagaagaagaaguu

SEQ ID NO: 1703993 - RNA, 19 nt, Homo sapiens
  misc_RNA (1)...(19): siRNA sense strand
gaguggcucuuuggcauuu

SEQ ID NO: 1703994 - RNA, 19 nt, Homo sapiens
  misc_RNA (1)...(19): siRNA sense strand
ggaagaccaaugaaaguug

SEQ ID NO: 1703995 - RNA, 19 nt, Homo sapiens
  misc_RNA (1)...(19): siRNA sense strand
gaacuggaaaggacuggaa

SEQ ID NO: 1703996 - RNA, 19 nt, Homo sapiens
  misc_RNA (1)...(19): siRNA sense strand
gugaagugcccaucaauug

SEQ ID NO: 1703997 - RNA, 19 nt, Homo sapiens
  misc_RNA (1)...(19): siRNA sense strand
gcacagcaagcucuacaga

SEQ ID NO: 1703998 - RNA, 19 nt, Homo sapiens
  misc_RNA (1)...(19): siRNA sense strand
cagcaauggcaaacaauuu

SEQ ID NO: 1703999 - RNA, 19 nt, Homo sapiens
  misc_RNA (1)...(19): siRNA sense strand
gcagcuggcggcaagaauu

SEQ ID NO: 1704000 - RNA, 19 nt, Homo sapiens
  misc_RNA (1)...(19): siRNA sense strand
gaacuagcaggaagaccaa

SEQ ID NO: 1704001 - RNA, 19 nt, Homo sapiens
  misc_RNA (1)...(19): siRNA sense strand
ggaagugcuggaccuauga

SEQ ID NO: 1704002 - RNA, 19 nt, Homo sapiens
  misc_RNA (1)...(19): siRNA sense strand
cucagugccucuagcaaua

SEQ ID NO: 1704003 - RNA, 19 nt, Homo sapiens
  misc_RNA (1)...(19): siRNA sense strand
ggaaagguucgagauguga

SEQ ID NO: 1704004 - RNA, 19 nt, Homo sapiens
  misc_RNA (1)...(19): siRNA sense strand
gcagcaauggcaaacaauu

SEQ ID NO: 1704005 - RNA, 19 nt, Homo sapiens
  misc_RNA (1)...(19): siRNA sense strand
cgagaugugaggaugauuu

SEQ ID NO: 1704006 - RNA, 19 nt, Homo sapiens
  misc_RNA (1)...(19): siRNA sense strand
uaggaaagguucgagaugu

SEQ ID NO: 1704007 - RNA, 19 nt, Homo sapiens
  misc_RNA (1)...(19): siRNA sense strand
ggguacagguuugcagauu

SEQ ID NO: 1704008 - RNA, 19 nt, Homo sapiens
  misc_RNA (1)...(19): siRNA sense strand
gguacagguuugcagauuc

SEQ ID NO: 1704009 - RNA, 19 nt, Homo sapiens
  misc_RNA (1)...(19): siRNA sense strand
cacaaccuguuuccugauu

SEQ ID NO: 1704010 - RNA, 19 nt, Homo sapiens
  misc_RNA (1)...(19): siRNA sense strand
acagaugaguggcucuuug

SEQ ID NO: 1704011 - RNA, 19 nt, Homo sapiens
  misc_RNA (1)...(19): siRNA sense strand
ggaccuaugaggcuuuaug

SEQ ID NO: 1704012 - RNA, 19 nt, Homo sapiens
  misc_RNA (1)...(19): siRNA sense strand
aggaugaugugauugaaga

SEQ ID NO: 1704013 - RNA, 19 nt, Homo sapiens
  misc_RNA (1)...(19): siRNA sense strand
uaacauguuuaacccucaa

SEQ ID NO: 1704014 - RNA, 19 nt, Homo sapiens
  misc_RNA (1)...(19): siRNA sense strand
gaacaacuuaauggauuug

SEQ ID NO: 1704015 - RNA, 19 nt, Homo sapiens
  misc_RNA (1)...(19): siRNA sense strand
uaaggaugaugugauugaa

SEQ ID NO: 1704016 - RNA, 19 nt, Homo sapiens
  misc_RNA (1)...(19): siRNA sense strand
uaauggauuugaacuagca

SEQ ID NO: 1704017 - RNA, 19 nt, Homo sapiens
  misc_RNA (1)...(19): siRNA sense strand
aggauuaacuggccaacga

SEQ ID NO: 1704018 - RNA, 19 nt, Homo sapiens
  misc_RNA (1)...(19): siRNA sense strand
gcaaacaauuuacaaaagg

SEQ ID NO: 1704019 - RNA, 19 nt, Homo sapiens
  misc_RNA (1)...(19): siRNA sense strand
gcauauguaccucuuccaa

SEQ ID NO: 1704020 - RNA, 19 nt, Homo sapiens
  misc_RNA (1)...(19): siRNA sense strand
gaacaacuggucgucuuca

SEQ ID NO: 1704021 - RNA, 19 nt, Homo sapiens
  misc_RNA (1)...(19): siRNA sense strand
aaugauaacagcagcauau

SEQ ID NO: 1704022 - RNA, 19 nt, Homo sapiens
  misc_RNA (1)...(19): siRNA sense strand
agcaauggcaaacaauuua

SEQ ID NO: 1704023 - RNA, 19 nt, Homo sapiens
  misc_RNA (1)...(19): siRNA sense strand
uaugugaagugcccaucaa

SEQ ID NO: 1704024 - RNA, 19 nt, Homo sapiens
  misc_RNA (1)...(19): siRNA sense strand
gauuugcaaacaagacuuu

SEQ ID NO: 1704025 - RNA, 19 nt, Homo sapiens
  misc_RNA (1)...(19): siRNA sense strand
gaauugauuugggaacaac

SEQ ID NO: 1704026 - RNA, 19 nt, Homo sapiens
  misc_RNA (1)...(19): siRNA sense strand
gcucagugccucuagcaau

SEQ ID NO: 1704027 - RNA, 19 nt, Homo sapiens
  misc_RNA (1)...(19): siRNA sense strand
cuuaauggauuugaacuag

SEQ ID NO: 1704028 - RNA, 19 nt, Homo sapiens
  misc_RNA (1)...(19): siRNA sense strand
uuaaggaugaugugauuga

SEQ ID NO: 1704029 - RNA, 19 nt, Homo sapiens
  misc_RNA (1)...(19): siRNA sense strand
agaauucgaccaagggauu

SEQ ID NO: 1704030 - RNA, 19 nt, Homo sapiens
  misc_RNA (1)...(19): siRNA sense strand
uggaugggauaccgagauu

SEQ ID NO: 1704031 - RNA, 19 nt, Homo sapiens
  misc_RNA (1)...(19): siRNA sense strand
cugcagcaauggcaaacaa

SEQ ID NO: 1704032 - RNA, 19 nt, Homo sapiens
  misc_RNA (1)...(19): siRNA sense strand
caaccuguuuccugauucu

SEQ ID NO: 1704033 - RNA, 19 nt, Homo sapiens
  misc_RNA (1)...(19): siRNA sense strand
auguaccucuuccaacuua

SEQ ID NO: 1704034 - RNA, 19 nt, Homo sapiens
  misc_RNA (1)...(19): siRNA sense strand
guaggaaagguucgagaug

SEQ ID NO: 1704035 - RNA, 19 nt, Homo sapiens
  misc_RNA (1)...(19): siRNA sense strand
gaauucgaccaagggauuu

SEQ ID NO: 1704036 - RNA, 19 nt, Homo sapiens
  misc_RNA (1)...(19): siRNA sense strand
uggaagaauugaaaguauc

SEQ ID NO: 1704037 - RNA, 19 nt, Homo sapiens
  misc_RNA (1)...(19): siRNA sense strand
uaugugggcucauuacacu

SEQ ID NO: 1704038 - RNA, 19 nt, Homo sapiens
  misc_RNA (1)...(19): siRNA sense strand
gccucuagcaauaggauua

SEQ ID NO: 1704039 - RNA, 19 nt, Homo sapiens
  misc_RNA (1)...(19): siRNA sense strand
gcaauguguaugugaagug

SEQ ID NO: 1704040 - RNA, 19 nt, Homo sapiens
  misc_RNA (1)...(19): siRNA sense strand
ugaugugauugaagaaugu

SEQ ID NO: 1704041 - RNA, 19 nt, Homo sapiens
  misc_RNA (1)...(19): siRNA sense strand
gagauuaaggaugauguga

SEQ ID NO: 1704042 - RNA, 19 nt, Homo sapiens
  misc_RNA (1)...(19): siRNA sense strand
cagcaagcucuacagauga

SEQ ID NO: 1704043 - RNA, 19 nt, Homo sapiens
  misc_RNA (1)...(19): siRNA sense strand
ugacucagaaugugccaaa

SEQ ID NO: 1704044 - RNA, 19 nt, Homo sapiens
  misc_RNA (1)...(19): siRNA sense strand
cucauuacacuucaacaua

SEQ ID NO: 1704045 - RNA, 19 nt, Homo sapiens
  misc_RNA (1)...(19): siRNA sense strand
gagaugugaggaugauuuc

SEQ ID NO: 1704046 - RNA, 19 nt, Homo sapiens
  misc_RNA (1)...(19): siRNA sense strand
gaugugaggaugauuucug

SEQ ID NO: 1704047 - RNA, 19 nt, Homo sapiens
  misc_RNA (1)...(19): siRNA sense strand
acacaauguuuccaacucu

SEQ ID NO: 1704048 - RNA, 19 nt, Homo sapiens
  misc_RNA (1)...(19): siRNA sense strand
guacagguuugcagauucc

SEQ ID NO: 1704049 - RNA, 19 nt, Homo sapiens
  misc_RNA (1)...(19): siRNA sense strand
uucaagacguuccaaagga

SEQ ID NO: 1704050 - RNA, 19 nt, Homo sapiens
  misc_RNA (1)...(19): siRNA sense strand
aaauucagcucagggcaau

SEQ ID NO: 1704051 - RNA, 19 nt, Homo sapiens
  misc_RNA (1)...(19): siRNA sense strand
uuccaacucucuaacaugu

SEQ ID NO: 1704052 - RNA, 19 nt, Homo sapiens
  misc_RNA (1)...(19): siRNA sense strand
ggaacaacuggucgucuuc

SEQ ID NO: 1704053 - RNA, 19 nt, Homo sapiens
  misc_RNA (1)...(19): siRNA sense strand
gaugauggacagugaaacu

SEQ ID NO: 1704054 - RNA, 19 nt, Homo sapiens
  misc_RNA (1)...(19): siRNA sense strand
ggcaggugguuugcuggua

SEQ ID NO: 1704055 - RNA, 19 nt, Homo sapiens
  misc_RNA (1)...(19): siRNA sense strand
gagcugcagcaauggcaaa

SEQ ID NO: 1704056 - RNA, 19 nt, Homo sapiens
  misc_RNA (1)...(19): siRNA sense strand
gaauugcuuauguggaguu

SEQ ID NO: 1704057 - RNA, 19 nt, Homo sapiens
  misc_RNA (1)...(19): siRNA sense strand
caacuuaauggauuugaac

SEQ ID NO: 1704058 - RNA, 19 nt, Homo sapiens
  misc_RNA (1)...(19): siRNA sense strand
cagcucagggcaaugugua

SEQ ID NO: 1704059 - RNA, 19 nt, Homo sapiens
  misc_RNA (1)...(19): siRNA sense strand
caggugguuugcugguaaa

SEQ ID NO: 1704060 - RNA, 19 nt, Homo sapiens
  misc_RNA (1)...(19): siRNA sense strand
gcaauggcaaacaauuuac

SEQ ID NO: 1704061 - RNA, 19 nt, Homo sapiens
  misc_RNA (1)...(19): siRNA sense strand
gaagugcccaucaauugcu

SEQ ID NO: 1704062 - RNA, 19 nt, Homo sapiens
  misc_RNA (1)...(19): siRNA sense strand
aaaggacuggaauugauuu

SEQ ID NO: 1704063 - RNA, 19 nt, Homo sapiens
  misc_RNA (1)...(19): siRNA sense strand
gaaauucaagacguuccaa

SEQ ID NO: 1704064 - RNA, 19 nt, Homo sapiens
  misc_RNA (1)...(19): siRNA sense strand
caggaagaccaaugaaagu

SEQ ID NO: 1704065 - RNA, 19 nt, Homo sapiens
  misc_RNA (1)...(19): siRNA sense strand
uugcagaggguacagguuu

SEQ ID NO: 1704066 - RNA, 19 nt, Homo sapiens
  misc_RNA (1)...(19): siRNA sense strand
uucgagugcuaguucauuu

SEQ ID NO: 1704067 - RNA, 19 nt, Homo sapiens
  misc_RNA (1)...(19): siRNA sense strand
aaacagagcugcagcaaug

SEQ ID NO: 1704068 - RNA, 19 nt, Homo sapiens
  misc_RNA (1)...(19): siRNA sense strand
gaaaguauccagcugauga

SEQ ID NO: 1704069 - RNA, 19 nt, Homo sapiens
  misc_RNA (1)...(19): siRNA sense strand
ggaaaggacuggaauugau

SEQ ID NO: 1704070 - RNA, 19 nt, Homo sapiens
  misc_RNA (1)...(19): siRNA sense strand
caagggauauggauuuauu

SEQ ID NO: 1704071 - RNA, 19 nt, Homo sapiens
  misc_RNA (1)...(19): siRNA sense strand
gauaacagcagcauaugua

SEQ ID NO: 1704072 - RNA, 19 nt, Homo sapiens
  misc_RNA (1)...(19): siRNA sense strand
gauuaaggaugaugugauu

SEQ ID NO: 1704073 - RNA, 19 nt, Homo sapiens
  misc_RNA (1)...(19): siRNA sense strand
ggaacaacuuaauggauuu

SEQ ID NO: 1704074 - RNA, 19 nt, Homo sapiens
  misc_RNA (1)...(19): siRNA sense strand
ccaaaggaauugcuuaugu

SEQ ID NO: 1704075 - RNA, 19 nt, Homo sapiens
  misc_RNA (1)...(19): siRNA sense strand
gcaggugguuugcugguaa

SEQ ID NO: 1704076 - RNA, 19 nt, Homo sapiens
  misc_RNA (1)...(19): siRNA sense strand
ccaacucucuaacauguuu

SEQ ID NO: 1704077 - RNA, 19 nt, Homo sapiens
  misc_RNA (1)...(19): siRNA sense strand
gaaaggacuggaauugauu

SEQ ID NO: 1704078 - RNA, 19 nt, Homo sapiens
  misc_RNA (1)...(19): siRNA sense strand
caaaggaauugcuuaugug

SEQ ID NO: 1704079 - RNA, 19 nt, Homo sapiens
  misc_RNA (1)...(19): siRNA sense strand
gaaaguuggucauguuacu

SEQ ID NO: 1704080 - RNA, 19 nt, Homo sapiens
  misc_RNA (1)...(19): siRNA sense strand
gaugggauaccgagauuaa

SEQ ID NO: 1704081 - RNA, 19 nt, Homo sapiens
  misc_RNA (1)...(19): siRNA sense strand
caagggauuuggaagaguu

SEQ ID NO: 1704082 - RNA, 19 nt, Homo sapiens
  misc_RNA (1)...(19): siRNA sense strand
uggaacaacuuaauggauu

SEQ ID NO: 1704083 - RNA, 19 nt, Homo sapiens
  misc_RNA (1)...(19): siRNA sense strand
gacagaaauucaagacguu

SEQ ID NO: 1704084 - RNA, 19 nt, Homo sapiens
  misc_RNA (1)...(19): siRNA sense strand
gaagaaguuggaugggaua

SEQ ID NO: 1704085 - RNA, 19 nt, Homo sapiens
  misc_RNA (1)...(19): siRNA sense strand
gggaagugcuggaccuaug

SEQ ID NO: 1704086 - RNA, 19 nt, Homo sapiens
  misc_RNA (1)...(19): siRNA sense strand
gggaacaacuggucgucuu

SEQ ID NO: 1704087 - RNA, 19 nt, Homo sapiens
  misc_RNA (1)...(19): siRNA sense strand
auaccgagauuaaggauga

SEQ ID NO: 1704088 - RNA, 19 nt, Homo sapiens
  misc_RNA (1)...(19): siRNA sense strand
acagcaagcucuacagaug

SEQ ID NO: 1704089 - RNA, 19 nt, Homo sapiens
  misc_RNA (1)...(19): siRNA sense strand
ggaauugauuugggaacaa

SEQ ID NO: 1704090 - RNA, 19 nt, Homo sapiens
  misc_RNA (1)...(19): siRNA sense strand
gcaggaagaccaaugaaag

SEQ ID NO: 1704091 - RNA, 19 nt, Homo sapiens
  misc_RNA (1)...(19): siRNA sense strand
caacuuaccacaaccuguu

SEQ ID NO: 1704092 - RNA, 19 nt, Homo sapiens
  misc_RNA (1)...(19): siRNA sense strand
ucaaacagaagaagaaguu

SEQ ID NO: 1704093 - RNA, 19 nt, Homo sapiens
  misc_RNA (1)...(19): siRNA sense strand
gaguggcucuuuggcauuu

SEQ ID NO: 1704094 - RNA, 19 nt, Homo sapiens
  misc_RNA (1)...(19): siRNA sense strand
ggaagaccaaugaaaguug

SEQ ID NO: 1704095 - RNA, 19 nt, Homo sapiens
  misc_RNA (1)...(19): siRNA sense strand
gaacuggaaaggacuggaa

SEQ ID NO: 1704096 - RNA, 19 nt, Homo sapiens
  misc_RNA (1)...(19): siRNA sense strand
gugaagugcccaucaauug

SEQ ID NO: 1704097 - RNA, 19 nt, Homo sapiens
  misc_RNA (1)...(19): siRNA sense strand
gcacagcaagcucuacaga

SEQ ID NO: 1704098 - RNA, 19 nt, Homo sapiens
  misc_RNA (1)...(19): siRNA sense strand
cagcaauggcaaacaauuu

SEQ ID NO: 1704099 - RNA, 19 nt, Homo sapiens
  misc_RNA (1)...(19): siRNA sense strand
gcagcuggcggcaagaauu

SEQ ID NO: 1704100 - RNA, 19 nt, Homo sapiens
  misc_RNA (1)...(19): siRNA sense strand
gaacuagcaggaagaccaa

SEQ ID NO: 1704101 - RNA, 19 nt, Homo sapiens
  misc_RNA (1)...(19): siRNA sense strand
ggaagugcuggaccuauga

SEQ ID NO: 1704102 - RNA, 19 nt, Homo sapiens
  misc_RNA (1)...(19): siRNA sense strand
cucagugccucuagcaaua

SEQ ID NO: 1704103 - RNA, 19 nt, Homo sapiens
  misc_RNA (1)...(19): siRNA sense strand
ggaaagguucgagauguga

SEQ ID NO: 1704104 - RNA, 19 nt, Homo sapiens
  misc_RNA (1)...(19): siRNA sense strand
gcagcaauggcaaacaauu

SEQ ID NO: 1704105 - RNA, 19 nt, Homo sapiens
  misc_RNA (1)...(19): siRNA sense strand
cgagaugugaggaugauuu

SEQ ID NO: 1704106 - RNA, 19 nt, Homo sapiens
  misc_RNA (1)...(19): siRNA sense strand
uaggaaagguucgagaugu

SEQ ID NO: 1704107 - RNA, 19 nt, Homo sapiens
  misc_RNA (1)...(19): siRNA sense strand
ggguacagguuugcagauu

SEQ ID NO: 1704108 - RNA, 19 nt, Homo sapiens
  misc_RNA (1)...(19): siRNA sense strand
gguacagguuugcagauuc

SEQ ID NO: 1704109 - RNA, 19 nt, Homo sapiens
  misc_RNA (1)...(19): siRNA sense strand
cacaaccuguuuccugauu

SEQ ID NO: 1704110 - RNA, 19 nt, Homo sapiens
  misc_RNA (1)...(19): siRNA sense strand
acagaugaguggcucuuug

SEQ ID NO: 1704111 - RNA, 19 nt, Homo sapiens
  misc_RNA (1)...(19): siRNA sense strand
ggaccuaugaggcuuuaug

SEQ ID NO: 1704112 - RNA, 19 nt, Homo sapiens
  misc_RNA (1)...(19): siRNA sense strand
aggaugaugugauugaaga

SEQ ID NO: 1704113 - RNA, 19 nt, Homo sapiens
  misc_RNA (1)...(19): siRNA sense strand
uaacauguuuaacccucaa

SEQ ID NO: 1704114 - RNA, 19 nt, Homo sapiens
  misc_RNA (1)...(19): siRNA sense strand
gaacaacuuaauggauuug

SEQ ID NO: 1704115 - RNA, 19 nt, Homo sapiens
  misc_RNA (1)...(19): siRNA sense strand
uaaggaugaugugauugaa

SEQ ID NO: 1704116 - RNA, 19 nt, Homo sapiens
  misc_RNA (1)...(19): siRNA sense strand
uaauggauuugaacuagca

SEQ ID NO: 1704117 - RNA, 19 nt, Homo sapiens
  misc_RNA (1)...(19): siRNA sense strand
aggauuaacuggccaacga

SEQ ID NO: 1704118 - RNA, 19 nt, Homo sapiens
  misc_RNA (1)...(19): siRNA sense strand
gcaaacaauuuacaaaagg

SEQ ID NO: 1704119 - RNA, 19 nt, Homo sapiens
  misc_RNA (1)...(19): siRNA sense strand
gcauauguaccucuuccaa

SEQ ID NO: 1704120 - RNA, 19 nt, Homo sapiens
  misc_RNA (1)...(19): siRNA sense strand
gaacaacuggucgucuuca

SEQ ID NO: 1704121 - RNA, 19 nt, Homo sapiens
  misc_RNA (1)...(19): siRNA sense strand
aaugauaacagcagcauau

SEQ ID NO: 1704122 - RNA, 19 nt, Homo sapiens
  misc_RNA (1)...(19): siRNA sense strand
agcaauggcaaacaauuua

SEQ ID NO: 1704123 - RNA, 19 nt, Homo sapiens
  misc_RNA (1)...(19): siRNA sense strand
uaugugaagugcccaucaa

SEQ ID NO: 1704124 - RNA, 19 nt, Homo sapiens
  misc_RNA (1)...(19): siRNA sense strand
gauuugcaaacaagacuuu

SEQ ID NO: 1704125 - RNA, 19 nt, Homo sapiens
  misc_RNA (1)...(19): siRNA sense strand
gaauugauuugggaacaac

SEQ ID NO: 1704126 - RNA, 19 nt, Homo sapiens
  misc_RNA (1)...(19): siRNA sense strand
gcucagugccucuagcaau

SEQ ID NO: 1704127 - RNA, 19 nt, Homo sapiens
  misc_RNA (1)...(19): siRNA sense strand
cuuaauggauuugaacuag

SEQ ID NO: 1704128 - RNA, 19 nt, Homo sapiens
  misc_RNA (1)...(19): siRNA sense strand
uuaaggaugaugugauuga

SEQ ID NO: 1704129 - RNA, 19 nt, Homo sapiens
  misc_RNA (1)...(19): siRNA sense strand
agaauucgaccaagggauu

SEQ ID NO: 1704130 - RNA, 19 nt, Homo sapiens
  misc_RNA (1)...(19): siRNA sense strand
uggaugggauaccgagauu

SEQ ID NO: 1704131 - RNA, 19 nt, Homo sapiens
  misc_RNA (1)...(19): siRNA sense strand
cugcagcaauggcaaacaa

SEQ ID NO: 1704132 - RNA, 19 nt, Homo sapiens
  misc_RNA (1)...(19): siRNA sense strand
caaccuguuuccugauucu

SEQ ID NO: 1704133 - RNA, 19 nt, Homo sapiens
  misc_RNA (1)...(19): siRNA sense strand
auguaccucuuccaacuua

SEQ ID NO: 1704134 - RNA, 19 nt, Homo sapiens
  misc_RNA (1)...(19): siRNA sense strand
guaggaaagguucgagaug

SEQ ID NO: 1704135 - RNA, 19 nt, Homo sapiens
  misc_RNA (1)...(19): siRNA sense strand
gaauucgaccaagggauuu

SEQ ID NO: 1704136 - RNA, 19 nt, Homo sapiens
  misc_RNA (1)...(19): siRNA sense strand
uggaagaauugaaaguauc

SEQ ID NO: 1704137 - RNA, 19 nt, Homo sapiens
  misc_RNA (1)...(19): siRNA sense strand
uaugugggcucauuacacu

SEQ ID NO: 1704138 - RNA, 19 nt, Homo sapiens
  misc_RNA (1)...(19): siRNA sense strand
gccucuagcaauaggauua

SEQ ID NO: 1704139 - RNA, 19 nt, Homo sapiens
  misc_RNA (1)...(19): siRNA sense strand
gcaauguguaugugaagug

SEQ ID NO: 1704140 - RNA, 19 nt, Homo sapiens
  misc_RNA (1)...(19): siRNA sense strand
ugaugugauugaagaaugu

SEQ ID NO: 1704141 - RNA, 19 nt, Homo sapiens
  misc_RNA (1)...(19): siRNA sense strand
gagauuaaggaugauguga

SEQ ID NO: 1704142 - RNA, 19 nt, Homo sapiens
  misc_RNA (1)...(19): siRNA sense strand
cagcaagcucuacagauga

SEQ ID NO: 1704143 - RNA, 19 nt, Homo sapiens
  misc_RNA (1)...(19): siRNA sense strand
ugacucagaaugugccaaa

SEQ ID NO: 1704144 - RNA, 19 nt, Homo sapiens
  misc_RNA (1)...(19): siRNA sense strand
cucauuacacuucaacaua

SEQ ID NO: 1704145 - RNA, 19 nt, Homo sapiens
  misc_RNA (1)...(19): siRNA sense strand
gagaugugaggaugauuuc

SEQ ID NO: 1704146 - RNA, 19 nt, Homo sapiens
  misc_RNA (1)...(19): siRNA sense strand
gaugugaggaugauuucug

SEQ ID NO: 1704147 - RNA, 19 nt, Homo sapiens
  misc_RNA (1)...(19): siRNA sense strand
acacaauguuuccaacucu

SEQ ID NO: 1704148 - RNA, 19 nt, Homo sapiens
  misc_RNA (1)...(19): siRNA sense strand
guacagguuugcagauucc

SEQ ID NO: 1704149 - RNA, 19 nt, Homo sapiens
  misc_RNA (1)...(19): siRNA sense strand
uucaagacguuccaaagga

SEQ ID NO: 1704150 - RNA, 19 nt, Homo sapiens
  misc_RNA (1)...(19): siRNA sense strand
aaauucagcucagggcaau

SEQ ID NO: 1704151 - RNA, 19 nt, Homo sapiens
  misc_RNA (1)...(19): siRNA sense strand
uuccaacucucuaacaugu

SEQ ID NO: 1704152 - RNA, 19 nt, Homo sapiens
  misc_RNA (1)...(19): siRNA sense strand
ggaacaacuggucgucuuc

SEQ ID NO: 1704153 - RNA, 19 nt, Homo sapiens
  misc_RNA (1)...(19): siRNA sense strand
gaugauggacagugaaacu

SEQ ID NO: 1704154 - RNA, 19 nt, Homo sapiens
  misc_RNA (1)...(19): siRNA sense strand
ggcaggugguuugcuggua

SEQ ID NO: 1704155 - RNA, 19 nt, Homo sapiens
  misc_RNA (1)...(19): siRNA sense strand
gagcugcagcaauggcaaa

SEQ ID NO: 1704156 - RNA, 19 nt, Homo sapiens
  misc_RNA (1)...(19): siRNA sense strand
gaauugcuuauguggaguu

SEQ ID NO: 1704157 - RNA, 19 nt, Homo sapiens
  misc_RNA (1)...(19): siRNA sense strand
caacuuaauggauuugaac

SEQ ID NO: 1704158 - RNA, 19 nt, Homo sapiens
  misc_RNA (1)...(19): siRNA sense strand
cagcucagggcaaugugua

SEQ ID NO: 1704159 - RNA, 19 nt, Homo sapiens
  misc_RNA (1)...(19): siRNA sense strand
caggugguuugcugguaaa

SEQ ID NO: 1704160 - RNA, 19 nt, Homo sapiens
  misc_RNA (1)...(19): siRNA sense strand
gcaauggcaaacaauuuac

SEQ ID NO: 1704161 - RNA, 19 nt, Homo sapiens
  misc_RNA (1)...(19): siRNA sense strand
gaagugcccaucaauugcu

SEQ ID NO: 1704162 - RNA, 19 nt, Homo sapiens
  misc_RNA (1)...(19): siRNA sense strand
aaaggacuggaauugauuu

SEQ ID NO: 1704163 - RNA, 19 nt, Homo sapiens
  misc_RNA (1)...(19): siRNA sense strand
gaaauucaagacguuccaa

SEQ ID NO: 1704164 - RNA, 19 nt, Homo sapiens
  misc_RNA (1)...(19): siRNA sense strand
caggaagaccaaugaaagu

SEQ ID NO: 1704165 - RNA, 19 nt, Homo sapiens
  misc_RNA (1)...(19): siRNA sense strand
uugcagaggguacagguuu

SEQ ID NO: 1704166 - RNA, 19 nt, Homo sapiens
  misc_RNA (1)...(19): siRNA sense strand
uucgagugcuaguucauuu

SEQ ID NO: 1704167 - RNA, 19 nt, Homo sapiens
  misc_RNA (1)...(19): siRNA sense strand
gaaagcaacuggugauuua

SEQ ID NO: 1704168 - RNA, 19 nt, Homo sapiens
  misc_RNA (1)...(19): siRNA sense strand
gaacggagacgaugccuuu

SEQ ID NO: 1704169 - RNA, 19 nt, Homo sapiens
  misc_RNA (1)...(19): siRNA sense strand
ucaggaagaugacgaguaa

SEQ ID NO: 1704170 - RNA, 19 nt, Homo sapiens
  misc_RNA (1)...(19): siRNA sense strand
caagacaucuggacccaaa

SEQ ID NO: 1704171 - RNA, 19 nt, Homo sapiens
  misc_RNA (1)...(19): siRNA sense strand
gaugaaagccucggagaaa

SEQ ID NO: 1704172 - RNA, 19 nt, Homo sapiens
  misc_RNA (1)...(19): siRNA sense strand
uaggguugguucucaaaua

SEQ ID NO: 1704173 - RNA, 19 nt, Homo sapiens
  misc_RNA (1)...(19): siRNA sense strand
cggagacgaugccuuugua

SEQ ID NO: 1704174 - RNA, 19 nt, Homo sapiens
  misc_RNA (1)...(19): siRNA sense strand
gaucagcgacccucaggaa

SEQ ID NO: 1704175 - RNA, 19 nt, Homo sapiens
  misc_RNA (1)...(19): siRNA sense strand
gcagaggaaggaaaugauu

SEQ ID NO: 1704176 - RNA, 19 nt, Homo sapiens
  misc_RNA (1)...(19): siRNA sense strand
gaagaucacgcccgagaag

SEQ ID NO: 1704177 - RNA, 19 nt, Homo sapiens
  misc_RNA (1)...(19): siRNA sense strand
ccaccuuucaugcguaaua

SEQ ID NO: 1704178 - RNA, 19 nt, Homo sapiens
  misc_RNA (1)...(19): siRNA sense strand
ucaaauaccagagaagaug

SEQ ID NO: 1704179 - RNA, 19 nt, Homo sapiens
  misc_RNA (1)...(19): siRNA sense strand
ccacagagugcgugagaga

SEQ ID NO: 1704180 - RNA, 19 nt, Homo sapiens
  misc_RNA (1)...(19): siRNA sense strand
gaccuaggguugguucuca

SEQ ID NO: 1704181 - RNA, 19 nt, Homo sapiens
  misc_RNA (1)...(19): siRNA sense strand
ggccaugacuaaacuaggu

SEQ ID NO: 1704182 - RNA, 19 nt, Homo sapiens
  misc_RNA (1)...(19): siRNA sense strand
aguaugaggccaugacuaa

SEQ ID NO: 1704183 - RNA, 19 nt, Homo sapiens
  misc_RNA (1)...(19): siRNA sense strand
gaagggagugccagaagca

SEQ ID NO: 1704184 - RNA, 19 nt, Homo sapiens
  misc_RNA (1)...(19): siRNA sense strand
ggugauuuaugaagagauc

SEQ ID NO: 1704185 - RNA, 19 nt, Homo sapiens
  misc_RNA (1)...(19): siRNA sense strand
gagaaaaucaucuaugugu

SEQ ID NO: 1704186 - RNA, 19 nt, Homo sapiens
  misc_RNA (1)...(19): siRNA sense strand
gaaaguaugaggccaugac

SEQ ID NO: 1704187 - RNA, 19 nt, Homo sapiens
  misc_RNA (1)...(19): siRNA sense strand
agaaagcaacuggugauuu

SEQ ID NO: 1704188 - RNA, 19 nt, Homo sapiens
  misc_RNA (1)...(19): siRNA sense strand
ugagaagguuaacaagaca

SEQ ID NO: 1704189 - RNA, 19 nt, Homo sapiens
  misc_RNA (1)...(19): siRNA sense strand
caccuuucaugcguaauaa

SEQ ID NO: 1704190 - RNA, 19 nt, Homo sapiens
  misc_RNA (1)...(19): siRNA sense strand
gagaaagcaacuggugauu

SEQ ID NO: 1704191 - RNA, 19 nt, Homo sapiens
  misc_RNA (1)...(19): siRNA sense strand
gagaaagagugggaaaaga

SEQ ID NO: 1704192 - RNA, 19 nt, Homo sapiens
  misc_RNA (1)...(19): siRNA sense strand
cagcagaggaaggaaauga

SEQ ID NO: 1704193 - RNA, 19 nt, Homo sapiens
  misc_RNA (1)...(19): siRNA sense strand
cgagaagccagcagaggaa

SEQ ID NO: 1704194 - RNA, 19 nt, Homo sapiens
  misc_RNA (1)...(19): siRNA sense strand
aaacuaaauaccucugaga

SEQ ID NO: 1704195 - RNA, 19 nt, Homo sapiens
  misc_RNA (1)...(19): siRNA sense strand
gaagccagcagaggaagga

SEQ ID NO: 1704196 - RNA, 19 nt, Homo sapiens
  misc_RNA (1)...(19): siRNA sense strand
cagcgacccucaggaagau

SEQ ID NO: 1704197 - RNA, 19 nt, Homo sapiens
  misc_RNA (1)...(19): siRNA sense strand
auaaacgggucgcagacuu

SEQ ID NO: 1704198 - RNA, 19 nt, Homo sapiens
  misc_RNA (1)...(19): siRNA sense strand
caacuggugauuuaugaag

SEQ ID NO: 1704199 - RNA, 19 nt, Homo sapiens
  misc_RNA (1)...(19): siRNA sense strand
cugagaagguuaacaagac

SEQ ID NO: 1704200 - RNA, 19 nt, Homo sapiens
  misc_RNA (1)...(19): siRNA sense strand
ccucugagaagguuaacaa

SEQ ID NO: 1704201 - RNA, 19 nt, Homo sapiens
  misc_RNA (1)...(19): siRNA sense strand
acagagugcgugagagaaa

SEQ ID NO: 1704202 - RNA, 19 nt, Homo sapiens
  misc_RNA (1)...(19): siRNA sense strand
agcaacuggugauuuauga

SEQ ID NO: 1704203 - RNA, 19 nt, Homo sapiens
  misc_RNA (1)...(19): siRNA sense strand
gcaacuggugauuuaugaa

SEQ ID NO: 1704204 - RNA, 19 nt, Homo sapiens
  misc_RNA (1)...(19): siRNA sense strand
ucagcgacccucaggaaga

SEQ ID NO: 1704205 - RNA, 19 nt, Homo sapiens
  misc_RNA (1)...(19): siRNA sense strand
cggagaaaaucaucuaugu

SEQ ID NO: 1704206 - RNA, 19 nt, Homo sapiens
  misc_RNA (1)...(19): siRNA sense strand
uaaacgggucgcagacuuc

SEQ ID NO: 1704207 - RNA, 19 nt, Homo sapiens
  misc_RNA (1)...(19): siRNA sense strand
gaaagagugggaaaagaug

SEQ ID NO: 1704208 - RNA, 19 nt, Homo sapiens
  misc_RNA (1)...(19): siRNA sense strand
aggccacccucccaccuuu

SEQ ID NO: 1704209 - RNA, 19 nt, Homo sapiens
  misc_RNA (1)...(19): siRNA sense strand
gaaaacuaaauaccucuga

SEQ ID NO: 1704210 - RNA, 19 nt, Homo sapiens
  misc_RNA (1)...(19): siRNA sense strand
ggggaaugauuuugauaau

SEQ ID NO: 1704211 - RNA, 19 nt, Homo sapiens
  misc_RNA (1)...(19): siRNA sense strand
gggaaugauuuugauaaug

SEQ ID NO: 1704212 - RNA, 19 nt, Homo sapiens
  misc_RNA (1)...(19): siRNA sense strand
guaugaggccaugacuaaa

SEQ ID NO: 1704213 - RNA, 19 nt, Homo sapiens
  misc_RNA (1)...(19): siRNA sense strand
cagaggaaggaaaugauuc

SEQ ID NO: 1704214 - RNA, 19 nt, Homo sapiens
  misc_RNA (1)...(19): siRNA sense strand
gaaucagguugaacauccu

SEQ ID NO: 1704215 - RNA, 19 nt, Homo sapiens
  misc_RNA (1)...(19): siRNA sense strand
agagaaagcaacuggugau

SEQ ID NO: 1704216 - RNA, 19 nt, Homo sapiens
  misc_RNA (1)...(19): siRNA sense strand
ucugagaagguuaacaaga

SEQ ID NO: 1704217 - RNA, 19 nt, Homo sapiens
  misc_RNA (1)...(19): siRNA sense strand
cuucgaugauauugccaaa

SEQ ID NO: 1704218 - RNA, 19 nt, Homo sapiens
  misc_RNA (1)...(19): siRNA sense strand
cgaagaucacgcccgagaa

SEQ ID NO: 1704219 - RNA, 19 nt, Homo sapiens
  misc_RNA (1)...(19): siRNA sense strand
gaaagcaacuggugauuua

SEQ ID NO: 1704220 - RNA, 19 nt, Homo sapiens
  misc_RNA (1)...(19): siRNA sense strand
gaacggagacgaugccuuu

SEQ ID NO: 1704221 - RNA, 19 nt, Homo sapiens
  misc_RNA (1)...(19): siRNA sense strand
ucaggaagaugacgaguaa

SEQ ID NO: 1704222 - RNA, 19 nt, Homo sapiens
  misc_RNA (1)...(19): siRNA sense strand
caagacaucuggacccaaa

SEQ ID NO: 1704223 - RNA, 19 nt, Homo sapiens
  misc_RNA (1)...(19): siRNA sense strand
gaugaaagccucggagaaa

SEQ ID NO: 1704224 - RNA, 19 nt, Homo sapiens
  misc_RNA (1)...(19): siRNA sense strand
uaggguugguucucaaaua

SEQ ID NO: 1704225 - RNA, 19 nt, Homo sapiens
  misc_RNA (1)...(19): siRNA sense strand
cggagacgaugccuuugua

SEQ ID NO: 1704226 - RNA, 19 nt, Homo sapiens
  misc_RNA (1)...(19): siRNA sense strand
gaucagcgacccucaggaa

SEQ ID NO: 1704227 - RNA, 19 nt, Homo sapiens
  misc_RNA (1)...(19): siRNA sense strand
gcagaggaaggaaaugauu

SEQ ID NO: 1704228 - RNA, 19 nt, Homo sapiens
  misc_RNA (1)...(19): siRNA sense strand
gaagaucacgcccgagaag

SEQ ID NO: 1704229 - RNA, 19 nt, Homo sapiens
  misc_RNA (1)...(19): siRNA sense strand
ccaccuuucaugcguaaua

SEQ ID NO: 1704230 - RNA, 19 nt, Homo sapiens
  misc_RNA (1)...(19): siRNA sense strand
ucaaauaccagagaagaug

SEQ ID NO: 1704231 - RNA, 19 nt, Homo sapiens
  misc_RNA (1)...(19): siRNA sense strand
ccacagagugcgugagaga

SEQ ID NO: 1704232 - RNA, 19 nt, Homo sapiens
  misc_RNA (1)...(19): siRNA sense strand
gaccuaggguugguucuca

SEQ ID NO: 1704233 - RNA, 19 nt, Homo sapiens
  misc_RNA (1)...(19): siRNA sense strand
ggccaugacuaaacuaggu

SEQ ID NO: 1704234 - RNA, 19 nt, Homo sapiens
  misc_RNA (1)...(19): siRNA sense strand
aguaugaggccaugacuaa

SEQ ID NO: 1704235 - RNA, 19 nt, Homo sapiens
  misc_RNA (1)...(19): siRNA sense strand
gaagggagugccagaagca

SEQ ID NO: 1704236 - RNA, 19 nt, Homo sapiens
  misc_RNA (1)...(19): siRNA sense strand
ggugauuuaugaagagauc

SEQ ID NO: 1704237 - RNA, 19 nt, Homo sapiens
  misc_RNA (1)...(19): siRNA sense strand
gagaaaaucaucuaugugu

SEQ ID NO: 1704238 - RNA, 19 nt, Homo sapiens
  misc_RNA (1)...(19): siRNA sense strand
gaaaguaugaggccaugac

SEQ ID NO: 1704239 - RNA, 19 nt, Homo sapiens
  misc_RNA (1)...(19): siRNA sense strand
agaaagcaacuggugauuu

SEQ ID NO: 1704240 - RNA, 19 nt, Homo sapiens
  misc_RNA (1)...(19): siRNA sense strand
ugagaagguuaacaagaca

SEQ ID NO: 1704241 - RNA, 19 nt, Homo sapiens
  misc_RNA (1)...(19): siRNA sense strand
caccuuucaugcguaauaa

SEQ ID NO: 1704242 - RNA, 19 nt, Homo sapiens
  misc_RNA (1)...(19): siRNA sense strand
gagaaagcaacuggugauu

SEQ ID NO: 1704243 - RNA, 19 nt, Homo sapiens
  misc_RNA (1)...(19): siRNA sense strand
gagaaagagugggaaaaga

SEQ ID NO: 1704244 - RNA, 19 nt, Homo sapiens
  misc_RNA (1)...(19): siRNA sense strand
cagcagaggaaggaaauga

SEQ ID NO: 1704245 - RNA, 19 nt, Homo sapiens
  misc_RNA (1)...(19): siRNA sense strand
cgagaagccagcagaggaa

SEQ ID NO: 1704246 - RNA, 19 nt, Homo sapiens
  misc_RNA (1)...(19): siRNA sense strand
aaacuaaauaccucugaga

SEQ ID NO: 1704247 - RNA, 19 nt, Homo sapiens
  misc_RNA (1)...(19): siRNA sense strand
gaagccagcagaggaagga

SEQ ID NO: 1704248 - RNA, 19 nt, Homo sapiens
  misc_RNA (1)...(19): siRNA sense strand
cagcgacccucaggaagau

SEQ ID NO: 1704249 - RNA, 19 nt, Homo sapiens
  misc_RNA (1)...(19): siRNA sense strand
auaaacgggucgcagacuu

SEQ ID NO: 1704250 - RNA, 19 nt, Homo sapiens
  misc_RNA (1)...(19): siRNA sense strand
caacuggugauuuaugaag

SEQ ID NO: 1704251 - RNA, 19 nt, Homo sapiens
  misc_RNA (1)...(19): siRNA sense strand
cugagaagguuaacaagac

SEQ ID NO: 1704252 - RNA, 19 nt, Homo sapiens
  misc_RNA (1)...(19): siRNA sense strand
ccucugagaagguuaacaa

SEQ ID NO: 1704253 - RNA, 19 nt, Homo sapiens
  misc_RNA (1)...(19): siRNA sense strand
acagagugcgugagagaaa

SEQ ID NO: 1704254 - RNA, 19 nt, Homo sapiens
  misc_RNA (1)...(19): siRNA sense strand
agcaacuggugauuuauga

SEQ ID NO: 1704255 - RNA, 19 nt, Homo sapiens
  misc_RNA (1)...(19): siRNA sense strand
gcaacuggugauuuaugaa

SEQ ID NO: 1704256 - RNA, 19 nt, Homo sapiens
  misc_RNA (1)...(19): siRNA sense strand
ucagcgacccucaggaaga

SEQ ID NO: 1704257 - RNA, 19 nt, Homo sapiens
  misc_RNA (1)...(19): siRNA sense strand
cggagaaaaucaucuaugu

SEQ ID NO: 1704258 - RNA, 19 nt, Homo sapiens
  misc_RNA (1)...(19): siRNA sense strand
uaaacgggucgcagacuuc

SEQ ID NO: 1704259 - RNA, 19 nt, Homo sapiens
  misc_RNA (1)...(19): siRNA sense strand
gaaagagugggaaaagaug

SEQ ID NO: 1704260 - RNA, 19 nt, Homo sapiens
  misc_RNA (1)...(19): siRNA sense strand
aggccacccucccaccuuu

SEQ ID NO: 1704261 - RNA, 19 nt, Homo sapiens
  misc_RNA (1)...(19): siRNA sense strand
gaaaacuaaauaccucuga

SEQ ID NO: 1704262 - RNA, 19 nt, Homo sapiens
  misc_RNA (1)...(19): siRNA sense strand
ggggaaugauuuugauaau

SEQ ID NO: 1704263 - RNA, 19 nt, Homo sapiens
  misc_RNA (1)...(19): siRNA sense strand
gggaaugauuuugauaaug

SEQ ID NO: 1704264 - RNA, 19 nt, Homo sapiens
  misc_RNA (1)...(19): siRNA sense strand
guaugaggccaugacuaaa

SEQ ID NO: 1704265 - RNA, 19 nt, Homo sapiens
  misc_RNA (1)...(19): siRNA sense strand
cagaggaaggaaaugauuc

SEQ ID NO: 1704266 - RNA, 19 nt, Homo sapiens
  misc_RNA (1)...(19): siRNA sense strand
gaaucagguugaacauccu

SEQ ID NO: 1704267 - RNA, 19 nt, Homo sapiens
  misc_RNA (1)...(19): siRNA sense strand
agagaaagcaacuggugau

SEQ ID NO: 1704268 - RNA, 19 nt, Homo sapiens
  misc_RNA (1)...(19): siRNA sense strand
ucugagaagguuaacaaga

SEQ ID NO: 1704269 - RNA, 19 nt, Homo sapiens
  misc_RNA (1)...(19): siRNA sense strand
cuucgaugauauugccaaa

SEQ ID NO: 1704270 - RNA, 19 nt, Homo sapiens
  misc_RNA (1)...(19): siRNA sense strand
cgaagaucacgcccgagaa

SEQ ID NO: 1704271 - RNA, 19 nt, Homo sapiens
  misc_RNA (1)...(19): siRNA sense strand
gcaaaggaauguuaaucua

SEQ ID NO: 1704272 - RNA, 19 nt, Homo sapiens
  misc_RNA (1)...(19): siRNA sense strand
gaauggauauuugcagaua

SEQ ID NO: 1704273 - RNA, 19 nt, Homo sapiens
  misc_RNA (1)...(19): siRNA sense strand
cagaaucacugaaagcaaa

SEQ ID NO: 1704274 - RNA, 19 nt, Homo sapiens
  misc_RNA (1)...(19): siRNA sense strand
caucguggcgcauguauua

SEQ ID NO: 1704275 - RNA, 19 nt, Homo sapiens
  misc_RNA (1)...(19): siRNA sense strand
gaagacaauuauucacguu

SEQ ID NO: 1704276 - RNA, 19 nt, Homo sapiens
  misc_RNA (1)...(19): siRNA sense strand
gaaaccaaauccugaucaa

SEQ ID NO: 1704277 - RNA, 19 nt, Homo sapiens
  misc_RNA (1)...(19): siRNA sense strand
caagagcaaaggaauguua

SEQ ID NO: 1704278 - RNA, 19 nt, Homo sapiens
  misc_RNA (1)...(19): siRNA sense strand
ccauuaaaguuacugguuu

SEQ ID NO: 1704279 - RNA, 19 nt, Homo sapiens
  misc_RNA (1)...(19): siRNA sense strand
uaaguacgauguucaagug

SEQ ID NO: 1704280 - RNA, 19 nt, Homo sapiens
  misc_RNA (1)...(19): siRNA sense strand
gaaaauaaacgcuccaaaa

SEQ ID NO: 1704281 - RNA, 19 nt, Homo sapiens
  misc_RNA (1)...(19): siRNA sense strand
gaaaccagaaucacugaaa

SEQ ID NO: 1704282 - RNA, 19 nt, Homo sapiens
  misc_RNA (1)...(19): siRNA sense strand
gaguggagccaaccuauuu

SEQ ID NO: 1704283 - RNA, 19 nt, Homo sapiens
  misc_RNA (1)...(19): siRNA sense strand
gcagaacgaccacucacua

SEQ ID NO: 1704284 - RNA, 19 nt, Homo sapiens
  misc_RNA (1)...(19): siRNA sense strand
caaauaaauccuccacuga

SEQ ID NO: 1704285 - RNA, 19 nt, Homo sapiens
  misc_RNA (1)...(19): siRNA sense strand
ccuggaaccucaauuguga

SEQ ID NO: 1704286 - RNA, 19 nt, Homo sapiens
  misc_RNA (1)...(19): siRNA sense strand
ucacgccauugaucaaaua

SEQ ID NO: 1704287 - RNA, 19 nt, Homo sapiens
  misc_RNA (1)...(19): siRNA sense strand
ccacaaacacuacagaaga

SEQ ID NO: 1704288 - RNA, 19 nt, Homo sapiens
  misc_RNA (1)...(19): siRNA sense strand
ugaaggaacucgucucucu

SEQ ID NO: 1704289 - RNA, 19 nt, Homo sapiens
  misc_RNA (1)...(19): siRNA sense strand
gagccaaccuauuuaugug

SEQ ID NO: 1704290 - RNA, 19 nt, Homo sapiens
  misc_RNA (1)...(19): siRNA sense strand
gaacucgucucucuaucca

SEQ ID NO: 1704291 - RNA, 19 nt, Homo sapiens
  misc_RNA (1)...(19): siRNA sense strand
gaagaugacuaugaaacca

SEQ ID NO: 1704292 - RNA, 19 nt, Homo sapiens
  misc_RNA (1)...(19): siRNA sense strand
ugacuuacuuccugaugaa

SEQ ID NO: 1704293 - RNA, 19 nt, Homo sapiens
  misc_RNA (1)...(19): siRNA sense strand
gaaagcaaauguguaacca

SEQ ID NO: 1704294 - RNA, 19 nt, Homo sapiens
  misc_RNA (1)...(19): siRNA sense strand
gcagggcucuggagugagu

SEQ ID NO: 1704295 - RNA, 19 nt, Homo sapiens
  misc_RNA (1)...(19): siRNA sense strand
gaaugucacagcagagauu

SEQ ID NO: 1704296 - RNA, 19 nt, Homo sapiens
  misc_RNA (1)...(19): siRNA sense strand
uacaaggaauggauauuug

SEQ ID NO: 1704297 - RNA, 19 nt, Homo sapiens
  misc_RNA (1)...(19): siRNA sense strand
guacgauguucaagugaga

SEQ ID NO: 1704298 - RNA, 19 nt, Homo sapiens
  misc_RNA (1)...(19): siRNA sense strand
ccugucaauuucaccauua

SEQ ID NO: 1704299 - RNA, 19 nt, Homo sapiens
  misc_RNA (1)...(19): siRNA sense strand
ggagccaaccuauuuaugu

SEQ ID NO: 1704300 - RNA, 19 nt, Homo sapiens
  misc_RNA (1)...(19): siRNA sense strand
agaaaccagugucugcuuu

SEQ ID NO: 1704301 - RNA, 19 nt, Homo sapiens
  misc_RNA (1)...(19): siRNA sense strand
gaacgaccacucacuacug

SEQ ID NO: 1704302 - RNA, 19 nt, Homo sapiens
  misc_RNA (1)...(19): siRNA sense strand
gaaggaacucgucucucua

SEQ ID NO: 1704303 - RNA, 19 nt, Homo sapiens
  misc_RNA (1)...(19): siRNA sense strand
gauacugcaagcugacuua

SEQ ID NO: 1704304 - RNA, 19 nt, Homo sapiens
  misc_RNA (1)...(19): siRNA sense strand
cuacagaagacaauuauuc

SEQ ID NO: 1704305 - RNA, 19 nt, Homo sapiens
  misc_RNA (1)...(19): siRNA sense strand
ccaaugcauucaucucaau

SEQ ID NO: 1704306 - RNA, 19 nt, Homo sapiens
  misc_RNA (1)...(19): siRNA sense strand
ggaccauccugcagaacga

SEQ ID NO: 1704307 - RNA, 19 nt, Homo sapiens
  misc_RNA (1)...(19): siRNA sense strand
aauaaacgcuccaaaagaa

SEQ ID NO: 1704308 - RNA, 19 nt, Homo sapiens
  misc_RNA (1)...(19): siRNA sense strand
caaaagaagaugacuauga

SEQ ID NO: 1704309 - RNA, 19 nt, Homo sapiens
  misc_RNA (1)...(19): siRNA sense strand
aaauaucgcaugcugguuu

SEQ ID NO: 1704310 - RNA, 19 nt, Homo sapiens
  misc_RNA (1)...(19): siRNA sense strand
aaauaaauccuccacugaa

SEQ ID NO: 1704311 - RNA, 19 nt, Homo sapiens
  misc_RNA (1)...(19): siRNA sense strand
cauuaaaguuacugguuug

SEQ ID NO: 1704312 - RNA, 19 nt, Homo sapiens
  misc_RNA (1)...(19): siRNA sense strand
aauaaauccuccacugaau

SEQ ID NO: 1704313 - RNA, 19 nt, Homo sapiens
  misc_RNA (1)...(19): siRNA sense strand
caaaggaauguuaaucuag

SEQ ID NO: 1704314 - RNA, 19 nt, Homo sapiens
  misc_RNA (1)...(19): siRNA sense strand
cgccauugaucaaauaaau

SEQ ID NO: 1704315 - RNA, 19 nt, Homo sapiens
  misc_RNA (1)...(19): siRNA sense strand
acacuacagaagacaauua

SEQ ID NO: 1704316 - RNA, 19 nt, Homo sapiens
  misc_RNA (1)...(19): siRNA sense strand
ggaaaccaaauccugauca

SEQ ID NO: 1704317 - RNA, 19 nt, Homo sapiens
  misc_RNA (1)...(19): siRNA sense strand
gaucaagagcaaaggaaug

SEQ ID NO: 1704318 - RNA, 19 nt, Homo sapiens
  misc_RNA (1)...(19): siRNA sense strand
ugaagaaugccaagaauac

SEQ ID NO: 1704319 - RNA, 19 nt, Homo sapiens
  misc_RNA (1)...(19): siRNA sense strand
gagcaaaggaauguuaauc

SEQ ID NO: 1704320 - RNA, 19 nt, Homo sapiens
  misc_RNA (1)...(19): siRNA sense strand
gaccaaugcauucaucuca

SEQ ID NO: 1704321 - RNA, 19 nt, Homo sapiens
  misc_RNA (1)...(19): siRNA sense strand
gaagaaugccaagaauaca

SEQ ID NO: 1704322 - RNA, 19 nt, Homo sapiens
  misc_RNA (1)...(19): siRNA sense strand
aaccaaauccugaucaaga

SEQ ID NO: 1704323 - RNA, 19 nt, Homo sapiens
  misc_RNA (1)...(19): siRNA sense strand
acugaaagcaaauguguaa

SEQ ID NO: 1704324 - RNA, 19 nt, Homo sapiens
  misc_RNA (1)...(19): siRNA sense strand
gcaaauguguaaccauccu

SEQ ID NO: 1704325 - RNA, 19 nt, Homo sapiens
  misc_RNA (1)...(19): siRNA sense strand
caagugagagcagcaguga

SEQ ID NO: 1704326 - RNA, 19 nt, Homo sapiens
  misc_RNA (1)...(19): siRNA sense strand
acugcaagcugacuuacuu

SEQ ID NO: 1704327 - RNA, 19 nt, Homo sapiens
  misc_RNA (1)...(19): siRNA sense strand
gcccuuugaucagcuguuu

SEQ ID NO: 1704328 - RNA, 19 nt, Homo sapiens
  misc_RNA (1)...(19): siRNA sense strand
uuaaggucauaccaaguuu

SEQ ID NO: 1704329 - RNA, 19 nt, Homo sapiens
  misc_RNA (1)...(19): siRNA sense strand
aggcagggcucuggaguga

SEQ ID NO: 1704330 - RNA, 19 nt, Homo sapiens
  misc_RNA (1)...(19): siRNA sense strand
ccauugcuuugauuaugaa

SEQ ID NO: 1704331 - RNA, 19 nt, Homo sapiens
  misc_RNA (1)...(19): siRNA sense strand
uaaauccuccacugaaugu

SEQ ID NO: 1704332 - RNA, 19 nt, Homo sapiens
  misc_RNA (1)...(19): siRNA sense strand
ggcuugcggugcuuguuaa

SEQ ID NO: 1704333 - RNA, 19 nt, Homo sapiens
  misc_RNA (1)...(19): siRNA sense strand
ucacuucucccaccuguca

SEQ ID NO: 1704334 - RNA, 19 nt, Homo sapiens
  misc_RNA (1)...(19): siRNA sense strand
cugaggacacgcaguauuu

SEQ ID NO: 1704335 - RNA, 19 nt, Homo sapiens
  misc_RNA (1)...(19): siRNA sense strand
aaaccagaaucacugaaag

SEQ ID NO: 1704336 - RNA, 19 nt, Homo sapiens
  misc_RNA (1)...(19): siRNA sense strand
uaaccauccuccacaaagg

SEQ ID NO: 1704337 - RNA, 19 nt, Homo sapiens
  misc_RNA (1)...(19): siRNA sense strand
ggauauuugcagauagaaa

SEQ ID NO: 1704338 - RNA, 19 nt, Homo sapiens
  misc_RNA (1)...(19): siRNA sense strand
acaauacaaggaauggaua

SEQ ID NO: 1704339 - RNA, 19 nt, Homo sapiens
  misc_RNA (1)...(19): siRNA sense strand
gaucaucguggcgcaugua

SEQ ID NO: 1704340 - RNA, 19 nt, Homo sapiens
  misc_RNA (1)...(19): siRNA sense strand
uccauugcuuugauuauga

SEQ ID NO: 1704341 - RNA, 19 nt, Homo sapiens
  misc_RNA (1)...(19): siRNA sense strand
gagaaaccagugucugcuu

SEQ ID NO: 1704342 - RNA, 19 nt, Homo sapiens
  misc_RNA (1)...(19): siRNA sense strand
ucacugaaagcaaaugugu

SEQ ID NO: 1704343 - RNA, 19 nt, Homo sapiens
  misc_RNA (1)...(19): siRNA sense strand
gcaccacaaacacuacaga

SEQ ID NO: 1704344 - RNA, 19 nt, Homo sapiens
  misc_RNA (1)...(19): siRNA sense strand
caaugcauucaucucaaua

SEQ ID NO: 1704345 - RNA, 19 nt, Homo sapiens
  misc_RNA (1)...(19): siRNA sense strand
gacugaagaaugccaagaa

SEQ ID NO: 1704346 - RNA, 19 nt, Homo sapiens
  misc_RNA (1)...(19): siRNA sense strand
guauggcucuuggacugaa

SEQ ID NO: 1704347 - RNA, 19 nt, Homo sapiens
  misc_RNA (1)...(19): siRNA sense strand
caagaauacagcaaagaca

SEQ ID NO: 1704348 - RNA, 19 nt, Homo sapiens
  misc_RNA (1)...(19): siRNA sense strand
guaaccauccuccacaaag

SEQ ID NO: 1704349 - RNA, 19 nt, Homo sapiens
  misc_RNA (1)...(19): siRNA sense strand
cugaagaaugccaagaaua

SEQ ID NO: 1704350 - RNA, 19 nt, Homo sapiens
  misc_RNA (1)...(19): siRNA sense strand
ucucccaccugucaauuuc

SEQ ID NO: 1704351 - RNA, 19 nt, Homo sapiens
  misc_RNA (1)...(19): siRNA sense strand
cauaccaaguuucccuuca

SEQ ID NO: 1704352 - RNA, 19 nt, Homo sapiens
  misc_RNA (1)...(19): siRNA sense strand
cacaaacacuacagaagac

SEQ ID NO: 1704353 - RNA, 19 nt, Homo sapiens
  misc_RNA (1)...(19): siRNA sense strand
cacugcaccuggcuuguug

SEQ ID NO: 1704354 - RNA, 19 nt, Homo sapiens
  misc_RNA (1)...(19): siRNA sense strand
ggaauggauauuugcagau

SEQ ID NO: 1704355 - RNA, 19 nt, Homo sapiens
  misc_RNA (1)...(19): siRNA sense strand
ggacugaagaaugccaaga

SEQ ID NO: 1704356 - RNA, 19 nt, Homo sapiens
  misc_RNA (1)...(19): siRNA sense strand
acucgucucucuauccaau

SEQ ID NO: 1704357 - RNA, 19 nt, Homo sapiens
  misc_RNA (1)...(19): siRNA sense strand
caauacaaggaauggauau

SEQ ID NO: 1704358 - RNA, 19 nt, Homo sapiens
  misc_RNA (1)...(19): siRNA sense strand
ugguuuggcucaaguucuu

SEQ ID NO: 1704359 - RNA, 19 nt, Homo sapiens
  misc_RNA (1)...(19): siRNA sense strand
acugaagaaugccaagaau

SEQ ID NO: 1704360 - RNA, 19 nt, Homo sapiens
  misc_RNA (1)...(19): siRNA sense strand
cugacuuacuuccugauga

SEQ ID NO: 1704361 - RNA, 19 nt, Homo sapiens
  misc_RNA (1)...(19): siRNA sense strand
gaaauaucgcaugcugguu

SEQ ID NO: 1704362 - RNA, 19 nt, Homo sapiens
  misc_RNA (1)...(19): siRNA sense strand
guguaaccauccuccacaa

SEQ ID NO: 1704363 - RNA, 19 nt, Homo sapiens
  misc_RNA (1)...(19): siRNA sense strand
ggacuuuuauccucagcaa

SEQ ID NO: 1704364 - RNA, 19 nt, Homo sapiens
  misc_RNA (1)...(19): siRNA sense strand
uuuaaggucauaccaaguu

SEQ ID NO: 1704365 - RNA, 19 nt, Homo sapiens
  misc_RNA (1)...(19): siRNA sense strand
gcauguauuacucauccuu

SEQ ID NO: 1704366 - RNA, 19 nt, Homo sapiens
  misc_RNA (1)...(19): siRNA sense strand
uggcuugcggugcuuguua

SEQ ID NO: 1704367 - RNA, 19 nt, Homo sapiens
  misc_RNA (1)...(19): siRNA sense strand
aaacacuacagaagacaau

SEQ ID NO: 1704368 - RNA, 19 nt, Homo sapiens
  misc_RNA (1)...(19): siRNA sense strand
caaacacuacagaagacaa

SEQ ID NO: 1704369 - RNA, 19 nt, Homo sapiens
  misc_RNA (1)...(19): siRNA sense strand
gacuaugaaaccagaauca

SEQ ID NO: 1704370 - RNA, 19 nt, Homo sapiens
  misc_RNA (1)...(19): siRNA sense strand
auggauauuugcagauaga

SEQ ID NO: 1704371 - RNA, 19 nt, Homo sapiens
  misc_RNA (1)...(19): siRNA sense strand
gcaaaggaauguuaaucua

SEQ ID NO: 1704372 - RNA, 19 nt, Homo sapiens
  misc_RNA (1)...(19): siRNA sense strand
gaauggauauuugcagaua

SEQ ID NO: 1704373 - RNA, 19 nt, Homo sapiens
  misc_RNA (1)...(19): siRNA sense strand
cagaaucacugaaagcaaa

SEQ ID NO: 1704374 - RNA, 19 nt, Homo sapiens
  misc_RNA (1)...(19): siRNA sense strand
caucguggcgcauguauua

SEQ ID NO: 1704375 - RNA, 19 nt, Homo sapiens
  misc_RNA (1)...(19): siRNA sense strand
gaagacaauuauucacguu

SEQ ID NO: 1704376 - RNA, 19 nt, Homo sapiens
  misc_RNA (1)...(19): siRNA sense strand
gaaaccaaauccugaucaa

SEQ ID NO: 1704377 - RNA, 19 nt, Homo sapiens
  misc_RNA (1)...(19): siRNA sense strand
caagagcaaaggaauguua

SEQ ID NO: 1704378 - RNA, 19 nt, Homo sapiens
  misc_RNA (1)...(19): siRNA sense strand
ccauuaaaguuacugguuu

SEQ ID NO: 1704379 - RNA, 19 nt, Homo sapiens
  misc_RNA (1)...(19): siRNA sense strand
uaaguacgauguucaagug

SEQ ID NO: 1704380 - RNA, 19 nt, Homo sapiens
  misc_RNA (1)...(19): siRNA sense strand
gaaaauaaacgcuccaaaa

SEQ ID NO: 1704381 - RNA, 19 nt, Homo sapiens
  misc_RNA (1)...(19): siRNA sense strand
gaaaccagaaucacugaaa

SEQ ID NO: 1704382 - RNA, 19 nt, Homo sapiens
  misc_RNA (1)...(19): siRNA sense strand
gaguggagccaaccuauuu

SEQ ID NO: 1704383 - RNA, 19 nt, Homo sapiens
  misc_RNA (1)...(19): siRNA sense strand
gcagaacgaccacucacua

SEQ ID NO: 1704384 - RNA, 19 nt, Homo sapiens
  misc_RNA (1)...(19): siRNA sense strand
caaauaaauccuccacuga

SEQ ID NO: 1704385 - RNA, 19 nt, Homo sapiens
  misc_RNA (1)...(19): siRNA sense strand
ccuggaaccucaauuguga

SEQ ID NO: 1704386 - RNA, 19 nt, Homo sapiens
  misc_RNA (1)...(19): siRNA sense strand
ucacgccauugaucaaaua

SEQ ID NO: 1704387 - RNA, 19 nt, Homo sapiens
  misc_RNA (1)...(19): siRNA sense strand
ccacaaacacuacagaaga

SEQ ID NO: 1704388 - RNA, 19 nt, Homo sapiens
  misc_RNA (1)...(19): siRNA sense strand
ugaaggaacucgucucucu

SEQ ID NO: 1704389 - RNA, 19 nt, Homo sapiens
  misc_RNA (1)...(19): siRNA sense strand
gagccaaccuauuuaugug

SEQ ID NO: 1704390 - RNA, 19 nt, Homo sapiens
  misc_RNA (1)...(19): siRNA sense strand
gaacucgucucucuaucca

SEQ ID NO: 1704391 - RNA, 19 nt, Homo sapiens
  misc_RNA (1)...(19): siRNA sense strand
gaagaugacuaugaaacca

SEQ ID NO: 1704392 - RNA, 19 nt, Homo sapiens
  misc_RNA (1)...(19): siRNA sense strand
ugacuuacuuccugaugaa

SEQ ID NO: 1704393 - RNA, 19 nt, Homo sapiens
  misc_RNA (1)...(19): siRNA sense strand
gaaagcaaauguguaacca

SEQ ID NO: 1704394 - RNA, 19 nt, Homo sapiens
  misc_RNA (1)...(19): siRNA sense strand
gcagggcucuggagugagu

SEQ ID NO: 1704395 - RNA, 19 nt, Homo sapiens
  misc_RNA (1)...(19): siRNA sense strand
gaaugucacagcagagauu

SEQ ID NO: 1704396 - RNA, 19 nt, Homo sapiens
  misc_RNA (1)...(19): siRNA sense strand
uacaaggaauggauauuug

SEQ ID NO: 1704397 - RNA, 19 nt, Homo sapiens
  misc_RNA (1)...(19): siRNA sense strand
guacgauguucaagugaga

SEQ ID NO: 1704398 - RNA, 19 nt, Homo sapiens
  misc_RNA (1)...(19): siRNA sense strand
ccugucaauuucaccauua

SEQ ID NO: 1704399 - RNA, 19 nt, Homo sapiens
  misc_RNA (1)...(19): siRNA sense strand
ggagccaaccuauuuaugu

SEQ ID NO: 1704400 - RNA, 19 nt, Homo sapiens
  misc_RNA (1)...(19): siRNA sense strand
agaaaccagugucugcuuu

SEQ ID NO: 1704401 - RNA, 19 nt, Homo sapiens
  misc_RNA (1)...(19): siRNA sense strand
gaacgaccacucacuacug

SEQ ID NO: 1704402 - RNA, 19 nt, Homo sapiens
  misc_RNA (1)...(19): siRNA sense strand
gaaggaacucgucucucua

SEQ ID NO: 1704403 - RNA, 19 nt, Homo sapiens
  misc_RNA (1)...(19): siRNA sense strand
gauacugcaagcugacuua

SEQ ID NO: 1704404 - RNA, 19 nt, Homo sapiens
  misc_RNA (1)...(19): siRNA sense strand
cuacagaagacaauuauuc

SEQ ID NO: 1704405 - RNA, 19 nt, Homo sapiens
  misc_RNA (1)...(19): siRNA sense strand
ccaaugcauucaucucaau

SEQ ID NO: 1704406 - RNA, 19 nt, Homo sapiens
  misc_RNA (1)...(19): siRNA sense strand
ggaccauccugcagaacga

SEQ ID NO: 1704407 - RNA, 19 nt, Homo sapiens
  misc_RNA (1)...(19): siRNA sense strand
aauaaacgcuccaaaagaa

SEQ ID NO: 1704408 - RNA, 19 nt, Homo sapiens
  misc_RNA (1)...(19): siRNA sense strand
caaaagaagaugacuauga

SEQ ID NO: 1704409 - RNA, 19 nt, Homo sapiens
  misc_RNA (1)...(19): siRNA sense strand
aaauaucgcaugcugguuu

SEQ ID NO: 1704410 - RNA, 19 nt, Homo sapiens
  misc_RNA (1)...(19): siRNA sense strand
aaauaaauccuccacugaa

SEQ ID NO: 1704411 - RNA, 19 nt, Homo sapiens
  misc_RNA (1)...(19): siRNA sense strand
cauuaaaguuacugguuug

SEQ ID NO: 1704412 - RNA, 19 nt, Homo sapiens
  misc_RNA (1)...(19): siRNA sense strand
aauaaauccuccacugaau

SEQ ID NO: 1704413 - RNA, 19 nt, Homo sapiens
  misc_RNA (1)...(19): siRNA sense strand
caaaggaauguuaaucuag

SEQ ID NO: 1704414 - RNA, 19 nt, Homo sapiens
  misc_RNA (1)...(19): siRNA sense strand
cgccauugaucaaauaaau

SEQ ID NO: 1704415 - RNA, 19 nt, Homo sapiens
  misc_RNA (1)...(19): siRNA sense strand
acacuacagaagacaauua

SEQ ID NO: 1704416 - RNA, 19 nt, Homo sapiens
  misc_RNA (1)...(19): siRNA sense strand
ggaaaccaaauccugauca

SEQ ID NO: 1704417 - RNA, 19 nt, Homo sapiens
  misc_RNA (1)...(19): siRNA sense strand
gaucaagagcaaaggaaug

SEQ ID NO: 1704418 - RNA, 19 nt, Homo sapiens
  misc_RNA (1)...(19): siRNA sense strand
ugaagaaugccaagaauac

SEQ ID NO: 1704419 - RNA, 19 nt, Homo sapiens
  misc_RNA (1)...(19): siRNA sense strand
gagcaaaggaauguuaauc

SEQ ID NO: 1704420 - RNA, 19 nt, Homo sapiens
  misc_RNA (1)...(19): siRNA sense strand
gaccaaugcauucaucuca

SEQ ID NO: 1704421 - RNA, 19 nt, Homo sapiens
  misc_RNA (1)...(19): siRNA sense strand
gaagaaugccaagaauaca

SEQ ID NO: 1704422 - RNA, 19 nt, Homo sapiens
  misc_RNA (1)...(19): siRNA sense strand
aaccaaauccugaucaaga

SEQ ID NO: 1704423 - RNA, 19 nt, Homo sapiens
  misc_RNA (1)...(19): siRNA sense strand
acugaaagcaaauguguaa

SEQ ID NO: 1704424 - RNA, 19 nt, Homo sapiens
  misc_RNA (1)...(19): siRNA sense strand
gcaaauguguaaccauccu

SEQ ID NO: 1704425 - RNA, 19 nt, Homo sapiens
  misc_RNA (1)...(19): siRNA sense strand
caagugagagcagcaguga

SEQ ID NO: 1704426 - RNA, 19 nt, Homo sapiens
  misc_RNA (1)...(19): siRNA sense strand
acugcaagcugacuuacuu

SEQ ID NO: 1704427 - RNA, 19 nt, Homo sapiens
  misc_RNA (1)...(19): siRNA sense strand
gcccuuugaucagcuguuu

SEQ ID NO: 1704428 - RNA, 19 nt, Homo sapiens
  misc_RNA (1)...(19): siRNA sense strand
uuaaggucauaccaaguuu

SEQ ID NO: 1704429 - RNA, 19 nt, Homo sapiens
  misc_RNA (1)...(19): siRNA sense strand
aggcagggcucuggaguga

SEQ ID NO: 1704430 - RNA, 19 nt, Homo sapiens
  misc_RNA (1)...(19): siRNA sense strand
ccauugcuuugauuaugaa

SEQ ID NO: 1704431 - RNA, 19 nt, Homo sapiens
  misc_RNA (1)...(19): siRNA sense strand
uaaauccuccacugaaugu

SEQ ID NO: 1704432 - RNA, 19 nt, Homo sapiens
  misc_RNA (1)...(19): siRNA sense strand
ggcuugcggugcuuguuaa

SEQ ID NO: 1704433 - RNA, 19 nt, Homo sapiens
  misc_RNA (1)...(19): siRNA sense strand
ucacuucucccaccuguca

SEQ ID NO: 1704434 - RNA, 19 nt, Homo sapiens
  misc_RNA (1)...(19): siRNA sense strand
cugaggacacgcaguauuu

SEQ ID NO: 1704435 - RNA, 19 nt, Homo sapiens
  misc_RNA (1)...(19): siRNA sense strand
aaaccagaaucacugaaag

SEQ ID NO: 1704436 - RNA, 19 nt, Homo sapiens
  misc_RNA (1)...(19): siRNA sense strand
uaaccauccuccacaaagg

SEQ ID NO: 1704437 - RNA, 19 nt, Homo sapiens
  misc_RNA (1)...(19): siRNA sense strand
ggauauuugcagauagaaa

SEQ ID NO: 1704438 - RNA, 19 nt, Homo sapiens
  misc_RNA (1)...(19): siRNA sense strand
acaauacaaggaauggaua

SEQ ID NO: 1704439 - RNA, 19 nt, Homo sapiens
  misc_RNA (1)...(19): siRNA sense strand
gaucaucguggcgcaugua

SEQ ID NO: 1704440 - RNA, 19 nt, Homo sapiens
  misc_RNA (1)...(19): siRNA sense strand
uccauugcuuugauuauga

SEQ ID NO: 1704441 - RNA, 19 nt, Homo sapiens
  misc_RNA (1)...(19): siRNA sense strand
gagaaaccagugucugcuu

SEQ ID NO: 1704442 - RNA, 19 nt, Homo sapiens
  misc_RNA (1)...(19): siRNA sense strand
ucacugaaagcaaaugugu

SEQ ID NO: 1704443 - RNA, 19 nt, Homo sapiens
  misc_RNA (1)...(19): siRNA sense strand
gcaccacaaacacuacaga

SEQ ID NO: 1704444 - RNA, 19 nt, Homo sapiens
  misc_RNA (1)...(19): siRNA sense strand
caaugcauucaucucaaua

SEQ ID NO: 1704445 - RNA, 19 nt, Homo sapiens
  misc_RNA (1)...(19): siRNA sense strand
gacugaagaaugccaagaa

SEQ ID NO: 1704446 - RNA, 19 nt, Homo sapiens
  misc_RNA (1)...(19): siRNA sense strand
guauggcucuuggacugaa

SEQ ID NO: 1704447 - RNA, 19 nt, Homo sapiens
  misc_RNA (1)...(19): siRNA sense strand
caagaauacagcaaagaca

SEQ ID NO: 1704448 - RNA, 19 nt, Homo sapiens
  misc_RNA (1)...(19): siRNA sense strand
guaaccauccuccacaaag

SEQ ID NO: 1704449 - RNA, 19 nt, Homo sapiens
  misc_RNA (1)...(19): siRNA sense strand
cugaagaaugccaagaaua

SEQ ID NO: 1704450 - RNA, 19 nt, Homo sapiens
  misc_RNA (1)...(19): siRNA sense strand
ucucccaccugucaauuuc

SEQ ID NO: 1704451 - RNA, 19 nt, Homo sapiens
  misc_RNA (1)...(19): siRNA sense strand
cauaccaaguuucccuuca

SEQ ID NO: 1704452 - RNA, 19 nt, Homo sapiens
  misc_RNA (1)...(19): siRNA sense strand
cacaaacacuacagaagac

SEQ ID NO: 1704453 - RNA, 19 nt, Homo sapiens
  misc_RNA (1)...(19): siRNA sense strand
cacugcaccuggcuuguug

SEQ ID NO: 1704454 - RNA, 19 nt, Homo sapiens
  misc_RNA (1)...(19): siRNA sense strand
ggaauggauauuugcagau

SEQ ID NO: 1704455 - RNA, 19 nt, Homo sapiens
  misc_RNA (1)...(19): siRNA sense strand
ggacugaagaaugccaaga

SEQ ID NO: 1704456 - RNA, 19 nt, Homo sapiens
  misc_RNA (1)...(19): siRNA sense strand
acucgucucucuauccaau

SEQ ID NO: 1704457 - RNA, 19 nt, Homo sapiens
  misc_RNA (1)...(19): siRNA sense strand
caauacaaggaauggauau

SEQ ID NO: 1704458 - RNA, 19 nt, Homo sapiens
  misc_RNA (1)...(19): siRNA sense strand
ugguuuggcucaaguucuu

SEQ ID NO: 1704459 - RNA, 19 nt, Homo sapiens
  misc_RNA (1)...(19): siRNA sense strand
acugaagaaugccaagaau

SEQ ID NO: 1704460 - RNA, 19 nt, Homo sapiens
  misc_RNA (1)...(19): siRNA sense strand
cugacuuacuuccugauga

SEQ ID NO: 1704461 - RNA, 19 nt, Homo sapiens
  misc_RNA (1)...(19): siRNA sense strand
gaaauaucgcaugcugguu

SEQ ID NO: 1704462 - RNA, 19 nt, Homo sapiens
  misc_RNA (1)...(19): siRNA sense strand
guguaaccauccuccacaa

SEQ ID NO: 1704463 - RNA, 19 nt, Homo sapiens
  misc_RNA (1)...(19): siRNA sense strand
ggacuuuuauccucagcaa

SEQ ID NO: 1704464 - RNA, 19 nt, Homo sapiens
  misc_RNA (1)...(19): siRNA sense strand
uuuaaggucauaccaaguu

SEQ ID NO: 1704465 - RNA, 19 nt, Homo sapiens
  misc_RNA (1)...(19): siRNA sense strand
gcauguauuacucauccuu

SEQ ID NO: 1704466 - RNA, 19 nt, Homo sapiens
  misc_RNA (1)...(19): siRNA sense strand
uggcuugcggugcuuguua

SEQ ID NO: 1704467 - RNA, 19 nt, Homo sapiens
  misc_RNA (1)...(19): siRNA sense strand
aaacacuacagaagacaau

SEQ ID NO: 1704468 - RNA, 19 nt, Homo sapiens
  misc_RNA (1)...(19): siRNA sense strand
caaacacuacagaagacaa

SEQ ID NO: 1704469 - RNA, 19 nt, Homo sapiens
  misc_RNA (1)...(19): siRNA sense strand
gacuaugaaaccagaauca

SEQ ID NO: 1704470 - RNA, 19 nt, Homo sapiens
  misc_RNA (1)...(19): siRNA sense strand
auggauauuugcagauaga

SEQ ID NO: 1704471 - RNA, 19 nt, Homo sapiens
  misc_RNA (1)...(19): siRNA sense strand
gcaaaggaauguuaaucua

SEQ ID NO: 1704472 - RNA, 19 nt, Homo sapiens
  misc_RNA (1)...(19): siRNA sense strand
gaauggauauuugcagaua

SEQ ID NO: 1704473 - RNA, 19 nt, Homo sapiens
  misc_RNA (1)...(19): siRNA sense strand
cagaaucacugaaagcaaa

SEQ ID NO: 1704474 - RNA, 19 nt, Homo sapiens
  misc_RNA (1)...(19): siRNA sense strand
caucguggcgcauguauua

SEQ ID NO: 1704475 - RNA, 19 nt, Homo sapiens
  misc_RNA (1)...(19): siRNA sense strand
gaagacaauuauucacguu

SEQ ID NO: 1704476 - RNA, 19 nt, Homo sapiens
  misc_RNA (1)...(19): siRNA sense strand
gaaaccaaauccugaucaa

SEQ ID NO: 1704477 - RNA, 19 nt, Homo sapiens
  misc_RNA (1)...(19): siRNA sense strand
caagagcaaaggaauguua

SEQ ID NO: 1704478 - RNA, 19 nt, Homo sapiens
  misc_RNA (1)...(19): siRNA sense strand
ccauuaaaguuacugguuu

SEQ ID NO: 1704479 - RNA, 19 nt, Homo sapiens
  misc_RNA (1)...(19): siRNA sense strand
uaaguacgauguucaagug

SEQ ID NO: 1704480 - RNA, 19 nt, Homo sapiens
  misc_RNA (1)...(19): siRNA sense strand
gaaaauaaacgcuccaaaa

SEQ ID NO: 1704481 - RNA, 19 nt, Homo sapiens
  misc_RNA (1)...(19): siRNA sense strand
gaaaccagaaucacugaaa

SEQ ID NO: 1704482 - RNA, 19 nt, Homo sapiens
  misc_RNA (1)...(19): siRNA sense strand
gaguggagccaaccuauuu

SEQ ID NO: 1704483 - RNA, 19 nt, Homo sapiens
  misc_RNA (1)...(19): siRNA sense strand
gcagaacgaccacucacua

SEQ ID NO: 1704484 - RNA, 19 nt, Homo sapiens
  misc_RNA (1)...(19): siRNA sense strand
caaauaaauccuccacuga

SEQ ID NO: 1704485 - RNA, 19 nt, Homo sapiens
  misc_RNA (1)...(19): siRNA sense strand
ccuggaaccucaauuguga

SEQ ID NO: 1704486 - RNA, 19 nt, Homo sapiens
  misc_RNA (1)...(19): siRNA sense strand
ucacgccauugaucaaaua

SEQ ID NO: 1704487 - RNA, 19 nt, Homo sapiens
  misc_RNA (1)...(19): siRNA sense strand
ccacaaacacuacagaaga

SEQ ID NO: 1704488 - RNA, 19 nt, Homo sapiens
  misc_RNA (1)...(19): siRNA sense strand
ugaaggaacucgucucucu

SEQ ID NO: 1704489 - RNA, 19 nt, Homo sapiens
  misc_RNA (1)...(19): siRNA sense strand
gagccaaccuauuuaugug

SEQ ID NO: 1704490 - RNA, 19 nt, Homo sapiens
  misc_RNA (1)...(19): siRNA sense strand
gaacucgucucucuaucca

SEQ ID NO: 1704491 - RNA, 19 nt, Homo sapiens
  misc_RNA (1)...(19): siRNA sense strand
gaagaugacuaugaaacca

SEQ ID NO: 1704492 - RNA, 19 nt, Homo sapiens
  misc_RNA (1)...(19): siRNA sense strand
ugacuuacuuccugaugaa

SEQ ID NO: 1704493 - RNA, 19 nt, Homo sapiens
  misc_RNA (1)...(19): siRNA sense strand
gaaagcaaauguguaacca

SEQ ID NO: 1704494 - RNA, 19 nt, Homo sapiens
  misc_RNA (1)...(19): siRNA sense strand
gcagggcucuggagugagu

SEQ ID NO: 1704495 - RNA, 19 nt, Homo sapiens
  misc_RNA (1)...(19): siRNA sense strand
gaaugucacagcagagauu

SEQ ID NO: 1704496 - RNA, 19 nt, Homo sapiens
  misc_RNA (1)...(19): siRNA sense strand
uacaaggaauggauauuug

SEQ ID NO: 1704497 - RNA, 19 nt, Homo sapiens
  misc_RNA (1)...(19): siRNA sense strand
guacgauguucaagugaga

SEQ ID NO: 1704498 - RNA, 19 nt, Homo sapiens
  misc_RNA (1)...(19): siRNA sense strand
ccugucaauuucaccauua

SEQ ID NO: 1704499 - RNA, 19 nt, Homo sapiens
  misc_RNA (1)...(19): siRNA sense strand
ggagccaaccuauuuaugu

SEQ ID NO: 1704500 - RNA, 19 nt, Homo sapiens
  misc_RNA (1)...(19): siRNA sense strand
agaaaccagugucugcuuu

SEQ ID NO: 1704501 - RNA, 19 nt, Homo sapiens
  misc_RNA (1)...(19): siRNA sense strand
gaacgaccacucacuacug

SEQ ID NO: 1704502 - RNA, 19 nt, Homo sapiens
  misc_RNA (1)...(19): siRNA sense strand
gaaggaacucgucucucua

SEQ ID NO: 1704503 - RNA, 19 nt, Homo sapiens
  misc_RNA (1)...(19): siRNA sense strand
gauacugcaagcugacuua

SEQ ID NO: 1704504 - RNA, 19 nt, Homo sapiens
  misc_RNA (1)...(19): siRNA sense strand
cuacagaagacaauuauuc

SEQ ID NO: 1704505 - RNA, 19 nt, Homo sapiens
  misc_RNA (1)...(19): siRNA sense strand
ccaaugcauucaucucaau

SEQ ID NO: 1704506 - RNA, 19 nt, Homo sapiens
  misc_RNA (1)...(19): siRNA sense strand
ggaccauccugcagaacga

SEQ ID NO: 1704507 - RNA, 19 nt, Homo sapiens
  misc_RNA (1)...(19): siRNA sense strand
aauaaacgcuccaaaagaa

SEQ ID NO: 1704508 - RNA, 19 nt, Homo sapiens
  misc_RNA (1)...(19): siRNA sense strand
caaaagaagaugacuauga

SEQ ID NO: 1704509 - RNA, 19 nt, Homo sapiens
  misc_RNA (1)...(19): siRNA sense strand
aaauaucgcaugcugguuu

SEQ ID NO: 1704510 - RNA, 19 nt, Homo sapiens
  misc_RNA (1)...(19): siRNA sense strand
aaauaaauccuccacugaa

SEQ ID NO: 1704511 - RNA, 19 nt, Homo sapiens
  misc_RNA (1)...(19): siRNA sense strand
cauuaaaguuacugguuug

SEQ ID NO: 1704512 - RNA, 19 nt, Homo sapiens
  misc_RNA (1)...(19): siRNA sense strand
aauaaauccuccacugaau

SEQ ID NO: 1704513 - RNA, 19 nt, Homo sapiens
  misc_RNA (1)...(19): siRNA sense strand
caaaggaauguuaaucuag

SEQ ID NO: 1704514 - RNA, 19 nt, Homo sapiens
  misc_RNA (1)...(19): siRNA sense strand
cgccauugaucaaauaaau

SEQ ID NO: 1704515 - RNA, 19 nt, Homo sapiens
  misc_RNA (1)...(19): siRNA sense strand
acacuacagaagacaauua

SEQ ID NO: 1704516 - RNA, 19 nt, Homo sapiens
  misc_RNA (1)...(19): siRNA sense strand
ggaaaccaaauccugauca

SEQ ID NO: 1704517 - RNA, 19 nt, Homo sapiens
  misc_RNA (1)...(19): siRNA sense strand
gaucaagagcaaaggaaug

SEQ ID NO: 1704518 - RNA, 19 nt, Homo sapiens
  misc_RNA (1)...(19): siRNA sense strand
ugaagaaugccaagaauac

SEQ ID NO: 1704519 - RNA, 19 nt, Homo sapiens
  misc_RNA (1)...(19): siRNA sense strand
gagcaaaggaauguuaauc

SEQ ID NO: 1704520 - RNA, 19 nt, Homo sapiens
  misc_RNA (1)...(19): siRNA sense strand
gaccaaugcauucaucuca

SEQ ID NO: 1704521 - RNA, 19 nt, Homo sapiens
  misc_RNA (1)...(19): siRNA sense strand
gaagaaugccaagaauaca

SEQ ID NO: 1704522 - RNA, 19 nt, Homo sapiens
  misc_RNA (1)...(19): siRNA sense strand
aaccaaauccugaucaaga

SEQ ID NO: 1704523 - RNA, 19 nt, Homo sapiens
  misc_RNA (1)...(19): siRNA sense strand
acugaaagcaaauguguaa

SEQ ID NO: 1704524 - RNA, 19 nt, Homo sapiens
  misc_RNA (1)...(19): siRNA sense strand
gcaaauguguaaccauccu

SEQ ID NO: 1704525 - RNA, 19 nt, Homo sapiens
  misc_RNA (1)...(19): siRNA sense strand
caagugagagcagcaguga

SEQ ID NO: 1704526 - RNA, 19 nt, Homo sapiens
  misc_RNA (1)...(19): siRNA sense strand
acugcaagcugacuuacuu

SEQ ID NO: 1704527 - RNA, 19 nt, Homo sapiens
  misc_RNA (1)...(19): siRNA sense strand
gcccuuugaucagcuguuu

SEQ ID NO: 1704528 - RNA, 19 nt, Homo sapiens
  misc_RNA (1)...(19): siRNA sense strand
uuaaggucauaccaaguuu

SEQ ID NO: 1704529 - RNA, 19 nt, Homo sapiens
  misc_RNA (1)...(19): siRNA sense strand
aggcagggcucuggaguga

SEQ ID NO: 1704530 - RNA, 19 nt, Homo sapiens
  misc_RNA (1)...(19): siRNA sense strand
ccauugcuuugauuaugaa

SEQ ID NO: 1704531 - RNA, 19 nt, Homo sapiens
  misc_RNA (1)...(19): siRNA sense strand
uaaauccuccacugaaugu

SEQ ID NO: 1704532 - RNA, 19 nt, Homo sapiens
  misc_RNA (1)...(19): siRNA sense strand
ggcuugcggugcuuguuaa

SEQ ID NO: 1704533 - RNA, 19 nt, Homo sapiens
  misc_RNA (1)...(19): siRNA sense strand
ucacuucucccaccuguca

SEQ ID NO: 1704534 - RNA, 19 nt, Homo sapiens
  misc_RNA (1)...(19): siRNA sense strand
cugaggacacgcaguauuu

SEQ ID NO: 1704535 - RNA, 19 nt, Homo sapiens
  misc_RNA (1)...(19): siRNA sense strand
aaaccagaaucacugaaag

SEQ ID NO: 1704536 - RNA, 19 nt, Homo sapiens
  misc_RNA (1)...(19): siRNA sense strand
uaaccauccuccacaaagg

SEQ ID NO: 1704537 - RNA, 19 nt, Homo sapiens
  misc_RNA (1)...(19): siRNA sense strand
ggauauuugcagauagaaa

SEQ ID NO: 1704538 - RNA, 19 nt, Homo sapiens
  misc_RNA (1)...(19): siRNA sense strand
acaauacaaggaauggaua

SEQ ID NO: 1704539 - RNA, 19 nt, Homo sapiens
  misc_RNA (1)...(19): siRNA sense strand
gaucaucguggcgcaugua

SEQ ID NO: 1704540 - RNA, 19 nt, Homo sapiens
  misc_RNA (1)...(19): siRNA sense strand
uccauugcuuugauuauga

SEQ ID NO: 1704541 - RNA, 19 nt, Homo sapiens
  misc_RNA (1)...(19): siRNA sense strand
gagaaaccagugucugcuu

SEQ ID NO: 1704542 - RNA, 19 nt, Homo sapiens
  misc_RNA (1)...(19): siRNA sense strand
ucacugaaagcaaaugugu

SEQ ID NO: 1704543 - RNA, 19 nt, Homo sapiens
  misc_RNA (1)...(19): siRNA sense strand
gcaccacaaacacuacaga

SEQ ID NO: 1704544 - RNA, 19 nt, Homo sapiens
  misc_RNA (1)...(19): siRNA sense strand
caaugcauucaucucaaua

SEQ ID NO: 1704545 - RNA, 19 nt, Homo sapiens
  misc_RNA (1)...(19): siRNA sense strand
gacugaagaaugccaagaa

SEQ ID NO: 1704546 - RNA, 19 nt, Homo sapiens
  misc_RNA (1)...(19): siRNA sense strand
guauggcucuuggacugaa

SEQ ID NO: 1704547 - RNA, 19 nt, Homo sapiens
  misc_RNA (1)...(19): siRNA sense strand
caagaauacagcaaagaca

SEQ ID NO: 1704548 - RNA, 19 nt, Homo sapiens
  misc_RNA (1)...(19): siRNA sense strand
guaaccauccuccacaaag

SEQ ID NO: 1704549 - RNA, 19 nt, Homo sapiens
  misc_RNA (1)...(19): siRNA sense strand
cugaagaaugccaagaaua

SEQ ID NO: 1704550 - RNA, 19 nt, Homo sapiens
  misc_RNA (1)...(19): siRNA sense strand
ucucccaccugucaauuuc

SEQ ID NO: 1704551 - RNA, 19 nt, Homo sapiens
  misc_RNA (1)...(19): siRNA sense strand
cauaccaaguuucccuuca

SEQ ID NO: 1704552 - RNA, 19 nt, Homo sapiens
  misc_RNA (1)...(19): siRNA sense strand
cacaaacacuacagaagac

SEQ ID NO: 1704553 - RNA, 19 nt, Homo sapiens
  misc_RNA (1)...(19): siRNA sense strand
cacugcaccuggcuuguug

SEQ ID NO: 1704554 - RNA, 19 nt, Homo sapiens
  misc_RNA (1)...(19): siRNA sense strand
ggaauggauauuugcagau

SEQ ID NO: 1704555 - RNA, 19 nt, Homo sapiens
  misc_RNA (1)...(19): siRNA sense strand
ggacugaagaaugccaaga

SEQ ID NO: 1704556 - RNA, 19 nt, Homo sapiens
  misc_RNA (1)...(19): siRNA sense strand
acucgucucucuauccaau

SEQ ID NO: 1704557 - RNA, 19 nt, Homo sapiens
  misc_RNA (1)...(19): siRNA sense strand
caauacaaggaauggauau

SEQ ID NO: 1704558 - RNA, 19 nt, Homo sapiens
  misc_RNA (1)...(19): siRNA sense strand
ugguuuggcucaaguucuu

SEQ ID NO: 1704559 - RNA, 19 nt, Homo sapiens
  misc_RNA (1)...(19): siRNA sense strand
acugaagaaugccaagaau

SEQ ID NO: 1704560 - RNA, 19 nt, Homo sapiens
  misc_RNA (1)...(19): siRNA sense strand
cugacuuacuuccugauga

SEQ ID NO: 1704561 - RNA, 19 nt, Homo sapiens
  misc_RNA (1)...(19): siRNA sense strand
gaaauaucgcaugcugguu

SEQ ID NO: 1704562 - RNA, 19 nt, Homo sapiens
  misc_RNA (1)...(19): siRNA sense strand
guguaaccauccuccacaa

SEQ ID NO: 1704563 - RNA, 19 nt, Homo sapiens
  misc_RNA (1)...(19): siRNA sense strand
ggacuuuuauccucagcaa

SEQ ID NO: 1704564 - RNA, 19 nt, Homo sapiens
  misc_RNA (1)...(19): siRNA sense strand
uuuaaggucauaccaaguu

SEQ ID NO: 1704565 - RNA, 19 nt, Homo sapiens
  misc_RNA (1)...(19): siRNA sense strand
gcauguauuacucauccuu

SEQ ID NO: 1704566 - RNA, 19 nt, Homo sapiens
  misc_RNA (1)...(19): siRNA sense strand
uggcuugcggugcuuguua

SEQ ID NO: 1704567 - RNA, 19 nt, Homo sapiens
  misc_RNA (1)...(19): siRNA sense strand
aaacacuacagaagacaau

SEQ ID NO: 1704568 - RNA, 19 nt, Homo sapiens
  misc_RNA (1)...(19): siRNA sense strand
caaacacuacagaagacaa

SEQ ID NO: 1704569 - RNA, 19 nt, Homo sapiens
  misc_RNA (1)...(19): siRNA sense strand
gacuaugaaaccagaauca

SEQ ID NO: 1704570 - RNA, 19 nt, Homo sapiens
  misc_RNA (1)...(19): siRNA sense strand
auggauauuugcagauaga

SEQ ID NO: 1704571 - RNA, 19 nt, Homo sapiens
  misc_RNA (1)...(19): siRNA sense strand
gcaaaggaauguuaaucua

SEQ ID NO: 1704572 - RNA, 19 nt, Homo sapiens
  misc_RNA (1)...(19): siRNA sense strand
gaauggauauuugcagaua

SEQ ID NO: 1704573 - RNA, 19 nt, Homo sapiens
  misc_RNA (1)...(19): siRNA sense strand
cagaaucacugaaagcaaa

SEQ ID NO: 1704574 - RNA, 19 nt, Homo sapiens
  misc_RNA (1)...(19): siRNA sense strand
caucguggcgcauguauua

SEQ ID NO: 1704575 - RNA, 19 nt, Homo sapiens
  misc_RNA (1)...(19): siRNA sense strand
gaagacaauuauucacguu

SEQ ID NO: 1704576 - RNA, 19 nt, Homo sapiens
  misc_RNA (1)...(19): siRNA sense strand
gaaaccaaauccugaucaa

SEQ ID NO: 1704577 - RNA, 19 nt, Homo sapiens
  misc_RNA (1)...(19): siRNA sense strand
caagagcaaaggaauguua

SEQ ID NO: 1704578 - RNA, 19 nt, Homo sapiens
  misc_RNA (1)...(19): siRNA sense strand
ccauuaaaguuacugguuu

SEQ ID NO: 1704579 - RNA, 19 nt, Homo sapiens
  misc_RNA (1)...(19): siRNA sense strand
uaaguacgauguucaagug

SEQ ID NO: 1704580 - RNA, 19 nt, Homo sapiens
  misc_RNA (1)...(19): siRNA sense strand
gaaaauaaacgcuccaaaa

SEQ ID NO: 1704581 - RNA, 19 nt, Homo sapiens
  misc_RNA (1)...(19): siRNA sense strand
gaaaccagaaucacugaaa

SEQ ID NO: 1704582 - RNA, 19 nt, Homo sapiens
  misc_RNA (1)...(19): siRNA sense strand
gaguggagccaaccuauuu

SEQ ID NO: 1704583 - RNA, 19 nt, Homo sapiens
  misc_RNA (1)...(19): siRNA sense strand
gcagaacgaccacucacua

SEQ ID NO: 1704584 - RNA, 19 nt, Homo sapiens
  misc_RNA (1)...(19): siRNA sense strand
caaauaaauccuccacuga

SEQ ID NO: 1704585 - RNA, 19 nt, Homo sapiens
  misc_RNA (1)...(19): siRNA sense strand
ccuggaaccucaauuguga

SEQ ID NO: 1704586 - RNA, 19 nt, Homo sapiens
  misc_RNA (1)...(19): siRNA sense strand
ucacgccauugaucaaaua

SEQ ID NO: 1704587 - RNA, 19 nt, Homo sapiens
  misc_RNA (1)...(19): siRNA sense strand
ccacaaacacuacagaaga

SEQ ID NO: 1704588 - RNA, 19 nt, Homo sapiens
  misc_RNA (1)...(19): siRNA sense strand
ugaaggaacucgucucucu

SEQ ID NO: 1704589 - RNA, 19 nt, Homo sapiens
  misc_RNA (1)...(19): siRNA sense strand
gagccaaccuauuuaugug

SEQ ID NO: 1704590 - RNA, 19 nt, Homo sapiens
  misc_RNA (1)...(19): siRNA sense strand
gaacucgucucucuaucca

SEQ ID NO: 1704591 - RNA, 19 nt, Homo sapiens
  misc_RNA (1)...(19): siRNA sense strand
gaagaugacuaugaaacca

SEQ ID NO: 1704592 - RNA, 19 nt, Homo sapiens
  misc_RNA (1)...(19): siRNA sense strand
ugacuuacuuccugaugaa

SEQ ID NO: 1704593 - RNA, 19 nt, Homo sapiens
  misc_RNA (1)...(19): siRNA sense strand
gaaagcaaauguguaacca

SEQ ID NO: 1704594 - RNA, 19 nt, Homo sapiens
  misc_RNA (1)...(19): siRNA sense strand
gcagggcucuggagugagu

SEQ ID NO: 1704595 - RNA, 19 nt, Homo sapiens
  misc_RNA (1)...(19): siRNA sense strand
gaaugucacagcagagauu

SEQ ID NO: 1704596 - RNA, 19 nt, Homo sapiens
  misc_RNA (1)...(19): siRNA sense strand
uacaaggaauggauauuug

SEQ ID NO: 1704597 - RNA, 19 nt, Homo sapiens
  misc_RNA (1)...(19): siRNA sense strand
guacgauguucaagugaga

SEQ ID NO: 1704598 - RNA, 19 nt, Homo sapiens
  misc_RNA (1)...(19): siRNA sense strand
ccugucaauuucaccauua

SEQ ID NO: 1704599 - RNA, 19 nt, Homo sapiens
  misc_RNA (1)...(19): siRNA sense strand
ggagccaaccuauuuaugu

SEQ ID NO: 1704600 - RNA, 19 nt, Homo sapiens
  misc_RNA (1)...(19): siRNA sense strand
agaaaccagugucugcuuu

SEQ ID NO: 1704601 - RNA, 19 nt, Homo sapiens
  misc_RNA (1)...(19): siRNA sense strand
gaacgaccacucacuacug

SEQ ID NO: 1704602 - RNA, 19 nt, Homo sapiens
  misc_RNA (1)...(19): siRNA sense strand
gaaggaacucgucucucua

SEQ ID NO: 1704603 - RNA, 19 nt, Homo sapiens
  misc_RNA (1)...(19): siRNA sense strand
gauacugcaagcugacuua

SEQ ID NO: 1704604 - RNA, 19 nt, Homo sapiens
  misc_RNA (1)...(19): siRNA sense strand
cuacagaagacaauuauuc

SEQ ID NO: 1704605 - RNA, 19 nt, Homo sapiens
  misc_RNA (1)...(19): siRNA sense strand
ccaaugcauucaucucaau

SEQ ID NO: 1704606 - RNA, 19 nt, Homo sapiens
  misc_RNA (1)...(19): siRNA sense strand
ggaccauccugcagaacga

SEQ ID NO: 1704607 - RNA, 19 nt, Homo sapiens
  misc_RNA (1)...(19): siRNA sense strand
aauaaacgcuccaaaagaa

SEQ ID NO: 1704608 - RNA, 19 nt, Homo sapiens
  misc_RNA (1)...(19): siRNA sense strand
caaaagaagaugacuauga

SEQ ID NO: 1704609 - RNA, 19 nt, Homo sapiens
  misc_RNA (1)...(19): siRNA sense strand
aaauaucgcaugcugguuu

SEQ ID NO: 1704610 - RNA, 19 nt, Homo sapiens
  misc_RNA (1)...(19): siRNA sense strand
aaauaaauccuccacugaa

SEQ ID NO: 1704611 - RNA, 19 nt, Homo sapiens
  misc_RNA (1)...(19): siRNA sense strand
cauuaaaguuacugguuug

SEQ ID NO: 1704612 - RNA, 19 nt, Homo sapiens
  misc_RNA (1)...(19): siRNA sense strand
aauaaauccuccacugaau

SEQ ID NO: 1704613 - RNA, 19 nt, Homo sapiens
  misc_RNA (1)...(19): siRNA sense strand
caaaggaauguuaaucuag

SEQ ID NO: 1704614 - RNA, 19 nt, Homo sapiens
  misc_RNA (1)...(19): siRNA sense strand
cgccauugaucaaauaaau

SEQ ID NO: 1704615 - RNA, 19 nt, Homo sapiens
  misc_RNA (1)...(19): siRNA sense strand
acacuacagaagacaauua

SEQ ID NO: 1704616 - RNA, 19 nt, Homo sapiens
  misc_RNA (1)...(19): siRNA sense strand
ggaaaccaaauccugauca

SEQ ID NO: 1704617 - RNA, 19 nt, Homo sapiens
  misc_RNA (1)...(19): siRNA sense strand
gaucaagagcaaaggaaug

SEQ ID NO: 1704618 - RNA, 19 nt, Homo sapiens
  misc_RNA (1)...(19): siRNA sense strand
ugaagaaugccaagaauac

SEQ ID NO: 1704619 - RNA, 19 nt, Homo sapiens
  misc_RNA (1)...(19): siRNA sense strand
gagcaaaggaauguuaauc

SEQ ID NO: 1704620 - RNA, 19 nt, Homo sapiens
  misc_RNA (1)...(19): siRNA sense strand
gaccaaugcauucaucuca

SEQ ID NO: 1704621 - RNA, 19 nt, Homo sapiens
  misc_RNA (1)...(19): siRNA sense strand
gaagaaugccaagaauaca

SEQ ID NO: 1704622 - RNA, 19 nt, Homo sapiens
  misc_RNA (1)...(19): siRNA sense strand
aaccaaauccugaucaaga

SEQ ID NO: 1704623 - RNA, 19 nt, Homo sapiens
  misc_RNA (1)...(19): siRNA sense strand
acugaaagcaaauguguaa

SEQ ID NO: 1704624 - RNA, 19 nt, Homo sapiens
  misc_RNA (1)...(19): siRNA sense strand
gcaaauguguaaccauccu

SEQ ID NO: 1704625 - RNA, 19 nt, Homo sapiens
  misc_RNA (1)...(19): siRNA sense strand
caagugagagcagcaguga

SEQ ID NO: 1704626 - RNA, 19 nt, Homo sapiens
  misc_RNA (1)...(19): siRNA sense strand
acugcaagcugacuuacuu

SEQ ID NO: 1704627 - RNA, 19 nt, Homo sapiens
  misc_RNA (1)...(19): siRNA sense strand
gcccuuugaucagcuguuu

SEQ ID NO: 1704628 - RNA, 19 nt, Homo sapiens
  misc_RNA (1)...(19): siRNA sense strand
uuaaggucauaccaaguuu

SEQ ID NO: 1704629 - RNA, 19 nt, Homo sapiens
  misc_RNA (1)...(19): siRNA sense strand
aggcagggcucuggaguga

SEQ ID NO: 1704630 - RNA, 19 nt, Homo sapiens
  misc_RNA (1)...(19): siRNA sense strand
ccauugcuuugauuaugaa

SEQ ID NO: 1704631 - RNA, 19 nt, Homo sapiens
  misc_RNA (1)...(19): siRNA sense strand
uaaauccuccacugaaugu

SEQ ID NO: 1704632 - RNA, 19 nt, Homo sapiens
  misc_RNA (1)...(19): siRNA sense strand
ggcuugcggugcuuguuaa

SEQ ID NO: 1704633 - RNA, 19 nt, Homo sapiens
  misc_RNA (1)...(19): siRNA sense strand
ucacuucucccaccuguca

SEQ ID NO: 1704634 - RNA, 19 nt, Homo sapiens
  misc_RNA (1)...(19): siRNA sense strand
cugaggacacgcaguauuu

SEQ ID NO: 1704635 - RNA, 19 nt, Homo sapiens
  misc_RNA (1)...(19): siRNA sense strand
aaaccagaaucacugaaag

SEQ ID NO: 1704636 - RNA, 19 nt, Homo sapiens
  misc_RNA (1)...(19): siRNA sense strand
uaaccauccuccacaaagg

SEQ ID NO: 1704637 - RNA, 19 nt, Homo sapiens
  misc_RNA (1)...(19): siRNA sense strand
ggauauuugcagauagaaa

SEQ ID NO: 1704638 - RNA, 19 nt, Homo sapiens
  misc_RNA (1)...(19): siRNA sense strand
acaauacaaggaauggaua

SEQ ID NO: 1704639 - RNA, 19 nt, Homo sapiens
  misc_RNA (1)...(19): siRNA sense strand
gaucaucguggcgcaugua

SEQ ID NO: 1704640 - RNA, 19 nt, Homo sapiens
  misc_RNA (1)...(19): siRNA sense strand
uccauugcuuugauuauga

SEQ ID NO: 1704641 - RNA, 19 nt, Homo sapiens
  misc_RNA (1)...(19): siRNA sense strand
gagaaaccagugucugcuu

SEQ ID NO: 1704642 - RNA, 19 nt, Homo sapiens
  misc_RNA (1)...(19): siRNA sense strand
ucacugaaagcaaaugugu

SEQ ID NO: 1704643 - RNA, 19 nt, Homo sapiens
  misc_RNA (1)...(19): siRNA sense strand
gcaccacaaacacuacaga

SEQ ID NO: 1704644 - RNA, 19 nt, Homo sapiens
  misc_RNA (1)...(19): siRNA sense strand
caaugcauucaucucaaua

SEQ ID NO: 1704645 - RNA, 19 nt, Homo sapiens
  misc_RNA (1)...(19): siRNA sense strand
gacugaagaaugccaagaa

SEQ ID NO: 1704646 - RNA, 19 nt, Homo sapiens
  misc_RNA (1)...(19): siRNA sense strand
guauggcucuuggacugaa

SEQ ID NO: 1704647 - RNA, 19 nt, Homo sapiens
  misc_RNA (1)...(19): siRNA sense strand
caagaauacagcaaagaca

SEQ ID NO: 1704648 - RNA, 19 nt, Homo sapiens
  misc_RNA (1)...(19): siRNA sense strand
guaaccauccuccacaaag

SEQ ID NO: 1704649 - RNA, 19 nt, Homo sapiens
  misc_RNA (1)...(19): siRNA sense strand
cugaagaaugccaagaaua

SEQ ID NO: 1704650 - RNA, 19 nt, Homo sapiens
  misc_RNA (1)...(19): siRNA sense strand
ucucccaccugucaauuuc

SEQ ID NO: 1704651 - RNA, 19 nt, Homo sapiens
  misc_RNA (1)...(19): siRNA sense strand
cauaccaaguuucccuuca

SEQ ID NO: 1704652 - RNA, 19 nt, Homo sapiens
  misc_RNA (1)...(19): siRNA sense strand
cacaaacacuacagaagac

SEQ ID NO: 1704653 - RNA, 19 nt, Homo sapiens
  misc_RNA (1)...(19): siRNA sense strand
cacugcaccuggcuuguug

SEQ ID NO: 1704654 - RNA, 19 nt, Homo sapiens
  misc_RNA (1)...(19): siRNA sense strand
ggaauggauauuugcagau

SEQ ID NO: 1704655 - RNA, 19 nt, Homo sapiens
  misc_RNA (1)...(19): siRNA sense strand
ggacugaagaaugccaaga

SEQ ID NO: 1704656 - RNA, 19 nt, Homo sapiens
  misc_RNA (1)...(19): siRNA sense strand
acucgucucucuauccaau

SEQ ID NO: 1704657 - RNA, 19 nt, Homo sapiens
  misc_RNA (1)...(19): siRNA sense strand
caauacaaggaauggauau

SEQ ID NO: 1704658 - RNA, 19 nt, Homo sapiens
  misc_RNA (1)...(19): siRNA sense strand
ugguuuggcucaaguucuu

SEQ ID NO: 1704659 - RNA, 19 nt, Homo sapiens
  misc_RNA (1)...(19): siRNA sense strand
acugaagaaugccaagaau

SEQ ID NO: 1704660 - RNA, 19 nt, Homo sapiens
  misc_RNA (1)...(19): siRNA sense strand
cugacuuacuuccugauga

SEQ ID NO: 1704661 - RNA, 19 nt, Homo sapiens
  misc_RNA (1)...(19): siRNA sense strand
gaaauaucgcaugcugguu

SEQ ID NO: 1704662 - RNA, 19 nt, Homo sapiens
  misc_RNA (1)...(19): siRNA sense strand
guguaaccauccuccacaa

SEQ ID NO: 1704663 - RNA, 19 nt, Homo sapiens
  misc_RNA (1)...(19): siRNA sense strand
ggacuuuuauccucagcaa

SEQ ID NO: 1704664 - RNA, 19 nt, Homo sapiens
  misc_RNA (1)...(19): siRNA sense strand
uuuaaggucauaccaaguu

SEQ ID NO: 1704665 - RNA, 19 nt, Homo sapiens
  misc_RNA (1)...(19): siRNA sense strand
gcauguauuacucauccuu

SEQ ID NO: 1704666 - RNA, 19 nt, Homo sapiens
  misc_RNA (1)...(19): siRNA sense strand
uggcuugcggugcuuguua

SEQ ID NO: 1704667 - RNA, 19 nt, Homo sapiens
  misc_RNA (1)...(19): siRNA sense strand
aaacacuacagaagacaau

SEQ ID NO: 1704668 - RNA, 19 nt, Homo sapiens
  misc_RNA (1)...(19): siRNA sense strand
caaacacuacagaagacaa

SEQ ID NO: 1704669 - RNA, 19 nt, Homo sapiens
  misc_RNA (1)...(19): siRNA sense strand
gacuaugaaaccagaauca

SEQ ID NO: 1704670 - RNA, 19 nt, Homo sapiens
  misc_RNA (1)...(19): siRNA sense strand
auggauauuugcagauaga

SEQ ID NO: 1704671 - RNA, 19 nt, Homo sapiens
  misc_RNA (1)...(19): siRNA sense strand
gcaaaggaauguuaaucua

SEQ ID NO: 1704672 - RNA, 19 nt, Homo sapiens
  misc_RNA (1)...(19): siRNA sense strand
gaauggauauuugcagaua

SEQ ID NO: 1704673 - RNA, 19 nt, Homo sapiens
  misc_RNA (1)...(19): siRNA sense strand
cagaaucacugaaagcaaa

SEQ ID NO: 1704674 - RNA, 19 nt, Homo sapiens
  misc_RNA (1)...(19): siRNA sense strand
caucguggcgcauguauua

SEQ ID NO: 1704675 - RNA, 19 nt, Homo sapiens
  misc_RNA (1)...(19): siRNA sense strand
gaagacaauuauucacguu

SEQ ID NO: 1704676 - RNA, 19 nt, Homo sapiens
  misc_RNA (1)...(19): siRNA sense strand
gaaaccaaauccugaucaa

SEQ ID NO: 1704677 - RNA, 19 nt, Homo sapiens
  misc_RNA (1)...(19): siRNA sense strand
caagagcaaaggaauguua

SEQ ID NO: 1704678 - RNA, 19 nt, Homo sapiens
  misc_RNA (1)...(19): siRNA sense strand
ccauuaaaguuacugguuu

SEQ ID NO: 1704679 - RNA, 19 nt, Homo sapiens
  misc_RNA (1)...(19): siRNA sense strand
uaaguacgauguucaagug

SEQ ID NO: 1704680 - RNA, 19 nt, Homo sapiens
  misc_RNA (1)...(19): siRNA sense strand
gaaaauaaacgcuccaaaa

SEQ ID NO: 1704681 - RNA, 19 nt, Homo sapiens
  misc_RNA (1)...(19): siRNA sense strand
gaaaccagaaucacugaaa

SEQ ID NO: 1704682 - RNA, 19 nt, Homo sapiens
  misc_RNA (1)...(19): siRNA sense strand
gaguggagccaaccuauuu

SEQ ID NO: 1704683 - RNA, 19 nt, Homo sapiens
  misc_RNA (1)...(19): siRNA sense strand
gcagaacgaccacucacua

SEQ ID NO: 1704684 - RNA, 19 nt, Homo sapiens
  misc_RNA (1)...(19): siRNA sense strand
caaauaaauccuccacuga

SEQ ID NO: 1704685 - RNA, 19 nt, Homo sapiens
  misc_RNA (1)...(19): siRNA sense strand
ccuggaaccucaauuguga

SEQ ID NO: 1704686 - RNA, 19 nt, Homo sapiens
  misc_RNA (1)...(19): siRNA sense strand
ucacgccauugaucaaaua

SEQ ID NO: 1704687 - RNA, 19 nt, Homo sapiens
  misc_RNA (1)...(19): siRNA sense strand
ccacaaacacuacagaaga

SEQ ID NO: 1704688 - RNA, 19 nt, Homo sapiens
  misc_RNA (1)...(19): siRNA sense strand
ugaaggaacucgucucucu

SEQ ID NO: 1704689 - RNA, 19 nt, Homo sapiens
  misc_RNA (1)...(19): siRNA sense strand
gagccaaccuauuuaugug

SEQ ID NO: 1704690 - RNA, 19 nt, Homo sapiens
  misc_RNA (1)...(19): siRNA sense strand
gaacucgucucucuaucca

SEQ ID NO: 1704691 - RNA, 19 nt, Homo sapiens
  misc_RNA (1)...(19): siRNA sense strand
gaagaugacuaugaaacca

SEQ ID NO: 1704692 - RNA, 19 nt, Homo sapiens
  misc_RNA (1)...(19): siRNA sense strand
ugacuuacuuccugaugaa

SEQ ID NO: 1704693 - RNA, 19 nt, Homo sapiens
  misc_RNA (1)...(19): siRNA sense strand
gaaagcaaauguguaacca

SEQ ID NO: 1704694 - RNA, 19 nt, Homo sapiens
  misc_RNA (1)...(19): siRNA sense strand
gcagggcucuggagugagu

SEQ ID NO: 1704695 - RNA, 19 nt, Homo sapiens
  misc_RNA (1)...(19): siRNA sense strand
gaaugucacagcagagauu

SEQ ID NO: 1704696 - RNA, 19 nt, Homo sapiens
  misc_RNA (1)...(19): siRNA sense strand
uacaaggaauggauauuug

SEQ ID NO: 1704697 - RNA, 19 nt, Homo sapiens
  misc_RNA (1)...(19): siRNA sense strand
guacgauguucaagugaga

SEQ ID NO: 1704698 - RNA, 19 nt, Homo sapiens
  misc_RNA (1)...(19): siRNA sense strand
ccugucaauuucaccauua

SEQ ID NO: 1704699 - RNA, 19 nt, Homo sapiens
  misc_RNA (1)...(19): siRNA sense strand
ggagccaaccuauuuaugu

SEQ ID NO: 1704700 - RNA, 19 nt, Homo sapiens
  misc_RNA (1)...(19): siRNA sense strand
agaaaccagugucugcuuu

SEQ ID NO: 1704701 - RNA, 19 nt, Homo sapiens
  misc_RNA (1)...(19): siRNA sense strand
gaacgaccacucacuacug

SEQ ID NO: 1704702 - RNA, 19 nt, Homo sapiens
  misc_RNA (1)...(19): siRNA sense strand
gaaggaacucgucucucua

SEQ ID NO: 1704703 - RNA, 19 nt, Homo sapiens
  misc_RNA (1)...(19): siRNA sense strand
gauacugcaagcugacuua

SEQ ID NO: 1704704 - RNA, 19 nt, Homo sapiens
  misc_RNA (1)...(19): siRNA sense strand
cuacagaagacaauuauuc

SEQ ID NO: 1704705 - RNA, 19 nt, Homo sapiens
  misc_RNA (1)...(19): siRNA sense strand
ccaaugcauucaucucaau

SEQ ID NO: 1704706 - RNA, 19 nt, Homo sapiens
  misc_RNA (1)...(19): siRNA sense strand
ggaccauccugcagaacga

SEQ ID NO: 1704707 - RNA, 19 nt, Homo sapiens
  misc_RNA (1)...(19): siRNA sense strand
aauaaacgcuccaaaagaa

SEQ ID NO: 1704708 - RNA, 19 nt, Homo sapiens
  misc_RNA (1)...(19): siRNA sense strand
caaaagaagaugacuauga

SEQ ID NO: 1704709 - RNA, 19 nt, Homo sapiens
  misc_RNA (1)...(19): siRNA sense strand
aaauaucgcaugcugguuu

SEQ ID NO: 1704710 - RNA, 19 nt, Homo sapiens
  misc_RNA (1)...(19): siRNA sense strand
aaauaaauccuccacugaa

SEQ ID NO: 1704711 - RNA, 19 nt, Homo sapiens
  misc_RNA (1)...(19): siRNA sense strand
cauuaaaguuacugguuug

SEQ ID NO: 1704712 - RNA, 19 nt, Homo sapiens
  misc_RNA (1)...(19): siRNA sense strand
aauaaauccuccacugaau

SEQ ID NO: 1704713 - RNA, 19 nt, Homo sapiens
  misc_RNA (1)...(19): siRNA sense strand
caaaggaauguuaaucuag

SEQ ID NO: 1704714 - RNA, 19 nt, Homo sapiens
  misc_RNA (1)...(19): siRNA sense strand
cgccauugaucaaauaaau

SEQ ID NO: 1704715 - RNA, 19 nt, Homo sapiens
  misc_RNA (1)...(19): siRNA sense strand
acacuacagaagacaauua

SEQ ID NO: 1704716 - RNA, 19 nt, Homo sapiens
  misc_RNA (1)...(19): siRNA sense strand
ggaaaccaaauccugauca

SEQ ID NO: 1704717 - RNA, 19 nt, Homo sapiens
  misc_RNA (1)...(19): siRNA sense strand
gaucaagagcaaaggaaug

SEQ ID NO: 1704718 - RNA, 19 nt, Homo sapiens
  misc_RNA (1)...(19): siRNA sense strand
ugaagaaugccaagaauac

SEQ ID NO: 1704719 - RNA, 19 nt, Homo sapiens
  misc_RNA (1)...(19): siRNA sense strand
gagcaaaggaauguuaauc

SEQ ID NO: 1704720 - RNA, 19 nt, Homo sapiens
  misc_RNA (1)...(19): siRNA sense strand
gaccaaugcauucaucuca

SEQ ID NO: 1704721 - RNA, 19 nt, Homo sapiens
  misc_RNA (1)...(19): siRNA sense strand
gaagaaugccaagaauaca

SEQ ID NO: 1704722 - RNA, 19 nt, Homo sapiens
  misc_RNA (1)...(19): siRNA sense strand
aaccaaauccugaucaaga

SEQ ID NO: 1704723 - RNA, 19 nt, Homo sapiens
  misc_RNA (1)...(19): siRNA sense strand
acugaaagcaaauguguaa

SEQ ID NO: 1704724 - RNA, 19 nt, Homo sapiens
  misc_RNA (1)...(19): siRNA sense strand
gcaaauguguaaccauccu

SEQ ID NO: 1704725 - RNA, 19 nt, Homo sapiens
  misc_RNA (1)...(19): siRNA sense strand
caagugagagcagcaguga

SEQ ID NO: 1704726 - RNA, 19 nt, Homo sapiens
  misc_RNA (1)...(19): siRNA sense strand
acugcaagcugacuuacuu

SEQ ID NO: 1704727 - RNA, 19 nt, Homo sapiens
  misc_RNA (1)...(19): siRNA sense strand
gcccuuugaucagcuguuu

SEQ ID NO: 1704728 - RNA, 19 nt, Homo sapiens
  misc_RNA (1)...(19): siRNA sense strand
uuaaggucauaccaaguuu

SEQ ID NO: 1704729 - RNA, 19 nt, Homo sapiens
  misc_RNA (1)...(19): siRNA sense strand
aggcagggcucuggaguga

SEQ ID NO: 1704730 - RNA, 19 nt, Homo sapiens
  misc_RNA (1)...(19): siRNA sense strand
ccauugcuuugauuaugaa

SEQ ID NO: 1704731 - RNA, 19 nt, Homo sapiens
  misc_RNA (1)...(19): siRNA sense strand
uaaauccuccacugaaugu

SEQ ID NO: 1704732 - RNA, 19 nt, Homo sapiens
  misc_RNA (1)...(19): siRNA sense strand
ggcuugcggugcuuguuaa

SEQ ID NO: 1704733 - RNA, 19 nt, Homo sapiens
  misc_RNA (1)...(19): siRNA sense strand
ucacuucucccaccuguca

SEQ ID NO: 1704734 - RNA, 19 nt, Homo sapiens
  misc_RNA (1)...(19): siRNA sense strand
cugaggacacgcaguauuu

SEQ ID NO: 1704735 - RNA, 19 nt, Homo sapiens
  misc_RNA (1)...(19): siRNA sense strand
aaaccagaaucacugaaag

SEQ ID NO: 1704736 - RNA, 19 nt, Homo sapiens
  misc_RNA (1)...(19): siRNA sense strand
uaaccauccuccacaaagg

SEQ ID NO: 1704737 - RNA, 19 nt, Homo sapiens
  misc_RNA (1)...(19): siRNA sense strand
ggauauuugcagauagaaa

SEQ ID NO: 1704738 - RNA, 19 nt, Homo sapiens
  misc_RNA (1)...(19): siRNA sense strand
acaauacaaggaauggaua

SEQ ID NO: 1704739 - RNA, 19 nt, Homo sapiens
  misc_RNA (1)...(19): siRNA sense strand
gaucaucguggcgcaugua

SEQ ID NO: 1704740 - RNA, 19 nt, Homo sapiens
  misc_RNA (1)...(19): siRNA sense strand
uccauugcuuugauuauga

SEQ ID NO: 1704741 - RNA, 19 nt, Homo sapiens
  misc_RNA (1)...(19): siRNA sense strand
gagaaaccagugucugcuu

SEQ ID NO: 1704742 - RNA, 19 nt, Homo sapiens
  misc_RNA (1)...(19): siRNA sense strand
ucacugaaagcaaaugugu

SEQ ID NO: 1704743 - RNA, 19 nt, Homo sapiens
  misc_RNA (1)...(19): siRNA sense strand
gcaccacaaacacuacaga

SEQ ID NO: 1704744 - RNA, 19 nt, Homo sapiens
  misc_RNA (1)...(19): siRNA sense strand
caaugcauucaucucaaua

SEQ ID NO: 1704745 - RNA, 19 nt, Homo sapiens
  misc_RNA (1)...(19): siRNA sense strand
gacugaagaaugccaagaa

SEQ ID NO: 1704746 - RNA, 19 nt, Homo sapiens
  misc_RNA (1)...(19): siRNA sense strand
guauggcucuuggacugaa

SEQ ID NO: 1704747 - RNA, 19 nt, Homo sapiens
  misc_RNA (1)...(19): siRNA sense strand
caagaauacagcaaagaca

SEQ ID NO: 1704748 - RNA, 19 nt, Homo sapiens
  misc_RNA (1)...(19): siRNA sense strand
guaaccauccuccacaaag

SEQ ID NO: 1704749 - RNA, 19 nt, Homo sapiens
  misc_RNA (1)...(19): siRNA sense strand
cugaagaaugccaagaaua

SEQ ID NO: 1704750 - RNA, 19 nt, Homo sapiens
  misc_RNA (1)...(19): siRNA sense strand
ucucccaccugucaauuuc

SEQ ID NO: 1704751 - RNA, 19 nt, Homo sapiens
  misc_RNA (1)...(19): siRNA sense strand
cauaccaaguuucccuuca

SEQ ID NO: 1704752 - RNA, 19 nt, Homo sapiens
  misc_RNA (1)...(19): siRNA sense strand
cacaaacacuacagaagac

SEQ ID NO: 1704753 - RNA, 19 nt, Homo sapiens
  misc_RNA (1)...(19): siRNA sense strand
cacugcaccuggcuuguug

SEQ ID NO: 1704754 - RNA, 19 nt, Homo sapiens
  misc_RNA (1)...(19): siRNA sense strand
ggaauggauauuugcagau

SEQ ID NO: 1704755 - RNA, 19 nt, Homo sapiens
  misc_RNA (1)...(19): siRNA sense strand
ggacugaagaaugccaaga

SEQ ID NO: 1704756 - RNA, 19 nt, Homo sapiens
  misc_RNA (1)...(19): siRNA sense strand
acucgucucucuauccaau

SEQ ID NO: 1704757 - RNA, 19 nt, Homo sapiens
  misc_RNA (1)...(19): siRNA sense strand
caauacaaggaauggauau

SEQ ID NO: 1704758 - RNA, 19 nt, Homo sapiens
  misc_RNA (1)...(19): siRNA sense strand
ugguuuggcucaaguucuu

SEQ ID NO: 1704759 - RNA, 19 nt, Homo sapiens
  misc_RNA (1)...(19): siRNA sense strand
acugaagaaugccaagaau

SEQ ID NO: 1704760 - RNA, 19 nt, Homo sapiens
  misc_RNA (1)...(19): siRNA sense strand
cugacuuacuuccugauga

SEQ ID NO: 1704761 - RNA, 19 nt, Homo sapiens
  misc_RNA (1)...(19): siRNA sense strand
gaaauaucgcaugcugguu

SEQ ID NO: 1704762 - RNA, 19 nt, Homo sapiens
  misc_RNA (1)...(19): siRNA sense strand
guguaaccauccuccacaa

SEQ ID NO: 1704763 - RNA, 19 nt, Homo sapiens
  misc_RNA (1)...(19): siRNA sense strand
ggacuuuuauccucagcaa

SEQ ID NO: 1704764 - RNA, 19 nt, Homo sapiens
  misc_RNA (1)...(19): siRNA sense strand
uuuaaggucauaccaaguu

SEQ ID NO: 1704765 - RNA, 19 nt, Homo sapiens
  misc_RNA (1)...(19): siRNA sense strand
gcauguauuacucauccuu

SEQ ID NO: 1704766 - RNA, 19 nt, Homo sapiens
  misc_RNA (1)...(19): siRNA sense strand
uggcuugcggugcuuguua

SEQ ID NO: 1704767 - RNA, 19 nt, Homo sapiens
  misc_RNA (1)...(19): siRNA sense strand
aaacacuacagaagacaau

SEQ ID NO: 1704768 - RNA, 19 nt, Homo sapiens
  misc_RNA (1)...(19): siRNA sense strand
caaacacuacagaagacaa

SEQ ID NO: 1704769 - RNA, 19 nt, Homo sapiens
  misc_RNA (1)...(19): siRNA sense strand
gacuaugaaaccagaauca

SEQ ID NO: 1704770 - RNA, 19 nt, Homo sapiens
  misc_RNA (1)...(19): siRNA sense strand
auggauauuugcagauaga

SEQ ID NO: 1704771 - RNA, 19 nt, Homo sapiens
  misc_RNA (1)...(19): siRNA sense strand
gcaaaggaauguuaaucua

SEQ ID NO: 1704772 - RNA, 19 nt, Homo sapiens
  misc_RNA (1)...(19): siRNA sense strand
gaauggauauuugcagaua

SEQ ID NO: 1704773 - RNA, 19 nt, Homo sapiens
  misc_RNA (1)...(19): siRNA sense strand
cagaaucacugaaagcaaa

SEQ ID NO: 1704774 - RNA, 19 nt, Homo sapiens
  misc_RNA (1)...(19): siRNA sense strand
caucguggcgcauguauua

SEQ ID NO: 1704775 - RNA, 19 nt, Homo sapiens
  misc_RNA (1)...(19): siRNA sense strand
gaagacaauuauucacguu

SEQ ID NO: 1704776 - RNA, 19 nt, Homo sapiens
  misc_RNA (1)...(19): siRNA sense strand
gaaaccaaauccugaucaa

SEQ ID NO: 1704777 - RNA, 19 nt, Homo sapiens
  misc_RNA (1)...(19): siRNA sense strand
caagagcaaaggaauguua

SEQ ID NO: 1704778 - RNA, 19 nt, Homo sapiens
  misc_RNA (1)...(19): siRNA sense strand
ccauuaaaguuacugguuu

SEQ ID NO: 1704779 - RNA, 19 nt, Homo sapiens
  misc_RNA (1)...(19): siRNA sense strand
uaaguacgauguucaagug

SEQ ID NO: 1704780 - RNA, 19 nt, Homo sapiens
  misc_RNA (1)...(19): siRNA sense strand
gaaaauaaacgcuccaaaa

SEQ ID NO: 1704781 - RNA, 19 nt, Homo sapiens
  misc_RNA (1)...(19): siRNA sense strand
gaaaccagaaucacugaaa

SEQ ID NO: 1704782 - RNA, 19 nt, Homo sapiens
  misc_RNA (1)...(19): siRNA sense strand
gaguggagccaaccuauuu

SEQ ID NO: 1704783 - RNA, 19 nt, Homo sapiens
  misc_RNA (1)...(19): siRNA sense strand
gcagaacgaccacucacua

SEQ ID NO: 1704784 - RNA, 19 nt, Homo sapiens
  misc_RNA (1)...(19): siRNA sense strand
caaauaaauccuccacuga

SEQ ID NO: 1704785 - RNA, 19 nt, Homo sapiens
  misc_RNA (1)...(19): siRNA sense strand
ccuggaaccucaauuguga

SEQ ID NO: 1704786 - RNA, 19 nt, Homo sapiens
  misc_RNA (1)...(19): siRNA sense strand
ucacgccauugaucaaaua

SEQ ID NO: 1704787 - RNA, 19 nt, Homo sapiens
  misc_RNA (1)...(19): siRNA sense strand
ccacaaacacuacagaaga

SEQ ID NO: 1704788 - RNA, 19 nt, Homo sapiens
  misc_RNA (1)...(19): siRNA sense strand
ugaaggaacucgucucucu

SEQ ID NO: 1704789 - RNA, 19 nt, Homo sapiens
  misc_RNA (1)...(19): siRNA sense strand
gagccaaccuauuuaugug

SEQ ID NO: 1704790 - RNA, 19 nt, Homo sapiens
  misc_RNA (1)...(19): siRNA sense strand
gaacucgucucucuaucca

SEQ ID NO: 1704791 - RNA, 19 nt, Homo sapiens
  misc_RNA (1)...(19): siRNA sense strand
gaagaugacuaugaaacca

SEQ ID NO: 1704792 - RNA, 19 nt, Homo sapiens
  misc_RNA (1)...(19): siRNA sense strand
ugacuuacuuccugaugaa

SEQ ID NO: 1704793 - RNA, 19 nt, Homo sapiens
  misc_RNA (1)...(19): siRNA sense strand
gaaagcaaauguguaacca

SEQ ID NO: 1704794 - RNA, 19 nt, Homo sapiens
  misc_RNA (1)...(19): siRNA sense strand
gcagggcucuggagugagu

SEQ ID NO: 1704795 - RNA, 19 nt, Homo sapiens
  misc_RNA (1)...(19): siRNA sense strand
gaaugucacagcagagauu

SEQ ID NO: 1704796 - RNA, 19 nt, Homo sapiens
  misc_RNA (1)...(19): siRNA sense strand
uacaaggaauggauauuug

SEQ ID NO: 1704797 - RNA, 19 nt, Homo sapiens
  misc_RNA (1)...(19): siRNA sense strand
guacgauguucaagugaga

SEQ ID NO: 1704798 - RNA, 19 nt, Homo sapiens
  misc_RNA (1)...(19): siRNA sense strand
ccugucaauuucaccauua

SEQ ID NO: 1704799 - RNA, 19 nt, Homo sapiens
  misc_RNA (1)...(19): siRNA sense strand
ggagccaaccuauuuaugu

SEQ ID NO: 1704800 - RNA, 19 nt, Homo sapiens
  misc_RNA (1)...(19): siRNA sense strand
agaaaccagugucugcuuu

SEQ ID NO: 1704801 - RNA, 19 nt, Homo sapiens
  misc_RNA (1)...(19): siRNA sense strand
gaacgaccacucacuacug

SEQ ID NO: 1704802 - RNA, 19 nt, Homo sapiens
  misc_RNA (1)...(19): siRNA sense strand
gaaggaacucgucucucua

SEQ ID NO: 1704803 - RNA, 19 nt, Homo sapiens
  misc_RNA (1)...(19): siRNA sense strand
gauacugcaagcugacuua

SEQ ID NO: 1704804 - RNA, 19 nt, Homo sapiens
  misc_RNA (1)...(19): siRNA sense strand
cuacagaagacaauuauuc

SEQ ID NO: 1704805 - RNA, 19 nt, Homo sapiens
  misc_RNA (1)...(19): siRNA sense strand
ccaaugcauucaucucaau

SEQ ID NO: 1704806 - RNA, 19 nt, Homo sapiens
  misc_RNA (1)...(19): siRNA sense strand
ggaccauccugcagaacga

SEQ ID NO: 1704807 - RNA, 19 nt, Homo sapiens
  misc_RNA (1)...(19): siRNA sense strand
aauaaacgcuccaaaagaa

SEQ ID NO: 1704808 - RNA, 19 nt, Homo sapiens
  misc_RNA (1)...(19): siRNA sense strand
caaaagaagaugacuauga

SEQ ID NO: 1704809 - RNA, 19 nt, Homo sapiens
  misc_RNA (1)...(19): siRNA sense strand
aaauaucgcaugcugguuu

SEQ ID NO: 1704810 - RNA, 19 nt, Homo sapiens
  misc_RNA (1)...(19): siRNA sense strand
aaauaaauccuccacugaa

SEQ ID NO: 1704811 - RNA, 19 nt, Homo sapiens
  misc_RNA (1)...(19): siRNA sense strand
cauuaaaguuacugguuug

SEQ ID NO: 1704812 - RNA, 19 nt, Homo sapiens
  misc_RNA (1)...(19): siRNA sense strand
aauaaauccuccacugaau

SEQ ID NO: 1704813 - RNA, 19 nt, Homo sapiens
  misc_RNA (1)...(19): siRNA sense strand
caaaggaauguuaaucuag

SEQ ID NO: 1704814 - RNA, 19 nt, Homo sapiens
  misc_RNA (1)...(19): siRNA sense strand
cgccauugaucaaauaaau

SEQ ID NO: 1704815 - RNA, 19 nt, Homo sapiens
  misc_RNA (1)...(19): siRNA sense strand
acacuacagaagacaauua

SEQ ID NO: 1704816 - RNA, 19 nt, Homo sapiens
  misc_RNA (1)...(19): siRNA sense strand
ggaaaccaaauccugauca

SEQ ID NO: 1704817 - RNA, 19 nt, Homo sapiens
  misc_RNA (1)...(19): siRNA sense strand
gaucaagagcaaaggaaug

SEQ ID NO: 1704818 - RNA, 19 nt, Homo sapiens
  misc_RNA (1)...(19): siRNA sense strand
ugaagaaugccaagaauac

SEQ ID NO: 1704819 - RNA, 19 nt, Homo sapiens
  misc_RNA (1)...(19): siRNA sense strand
gagcaaaggaauguuaauc

SEQ ID NO: 1704820 - RNA, 19 nt, Homo sapiens
  misc_RNA (1)...(19): siRNA sense strand
gaccaaugcauucaucuca

SEQ ID NO: 1704821 - RNA, 19 nt, Homo sapiens
  misc_RNA (1)...(19): siRNA sense strand
gaagaaugccaagaauaca

SEQ ID NO: 1704822 - RNA, 19 nt, Homo sapiens
  misc_RNA (1)...(19): siRNA sense strand
aaccaaauccugaucaaga

SEQ ID NO: 1704823 - RNA, 19 nt, Homo sapiens
  misc_RNA (1)...(19): siRNA sense strand
acugaaagcaaauguguaa

SEQ ID NO: 1704824 - RNA, 19 nt, Homo sapiens
  misc_RNA (1)...(19): siRNA sense strand
gcaaauguguaaccauccu

SEQ ID NO: 1704825 - RNA, 19 nt, Homo sapiens
  misc_RNA (1)...(19): siRNA sense strand
caagugagagcagcaguga

SEQ ID NO: 1704826 - RNA, 19 nt, Homo sapiens
  misc_RNA (1)...(19): siRNA sense strand
acugcaagcugacuuacuu

SEQ ID NO: 1704827 - RNA, 19 nt, Homo sapiens
  misc_RNA (1)...(19): siRNA sense strand
gcccuuugaucagcuguuu

SEQ ID NO: 1704828 - RNA, 19 nt, Homo sapiens
  misc_RNA (1)...(19): siRNA sense strand
uuaaggucauaccaaguuu

SEQ ID NO: 1704829 - RNA, 19 nt, Homo sapiens
  misc_RNA (1)...(19): siRNA sense strand
aggcagggcucuggaguga

SEQ ID NO: 1704830 - RNA, 19 nt, Homo sapiens
  misc_RNA (1)...(19): siRNA sense strand
ccauugcuuugauuaugaa

SEQ ID NO: 1704831 - RNA, 19 nt, Homo sapiens
  misc_RNA (1)...(19): siRNA sense strand
uaaauccuccacugaaugu

SEQ ID NO: 1704832 - RNA, 19 nt, Homo sapiens
  misc_RNA (1)...(19): siRNA sense strand
ggcuugcggugcuuguuaa

SEQ ID NO: 1704833 - RNA, 19 nt, Homo sapiens
  misc_RNA (1)...(19): siRNA sense strand
ucacuucucccaccuguca

SEQ ID NO: 1704834 - RNA, 19 nt, Homo sapiens
  misc_RNA (1)...(19): siRNA sense strand
cugaggacacgcaguauuu

SEQ ID NO: 1704835 - RNA, 19 nt, Homo sapiens
  misc_RNA (1)...(19): siRNA sense strand
aaaccagaaucacugaaag

SEQ ID NO: 1704836 - RNA, 19 nt, Homo sapiens
  misc_RNA (1)...(19): siRNA sense strand
uaaccauccuccacaaagg

SEQ ID NO: 1704837 - RNA, 19 nt, Homo sapiens
  misc_RNA (1)...(19): siRNA sense strand
ggauauuugcagauagaaa

SEQ ID NO: 1704838 - RNA, 19 nt, Homo sapiens
  misc_RNA (1)...(19): siRNA sense strand
acaauacaaggaauggaua

SEQ ID NO: 1704839 - RNA, 19 nt, Homo sapiens
  misc_RNA (1)...(19): siRNA sense strand
gaucaucguggcgcaugua

SEQ ID NO: 1704840 - RNA, 19 nt, Homo sapiens
  misc_RNA (1)...(19): siRNA sense strand
uccauugcuuugauuauga

SEQ ID NO: 1704841 - RNA, 19 nt, Homo sapiens
  misc_RNA (1)...(19): siRNA sense strand
gagaaaccagugucugcuu

SEQ ID NO: 1704842 - RNA, 19 nt, Homo sapiens
  misc_RNA (1)...(19): siRNA sense strand
ucacugaaagcaaaugugu

SEQ ID NO: 1704843 - RNA, 19 nt, Homo sapiens
  misc_RNA (1)...(19): siRNA sense strand
gcaccacaaacacuacaga

SEQ ID NO: 1704844 - RNA, 19 nt, Homo sapiens
  misc_RNA (1)...(19): siRNA sense strand
caaugcauucaucucaaua

SEQ ID NO: 1704845 - RNA, 19 nt, Homo sapiens
  misc_RNA (1)...(19): siRNA sense strand
gacugaagaaugccaagaa

SEQ ID NO: 1704846 - RNA, 19 nt, Homo sapiens
  misc_RNA (1)...(19): siRNA sense strand
guauggcucuuggacugaa

SEQ ID NO: 1704847 - RNA, 19 nt, Homo sapiens
  misc_RNA (1)...(19): siRNA sense strand
caagaauacagcaaagaca

SEQ ID NO: 1704848 - RNA, 19 nt, Homo sapiens
  misc_RNA (1)...(19): siRNA sense strand
guaaccauccuccacaaag

SEQ ID NO: 1704849 - RNA, 19 nt, Homo sapiens
  misc_RNA (1)...(19): siRNA sense strand
cugaagaaugccaagaaua

SEQ ID NO: 1704850 - RNA, 19 nt, Homo sapiens
  misc_RNA (1)...(19): siRNA sense strand
ucucccaccugucaauuuc

SEQ ID NO: 1704851 - RNA, 19 nt, Homo sapiens
  misc_RNA (1)...(19): siRNA sense strand
cauaccaaguuucccuuca

SEQ ID NO: 1704852 - RNA, 19 nt, Homo sapiens
  misc_RNA (1)...(19): siRNA sense strand
cacaaacacuacagaagac

SEQ ID NO: 1704853 - RNA, 19 nt, Homo sapiens
  misc_RNA (1)...(19): siRNA sense strand
cacugcaccuggcuuguug

SEQ ID NO: 1704854 - RNA, 19 nt, Homo sapiens
  misc_RNA (1)...(19): siRNA sense strand
ggaauggauauuugcagau

SEQ ID NO: 1704855 - RNA, 19 nt, Homo sapiens
  misc_RNA (1)...(19): siRNA sense strand
ggacugaagaaugccaaga

SEQ ID NO: 1704856 - RNA, 19 nt, Homo sapiens
  misc_RNA (1)...(19): siRNA sense strand
acucgucucucuauccaau

SEQ ID NO: 1704857 - RNA, 19 nt, Homo sapiens
  misc_RNA (1)...(19): siRNA sense strand
caauacaaggaauggauau

SEQ ID NO: 1704858 - RNA, 19 nt, Homo sapiens
  misc_RNA (1)...(19): siRNA sense strand
ugguuuggcucaaguucuu

SEQ ID NO: 1704859 - RNA, 19 nt, Homo sapiens
  misc_RNA (1)...(19): siRNA sense strand
acugaagaaugccaagaau

SEQ ID NO: 1704860 - RNA, 19 nt, Homo sapiens
  misc_RNA (1)...(19): siRNA sense strand
cugacuuacuuccugauga

SEQ ID NO: 1704861 - RNA, 19 nt, Homo sapiens
  misc_RNA (1)...(19): siRNA sense strand
gaaauaucgcaugcugguu

SEQ ID NO: 1704862 - RNA, 19 nt, Homo sapiens
  misc_RNA (1)...(19): siRNA sense strand
guguaaccauccuccacaa

SEQ ID NO: 1704863 - RNA, 19 nt, Homo sapiens
  misc_RNA (1)...(19): siRNA sense strand
ggacuuuuauccucagcaa

SEQ ID NO: 1704864 - RNA, 19 nt, Homo sapiens
  misc_RNA (1)...(19): siRNA sense strand
uuuaaggucauaccaaguu

SEQ ID NO: 1704865 - RNA, 19 nt, Homo sapiens
  misc_RNA (1)...(19): siRNA sense strand
gcauguauuacucauccuu

SEQ ID NO: 1704866 - RNA, 19 nt, Homo sapiens
  misc_RNA (1)...(19): siRNA sense strand
uggcuugcggugcuuguua

SEQ ID NO: 1704867 - RNA, 19 nt, Homo sapiens
  misc_RNA (1)...(19): siRNA sense strand
aaacacuacagaagacaau

SEQ ID NO: 1704868 - RNA, 19 nt, Homo sapiens
  misc_RNA (1)...(19): siRNA sense strand
caaacacuacagaagacaa

SEQ ID NO: 1704869 - RNA, 19 nt, Homo sapiens
  misc_RNA (1)...(19): siRNA sense strand
gacuaugaaaccagaauca

SEQ ID NO: 1704870 - RNA, 19 nt, Homo sapiens
  misc_RNA (1)...(19): siRNA sense strand
auggauauuugcagauaga

SEQ ID NO: 1704871 - RNA, 19 nt, Homo sapiens
  misc_RNA (1)...(19): siRNA sense strand
ggacaagaaucuaucauug

SEQ ID NO: 1704872 - RNA, 19 nt, Homo sapiens
  misc_RNA (1)...(19): siRNA sense strand
caagagauacgcuacauaa

SEQ ID NO: 1704873 - RNA, 19 nt, Homo sapiens
  misc_RNA (1)...(19): siRNA sense strand
caaaggcgauaacaucuau

SEQ ID NO: 1704874 - RNA, 19 nt, Homo sapiens
  misc_RNA (1)...(19): siRNA sense strand
gcgauaacaucuaugaaug

SEQ ID NO: 1704875 - RNA, 19 nt, Homo sapiens
  misc_RNA (1)...(19): siRNA sense strand
gcacuaaccauuucuaaag

SEQ ID NO: 1704876 - RNA, 19 nt, Homo sapiens
  misc_RNA (1)...(19): siRNA sense strand
ccaagaagaaggagaguaa

SEQ ID NO: 1704877 - RNA, 19 nt, Homo sapiens
  misc_RNA (1)...(19): siRNA sense strand
gguguauucuuucucgaua

SEQ ID NO: 1704878 - RNA, 19 nt, Homo sapiens
  misc_RNA (1)...(19): siRNA sense strand
gagcagaacaugacagaau

SEQ ID NO: 1704879 - RNA, 19 nt, Homo sapiens
  misc_RNA (1)...(19): siRNA sense strand
gauaacaucuaugaaugga

SEQ ID NO: 1704880 - RNA, 19 nt, Homo sapiens
  misc_RNA (1)...(19): siRNA sense strand
ucuaucugcucacuucuua

SEQ ID NO: 1704881 - RNA, 19 nt, Homo sapiens
  misc_RNA (1)...(19): siRNA sense strand
gacaguggaccaagagaua

SEQ ID NO: 1704882 - RNA, 19 nt, Homo sapiens
  misc_RNA (1)...(19): siRNA sense strand
guaugagggugguguauuc

SEQ ID NO: 1704883 - RNA, 19 nt, Homo sapiens
  misc_RNA (1)...(19): siRNA sense strand
gagaguaaagucagcauga

SEQ ID NO: 1704884 - RNA, 19 nt, Homo sapiens
  misc_RNA (1)...(19): siRNA sense strand
ugagggugguguauucuuu

SEQ ID NO: 1704885 - RNA, 19 nt, Homo sapiens
  misc_RNA (1)...(19): siRNA sense strand
gaaguauugccacucagua

SEQ ID NO: 1704886 - RNA, 19 nt, Homo sapiens
  misc_RNA (1)...(19): siRNA sense strand
caacagagcagaacaugac

SEQ ID NO: 1704887 - RNA, 19 nt, Homo sapiens
  misc_RNA (1)...(19): siRNA sense strand
cagcaaaccgagaaagaaa

SEQ ID NO: 1704888 - RNA, 19 nt, Homo sapiens
  misc_RNA (1)...(19): siRNA sense strand
gcuuggacauauugaaaga

SEQ ID NO: 1704889 - RNA, 19 nt, Homo sapiens
  misc_RNA (1)...(19): siRNA sense strand
guuauuugcuuggacauau

SEQ ID NO: 1704890 - RNA, 19 nt, Homo sapiens
  misc_RNA (1)...(19): siRNA sense strand
gaagaaggagaguaaaguc

SEQ ID NO: 1704891 - RNA, 19 nt, Homo sapiens
  misc_RNA (1)...(19): siRNA sense strand
cuucaagccuccaaagguu

SEQ ID NO: 1704892 - RNA, 19 nt, Homo sapiens
  misc_RNA (1)...(19): siRNA sense strand
gcaaaccgagaaagaaaca

SEQ ID NO: 1704893 - RNA, 19 nt, Homo sapiens
  misc_RNA (1)...(19): siRNA sense strand
ccaaaggcgauaacaucua

SEQ ID NO: 1704894 - RNA, 19 nt, Homo sapiens
  misc_RNA (1)...(19): siRNA sense strand
guccagcacuaaccauuuc

SEQ ID NO: 1704895 - RNA, 19 nt, Homo sapiens
  misc_RNA (1)...(19): siRNA sense strand
gucaagguguuauuugcuu

SEQ ID NO: 1704896 - RNA, 19 nt, Homo sapiens
  misc_RNA (1)...(19): siRNA sense strand
ccaagagauacgcuacaua

SEQ ID NO: 1704897 - RNA, 19 nt, Homo sapiens
  misc_RNA (1)...(19): siRNA sense strand
ggcgauaacaucuaugaau

SEQ ID NO: 1704898 - RNA, 19 nt, Homo sapiens
  misc_RNA (1)...(19): siRNA sense strand
aaaccgagaaagaaacaaa

SEQ ID NO: 1704899 - RNA, 19 nt, Homo sapiens
  misc_RNA (1)...(19): siRNA sense strand
gccagacaguggaccaaga

SEQ ID NO: 1704900 - RNA, 19 nt, Homo sapiens
  misc_RNA (1)...(19): siRNA sense strand
guauugccacucaguauau

SEQ ID NO: 1704901 - RNA, 19 nt, Homo sapiens
  misc_RNA (1)...(19): siRNA sense strand
aagguuacauuucggacaa

SEQ ID NO: 1704902 - RNA, 19 nt, Homo sapiens
  misc_RNA (1)...(19): siRNA sense strand
ggaaguauugccacucagu

SEQ ID NO: 1704903 - RNA, 19 nt, Homo sapiens
  misc_RNA (1)...(19): siRNA sense strand
ccagcaaaccgagaaagaa

SEQ ID NO: 1704904 - RNA, 19 nt, Homo sapiens
  misc_RNA (1)...(19): siRNA sense strand
cagcacuaaccauuucuaa

SEQ ID NO: 1704905 - RNA, 19 nt, Homo sapiens
  misc_RNA (1)...(19): siRNA sense strand
cggacaagaaucuaucauu

SEQ ID NO: 1704906 - RNA, 19 nt, Homo sapiens
  misc_RNA (1)...(19): siRNA sense strand
cacuaaccauuucuaaagu

SEQ ID NO: 1704907 - RNA, 19 nt, Homo sapiens
  misc_RNA (1)...(19): siRNA sense strand
ugggaaguauugccacuca

SEQ ID NO: 1704908 - RNA, 19 nt, Homo sapiens
  misc_RNA (1)...(19): siRNA sense strand
caagaagaaggagaguaaa

SEQ ID NO: 1704909 - RNA, 19 nt, Homo sapiens
  misc_RNA (1)...(19): siRNA sense strand
cuccaaagguuacauuucg

SEQ ID NO: 1704910 - RNA, 19 nt, Homo sapiens
  misc_RNA (1)...(19): siRNA sense strand
agcagaacaugacagaaug

SEQ ID NO: 1704911 - RNA, 19 nt, Homo sapiens
  misc_RNA (1)...(19): siRNA sense strand
cagagcagaacaugacaga

SEQ ID NO: 1704912 - RNA, 19 nt, Homo sapiens
  misc_RNA (1)...(19): siRNA sense strand
ccaaccagcaaaccgagaa

SEQ ID NO: 1704913 - RNA, 19 nt, Homo sapiens
  misc_RNA (1)...(19): siRNA sense strand
guaaagucagcaugagcaa

SEQ ID NO: 1704914 - RNA, 19 nt, Homo sapiens
  misc_RNA (1)...(19): siRNA sense strand
gaguccagcacuaaccauu

SEQ ID NO: 1704915 - RNA, 19 nt, Homo sapiens
  misc_RNA (1)...(19): siRNA sense strand
ccaacagagcagaacauga

SEQ ID NO: 1704916 - RNA, 19 nt, Homo sapiens
  misc_RNA (1)...(19): siRNA sense strand
ccacucaguauaugaccaa

SEQ ID NO: 1704917 - RNA, 19 nt, Homo sapiens
  misc_RNA (1)...(19): siRNA sense strand
gguuacauuucggacaaga

SEQ ID NO: 1704918 - RNA, 19 nt, Homo sapiens
  misc_RNA (1)...(19): siRNA sense strand
aguauugccacucaguaua

SEQ ID NO: 1704919 - RNA, 19 nt, Homo sapiens
  misc_RNA (1)...(19): siRNA sense strand
guguauucuuucucgauau

SEQ ID NO: 1704920 - RNA, 19 nt, Homo sapiens
  misc_RNA (1)...(19): siRNA sense strand
cuuucuaucugcucacuuc

SEQ ID NO: 1704921 - RNA, 19 nt, Homo sapiens
  misc_RNA (1)...(19): siRNA sense strand
caaccagcaaaccgagaaa

SEQ ID NO: 1704922 - RNA, 19 nt, Homo sapiens
  misc_RNA (1)...(19): siRNA sense strand
cagucaagguguuauuugc

SEQ ID NO: 1704923 - RNA, 19 nt, Homo sapiens
  misc_RNA (1)...(19): siRNA sense strand
uuacauuucggacaagaau

SEQ ID NO: 1704924 - RNA, 19 nt, Homo sapiens
  misc_RNA (1)...(19): siRNA sense strand
uguauucuuucucgauauc

SEQ ID NO: 1704925 - RNA, 19 nt, Homo sapiens
  misc_RNA (1)...(19): siRNA sense strand
ucccaaaggcgauaacauc

SEQ ID NO: 1704926 - RNA, 19 nt, Homo sapiens
  misc_RNA (1)...(19): siRNA sense strand
gcagaacaugacagaaugg

SEQ ID NO: 1704927 - RNA, 19 nt, Homo sapiens
  misc_RNA (1)...(19): siRNA sense strand
agaagaaggagaguaaagu

SEQ ID NO: 1704928 - RNA, 19 nt, Homo sapiens
  misc_RNA (1)...(19): siRNA sense strand
cgauaacaucuaugaaugg

SEQ ID NO: 1704929 - RNA, 19 nt, Homo sapiens
  misc_RNA (1)...(19): siRNA sense strand
gacagaauggccagacagu

SEQ ID NO: 1704930 - RNA, 19 nt, Homo sapiens
  misc_RNA (1)...(19): siRNA sense strand
uaaagucagcaugagcaaa

SEQ ID NO: 1704931 - RNA, 19 nt, Homo sapiens
  misc_RNA (1)...(19): siRNA sense strand
acagucaagguguuauuug

SEQ ID NO: 1704932 - RNA, 19 nt, Homo sapiens
  misc_RNA (1)...(19): siRNA sense strand
gaccaacagagcagaacau

SEQ ID NO: 1704933 - RNA, 19 nt, Homo sapiens
  misc_RNA (1)...(19): siRNA sense strand
ggacaagaaucuaucauug

SEQ ID NO: 1704934 - RNA, 19 nt, Homo sapiens
  misc_RNA (1)...(19): siRNA sense strand
caagagauacgcuacauaa

SEQ ID NO: 1704935 - RNA, 19 nt, Homo sapiens
  misc_RNA (1)...(19): siRNA sense strand
caaaggcgauaacaucuau

SEQ ID NO: 1704936 - RNA, 19 nt, Homo sapiens
  misc_RNA (1)...(19): siRNA sense strand
gcgauaacaucuaugaaug

SEQ ID NO: 1704937 - RNA, 19 nt, Homo sapiens
  misc_RNA (1)...(19): siRNA sense strand
gcacuaaccauuucuaaag

SEQ ID NO: 1704938 - RNA, 19 nt, Homo sapiens
  misc_RNA (1)...(19): siRNA sense strand
ccaagaagaaggagaguaa

SEQ ID NO: 1704939 - RNA, 19 nt, Homo sapiens
  misc_RNA (1)...(19): siRNA sense strand
gguguauucuuucucgaua

SEQ ID NO: 1704940 - RNA, 19 nt, Homo sapiens
  misc_RNA (1)...(19): siRNA sense strand
gagcagaacaugacagaau

SEQ ID NO: 1704941 - RNA, 19 nt, Homo sapiens
  misc_RNA (1)...(19): siRNA sense strand
gauaacaucuaugaaugga

SEQ ID NO: 1704942 - RNA, 19 nt, Homo sapiens
  misc_RNA (1)...(19): siRNA sense strand
ucuaucugcucacuucuua

SEQ ID NO: 1704943 - RNA, 19 nt, Homo sapiens
  misc_RNA (1)...(19): siRNA sense strand
gacaguggaccaagagaua

SEQ ID NO: 1704944 - RNA, 19 nt, Homo sapiens
  misc_RNA (1)...(19): siRNA sense strand
guaugagggugguguauuc

SEQ ID NO: 1704945 - RNA, 19 nt, Homo sapiens
  misc_RNA (1)...(19): siRNA sense strand
gagaguaaagucagcauga

SEQ ID NO: 1704946 - RNA, 19 nt, Homo sapiens
  misc_RNA (1)...(19): siRNA sense strand
ugagggugguguauucuuu

SEQ ID NO: 1704947 - RNA, 19 nt, Homo sapiens
  misc_RNA (1)...(19): siRNA sense strand
gaaguauugccacucagua

SEQ ID NO: 1704948 - RNA, 19 nt, Homo sapiens
  misc_RNA (1)...(19): siRNA sense strand
caacagagcagaacaugac

SEQ ID NO: 1704949 - RNA, 19 nt, Homo sapiens
  misc_RNA (1)...(19): siRNA sense strand
cagcaaaccgagaaagaaa

SEQ ID NO: 1704950 - RNA, 19 nt, Homo sapiens
  misc_RNA (1)...(19): siRNA sense strand
gcuuggacauauugaaaga

SEQ ID NO: 1704951 - RNA, 19 nt, Homo sapiens
  misc_RNA (1)...(19): siRNA sense strand
guuauuugcuuggacauau

SEQ ID NO: 1704952 - RNA, 19 nt, Homo sapiens
  misc_RNA (1)...(19): siRNA sense strand
gaagaaggagaguaaaguc

SEQ ID NO: 1704953 - RNA, 19 nt, Homo sapiens
  misc_RNA (1)...(19): siRNA sense strand
cuucaagccuccaaagguu

SEQ ID NO: 1704954 - RNA, 19 nt, Homo sapiens
  misc_RNA (1)...(19): siRNA sense strand
gcaaaccgagaaagaaaca

SEQ ID NO: 1704955 - RNA, 19 nt, Homo sapiens
  misc_RNA (1)...(19): siRNA sense strand
ccaaaggcgauaacaucua

SEQ ID NO: 1704956 - RNA, 19 nt, Homo sapiens
  misc_RNA (1)...(19): siRNA sense strand
guccagcacuaaccauuuc

SEQ ID NO: 1704957 - RNA, 19 nt, Homo sapiens
  misc_RNA (1)...(19): siRNA sense strand
gucaagguguuauuugcuu

SEQ ID NO: 1704958 - RNA, 19 nt, Homo sapiens
  misc_RNA (1)...(19): siRNA sense strand
ccaagagauacgcuacaua

SEQ ID NO: 1704959 - RNA, 19 nt, Homo sapiens
  misc_RNA (1)...(19): siRNA sense strand
ggcgauaacaucuaugaau

SEQ ID NO: 1704960 - RNA, 19 nt, Homo sapiens
  misc_RNA (1)...(19): siRNA sense strand
aaaccgagaaagaaacaaa

SEQ ID NO: 1704961 - RNA, 19 nt, Homo sapiens
  misc_RNA (1)...(19): siRNA sense strand
gccagacaguggaccaaga

SEQ ID NO: 1704962 - RNA, 19 nt, Homo sapiens
  misc_RNA (1)...(19): siRNA sense strand
guauugccacucaguauau

SEQ ID NO: 1704963 - RNA, 19 nt, Homo sapiens
  misc_RNA (1)...(19): siRNA sense strand
aagguuacauuucggacaa

SEQ ID NO: 1704964 - RNA, 19 nt, Homo sapiens
  misc_RNA (1)...(19): siRNA sense strand
ggaaguauugccacucagu

SEQ ID NO: 1704965 - RNA, 19 nt, Homo sapiens
  misc_RNA (1)...(19): siRNA sense strand
ccagcaaaccgagaaagaa

SEQ ID NO: 1704966 - RNA, 19 nt, Homo sapiens
  misc_RNA (1)...(19): siRNA sense strand
cagcacuaaccauuucuaa

SEQ ID NO: 1704967 - RNA, 19 nt, Homo sapiens
  misc_RNA (1)...(19): siRNA sense strand
cggacaagaaucuaucauu

SEQ ID NO: 1704968 - RNA, 19 nt, Homo sapiens
  misc_RNA (1)...(19): siRNA sense strand
cacuaaccauuucuaaagu

SEQ ID NO: 1704969 - RNA, 19 nt, Homo sapiens
  misc_RNA (1)...(19): siRNA sense strand
ugggaaguauugccacuca

SEQ ID NO: 1704970 - RNA, 19 nt, Homo sapiens
  misc_RNA (1)...(19): siRNA sense strand
caagaagaaggagaguaaa

SEQ ID NO: 1704971 - RNA, 19 nt, Homo sapiens
  misc_RNA (1)...(19): siRNA sense strand
cuccaaagguuacauuucg

SEQ ID NO: 1704972 - RNA, 19 nt, Homo sapiens
  misc_RNA (1)...(19): siRNA sense strand
agcagaacaugacagaaug

SEQ ID NO: 1704973 - RNA, 19 nt, Homo sapiens
  misc_RNA (1)...(19): siRNA sense strand
cagagcagaacaugacaga

SEQ ID NO: 1704974 - RNA, 19 nt, Homo sapiens
  misc_RNA (1)...(19): siRNA sense strand
ccaaccagcaaaccgagaa

SEQ ID NO: 1704975 - RNA, 19 nt, Homo sapiens
  misc_RNA (1)...(19): siRNA sense strand
guaaagucagcaugagcaa

SEQ ID NO: 1704976 - RNA, 19 nt, Homo sapiens
  misc_RNA (1)...(19): siRNA sense strand
gaguccagcacuaaccauu

SEQ ID NO: 1704977 - RNA, 19 nt, Homo sapiens
  misc_RNA (1)...(19): siRNA sense strand
ccaacagagcagaacauga

SEQ ID NO: 1704978 - RNA, 19 nt, Homo sapiens
  misc_RNA (1)...(19): siRNA sense strand
ccacucaguauaugaccaa

SEQ ID NO: 1704979 - RNA, 19 nt, Homo sapiens
  misc_RNA (1)...(19): siRNA sense strand
gguuacauuucggacaaga

SEQ ID NO: 1704980 - RNA, 19 nt, Homo sapiens
  misc_RNA (1)...(19): siRNA sense strand
aguauugccacucaguaua

SEQ ID NO: 1704981 - RNA, 19 nt, Homo sapiens
  misc_RNA (1)...(19): siRNA sense strand
guguauucuuucucgauau

SEQ ID NO: 1704982 - RNA, 19 nt, Homo sapiens
  misc_RNA (1)...(19): siRNA sense strand
cuuucuaucugcucacuuc

SEQ ID NO: 1704983 - RNA, 19 nt, Homo sapiens
  misc_RNA (1)...(19): siRNA sense strand
caaccagcaaaccgagaaa

SEQ ID NO: 1704984 - RNA, 19 nt, Homo sapiens
  misc_RNA (1)...(19): siRNA sense strand
cagucaagguguuauuugc

SEQ ID NO: 1704985 - RNA, 19 nt, Homo sapiens
  misc_RNA (1)...(19): siRNA sense strand
uuacauuucggacaagaau

SEQ ID NO: 1704986 - RNA, 19 nt, Homo sapiens
  misc_RNA (1)...(19): siRNA sense strand
uguauucuuucucgauauc

SEQ ID NO: 1704987 - RNA, 19 nt, Homo sapiens
  misc_RNA (1)...(19): siRNA sense strand
ucccaaaggcgauaacauc

SEQ ID NO: 1704988 - RNA, 19 nt, Homo sapiens
  misc_RNA (1)...(19): siRNA sense strand
gcagaacaugacagaaugg

SEQ ID NO: 1704989 - RNA, 19 nt, Homo sapiens
  misc_RNA (1)...(19): siRNA sense strand
agaagaaggagaguaaagu

SEQ ID NO: 1704990 - RNA, 19 nt, Homo sapiens
  misc_RNA (1)...(19): siRNA sense strand
cgauaacaucuaugaaugg

SEQ ID NO: 1704991 - RNA, 19 nt, Homo sapiens
  misc_RNA (1)...(19): siRNA sense strand
gacagaauggccagacagu

SEQ ID NO: 1704992 - RNA, 19 nt, Homo sapiens
  misc_RNA (1)...(19): siRNA sense strand
uaaagucagcaugagcaaa

SEQ ID NO: 1704993 - RNA, 19 nt, Homo sapiens
  misc_RNA (1)...(19): siRNA sense strand
acagucaagguguuauuug

SEQ ID NO: 1704994 - RNA, 19 nt, Homo sapiens
  misc_RNA (1)...(19): siRNA sense strand
gaccaacagagcagaacau

SEQ ID NO: 1704995 - RNA, 19 nt, Homo sapiens
  misc_RNA (1)...(19): siRNA sense strand
gcacagaggagguccagua

SEQ ID NO: 1704996 - RNA, 19 nt, Homo sapiens
  misc_RNA (1)...(19): siRNA sense strand
gagaagaagcuaagaagaa

SEQ ID NO: 1704997 - RNA, 19 nt, Homo sapiens
  misc_RNA (1)...(19): siRNA sense strand
gagagcaccuuggaacauu

SEQ ID NO: 1704998 - RNA, 19 nt, Homo sapiens
  misc_RNA (1)...(19): siRNA sense strand
gccaaauccugaacaagaa

SEQ ID NO: 1704999 - RNA, 19 nt, Homo sapiens
  misc_RNA (1)...(19): siRNA sense strand
cagaggagguccaguaucu

SEQ ID NO: 1705000 - RNA, 19 nt, Homo sapiens
  misc_RNA (1)...(19): siRNA sense strand
agaagaagcuaagaagaau

SEQ ID NO: 1705001 - RNA, 19 nt, Homo sapiens
  misc_RNA (1)...(19): siRNA sense strand
uggauggacuugauucuga

SEQ ID NO: 1705002 - RNA, 19 nt, Homo sapiens
  misc_RNA (1)...(19): siRNA sense strand
gaagauggugccaacaaug

SEQ ID NO: 1705003 - RNA, 19 nt, Homo sapiens
  misc_RNA (1)...(19): siRNA sense strand
ggacuugauucugaugaga

SEQ ID NO: 1705004 - RNA, 19 nt, Homo sapiens
  misc_RNA (1)...(19): siRNA sense strand
cacaagaucuggccaggau

SEQ ID NO: 1705005 - RNA, 19 nt, Homo sapiens
  misc_RNA (1)...(19): siRNA sense strand
ggauucagaaguguauuua

SEQ ID NO: 1705006 - RNA, 19 nt, Homo sapiens
  misc_RNA (1)...(19): siRNA sense strand
ggagguggcugacuuugcu

SEQ ID NO: 1705007 - RNA, 19 nt, Homo sapiens
  misc_RNA (1)...(19): siRNA sense strand
ucucugggcugaaauuugu

SEQ ID NO: 1705008 - RNA, 19 nt, Homo sapiens
  misc_RNA (1)...(19): siRNA sense strand
gaagcuaagaagaaucaaa

SEQ ID NO: 1705009 - RNA, 19 nt, Homo sapiens
  misc_RNA (1)...(19): siRNA sense strand
gaggagguccaguaucuga

SEQ ID NO: 1705010 - RNA, 19 nt, Homo sapiens
  misc_RNA (1)...(19): siRNA sense strand
caggaucucugggcugaaa

SEQ ID NO: 1705011 - RNA, 19 nt, Homo sapiens
  misc_RNA (1)...(19): siRNA sense strand
cuaagaagaaucaaagguu

SEQ ID NO: 1705012 - RNA, 19 nt, Homo sapiens
  misc_RNA (1)...(19): siRNA sense strand
gcuccagccagauaaagua

SEQ ID NO: 1705013 - RNA, 19 nt, Homo sapiens
  misc_RNA (1)...(19): siRNA sense strand
ggagguccaguaucugauu

SEQ ID NO: 1705014 - RNA, 19 nt, Homo sapiens
  misc_RNA (1)...(19): siRNA sense strand
agagggagguggcugacuu

SEQ ID NO: 1705015 - RNA, 19 nt, Homo sapiens
  misc_RNA (1)...(19): siRNA sense strand
gcaggauucagaaguguau

SEQ ID NO: 1705016 - RNA, 19 nt, Homo sapiens
  misc_RNA (1)...(19): siRNA sense strand
ggauggacuugauucugau

SEQ ID NO: 1705017 - RNA, 19 nt, Homo sapiens
  misc_RNA (1)...(19): siRNA sense strand
guauuuagcaucucuagag

SEQ ID NO: 1705018 - RNA, 19 nt, Homo sapiens
  misc_RNA (1)...(19): siRNA sense strand
agaaguguauuuagcaucu

SEQ ID NO: 1705019 - RNA, 19 nt, Homo sapiens
  misc_RNA (1)...(19): siRNA sense strand
agaagauggugccaacaau

SEQ ID NO: 1705020 - RNA, 19 nt, Homo sapiens
  misc_RNA (1)...(19): siRNA sense strand
ugccaaauccugaacaaga

SEQ ID NO: 1705021 - RNA, 19 nt, Homo sapiens
  misc_RNA (1)...(19): siRNA sense strand
gagggagguggcugacuuu

SEQ ID NO: 1705022 - RNA, 19 nt, Homo sapiens
  misc_RNA (1)...(19): siRNA sense strand
cagcagcagcagaacagua

SEQ ID NO: 1705023 - RNA, 19 nt, Homo sapiens
  misc_RNA (1)...(19): siRNA sense strand
caagccagcagcagcagaa

SEQ ID NO: 1705024 - RNA, 19 nt, Homo sapiens
  misc_RNA (1)...(19): siRNA sense strand
gagguccaguaucugauuc

SEQ ID NO: 1705025 - RNA, 19 nt, Homo sapiens
  misc_RNA (1)...(19): siRNA sense strand
agagcaccuuggaacauuu

SEQ ID NO: 1705026 - RNA, 19 nt, Homo sapiens
  misc_RNA (1)...(19): siRNA sense strand
ugccaacaaugcauucuca

SEQ ID NO: 1705027 - RNA, 19 nt, Homo sapiens
  misc_RNA (1)...(19): siRNA sense strand
gaagaagcuaagaagaauc

SEQ ID NO: 1705028 - RNA, 19 nt, Homo sapiens
  misc_RNA (1)...(19): siRNA sense strand
ucagaaguguauuuagcau

SEQ ID NO: 1705029 - RNA, 19 nt, Homo sapiens
  misc_RNA (1)...(19): siRNA sense strand
ccaacaaugcauucucaga

SEQ ID NO: 1705030 - RNA, 19 nt, Homo sapiens
  misc_RNA (1)...(19): siRNA sense strand
cuagagaagaagcuaagaa

SEQ ID NO: 1705031 - RNA, 19 nt, Homo sapiens
  misc_RNA (1)...(19): siRNA sense strand
cagagucacagguugagaa

SEQ ID NO: 1705032 - RNA, 19 nt, Homo sapiens
  misc_RNA (1)...(19): siRNA sense strand
gaucucugggcugaaauuu

SEQ ID NO: 1705033 - RNA, 19 nt, Homo sapiens
  misc_RNA (1)...(19): siRNA sense strand
gcuaagaagaaucaaaggu

SEQ ID NO: 1705034 - RNA, 19 nt, Homo sapiens
  misc_RNA (1)...(19): siRNA sense strand
ggaucucugggcugaaauu

SEQ ID NO: 1705035 - RNA, 19 nt, Homo sapiens
  misc_RNA (1)...(19): siRNA sense strand
ucagacuccuuuguggauu

SEQ ID NO: 1705036 - RNA, 19 nt, Homo sapiens
  misc_RNA (1)...(19): siRNA sense strand
aagaagauggugccaacaa

SEQ ID NO: 1705037 - RNA, 19 nt, Homo sapiens
  misc_RNA (1)...(19): siRNA sense strand
aagaagcuaagaagaauca

SEQ ID NO: 1705038 - RNA, 19 nt, Homo sapiens
  misc_RNA (1)...(19): siRNA sense strand
cagacuccuuuguggauuc

SEQ ID NO: 1705039 - RNA, 19 nt, Homo sapiens
  misc_RNA (1)...(19): siRNA sense strand
uagagaagaagcuaagaag

SEQ ID NO: 1705040 - RNA, 19 nt, Homo sapiens
  misc_RNA (1)...(19): siRNA sense strand
gggcucccuugcaggauuc

SEQ ID NO: 1705041 - RNA, 19 nt, Homo sapiens
  misc_RNA (1)...(19): siRNA sense strand
agagaagaagcuaagaaga

SEQ ID NO: 1705042 - RNA, 19 nt, Homo sapiens
  misc_RNA (1)...(19): siRNA sense strand
caaauccugaacaagaaga

SEQ ID NO: 1705043 - RNA, 19 nt, Homo sapiens
  misc_RNA (1)...(19): siRNA sense strand
aagcuaagaagaaucaaag

SEQ ID NO: 1705044 - RNA, 19 nt, Homo sapiens
  misc_RNA (1)...(19): siRNA sense strand
gagcaccuuggaacauuuc

SEQ ID NO: 1705045 - RNA, 19 nt, Homo sapiens
  misc_RNA (1)...(19): siRNA sense strand
gaaguguauuuagcaucuc

SEQ ID NO: 1705046 - RNA, 19 nt, Homo sapiens
  misc_RNA (1)...(19): siRNA sense strand
agcagcagcagaacaguaa

SEQ ID NO: 1705047 - RNA, 19 nt, Homo sapiens
  misc_RNA (1)...(19): siRNA sense strand
guuccugucugccaaaucc

SEQ ID NO: 1705048 - RNA, 19 nt, Homo sapiens
  misc_RNA (1)...(19): siRNA sense strand
gacaauagcugcaaagaua

SEQ ID NO: 1705049 - RNA, 19 nt, Homo sapiens
  misc_RNA (1)...(19): siRNA sense strand
gcaagacggguuacuauuu

SEQ ID NO: 1705050 - RNA, 19 nt, Homo sapiens
  misc_RNA (1)...(19): siRNA sense strand
cuaggcaacuguauugaua

SEQ ID NO: 1705051 - RNA, 19 nt, Homo sapiens
  misc_RNA (1)...(19): siRNA sense strand
gugcaagaguggcuuuaua

SEQ ID NO: 1705052 - RNA, 19 nt, Homo sapiens
  misc_RNA (1)...(19): siRNA sense strand
gugaagaggugcugccauu

SEQ ID NO: 1705053 - RNA, 19 nt, Homo sapiens
  misc_RNA (1)...(19): siRNA sense strand
gugaagaugucaaugaaug

SEQ ID NO: 1705054 - RNA, 19 nt, Homo sapiens
  misc_RNA (1)...(19): siRNA sense strand
caagaggacccauaucuga

SEQ ID NO: 1705055 - RNA, 19 nt, Homo sapiens
  misc_RNA (1)...(19): siRNA sense strand
ggagaauccugcaucaaca

SEQ ID NO: 1705056 - RNA, 19 nt, Homo sapiens
  misc_RNA (1)...(19): siRNA sense strand
ggaacgcgcuguguugaug

SEQ ID NO: 1705057 - RNA, 19 nt, Homo sapiens
  misc_RNA (1)...(19): siRNA sense strand
ggacaucgcugcgugaacu

SEQ ID NO: 1705058 - RNA, 19 nt, Homo sapiens
  misc_RNA (1)...(19): siRNA sense strand
ggaacaagaggacccauau

SEQ ID NO: 1705059 - RNA, 19 nt, Homo sapiens
  misc_RNA (1)...(19): siRNA sense strand
gacccaagcuacagugcaa

SEQ ID NO: 1705060 - RNA, 19 nt, Homo sapiens
  misc_RNA (1)...(19): siRNA sense strand
gauggugucuccugugaag

SEQ ID NO: 1705061 - RNA, 19 nt, Homo sapiens
  misc_RNA (1)...(19): siRNA sense strand
caagacggguuacuauuuu

SEQ ID NO: 1705062 - RNA, 19 nt, Homo sapiens
  misc_RNA (1)...(19): siRNA sense strand
aaacggauaagaucauuga

SEQ ID NO: 1705063 - RNA, 19 nt, Homo sapiens
  misc_RNA (1)...(19): siRNA sense strand
gauggcaggucaugugaag

SEQ ID NO: 1705064 - RNA, 19 nt, Homo sapiens
  misc_RNA (1)...(19): siRNA sense strand
aagaguggcuuuauacaag

SEQ ID NO: 1705065 - RNA, 19 nt, Homo sapiens
  misc_RNA (1)...(19): siRNA sense strand
caagaguggcuuuauacaa

SEQ ID NO: 1705066 - RNA, 19 nt, Homo sapiens
  misc_RNA (1)...(19): siRNA sense strand
gcgaaugcaagacggguua

SEQ ID NO: 1705067 - RNA, 19 nt, Homo sapiens
  misc_RNA (1)...(19): siRNA sense strand
gcucuaggcaacuguauug

SEQ ID NO: 1705068 - RNA, 19 nt, Homo sapiens
  misc_RNA (1)...(19): siRNA sense strand
ggacaauagcugcaaagau

SEQ ID NO: 1705069 - RNA, 19 nt, Homo sapiens
  misc_RNA (1)...(19): siRNA sense strand
auacaugcaucaacacaga

SEQ ID NO: 1705070 - RNA, 19 nt, Homo sapiens
  misc_RNA (1)...(19): siRNA sense strand
ccaagaaacggauaagauc

SEQ ID NO: 1705071 - RNA, 19 nt, Homo sapiens
  misc_RNA (1)...(19): siRNA sense strand
gaagaacgugcccaacugu

SEQ ID NO: 1705072 - RNA, 19 nt, Homo sapiens
  misc_RNA (1)...(19): siRNA sense strand
caaagauauugacgagugu

SEQ ID NO: 1705073 - RNA, 19 nt, Homo sapiens
  misc_RNA (1)...(19): siRNA sense strand
gcucagcgauguggaugga

SEQ ID NO: 1705074 - RNA, 19 nt, Homo sapiens
  misc_RNA (1)...(19): siRNA sense strand
ggccagagcugcgaguaca

SEQ ID NO: 1705075 - RNA, 19 nt, Homo sapiens
  misc_RNA (1)...(19): siRNA sense strand
ggccguggcuaccaucuca

SEQ ID NO: 1705076 - RNA, 19 nt, Homo sapiens
  misc_RNA (1)...(19): siRNA sense strand
agaagaacgugcccaacug

SEQ ID NO: 1705077 - RNA, 19 nt, Homo sapiens
  misc_RNA (1)...(19): siRNA sense strand
caagaaacggauaagauca

SEQ ID NO: 1705078 - RNA, 19 nt, Homo sapiens
  misc_RNA (1)...(19): siRNA sense strand
gagggaacgcgcuguguug

SEQ ID NO: 1705079 - RNA, 19 nt, Homo sapiens
  misc_RNA (1)...(19): siRNA sense strand
gcuacggaauccaaagaau

SEQ ID NO: 1705080 - RNA, 19 nt, Homo sapiens
  misc_RNA (1)...(19): siRNA sense strand
gaacaagaggacccauauc

SEQ ID NO: 1705081 - RNA, 19 nt, Homo sapiens
  misc_RNA (1)...(19): siRNA sense strand
agaaacggauaagaucauu

SEQ ID NO: 1705082 - RNA, 19 nt, Homo sapiens
  misc_RNA (1)...(19): siRNA sense strand
ggagggaacgcgcuguguu

SEQ ID NO: 1705083 - RNA, 19 nt, Homo sapiens
  misc_RNA (1)...(19): siRNA sense strand
gaggacccauaucugaaug

SEQ ID NO: 1705084 - RNA, 19 nt, Homo sapiens
  misc_RNA (1)...(19): siRNA sense strand
ccaggagaccggagauuug

SEQ ID NO: 1705085 - RNA, 19 nt, Homo sapiens
  misc_RNA (1)...(19): siRNA sense strand
gcuaccagcucagcgaugu

SEQ ID NO: 1705086 - RNA, 19 nt, Homo sapiens
  misc_RNA (1)...(19): siRNA sense strand
ggaugugugucgaugucaa

SEQ ID NO: 1705087 - RNA, 19 nt, Homo sapiens
  misc_RNA (1)...(19): siRNA sense strand
gaccggagauuuggauguc

SEQ ID NO: 1705088 - RNA, 19 nt, Homo sapiens
  misc_RNA (1)...(19): siRNA sense strand
ugacuggcauccacaacug

SEQ ID NO: 1705089 - RNA, 19 nt, Homo sapiens
  misc_RNA (1)...(19): siRNA sense strand
gauauugacgagugugaga

SEQ ID NO: 1705090 - RNA, 19 nt, Homo sapiens
  misc_RNA (1)...(19): siRNA sense strand
gcaucagccuggccaacga

SEQ ID NO: 1705091 - RNA, 19 nt, Homo sapiens
  misc_RNA (1)...(19): siRNA sense strand
ggacugcucgcugccauau

SEQ ID NO: 1705092 - RNA, 19 nt, Homo sapiens
  misc_RNA (1)...(19): siRNA sense strand
gcaagaguggcuuuauaca

SEQ ID NO: 1705093 - RNA, 19 nt, Homo sapiens
  misc_RNA (1)...(19): siRNA sense strand
ucaacacagugggcucuuu

SEQ ID NO: 1705094 - RNA, 19 nt, Homo sapiens
  misc_RNA (1)...(19): siRNA sense strand
ugugagagugguauucaua

SEQ ID NO: 1705095 - RNA, 19 nt, Homo sapiens
  misc_RNA (1)...(19): siRNA sense strand
agaacacgcugggcuccua

SEQ ID NO: 1705096 - RNA, 19 nt, Homo sapiens
  misc_RNA (1)...(19): siRNA sense strand
gaagaggugcugccauugc

SEQ ID NO: 1705097 - RNA, 19 nt, Homo sapiens
  misc_RNA (1)...(19): siRNA sense strand
agaauacucugggauccuu

SEQ ID NO: 1705098 - RNA, 19 nt, Homo sapiens
  misc_RNA (1)...(19): siRNA sense strand
aacgagaccugcuucaaca

SEQ ID NO: 1705099 - RNA, 19 nt, Homo sapiens
  misc_RNA (1)...(19): siRNA sense strand
caacgagaccugcuucaac

SEQ ID NO: 1705100 - RNA, 19 nt, Homo sapiens
  misc_RNA (1)...(19): siRNA sense strand
gccaggagaccggagauuu

SEQ ID NO: 1705101 - RNA, 19 nt, Homo sapiens
  misc_RNA (1)...(19): siRNA sense strand
gaaacggauaagaucauug

SEQ ID NO: 1705102 - RNA, 19 nt, Homo sapiens
  misc_RNA (1)...(19): siRNA sense strand
aaugaguguuugaguauca

SEQ ID NO: 1705103 - RNA, 19 nt, Homo sapiens
  misc_RNA (1)...(19): siRNA sense strand
gugagagugguauucauaa

SEQ ID NO: 1705104 - RNA, 19 nt, Homo sapiens
  misc_RNA (1)...(19): siRNA sense strand
caacacagugggcucuuuc

SEQ ID NO: 1705105 - RNA, 19 nt, Homo sapiens
  misc_RNA (1)...(19): siRNA sense strand
cugugaagaugucaaugaa

SEQ ID NO: 1705106 - RNA, 19 nt, Homo sapiens
  misc_RNA (1)...(19): siRNA sense strand
ugauaucaaugaguguuug

SEQ ID NO: 1705107 - RNA, 19 nt, Homo sapiens
  misc_RNA (1)...(19): siRNA sense strand
agagugguauucauaacug

SEQ ID NO: 1705108 - RNA, 19 nt, Homo sapiens
  misc_RNA (1)...(19): siRNA sense strand
agaguggcuuuauacaaga

SEQ ID NO: 1705109 - RNA, 19 nt, Homo sapiens
  misc_RNA (1)...(19): siRNA sense strand
cugauggugucuccuguga

SEQ ID NO: 1705110 - RNA, 19 nt, Homo sapiens
  misc_RNA (1)...(19): siRNA sense strand
auaagaucauugagguuga

SEQ ID NO: 1705111 - RNA, 19 nt, Homo sapiens
  misc_RNA (1)...(19): siRNA sense strand
ucgagugcccugagaacua

SEQ ID NO: 1705112 - RNA, 19 nt, Homo sapiens
  misc_RNA (1)...(19): siRNA sense strand
cuacggaauccaaagaaug

SEQ ID NO: 1705113 - RNA, 19 nt, Homo sapiens
  misc_RNA (1)...(19): siRNA sense strand
gacaccggauggccacuca

SEQ ID NO: 1705114 - RNA, 19 nt, Homo sapiens
  misc_RNA (1)...(19): siRNA sense strand
ccugugaagaugucaauga

SEQ ID NO: 1705115 - RNA, 19 nt, Homo sapiens
  misc_RNA (1)...(19): siRNA sense strand
cgagugcccugagaacuac

SEQ ID NO: 1705116 - RNA, 19 nt, Homo sapiens
  misc_RNA (1)...(19): siRNA sense strand
ggauaagaucauugagguu

SEQ ID NO: 1705117 - RNA, 19 nt, Homo sapiens
  misc_RNA (1)...(19): siRNA sense strand
caggaugugugucgauguc

SEQ ID NO: 1705118 - RNA, 19 nt, Homo sapiens
  misc_RNA (1)...(19): siRNA sense strand
ggagaccggagauuuggau

SEQ ID NO: 1705119 - RNA, 19 nt, Homo sapiens
  misc_RNA (1)...(19): siRNA sense strand
agaggacaauagcugcaaa

SEQ ID NO: 1705120 - RNA, 19 nt, Homo sapiens
  misc_RNA (1)...(19): siRNA sense strand
gaagaugucaaugaaugca

SEQ ID NO: 1705121 - RNA, 19 nt, Homo sapiens
  misc_RNA (1)...(19): siRNA sense strand
cuacggcuccuaccagugu

SEQ ID NO: 1705122 - RNA, 19 nt, Homo sapiens
  misc_RNA (1)...(19): siRNA sense strand
aagcagcagugccgagaca

SEQ ID NO: 1705123 - RNA, 19 nt, Homo sapiens
  misc_RNA (1)...(19): siRNA sense strand
gaacgcgcuguguugaugu

SEQ ID NO: 1705124 - RNA, 19 nt, Homo sapiens
  misc_RNA (1)...(19): siRNA sense strand
gagcucacagaggacaaua

SEQ ID NO: 1705125 - RNA, 19 nt, Homo sapiens
  misc_RNA (1)...(19): siRNA sense strand
gagagugguauucauaacu

SEQ ID NO: 1705126 - RNA, 19 nt, Homo sapiens
  misc_RNA (1)...(19): siRNA sense strand
cgaguacagccucaugguu

SEQ ID NO: 1705127 - RNA, 19 nt, Homo sapiens
  misc_RNA (1)...(19): siRNA sense strand
ggagugugccaacgucuac

SEQ ID NO: 1705128 - RNA, 19 nt, Homo sapiens
  misc_RNA (1)...(19): siRNA sense strand
cagaagaacgugcccaacu

SEQ ID NO: 1705129 - RNA, 19 nt, Homo sapiens
  misc_RNA (1)...(19): siRNA sense strand
gaguggcuuuauacaagau

SEQ ID NO: 1705130 - RNA, 19 nt, Homo sapiens
  misc_RNA (1)...(19): siRNA sense strand
ccacaacugcuccaucaac

SEQ ID NO: 1705131 - RNA, 19 nt, Homo sapiens
  misc_RNA (1)...(19): siRNA sense strand
cauaugcuacggaauccaa

SEQ ID NO: 1705132 - RNA, 19 nt, Homo sapiens
  misc_RNA (1)...(19): siRNA sense strand
caaugaguguuugaguauc

SEQ ID NO: 1705133 - RNA, 19 nt, Homo sapiens
  misc_RNA (1)...(19): siRNA sense strand
ugagagugguauucauaac

SEQ ID NO: 1705134 - RNA, 19 nt, Homo sapiens
  misc_RNA (1)...(19): siRNA sense strand
ggacccauaucugaaugac

SEQ ID NO: 1705135 - RNA, 19 nt, Homo sapiens
  misc_RNA (1)...(19): siRNA sense strand
ggccacaagugcgagaaca

SEQ ID NO: 1705136 - RNA, 19 nt, Homo sapiens
  misc_RNA (1)...(19): siRNA sense strand
uaagaucauugagguugag

SEQ ID NO: 1705137 - RNA, 19 nt, Homo sapiens
  misc_RNA (1)...(19): siRNA sense strand
aagaggacccauaucugaa

SEQ ID NO: 1705138 - RNA, 19 nt, Homo sapiens
  misc_RNA (1)...(19): siRNA sense strand
auccacaacugcuccauca

SEQ ID NO: 1705139 - RNA, 19 nt, Homo sapiens
  misc_RNA (1)...(19): siRNA sense strand
uccaagaaacggauaagau

SEQ ID NO: 1705140 - RNA, 19 nt, Homo sapiens
  misc_RNA (1)...(19): siRNA sense strand
aggcaacuguauugauauc

SEQ ID NO: 1705141 - RNA, 19 nt, Homo sapiens
  misc_RNA (1)...(19): siRNA sense strand
guggauggcaggucaugug

SEQ ID NO: 1705142 - RNA, 19 nt, Homo sapiens
  misc_RNA (1)...(19): siRNA sense strand
gaugcucuaggcaacugua

SEQ ID NO: 1705143 - RNA, 19 nt, Homo sapiens
  misc_RNA (1)...(19): siRNA sense strand
gacaauagcugcaaagaua

SEQ ID NO: 1705144 - RNA, 19 nt, Homo sapiens
  misc_RNA (1)...(19): siRNA sense strand
gcaagacggguuacuauuu

SEQ ID NO: 1705145 - RNA, 19 nt, Homo sapiens
  misc_RNA (1)...(19): siRNA sense strand
cuaggcaacuguauugaua

SEQ ID NO: 1705146 - RNA, 19 nt, Homo sapiens
  misc_RNA (1)...(19): siRNA sense strand
gugcaagaguggcuuuaua

SEQ ID NO: 1705147 - RNA, 19 nt, Homo sapiens
  misc_RNA (1)...(19): siRNA sense strand
gugaagaggugcugccauu

SEQ ID NO: 1705148 - RNA, 19 nt, Homo sapiens
  misc_RNA (1)...(19): siRNA sense strand
gugaagaugucaaugaaug

SEQ ID NO: 1705149 - RNA, 19 nt, Homo sapiens
  misc_RNA (1)...(19): siRNA sense strand
caagaggacccauaucuga

SEQ ID NO: 1705150 - RNA, 19 nt, Homo sapiens
  misc_RNA (1)...(19): siRNA sense strand
ggagaauccugcaucaaca

SEQ ID NO: 1705151 - RNA, 19 nt, Homo sapiens
  misc_RNA (1)...(19): siRNA sense strand
ggaacgcgcuguguugaug

SEQ ID NO: 1705152 - RNA, 19 nt, Homo sapiens
  misc_RNA (1)...(19): siRNA sense strand
ggacaucgcugcgugaacu

SEQ ID NO: 1705153 - RNA, 19 nt, Homo sapiens
  misc_RNA (1)...(19): siRNA sense strand
ggaacaagaggacccauau

SEQ ID NO: 1705154 - RNA, 19 nt, Homo sapiens
  misc_RNA (1)...(19): siRNA sense strand
gacccaagcuacagugcaa

SEQ ID NO: 1705155 - RNA, 19 nt, Homo sapiens
  misc_RNA (1)...(19): siRNA sense strand
gauggugucuccugugaag

SEQ ID NO: 1705156 - RNA, 19 nt, Homo sapiens
  misc_RNA (1)...(19): siRNA sense strand
caagacggguuacuauuuu

SEQ ID NO: 1705157 - RNA, 19 nt, Homo sapiens
  misc_RNA (1)...(19): siRNA sense strand
aaacggauaagaucauuga

SEQ ID NO: 1705158 - RNA, 19 nt, Homo sapiens
  misc_RNA (1)...(19): siRNA sense strand
gauggcaggucaugugaag

SEQ ID NO: 1705159 - RNA, 19 nt, Homo sapiens
  misc_RNA (1)...(19): siRNA sense strand
aagaguggcuuuauacaag

SEQ ID NO: 1705160 - RNA, 19 nt, Homo sapiens
  misc_RNA (1)...(19): siRNA sense strand
caagaguggcuuuauacaa

SEQ ID NO: 1705161 - RNA, 19 nt, Homo sapiens
  misc_RNA (1)...(19): siRNA sense strand
gcgaaugcaagacggguua

SEQ ID NO: 1705162 - RNA, 19 nt, Homo sapiens
  misc_RNA (1)...(19): siRNA sense strand
gcucuaggcaacuguauug

SEQ ID NO: 1705163 - RNA, 19 nt, Homo sapiens
  misc_RNA (1)...(19): siRNA sense strand
ggacaauagcugcaaagau

SEQ ID NO: 1705164 - RNA, 19 nt, Homo sapiens
  misc_RNA (1)...(19): siRNA sense strand
auacaugcaucaacacaga

SEQ ID NO: 1705165 - RNA, 19 nt, Homo sapiens
  misc_RNA (1)...(19): siRNA sense strand
ccaagaaacggauaagauc

SEQ ID NO: 1705166 - RNA, 19 nt, Homo sapiens
  misc_RNA (1)...(19): siRNA sense strand
gaagaacgugcccaacugu

SEQ ID NO: 1705167 - RNA, 19 nt, Homo sapiens
  misc_RNA (1)...(19): siRNA sense strand
caaagauauugacgagugu

SEQ ID NO: 1705168 - RNA, 19 nt, Homo sapiens
  misc_RNA (1)...(19): siRNA sense strand
gcucagcgauguggaugga

SEQ ID NO: 1705169 - RNA, 19 nt, Homo sapiens
  misc_RNA (1)...(19): siRNA sense strand
ggccagagcugcgaguaca

SEQ ID NO: 1705170 - RNA, 19 nt, Homo sapiens
  misc_RNA (1)...(19): siRNA sense strand
ggccguggcuaccaucuca

SEQ ID NO: 1705171 - RNA, 19 nt, Homo sapiens
  misc_RNA (1)...(19): siRNA sense strand
agaagaacgugcccaacug

SEQ ID NO: 1705172 - RNA, 19 nt, Homo sapiens
  misc_RNA (1)...(19): siRNA sense strand
caagaaacggauaagauca

SEQ ID NO: 1705173 - RNA, 19 nt, Homo sapiens
  misc_RNA (1)...(19): siRNA sense strand
gagggaacgcgcuguguug

SEQ ID NO: 1705174 - RNA, 19 nt, Homo sapiens
  misc_RNA (1)...(19): siRNA sense strand
gcuacggaauccaaagaau

SEQ ID NO: 1705175 - RNA, 19 nt, Homo sapiens
  misc_RNA (1)...(19): siRNA sense strand
gaacaagaggacccauauc

SEQ ID NO: 1705176 - RNA, 19 nt, Homo sapiens
  misc_RNA (1)...(19): siRNA sense strand
agaaacggauaagaucauu

SEQ ID NO: 1705177 - RNA, 19 nt, Homo sapiens
  misc_RNA (1)...(19): siRNA sense strand
ggagggaacgcgcuguguu

SEQ ID NO: 1705178 - RNA, 19 nt, Homo sapiens
  misc_RNA (1)...(19): siRNA sense strand
gaggacccauaucugaaug

SEQ ID NO: 1705179 - RNA, 19 nt, Homo sapiens
  misc_RNA (1)...(19): siRNA sense strand
ccaggagaccggagauuug

SEQ ID NO: 1705180 - RNA, 19 nt, Homo sapiens
  misc_RNA (1)...(19): siRNA sense strand
gcuaccagcucagcgaugu

SEQ ID NO: 1705181 - RNA, 19 nt, Homo sapiens
  misc_RNA (1)...(19): siRNA sense strand
ggaugugugucgaugucaa

SEQ ID NO: 1705182 - RNA, 19 nt, Homo sapiens
  misc_RNA (1)...(19): siRNA sense strand
gaccggagauuuggauguc

SEQ ID NO: 1705183 - RNA, 19 nt, Homo sapiens
  misc_RNA (1)...(19): siRNA sense strand
ugacuggcauccacaacug

SEQ ID NO: 1705184 - RNA, 19 nt, Homo sapiens
  misc_RNA (1)...(19): siRNA sense strand
gauauugacgagugugaga

SEQ ID NO: 1705185 - RNA, 19 nt, Homo sapiens
  misc_RNA (1)...(19): siRNA sense strand
gcaucagccuggccaacga

SEQ ID NO: 1705186 - RNA, 19 nt, Homo sapiens
  misc_RNA (1)...(19): siRNA sense strand
ggacugcucgcugccauau

SEQ ID NO: 1705187 - RNA, 19 nt, Homo sapiens
  misc_RNA (1)...(19): siRNA sense strand
gcaagaguggcuuuauaca

SEQ ID NO: 1705188 - RNA, 19 nt, Homo sapiens
  misc_RNA (1)...(19): siRNA sense strand
ucaacacagugggcucuuu

SEQ ID NO: 1705189 - RNA, 19 nt, Homo sapiens
  misc_RNA (1)...(19): siRNA sense strand
ugugagagugguauucaua

SEQ ID NO: 1705190 - RNA, 19 nt, Homo sapiens
  misc_RNA (1)...(19): siRNA sense strand
agaacacgcugggcuccua

SEQ ID NO: 1705191 - RNA, 19 nt, Homo sapiens
  misc_RNA (1)...(19): siRNA sense strand
gaagaggugcugccauugc

SEQ ID NO: 1705192 - RNA, 19 nt, Homo sapiens
  misc_RNA (1)...(19): siRNA sense strand
agaauacucugggauccuu

SEQ ID NO: 1705193 - RNA, 19 nt, Homo sapiens
  misc_RNA (1)...(19): siRNA sense strand
aacgagaccugcuucaaca

SEQ ID NO: 1705194 - RNA, 19 nt, Homo sapiens
  misc_RNA (1)...(19): siRNA sense strand
caacgagaccugcuucaac

SEQ ID NO: 1705195 - RNA, 19 nt, Homo sapiens
  misc_RNA (1)...(19): siRNA sense strand
gccaggagaccggagauuu

SEQ ID NO: 1705196 - RNA, 19 nt, Homo sapiens
  misc_RNA (1)...(19): siRNA sense strand
gaaacggauaagaucauug

SEQ ID NO: 1705197 - RNA, 19 nt, Homo sapiens
  misc_RNA (1)...(19): siRNA sense strand
aaugaguguuugaguauca

SEQ ID NO: 1705198 - RNA, 19 nt, Homo sapiens
  misc_RNA (1)...(19): siRNA sense strand
gugagagugguauucauaa

SEQ ID NO: 1705199 - RNA, 19 nt, Homo sapiens
  misc_RNA (1)...(19): siRNA sense strand
caacacagugggcucuuuc

SEQ ID NO: 1705200 - RNA, 19 nt, Homo sapiens
  misc_RNA (1)...(19): siRNA sense strand
cugugaagaugucaaugaa

SEQ ID NO: 1705201 - RNA, 19 nt, Homo sapiens
  misc_RNA (1)...(19): siRNA sense strand
ugauaucaaugaguguuug

SEQ ID NO: 1705202 - RNA, 19 nt, Homo sapiens
  misc_RNA (1)...(19): siRNA sense strand
agagugguauucauaacug

SEQ ID NO: 1705203 - RNA, 19 nt, Homo sapiens
  misc_RNA (1)...(19): siRNA sense strand
agaguggcuuuauacaaga

SEQ ID NO: 1705204 - RNA, 19 nt, Homo sapiens
  misc_RNA (1)...(19): siRNA sense strand
cugauggugucuccuguga

SEQ ID NO: 1705205 - RNA, 19 nt, Homo sapiens
  misc_RNA (1)...(19): siRNA sense strand
auaagaucauugagguuga

SEQ ID NO: 1705206 - RNA, 19 nt, Homo sapiens
  misc_RNA (1)...(19): siRNA sense strand
ucgagugcccugagaacua

SEQ ID NO: 1705207 - RNA, 19 nt, Homo sapiens
  misc_RNA (1)...(19): siRNA sense strand
cuacggaauccaaagaaug

SEQ ID NO: 1705208 - RNA, 19 nt, Homo sapiens
  misc_RNA (1)...(19): siRNA sense strand
gacaccggauggccacuca

SEQ ID NO: 1705209 - RNA, 19 nt, Homo sapiens
  misc_RNA (1)...(19): siRNA sense strand
ccugugaagaugucaauga

SEQ ID NO: 1705210 - RNA, 19 nt, Homo sapiens
  misc_RNA (1)...(19): siRNA sense strand
cgagugcccugagaacuac

SEQ ID NO: 1705211 - RNA, 19 nt, Homo sapiens
  misc_RNA (1)...(19): siRNA sense strand
ggauaagaucauugagguu

SEQ ID NO: 1705212 - RNA, 19 nt, Homo sapiens
  misc_RNA (1)...(19): siRNA sense strand
caggaugugugucgauguc

SEQ ID NO: 1705213 - RNA, 19 nt, Homo sapiens
  misc_RNA (1)...(19): siRNA sense strand
ggagaccggagauuuggau

SEQ ID NO: 1705214 - RNA, 19 nt, Homo sapiens
  misc_RNA (1)...(19): siRNA sense strand
agaggacaauagcugcaaa

SEQ ID NO: 1705215 - RNA, 19 nt, Homo sapiens
  misc_RNA (1)...(19): siRNA sense strand
gaagaugucaaugaaugca

SEQ ID NO: 1705216 - RNA, 19 nt, Homo sapiens
  misc_RNA (1)...(19): siRNA sense strand
cuacggcuccuaccagugu

SEQ ID NO: 1705217 - RNA, 19 nt, Homo sapiens
  misc_RNA (1)...(19): siRNA sense strand
aagcagcagugccgagaca

SEQ ID NO: 1705218 - RNA, 19 nt, Homo sapiens
  misc_RNA (1)...(19): siRNA sense strand
gaacgcgcuguguugaugu

SEQ ID NO: 1705219 - RNA, 19 nt, Homo sapiens
  misc_RNA (1)...(19): siRNA sense strand
gagcucacagaggacaaua

SEQ ID NO: 1705220 - RNA, 19 nt, Homo sapiens
  misc_RNA (1)...(19): siRNA sense strand
gagagugguauucauaacu

SEQ ID NO: 1705221 - RNA, 19 nt, Homo sapiens
  misc_RNA (1)...(19): siRNA sense strand
cgaguacagccucaugguu

SEQ ID NO: 1705222 - RNA, 19 nt, Homo sapiens
  misc_RNA (1)...(19): siRNA sense strand
ggagugugccaacgucuac

SEQ ID NO: 1705223 - RNA, 19 nt, Homo sapiens
  misc_RNA (1)...(19): siRNA sense strand
cagaagaacgugcccaacu

SEQ ID NO: 1705224 - RNA, 19 nt, Homo sapiens
  misc_RNA (1)...(19): siRNA sense strand
gaguggcuuuauacaagau

SEQ ID NO: 1705225 - RNA, 19 nt, Homo sapiens
  misc_RNA (1)...(19): siRNA sense strand
ccacaacugcuccaucaac

SEQ ID NO: 1705226 - RNA, 19 nt, Homo sapiens
  misc_RNA (1)...(19): siRNA sense strand
cauaugcuacggaauccaa

SEQ ID NO: 1705227 - RNA, 19 nt, Homo sapiens
  misc_RNA (1)...(19): siRNA sense strand
caaugaguguuugaguauc

SEQ ID NO: 1705228 - RNA, 19 nt, Homo sapiens
  misc_RNA (1)...(19): siRNA sense strand
ugagagugguauucauaac

SEQ ID NO: 1705229 - RNA, 19 nt, Homo sapiens
  misc_RNA (1)...(19): siRNA sense strand
ggacccauaucugaaugac

SEQ ID NO: 1705230 - RNA, 19 nt, Homo sapiens
  misc_RNA (1)...(19): siRNA sense strand
ggccacaagugcgagaaca

SEQ ID NO: 1705231 - RNA, 19 nt, Homo sapiens
  misc_RNA (1)...(19): siRNA sense strand
uaagaucauugagguugag

SEQ ID NO: 1705232 - RNA, 19 nt, Homo sapiens
  misc_RNA (1)...(19): siRNA sense strand
aagaggacccauaucugaa

SEQ ID NO: 1705233 - RNA, 19 nt, Homo sapiens
  misc_RNA (1)...(19): siRNA sense strand
auccacaacugcuccauca

SEQ ID NO: 1705234 - RNA, 19 nt, Homo sapiens
  misc_RNA (1)...(19): siRNA sense strand
uccaagaaacggauaagau

SEQ ID NO: 1705235 - RNA, 19 nt, Homo sapiens
  misc_RNA (1)...(19): siRNA sense strand
aggcaacuguauugauauc

SEQ ID NO: 1705236 - RNA, 19 nt, Homo sapiens
  misc_RNA (1)...(19): siRNA sense strand
guggauggcaggucaugug

SEQ ID NO: 1705237 - RNA, 19 nt, Homo sapiens
  misc_RNA (1)...(19): siRNA sense strand
gaugcucuaggcaacugua

SEQ ID NO: 1705238 - RNA, 19 nt, Homo sapiens
  misc_RNA (1)...(19): siRNA sense strand
gacaauagcugcaaagaua

SEQ ID NO: 1705239 - RNA, 19 nt, Homo sapiens
  misc_RNA (1)...(19): siRNA sense strand
gcaagacggguuacuauuu

SEQ ID NO: 1705240 - RNA, 19 nt, Homo sapiens
  misc_RNA (1)...(19): siRNA sense strand
cuaggcaacuguauugaua

SEQ ID NO: 1705241 - RNA, 19 nt, Homo sapiens
  misc_RNA (1)...(19): siRNA sense strand
gugcaagaguggcuuuaua

SEQ ID NO: 1705242 - RNA, 19 nt, Homo sapiens
  misc_RNA (1)...(19): siRNA sense strand
gugaagaggugcugccauu

SEQ ID NO: 1705243 - RNA, 19 nt, Homo sapiens
  misc_RNA (1)...(19): siRNA sense strand
gugaagaugucaaugaaug

SEQ ID NO: 1705244 - RNA, 19 nt, Homo sapiens
  misc_RNA (1)...(19): siRNA sense strand
caagaggacccauaucuga

SEQ ID NO: 1705245 - RNA, 19 nt, Homo sapiens
  misc_RNA (1)...(19): siRNA sense strand
ggagaauccugcaucaaca

SEQ ID NO: 1705246 - RNA, 19 nt, Homo sapiens
  misc_RNA (1)...(19): siRNA sense strand
ggaacgcgcuguguugaug

SEQ ID NO: 1705247 - RNA, 19 nt, Homo sapiens
  misc_RNA (1)...(19): siRNA sense strand
ggacaucgcugcgugaacu

SEQ ID NO: 1705248 - RNA, 19 nt, Homo sapiens
  misc_RNA (1)...(19): siRNA sense strand
ggaacaagaggacccauau

SEQ ID NO: 1705249 - RNA, 19 nt, Homo sapiens
  misc_RNA (1)...(19): siRNA sense strand
gacccaagcuacagugcaa

SEQ ID NO: 1705250 - RNA, 19 nt, Homo sapiens
  misc_RNA (1)...(19): siRNA sense strand
gauggugucuccugugaag

SEQ ID NO: 1705251 - RNA, 19 nt, Homo sapiens
  misc_RNA (1)...(19): siRNA sense strand
caagacggguuacuauuuu

SEQ ID NO: 1705252 - RNA, 19 nt, Homo sapiens
  misc_RNA (1)...(19): siRNA sense strand
aaacggauaagaucauuga

SEQ ID NO: 1705253 - RNA, 19 nt, Homo sapiens
  misc_RNA (1)...(19): siRNA sense strand
gauggcaggucaugugaag

SEQ ID NO: 1705254 - RNA, 19 nt, Homo sapiens
  misc_RNA (1)...(19): siRNA sense strand
aagaguggcuuuauacaag

SEQ ID NO: 1705255 - RNA, 19 nt, Homo sapiens
  misc_RNA (1)...(19): siRNA sense strand
caagaguggcuuuauacaa

SEQ ID NO: 1705256 - RNA, 19 nt, Homo sapiens
  misc_RNA (1)...(19): siRNA sense strand
gcgaaugcaagacggguua

SEQ ID NO: 1705257 - RNA, 19 nt, Homo sapiens
  misc_RNA (1)...(19): siRNA sense strand
gcucuaggcaacuguauug

SEQ ID NO: 1705258 - RNA, 19 nt, Homo sapiens
  misc_RNA (1)...(19): siRNA sense strand
ggacaauagcugcaaagau

SEQ ID NO: 1705259 - RNA, 19 nt, Homo sapiens
  misc_RNA (1)...(19): siRNA sense strand
auacaugcaucaacacaga

SEQ ID NO: 1705260 - RNA, 19 nt, Homo sapiens
  misc_RNA (1)...(19): siRNA sense strand
ccaagaaacggauaagauc

SEQ ID NO: 1705261 - RNA, 19 nt, Homo sapiens
  misc_RNA (1)...(19): siRNA sense strand
gaagaacgugcccaacugu

SEQ ID NO: 1705262 - RNA, 19 nt, Homo sapiens
  misc_RNA (1)...(19): siRNA sense strand
caaagauauugacgagugu

SEQ ID NO: 1705263 - RNA, 19 nt, Homo sapiens
  misc_RNA (1)...(19): siRNA sense strand
gcucagcgauguggaugga

SEQ ID NO: 1705264 - RNA, 19 nt, Homo sapiens
  misc_RNA (1)...(19): siRNA sense strand
ggccagagcugcgaguaca

SEQ ID NO: 1705265 - RNA, 19 nt, Homo sapiens
  misc_RNA (1)...(19): siRNA sense strand
ggccguggcuaccaucuca

SEQ ID NO: 1705266 - RNA, 19 nt, Homo sapiens
  misc_RNA (1)...(19): siRNA sense strand
agaagaacgugcccaacug

SEQ ID NO: 1705267 - RNA, 19 nt, Homo sapiens
  misc_RNA (1)...(19): siRNA sense strand
caagaaacggauaagauca

SEQ ID NO: 1705268 - RNA, 19 nt, Homo sapiens
  misc_RNA (1)...(19): siRNA sense strand
gagggaacgcgcuguguug

SEQ ID NO: 1705269 - RNA, 19 nt, Homo sapiens
  misc_RNA (1)...(19): siRNA sense strand
gcuacggaauccaaagaau

SEQ ID NO: 1705270 - RNA, 19 nt, Homo sapiens
  misc_RNA (1)...(19): siRNA sense strand
gaacaagaggacccauauc

SEQ ID NO: 1705271 - RNA, 19 nt, Homo sapiens
  misc_RNA (1)...(19): siRNA sense strand
agaaacggauaagaucauu

SEQ ID NO: 1705272 - RNA, 19 nt, Homo sapiens
  misc_RNA (1)...(19): siRNA sense strand
ggagggaacgcgcuguguu

SEQ ID NO: 1705273 - RNA, 19 nt, Homo sapiens
  misc_RNA (1)...(19): siRNA sense strand
gaggacccauaucugaaug

SEQ ID NO: 1705274 - RNA, 19 nt, Homo sapiens
  misc_RNA (1)...(19): siRNA sense strand
ccaggagaccggagauuug

SEQ ID NO: 1705275 - RNA, 19 nt, Homo sapiens
  misc_RNA (1)...(19): siRNA sense strand
gcuaccagcucagcgaugu

SEQ ID NO: 1705276 - RNA, 19 nt, Homo sapiens
  misc_RNA (1)...(19): siRNA sense strand
ggaugugugucgaugucaa

SEQ ID NO: 1705277 - RNA, 19 nt, Homo sapiens
  misc_RNA (1)...(19): siRNA sense strand
gaccggagauuuggauguc

SEQ ID NO: 1705278 - RNA, 19 nt, Homo sapiens
  misc_RNA (1)...(19): siRNA sense strand
ugacuggcauccacaacug

SEQ ID NO: 1705279 - RNA, 19 nt, Homo sapiens
  misc_RNA (1)...(19): siRNA sense strand
gauauugacgagugugaga

SEQ ID NO: 1705280 - RNA, 19 nt, Homo sapiens
  misc_RNA (1)...(19): siRNA sense strand
gcaucagccuggccaacga

SEQ ID NO: 1705281 - RNA, 19 nt, Homo sapiens
  misc_RNA (1)...(19): siRNA sense strand
ggacugcucgcugccauau

SEQ ID NO: 1705282 - RNA, 19 nt, Homo sapiens
  misc_RNA (1)...(19): siRNA sense strand
gcaagaguggcuuuauaca

SEQ ID NO: 1705283 - RNA, 19 nt, Homo sapiens
  misc_RNA (1)...(19): siRNA sense strand
ucaacacagugggcucuuu

SEQ ID NO: 1705284 - RNA, 19 nt, Homo sapiens
  misc_RNA (1)...(19): siRNA sense strand
ugugagagugguauucaua

SEQ ID NO: 1705285 - RNA, 19 nt, Homo sapiens
  misc_RNA (1)...(19): siRNA sense strand
agaacacgcugggcuccua

SEQ ID NO: 1705286 - RNA, 19 nt, Homo sapiens
  misc_RNA (1)...(19): siRNA sense strand
gaagaggugcugccauugc

SEQ ID NO: 1705287 - RNA, 19 nt, Homo sapiens
  misc_RNA (1)...(19): siRNA sense strand
agaauacucugggauccuu

SEQ ID NO: 1705288 - RNA, 19 nt, Homo sapiens
  misc_RNA (1)...(19): siRNA sense strand
aacgagaccugcuucaaca

SEQ ID NO: 1705289 - RNA, 19 nt, Homo sapiens
  misc_RNA (1)...(19): siRNA sense strand
caacgagaccugcuucaac

SEQ ID NO: 1705290 - RNA, 19 nt, Homo sapiens
  misc_RNA (1)...(19): siRNA sense strand
gccaggagaccggagauuu

SEQ ID NO: 1705291 - RNA, 19 nt, Homo sapiens
  misc_RNA (1)...(19): siRNA sense strand
gaaacggauaagaucauug

SEQ ID NO: 1705292 - RNA, 19 nt, Homo sapiens
  misc_RNA (1)...(19): siRNA sense strand
aaugaguguuugaguauca

SEQ ID NO: 1705293 - RNA, 19 nt, Homo sapiens
  misc_RNA (1)...(19): siRNA sense strand
gugagagugguauucauaa

SEQ ID NO: 1705294 - RNA, 19 nt, Homo sapiens
  misc_RNA (1)...(19): siRNA sense strand
caacacagugggcucuuuc

SEQ ID NO: 1705295 - RNA, 19 nt, Homo sapiens
  misc_RNA (1)...(19): siRNA sense strand
cugugaagaugucaaugaa

SEQ ID NO: 1705296 - RNA, 19 nt, Homo sapiens
  misc_RNA (1)...(19): siRNA sense strand
ugauaucaaugaguguuug

SEQ ID NO: 1705297 - RNA, 19 nt, Homo sapiens
  misc_RNA (1)...(19): siRNA sense strand
agagugguauucauaacug

SEQ ID NO: 1705298 - RNA, 19 nt, Homo sapiens
  misc_RNA (1)...(19): siRNA sense strand
agaguggcuuuauacaaga

SEQ ID NO: 1705299 - RNA, 19 nt, Homo sapiens
  misc_RNA (1)...(19): siRNA sense strand
cugauggugucuccuguga

SEQ ID NO: 1705300 - RNA, 19 nt, Homo sapiens
  misc_RNA (1)...(19): siRNA sense strand
auaagaucauugagguuga

SEQ ID NO: 1705301 - RNA, 19 nt, Homo sapiens
  misc_RNA (1)...(19): siRNA sense strand
ucgagugcccugagaacua

SEQ ID NO: 1705302 - RNA, 19 nt, Homo sapiens
  misc_RNA (1)...(19): siRNA sense strand
cuacggaauccaaagaaug

SEQ ID NO: 1705303 - RNA, 19 nt, Homo sapiens
  misc_RNA (1)...(19): siRNA sense strand
gacaccggauggccacuca

SEQ ID NO: 1705304 - RNA, 19 nt, Homo sapiens
  misc_RNA (1)...(19): siRNA sense strand
ccugugaagaugucaauga

SEQ ID NO: 1705305 - RNA, 19 nt, Homo sapiens
  misc_RNA (1)...(19): siRNA sense strand
cgagugcccugagaacuac

SEQ ID NO: 1705306 - RNA, 19 nt, Homo sapiens
  misc_RNA (1)...(19): siRNA sense strand
ggauaagaucauugagguu

SEQ ID NO: 1705307 - RNA, 19 nt, Homo sapiens
  misc_RNA (1)...(19): siRNA sense strand
caggaugugugucgauguc

SEQ ID NO: 1705308 - RNA, 19 nt, Homo sapiens
  misc_RNA (1)...(19): siRNA sense strand
ggagaccggagauuuggau

SEQ ID NO: 1705309 - RNA, 19 nt, Homo sapiens
  misc_RNA (1)...(19): siRNA sense strand
agaggacaauagcugcaaa

SEQ ID NO: 1705310 - RNA, 19 nt, Homo sapiens
  misc_RNA (1)...(19): siRNA sense strand
gaagaugucaaugaaugca

SEQ ID NO: 1705311 - RNA, 19 nt, Homo sapiens
  misc_RNA (1)...(19): siRNA sense strand
cuacggcuccuaccagugu

SEQ ID NO: 1705312 - RNA, 19 nt, Homo sapiens
  misc_RNA (1)...(19): siRNA sense strand
aagcagcagugccgagaca

SEQ ID NO: 1705313 - RNA, 19 nt, Homo sapiens
  misc_RNA (1)...(19): siRNA sense strand
gaacgcgcuguguugaugu

SEQ ID NO: 1705314 - RNA, 19 nt, Homo sapiens
  misc_RNA (1)...(19): siRNA sense strand
gagcucacagaggacaaua

SEQ ID NO: 1705315 - RNA, 19 nt, Homo sapiens
  misc_RNA (1)...(19): siRNA sense strand
gagagugguauucauaacu

SEQ ID NO: 1705316 - RNA, 19 nt, Homo sapiens
  misc_RNA (1)...(19): siRNA sense strand
cgaguacagccucaugguu

SEQ ID NO: 1705317 - RNA, 19 nt, Homo sapiens
  misc_RNA (1)...(19): siRNA sense strand
ggagugugccaacgucuac

SEQ ID NO: 1705318 - RNA, 19 nt, Homo sapiens
  misc_RNA (1)...(19): siRNA sense strand
cagaagaacgugcccaacu

SEQ ID NO: 1705319 - RNA, 19 nt, Homo sapiens
  misc_RNA (1)...(19): siRNA sense strand
gaguggcuuuauacaagau

SEQ ID NO: 1705320 - RNA, 19 nt, Homo sapiens
  misc_RNA (1)...(19): siRNA sense strand
ccacaacugcuccaucaac

SEQ ID NO: 1705321 - RNA, 19 nt, Homo sapiens
  misc_RNA (1)...(19): siRNA sense strand
cauaugcuacggaauccaa

SEQ ID NO: 1705322 - RNA, 19 nt, Homo sapiens
  misc_RNA (1)...(19): siRNA sense strand
caaugaguguuugaguauc

SEQ ID NO: 1705323 - RNA, 19 nt, Homo sapiens
  misc_RNA (1)...(19): siRNA sense strand
ugagagugguauucauaac

SEQ ID NO: 1705324 - RNA, 19 nt, Homo sapiens
  misc_RNA (1)...(19): siRNA sense strand
ggacccauaucugaaugac

SEQ ID NO: 1705325 - RNA, 19 nt, Homo sapiens
  misc_RNA (1)...(19): siRNA sense strand
ggccacaagugcgagaaca

SEQ ID NO: 1705326 - RNA, 19 nt, Homo sapiens
  misc_RNA (1)...(19): siRNA sense strand
uaagaucauugagguugag

SEQ ID NO: 1705327 - RNA, 19 nt, Homo sapiens
  misc_RNA (1)...(19): siRNA sense strand
aagaggacccauaucugaa

SEQ ID NO: 1705328 - RNA, 19 nt, Homo sapiens
  misc_RNA (1)...(19): siRNA sense strand
auccacaacugcuccauca

SEQ ID NO: 1705329 - RNA, 19 nt, Homo sapiens
  misc_RNA (1)...(19): siRNA sense strand
uccaagaaacggauaagau

SEQ ID NO: 1705330 - RNA, 19 nt, Homo sapiens
  misc_RNA (1)...(19): siRNA sense strand
aggcaacuguauugauauc

SEQ ID NO: 1705331 - RNA, 19 nt, Homo sapiens
  misc_RNA (1)...(19): siRNA sense strand
guggauggcaggucaugug

SEQ ID NO: 1705332 - RNA, 19 nt, Homo sapiens
  misc_RNA (1)...(19): siRNA sense strand
gaugcucuaggcaacugua

SEQ ID NO: 1705333 - RNA, 19 nt, Homo sapiens
  misc_RNA (1)...(19): siRNA sense strand
gacaauagcugcaaagaua

SEQ ID NO: 1705334 - RNA, 19 nt, Homo sapiens
  misc_RNA (1)...(19): siRNA sense strand
gcaagacggguuacuauuu

SEQ ID NO: 1705335 - RNA, 19 nt, Homo sapiens
  misc_RNA (1)...(19): siRNA sense strand
cuaggcaacuguauugaua

SEQ ID NO: 1705336 - RNA, 19 nt, Homo sapiens
  misc_RNA (1)...(19): siRNA sense strand
gugcaagaguggcuuuaua

SEQ ID NO: 1705337 - RNA, 19 nt, Homo sapiens
  misc_RNA (1)...(19): siRNA sense strand
gugaagaggugcugccauu

SEQ ID NO: 1705338 - RNA, 19 nt, Homo sapiens
  misc_RNA (1)...(19): siRNA sense strand
gugaagaugucaaugaaug

SEQ ID NO: 1705339 - RNA, 19 nt, Homo sapiens
  misc_RNA (1)...(19): siRNA sense strand
caagaggacccauaucuga

SEQ ID NO: 1705340 - RNA, 19 nt, Homo sapiens
  misc_RNA (1)...(19): siRNA sense strand
ggagaauccugcaucaaca

SEQ ID NO: 1705341 - RNA, 19 nt, Homo sapiens
  misc_RNA (1)...(19): siRNA sense strand
ggaacgcgcuguguugaug

SEQ ID NO: 1705342 - RNA, 19 nt, Homo sapiens
  misc_RNA (1)...(19): siRNA sense strand
ggacaucgcugcgugaacu

SEQ ID NO: 1705343 - RNA, 19 nt, Homo sapiens
  misc_RNA (1)...(19): siRNA sense strand
ggaacaagaggacccauau

SEQ ID NO: 1705344 - RNA, 19 nt, Homo sapiens
  misc_RNA (1)...(19): siRNA sense strand
gacccaagcuacagugcaa

SEQ ID NO: 1705345 - RNA, 19 nt, Homo sapiens
  misc_RNA (1)...(19): siRNA sense strand
gauggugucuccugugaag

SEQ ID NO: 1705346 - RNA, 19 nt, Homo sapiens
  misc_RNA (1)...(19): siRNA sense strand
caagacggguuacuauuuu

SEQ ID NO: 1705347 - RNA, 19 nt, Homo sapiens
  misc_RNA (1)...(19): siRNA sense strand
aaacggauaagaucauuga

SEQ ID NO: 1705348 - RNA, 19 nt, Homo sapiens
  misc_RNA (1)...(19): siRNA sense strand
gauggcaggucaugugaag

SEQ ID NO: 1705349 - RNA, 19 nt, Homo sapiens
  misc_RNA (1)...(19): siRNA sense strand
aagaguggcuuuauacaag

SEQ ID NO: 1705350 - RNA, 19 nt, Homo sapiens
  misc_RNA (1)...(19): siRNA sense strand
caagaguggcuuuauacaa

SEQ ID NO: 1705351 - RNA, 19 nt, Homo sapiens
  misc_RNA (1)...(19): siRNA sense strand
gcgaaugcaagacggguua

SEQ ID NO: 1705352 - RNA, 19 nt, Homo sapiens
  misc_RNA (1)...(19): siRNA sense strand
gcucuaggcaacuguauug

SEQ ID NO: 1705353 - RNA, 19 nt, Homo sapiens
  misc_RNA (1)...(19): siRNA sense strand
ggacaauagcugcaaagau

SEQ ID NO: 1705354 - RNA, 19 nt, Homo sapiens
  misc_RNA (1)...(19): siRNA sense strand
auacaugcaucaacacaga

SEQ ID NO: 1705355 - RNA, 19 nt, Homo sapiens
  misc_RNA (1)...(19): siRNA sense strand
ccaagaaacggauaagauc

SEQ ID NO: 1705356 - RNA, 19 nt, Homo sapiens
  misc_RNA (1)...(19): siRNA sense strand
gaagaacgugcccaacugu

SEQ ID NO: 1705357 - RNA, 19 nt, Homo sapiens
  misc_RNA (1)...(19): siRNA sense strand
caaagauauugacgagugu

SEQ ID NO: 1705358 - RNA, 19 nt, Homo sapiens
  misc_RNA (1)...(19): siRNA sense strand
gcucagcgauguggaugga

SEQ ID NO: 1705359 - RNA, 19 nt, Homo sapiens
  misc_RNA (1)...(19): siRNA sense strand
ggccagagcugcgaguaca

SEQ ID NO: 1705360 - RNA, 19 nt, Homo sapiens
  misc_RNA (1)...(19): siRNA sense strand
ggccguggcuaccaucuca

SEQ ID NO: 1705361 - RNA, 19 nt, Homo sapiens
  misc_RNA (1)...(19): siRNA sense strand
agaagaacgugcccaacug

SEQ ID NO: 1705362 - RNA, 19 nt, Homo sapiens
  misc_RNA (1)...(19): siRNA sense strand
caagaaacggauaagauca

SEQ ID NO: 1705363 - RNA, 19 nt, Homo sapiens
  misc_RNA (1)...(19): siRNA sense strand
gagggaacgcgcuguguug

SEQ ID NO: 1705364 - RNA, 19 nt, Homo sapiens
  misc_RNA (1)...(19): siRNA sense strand
gcuacggaauccaaagaau

SEQ ID NO: 1705365 - RNA, 19 nt, Homo sapiens
  misc_RNA (1)...(19): siRNA sense strand
gaacaagaggacccauauc

SEQ ID NO: 1705366 - RNA, 19 nt, Homo sapiens
  misc_RNA (1)...(19): siRNA sense strand
agaaacggauaagaucauu

SEQ ID NO: 1705367 - RNA, 19 nt, Homo sapiens
  misc_RNA (1)...(19): siRNA sense strand
ggagggaacgcgcuguguu

SEQ ID NO: 1705368 - RNA, 19 nt, Homo sapiens
  misc_RNA (1)...(19): siRNA sense strand
gaggacccauaucugaaug

SEQ ID NO: 1705369 - RNA, 19 nt, Homo sapiens
  misc_RNA (1)...(19): siRNA sense strand
ccaggagaccggagauuug

SEQ ID NO: 1705370 - RNA, 19 nt, Homo sapiens
  misc_RNA (1)...(19): siRNA sense strand
gcuaccagcucagcgaugu

SEQ ID NO: 1705371 - RNA, 19 nt, Homo sapiens
  misc_RNA (1)...(19): siRNA sense strand
ggaugugugucgaugucaa

SEQ ID NO: 1705372 - RNA, 19 nt, Homo sapiens
  misc_RNA (1)...(19): siRNA sense strand
gaccggagauuuggauguc

SEQ ID NO: 1705373 - RNA, 19 nt, Homo sapiens
  misc_RNA (1)...(19): siRNA sense strand
ugacuggcauccacaacug

SEQ ID NO: 1705374 - RNA, 19 nt, Homo sapiens
  misc_RNA (1)...(19): siRNA sense strand
gauauugacgagugugaga

SEQ ID NO: 1705375 - RNA, 19 nt, Homo sapiens
  misc_RNA (1)...(19): siRNA sense strand
gcaucagccuggccaacga

SEQ ID NO: 1705376 - RNA, 19 nt, Homo sapiens
  misc_RNA (1)...(19): siRNA sense strand
ggacugcucgcugccauau

SEQ ID NO: 1705377 - RNA, 19 nt, Homo sapiens
  misc_RNA (1)...(19): siRNA sense strand
gcaagaguggcuuuauaca

SEQ ID NO: 1705378 - RNA, 19 nt, Homo sapiens
  misc_RNA (1)...(19): siRNA sense strand
ucaacacagugggcucuuu

SEQ ID NO: 1705379 - RNA, 19 nt, Homo sapiens
  misc_RNA (1)...(19): siRNA sense strand
ugugagagugguauucaua

SEQ ID NO: 1705380 - RNA, 19 nt, Homo sapiens
  misc_RNA (1)...(19): siRNA sense strand
agaacacgcugggcuccua

SEQ ID NO: 1705381 - RNA, 19 nt, Homo sapiens
  misc_RNA (1)...(19): siRNA sense strand
gaagaggugcugccauugc

SEQ ID NO: 1705382 - RNA, 19 nt, Homo sapiens
  misc_RNA (1)...(19): siRNA sense strand
agaauacucugggauccuu

SEQ ID NO: 1705383 - RNA, 19 nt, Homo sapiens
  misc_RNA (1)...(19): siRNA sense strand
aacgagaccugcuucaaca

SEQ ID NO: 1705384 - RNA, 19 nt, Homo sapiens
  misc_RNA (1)...(19): siRNA sense strand
caacgagaccugcuucaac

SEQ ID NO: 1705385 - RNA, 19 nt, Homo sapiens
  misc_RNA (1)...(19): siRNA sense strand
gccaggagaccggagauuu

SEQ ID NO: 1705386 - RNA, 19 nt, Homo sapiens
  misc_RNA (1)...(19): siRNA sense strand
gaaacggauaagaucauug

SEQ ID NO: 1705387 - RNA, 19 nt, Homo sapiens
  misc_RNA (1)...(19): siRNA sense strand
aaugaguguuugaguauca

SEQ ID NO: 1705388 - RNA, 19 nt, Homo sapiens
  misc_RNA (1)...(19): siRNA sense strand
gugagagugguauucauaa

SEQ ID NO: 1705389 - RNA, 19 nt, Homo sapiens
  misc_RNA (1)...(19): siRNA sense strand
caacacagugggcucuuuc

SEQ ID NO: 1705390 - RNA, 19 nt, Homo sapiens
  misc_RNA (1)...(19): siRNA sense strand
cugugaagaugucaaugaa

SEQ ID NO: 1705391 - RNA, 19 nt, Homo sapiens
  misc_RNA (1)...(19): siRNA sense strand
ugauaucaaugaguguuug

SEQ ID NO: 1705392 - RNA, 19 nt, Homo sapiens
  misc_RNA (1)...(19): siRNA sense strand
agagugguauucauaacug

SEQ ID NO: 1705393 - RNA, 19 nt, Homo sapiens
  misc_RNA (1)...(19): siRNA sense strand
agaguggcuuuauacaaga

SEQ ID NO: 1705394 - RNA, 19 nt, Homo sapiens
  misc_RNA (1)...(19): siRNA sense strand
cugauggugucuccuguga

SEQ ID NO: 1705395 - RNA, 19 nt, Homo sapiens
  misc_RNA (1)...(19): siRNA sense strand
auaagaucauugagguuga

SEQ ID NO: 1705396 - RNA, 19 nt, Homo sapiens
  misc_RNA (1)...(19): siRNA sense strand
ucgagugcccugagaacua

SEQ ID NO: 1705397 - RNA, 19 nt, Homo sapiens
  misc_RNA (1)...(19): siRNA sense strand
cuacggaauccaaagaaug

SEQ ID NO: 1705398 - RNA, 19 nt, Homo sapiens
  misc_RNA (1)...(19): siRNA sense strand
gacaccggauggccacuca

SEQ ID NO: 1705399 - RNA, 19 nt, Homo sapiens
  misc_RNA (1)...(19): siRNA sense strand
ccugugaagaugucaauga

SEQ ID NO: 1705400 - RNA, 19 nt, Homo sapiens
  misc_RNA (1)...(19): siRNA sense strand
cgagugcccugagaacuac

SEQ ID NO: 1705401 - RNA, 19 nt, Homo sapiens
  misc_RNA (1)...(19): siRNA sense strand
ggauaagaucauugagguu

SEQ ID NO: 1705402 - RNA, 19 nt, Homo sapiens
  misc_RNA (1)...(19): siRNA sense strand
caggaugugugucgauguc

SEQ ID NO: 1705403 - RNA, 19 nt, Homo sapiens
  misc_RNA (1)...(19): siRNA sense strand
ggagaccggagauuuggau

SEQ ID NO: 1705404 - RNA, 19 nt, Homo sapiens
  misc_RNA (1)...(19): siRNA sense strand
agaggacaauagcugcaaa

SEQ ID NO: 1705405 - RNA, 19 nt, Homo sapiens
  misc_RNA (1)...(19): siRNA sense strand
gaagaugucaaugaaugca

SEQ ID NO: 1705406 - RNA, 19 nt, Homo sapiens
  misc_RNA (1)...(19): siRNA sense strand
cuacggcuccuaccagugu

SEQ ID NO: 1705407 - RNA, 19 nt, Homo sapiens
  misc_RNA (1)...(19): siRNA sense strand
aagcagcagugccgagaca

SEQ ID NO: 1705408 - RNA, 19 nt, Homo sapiens
  misc_RNA (1)...(19): siRNA sense strand
gaacgcgcuguguugaugu

SEQ ID NO: 1705409 - RNA, 19 nt, Homo sapiens
  misc_RNA (1)...(19): siRNA sense strand
gagcucacagaggacaaua

SEQ ID NO: 1705410 - RNA, 19 nt, Homo sapiens
  misc_RNA (1)...(19): siRNA sense strand
gagagugguauucauaacu

SEQ ID NO: 1705411 - RNA, 19 nt, Homo sapiens
  misc_RNA (1)...(19): siRNA sense strand
cgaguacagccucaugguu

SEQ ID NO: 1705412 - RNA, 19 nt, Homo sapiens
  misc_RNA (1)...(19): siRNA sense strand
ggagugugccaacgucuac

SEQ ID NO: 1705413 - RNA, 19 nt, Homo sapiens
  misc_RNA (1)...(19): siRNA sense strand
cagaagaacgugcccaacu

SEQ ID NO: 1705414 - RNA, 19 nt, Homo sapiens
  misc_RNA (1)...(19): siRNA sense strand
gaguggcuuuauacaagau

SEQ ID NO: 1705415 - RNA, 19 nt, Homo sapiens
  misc_RNA (1)...(19): siRNA sense strand
ccacaacugcuccaucaac

SEQ ID NO: 1705416 - RNA, 19 nt, Homo sapiens
  misc_RNA (1)...(19): siRNA sense strand
cauaugcuacggaauccaa

SEQ ID NO: 1705417 - RNA, 19 nt, Homo sapiens
  misc_RNA (1)...(19): siRNA sense strand
caaugaguguuugaguauc

SEQ ID NO: 1705418 - RNA, 19 nt, Homo sapiens
  misc_RNA (1)...(19): siRNA sense strand
ugagagugguauucauaac

SEQ ID NO: 1705419 - RNA, 19 nt, Homo sapiens
  misc_RNA (1)...(19): siRNA sense strand
ggacccauaucugaaugac

SEQ ID NO: 1705420 - RNA, 19 nt, Homo sapiens
  misc_RNA (1)...(19): siRNA sense strand
ggccacaagugcgagaaca

SEQ ID NO: 1705421 - RNA, 19 nt, Homo sapiens
  misc_RNA (1)...(19): siRNA sense strand
uaagaucauugagguugag

SEQ ID NO: 1705422 - RNA, 19 nt, Homo sapiens
  misc_RNA (1)...(19): siRNA sense strand
aagaggacccauaucugaa

SEQ ID NO: 1705423 - RNA, 19 nt, Homo sapiens
  misc_RNA (1)...(19): siRNA sense strand
auccacaacugcuccauca

SEQ ID NO: 1705424 - RNA, 19 nt, Homo sapiens
  misc_RNA (1)...(19): siRNA sense strand
uccaagaaacggauaagau

SEQ ID NO: 1705425 - RNA, 19 nt, Homo sapiens
  misc_RNA (1)...(19): siRNA sense strand
aggcaacuguauugauauc

SEQ ID NO: 1705426 - RNA, 19 nt, Homo sapiens
  misc_RNA (1)...(19): siRNA sense strand
guggauggcaggucaugug

SEQ ID NO: 1705427 - RNA, 19 nt, Homo sapiens
  misc_RNA (1)...(19): siRNA sense strand
gaugcucuaggcaacugua

SEQ ID NO: 1705428 - RNA, 19 nt, Homo sapiens
  misc_RNA (1)...(19): siRNA sense strand
gacaauagcugcaaagaua

SEQ ID NO: 1705429 - RNA, 19 nt, Homo sapiens
  misc_RNA (1)...(19): siRNA sense strand
gcaagacggguuacuauuu

SEQ ID NO: 1705430 - RNA, 19 nt, Homo sapiens
  misc_RNA (1)...(19): siRNA sense strand
cuaggcaacuguauugaua

SEQ ID NO: 1705431 - RNA, 19 nt, Homo sapiens
  misc_RNA (1)...(19): siRNA sense strand
gugcaagaguggcuuuaua

SEQ ID NO: 1705432 - RNA, 19 nt, Homo sapiens
  misc_RNA (1)...(19): siRNA sense strand
gugaagaggugcugccauu

SEQ ID NO: 1705433 - RNA, 19 nt, Homo sapiens
  misc_RNA (1)...(19): siRNA sense strand
gugaagaugucaaugaaug

SEQ ID NO: 1705434 - RNA, 19 nt, Homo sapiens
  misc_RNA (1)...(19): siRNA sense strand
caagaggacccauaucuga

SEQ ID NO: 1705435 - RNA, 19 nt, Homo sapiens
  misc_RNA (1)...(19): siRNA sense strand
ggagaauccugcaucaaca

SEQ ID NO: 1705436 - RNA, 19 nt, Homo sapiens
  misc_RNA (1)...(19): siRNA sense strand
ggaacgcgcuguguugaug

SEQ ID NO: 1705437 - RNA, 19 nt, Homo sapiens
  misc_RNA (1)...(19): siRNA sense strand
ggacaucgcugcgugaacu

SEQ ID NO: 1705438 - RNA, 19 nt, Homo sapiens
  misc_RNA (1)...(19): siRNA sense strand
ggaacaagaggacccauau

SEQ ID NO: 1705439 - RNA, 19 nt, Homo sapiens
  misc_RNA (1)...(19): siRNA sense strand
gacccaagcuacagugcaa

SEQ ID NO: 1705440 - RNA, 19 nt, Homo sapiens
  misc_RNA (1)...(19): siRNA sense strand
gauggugucuccugugaag

SEQ ID NO: 1705441 - RNA, 19 nt, Homo sapiens
  misc_RNA (1)...(19): siRNA sense strand
caagacggguuacuauuuu

SEQ ID NO: 1705442 - RNA, 19 nt, Homo sapiens
  misc_RNA (1)...(19): siRNA sense strand
aaacggauaagaucauuga

SEQ ID NO: 1705443 - RNA, 19 nt, Homo sapiens
  misc_RNA (1)...(19): siRNA sense strand
gauggcaggucaugugaag

SEQ ID NO: 1705444 - RNA, 19 nt, Homo sapiens
  misc_RNA (1)...(19): siRNA sense strand
aagaguggcuuuauacaag

SEQ ID NO: 1705445 - RNA, 19 nt, Homo sapiens
  misc_RNA (1)...(19): siRNA sense strand
caagaguggcuuuauacaa

SEQ ID NO: 1705446 - RNA, 19 nt, Homo sapiens
  misc_RNA (1)...(19): siRNA sense strand
gcgaaugcaagacggguua

SEQ ID NO: 1705447 - RNA, 19 nt, Homo sapiens
  misc_RNA (1)...(19): siRNA sense strand
gcucuaggcaacuguauug

SEQ ID NO: 1705448 - RNA, 19 nt, Homo sapiens
  misc_RNA (1)...(19): siRNA sense strand
ggacaauagcugcaaagau

SEQ ID NO: 1705449 - RNA, 19 nt, Homo sapiens
  misc_RNA (1)...(19): siRNA sense strand
auacaugcaucaacacaga

SEQ ID NO: 1705450 - RNA, 19 nt, Homo sapiens
  misc_RNA (1)...(19): siRNA sense strand
ccaagaaacggauaagauc

SEQ ID NO: 1705451 - RNA, 19 nt, Homo sapiens
  misc_RNA (1)...(19): siRNA sense strand
gaagaacgugcccaacugu

SEQ ID NO: 1705452 - RNA, 19 nt, Homo sapiens
  misc_RNA (1)...(19): siRNA sense strand
caaagauauugacgagugu

SEQ ID NO: 1705453 - RNA, 19 nt, Homo sapiens
  misc_RNA (1)...(19): siRNA sense strand
gcucagcgauguggaugga

SEQ ID NO: 1705454 - RNA, 19 nt, Homo sapiens
  misc_RNA (1)...(19): siRNA sense strand
ggccagagcugcgaguaca

SEQ ID NO: 1705455 - RNA, 19 nt, Homo sapiens
  misc_RNA (1)...(19): siRNA sense strand
ggccguggcuaccaucuca

SEQ ID NO: 1705456 - RNA, 19 nt, Homo sapiens
  misc_RNA (1)...(19): siRNA sense strand
agaagaacgugcccaacug

SEQ ID NO: 1705457 - RNA, 19 nt, Homo sapiens
  misc_RNA (1)...(19): siRNA sense strand
caagaaacggauaagauca

SEQ ID NO: 1705458 - RNA, 19 nt, Homo sapiens
  misc_RNA (1)...(19): siRNA sense strand
gagggaacgcgcuguguug

SEQ ID NO: 1705459 - RNA, 19 nt, Homo sapiens
  misc_RNA (1)...(19): siRNA sense strand
gcuacggaauccaaagaau

SEQ ID NO: 1705460 - RNA, 19 nt, Homo sapiens
  misc_RNA (1)...(19): siRNA sense strand
gaacaagaggacccauauc

SEQ ID NO: 1705461 - RNA, 19 nt, Homo sapiens
  misc_RNA (1)...(19): siRNA sense strand
agaaacggauaagaucauu

SEQ ID NO: 1705462 - RNA, 19 nt, Homo sapiens
  misc_RNA (1)...(19): siRNA sense strand
ggagggaacgcgcuguguu

SEQ ID NO: 1705463 - RNA, 19 nt, Homo sapiens
  misc_RNA (1)...(19): siRNA sense strand
gaggacccauaucugaaug

SEQ ID NO: 1705464 - RNA, 19 nt, Homo sapiens
  misc_RNA (1)...(19): siRNA sense strand
ccaggagaccggagauuug

SEQ ID NO: 1705465 - RNA, 19 nt, Homo sapiens
  misc_RNA (1)...(19): siRNA sense strand
gcuaccagcucagcgaugu

SEQ ID NO: 1705466 - RNA, 19 nt, Homo sapiens
  misc_RNA (1)...(19): siRNA sense strand
ggaugugugucgaugucaa

SEQ ID NO: 1705467 - RNA, 19 nt, Homo sapiens
  misc_RNA (1)...(19): siRNA sense strand
gaccggagauuuggauguc

SEQ ID NO: 1705468 - RNA, 19 nt, Homo sapiens
  misc_RNA (1)...(19): siRNA sense strand
ugacuggcauccacaacug

SEQ ID NO: 1705469 - RNA, 19 nt, Homo sapiens
  misc_RNA (1)...(19): siRNA sense strand
gauauugacgagugugaga

SEQ ID NO: 1705470 - RNA, 19 nt, Homo sapiens
  misc_RNA (1)...(19): siRNA sense strand
gcaucagccuggccaacga

SEQ ID NO: 1705471 - RNA, 19 nt, Homo sapiens
  misc_RNA (1)...(19): siRNA sense strand
ggacugcucgcugccauau

SEQ ID NO: 1705472 - RNA, 19 nt, Homo sapiens
  misc_RNA (1)...(19): siRNA sense strand
gcaagaguggcuuuauaca

SEQ ID NO: 1705473 - RNA, 19 nt, Homo sapiens
  misc_RNA (1)...(19): siRNA sense strand
ucaacacagugggcucuuu

SEQ ID NO: 1705474 - RNA, 19 nt, Homo sapiens
  misc_RNA (1)...(19): siRNA sense strand
ugugagagugguauucaua

SEQ ID NO: 1705475 - RNA, 19 nt, Homo sapiens
  misc_RNA (1)...(19): siRNA sense strand
agaacacgcugggcuccua

SEQ ID NO: 1705476 - RNA, 19 nt, Homo sapiens
  misc_RNA (1)...(19): siRNA sense strand
gaagaggugcugccauugc

SEQ ID NO: 1705477 - RNA, 19 nt, Homo sapiens
  misc_RNA (1)...(19): siRNA sense strand
agaauacucugggauccuu

SEQ ID NO: 1705478 - RNA, 19 nt, Homo sapiens
  misc_RNA (1)...(19): siRNA sense strand
aacgagaccugcuucaaca

SEQ ID NO: 1705479 - RNA, 19 nt, Homo sapiens
  misc_RNA (1)...(19): siRNA sense strand
caacgagaccugcuucaac

SEQ ID NO: 1705480 - RNA, 19 nt, Homo sapiens
  misc_RNA (1)...(19): siRNA sense strand
gccaggagaccggagauuu

SEQ ID NO: 1705481 - RNA, 19 nt, Homo sapiens
  misc_RNA (1)...(19): siRNA sense strand
gaaacggauaagaucauug

SEQ ID NO: 1705482 - RNA, 19 nt, Homo sapiens
  misc_RNA (1)...(19): siRNA sense strand
aaugaguguuugaguauca

SEQ ID NO: 1705483 - RNA, 19 nt, Homo sapiens
  misc_RNA (1)...(19): siRNA sense strand
gugagagugguauucauaa

SEQ ID NO: 1705484 - RNA, 19 nt, Homo sapiens
  misc_RNA (1)...(19): siRNA sense strand
caacacagugggcucuuuc

SEQ ID NO: 1705485 - RNA, 19 nt, Homo sapiens
  misc_RNA (1)...(19): siRNA sense strand
cugugaagaugucaaugaa

SEQ ID NO: 1705486 - RNA, 19 nt, Homo sapiens
  misc_RNA (1)...(19): siRNA sense strand
ugauaucaaugaguguuug

SEQ ID NO: 1705487 - RNA, 19 nt, Homo sapiens
  misc_RNA (1)...(19): siRNA sense strand
agagugguauucauaacug

SEQ ID NO: 1705488 - RNA, 19 nt, Homo sapiens
  misc_RNA (1)...(19): siRNA sense strand
agaguggcuuuauacaaga

SEQ ID NO: 1705489 - RNA, 19 nt, Homo sapiens
  misc_RNA (1)...(19): siRNA sense strand
cugauggugucuccuguga

SEQ ID NO: 1705490 - RNA, 19 nt, Homo sapiens
  misc_RNA (1)...(19): siRNA sense strand
auaagaucauugagguuga

SEQ ID NO: 1705491 - RNA, 19 nt, Homo sapiens
  misc_RNA (1)...(19): siRNA sense strand
ucgagugcccugagaacua

SEQ ID NO: 1705492 - RNA, 19 nt, Homo sapiens
  misc_RNA (1)...(19): siRNA sense strand
cuacggaauccaaagaaug

SEQ ID NO: 1705493 - RNA, 19 nt, Homo sapiens
  misc_RNA (1)...(19): siRNA sense strand
gacaccggauggccacuca

SEQ ID NO: 1705494 - RNA, 19 nt, Homo sapiens
  misc_RNA (1)...(19): siRNA sense strand
ccugugaagaugucaauga

SEQ ID NO: 1705495 - RNA, 19 nt, Homo sapiens
  misc_RNA (1)...(19): siRNA sense strand
cgagugcccugagaacuac

SEQ ID NO: 1705496 - RNA, 19 nt, Homo sapiens
  misc_RNA (1)...(19): siRNA sense strand
ggauaagaucauugagguu

SEQ ID NO: 1705497 - RNA, 19 nt, Homo sapiens
  misc_RNA (1)...(19): siRNA sense strand
caggaugugugucgauguc

SEQ ID NO: 1705498 - RNA, 19 nt, Homo sapiens
  misc_RNA (1)...(19): siRNA sense strand
ggagaccggagauuuggau

SEQ ID NO: 1705499 - RNA, 19 nt, Homo sapiens
  misc_RNA (1)...(19): siRNA sense strand
agaggacaauagcugcaaa

SEQ ID NO: 1705500 - RNA, 19 nt, Homo sapiens
  misc_RNA (1)...(19): siRNA sense strand
gaagaugucaaugaaugca

SEQ ID NO: 1705501 - RNA, 19 nt, Homo sapiens
  misc_RNA (1)...(19): siRNA sense strand
cuacggcuccuaccagugu

SEQ ID NO: 1705502 - RNA, 19 nt, Homo sapiens
  misc_RNA (1)...(19): siRNA sense strand
aagcagcagugccgagaca

SEQ ID NO: 1705503 - RNA, 19 nt, Homo sapiens
  misc_RNA (1)...(19): siRNA sense strand
gaacgcgcuguguugaugu

SEQ ID NO: 1705504 - RNA, 19 nt, Homo sapiens
  misc_RNA (1)...(19): siRNA sense strand
gagcucacagaggacaaua

SEQ ID NO: 1705505 - RNA, 19 nt, Homo sapiens
  misc_RNA (1)...(19): siRNA sense strand
gagagugguauucauaacu

SEQ ID NO: 1705506 - RNA, 19 nt, Homo sapiens
  misc_RNA (1)...(19): siRNA sense strand
cgaguacagccucaugguu

SEQ ID NO: 1705507 - RNA, 19 nt, Homo sapiens
  misc_RNA (1)...(19): siRNA sense strand
ggagugugccaacgucuac

SEQ ID NO: 1705508 - RNA, 19 nt, Homo sapiens
  misc_RNA (1)...(19): siRNA sense strand
cagaagaacgugcccaacu

SEQ ID NO: 1705509 - RNA, 19 nt, Homo sapiens
  misc_RNA (1)...(19): siRNA sense strand
gaguggcuuuauacaagau

SEQ ID NO: 1705510 - RNA, 19 nt, Homo sapiens
  misc_RNA (1)...(19): siRNA sense strand
ccacaacugcuccaucaac

SEQ ID NO: 1705511 - RNA, 19 nt, Homo sapiens
  misc_RNA (1)...(19): siRNA sense strand
cauaugcuacggaauccaa

SEQ ID NO: 1705512 - RNA, 19 nt, Homo sapiens
  misc_RNA (1)...(19): siRNA sense strand
caaugaguguuugaguauc

SEQ ID NO: 1705513 - RNA, 19 nt, Homo sapiens
  misc_RNA (1)...(19): siRNA sense strand
ugagagugguauucauaac

SEQ ID NO: 1705514 - RNA, 19 nt, Homo sapiens
  misc_RNA (1)...(19): siRNA sense strand
ggacccauaucugaaugac

SEQ ID NO: 1705515 - RNA, 19 nt, Homo sapiens
  misc_RNA (1)...(19): siRNA sense strand
ggccacaagugcgagaaca

SEQ ID NO: 1705516 - RNA, 19 nt, Homo sapiens
  misc_RNA (1)...(19): siRNA sense strand
uaagaucauugagguugag

SEQ ID NO: 1705517 - RNA, 19 nt, Homo sapiens
  misc_RNA (1)...(19): siRNA sense strand
aagaggacccauaucugaa

SEQ ID NO: 1705518 - RNA, 19 nt, Homo sapiens
  misc_RNA (1)...(19): siRNA sense strand
auccacaacugcuccauca

SEQ ID NO: 1705519 - RNA, 19 nt, Homo sapiens
  misc_RNA (1)...(19): siRNA sense strand
uccaagaaacggauaagau

SEQ ID NO: 1705520 - RNA, 19 nt, Homo sapiens
  misc_RNA (1)...(19): siRNA sense strand
aggcaacuguauugauauc

SEQ ID NO: 1705521 - RNA, 19 nt, Homo sapiens
  misc_RNA (1)...(19): siRNA sense strand
guggauggcaggucaugug

SEQ ID NO: 1705522 - RNA, 19 nt, Homo sapiens
  misc_RNA (1)...(19): siRNA sense strand
gaugcucuaggcaacugua

SEQ ID NO: 1705523 - RNA, 19 nt, Homo sapiens
  misc_RNA (1)...(19): siRNA sense strand
gacaauagcugcaaagaua

SEQ ID NO: 1705524 - RNA, 19 nt, Homo sapiens
  misc_RNA (1)...(19): siRNA sense strand
gcaagacggguuacuauuu

SEQ ID NO: 1705525 - RNA, 19 nt, Homo sapiens
  misc_RNA (1)...(19): siRNA sense strand
cuaggcaacuguauugaua

SEQ ID NO: 1705526 - RNA, 19 nt, Homo sapiens
  misc_RNA (1)...(19): siRNA sense strand
gugcaagaguggcuuuaua

SEQ ID NO: 1705527 - RNA, 19 nt, Homo sapiens
  misc_RNA (1)...(19): siRNA sense strand
gugaagaggugcugccauu

SEQ ID NO: 1705528 - RNA, 19 nt, Homo sapiens
  misc_RNA (1)...(19): siRNA sense strand
gugaagaugucaaugaaug

SEQ ID NO: 1705529 - RNA, 19 nt, Homo sapiens
  misc_RNA (1)...(19): siRNA sense strand
caagaggacccauaucuga

SEQ ID NO: 1705530 - RNA, 19 nt, Homo sapiens
  misc_RNA (1)...(19): siRNA sense strand
ggagaauccugcaucaaca

SEQ ID NO: 1705531 - RNA, 19 nt, Homo sapiens
  misc_RNA (1)...(19): siRNA sense strand
ggaacgcgcuguguugaug

SEQ ID NO: 1705532 - RNA, 19 nt, Homo sapiens
  misc_RNA (1)...(19): siRNA sense strand
ggacaucgcugcgugaacu

SEQ ID NO: 1705533 - RNA, 19 nt, Homo sapiens
  misc_RNA (1)...(19): siRNA sense strand
ggaacaagaggacccauau

SEQ ID NO: 1705534 - RNA, 19 nt, Homo sapiens
  misc_RNA (1)...(19): siRNA sense strand
gacccaagcuacagugcaa

SEQ ID NO: 1705535 - RNA, 19 nt, Homo sapiens
  misc_RNA (1)...(19): siRNA sense strand
gauggugucuccugugaag

SEQ ID NO: 1705536 - RNA, 19 nt, Homo sapiens
  misc_RNA (1)...(19): siRNA sense strand
caagacggguuacuauuuu

SEQ ID NO: 1705537 - RNA, 19 nt, Homo sapiens
  misc_RNA (1)...(19): siRNA sense strand
aaacggauaagaucauuga

SEQ ID NO: 1705538 - RNA, 19 nt, Homo sapiens
  misc_RNA (1)...(19): siRNA sense strand
gauggcaggucaugugaag

SEQ ID NO: 1705539 - RNA, 19 nt, Homo sapiens
  misc_RNA (1)...(19): siRNA sense strand
aagaguggcuuuauacaag

SEQ ID NO: 1705540 - RNA, 19 nt, Homo sapiens
  misc_RNA (1)...(19): siRNA sense strand
caagaguggcuuuauacaa

SEQ ID NO: 1705541 - RNA, 19 nt, Homo sapiens
  misc_RNA (1)...(19): siRNA sense strand
gcgaaugcaagacggguua

SEQ ID NO: 1705542 - RNA, 19 nt, Homo sapiens
  misc_RNA (1)...(19): siRNA sense strand
gcucuaggcaacuguauug

SEQ ID NO: 1705543 - RNA, 19 nt, Homo sapiens
  misc_RNA (1)...(19): siRNA sense strand
ggacaauagcugcaaagau

SEQ ID NO: 1705544 - RNA, 19 nt, Homo sapiens
  misc_RNA (1)...(19): siRNA sense strand
auacaugcaucaacacaga

SEQ ID NO: 1705545 - RNA, 19 nt, Homo sapiens
  misc_RNA (1)...(19): siRNA sense strand
ccaagaaacggauaagauc

SEQ ID NO: 1705546 - RNA, 19 nt, Homo sapiens
  misc_RNA (1)...(19): siRNA sense strand
gaagaacgugcccaacugu

SEQ ID NO: 1705547 - RNA, 19 nt, Homo sapiens
  misc_RNA (1)...(19): siRNA sense strand
caaagauauugacgagugu

SEQ ID NO: 1705548 - RNA, 19 nt, Homo sapiens
  misc_RNA (1)...(19): siRNA sense strand
gcucagcgauguggaugga

SEQ ID NO: 1705549 - RNA, 19 nt, Homo sapiens
  misc_RNA (1)...(19): siRNA sense strand
ggccagagcugcgaguaca

SEQ ID NO: 1705550 - RNA, 19 nt, Homo sapiens
  misc_RNA (1)...(19): siRNA sense strand
ggccguggcuaccaucuca

SEQ ID NO: 1705551 - RNA, 19 nt, Homo sapiens
  misc_RNA (1)...(19): siRNA sense strand
agaagaacgugcccaacug

SEQ ID NO: 1705552 - RNA, 19 nt, Homo sapiens
  misc_RNA (1)...(19): siRNA sense strand
caagaaacggauaagauca

SEQ ID NO: 1705553 - RNA, 19 nt, Homo sapiens
  misc_RNA (1)...(19): siRNA sense strand
gagggaacgcgcuguguug

SEQ ID NO: 1705554 - RNA, 19 nt, Homo sapiens
  misc_RNA (1)...(19): siRNA sense strand
gcuacggaauccaaagaau

SEQ ID NO: 1705555 - RNA, 19 nt, Homo sapiens
  misc_RNA (1)...(19): siRNA sense strand
gaacaagaggacccauauc

SEQ ID NO: 1705556 - RNA, 19 nt, Homo sapiens
  misc_RNA (1)...(19): siRNA sense strand
agaaacggauaagaucauu

SEQ ID NO: 1705557 - RNA, 19 nt, Homo sapiens
  misc_RNA (1)...(19): siRNA sense strand
ggagggaacgcgcuguguu

SEQ ID NO: 1705558 - RNA, 19 nt, Homo sapiens
  misc_RNA (1)...(19): siRNA sense strand
gaggacccauaucugaaug

SEQ ID NO: 1705559 - RNA, 19 nt, Homo sapiens
  misc_RNA (1)...(19): siRNA sense strand
ccaggagaccggagauuug

SEQ ID NO: 1705560 - RNA, 19 nt, Homo sapiens
  misc_RNA (1)...(19): siRNA sense strand
gcuaccagcucagcgaugu

SEQ ID NO: 1705561 - RNA, 19 nt, Homo sapiens
  misc_RNA (1)...(19): siRNA sense strand
ggaugugugucgaugucaa

SEQ ID NO: 1705562 - RNA, 19 nt, Homo sapiens
  misc_RNA (1)...(19): siRNA sense strand
gaccggagauuuggauguc

SEQ ID NO: 1705563 - RNA, 19 nt, Homo sapiens
  misc_RNA (1)...(19): siRNA sense strand
ugacuggcauccacaacug

SEQ ID NO: 1705564 - RNA, 19 nt, Homo sapiens
  misc_RNA (1)...(19): siRNA sense strand
gauauugacgagugugaga

SEQ ID NO: 1705565 - RNA, 19 nt, Homo sapiens
  misc_RNA (1)...(19): siRNA sense strand
gcaucagccuggccaacga

SEQ ID NO: 1705566 - RNA, 19 nt, Homo sapiens
  misc_RNA (1)...(19): siRNA sense strand
ggacugcucgcugccauau

SEQ ID NO: 1705567 - RNA, 19 nt, Homo sapiens
  misc_RNA (1)...(19): siRNA sense strand
gcaagaguggcuuuauaca

SEQ ID NO: 1705568 - RNA, 19 nt, Homo sapiens
  misc_RNA (1)...(19): siRNA sense strand
ucaacacagugggcucuuu

SEQ ID NO: 1705569 - RNA, 19 nt, Homo sapiens
  misc_RNA (1)...(19): siRNA sense strand
ugugagagugguauucaua

SEQ ID NO: 1705570 - RNA, 19 nt, Homo sapiens
  misc_RNA (1)...(19): siRNA sense strand
agaacacgcugggcuccua

SEQ ID NO: 1705571 - RNA, 19 nt, Homo sapiens
  misc_RNA (1)...(19): siRNA sense strand
gaagaggugcugccauugc

SEQ ID NO: 1705572 - RNA, 19 nt, Homo sapiens
  misc_RNA (1)...(19): siRNA sense strand
agaauacucugggauccuu

SEQ ID NO: 1705573 - RNA, 19 nt, Homo sapiens
  misc_RNA (1)...(19): siRNA sense strand
aacgagaccugcuucaaca

SEQ ID NO: 1705574 - RNA, 19 nt, Homo sapiens
  misc_RNA (1)...(19): siRNA sense strand
caacgagaccugcuucaac

SEQ ID NO: 1705575 - RNA, 19 nt, Homo sapiens
  misc_RNA (1)...(19): siRNA sense strand
gccaggagaccggagauuu

SEQ ID NO: 1705576 - RNA, 19 nt, Homo sapiens
  misc_RNA (1)...(19): siRNA sense strand
gaaacggauaagaucauug

SEQ ID NO: 1705577 - RNA, 19 nt, Homo sapiens
  misc_RNA (1)...(19): siRNA sense strand
aaugaguguuugaguauca

SEQ ID NO: 1705578 - RNA, 19 nt, Homo sapiens
  misc_RNA (1)...(19): siRNA sense strand
gugagagugguauucauaa

SEQ ID NO: 1705579 - RNA, 19 nt, Homo sapiens
  misc_RNA (1)...(19): siRNA sense strand
caacacagugggcucuuuc

SEQ ID NO: 1705580 - RNA, 19 nt, Homo sapiens
  misc_RNA (1)...(19): siRNA sense strand
cugugaagaugucaaugaa

SEQ ID NO: 1705581 - RNA, 19 nt, Homo sapiens
  misc_RNA (1)...(19): siRNA sense strand
ugauaucaaugaguguuug

SEQ ID NO: 1705582 - RNA, 19 nt, Homo sapiens
  misc_RNA (1)...(19): siRNA sense strand
agagugguauucauaacug

SEQ ID NO: 1705583 - RNA, 19 nt, Homo sapiens
  misc_RNA (1)...(19): siRNA sense strand
agaguggcuuuauacaaga

SEQ ID NO: 1705584 - RNA, 19 nt, Homo sapiens
  misc_RNA (1)...(19): siRNA sense strand
cugauggugucuccuguga

SEQ ID NO: 1705585 - RNA, 19 nt, Homo sapiens
  misc_RNA (1)...(19): siRNA sense strand
auaagaucauugagguuga

SEQ ID NO: 1705586 - RNA, 19 nt, Homo sapiens
  misc_RNA (1)...(19): siRNA sense strand
ucgagugcccugagaacua

SEQ ID NO: 1705587 - RNA, 19 nt, Homo sapiens
  misc_RNA (1)...(19): siRNA sense strand
cuacggaauccaaagaaug

SEQ ID NO: 1705588 - RNA, 19 nt, Homo sapiens
  misc_RNA (1)...(19): siRNA sense strand
gacaccggauggccacuca

SEQ ID NO: 1705589 - RNA, 19 nt, Homo sapiens
  misc_RNA (1)...(19): siRNA sense strand
ccugugaagaugucaauga

SEQ ID NO: 1705590 - RNA, 19 nt, Homo sapiens
  misc_RNA (1)...(19): siRNA sense strand
cgagugcccugagaacuac

SEQ ID NO: 1705591 - RNA, 19 nt, Homo sapiens
  misc_RNA (1)...(19): siRNA sense strand
ggauaagaucauugagguu

SEQ ID NO: 1705592 - RNA, 19 nt, Homo sapiens
  misc_RNA (1)...(19): siRNA sense strand
caggaugugugucgauguc

SEQ ID NO: 1705593 - RNA, 19 nt, Homo sapiens
  misc_RNA (1)...(19): siRNA sense strand
ggagaccggagauuuggau

SEQ ID NO: 1705594 - RNA, 19 nt, Homo sapiens
  misc_RNA (1)...(19): siRNA sense strand
agaggacaauagcugcaaa

SEQ ID NO: 1705595 - RNA, 19 nt, Homo sapiens
  misc_RNA (1)...(19): siRNA sense strand
gaagaugucaaugaaugca

SEQ ID NO: 1705596 - RNA, 19 nt, Homo sapiens
  misc_RNA (1)...(19): siRNA sense strand
cuacggcuccuaccagugu

SEQ ID NO: 1705597 - RNA, 19 nt, Homo sapiens
  misc_RNA (1)...(19): siRNA sense strand
aagcagcagugccgagaca

SEQ ID NO: 1705598 - RNA, 19 nt, Homo sapiens
  misc_RNA (1)...(19): siRNA sense strand
gaacgcgcuguguugaugu

SEQ ID NO: 1705599 - RNA, 19 nt, Homo sapiens
  misc_RNA (1)...(19): siRNA sense strand
gagcucacagaggacaaua

SEQ ID NO: 1705600 - RNA, 19 nt, Homo sapiens
  misc_RNA (1)...(19): siRNA sense strand
gagagugguauucauaacu

SEQ ID NO: 1705601 - RNA, 19 nt, Homo sapiens
  misc_RNA (1)...(19): siRNA sense strand
cgaguacagccucaugguu

SEQ ID NO: 1705602 - RNA, 19 nt, Homo sapiens
  misc_RNA (1)...(19): siRNA sense strand
ggagugugccaacgucuac

SEQ ID NO: 1705603 - RNA, 19 nt, Homo sapiens
  misc_RNA (1)...(19): siRNA sense strand
cagaagaacgugcccaacu

SEQ ID NO: 1705604 - RNA, 19 nt, Homo sapiens
  misc_RNA (1)...(19): siRNA sense strand
gaguggcuuuauacaagau

SEQ ID NO: 1705605 - RNA, 19 nt, Homo sapiens
  misc_RNA (1)...(19): siRNA sense strand
ccacaacugcuccaucaac

SEQ ID NO: 1705606 - RNA, 19 nt, Homo sapiens
  misc_RNA (1)...(19): siRNA sense strand
cauaugcuacggaauccaa

SEQ ID NO: 1705607 - RNA, 19 nt, Homo sapiens
  misc_RNA (1)...(19): siRNA sense strand
caaugaguguuugaguauc

SEQ ID NO: 1705608 - RNA, 19 nt, Homo sapiens
  misc_RNA (1)...(19): siRNA sense strand
ugagagugguauucauaac

SEQ ID NO: 1705609 - RNA, 19 nt, Homo sapiens
  misc_RNA (1)...(19): siRNA sense strand
ggacccauaucugaaugac

SEQ ID NO: 1705610 - RNA, 19 nt, Homo sapiens
  misc_RNA (1)...(19): siRNA sense strand
ggccacaagugcgagaaca

SEQ ID NO: 1705611 - RNA, 19 nt, Homo sapiens
  misc_RNA (1)...(19): siRNA sense strand
uaagaucauugagguugag

SEQ ID NO: 1705612 - RNA, 19 nt, Homo sapiens
  misc_RNA (1)...(19): siRNA sense strand
aagaggacccauaucugaa

SEQ ID NO: 1705613 - RNA, 19 nt, Homo sapiens
  misc_RNA (1)...(19): siRNA sense strand
auccacaacugcuccauca

SEQ ID NO: 1705614 - RNA, 19 nt, Homo sapiens
  misc_RNA (1)...(19): siRNA sense strand
uccaagaaacggauaagau

SEQ ID NO: 1705615 - RNA, 19 nt, Homo sapiens
  misc_RNA (1)...(19): siRNA sense strand
aggcaacuguauugauauc

SEQ ID NO: 1705616 - RNA, 19 nt, Homo sapiens
  misc_RNA (1)...(19): siRNA sense strand
guggauggcaggucaugug

SEQ ID NO: 1705617 - RNA, 19 nt, Homo sapiens
  misc_RNA (1)...(19): siRNA sense strand
gaugcucuaggcaacugua

SEQ ID NO: 1705618 - RNA, 19 nt, Homo sapiens
  misc_RNA (1)...(19): siRNA sense strand
gacaauagcugcaaagaua

SEQ ID NO: 1705619 - RNA, 19 nt, Homo sapiens
  misc_RNA (1)...(19): siRNA sense strand
gcaagacggguuacuauuu

SEQ ID NO: 1705620 - RNA, 19 nt, Homo sapiens
  misc_RNA (1)...(19): siRNA sense strand
cuaggcaacuguauugaua

SEQ ID NO: 1705621 - RNA, 19 nt, Homo sapiens
  misc_RNA (1)...(19): siRNA sense strand
gugcaagaguggcuuuaua

SEQ ID NO: 1705622 - RNA, 19 nt, Homo sapiens
  misc_RNA (1)...(19): siRNA sense strand
gugaagaggugcugccauu

SEQ ID NO: 1705623 - RNA, 19 nt, Homo sapiens
  misc_RNA (1)...(19): siRNA sense strand
gugaagaugucaaugaaug

SEQ ID NO: 1705624 - RNA, 19 nt, Homo sapiens
  misc_RNA (1)...(19): siRNA sense strand
caagaggacccauaucuga

SEQ ID NO: 1705625 - RNA, 19 nt, Homo sapiens
  misc_RNA (1)...(19): siRNA sense strand
ggagaauccugcaucaaca

SEQ ID NO: 1705626 - RNA, 19 nt, Homo sapiens
  misc_RNA (1)...(19): siRNA sense strand
ggaacgcgcuguguugaug

SEQ ID NO: 1705627 - RNA, 19 nt, Homo sapiens
  misc_RNA (1)...(19): siRNA sense strand
ggacaucgcugcgugaacu

SEQ ID NO: 1705628 - RNA, 19 nt, Homo sapiens
  misc_RNA (1)...(19): siRNA sense strand
ggaacaagaggacccauau

SEQ ID NO: 1705629 - RNA, 19 nt, Homo sapiens
  misc_RNA (1)...(19): siRNA sense strand
gacccaagcuacagugcaa

SEQ ID NO: 1705630 - RNA, 19 nt, Homo sapiens
  misc_RNA (1)...(19): siRNA sense strand
gauggugucuccugugaag

SEQ ID NO: 1705631 - RNA, 19 nt, Homo sapiens
  misc_RNA (1)...(19): siRNA sense strand
caagacggguuacuauuuu

SEQ ID NO: 1705632 - RNA, 19 nt, Homo sapiens
  misc_RNA (1)...(19): siRNA sense strand
aaacggauaagaucauuga

SEQ ID NO: 1705633 - RNA, 19 nt, Homo sapiens
  misc_RNA (1)...(19): siRNA sense strand
gauggcaggucaugugaag

SEQ ID NO: 1705634 - RNA, 19 nt, Homo sapiens
  misc_RNA (1)...(19): siRNA sense strand
aagaguggcuuuauacaag

SEQ ID NO: 1705635 - RNA, 19 nt, Homo sapiens
  misc_RNA (1)...(19): siRNA sense strand
caagaguggcuuuauacaa

SEQ ID NO: 1705636 - RNA, 19 nt, Homo sapiens
  misc_RNA (1)...(19): siRNA sense strand
gcgaaugcaagacggguua

SEQ ID NO: 1705637 - RNA, 19 nt, Homo sapiens
  misc_RNA (1)...(19): siRNA sense strand
gcucuaggcaacuguauug

SEQ ID NO: 1705638 - RNA, 19 nt, Homo sapiens
  misc_RNA (1)...(19): siRNA sense strand
ggacaauagcugcaaagau

SEQ ID NO: 1705639 - RNA, 19 nt, Homo sapiens
  misc_RNA (1)...(19): siRNA sense strand
auacaugcaucaacacaga

SEQ ID NO: 1705640 - RNA, 19 nt, Homo sapiens
  misc_RNA (1)...(19): siRNA sense strand
ccaagaaacggauaagauc

SEQ ID NO: 1705641 - RNA, 19 nt, Homo sapiens
  misc_RNA (1)...(19): siRNA sense strand
gaagaacgugcccaacugu

SEQ ID NO: 1705642 - RNA, 19 nt, Homo sapiens
  misc_RNA (1)...(19): siRNA sense strand
caaagauauugacgagugu

SEQ ID NO: 1705643 - RNA, 19 nt, Homo sapiens
  misc_RNA (1)...(19): siRNA sense strand
gcucagcgauguggaugga

SEQ ID NO: 1705644 - RNA, 19 nt, Homo sapiens
  misc_RNA (1)...(19): siRNA sense strand
ggccagagcugcgaguaca

SEQ ID NO: 1705645 - RNA, 19 nt, Homo sapiens
  misc_RNA (1)...(19): siRNA sense strand
ggccguggcuaccaucuca

SEQ ID NO: 1705646 - RNA, 19 nt, Homo sapiens
  misc_RNA (1)...(19): siRNA sense strand
agaagaacgugcccaacug

SEQ ID NO: 1705647 - RNA, 19 nt, Homo sapiens
  misc_RNA (1)...(19): siRNA sense strand
caagaaacggauaagauca

SEQ ID NO: 1705648 - RNA, 19 nt, Homo sapiens
  misc_RNA (1)...(19): siRNA sense strand
gagggaacgcgcuguguug

SEQ ID NO: 1705649 - RNA, 19 nt, Homo sapiens
  misc_RNA (1)...(19): siRNA sense strand
gcuacggaauccaaagaau

SEQ ID NO: 1705650 - RNA, 19 nt, Homo sapiens
  misc_RNA (1)...(19): siRNA sense strand
gaacaagaggacccauauc

SEQ ID NO: 1705651 - RNA, 19 nt, Homo sapiens
  misc_RNA (1)...(19): siRNA sense strand
agaaacggauaagaucauu

SEQ ID NO: 1705652 - RNA, 19 nt, Homo sapiens
  misc_RNA (1)...(19): siRNA sense strand
ggagggaacgcgcuguguu

SEQ ID NO: 1705653 - RNA, 19 nt, Homo sapiens
  misc_RNA (1)...(19): siRNA sense strand
gaggacccauaucugaaug

SEQ ID NO: 1705654 - RNA, 19 nt, Homo sapiens
  misc_RNA (1)...(19): siRNA sense strand
ccaggagaccggagauuug

SEQ ID NO: 1705655 - RNA, 19 nt, Homo sapiens
  misc_RNA (1)...(19): siRNA sense strand
gcuaccagcucagcgaugu

SEQ ID NO: 1705656 - RNA, 19 nt, Homo sapiens
  misc_RNA (1)...(19): siRNA sense strand
ggaugugugucgaugucaa

SEQ ID NO: 1705657 - RNA, 19 nt, Homo sapiens
  misc_RNA (1)...(19): siRNA sense strand
gaccggagauuuggauguc

SEQ ID NO: 1705658 - RNA, 19 nt, Homo sapiens
  misc_RNA (1)...(19): siRNA sense strand
ugacuggcauccacaacug

SEQ ID NO: 1705659 - RNA, 19 nt, Homo sapiens
  misc_RNA (1)...(19): siRNA sense strand
gauauugacgagugugaga

SEQ ID NO: 1705660 - RNA, 19 nt, Homo sapiens
  misc_RNA (1)...(19): siRNA sense strand
gcaucagccuggccaacga

SEQ ID NO: 1705661 - RNA, 19 nt, Homo sapiens
  misc_RNA (1)...(19): siRNA sense strand
ggacugcucgcugccauau

SEQ ID NO: 1705662 - RNA, 19 nt, Homo sapiens
  misc_RNA (1)...(19): siRNA sense strand
gcaagaguggcuuuauaca

SEQ ID NO: 1705663 - RNA, 19 nt, Homo sapiens
  misc_RNA (1)...(19): siRNA sense strand
ucaacacagugggcucuuu

SEQ ID NO: 1705664 - RNA, 19 nt, Homo sapiens
  misc_RNA (1)...(19): siRNA sense strand
ugugagagugguauucaua

SEQ ID NO: 1705665 - RNA, 19 nt, Homo sapiens
  misc_RNA (1)...(19): siRNA sense strand
agaacacgcugggcuccua

SEQ ID NO: 1705666 - RNA, 19 nt, Homo sapiens
  misc_RNA (1)...(19): siRNA sense strand
gaagaggugcugccauugc

SEQ ID NO: 1705667 - RNA, 19 nt, Homo sapiens
  misc_RNA (1)...(19): siRNA sense strand
agaauacucugggauccuu

SEQ ID NO: 1705668 - RNA, 19 nt, Homo sapiens
  misc_RNA (1)...(19): siRNA sense strand
aacgagaccugcuucaaca

SEQ ID NO: 1705669 - RNA, 19 nt, Homo sapiens
  misc_RNA (1)...(19): siRNA sense strand
caacgagaccugcuucaac

SEQ ID NO: 1705670 - RNA, 19 nt, Homo sapiens
  misc_RNA (1)...(19): siRNA sense strand
gccaggagaccggagauuu

SEQ ID NO: 1705671 - RNA, 19 nt, Homo sapiens
  misc_RNA (1)...(19): siRNA sense strand
gaaacggauaagaucauug

SEQ ID NO: 1705672 - RNA, 19 nt, Homo sapiens
  misc_RNA (1)...(19): siRNA sense strand
aaugaguguuugaguauca

SEQ ID NO: 1705673 - RNA, 19 nt, Homo sapiens
  misc_RNA (1)...(19): siRNA sense strand
gugagagugguauucauaa

SEQ ID NO: 1705674 - RNA, 19 nt, Homo sapiens
  misc_RNA (1)...(19): siRNA sense strand
caacacagugggcucuuuc

SEQ ID NO: 1705675 - RNA, 19 nt, Homo sapiens
  misc_RNA (1)...(19): siRNA sense strand
cugugaagaugucaaugaa

SEQ ID NO: 1705676 - RNA, 19 nt, Homo sapiens
  misc_RNA (1)...(19): siRNA sense strand
ugauaucaaugaguguuug

SEQ ID NO: 1705677 - RNA, 19 nt, Homo sapiens
  misc_RNA (1)...(19): siRNA sense strand
agagugguauucauaacug

SEQ ID NO: 1705678 - RNA, 19 nt, Homo sapiens
  misc_RNA (1)...(19): siRNA sense strand
agaguggcuuuauacaaga

SEQ ID NO: 1705679 - RNA, 19 nt, Homo sapiens
  misc_RNA (1)...(19): siRNA sense strand
cugauggugucuccuguga

SEQ ID NO: 1705680 - RNA, 19 nt, Homo sapiens
  misc_RNA (1)...(19): siRNA sense strand
auaagaucauugagguuga

SEQ ID NO: 1705681 - RNA, 19 nt, Homo sapiens
  misc_RNA (1)...(19): siRNA sense strand
ucgagugcccugagaacua

SEQ ID NO: 1705682 - RNA, 19 nt, Homo sapiens
  misc_RNA (1)...(19): siRNA sense strand
cuacggaauccaaagaaug

SEQ ID NO: 1705683 - RNA, 19 nt, Homo sapiens
  misc_RNA (1)...(19): siRNA sense strand
gacaccggauggccacuca

SEQ ID NO: 1705684 - RNA, 19 nt, Homo sapiens
  misc_RNA (1)...(19): siRNA sense strand
ccugugaagaugucaauga

SEQ ID NO: 1705685 - RNA, 19 nt, Homo sapiens
  misc_RNA (1)...(19): siRNA sense strand
cgagugcccugagaacuac

SEQ ID NO: 1705686 - RNA, 19 nt, Homo sapiens
  misc_RNA (1)...(19): siRNA sense strand
ggauaagaucauugagguu

SEQ ID NO: 1705687 - RNA, 19 nt, Homo sapiens
  misc_RNA (1)...(19): siRNA sense strand
caggaugugugucgauguc

SEQ ID NO: 1705688 - RNA, 19 nt, Homo sapiens
  misc_RNA (1)...(19): siRNA sense strand
ggagaccggagauuuggau

SEQ ID NO: 1705689 - RNA, 19 nt, Homo sapiens
  misc_RNA (1)...(19): siRNA sense strand
agaggacaauagcugcaaa

SEQ ID NO: 1705690 - RNA, 19 nt, Homo sapiens
  misc_RNA (1)...(19): siRNA sense strand
gaagaugucaaugaaugca

SEQ ID NO: 1705691 - RNA, 19 nt, Homo sapiens
  misc_RNA (1)...(19): siRNA sense strand
cuacggcuccuaccagugu

SEQ ID NO: 1705692 - RNA, 19 nt, Homo sapiens
  misc_RNA (1)...(19): siRNA sense strand
aagcagcagugccgagaca

SEQ ID NO: 1705693 - RNA, 19 nt, Homo sapiens
  misc_RNA (1)...(19): siRNA sense strand
gaacgcgcuguguugaugu

SEQ ID NO: 1705694 - RNA, 19 nt, Homo sapiens
  misc_RNA (1)...(19): siRNA sense strand
gagcucacagaggacaaua

SEQ ID NO: 1705695 - RNA, 19 nt, Homo sapiens
  misc_RNA (1)...(19): siRNA sense strand
gagagugguauucauaacu

SEQ ID NO: 1705696 - RNA, 19 nt, Homo sapiens
  misc_RNA (1)...(19): siRNA sense strand
cgaguacagccucaugguu

SEQ ID NO: 1705697 - RNA, 19 nt, Homo sapiens
  misc_RNA (1)...(19): siRNA sense strand
ggagugugccaacgucuac

SEQ ID NO: 1705698 - RNA, 19 nt, Homo sapiens
  misc_RNA (1)...(19): siRNA sense strand
cagaagaacgugcccaacu

SEQ ID NO: 1705699 - RNA, 19 nt, Homo sapiens
  misc_RNA (1)...(19): siRNA sense strand
gaguggcuuuauacaagau

SEQ ID NO: 1705700 - RNA, 19 nt, Homo sapiens
  misc_RNA (1)...(19): siRNA sense strand
ccacaacugcuccaucaac

SEQ ID NO: 1705701 - RNA, 19 nt, Homo sapiens
  misc_RNA (1)...(19): siRNA sense strand
cauaugcuacggaauccaa

SEQ ID NO: 1705702 - RNA, 19 nt, Homo sapiens
  misc_RNA (1)...(19): siRNA sense strand
caaugaguguuugaguauc

SEQ ID NO: 1705703 - RNA, 19 nt, Homo sapiens
  misc_RNA (1)...(19): siRNA sense strand
ugagagugguauucauaac

SEQ ID NO: 1705704 - RNA, 19 nt, Homo sapiens
  misc_RNA (1)...(19): siRNA sense strand
ggacccauaucugaaugac

SEQ ID NO: 1705705 - RNA, 19 nt, Homo sapiens
  misc_RNA (1)...(19): siRNA sense strand
ggccacaagugcgagaaca

SEQ ID NO: 1705706 - RNA, 19 nt, Homo sapiens
  misc_RNA (1)...(19): siRNA sense strand
uaagaucauugagguugag

SEQ ID NO: 1705707 - RNA, 19 nt, Homo sapiens
  misc_RNA (1)...(19): siRNA sense strand
aagaggacccauaucugaa

SEQ ID NO: 1705708 - RNA, 19 nt, Homo sapiens
  misc_RNA (1)...(19): siRNA sense strand
auccacaacugcuccauca

SEQ ID NO: 1705709 - RNA, 19 nt, Homo sapiens
  misc_RNA (1)...(19): siRNA sense strand
uccaagaaacggauaagau

SEQ ID NO: 1705710 - RNA, 19 nt, Homo sapiens
  misc_RNA (1)...(19): siRNA sense strand
aggcaacuguauugauauc

SEQ ID NO: 1705711 - RNA, 19 nt, Homo sapiens
  misc_RNA (1)...(19): siRNA sense strand
guggauggcaggucaugug

SEQ ID NO: 1705712 - RNA, 19 nt, Homo sapiens
  misc_RNA (1)...(19): siRNA sense strand
gaugcucuaggcaacugua

SEQ ID NO: 1705713 - RNA, 19 nt, Homo sapiens
  misc_RNA (1)...(19): siRNA sense strand
gacaauagcugcaaagaua

SEQ ID NO: 1705714 - RNA, 19 nt, Homo sapiens
  misc_RNA (1)...(19): siRNA sense strand
gcaagacggguuacuauuu

SEQ ID NO: 1705715 - RNA, 19 nt, Homo sapiens
  misc_RNA (1)...(19): siRNA sense strand
cuaggcaacuguauugaua

SEQ ID NO: 1705716 - RNA, 19 nt, Homo sapiens
  misc_RNA (1)...(19): siRNA sense strand
gugcaagaguggcuuuaua

SEQ ID NO: 1705717 - RNA, 19 nt, Homo sapiens
  misc_RNA (1)...(19): siRNA sense strand
gugaagaggugcugccauu

SEQ ID NO: 1705718 - RNA, 19 nt, Homo sapiens
  misc_RNA (1)...(19): siRNA sense strand
gugaagaugucaaugaaug

SEQ ID NO: 1705719 - RNA, 19 nt, Homo sapiens
  misc_RNA (1)...(19): siRNA sense strand
caagaggacccauaucuga

SEQ ID NO: 1705720 - RNA, 19 nt, Homo sapiens
  misc_RNA (1)...(19): siRNA sense strand
ggagaauccugcaucaaca

SEQ ID NO: 1705721 - RNA, 19 nt, Homo sapiens
  misc_RNA (1)...(19): siRNA sense strand
ggaacgcgcuguguugaug

SEQ ID NO: 1705722 - RNA, 19 nt, Homo sapiens
  misc_RNA (1)...(19): siRNA sense strand
ggacaucgcugcgugaacu

SEQ ID NO: 1705723 - RNA, 19 nt, Homo sapiens
  misc_RNA (1)...(19): siRNA sense strand
ggaacaagaggacccauau

SEQ ID NO: 1705724 - RNA, 19 nt, Homo sapiens
  misc_RNA (1)...(19): siRNA sense strand
gacccaagcuacagugcaa

SEQ ID NO: 1705725 - RNA, 19 nt, Homo sapiens
  misc_RNA (1)...(19): siRNA sense strand
gauggugucuccugugaag

SEQ ID NO: 1705726 - RNA, 19 nt, Homo sapiens
  misc_RNA (1)...(19): siRNA sense strand
caagacggguuacuauuuu

SEQ ID NO: 1705727 - RNA, 19 nt, Homo sapiens
  misc_RNA (1)...(19): siRNA sense strand
aaacggauaagaucauuga

SEQ ID NO: 1705728 - RNA, 19 nt, Homo sapiens
  misc_RNA (1)...(19): siRNA sense strand
gauggcaggucaugugaag

SEQ ID NO: 1705729 - RNA, 19 nt, Homo sapiens
  misc_RNA (1)...(19): siRNA sense strand
aagaguggcuuuauacaag

SEQ ID NO: 1705730 - RNA, 19 nt, Homo sapiens
  misc_RNA (1)...(19): siRNA sense strand
caagaguggcuuuauacaa

SEQ ID NO: 1705731 - RNA, 19 nt, Homo sapiens
  misc_RNA (1)...(19): siRNA sense strand
gcgaaugcaagacggguua

SEQ ID NO: 1705732 - RNA, 19 nt, Homo sapiens
  misc_RNA (1)...(19): siRNA sense strand
gcucuaggcaacuguauug

SEQ ID NO: 1705733 - RNA, 19 nt, Homo sapiens
  misc_RNA (1)...(19): siRNA sense strand
ggacaauagcugcaaagau

SEQ ID NO: 1705734 - RNA, 19 nt, Homo sapiens
  misc_RNA (1)...(19): siRNA sense strand
auacaugcaucaacacaga

SEQ ID NO: 1705735 - RNA, 19 nt, Homo sapiens
  misc_RNA (1)...(19): siRNA sense strand
ccaagaaacggauaagauc

SEQ ID NO: 1705736 - RNA, 19 nt, Homo sapiens
  misc_RNA (1)...(19): siRNA sense strand
gaagaacgugcccaacugu

SEQ ID NO: 1705737 - RNA, 19 nt, Homo sapiens
  misc_RNA (1)...(19): siRNA sense strand
caaagauauugacgagugu

SEQ ID NO: 1705738 - RNA, 19 nt, Homo sapiens
  misc_RNA (1)...(19): siRNA sense strand
gcucagcgauguggaugga

SEQ ID NO: 1705739 - RNA, 19 nt, Homo sapiens
  misc_RNA (1)...(19): siRNA sense strand
ggccagagcugcgaguaca

SEQ ID NO: 1705740 - RNA, 19 nt, Homo sapiens
  misc_RNA (1)...(19): siRNA sense strand
ggccguggcuaccaucuca

SEQ ID NO: 1705741 - RNA, 19 nt, Homo sapiens
  misc_RNA (1)...(19): siRNA sense strand
agaagaacgugcccaacug

SEQ ID NO: 1705742 - RNA, 19 nt, Homo sapiens
  misc_RNA (1)...(19): siRNA sense strand
caagaaacggauaagauca

SEQ ID NO: 1705743 - RNA, 19 nt, Homo sapiens
  misc_RNA (1)...(19): siRNA sense strand
gagggaacgcgcuguguug

SEQ ID NO: 1705744 - RNA, 19 nt, Homo sapiens
  misc_RNA (1)...(19): siRNA sense strand
gcuacggaauccaaagaau

SEQ ID NO: 1705745 - RNA, 19 nt, Homo sapiens
  misc_RNA (1)...(19): siRNA sense strand
gaacaagaggacccauauc

SEQ ID NO: 1705746 - RNA, 19 nt, Homo sapiens
  misc_RNA (1)...(19): siRNA sense strand
agaaacggauaagaucauu

SEQ ID NO: 1705747 - RNA, 19 nt, Homo sapiens
  misc_RNA (1)...(19): siRNA sense strand
ggagggaacgcgcuguguu

SEQ ID NO: 1705748 - RNA, 19 nt, Homo sapiens
  misc_RNA (1)...(19): siRNA sense strand
gaggacccauaucugaaug

SEQ ID NO: 1705749 - RNA, 19 nt, Homo sapiens
  misc_RNA (1)...(19): siRNA sense strand
ccaggagaccggagauuug

SEQ ID NO: 1705750 - RNA, 19 nt, Homo sapiens
  misc_RNA (1)...(19): siRNA sense strand
gcuaccagcucagcgaugu

SEQ ID NO: 1705751 - RNA, 19 nt, Homo sapiens
  misc_RNA (1)...(19): siRNA sense strand
ggaugugugucgaugucaa

SEQ ID NO: 1705752 - RNA, 19 nt, Homo sapiens
  misc_RNA (1)...(19): siRNA sense strand
gaccggagauuuggauguc

SEQ ID NO: 1705753 - RNA, 19 nt, Homo sapiens
  misc_RNA (1)...(19): siRNA sense strand
ugacuggcauccacaacug

SEQ ID NO: 1705754 - RNA, 19 nt, Homo sapiens
  misc_RNA (1)...(19): siRNA sense strand
gauauugacgagugugaga

SEQ ID NO: 1705755 - RNA, 19 nt, Homo sapiens
  misc_RNA (1)...(19): siRNA sense strand
gcaucagccuggccaacga

SEQ ID NO: 1705756 - RNA, 19 nt, Homo sapiens
  misc_RNA (1)...(19): siRNA sense strand
ggacugcucgcugccauau

SEQ ID NO: 1705757 - RNA, 19 nt, Homo sapiens
  misc_RNA (1)...(19): siRNA sense strand
gcaagaguggcuuuauaca

SEQ ID NO: 1705758 - RNA, 19 nt, Homo sapiens
  misc_RNA (1)...(19): siRNA sense strand
ucaacacagugggcucuuu

SEQ ID NO: 1705759 - RNA, 19 nt, Homo sapiens
  misc_RNA (1)...(19): siRNA sense strand
ugugagagugguauucaua

SEQ ID NO: 1705760 - RNA, 19 nt, Homo sapiens
  misc_RNA (1)...(19): siRNA sense strand
agaacacgcugggcuccua

SEQ ID NO: 1705761 - RNA, 19 nt, Homo sapiens
  misc_RNA (1)...(19): siRNA sense strand
gaagaggugcugccauugc

SEQ ID NO: 1705762 - RNA, 19 nt, Homo sapiens
  misc_RNA (1)...(19): siRNA sense strand
agaauacucugggauccuu

SEQ ID NO: 1705763 - RNA, 19 nt, Homo sapiens
  misc_RNA (1)...(19): siRNA sense strand
aacgagaccugcuucaaca

SEQ ID NO: 1705764 - RNA, 19 nt, Homo sapiens
  misc_RNA (1)...(19): siRNA sense strand
caacgagaccugcuucaac

SEQ ID NO: 1705765 - RNA, 19 nt, Homo sapiens
  misc_RNA (1)...(19): siRNA sense strand
gccaggagaccggagauuu

SEQ ID NO: 1705766 - RNA, 19 nt, Homo sapiens
  misc_RNA (1)...(19): siRNA sense strand
gaaacggauaagaucauug

SEQ ID NO: 1705767 - RNA, 19 nt, Homo sapiens
  misc_RNA (1)...(19): siRNA sense strand
aaugaguguuugaguauca

SEQ ID NO: 1705768 - RNA, 19 nt, Homo sapiens
  misc_RNA (1)...(19): siRNA sense strand
gugagagugguauucauaa

SEQ ID NO: 1705769 - RNA, 19 nt, Homo sapiens
  misc_RNA (1)...(19): siRNA sense strand
caacacagugggcucuuuc

SEQ ID NO: 1705770 - RNA, 19 nt, Homo sapiens
  misc_RNA (1)...(19): siRNA sense strand
cugugaagaugucaaugaa

SEQ ID NO: 1705771 - RNA, 19 nt, Homo sapiens
  misc_RNA (1)...(19): siRNA sense strand
ugauaucaaugaguguuug

SEQ ID NO: 1705772 - RNA, 19 nt, Homo sapiens
  misc_RNA (1)...(19): siRNA sense strand
agagugguauucauaacug

SEQ ID NO: 1705773 - RNA, 19 nt, Homo sapiens
  misc_RNA (1)...(19): siRNA sense strand
agaguggcuuuauacaaga

SEQ ID NO: 1705774 - RNA, 19 nt, Homo sapiens
  misc_RNA (1)...(19): siRNA sense strand
cugauggugucuccuguga

SEQ ID NO: 1705775 - RNA, 19 nt, Homo sapiens
  misc_RNA (1)...(19): siRNA sense strand
auaagaucauugagguuga

SEQ ID NO: 1705776 - RNA, 19 nt, Homo sapiens
  misc_RNA (1)...(19): siRNA sense strand
ucgagugcccugagaacua

SEQ ID NO: 1705777 - RNA, 19 nt, Homo sapiens
  misc_RNA (1)...(19): siRNA sense strand
cuacggaauccaaagaaug

SEQ ID NO: 1705778 - RNA, 19 nt, Homo sapiens
  misc_RNA (1)...(19): siRNA sense strand
gacaccggauggccacuca

SEQ ID NO: 1705779 - RNA, 19 nt, Homo sapiens
  misc_RNA (1)...(19): siRNA sense strand
ccugugaagaugucaauga

SEQ ID NO: 1705780 - RNA, 19 nt, Homo sapiens
  misc_RNA (1)...(19): siRNA sense strand
cgagugcccugagaacuac

SEQ ID NO: 1705781 - RNA, 19 nt, Homo sapiens
  misc_RNA (1)...(19): siRNA sense strand
ggauaagaucauugagguu

SEQ ID NO: 1705782 - RNA, 19 nt, Homo sapiens
  misc_RNA (1)...(19): siRNA sense strand
caggaugugugucgauguc

SEQ ID NO: 1705783 - RNA, 19 nt, Homo sapiens
  misc_RNA (1)...(19): siRNA sense strand
ggagaccggagauuuggau

SEQ ID NO: 1705784 - RNA, 19 nt, Homo sapiens
  misc_RNA (1)...(19): siRNA sense strand
agaggacaauagcugcaaa

SEQ ID NO: 1705785 - RNA, 19 nt, Homo sapiens
  misc_RNA (1)...(19): siRNA sense strand
gaagaugucaaugaaugca

SEQ ID NO: 1705786 - RNA, 19 nt, Homo sapiens
  misc_RNA (1)...(19): siRNA sense strand
cuacggcuccuaccagugu

SEQ ID NO: 1705787 - RNA, 19 nt, Homo sapiens
  misc_RNA (1)...(19): siRNA sense strand
aagcagcagugccgagaca

SEQ ID NO: 1705788 - RNA, 19 nt, Homo sapiens
  misc_RNA (1)...(19): siRNA sense strand
gaacgcgcuguguugaugu

SEQ ID NO: 1705789 - RNA, 19 nt, Homo sapiens
  misc_RNA (1)...(19): siRNA sense strand
gagcucacagaggacaaua

SEQ ID NO: 1705790 - RNA, 19 nt, Homo sapiens
  misc_RNA (1)...(19): siRNA sense strand
gagagugguauucauaacu

SEQ ID NO: 1705791 - RNA, 19 nt, Homo sapiens
  misc_RNA (1)...(19): siRNA sense strand
cgaguacagccucaugguu

SEQ ID NO: 1705792 - RNA, 19 nt, Homo sapiens
  misc_RNA (1)...(19): siRNA sense strand
ggagugugccaacgucuac

SEQ ID NO: 1705793 - RNA, 19 nt, Homo sapiens
  misc_RNA (1)...(19): siRNA sense strand
cagaagaacgugcccaacu

SEQ ID NO: 1705794 - RNA, 19 nt, Homo sapiens
  misc_RNA (1)...(19): siRNA sense strand
gaguggcuuuauacaagau

SEQ ID NO: 1705795 - RNA, 19 nt, Homo sapiens
  misc_RNA (1)...(19): siRNA sense strand
ccacaacugcuccaucaac

SEQ ID NO: 1705796 - RNA, 19 nt, Homo sapiens
  misc_RNA (1)...(19): siRNA sense strand
cauaugcuacggaauccaa

SEQ ID NO: 1705797 - RNA, 19 nt, Homo sapiens
  misc_RNA (1)...(19): siRNA sense strand
caaugaguguuugaguauc

SEQ ID NO: 1705798 - RNA, 19 nt, Homo sapiens
  misc_RNA (1)...(19): siRNA sense strand
ugagagugguauucauaac

SEQ ID NO: 1705799 - RNA, 19 nt, Homo sapiens
  misc_RNA (1)...(19): siRNA sense strand
ggacccauaucugaaugac

SEQ ID NO: 1705800 - RNA, 19 nt, Homo sapiens
  misc_RNA (1)...(19): siRNA sense strand
ggccacaagugcgagaaca

SEQ ID NO: 1705801 - RNA, 19 nt, Homo sapiens
  misc_RNA (1)...(19): siRNA sense strand
uaagaucauugagguugag

SEQ ID NO: 1705802 - RNA, 19 nt, Homo sapiens
  misc_RNA (1)...(19): siRNA sense strand
aagaggacccauaucugaa

SEQ ID NO: 1705803 - RNA, 19 nt, Homo sapiens
  misc_RNA (1)...(19): siRNA sense strand
auccacaacugcuccauca

SEQ ID NO: 1705804 - RNA, 19 nt, Homo sapiens
  misc_RNA (1)...(19): siRNA sense strand
uccaagaaacggauaagau

SEQ ID NO: 1705805 - RNA, 19 nt, Homo sapiens
  misc_RNA (1)...(19): siRNA sense strand
aggcaacuguauugauauc

SEQ ID NO: 1705806 - RNA, 19 nt, Homo sapiens
  misc_RNA (1)...(19): siRNA sense strand
guggauggcaggucaugug

SEQ ID NO: 1705807 - RNA, 19 nt, Homo sapiens
  misc_RNA (1)...(19): siRNA sense strand
gaugcucuaggcaacugua

SEQ ID NO: 1705808 - RNA, 19 nt, Homo sapiens
  misc_RNA (1)...(19): siRNA sense strand
caaaugagguugucacaga

SEQ ID NO: 1705809 - RNA, 19 nt, Homo sapiens
  misc_RNA (1)...(19): siRNA sense strand
gcagagaaaccucaagaaa

SEQ ID NO: 1705810 - RNA, 19 nt, Homo sapiens
  misc_RNA (1)...(19): siRNA sense strand
guacgugggucccuaugaa

SEQ ID NO: 1705811 - RNA, 19 nt, Homo sapiens
  misc_RNA (1)...(19): siRNA sense strand
gagcaucauugcaaacaug

SEQ ID NO: 1705812 - RNA, 19 nt, Homo sapiens
  misc_RNA (1)...(19): siRNA sense strand
caagacaugucauucaagu

SEQ ID NO: 1705813 - RNA, 19 nt, Homo sapiens
  misc_RNA (1)...(19): siRNA sense strand
ggagagugcugggauggaa

SEQ ID NO: 1705814 - RNA, 19 nt, Homo sapiens
  misc_RNA (1)...(19): siRNA sense strand
caacggaugcuuuaucaga

SEQ ID NO: 1705815 - RNA, 19 nt, Homo sapiens
  misc_RNA (1)...(19): siRNA sense strand
agacaugucauucaaguuu

SEQ ID NO: 1705816 - RNA, 19 nt, Homo sapiens
  misc_RNA (1)...(19): siRNA sense strand
acacuugccuggcgaacaa

SEQ ID NO: 1705817 - RNA, 19 nt, Homo sapiens
  misc_RNA (1)...(19): siRNA sense strand
guacaagcauccugacaac

SEQ ID NO: 1705818 - RNA, 19 nt, Homo sapiens
  misc_RNA (1)...(19): siRNA sense strand
ccacagagcaccagcaaag

SEQ ID NO: 1705819 - RNA, 19 nt, Homo sapiens
  misc_RNA (1)...(19): siRNA sense strand
ccagaugacuugugagaac

SEQ ID NO: 1705820 - RNA, 19 nt, Homo sapiens
  misc_RNA (1)...(19): siRNA sense strand
cagcagagauaauggaaac

SEQ ID NO: 1705821 - RNA, 19 nt, Homo sapiens
  misc_RNA (1)...(19): siRNA sense strand
ggcgugagcuggagaagca

SEQ ID NO: 1705822 - RNA, 19 nt, Homo sapiens
  misc_RNA (1)...(19): siRNA sense strand
cacaggagcuugcaacaac

SEQ ID NO: 1705823 - RNA, 19 nt, Homo sapiens
  misc_RNA (1)...(19): siRNA sense strand
ggagaacagccacgucuuc

SEQ ID NO: 1705824 - RNA, 19 nt, Homo sapiens
  misc_RNA (1)...(19): siRNA sense strand
gagcguggccgacaagauc

SEQ ID NO: 1705825 - RNA, 19 nt, Homo sapiens
  misc_RNA (1)...(19): siRNA sense strand
cagcaucacuggcaugaac

SEQ ID NO: 1705826 - RNA, 19 nt, Homo sapiens
  misc_RNA (1)...(19): siRNA sense strand
gcacggguaugagcuccaa

SEQ ID NO: 1705827 - RNA, 19 nt, Homo sapiens
  misc_RNA (1)...(19): siRNA sense strand
gguuauggccugcacagaa

SEQ ID NO: 1705828 - RNA, 19 nt, Homo sapiens
  misc_RNA (1)...(19): siRNA sense strand
caaauuccccgaagacuuu

SEQ ID NO: 1705829 - RNA, 19 nt, Homo sapiens
  misc_RNA (1)...(19): siRNA sense strand
gggaaagccugaggagucu

SEQ ID NO: 1705830 - RNA, 19 nt, Homo sapiens
  misc_RNA (1)...(19): siRNA sense strand
guuauggccugcacagaag

SEQ ID NO: 1705831 - RNA, 19 nt, Homo sapiens
  misc_RNA (1)...(19): siRNA sense strand
ccugaaaacucaacaauca

SEQ ID NO: 1705832 - RNA, 19 nt, Homo sapiens
  misc_RNA (1)...(19): siRNA sense strand
ccaacaagcggagugauug

SEQ ID NO: 1705833 - RNA, 19 nt, Homo sapiens
  misc_RNA (1)...(19): siRNA sense strand
ccagagagcguggagaaug

SEQ ID NO: 1705834 - RNA, 19 nt, Homo sapiens
  misc_RNA (1)...(19): siRNA sense strand
gaugaugaccgcuauucug

SEQ ID NO: 1705835 - RNA, 19 nt, Homo sapiens
  misc_RNA (1)...(19): siRNA sense strand
gacaugucauucaaguuuc

SEQ ID NO: 1705836 - RNA, 19 nt, Homo sapiens
  misc_RNA (1)...(19): siRNA sense strand
caagcauccugacaacauc

SEQ ID NO: 1705837 - RNA, 19 nt, Homo sapiens
  misc_RNA (1)...(19): siRNA sense strand
ugaggagucucgugucucu

SEQ ID NO: 1705838 - RNA, 19 nt, Homo sapiens
  misc_RNA (1)...(19): siRNA sense strand
cagagagcguggagaaugg

SEQ ID NO: 1705839 - RNA, 19 nt, Homo sapiens
  misc_RNA (1)...(19): siRNA sense strand
ccgacaagauccuggacuu

SEQ ID NO: 1705840 - RNA, 19 nt, Homo sapiens
  misc_RNA (1)...(19): siRNA sense strand
agagaaaccucaagaaaag

SEQ ID NO: 1705841 - RNA, 19 nt, Homo sapiens
  misc_RNA (1)...(19): siRNA sense strand
gggacuuugugcacuguga

SEQ ID NO: 1705842 - RNA, 19 nt, Homo sapiens
  misc_RNA (1)...(19): siRNA sense strand
uccaacggaugcuuuauca

SEQ ID NO: 1705843 - RNA, 19 nt, Homo sapiens
  misc_RNA (1)...(19): siRNA sense strand
gagauaauggaaacaucaa

SEQ ID NO: 1705844 - RNA, 19 nt, Homo sapiens
  misc_RNA (1)...(19): siRNA sense strand
gccaacaagcggagugauu

SEQ ID NO: 1705845 - RNA, 19 nt, Homo sapiens
  misc_RNA (1)...(19): siRNA sense strand
ugucucgggucaucuguga

SEQ ID NO: 1705846 - RNA, 19 nt, Homo sapiens
  misc_RNA (1)...(19): siRNA sense strand
gagaacagccacgucuuca

SEQ ID NO: 1705847 - RNA, 19 nt, Homo sapiens
  misc_RNA (1)...(19): siRNA sense strand
gagcagcagagauaaugga

SEQ ID NO: 1705848 - RNA, 19 nt, Homo sapiens
  misc_RNA (1)...(19): siRNA sense strand
gcagagauaauggaaacau

SEQ ID NO: 1705849 - RNA, 19 nt, Homo sapiens
  misc_RNA (1)...(19): siRNA sense strand
gagcuugcaacaacagaga

SEQ ID NO: 1705850 - RNA, 19 nt, Homo sapiens
  misc_RNA (1)...(19): siRNA sense strand
caaaaugcccaaacacuug

SEQ ID NO: 1705851 - RNA, 19 nt, Homo sapiens
  misc_RNA (1)...(19): siRNA sense strand
aaagaaaagucaaccugaa

SEQ ID NO: 1705852 - RNA, 19 nt, Homo sapiens
  misc_RNA (1)...(19): siRNA sense strand
cagagauaauggaaacauc

SEQ ID NO: 1705853 - RNA, 19 nt, Homo sapiens
  misc_RNA (1)...(19): siRNA sense strand
aaguguggcuucccagaga

SEQ ID NO: 1705854 - RNA, 19 nt, Homo sapiens
  misc_RNA (1)...(19): siRNA sense strand
gcugggaggcuuagcugaa

SEQ ID NO: 1705855 - RNA, 19 nt, Homo sapiens
  misc_RNA (1)...(19): siRNA sense strand
uacaagcgaugaaaagaaa

SEQ ID NO: 1705856 - RNA, 19 nt, Homo sapiens
  misc_RNA (1)...(19): siRNA sense strand
cagagaaaccucaagaaaa

SEQ ID NO: 1705857 - RNA, 19 nt, Homo sapiens
  misc_RNA (1)...(19): siRNA sense strand
ccgaggccuuccagcagua

SEQ ID NO: 1705858 - RNA, 19 nt, Homo sapiens
  misc_RNA (1)...(19): siRNA sense strand
caaacuuccugagccaaca

SEQ ID NO: 1705859 - RNA, 19 nt, Homo sapiens
  misc_RNA (1)...(19): siRNA sense strand
aacggaugcuuuaucagaa

SEQ ID NO: 1705860 - RNA, 19 nt, Homo sapiens
  misc_RNA (1)...(19): siRNA sense strand
ggcgcgugcugguguauuc

SEQ ID NO: 1705861 - RNA, 19 nt, Homo sapiens
  misc_RNA (1)...(19): siRNA sense strand
cuggaggccuggagggaaa

SEQ ID NO: 1705862 - RNA, 19 nt, Homo sapiens
  misc_RNA (1)...(19): siRNA sense strand
cacagaugaugaccgcuau

SEQ ID NO: 1705863 - RNA, 19 nt, Homo sapiens
  misc_RNA (1)...(19): siRNA sense strand
gcagcagagauaauggaaa

SEQ ID NO: 1705864 - RNA, 19 nt, Homo sapiens
  misc_RNA (1)...(19): siRNA sense strand
cugggaggcuuagcugaaa

SEQ ID NO: 1705865 - RNA, 19 nt, Homo sapiens
  misc_RNA (1)...(19): siRNA sense strand
aaaugagguugucacagau

SEQ ID NO: 1705866 - RNA, 19 nt, Homo sapiens
  misc_RNA (1)...(19): siRNA sense strand
caaauacaggcccaucaca

SEQ ID NO: 1705867 - RNA, 19 nt, Homo sapiens
  misc_RNA (1)...(19): siRNA sense strand
caacaaucacagcauccaa

SEQ ID NO: 1705868 - RNA, 19 nt, Homo sapiens
  misc_RNA (1)...(19): siRNA sense strand
aggcuuagcugaaaacuuc

SEQ ID NO: 1705869 - RNA, 19 nt, Homo sapiens
  misc_RNA (1)...(19): siRNA sense strand
cuucagcccauggacauua

SEQ ID NO: 1705870 - RNA, 19 nt, Homo sapiens
  misc_RNA (1)...(19): siRNA sense strand
acgccacgaugcagagaaa

SEQ ID NO: 1705871 - RNA, 19 nt, Homo sapiens
  misc_RNA (1)...(19): siRNA sense strand
gcaguacgugggucccuau

SEQ ID NO: 1705872 - RNA, 19 nt, Homo sapiens
  misc_RNA (1)...(19): siRNA sense strand
cuguuugccugucucauug

SEQ ID NO: 1705873 - RNA, 19 nt, Homo sapiens
  misc_RNA (1)...(19): siRNA sense strand
acaagcauccugacaacau

SEQ ID NO: 1705874 - RNA, 19 nt, Homo sapiens
  misc_RNA (1)...(19): siRNA sense strand
gagagggaaagaacuccuu

SEQ ID NO: 1705875 - RNA, 19 nt, Homo sapiens
  misc_RNA (1)...(19): siRNA sense strand
agagauaauggaaacauca

SEQ ID NO: 1705876 - RNA, 19 nt, Homo sapiens
  misc_RNA (1)...(19): siRNA sense strand
gacagcaucacuggcauga

SEQ ID NO: 1705877 - RNA, 19 nt, Homo sapiens
  misc_RNA (1)...(19): siRNA sense strand
ccuguuugccugucucauu

SEQ ID NO: 1705878 - RNA, 19 nt, Homo sapiens
  misc_RNA (1)...(19): siRNA sense strand
ucacaggagcuugcaacaa

SEQ ID NO: 1705879 - RNA, 19 nt, Homo sapiens
  misc_RNA (1)...(19): siRNA sense strand
ugcccgagcagcagagaua

SEQ ID NO: 1705880 - RNA, 19 nt, Homo sapiens
  misc_RNA (1)...(19): siRNA sense strand
acugccagaugacuuguga

SEQ ID NO: 1705881 - RNA, 19 nt, Homo sapiens
  misc_RNA (1)...(19): siRNA sense strand
auggaaacaucaauacaag

SEQ ID NO: 1705882 - RNA, 19 nt, Homo sapiens
  misc_RNA (1)...(19): siRNA sense strand
auacaucgaccacgacauc

SEQ ID NO: 1705883 - RNA, 19 nt, Homo sapiens
  misc_RNA (1)...(19): siRNA sense strand
acaugucauucaaguuuca

SEQ ID NO: 1705884 - RNA, 19 nt, Homo sapiens
  misc_RNA (1)...(19): siRNA sense strand
cggaugcuuuaucagaaga

SEQ ID NO: 1705885 - RNA, 19 nt, Homo sapiens
  misc_RNA (1)...(19): siRNA sense strand
gagguugucacagaugaug

SEQ ID NO: 1705886 - RNA, 19 nt, Homo sapiens
  misc_RNA (1)...(19): siRNA sense strand
gcaaauuccccgaagacuu

SEQ ID NO: 1705887 - RNA, 19 nt, Homo sapiens
  misc_RNA (1)...(19): siRNA sense strand
gaugacuugugagaaccaa

SEQ ID NO: 1705888 - RNA, 19 nt, Homo sapiens
  misc_RNA (1)...(19): siRNA sense strand
gagccaacaagcggaguga

SEQ ID NO: 1705889 - RNA, 19 nt, Homo sapiens
  misc_RNA (1)...(19): siRNA sense strand
ccaggaaggaugggauuuc

SEQ ID NO: 1705890 - RNA, 19 nt, Homo sapiens
  misc_RNA (1)...(19): siRNA sense strand
cagaugaugaccgcuauuc

SEQ ID NO: 1705891 - RNA, 19 nt, Homo sapiens
  misc_RNA (1)...(19): siRNA sense strand
ccugaggagucucgugucu

SEQ ID NO: 1705892 - RNA, 19 nt, Homo sapiens
  misc_RNA (1)...(19): siRNA sense strand
uguacaagcauccugacaa

SEQ ID NO: 1705893 - RNA, 19 nt, Homo sapiens
  misc_RNA (1)...(19): siRNA sense strand
caaaugagguugucacaga

SEQ ID NO: 1705894 - RNA, 19 nt, Homo sapiens
  misc_RNA (1)...(19): siRNA sense strand
gcagagaaaccucaagaaa

SEQ ID NO: 1705895 - RNA, 19 nt, Homo sapiens
  misc_RNA (1)...(19): siRNA sense strand
guacgugggucccuaugaa

SEQ ID NO: 1705896 - RNA, 19 nt, Homo sapiens
  misc_RNA (1)...(19): siRNA sense strand
gagcaucauugcaaacaug

SEQ ID NO: 1705897 - RNA, 19 nt, Homo sapiens
  misc_RNA (1)...(19): siRNA sense strand
caagacaugucauucaagu

SEQ ID NO: 1705898 - RNA, 19 nt, Homo sapiens
  misc_RNA (1)...(19): siRNA sense strand
ggagagugcugggauggaa

SEQ ID NO: 1705899 - RNA, 19 nt, Homo sapiens
  misc_RNA (1)...(19): siRNA sense strand
caacggaugcuuuaucaga

SEQ ID NO: 1705900 - RNA, 19 nt, Homo sapiens
  misc_RNA (1)...(19): siRNA sense strand
agacaugucauucaaguuu

SEQ ID NO: 1705901 - RNA, 19 nt, Homo sapiens
  misc_RNA (1)...(19): siRNA sense strand
acacuugccuggcgaacaa

SEQ ID NO: 1705902 - RNA, 19 nt, Homo sapiens
  misc_RNA (1)...(19): siRNA sense strand
guacaagcauccugacaac

SEQ ID NO: 1705903 - RNA, 19 nt, Homo sapiens
  misc_RNA (1)...(19): siRNA sense strand
ccacagagcaccagcaaag

SEQ ID NO: 1705904 - RNA, 19 nt, Homo sapiens
  misc_RNA (1)...(19): siRNA sense strand
ccagaugacuugugagaac

SEQ ID NO: 1705905 - RNA, 19 nt, Homo sapiens
  misc_RNA (1)...(19): siRNA sense strand
cagcagagauaauggaaac

SEQ ID NO: 1705906 - RNA, 19 nt, Homo sapiens
  misc_RNA (1)...(19): siRNA sense strand
ggcgugagcuggagaagca

SEQ ID NO: 1705907 - RNA, 19 nt, Homo sapiens
  misc_RNA (1)...(19): siRNA sense strand
cacaggagcuugcaacaac

SEQ ID NO: 1705908 - RNA, 19 nt, Homo sapiens
  misc_RNA (1)...(19): siRNA sense strand
ggagaacagccacgucuuc

SEQ ID NO: 1705909 - RNA, 19 nt, Homo sapiens
  misc_RNA (1)...(19): siRNA sense strand
gagcguggccgacaagauc

SEQ ID NO: 1705910 - RNA, 19 nt, Homo sapiens
  misc_RNA (1)...(19): siRNA sense strand
cagcaucacuggcaugaac

SEQ ID NO: 1705911 - RNA, 19 nt, Homo sapiens
  misc_RNA (1)...(19): siRNA sense strand
gcacggguaugagcuccaa

SEQ ID NO: 1705912 - RNA, 19 nt, Homo sapiens
  misc_RNA (1)...(19): siRNA sense strand
gguuauggccugcacagaa

SEQ ID NO: 1705913 - RNA, 19 nt, Homo sapiens
  misc_RNA (1)...(19): siRNA sense strand
caaauuccccgaagacuuu

SEQ ID NO: 1705914 - RNA, 19 nt, Homo sapiens
  misc_RNA (1)...(19): siRNA sense strand
gggaaagccugaggagucu

SEQ ID NO: 1705915 - RNA, 19 nt, Homo sapiens
  misc_RNA (1)...(19): siRNA sense strand
guuauggccugcacagaag

SEQ ID NO: 1705916 - RNA, 19 nt, Homo sapiens
  misc_RNA (1)...(19): siRNA sense strand
ccugaaaacucaacaauca

SEQ ID NO: 1705917 - RNA, 19 nt, Homo sapiens
  misc_RNA (1)...(19): siRNA sense strand
ccaacaagcggagugauug

SEQ ID NO: 1705918 - RNA, 19 nt, Homo sapiens
  misc_RNA (1)...(19): siRNA sense strand
ccagagagcguggagaaug

SEQ ID NO: 1705919 - RNA, 19 nt, Homo sapiens
  misc_RNA (1)...(19): siRNA sense strand
gaugaugaccgcuauucug

SEQ ID NO: 1705920 - RNA, 19 nt, Homo sapiens
  misc_RNA (1)...(19): siRNA sense strand
gacaugucauucaaguuuc

SEQ ID NO: 1705921 - RNA, 19 nt, Homo sapiens
  misc_RNA (1)...(19): siRNA sense strand
caagcauccugacaacauc

SEQ ID NO: 1705922 - RNA, 19 nt, Homo sapiens
  misc_RNA (1)...(19): siRNA sense strand
ugaggagucucgugucucu

SEQ ID NO: 1705923 - RNA, 19 nt, Homo sapiens
  misc_RNA (1)...(19): siRNA sense strand
cagagagcguggagaaugg

SEQ ID NO: 1705924 - RNA, 19 nt, Homo sapiens
  misc_RNA (1)...(19): siRNA sense strand
ccgacaagauccuggacuu

SEQ ID NO: 1705925 - RNA, 19 nt, Homo sapiens
  misc_RNA (1)...(19): siRNA sense strand
agagaaaccucaagaaaag

SEQ ID NO: 1705926 - RNA, 19 nt, Homo sapiens
  misc_RNA (1)...(19): siRNA sense strand
gggacuuugugcacuguga

SEQ ID NO: 1705927 - RNA, 19 nt, Homo sapiens
  misc_RNA (1)...(19): siRNA sense strand
uccaacggaugcuuuauca

SEQ ID NO: 1705928 - RNA, 19 nt, Homo sapiens
  misc_RNA (1)...(19): siRNA sense strand
gagauaauggaaacaucaa

SEQ ID NO: 1705929 - RNA, 19 nt, Homo sapiens
  misc_RNA (1)...(19): siRNA sense strand
gccaacaagcggagugauu

SEQ ID NO: 1705930 - RNA, 19 nt, Homo sapiens
  misc_RNA (1)...(19): siRNA sense strand
ugucucgggucaucuguga

SEQ ID NO: 1705931 - RNA, 19 nt, Homo sapiens
  misc_RNA (1)...(19): siRNA sense strand
gagaacagccacgucuuca

SEQ ID NO: 1705932 - RNA, 19 nt, Homo sapiens
  misc_RNA (1)...(19): siRNA sense strand
gagcagcagagauaaugga

SEQ ID NO: 1705933 - RNA, 19 nt, Homo sapiens
  misc_RNA (1)...(19): siRNA sense strand
gcagagauaauggaaacau

SEQ ID NO: 1705934 - RNA, 19 nt, Homo sapiens
  misc_RNA (1)...(19): siRNA sense strand
gagcuugcaacaacagaga

SEQ ID NO: 1705935 - RNA, 19 nt, Homo sapiens
  misc_RNA (1)...(19): siRNA sense strand
caaaaugcccaaacacuug

SEQ ID NO: 1705936 - RNA, 19 nt, Homo sapiens
  misc_RNA (1)...(19): siRNA sense strand
aaagaaaagucaaccugaa

SEQ ID NO: 1705937 - RNA, 19 nt, Homo sapiens
  misc_RNA (1)...(19): siRNA sense strand
cagagauaauggaaacauc

SEQ ID NO: 1705938 - RNA, 19 nt, Homo sapiens
  misc_RNA (1)...(19): siRNA sense strand
aaguguggcuucccagaga

SEQ ID NO: 1705939 - RNA, 19 nt, Homo sapiens
  misc_RNA (1)...(19): siRNA sense strand
gcugggaggcuuagcugaa

SEQ ID NO: 1705940 - RNA, 19 nt, Homo sapiens
  misc_RNA (1)...(19): siRNA sense strand
uacaagcgaugaaaagaaa

SEQ ID NO: 1705941 - RNA, 19 nt, Homo sapiens
  misc_RNA (1)...(19): siRNA sense strand
cagagaaaccucaagaaaa

SEQ ID NO: 1705942 - RNA, 19 nt, Homo sapiens
  misc_RNA (1)...(19): siRNA sense strand
ccgaggccuuccagcagua

SEQ ID NO: 1705943 - RNA, 19 nt, Homo sapiens
  misc_RNA (1)...(19): siRNA sense strand
caaacuuccugagccaaca

SEQ ID NO: 1705944 - RNA, 19 nt, Homo sapiens
  misc_RNA (1)...(19): siRNA sense strand
aacggaugcuuuaucagaa

SEQ ID NO: 1705945 - RNA, 19 nt, Homo sapiens
  misc_RNA (1)...(19): siRNA sense strand
ggcgcgugcugguguauuc

SEQ ID NO: 1705946 - RNA, 19 nt, Homo sapiens
  misc_RNA (1)...(19): siRNA sense strand
cuggaggccuggagggaaa

SEQ ID NO: 1705947 - RNA, 19 nt, Homo sapiens
  misc_RNA (1)...(19): siRNA sense strand
cacagaugaugaccgcuau

SEQ ID NO: 1705948 - RNA, 19 nt, Homo sapiens
  misc_RNA (1)...(19): siRNA sense strand
gcagcagagauaauggaaa

SEQ ID NO: 1705949 - RNA, 19 nt, Homo sapiens
  misc_RNA (1)...(19): siRNA sense strand
cugggaggcuuagcugaaa

SEQ ID NO: 1705950 - RNA, 19 nt, Homo sapiens
  misc_RNA (1)...(19): siRNA sense strand
aaaugagguugucacagau

SEQ ID NO: 1705951 - RNA, 19 nt, Homo sapiens
  misc_RNA (1)...(19): siRNA sense strand
caaauacaggcccaucaca

SEQ ID NO: 1705952 - RNA, 19 nt, Homo sapiens
  misc_RNA (1)...(19): siRNA sense strand
caacaaucacagcauccaa

SEQ ID NO: 1705953 - RNA, 19 nt, Homo sapiens
  misc_RNA (1)...(19): siRNA sense strand
aggcuuagcugaaaacuuc

SEQ ID NO: 1705954 - RNA, 19 nt, Homo sapiens
  misc_RNA (1)...(19): siRNA sense strand
cuucagcccauggacauua

SEQ ID NO: 1705955 - RNA, 19 nt, Homo sapiens
  misc_RNA (1)...(19): siRNA sense strand
acgccacgaugcagagaaa

SEQ ID NO: 1705956 - RNA, 19 nt, Homo sapiens
  misc_RNA (1)...(19): siRNA sense strand
gcaguacgugggucccuau

SEQ ID NO: 1705957 - RNA, 19 nt, Homo sapiens
  misc_RNA (1)...(19): siRNA sense strand
cuguuugccugucucauug

SEQ ID NO: 1705958 - RNA, 19 nt, Homo sapiens
  misc_RNA (1)...(19): siRNA sense strand
acaagcauccugacaacau

SEQ ID NO: 1705959 - RNA, 19 nt, Homo sapiens
  misc_RNA (1)...(19): siRNA sense strand
gagagggaaagaacuccuu

SEQ ID NO: 1705960 - RNA, 19 nt, Homo sapiens
  misc_RNA (1)...(19): siRNA sense strand
agagauaauggaaacauca

SEQ ID NO: 1705961 - RNA, 19 nt, Homo sapiens
  misc_RNA (1)...(19): siRNA sense strand
gacagcaucacuggcauga

SEQ ID NO: 1705962 - RNA, 19 nt, Homo sapiens
  misc_RNA (1)...(19): siRNA sense strand
ccuguuugccugucucauu

SEQ ID NO: 1705963 - RNA, 19 nt, Homo sapiens
  misc_RNA (1)...(19): siRNA sense strand
ucacaggagcuugcaacaa

SEQ ID NO: 1705964 - RNA, 19 nt, Homo sapiens
  misc_RNA (1)...(19): siRNA sense strand
ugcccgagcagcagagaua

SEQ ID NO: 1705965 - RNA, 19 nt, Homo sapiens
  misc_RNA (1)...(19): siRNA sense strand
acugccagaugacuuguga

SEQ ID NO: 1705966 - RNA, 19 nt, Homo sapiens
  misc_RNA (1)...(19): siRNA sense strand
auggaaacaucaauacaag

SEQ ID NO: 1705967 - RNA, 19 nt, Homo sapiens
  misc_RNA (1)...(19): siRNA sense strand
auacaucgaccacgacauc

SEQ ID NO: 1705968 - RNA, 19 nt, Homo sapiens
  misc_RNA (1)...(19): siRNA sense strand
acaugucauucaaguuuca

SEQ ID NO: 1705969 - RNA, 19 nt, Homo sapiens
  misc_RNA (1)...(19): siRNA sense strand
cggaugcuuuaucagaaga

SEQ ID NO: 1705970 - RNA, 19 nt, Homo sapiens
  misc_RNA (1)...(19): siRNA sense strand
gagguugucacagaugaug

SEQ ID NO: 1705971 - RNA, 19 nt, Homo sapiens
  misc_RNA (1)...(19): siRNA sense strand
gcaaauuccccgaagacuu

SEQ ID NO: 1705972 - RNA, 19 nt, Homo sapiens
  misc_RNA (1)...(19): siRNA sense strand
gaugacuugugagaaccaa

SEQ ID NO: 1705973 - RNA, 19 nt, Homo sapiens
  misc_RNA (1)...(19): siRNA sense strand
gagccaacaagcggaguga

SEQ ID NO: 1705974 - RNA, 19 nt, Homo sapiens
  misc_RNA (1)...(19): siRNA sense strand
ccaggaaggaugggauuuc

SEQ ID NO: 1705975 - RNA, 19 nt, Homo sapiens
  misc_RNA (1)...(19): siRNA sense strand
cagaugaugaccgcuauuc

SEQ ID NO: 1705976 - RNA, 19 nt, Homo sapiens
  misc_RNA (1)...(19): siRNA sense strand
ccugaggagucucgugucu

SEQ ID NO: 1705977 - RNA, 19 nt, Homo sapiens
  misc_RNA (1)...(19): siRNA sense strand
uguacaagcauccugacaa

SEQ ID NO: 1705978 - RNA, 19 nt, Homo sapiens
  misc_RNA (1)...(19): siRNA sense strand
caaaugagguugucacaga

SEQ ID NO: 1705979 - RNA, 19 nt, Homo sapiens
  misc_RNA (1)...(19): siRNA sense strand
gcagagaaaccucaagaaa

SEQ ID NO: 1705980 - RNA, 19 nt, Homo sapiens
  misc_RNA (1)...(19): siRNA sense strand
guacgugggucccuaugaa

SEQ ID NO: 1705981 - RNA, 19 nt, Homo sapiens
  misc_RNA (1)...(19): siRNA sense strand
gagcaucauugcaaacaug

SEQ ID NO: 1705982 - RNA, 19 nt, Homo sapiens
  misc_RNA (1)...(19): siRNA sense strand
caagacaugucauucaagu

SEQ ID NO: 1705983 - RNA, 19 nt, Homo sapiens
  misc_RNA (1)...(19): siRNA sense strand
ggagagugcugggauggaa

SEQ ID NO: 1705984 - RNA, 19 nt, Homo sapiens
  misc_RNA (1)...(19): siRNA sense strand
caacggaugcuuuaucaga

SEQ ID NO: 1705985 - RNA, 19 nt, Homo sapiens
  misc_RNA (1)...(19): siRNA sense strand
agacaugucauucaaguuu

SEQ ID NO: 1705986 - RNA, 19 nt, Homo sapiens
  misc_RNA (1)...(19): siRNA sense strand
acacuugccuggcgaacaa

SEQ ID NO: 1705987 - RNA, 19 nt, Homo sapiens
  misc_RNA (1)...(19): siRNA sense strand
guacaagcauccugacaac

SEQ ID NO: 1705988 - RNA, 19 nt, Homo sapiens
  misc_RNA (1)...(19): siRNA sense strand
ccacagagcaccagcaaag

SEQ ID NO: 1705989 - RNA, 19 nt, Homo sapiens
  misc_RNA (1)...(19): siRNA sense strand
ccagaugacuugugagaac

SEQ ID NO: 1705990 - RNA, 19 nt, Homo sapiens
  misc_RNA (1)...(19): siRNA sense strand
cagcagagauaauggaaac

SEQ ID NO: 1705991 - RNA, 19 nt, Homo sapiens
  misc_RNA (1)...(19): siRNA sense strand
ggcgugagcuggagaagca

SEQ ID NO: 1705992 - RNA, 19 nt, Homo sapiens
  misc_RNA (1)...(19): siRNA sense strand
cacaggagcuugcaacaac

SEQ ID NO: 1705993 - RNA, 19 nt, Homo sapiens
  misc_RNA (1)...(19): siRNA sense strand
ggagaacagccacgucuuc

SEQ ID NO: 1705994 - RNA, 19 nt, Homo sapiens
  misc_RNA (1)...(19): siRNA sense strand
gagcguggccgacaagauc

SEQ ID NO: 1705995 - RNA, 19 nt, Homo sapiens
  misc_RNA (1)...(19): siRNA sense strand
cagcaucacuggcaugaac

SEQ ID NO: 1705996 - RNA, 19 nt, Homo sapiens
  misc_RNA (1)...(19): siRNA sense strand
gcacggguaugagcuccaa

SEQ ID NO: 1705997 - RNA, 19 nt, Homo sapiens
  misc_RNA (1)...(19): siRNA sense strand
gguuauggccugcacagaa

SEQ ID NO: 1705998 - RNA, 19 nt, Homo sapiens
  misc_RNA (1)...(19): siRNA sense strand
caaauuccccgaagacuuu

SEQ ID NO: 1705999 - RNA, 19 nt, Homo sapiens
  misc_RNA (1)...(19): siRNA sense strand
gggaaagccugaggagucu

SEQ ID NO: 1706000 - RNA, 19 nt, Homo sapiens
  misc_RNA (1)...(19): siRNA sense strand
guuauggccugcacagaag

SEQ ID NO: 1706001 - RNA, 19 nt, Homo sapiens
  misc_RNA (1)...(19): siRNA sense strand
ccugaaaacucaacaauca

SEQ ID NO: 1706002 - RNA, 19 nt, Homo sapiens
  misc_RNA (1)...(19): siRNA sense strand
ccaacaagcggagugauug

SEQ ID NO: 1706003 - RNA, 19 nt, Homo sapiens
  misc_RNA (1)...(19): siRNA sense strand
ggacacugcagaacagcuu

SEQ ID NO: 1706004 - RNA, 19 nt, Homo sapiens
  misc_RNA (1)...(19): siRNA sense strand
ccagagagcguggagaaug

SEQ ID NO: 1706005 - RNA, 19 nt, Homo sapiens
  misc_RNA (1)...(19): siRNA sense strand
gaugaugaccgcuauucug

SEQ ID NO: 1706006 - RNA, 19 nt, Homo sapiens
  misc_RNA (1)...(19): siRNA sense strand
gacaugucauucaaguuuc

SEQ ID NO: 1706007 - RNA, 19 nt, Homo sapiens
  misc_RNA (1)...(19): siRNA sense strand
caagcauccugacaacauc

SEQ ID NO: 1706008 - RNA, 19 nt, Homo sapiens
  misc_RNA (1)...(19): siRNA sense strand
ccgacaagauccuggacuu

SEQ ID NO: 1706009 - RNA, 19 nt, Homo sapiens
  misc_RNA (1)...(19): siRNA sense strand
cagagagcguggagaaugg

SEQ ID NO: 1706010 - RNA, 19 nt, Homo sapiens
  misc_RNA (1)...(19): siRNA sense strand
ugaggagucucgugucucu

SEQ ID NO: 1706011 - RNA, 19 nt, Homo sapiens
  misc_RNA (1)...(19): siRNA sense strand
agagaaaccucaagaaaag

SEQ ID NO: 1706012 - RNA, 19 nt, Homo sapiens
  misc_RNA (1)...(19): siRNA sense strand
gggacuuugugcacuguga

SEQ ID NO: 1706013 - RNA, 19 nt, Homo sapiens
  misc_RNA (1)...(19): siRNA sense strand
uccaacggaugcuuuauca

SEQ ID NO: 1706014 - RNA, 19 nt, Homo sapiens
  misc_RNA (1)...(19): siRNA sense strand
gagauaauggaaacaucaa

SEQ ID NO: 1706015 - RNA, 19 nt, Homo sapiens
  misc_RNA (1)...(19): siRNA sense strand
gccaacaagcggagugauu

SEQ ID NO: 1706016 - RNA, 19 nt, Homo sapiens
  misc_RNA (1)...(19): siRNA sense strand
ugucucgggucaucuguga

SEQ ID NO: 1706017 - RNA, 19 nt, Homo sapiens
  misc_RNA (1)...(19): siRNA sense strand
gagaacagccacgucuuca

SEQ ID NO: 1706018 - RNA, 19 nt, Homo sapiens
  misc_RNA (1)...(19): siRNA sense strand
gagcagcagagauaaugga

SEQ ID NO: 1706019 - RNA, 19 nt, Homo sapiens
  misc_RNA (1)...(19): siRNA sense strand
gcagagauaauggaaacau

SEQ ID NO: 1706020 - RNA, 19 nt, Homo sapiens
  misc_RNA (1)...(19): siRNA sense strand
gagcuugcaacaacagaga

SEQ ID NO: 1706021 - RNA, 19 nt, Homo sapiens
  misc_RNA (1)...(19): siRNA sense strand
caaaaugcccaaacacuug

SEQ ID NO: 1706022 - RNA, 19 nt, Homo sapiens
  misc_RNA (1)...(19): siRNA sense strand
aaagaaaagucaaccugaa

SEQ ID NO: 1706023 - RNA, 19 nt, Homo sapiens
  misc_RNA (1)...(19): siRNA sense strand
cagagauaauggaaacauc

SEQ ID NO: 1706024 - RNA, 19 nt, Homo sapiens
  misc_RNA (1)...(19): siRNA sense strand
aaguguggcuucccagaga

SEQ ID NO: 1706025 - RNA, 19 nt, Homo sapiens
  misc_RNA (1)...(19): siRNA sense strand
gcugggaggcuuagcugaa

SEQ ID NO: 1706026 - RNA, 19 nt, Homo sapiens
  misc_RNA (1)...(19): siRNA sense strand
uacaagcgaugaaaagaaa

SEQ ID NO: 1706027 - RNA, 19 nt, Homo sapiens
  misc_RNA (1)...(19): siRNA sense strand
cagagaaaccucaagaaaa

SEQ ID NO: 1706028 - RNA, 19 nt, Homo sapiens
  misc_RNA (1)...(19): siRNA sense strand
ccgaggccuuccagcagua

SEQ ID NO: 1706029 - RNA, 19 nt, Homo sapiens
  misc_RNA (1)...(19): siRNA sense strand
caaacuuccugagccaaca

SEQ ID NO: 1706030 - RNA, 19 nt, Homo sapiens
  misc_RNA (1)...(19): siRNA sense strand
aacggaugcuuuaucagaa

SEQ ID NO: 1706031 - RNA, 19 nt, Homo sapiens
  misc_RNA (1)...(19): siRNA sense strand
ggcgcgugcugguguauuc

SEQ ID NO: 1706032 - RNA, 19 nt, Homo sapiens
  misc_RNA (1)...(19): siRNA sense strand
cuggaggccuggagggaaa

SEQ ID NO: 1706033 - RNA, 19 nt, Homo sapiens
  misc_RNA (1)...(19): siRNA sense strand
cacagaugaugaccgcuau

SEQ ID NO: 1706034 - RNA, 19 nt, Homo sapiens
  misc_RNA (1)...(19): siRNA sense strand
gcagcagagauaauggaaa

SEQ ID NO: 1706035 - RNA, 19 nt, Homo sapiens
  misc_RNA (1)...(19): siRNA sense strand
cugggaggcuuagcugaaa

SEQ ID NO: 1706036 - RNA, 19 nt, Homo sapiens
  misc_RNA (1)...(19): siRNA sense strand
aaaugagguugucacagau

SEQ ID NO: 1706037 - RNA, 19 nt, Homo sapiens
  misc_RNA (1)...(19): siRNA sense strand
caaauacaggcccaucaca

SEQ ID NO: 1706038 - RNA, 19 nt, Homo sapiens
  misc_RNA (1)...(19): siRNA sense strand
caacaaucacagcauccaa

SEQ ID NO: 1706039 - RNA, 19 nt, Homo sapiens
  misc_RNA (1)...(19): siRNA sense strand
aggcuuagcugaaaacuuc

SEQ ID NO: 1706040 - RNA, 19 nt, Homo sapiens
  misc_RNA (1)...(19): siRNA sense strand
cuucagcccauggacauua

SEQ ID NO: 1706041 - RNA, 19 nt, Homo sapiens
  misc_RNA (1)...(19): siRNA sense strand
acgccacgaugcagagaaa

SEQ ID NO: 1706042 - RNA, 19 nt, Homo sapiens
  misc_RNA (1)...(19): siRNA sense strand
gcaguacgugggucccuau

SEQ ID NO: 1706043 - RNA, 19 nt, Homo sapiens
  misc_RNA (1)...(19): siRNA sense strand
guacgacucuuuuccaaac

SEQ ID NO: 1706044 - RNA, 19 nt, Homo sapiens
  misc_RNA (1)...(19): siRNA sense strand
cuguuugccugucucauug

SEQ ID NO: 1706045 - RNA, 19 nt, Homo sapiens
  misc_RNA (1)...(19): siRNA sense strand
acaagcauccugacaacau

SEQ ID NO: 1706046 - RNA, 19 nt, Homo sapiens
  misc_RNA (1)...(19): siRNA sense strand
gagagggaaagaacuccuu

SEQ ID NO: 1706047 - RNA, 19 nt, Homo sapiens
  misc_RNA (1)...(19): siRNA sense strand
agagauaauggaaacauca

SEQ ID NO: 1706048 - RNA, 19 nt, Homo sapiens
  misc_RNA (1)...(19): siRNA sense strand
cugcagaacagcuucaugu

SEQ ID NO: 1706049 - RNA, 19 nt, Homo sapiens
  misc_RNA (1)...(19): siRNA sense strand
gacagcaucacuggcauga

SEQ ID NO: 1706050 - RNA, 19 nt, Homo sapiens
  misc_RNA (1)...(19): siRNA sense strand
ccuguuugccugucucauu

SEQ ID NO: 1706051 - RNA, 19 nt, Homo sapiens
  misc_RNA (1)...(19): siRNA sense strand
ucacaggagcuugcaacaa

SEQ ID NO: 1706052 - RNA, 19 nt, Homo sapiens
  misc_RNA (1)...(19): siRNA sense strand
ugcccgagcagcagagaua

SEQ ID NO: 1706053 - RNA, 19 nt, Homo sapiens
  misc_RNA (1)...(19): siRNA sense strand
acugccagaugacuuguga

SEQ ID NO: 1706054 - RNA, 19 nt, Homo sapiens
  misc_RNA (1)...(19): siRNA sense strand
auggaaacaucaauacaag

SEQ ID NO: 1706055 - RNA, 19 nt, Homo sapiens
  misc_RNA (1)...(19): siRNA sense strand
auacaucgaccacgacauc

SEQ ID NO: 1706056 - RNA, 19 nt, Homo sapiens
  misc_RNA (1)...(19): siRNA sense strand
acaugucauucaaguuuca

SEQ ID NO: 1706057 - RNA, 19 nt, Homo sapiens
  misc_RNA (1)...(19): siRNA sense strand
cggaugcuuuaucagaaga

SEQ ID NO: 1706058 - RNA, 19 nt, Homo sapiens
  misc_RNA (1)...(19): siRNA sense strand
gagguugucacagaugaug

SEQ ID NO: 1706059 - RNA, 19 nt, Homo sapiens
  misc_RNA (1)...(19): siRNA sense strand
gcaaauuccccgaagacuu

SEQ ID NO: 1706060 - RNA, 19 nt, Homo sapiens
  misc_RNA (1)...(19): siRNA sense strand
gaugacuugugagaaccaa

SEQ ID NO: 1706061 - RNA, 19 nt, Homo sapiens
  misc_RNA (1)...(19): siRNA sense strand
gagccaacaagcggaguga

SEQ ID NO: 1706062 - RNA, 19 nt, Homo sapiens
  misc_RNA (1)...(19): siRNA sense strand
ccaggaaggaugggauuuc

SEQ ID NO: 1706063 - RNA, 19 nt, Homo sapiens
  misc_RNA (1)...(19): siRNA sense strand
cagaugaugaccgcuauuc

SEQ ID NO: 1706064 - RNA, 19 nt, Homo sapiens
  misc_RNA (1)...(19): siRNA sense strand
ccugaggagucucgugucu

SEQ ID NO: 1706065 - RNA, 19 nt, Homo sapiens
  misc_RNA (1)...(19): siRNA sense strand
uguacaagcauccugacaa

SEQ ID NO: 1706066 - RNA, 19 nt, Homo sapiens
  misc_RNA (1)...(19): siRNA sense strand
caaaugagguugucacaga

SEQ ID NO: 1706067 - RNA, 19 nt, Homo sapiens
  misc_RNA (1)...(19): siRNA sense strand
gcagagaaaccucaagaaa

SEQ ID NO: 1706068 - RNA, 19 nt, Homo sapiens
  misc_RNA (1)...(19): siRNA sense strand
guacgugggucccuaugaa

SEQ ID NO: 1706069 - RNA, 19 nt, Homo sapiens
  misc_RNA (1)...(19): siRNA sense strand
gagcaucauugcaaacaug

SEQ ID NO: 1706070 - RNA, 19 nt, Homo sapiens
  misc_RNA (1)...(19): siRNA sense strand
caagacaugucauucaagu

SEQ ID NO: 1706071 - RNA, 19 nt, Homo sapiens
  misc_RNA (1)...(19): siRNA sense strand
ggagagugcugggauggaa

SEQ ID NO: 1706072 - RNA, 19 nt, Homo sapiens
  misc_RNA (1)...(19): siRNA sense strand
caacggaugcuuuaucaga

SEQ ID NO: 1706073 - RNA, 19 nt, Homo sapiens
  misc_RNA (1)...(19): siRNA sense strand
agacaugucauucaaguuu

SEQ ID NO: 1706074 - RNA, 19 nt, Homo sapiens
  misc_RNA (1)...(19): siRNA sense strand
acacuugccuggcgaacaa

SEQ ID NO: 1706075 - RNA, 19 nt, Homo sapiens
  misc_RNA (1)...(19): siRNA sense strand
guacaagcauccugacaac

SEQ ID NO: 1706076 - RNA, 19 nt, Homo sapiens
  misc_RNA (1)...(19): siRNA sense strand
ccacagagcaccagcaaag

SEQ ID NO: 1706077 - RNA, 19 nt, Homo sapiens
  misc_RNA (1)...(19): siRNA sense strand
ccagaugacuugugagaac

SEQ ID NO: 1706078 - RNA, 19 nt, Homo sapiens
  misc_RNA (1)...(19): siRNA sense strand
cagcagagauaauggaaac

SEQ ID NO: 1706079 - RNA, 19 nt, Homo sapiens
  misc_RNA (1)...(19): siRNA sense strand
ggcgugagcuggagaagca

SEQ ID NO: 1706080 - RNA, 19 nt, Homo sapiens
  misc_RNA (1)...(19): siRNA sense strand
cacaggagcuugcaacaac

SEQ ID NO: 1706081 - RNA, 19 nt, Homo sapiens
  misc_RNA (1)...(19): siRNA sense strand
ggagaacagccacgucuuc

SEQ ID NO: 1706082 - RNA, 19 nt, Homo sapiens
  misc_RNA (1)...(19): siRNA sense strand
gagcguggccgacaagauc

SEQ ID NO: 1706083 - RNA, 19 nt, Homo sapiens
  misc_RNA (1)...(19): siRNA sense strand
cagcaucacuggcaugaac

SEQ ID NO: 1706084 - RNA, 19 nt, Homo sapiens
  misc_RNA (1)...(19): siRNA sense strand
gcacggguaugagcuccaa

SEQ ID NO: 1706085 - RNA, 19 nt, Homo sapiens
  misc_RNA (1)...(19): siRNA sense strand
gguuauggccugcacagaa

SEQ ID NO: 1706086 - RNA, 19 nt, Homo sapiens
  misc_RNA (1)...(19): siRNA sense strand
caaauuccccgaagacuuu

SEQ ID NO: 1706087 - RNA, 19 nt, Homo sapiens
  misc_RNA (1)...(19): siRNA sense strand
gggaaagccugaggagucu

SEQ ID NO: 1706088 - RNA, 19 nt, Homo sapiens
  misc_RNA (1)...(19): siRNA sense strand
guuauggccugcacagaag

SEQ ID NO: 1706089 - RNA, 19 nt, Homo sapiens
  misc_RNA (1)...(19): siRNA sense strand
ccugaaaacucaacaauca

SEQ ID NO: 1706090 - RNA, 19 nt, Homo sapiens
  misc_RNA (1)...(19): siRNA sense strand
ccaacaagcggagugauug

SEQ ID NO: 1706091 - RNA, 19 nt, Homo sapiens
  misc_RNA (1)...(19): siRNA sense strand
ccagagagcguggagaaug

SEQ ID NO: 1706092 - RNA, 19 nt, Homo sapiens
  misc_RNA (1)...(19): siRNA sense strand
gaugaugaccgcuauucug

SEQ ID NO: 1706093 - RNA, 19 nt, Homo sapiens
  misc_RNA (1)...(19): siRNA sense strand
gacaugucauucaaguuuc

SEQ ID NO: 1706094 - RNA, 19 nt, Homo sapiens
  misc_RNA (1)...(19): siRNA sense strand
caagcauccugacaacauc

SEQ ID NO: 1706095 - RNA, 19 nt, Homo sapiens
  misc_RNA (1)...(19): siRNA sense strand
ugaggagucucgugucucu

SEQ ID NO: 1706096 - RNA, 19 nt, Homo sapiens
  misc_RNA (1)...(19): siRNA sense strand
cagagagcguggagaaugg

SEQ ID NO: 1706097 - RNA, 19 nt, Homo sapiens
  misc_RNA (1)...(19): siRNA sense strand
ccgacaagauccuggacuu

SEQ ID NO: 1706098 - RNA, 19 nt, Homo sapiens
  misc_RNA (1)...(19): siRNA sense strand
agagaaaccucaagaaaag

SEQ ID NO: 1706099 - RNA, 19 nt, Homo sapiens
  misc_RNA (1)...(19): siRNA sense strand
gggacuuugugcacuguga

SEQ ID NO: 1706100 - RNA, 19 nt, Homo sapiens
  misc_RNA (1)...(19): siRNA sense strand
uccaacggaugcuuuauca

SEQ ID NO: 1706101 - RNA, 19 nt, Homo sapiens
  misc_RNA (1)...(19): siRNA sense strand
gagauaauggaaacaucaa

SEQ ID NO: 1706102 - RNA, 19 nt, Homo sapiens
  misc_RNA (1)...(19): siRNA sense strand
gccaacaagcggagugauu

SEQ ID NO: 1706103 - RNA, 19 nt, Homo sapiens
  misc_RNA (1)...(19): siRNA sense strand
ugucucgggucaucuguga

SEQ ID NO: 1706104 - RNA, 19 nt, Homo sapiens
  misc_RNA (1)...(19): siRNA sense strand
gagaacagccacgucuuca

SEQ ID NO: 1706105 - RNA, 19 nt, Homo sapiens
  misc_RNA (1)...(19): siRNA sense strand
gagcagcagagauaaugga

SEQ ID NO: 1706106 - RNA, 19 nt, Homo sapiens
  misc_RNA (1)...(19): siRNA sense strand
gcagagauaauggaaacau

SEQ ID NO: 1706107 - RNA, 19 nt, Homo sapiens
  misc_RNA (1)...(19): siRNA sense strand
gagcuugcaacaacagaga

SEQ ID NO: 1706108 - RNA, 19 nt, Homo sapiens
  misc_RNA (1)...(19): siRNA sense strand
caaaaugcccaaacacuug

SEQ ID NO: 1706109 - RNA, 19 nt, Homo sapiens
  misc_RNA (1)...(19): siRNA sense strand
aaagaaaagucaaccugaa

SEQ ID NO: 1706110 - RNA, 19 nt, Homo sapiens
  misc_RNA (1)...(19): siRNA sense strand
cagagauaauggaaacauc

SEQ ID NO: 1706111 - RNA, 19 nt, Homo sapiens
  misc_RNA (1)...(19): siRNA sense strand
aaguguggcuucccagaga

SEQ ID NO: 1706112 - RNA, 19 nt, Homo sapiens
  misc_RNA (1)...(19): siRNA sense strand
gcugggaggcuuagcugaa

SEQ ID NO: 1706113 - RNA, 19 nt, Homo sapiens
  misc_RNA (1)...(19): siRNA sense strand
uacaagcgaugaaaagaaa

SEQ ID NO: 1706114 - RNA, 19 nt, Homo sapiens
  misc_RNA (1)...(19): siRNA sense strand
cagagaaaccucaagaaaa

SEQ ID NO: 1706115 - RNA, 19 nt, Homo sapiens
  misc_RNA (1)...(19): siRNA sense strand
ccgaggccuuccagcagua

SEQ ID NO: 1706116 - RNA, 19 nt, Homo sapiens
  misc_RNA (1)...(19): siRNA sense strand
caaacuuccugagccaaca

SEQ ID NO: 1706117 - RNA, 19 nt, Homo sapiens
  misc_RNA (1)...(19): siRNA sense strand
aacggaugcuuuaucagaa

SEQ ID NO: 1706118 - RNA, 19 nt, Homo sapiens
  misc_RNA (1)...(19): siRNA sense strand
ggcgcgugcugguguauuc

SEQ ID NO: 1706119 - RNA, 19 nt, Homo sapiens
  misc_RNA (1)...(19): siRNA sense strand
cuggaggccuggagggaaa

SEQ ID NO: 1706120 - RNA, 19 nt, Homo sapiens
  misc_RNA (1)...(19): siRNA sense strand
cacagaugaugaccgcuau

SEQ ID NO: 1706121 - RNA, 19 nt, Homo sapiens
  misc_RNA (1)...(19): siRNA sense strand
gcagcagagauaauggaaa

SEQ ID NO: 1706122 - RNA, 19 nt, Homo sapiens
  misc_RNA (1)...(19): siRNA sense strand
cugggaggcuuagcugaaa

SEQ ID NO: 1706123 - RNA, 19 nt, Homo sapiens
  misc_RNA (1)...(19): siRNA sense strand
aaaugagguugucacagau

SEQ ID NO: 1706124 - RNA, 19 nt, Homo sapiens
  misc_RNA (1)...(19): siRNA sense strand
caaauacaggcccaucaca

SEQ ID NO: 1706125 - RNA, 19 nt, Homo sapiens
  misc_RNA (1)...(19): siRNA sense strand
caacaaucacagcauccaa

SEQ ID NO: 1706126 - RNA, 19 nt, Homo sapiens
  misc_RNA (1)...(19): siRNA sense strand
aggcuuagcugaaaacuuc

SEQ ID NO: 1706127 - RNA, 19 nt, Homo sapiens
  misc_RNA (1)...(19): siRNA sense strand
cuucagcccauggacauua

SEQ ID NO: 1706128 - RNA, 19 nt, Homo sapiens
  misc_RNA (1)...(19): siRNA sense strand
acgccacgaugcagagaaa

SEQ ID NO: 1706129 - RNA, 19 nt, Homo sapiens
  misc_RNA (1)...(19): siRNA sense strand
gcaguacgugggucccuau

SEQ ID NO: 1706130 - RNA, 19 nt, Homo sapiens
  misc_RNA (1)...(19): siRNA sense strand
cuguuugccugucucauug

SEQ ID NO: 1706131 - RNA, 19 nt, Homo sapiens
  misc_RNA (1)...(19): siRNA sense strand
acaagcauccugacaacau

SEQ ID NO: 1706132 - RNA, 19 nt, Homo sapiens
  misc_RNA (1)...(19): siRNA sense strand
gagagggaaagaacuccuu

SEQ ID NO: 1706133 - RNA, 19 nt, Homo sapiens
  misc_RNA (1)...(19): siRNA sense strand
agagauaauggaaacauca

SEQ ID NO: 1706134 - RNA, 19 nt, Homo sapiens
  misc_RNA (1)...(19): siRNA sense strand
gacagcaucacuggcauga

SEQ ID NO: 1706135 - RNA, 19 nt, Homo sapiens
  misc_RNA (1)...(19): siRNA sense strand
ccuguuugccugucucauu

SEQ ID NO: 1706136 - RNA, 19 nt, Homo sapiens
  misc_RNA (1)...(19): siRNA sense strand
ucacaggagcuugcaacaa

SEQ ID NO: 1706137 - RNA, 19 nt, Homo sapiens
  misc_RNA (1)...(19): siRNA sense strand
ugcccgagcagcagagaua

SEQ ID NO: 1706138 - RNA, 19 nt, Homo sapiens
  misc_RNA (1)...(19): siRNA sense strand
acugccagaugacuuguga

SEQ ID NO: 1706139 - RNA, 19 nt, Homo sapiens
  misc_RNA (1)...(19): siRNA sense strand
auggaaacaucaauacaag

SEQ ID NO: 1706140 - RNA, 19 nt, Homo sapiens
  misc_RNA (1)...(19): siRNA sense strand
auacaucgaccacgacauc

SEQ ID NO: 1706141 - RNA, 19 nt, Homo sapiens
  misc_RNA (1)...(19): siRNA sense strand
acaugucauucaaguuuca

SEQ ID NO: 1706142 - RNA, 19 nt, Homo sapiens
  misc_RNA (1)...(19): siRNA sense strand
cggaugcuuuaucagaaga

SEQ ID NO: 1706143 - RNA, 19 nt, Homo sapiens
  misc_RNA (1)...(19): siRNA sense strand
gagguugucacagaugaug

SEQ ID NO: 1706144 - RNA, 19 nt, Homo sapiens
  misc_RNA (1)...(19): siRNA sense strand
gcaaauuccccgaagacuu

SEQ ID NO: 1706145 - RNA, 19 nt, Homo sapiens
  misc_RNA (1)...(19): siRNA sense strand
gaugacuugugagaaccaa

SEQ ID NO: 1706146 - RNA, 19 nt, Homo sapiens
  misc_RNA (1)...(19): siRNA sense strand
gagccaacaagcggaguga

SEQ ID NO: 1706147 - RNA, 19 nt, Homo sapiens
  misc_RNA (1)...(19): siRNA sense strand
ccaggaaggaugggauuuc

SEQ ID NO: 1706148 - RNA, 19 nt, Homo sapiens
  misc_RNA (1)...(19): siRNA sense strand
cagaugaugaccgcuauuc

SEQ ID NO: 1706149 - RNA, 19 nt, Homo sapiens
  misc_RNA (1)...(19): siRNA sense strand
ccugaggagucucgugucu

SEQ ID NO: 1706150 - RNA, 19 nt, Homo sapiens
  misc_RNA (1)...(19): siRNA sense strand
uguacaagcauccugacaa

SEQ ID NO: 1706151 - RNA, 19 nt, Homo sapiens
  misc_RNA (1)...(19): siRNA sense strand
caaaugagguugucacaga

SEQ ID NO: 1706152 - RNA, 19 nt, Homo sapiens
  misc_RNA (1)...(19): siRNA sense strand
gcagagaaaccucaagaaa

SEQ ID NO: 1706153 - RNA, 19 nt, Homo sapiens
  misc_RNA (1)...(19): siRNA sense strand
guacgugggucccuaugaa

SEQ ID NO: 1706154 - RNA, 19 nt, Homo sapiens
  misc_RNA (1)...(19): siRNA sense strand
gagcaucauugcaaacaug

SEQ ID NO: 1706155 - RNA, 19 nt, Homo sapiens
  misc_RNA (1)...(19): siRNA sense strand
caagacaugucauucaagu

SEQ ID NO: 1706156 - RNA, 19 nt, Homo sapiens
  misc_RNA (1)...(19): siRNA sense strand
ggagagugcugggauggaa

SEQ ID NO: 1706157 - RNA, 19 nt, Homo sapiens
  misc_RNA (1)...(19): siRNA sense strand
caacggaugcuuuaucaga

SEQ ID NO: 1706158 - RNA, 19 nt, Homo sapiens
  misc_RNA (1)...(19): siRNA sense strand
agacaugucauucaaguuu

SEQ ID NO: 1706159 - RNA, 19 nt, Homo sapiens
  misc_RNA (1)...(19): siRNA sense strand
acacuugccuggcgaacaa

SEQ ID NO: 1706160 - RNA, 19 nt, Homo sapiens
  misc_RNA (1)...(19): siRNA sense strand
guacaagcauccugacaac

SEQ ID NO: 1706161 - RNA, 19 nt, Homo sapiens
  misc_RNA (1)...(19): siRNA sense strand
ccacagagcaccagcaaag

SEQ ID NO: 1706162 - RNA, 19 nt, Homo sapiens
  misc_RNA (1)...(19): siRNA sense strand
ccagaugacuugugagaac

SEQ ID NO: 1706163 - RNA, 19 nt, Homo sapiens
  misc_RNA (1)...(19): siRNA sense strand
cagcagagauaauggaaac

SEQ ID NO: 1706164 - RNA, 19 nt, Homo sapiens
  misc_RNA (1)...(19): siRNA sense strand
ggcgugagcuggagaagca

SEQ ID NO: 1706165 - RNA, 19 nt, Homo sapiens
  misc_RNA (1)...(19): siRNA sense strand
cacaggagcuugcaacaac

SEQ ID NO: 1706166 - RNA, 19 nt, Homo sapiens
  misc_RNA (1)...(19): siRNA sense strand
ggagaacagccacgucuuc

SEQ ID NO: 1706167 - RNA, 19 nt, Homo sapiens
  misc_RNA (1)...(19): siRNA sense strand
gagcguggccgacaagauc

SEQ ID NO: 1706168 - RNA, 19 nt, Homo sapiens
  misc_RNA (1)...(19): siRNA sense strand
cagcaucacuggcaugaac

SEQ ID NO: 1706169 - RNA, 19 nt, Homo sapiens
  misc_RNA (1)...(19): siRNA sense strand
gcacggguaugagcuccaa

SEQ ID NO: 1706170 - RNA, 19 nt, Homo sapiens
  misc_RNA (1)...(19): siRNA sense strand
gguuauggccugcacagaa

SEQ ID NO: 1706171 - RNA, 19 nt, Homo sapiens
  misc_RNA (1)...(19): siRNA sense strand
caaauuccccgaagacuuu

SEQ ID NO: 1706172 - RNA, 19 nt, Homo sapiens
  misc_RNA (1)...(19): siRNA sense strand
gggaaagccugaggagucu

SEQ ID NO: 1706173 - RNA, 19 nt, Homo sapiens
  misc_RNA (1)...(19): siRNA sense strand
guuauggccugcacagaag

SEQ ID NO: 1706174 - RNA, 19 nt, Homo sapiens
  misc_RNA (1)...(19): siRNA sense strand
ccugaaaacucaacaauca

SEQ ID NO: 1706175 - RNA, 19 nt, Homo sapiens
  misc_RNA (1)...(19): siRNA sense strand
ccaacaagcggagugauug

SEQ ID NO: 1706176 - RNA, 19 nt, Homo sapiens
  misc_RNA (1)...(19): siRNA sense strand
ccagagagcguggagaaug

SEQ ID NO: 1706177 - RNA, 19 nt, Homo sapiens
  misc_RNA (1)...(19): siRNA sense strand
gaugaugaccgcuauucug

SEQ ID NO: 1706178 - RNA, 19 nt, Homo sapiens
  misc_RNA (1)...(19): siRNA sense strand
gacaugucauucaaguuuc

SEQ ID NO: 1706179 - RNA, 19 nt, Homo sapiens
  misc_RNA (1)...(19): siRNA sense strand
caagcauccugacaacauc

SEQ ID NO: 1706180 - RNA, 19 nt, Homo sapiens
  misc_RNA (1)...(19): siRNA sense strand
ugaggagucucgugucucu

SEQ ID NO: 1706181 - RNA, 19 nt, Homo sapiens
  misc_RNA (1)...(19): siRNA sense strand
cagagagcguggagaaugg

SEQ ID NO: 1706182 - RNA, 19 nt, Homo sapiens
  misc_RNA (1)...(19): siRNA sense strand
ccgacaagauccuggacuu

SEQ ID NO: 1706183 - RNA, 19 nt, Homo sapiens
  misc_RNA (1)...(19): siRNA sense strand
agagaaaccucaagaaaag

SEQ ID NO: 1706184 - RNA, 19 nt, Homo sapiens
  misc_RNA (1)...(19): siRNA sense strand
gggacuuugugcacuguga

SEQ ID NO: 1706185 - RNA, 19 nt, Homo sapiens
  misc_RNA (1)...(19): siRNA sense strand
uccaacggaugcuuuauca

SEQ ID NO: 1706186 - RNA, 19 nt, Homo sapiens
  misc_RNA (1)...(19): siRNA sense strand
gagauaauggaaacaucaa

SEQ ID NO: 1706187 - RNA, 19 nt, Homo sapiens
  misc_RNA (1)...(19): siRNA sense strand
gccaacaagcggagugauu

SEQ ID NO: 1706188 - RNA, 19 nt, Homo sapiens
  misc_RNA (1)...(19): siRNA sense strand
ugucucgggucaucuguga

SEQ ID NO: 1706189 - RNA, 19 nt, Homo sapiens
  misc_RNA (1)...(19): siRNA sense strand
gagaacagccacgucuuca

SEQ ID NO: 1706190 - RNA, 19 nt, Homo sapiens
  misc_RNA (1)...(19): siRNA sense strand
gagcagcagagauaaugga

SEQ ID NO: 1706191 - RNA, 19 nt, Homo sapiens
  misc_RNA (1)...(19): siRNA sense strand
gcagagauaauggaaacau

SEQ ID NO: 1706192 - RNA, 19 nt, Homo sapiens
  misc_RNA (1)...(19): siRNA sense strand
gagcuugcaacaacagaga

SEQ ID NO: 1706193 - RNA, 19 nt, Homo sapiens
  misc_RNA (1)...(19): siRNA sense strand
caaaaugcccaaacacuug

SEQ ID NO: 1706194 - RNA, 19 nt, Homo sapiens
  misc_RNA (1)...(19): siRNA sense strand
aaagaaaagucaaccugaa

SEQ ID NO: 1706195 - RNA, 19 nt, Homo sapiens
  misc_RNA (1)...(19): siRNA sense strand
cagagauaauggaaacauc

SEQ ID NO: 1706196 - RNA, 19 nt, Homo sapiens
  misc_RNA (1)...(19): siRNA sense strand
aaguguggcuucccagaga

SEQ ID NO: 1706197 - RNA, 19 nt, Homo sapiens
  misc_RNA (1)...(19): siRNA sense strand
gcugggaggcuuagcugaa

SEQ ID NO: 1706198 - RNA, 19 nt, Homo sapiens
  misc_RNA (1)...(19): siRNA sense strand
uacaagcgaugaaaagaaa

SEQ ID NO: 1706199 - RNA, 19 nt, Homo sapiens
  misc_RNA (1)...(19): siRNA sense strand
cagagaaaccucaagaaaa

SEQ ID NO: 1706200 - RNA, 19 nt, Homo sapiens
  misc_RNA (1)...(19): siRNA sense strand
ccgaggccuuccagcagua

SEQ ID NO: 1706201 - RNA, 19 nt, Homo sapiens
  misc_RNA (1)...(19): siRNA sense strand
caaacuuccugagccaaca

SEQ ID NO: 1706202 - RNA, 19 nt, Homo sapiens
  misc_RNA (1)...(19): siRNA sense strand
aacggaugcuuuaucagaa

SEQ ID NO: 1706203 - RNA, 19 nt, Homo sapiens
  misc_RNA (1)...(19): siRNA sense strand
ggcgcgugcugguguauuc

SEQ ID NO: 1706204 - RNA, 19 nt, Homo sapiens
  misc_RNA (1)...(19): siRNA sense strand
cuggaggccuggagggaaa

SEQ ID NO: 1706205 - RNA, 19 nt, Homo sapiens
  misc_RNA (1)...(19): siRNA sense strand
cacagaugaugaccgcuau

SEQ ID NO: 1706206 - RNA, 19 nt, Homo sapiens
  misc_RNA (1)...(19): siRNA sense strand
gcagcagagauaauggaaa

SEQ ID NO: 1706207 - RNA, 19 nt, Homo sapiens
  misc_RNA (1)...(19): siRNA sense strand
cugggaggcuuagcugaaa

SEQ ID NO: 1706208 - RNA, 19 nt, Homo sapiens
  misc_RNA (1)...(19): siRNA sense strand
aaaugagguugucacagau

SEQ ID NO: 1706209 - RNA, 19 nt, Homo sapiens
  misc_RNA (1)...(19): siRNA sense strand
caaauacaggcccaucaca

SEQ ID NO: 1706210 - RNA, 19 nt, Homo sapiens
  misc_RNA (1)...(19): siRNA sense strand
caacaaucacagcauccaa

SEQ ID NO: 1706211 - RNA, 19 nt, Homo sapiens
  misc_RNA (1)...(19): siRNA sense strand
aggcuuagcugaaaacuuc

SEQ ID NO: 1706212 - RNA, 19 nt, Homo sapiens
  misc_RNA (1)...(19): siRNA sense strand
cuucagcccauggacauua

SEQ ID NO: 1706213 - RNA, 19 nt, Homo sapiens
  misc_RNA (1)...(19): siRNA sense strand
acgccacgaugcagagaaa

SEQ ID NO: 1706214 - RNA, 19 nt, Homo sapiens
  misc_RNA (1)...(19): siRNA sense strand
gcaguacgugggucccuau

SEQ ID NO: 1706215 - RNA, 19 nt, Homo sapiens
  misc_RNA (1)...(19): siRNA sense strand
cuguuugccugucucauug

SEQ ID NO: 1706216 - RNA, 19 nt, Homo sapiens
  misc_RNA (1)...(19): siRNA sense strand
acaagcauccugacaacau

SEQ ID NO: 1706217 - RNA, 19 nt, Homo sapiens
  misc_RNA (1)...(19): siRNA sense strand
gagagggaaagaacuccuu

SEQ ID NO: 1706218 - RNA, 19 nt, Homo sapiens
  misc_RNA (1)...(19): siRNA sense strand
agagauaauggaaacauca

SEQ ID NO: 1706219 - RNA, 19 nt, Homo sapiens
  misc_RNA (1)...(19): siRNA sense strand
gacagcaucacuggcauga

SEQ ID NO: 1706220 - RNA, 19 nt, Homo sapiens
  misc_RNA (1)...(19): siRNA sense strand
ccuguuugccugucucauu

SEQ ID NO: 1706221 - RNA, 19 nt, Homo sapiens
  misc_RNA (1)...(19): siRNA sense strand
ucacaggagcuugcaacaa

SEQ ID NO: 1706222 - RNA, 19 nt, Homo sapiens
  misc_RNA (1)...(19): siRNA sense strand
ugcccgagcagcagagaua

SEQ ID NO: 1706223 - RNA, 19 nt, Homo sapiens
  misc_RNA (1)...(19): siRNA sense strand
acugccagaugacuuguga

SEQ ID NO: 1706224 - RNA, 19 nt, Homo sapiens
  misc_RNA (1)...(19): siRNA sense strand
auggaaacaucaauacaag

SEQ ID NO: 1706225 - RNA, 19 nt, Homo sapiens
  misc_RNA (1)...(19): siRNA sense strand
auacaucgaccacgacauc

SEQ ID NO: 1706226 - RNA, 19 nt, Homo sapiens
  misc_RNA (1)...(19): siRNA sense strand
acaugucauucaaguuuca

SEQ ID NO: 1706227 - RNA, 19 nt, Homo sapiens
  misc_RNA (1)...(19): siRNA sense strand
cggaugcuuuaucagaaga

SEQ ID NO: 1706228 - RNA, 19 nt, Homo sapiens
  misc_RNA (1)...(19): siRNA sense strand
gagguugucacagaugaug

SEQ ID NO: 1706229 - RNA, 19 nt, Homo sapiens
  misc_RNA (1)...(19): siRNA sense strand
gcaaauuccccgaagacuu

SEQ ID NO: 1706230 - RNA, 19 nt, Homo sapiens
  misc_RNA (1)...(19): siRNA sense strand
gaugacuugugagaaccaa

SEQ ID NO: 1706231 - RNA, 19 nt, Homo sapiens
  misc_RNA (1)...(19): siRNA sense strand
gagccaacaagcggaguga

SEQ ID NO: 1706232 - RNA, 19 nt, Homo sapiens
  misc_RNA (1)...(19): siRNA sense strand
ccaggaaggaugggauuuc

SEQ ID NO: 1706233 - RNA, 19 nt, Homo sapiens
  misc_RNA (1)...(19): siRNA sense strand
cagaugaugaccgcuauuc

SEQ ID NO: 1706234 - RNA, 19 nt, Homo sapiens
  misc_RNA (1)...(19): siRNA sense strand
ccugaggagucucgugucu

SEQ ID NO: 1706235 - RNA, 19 nt, Homo sapiens
  misc_RNA (1)...(19): siRNA sense strand
uguacaagcauccugacaa

SEQ ID NO: 1706236 - RNA, 19 nt, Homo sapiens
  misc_RNA (1)...(19): siRNA sense strand
gaaaguggcagcaagauua

SEQ ID NO: 1706237 - RNA, 19 nt, Homo sapiens
  misc_RNA (1)...(19): siRNA sense strand
gcaguuaucuauuucuuug

SEQ ID NO: 1706238 - RNA, 19 nt, Homo sapiens
  misc_RNA (1)...(19): siRNA sense strand
gggaagcuguucaaauuaa

SEQ ID NO: 1706239 - RNA, 19 nt, Homo sapiens
  misc_RNA (1)...(19): siRNA sense strand
gcagaaagacugacuaaau

SEQ ID NO: 1706240 - RNA, 19 nt, Homo sapiens
  misc_RNA (1)...(19): siRNA sense strand
acaaggcuaugaacaaaua

SEQ ID NO: 1706241 - RNA, 19 nt, Homo sapiens
  misc_RNA (1)...(19): siRNA sense strand
ucaaagaaguucaguggaa

SEQ ID NO: 1706242 - RNA, 19 nt, Homo sapiens
  misc_RNA (1)...(19): siRNA sense strand
cagaaagacugacuaaauc

SEQ ID NO: 1706243 - RNA, 19 nt, Homo sapiens
  misc_RNA (1)...(19): siRNA sense strand
aaagauaccugaagauuac

SEQ ID NO: 1706244 - RNA, 19 nt, Homo sapiens
  misc_RNA (1)...(19): siRNA sense strand
gaagugcccugacagagau

SEQ ID NO: 1706245 - RNA, 19 nt, Homo sapiens
  misc_RNA (1)...(19): siRNA sense strand
gcacuuagcccuugucuac

SEQ ID NO: 1706246 - RNA, 19 nt, Homo sapiens
  misc_RNA (1)...(19): siRNA sense strand
acauagagauggaagagua

SEQ ID NO: 1706247 - RNA, 19 nt, Homo sapiens
  misc_RNA (1)...(19): siRNA sense strand
gcucauuggucaaauauca

SEQ ID NO: 1706248 - RNA, 19 nt, Homo sapiens
  misc_RNA (1)...(19): siRNA sense strand
aaagagacuucaauucuga

SEQ ID NO: 1706249 - RNA, 19 nt, Homo sapiens
  misc_RNA (1)...(19): siRNA sense strand
gauguucucaguauuguua

SEQ ID NO: 1706250 - RNA, 19 nt, Homo sapiens
  misc_RNA (1)...(19): siRNA sense strand
ucgggaagcuguucaaauu

SEQ ID NO: 1706251 - RNA, 19 nt, Homo sapiens
  misc_RNA (1)...(19): siRNA sense strand
gauaacaaauggagucauc

SEQ ID NO: 1706252 - RNA, 19 nt, Homo sapiens
  misc_RNA (1)...(19): siRNA sense strand
caaagagacuucaauucug

SEQ ID NO: 1706253 - RNA, 19 nt, Homo sapiens
  misc_RNA (1)...(19): siRNA sense strand
gcagcaagauuaugguuca

SEQ ID NO: 1706254 - RNA, 19 nt, Homo sapiens
  misc_RNA (1)...(19): siRNA sense strand
gagcauaauuugcaucuac

SEQ ID NO: 1706255 - RNA, 19 nt, Homo sapiens
  misc_RNA (1)...(19): siRNA sense strand
ucacaaggcuaugaacaaa

SEQ ID NO: 1706256 - RNA, 19 nt, Homo sapiens
  misc_RNA (1)...(19): siRNA sense strand
gcaagauuaugguucaguu

SEQ ID NO: 1706257 - RNA, 19 nt, Homo sapiens
  misc_RNA (1)...(19): siRNA sense strand
ggaagcuguucaaauuaaa

SEQ ID NO: 1706258 - RNA, 19 nt, Homo sapiens
  misc_RNA (1)...(19): siRNA sense strand
ccucagacguugcaauuga

SEQ ID NO: 1706259 - RNA, 19 nt, Homo sapiens
  misc_RNA (1)...(19): siRNA sense strand
gaaguucaguggaauaaaa

SEQ ID NO: 1706260 - RNA, 19 nt, Homo sapiens
  misc_RNA (1)...(19): siRNA sense strand
cagcacaaaucuuauugaa

SEQ ID NO: 1706261 - RNA, 19 nt, Homo sapiens
  misc_RNA (1)...(19): siRNA sense strand
ggacuuggaccuauagaga

SEQ ID NO: 1706262 - RNA, 19 nt, Homo sapiens
  misc_RNA (1)...(19): siRNA sense strand
aaacagaccuugaguucca

SEQ ID NO: 1706263 - RNA, 19 nt, Homo sapiens
  misc_RNA (1)...(19): siRNA sense strand
gauuaucucucagcccuuu

SEQ ID NO: 1706264 - RNA, 19 nt, Homo sapiens
  misc_RNA (1)...(19): siRNA sense strand
caugguacauuugaaguaa

SEQ ID NO: 1706265 - RNA, 19 nt, Homo sapiens
  misc_RNA (1)...(19): siRNA sense strand
gcgagaagcagguccauga

SEQ ID NO: 1706266 - RNA, 19 nt, Homo sapiens
  misc_RNA (1)...(19): siRNA sense strand
ucacaagucccucacauug

SEQ ID NO: 1706267 - RNA, 19 nt, Homo sapiens
  misc_RNA (1)...(19): siRNA sense strand
caaagaaguucaguggaau

SEQ ID NO: 1706268 - RNA, 19 nt, Homo sapiens
  misc_RNA (1)...(19): siRNA sense strand
ugacuaugcuauuucaguu

SEQ ID NO: 1706269 - RNA, 19 nt, Homo sapiens
  misc_RNA (1)...(19): siRNA sense strand
gaaucuagugugaaaguuu

SEQ ID NO: 1706270 - RNA, 19 nt, Homo sapiens
  misc_RNA (1)...(19): siRNA sense strand
cggcaacacuggaaacuuc

SEQ ID NO: 1706271 - RNA, 19 nt, Homo sapiens
  misc_RNA (1)...(19): siRNA sense strand
cacaagagaaugagacuuu

SEQ ID NO: 1706272 - RNA, 19 nt, Homo sapiens
  misc_RNA (1)...(19): siRNA sense strand
ucuaugauguucucaguau

SEQ ID NO: 1706273 - RNA, 19 nt, Homo sapiens
  misc_RNA (1)...(19): siRNA sense strand
cagcaacucgccaagguua

SEQ ID NO: 1706274 - RNA, 19 nt, Homo sapiens
  misc_RNA (1)...(19): siRNA sense strand
aaaacaggcuccagauaua

SEQ ID NO: 1706275 - RNA, 19 nt, Homo sapiens
  misc_RNA (1)...(19): siRNA sense strand
gagcagcacaaaucuuauu

SEQ ID NO: 1706276 - RNA, 19 nt, Homo sapiens
  misc_RNA (1)...(19): siRNA sense strand
guaauuacacugucuuauc

SEQ ID NO: 1706277 - RNA, 19 nt, Homo sapiens
  misc_RNA (1)...(19): siRNA sense strand
aaauggagcugcuuauguc

SEQ ID NO: 1706278 - RNA, 19 nt, Homo sapiens
  misc_RNA (1)...(19): siRNA sense strand
cuacagaagugcaggaucu

SEQ ID NO: 1706279 - RNA, 19 nt, Homo sapiens
  misc_RNA (1)...(19): siRNA sense strand
gaccuugaguuccaucaug

SEQ ID NO: 1706280 - RNA, 19 nt, Homo sapiens
  misc_RNA (1)...(19): siRNA sense strand
uggagcagcacaaaucuua

SEQ ID NO: 1706281 - RNA, 19 nt, Homo sapiens
  misc_RNA (1)...(19): siRNA sense strand
cugcuuaugucugcacuua

SEQ ID NO: 1706282 - RNA, 19 nt, Homo sapiens
  misc_RNA (1)...(19): siRNA sense strand
cuacaaagagacuucaauu

SEQ ID NO: 1706283 - RNA, 19 nt, Homo sapiens
  misc_RNA (1)...(19): siRNA sense strand
ggaaggagugguaaaauuu

SEQ ID NO: 1706284 - RNA, 19 nt, Homo sapiens
  misc_RNA (1)...(19): siRNA sense strand
uaaccaauguaaagaccuu

SEQ ID NO: 1706285 - RNA, 19 nt, Homo sapiens
  misc_RNA (1)...(19): siRNA sense strand
guuaugggcuggcaaguac

SEQ ID NO: 1706286 - RNA, 19 nt, Homo sapiens
  misc_RNA (1)...(19): siRNA sense strand
agagauggaagaguaauua

SEQ ID NO: 1706287 - RNA, 19 nt, Homo sapiens
  misc_RNA (1)...(19): siRNA sense strand
gauucgaguuguacauaga

SEQ ID NO: 1706288 - RNA, 19 nt, Homo sapiens
  misc_RNA (1)...(19): siRNA sense strand
guuuaugaaucuaguguga

SEQ ID NO: 1706289 - RNA, 19 nt, Homo sapiens
  misc_RNA (1)...(19): siRNA sense strand
gggcagaaagacugacuaa

SEQ ID NO: 1706290 - RNA, 19 nt, Homo sapiens
  misc_RNA (1)...(19): siRNA sense strand
agcaggagcuacaggauuu

SEQ ID NO: 1706291 - RNA, 19 nt, Homo sapiens
  misc_RNA (1)...(19): siRNA sense strand
acaaagagacuucaauucu

SEQ ID NO: 1706292 - RNA, 19 nt, Homo sapiens
  misc_RNA (1)...(19): siRNA sense strand
gagcuucaguaaucaugug

SEQ ID NO: 1706293 - RNA, 19 nt, Homo sapiens
  misc_RNA (1)...(19): siRNA sense strand
gagcaggagcuacaggauu

SEQ ID NO: 1706294 - RNA, 19 nt, Homo sapiens
  misc_RNA (1)...(19): siRNA sense strand
ggaucucucuuuccucauc

SEQ ID NO: 1706295 - RNA, 19 nt, Homo sapiens
  misc_RNA (1)...(19): siRNA sense strand
ugacagagauguguguucu

SEQ ID NO: 1706296 - RNA, 19 nt, Homo sapiens
  misc_RNA (1)...(19): siRNA sense strand
gguaaugcaucugccauca

SEQ ID NO: 1706297 - RNA, 19 nt, Homo sapiens
  misc_RNA (1)...(19): siRNA sense strand
ggaagaguaauuacacugu

SEQ ID NO: 1706298 - RNA, 19 nt, Homo sapiens
  misc_RNA (1)...(19): siRNA sense strand
agauguguguucucuauga

SEQ ID NO: 1706299 - RNA, 19 nt, Homo sapiens
  misc_RNA (1)...(19): siRNA sense strand
caggcucauuggucaaaua

SEQ ID NO: 1706300 - RNA, 19 nt, Homo sapiens
  misc_RNA (1)...(19): siRNA sense strand
ggugaccucggcacaguua

SEQ ID NO: 1706301 - RNA, 19 nt, Homo sapiens
  misc_RNA (1)...(19): siRNA sense strand
cugcauauaucaagguuuc

SEQ ID NO: 1706302 - RNA, 19 nt, Homo sapiens
  misc_RNA (1)...(19): siRNA sense strand
gaguaauuacacugucuua

SEQ ID NO: 1706303 - RNA, 19 nt, Homo sapiens
  misc_RNA (1)...(19): siRNA sense strand
gaggaacaauuugagaagu

SEQ ID NO: 1706304 - RNA, 19 nt, Homo sapiens
  misc_RNA (1)...(19): siRNA sense strand
caaauggagucaucuucgu

SEQ ID NO: 1706305 - RNA, 19 nt, Homo sapiens
  misc_RNA (1)...(19): siRNA sense strand
cgacgaggaaggaguggua

SEQ ID NO: 1706306 - RNA, 19 nt, Homo sapiens
  misc_RNA (1)...(19): siRNA sense strand
agacuucaauucugagcuu

SEQ ID NO: 1706307 - RNA, 19 nt, Homo sapiens
  misc_RNA (1)...(19): siRNA sense strand
aaaacaagcuacaaagaga

SEQ ID NO: 1706308 - RNA, 19 nt, Homo sapiens
  misc_RNA (1)...(19): siRNA sense strand
cuauagagagcauugguaa

SEQ ID NO: 1706309 - RNA, 19 nt, Homo sapiens
  misc_RNA (1)...(19): siRNA sense strand
ggaccuauagagagcauug

SEQ ID NO: 1706310 - RNA, 19 nt, Homo sapiens
  misc_RNA (1)...(19): siRNA sense strand
caaauaugcaaguccauuc

SEQ ID NO: 1706311 - RNA, 19 nt, Homo sapiens
  misc_RNA (1)...(19): siRNA sense strand
cuaaaucaguuaccgaaaa

SEQ ID NO: 1706312 - RNA, 19 nt, Homo sapiens
  misc_RNA (1)...(19): siRNA sense strand
acuuagcccuugucuacua

SEQ ID NO: 1706313 - RNA, 19 nt, Homo sapiens
  misc_RNA (1)...(19): siRNA sense strand
aaagaaguucaguggaaua

SEQ ID NO: 1706314 - RNA, 19 nt, Homo sapiens
  misc_RNA (1)...(19): siRNA sense strand
uaacaaauggagucaucuu

SEQ ID NO: 1706315 - RNA, 19 nt, Homo sapiens
  misc_RNA (1)...(19): siRNA sense strand
gcuaugaacaaauaugcaa

SEQ ID NO: 1706316 - RNA, 19 nt, Homo sapiens
  misc_RNA (1)...(19): siRNA sense strand
gagcuugcaguuaucuauu

SEQ ID NO: 1706317 - RNA, 19 nt, Homo sapiens
  misc_RNA (1)...(19): siRNA sense strand
uuuccgagcuugcaguuau

SEQ ID NO: 1706318 - RNA, 19 nt, Homo sapiens
  misc_RNA (1)...(19): siRNA sense strand
gcagcacaaaucuuauuga

SEQ ID NO: 1706319 - RNA, 19 nt, Homo sapiens
  misc_RNA (1)...(19): siRNA sense strand
caagauuaugguucaguuu

SEQ ID NO: 1706320 - RNA, 19 nt, Homo sapiens
  misc_RNA (1)...(19): siRNA sense strand
ucaguauuguuagggauaa

SEQ ID NO: 1706321 - RNA, 19 nt, Homo sapiens
  misc_RNA (1)...(19): siRNA sense strand
uagagcugcugcaaccauu

SEQ ID NO: 1706322 - RNA, 19 nt, Homo sapiens
  misc_RNA (1)...(19): siRNA sense strand
ucaguuuccucguaaccaa

SEQ ID NO: 1706323 - RNA, 19 nt, Homo sapiens
  misc_RNA (1)...(19): siRNA sense strand
cagauucgaguuguacaua

SEQ ID NO: 1706324 - RNA, 19 nt, Homo sapiens
  misc_RNA (1)...(19): siRNA sense strand
ccucaaaugauaagaaauc

SEQ ID NO: 1706325 - RNA, 19 nt, Homo sapiens
  misc_RNA (1)...(19): siRNA sense strand
gauguguguucucuaugau

SEQ ID NO: 1706326 - RNA, 19 nt, Homo sapiens
  misc_RNA (1)...(19): siRNA sense strand
gagcugcugcaaccauuga

SEQ ID NO: 1706327 - RNA, 19 nt, Homo sapiens
  misc_RNA (1)...(19): siRNA sense strand
auaaacagaccuugaguuc

SEQ ID NO: 1706328 - RNA, 19 nt, Homo sapiens
  misc_RNA (1)...(19): siRNA sense strand
ucagugaggaacaauuuga

SEQ ID NO: 1706329 - RNA, 19 nt, Homo sapiens
  misc_RNA (1)...(19): siRNA sense strand
aauggaaggucgaaauuuu

SEQ ID NO: 1706330 - RNA, 19 nt, Homo sapiens
  misc_RNA (1)...(19): siRNA sense strand
ugagcagauucgaguugua

SEQ ID NO: 1706331 - RNA, 19 nt, Homo sapiens
  misc_RNA (1)...(19): siRNA sense strand
cugauuagagaguuucaua

SEQ ID NO: 1706332 - RNA, 19 nt, Homo sapiens
  misc_RNA (1)...(19): siRNA sense strand
cgggaagcuguucaaauua

SEQ ID NO: 1706333 - RNA, 19 nt, Homo sapiens
  misc_RNA (1)...(19): siRNA sense strand
gcacaguuaaccucuucaa

SEQ ID NO: 1706334 - RNA, 19 nt, Homo sapiens
  misc_RNA (1)...(19): siRNA sense strand
ugaaaguggcagcaagauu

SEQ ID NO: 1706335 - RNA, 19 nt, Homo sapiens
  misc_RNA (1)...(19): siRNA sense strand
gaaggucgaaauuuuguuu

SEQ ID NO: 1706336 - RNA, 19 nt, Homo sapiens
  misc_RNA (1)...(19): siRNA sense strand
ggagacagcugcucuacug

SEQ ID NO: 1706337 - RNA, 19 nt, Homo sapiens
  misc_RNA (1)...(19): siRNA sense strand
gagaggugauugagaagaa

SEQ ID NO: 1706338 - RNA, 19 nt, Homo sapiens
  misc_RNA (1)...(19): siRNA sense strand
caacaucucugaggugaag

SEQ ID NO: 1706339 - RNA, 19 nt, Homo sapiens
  misc_RNA (1)...(19): siRNA sense strand
ggacgagcuuguuggcauu

SEQ ID NO: 1706340 - RNA, 19 nt, Homo sapiens
  misc_RNA (1)...(19): siRNA sense strand
gaaccggccugcugauguc

SEQ ID NO: 1706341 - RNA, 19 nt, Homo sapiens
  misc_RNA (1)...(19): siRNA sense strand
agcaagagcuggagacuau

SEQ ID NO: 1706342 - RNA, 19 nt, Homo sapiens
  misc_RNA (1)...(19): siRNA sense strand
gcugagggccaccuacuuu

SEQ ID NO: 1706343 - RNA, 19 nt, Homo sapiens
  misc_RNA (1)...(19): siRNA sense strand
gggcugaucuccacuuugc

SEQ ID NO: 1706344 - RNA, 19 nt, Homo sapiens
  misc_RNA (1)...(19): siRNA sense strand
gcuggagacuaucaccauu

SEQ ID NO: 1706345 - RNA, 19 nt, Homo sapiens
  misc_RNA (1)...(19): siRNA sense strand
gacagcugcucuacugguu

SEQ ID NO: 1706346 - RNA, 19 nt, Homo sapiens
  misc_RNA (1)...(19): siRNA sense strand
ugcgagaggugauugagaa

SEQ ID NO: 1706347 - RNA, 19 nt, Homo sapiens
  misc_RNA (1)...(19): siRNA sense strand
acuauucccucaugaagga

SEQ ID NO: 1706348 - RNA, 19 nt, Homo sapiens
  misc_RNA (1)...(19): siRNA sense strand
ugaagaccaugcugcagau

SEQ ID NO: 1706349 - RNA, 19 nt, Homo sapiens
  misc_RNA (1)...(19): siRNA sense strand
ugacgaaccaugcgggauu

SEQ ID NO: 1706350 - RNA, 19 nt, Homo sapiens
  misc_RNA (1)...(19): siRNA sense strand
ugcaugagguggugacgaa

SEQ ID NO: 1706351 - RNA, 19 nt, Homo sapiens
  misc_RNA (1)...(19): siRNA sense strand
aggaagagcggauggugua

SEQ ID NO: 1706352 - RNA, 19 nt, Homo sapiens
  misc_RNA (1)...(19): siRNA sense strand
ggccuucucugaguucuuc

SEQ ID NO: 1706353 - RNA, 19 nt, Homo sapiens
  misc_RNA (1)...(19): siRNA sense strand
gagcaagagcuggagacua

SEQ ID NO: 1706354 - RNA, 19 nt, Homo sapiens
  misc_RNA (1)...(19): siRNA sense strand
gaagagcggaugguguaug

SEQ ID NO: 1706355 - RNA, 19 nt, Homo sapiens
  misc_RNA (1)...(19): siRNA sense strand
aagagcggaugguguaugu

SEQ ID NO: 1706356 - RNA, 19 nt, Homo sapiens
  misc_RNA (1)...(19): siRNA sense strand
ugaugcccaugcucaauga

SEQ ID NO: 1706357 - RNA, 19 nt, Homo sapiens
  misc_RNA (1)...(19): siRNA sense strand
gagcugcaacugacaucuu

SEQ ID NO: 1706358 - RNA, 19 nt, Homo sapiens
  misc_RNA (1)...(19): siRNA sense strand
ccacuucuacuacaacauc

SEQ ID NO: 1706359 - RNA, 19 nt, Homo sapiens
  misc_RNA (1)...(19): siRNA sense strand
caagagcuggagacuauca

SEQ ID NO: 1706360 - RNA, 19 nt, Homo sapiens
  misc_RNA (1)...(19): siRNA sense strand
uauguggccuucucugagu

SEQ ID NO: 1706361 - RNA, 19 nt, Homo sapiens
  misc_RNA (1)...(19): siRNA sense strand
gaaggucacagagcugcaa

SEQ ID NO: 1706362 - RNA, 19 nt, Homo sapiens
  misc_RNA (1)...(19): siRNA sense strand
gacgaaccaugcgggauuc

SEQ ID NO: 1706363 - RNA, 19 nt, Homo sapiens
  misc_RNA (1)...(19): siRNA sense strand
ucucugaguucuucuucga

SEQ ID NO: 1706364 - RNA, 19 nt, Homo sapiens
  misc_RNA (1)...(19): siRNA sense strand
cauugacuauucccucaug

SEQ ID NO: 1706365 - RNA, 19 nt, Homo sapiens
  misc_RNA (1)...(19): siRNA sense strand
caucuuccgagcucgauuu

SEQ ID NO: 1706366 - RNA, 19 nt, Homo sapiens
  misc_RNA (1)...(19): siRNA sense strand
gugauugacuccccauuga

SEQ ID NO: 1706367 - RNA, 19 nt, Homo sapiens
  misc_RNA (1)...(19): siRNA sense strand
gaagaaccggccugcugau

SEQ ID NO: 1706368 - RNA, 19 nt, Homo sapiens
  misc_RNA (1)...(19): siRNA sense strand
uggagucgcuggcucugau

SEQ ID NO: 1706369 - RNA, 19 nt, Homo sapiens
  misc_RNA (1)...(19): siRNA sense strand
agaccaugcugcagauugg

SEQ ID NO: 1706370 - RNA, 19 nt, Homo sapiens
  misc_RNA (1)...(19): siRNA sense strand
gaagguguaugauuuucuc

SEQ ID NO: 1706371 - RNA, 19 nt, Homo sapiens
  misc_RNA (1)...(19): siRNA sense strand
caggagcugaugcuucaaa

SEQ ID NO: 1706372 - RNA, 19 nt, Homo sapiens
  misc_RNA (1)...(19): siRNA sense strand
gaagaccaugcugcagauu

SEQ ID NO: 1706373 - RNA, 19 nt, Homo sapiens
  misc_RNA (1)...(19): siRNA sense strand
cagcugcucuacugguucu

SEQ ID NO: 1706374 - RNA, 19 nt, Homo sapiens
  misc_RNA (1)...(19): siRNA sense strand
cgcuggagcuggugaagca

SEQ ID NO: 1706375 - RNA, 19 nt, Homo sapiens
  misc_RNA (1)...(19): siRNA sense strand
cuuccgagcucgauuucca

SEQ ID NO: 1706376 - RNA, 19 nt, Homo sapiens
  misc_RNA (1)...(19): siRNA sense strand
gugaugcccaugcucaaug

SEQ ID NO: 1706377 - RNA, 19 nt, Homo sapiens
  misc_RNA (1)...(19): siRNA sense strand
ugacuauucccucaugaag

SEQ ID NO: 1706378 - RNA, 19 nt, Homo sapiens
  misc_RNA (1)...(19): siRNA sense strand
ggccacuucuacuacaaca

SEQ ID NO: 1706379 - RNA, 19 nt, Homo sapiens
  misc_RNA (1)...(19): siRNA sense strand
ggaagagcggaugguguau

SEQ ID NO: 1706380 - RNA, 19 nt, Homo sapiens
  misc_RNA (1)...(19): siRNA sense strand
uaccugagggcaucaacuu

SEQ ID NO: 1706381 - RNA, 19 nt, Homo sapiens
  misc_RNA (1)...(19): siRNA sense strand
ggagacagcugcucuacug

SEQ ID NO: 1706382 - RNA, 19 nt, Homo sapiens
  misc_RNA (1)...(19): siRNA sense strand
gagaggugauugagaagaa

SEQ ID NO: 1706383 - RNA, 19 nt, Homo sapiens
  misc_RNA (1)...(19): siRNA sense strand
caacaucucugaggugaag

SEQ ID NO: 1706384 - RNA, 19 nt, Homo sapiens
  misc_RNA (1)...(19): siRNA sense strand
ggacgagcuuguuggcauu

SEQ ID NO: 1706385 - RNA, 19 nt, Homo sapiens
  misc_RNA (1)...(19): siRNA sense strand
gaaccggccugcugauguc

SEQ ID NO: 1706386 - RNA, 19 nt, Homo sapiens
  misc_RNA (1)...(19): siRNA sense strand
agcaagagcuggagacuau

SEQ ID NO: 1706387 - RNA, 19 nt, Homo sapiens
  misc_RNA (1)...(19): siRNA sense strand
gaucugcccuguccucuac

SEQ ID NO: 1706388 - RNA, 19 nt, Homo sapiens
  misc_RNA (1)...(19): siRNA sense strand
gcugagggccaccuacuuu

SEQ ID NO: 1706389 - RNA, 19 nt, Homo sapiens
  misc_RNA (1)...(19): siRNA sense strand
gggcugaucuccacuuugc

SEQ ID NO: 1706390 - RNA, 19 nt, Homo sapiens
  misc_RNA (1)...(19): siRNA sense strand
gcuggagacuaucaccauu

SEQ ID NO: 1706391 - RNA, 19 nt, Homo sapiens
  misc_RNA (1)...(19): siRNA sense strand
gacagcugcucuacugguu

SEQ ID NO: 1706392 - RNA, 19 nt, Homo sapiens
  misc_RNA (1)...(19): siRNA sense strand
ugcgagaggugauugagaa

SEQ ID NO: 1706393 - RNA, 19 nt, Homo sapiens
  misc_RNA (1)...(19): siRNA sense strand
acuauucccucaugaagga

SEQ ID NO: 1706394 - RNA, 19 nt, Homo sapiens
  misc_RNA (1)...(19): siRNA sense strand
ugaagaccaugcugcagau

SEQ ID NO: 1706395 - RNA, 19 nt, Homo sapiens
  misc_RNA (1)...(19): siRNA sense strand
ugacgaaccaugcgggauu

SEQ ID NO: 1706396 - RNA, 19 nt, Homo sapiens
  misc_RNA (1)...(19): siRNA sense strand
ugcaugagguggugacgaa

SEQ ID NO: 1706397 - RNA, 19 nt, Homo sapiens
  misc_RNA (1)...(19): siRNA sense strand
aggaagagcggauggugua

SEQ ID NO: 1706398 - RNA, 19 nt, Homo sapiens
  misc_RNA (1)...(19): siRNA sense strand
gagcaagagcuggagacua

SEQ ID NO: 1706399 - RNA, 19 nt, Homo sapiens
  misc_RNA (1)...(19): siRNA sense strand
ggccuucucugaguucuuc

SEQ ID NO: 1706400 - RNA, 19 nt, Homo sapiens
  misc_RNA (1)...(19): siRNA sense strand
gaagagcggaugguguaug

SEQ ID NO: 1706401 - RNA, 19 nt, Homo sapiens
  misc_RNA (1)...(19): siRNA sense strand
aagagcggaugguguaugu

SEQ ID NO: 1706402 - RNA, 19 nt, Homo sapiens
  misc_RNA (1)...(19): siRNA sense strand
ugaugcccaugcucaauga

SEQ ID NO: 1706403 - RNA, 19 nt, Homo sapiens
  misc_RNA (1)...(19): siRNA sense strand
gagcugcaacugacaucuu

SEQ ID NO: 1706404 - RNA, 19 nt, Homo sapiens
  misc_RNA (1)...(19): siRNA sense strand
ccacuucuacuacaacauc

SEQ ID NO: 1706405 - RNA, 19 nt, Homo sapiens
  misc_RNA (1)...(19): siRNA sense strand
caagagcuggagacuauca

SEQ ID NO: 1706406 - RNA, 19 nt, Homo sapiens
  misc_RNA (1)...(19): siRNA sense strand
uauguggccuucucugagu

SEQ ID NO: 1706407 - RNA, 19 nt, Homo sapiens
  misc_RNA (1)...(19): siRNA sense strand
gaaggucacagagcugcaa

SEQ ID NO: 1706408 - RNA, 19 nt, Homo sapiens
  misc_RNA (1)...(19): siRNA sense strand
gacgaaccaugcgggauuc

SEQ ID NO: 1706409 - RNA, 19 nt, Homo sapiens
  misc_RNA (1)...(19): siRNA sense strand
ucucugaguucuucuucga

SEQ ID NO: 1706410 - RNA, 19 nt, Homo sapiens
  misc_RNA (1)...(19): siRNA sense strand
cauugacuauucccucaug

SEQ ID NO: 1706411 - RNA, 19 nt, Homo sapiens
  misc_RNA (1)...(19): siRNA sense strand
caucuuccgagcucgauuu

SEQ ID NO: 1706412 - RNA, 19 nt, Homo sapiens
  misc_RNA (1)...(19): siRNA sense strand
gugauugacuccccauuga

SEQ ID NO: 1706413 - RNA, 19 nt, Homo sapiens
  misc_RNA (1)...(19): siRNA sense strand
gaagaaccggccugcugau

SEQ ID NO: 1706414 - RNA, 19 nt, Homo sapiens
  misc_RNA (1)...(19): siRNA sense strand
uggagucgcuggcucugau

SEQ ID NO: 1706415 - RNA, 19 nt, Homo sapiens
  misc_RNA (1)...(19): siRNA sense strand
agaccaugcugcagauugg

SEQ ID NO: 1706416 - RNA, 19 nt, Homo sapiens
  misc_RNA (1)...(19): siRNA sense strand
gaagguguaugauuuucuc

SEQ ID NO: 1706417 - RNA, 19 nt, Homo sapiens
  misc_RNA (1)...(19): siRNA sense strand
caggagcugaugcuucaaa

SEQ ID NO: 1706418 - RNA, 19 nt, Homo sapiens
  misc_RNA (1)...(19): siRNA sense strand
gaagaccaugcugcagauu

SEQ ID NO: 1706419 - RNA, 19 nt, Homo sapiens
  misc_RNA (1)...(19): siRNA sense strand
cagcugcucuacugguucu

SEQ ID NO: 1706420 - RNA, 19 nt, Homo sapiens
  misc_RNA (1)...(19): siRNA sense strand
cgcuggagcuggugaagca

SEQ ID NO: 1706421 - RNA, 19 nt, Homo sapiens
  misc_RNA (1)...(19): siRNA sense strand
cuuccgagcucgauuucca

SEQ ID NO: 1706422 - RNA, 19 nt, Homo sapiens
  misc_RNA (1)...(19): siRNA sense strand
gugaugcccaugcucaaug

SEQ ID NO: 1706423 - RNA, 19 nt, Homo sapiens
  misc_RNA (1)...(19): siRNA sense strand
ggccacuucuacuacaaca

SEQ ID NO: 1706424 - RNA, 19 nt, Homo sapiens
  misc_RNA (1)...(19): siRNA sense strand
ugacuauucccucaugaag

SEQ ID NO: 1706425 - RNA, 19 nt, Homo sapiens
  misc_RNA (1)...(19): siRNA sense strand
ggaagagcggaugguguau

SEQ ID NO: 1706426 - RNA, 19 nt, Homo sapiens
  misc_RNA (1)...(19): siRNA sense strand
uaccugagggcaucaacuu

SEQ ID NO: 1706427 - RNA, 19 nt, Homo sapiens
  misc_RNA (1)...(19): siRNA sense strand
gaauggagaucaacuauac

SEQ ID NO: 1706428 - RNA, 19 nt, Homo sapiens
  misc_RNA (1)...(19): siRNA sense strand
caagagauacgcaacauaa

SEQ ID NO: 1706429 - RNA, 19 nt, Homo sapiens
  misc_RNA (1)...(19): siRNA sense strand
caaaaccacugcuaaguua

SEQ ID NO: 1706430 - RNA, 19 nt, Homo sapiens
  misc_RNA (1)...(19): siRNA sense strand
gcauagccacucaguauuu

SEQ ID NO: 1706431 - RNA, 19 nt, Homo sapiens
  misc_RNA (1)...(19): siRNA sense strand
agaaggagcuagcugaaau

SEQ ID NO: 1706432 - RNA, 19 nt, Homo sapiens
  misc_RNA (1)...(19): siRNA sense strand
gaaggagcuagcugaaaua

SEQ ID NO: 1706433 - RNA, 19 nt, Homo sapiens
  misc_RNA (1)...(19): siRNA sense strand
caacuggagucccgcuuug

SEQ ID NO: 1706434 - RNA, 19 nt, Homo sapiens
  misc_RNA (1)...(19): siRNA sense strand
gacaguggaccaagagaua

SEQ ID NO: 1706435 - RNA, 19 nt, Homo sapiens
  misc_RNA (1)...(19): siRNA sense strand
ggagcuagcugaaauaacc

SEQ ID NO: 1706436 - RNA, 19 nt, Homo sapiens
  misc_RNA (1)...(19): siRNA sense strand
gcuaaguuauccacuagug

SEQ ID NO: 1706437 - RNA, 19 nt, Homo sapiens
  misc_RNA (1)...(19): siRNA sense strand
auaugaaggugguguguuu

SEQ ID NO: 1706438 - RNA, 19 nt, Homo sapiens
  misc_RNA (1)...(19): siRNA sense strand
acaccaaacucucuagcaa

SEQ ID NO: 1706439 - RNA, 19 nt, Homo sapiens
  misc_RNA (1)...(19): siRNA sense strand
gcaaagguccgaugaugag

SEQ ID NO: 1706440 - RNA, 19 nt, Homo sapiens
  misc_RNA (1)...(19): siRNA sense strand
gagaucaacuauacuuggu

SEQ ID NO: 1706441 - RNA, 19 nt, Homo sapiens
  misc_RNA (1)...(19): siRNA sense strand
gagcagaacacgacaggau

SEQ ID NO: 1706442 - RNA, 19 nt, Homo sapiens
  misc_RNA (1)...(19): siRNA sense strand
aagcauagccacucaguau

SEQ ID NO: 1706443 - RNA, 19 nt, Homo sapiens
  misc_RNA (1)...(19): siRNA sense strand
uagcugaaauaacccuuga

SEQ ID NO: 1706444 - RNA, 19 nt, Homo sapiens
  misc_RNA (1)...(19): siRNA sense strand
ggacauccuuaaagacaac

SEQ ID NO: 1706445 - RNA, 19 nt, Homo sapiens
  misc_RNA (1)...(19): siRNA sense strand
cauagccacucaguauuug

SEQ ID NO: 1706446 - RNA, 19 nt, Homo sapiens
  misc_RNA (1)...(19): siRNA sense strand
gaagaacaagaggaaagaa

SEQ ID NO: 1706447 - RNA, 19 nt, Homo sapiens
  misc_RNA (1)...(19): siRNA sense strand
gaagcauagccacucagua

SEQ ID NO: 1706448 - RNA, 19 nt, Homo sapiens
  misc_RNA (1)...(19): siRNA sense strand
ccuaaaggagauaacauuu

SEQ ID NO: 1706449 - RNA, 19 nt, Homo sapiens
  misc_RNA (1)...(19): siRNA sense strand
ugaauggagaucaacuaua

SEQ ID NO: 1706450 - RNA, 19 nt, Homo sapiens
  misc_RNA (1)...(19): siRNA sense strand
gcaaaaccacugcuaaguu

SEQ ID NO: 1706451 - RNA, 19 nt, Homo sapiens
  misc_RNA (1)...(19): siRNA sense strand
ccaagagauacgcaacaua

SEQ ID NO: 1706452 - RNA, 19 nt, Homo sapiens
  misc_RNA (1)...(19): siRNA sense strand
gcagaacacgacaggauag

SEQ ID NO: 1706453 - RNA, 19 nt, Homo sapiens
  misc_RNA (1)...(19): siRNA sense strand
guuauccacuagugcuaaa

SEQ ID NO: 1706454 - RNA, 19 nt, Homo sapiens
  misc_RNA (1)...(19): siRNA sense strand
gccagacaguggaccaaga

SEQ ID NO: 1706455 - RNA, 19 nt, Homo sapiens
  misc_RNA (1)...(19): siRNA sense strand
ggcaaagguccgaugauga

SEQ ID NO: 1706456 - RNA, 19 nt, Homo sapiens
  misc_RNA (1)...(19): siRNA sense strand
gccuaaaggagauaacauu

SEQ ID NO: 1706457 - RNA, 19 nt, Homo sapiens
  misc_RNA (1)...(19): siRNA sense strand
aggcaaagguccgaugaug

SEQ ID NO: 1706458 - RNA, 19 nt, Homo sapiens
  misc_RNA (1)...(19): siRNA sense strand
gucuggacauccuuaaaga

SEQ ID NO: 1706459 - RNA, 19 nt, Homo sapiens
  misc_RNA (1)...(19): siRNA sense strand
cuaaaagaauucagaagga

SEQ ID NO: 1706460 - RNA, 19 nt, Homo sapiens
  misc_RNA (1)...(19): siRNA sense strand
uuuaagccaccaaagguua

SEQ ID NO: 1706461 - RNA, 19 nt, Homo sapiens
  misc_RNA (1)...(19): siRNA sense strand
ugaaauaacccuugauccu

SEQ ID NO: 1706462 - RNA, 19 nt, Homo sapiens
  misc_RNA (1)...(19): siRNA sense strand
uccagagccugaagaacaa

SEQ ID NO: 1706463 - RNA, 19 nt, Homo sapiens
  misc_RNA (1)...(19): siRNA sense strand
gcugaaauaacccuugauc

SEQ ID NO: 1706464 - RNA, 19 nt, Homo sapiens
  misc_RNA (1)...(19): siRNA sense strand
ggaagcauagccacucagu

SEQ ID NO: 1706465 - RNA, 19 nt, Homo sapiens
  misc_RNA (1)...(19): siRNA sense strand
caccagcaguggcaguuca

SEQ ID NO: 1706466 - RNA, 19 nt, Homo sapiens
  misc_RNA (1)...(19): siRNA sense strand
ugaagaacaagaggaaaga

SEQ ID NO: 1706467 - RNA, 19 nt, Homo sapiens
  misc_RNA (1)...(19): siRNA sense strand
caccaaacucucuagcaaa

SEQ ID NO: 1706468 - RNA, 19 nt, Homo sapiens
  misc_RNA (1)...(19): siRNA sense strand
aagaacaagaggaaagaaa

SEQ ID NO: 1706469 - RNA, 19 nt, Homo sapiens
  misc_RNA (1)...(19): siRNA sense strand
cagaaggagcuagcugaaa

SEQ ID NO: 1706470 - RNA, 19 nt, Homo sapiens
  misc_RNA (1)...(19): siRNA sense strand
ccaccggguucuguauaug

SEQ ID NO: 1706471 - RNA, 19 nt, Homo sapiens
  misc_RNA (1)...(19): siRNA sense strand
acugcuaaguuauccacua

SEQ ID NO: 1706472 - RNA, 19 nt, Homo sapiens
  misc_RNA (1)...(19): siRNA sense strand
uaugaauggagaucaacua

SEQ ID NO: 1706473 - RNA, 19 nt, Homo sapiens
  misc_RNA (1)...(19): siRNA sense strand
cugcuaaguuauccacuag

SEQ ID NO: 1706474 - RNA, 19 nt, Homo sapiens
  misc_RNA (1)...(19): siRNA sense strand
gaaucuaucacugcaacau

SEQ ID NO: 1706475 - RNA, 19 nt, Homo sapiens
  misc_RNA (1)...(19): siRNA sense strand
ccacucaguauuugaccaa

SEQ ID NO: 1706476 - RNA, 19 nt, Homo sapiens
  misc_RNA (1)...(19): siRNA sense strand
cuccagagccugaagaaca

SEQ ID NO: 1706477 - RNA, 19 nt, Homo sapiens
  misc_RNA (1)...(19): siRNA sense strand
caacagucagggagucauc

SEQ ID NO: 1706478 - RNA, 19 nt, Homo sapiens
  misc_RNA (1)...(19): siRNA sense strand
gaccaagagauacgcaaca

SEQ ID NO: 1706479 - RNA, 19 nt, Homo sapiens
  misc_RNA (1)...(19): siRNA sense strand
caccggguucuguauauga

SEQ ID NO: 1706480 - RNA, 19 nt, Homo sapiens
  misc_RNA (1)...(19): siRNA sense strand
cauuuaagccaccaaaggu

SEQ ID NO: 1706481 - RNA, 19 nt, Homo sapiens
  misc_RNA (1)...(19): siRNA sense strand
ggauaucacauuuucauca

SEQ ID NO: 1706482 - RNA, 19 nt, Homo sapiens
  misc_RNA (1)...(19): siRNA sense strand
gacaggauagccagacagu

SEQ ID NO: 1706483 - RNA, 19 nt, Homo sapiens
  misc_RNA (1)...(19): siRNA sense strand
aaaccacugcuaaguuauc

SEQ ID NO: 1706484 - RNA, 19 nt, Homo sapiens
  misc_RNA (1)...(19): siRNA sense strand
uggacauccuuaaagacaa

SEQ ID NO: 1706485 - RNA, 19 nt, Homo sapiens
  misc_RNA (1)...(19): siRNA sense strand
gaauggagaucaacuauac

SEQ ID NO: 1706486 - RNA, 19 nt, Homo sapiens
  misc_RNA (1)...(19): siRNA sense strand
caagagauacgcaacauaa

SEQ ID NO: 1706487 - RNA, 19 nt, Homo sapiens
  misc_RNA (1)...(19): siRNA sense strand
caaaaccacugcuaaguua

SEQ ID NO: 1706488 - RNA, 19 nt, Homo sapiens
  misc_RNA (1)...(19): siRNA sense strand
gcauagccacucaguauuu

SEQ ID NO: 1706489 - RNA, 19 nt, Homo sapiens
  misc_RNA (1)...(19): siRNA sense strand
agaaggagcuagcugaaau

SEQ ID NO: 1706490 - RNA, 19 nt, Homo sapiens
  misc_RNA (1)...(19): siRNA sense strand
gaaggagcuagcugaaaua

SEQ ID NO: 1706491 - RNA, 19 nt, Homo sapiens
  misc_RNA (1)...(19): siRNA sense strand
caacuggagucccgcuuug

SEQ ID NO: 1706492 - RNA, 19 nt, Homo sapiens
  misc_RNA (1)...(19): siRNA sense strand
gacaguggaccaagagaua

SEQ ID NO: 1706493 - RNA, 19 nt, Homo sapiens
  misc_RNA (1)...(19): siRNA sense strand
ggagcuagcugaaauaacc

SEQ ID NO: 1706494 - RNA, 19 nt, Homo sapiens
  misc_RNA (1)...(19): siRNA sense strand
gcuaaguuauccacuagug

SEQ ID NO: 1706495 - RNA, 19 nt, Homo sapiens
  misc_RNA (1)...(19): siRNA sense strand
auaugaaggugguguguuu

SEQ ID NO: 1706496 - RNA, 19 nt, Homo sapiens
  misc_RNA (1)...(19): siRNA sense strand
acaccaaacucucuagcaa

SEQ ID NO: 1706497 - RNA, 19 nt, Homo sapiens
  misc_RNA (1)...(19): siRNA sense strand
gcaaagguccgaugaugag

SEQ ID NO: 1706498 - RNA, 19 nt, Homo sapiens
  misc_RNA (1)...(19): siRNA sense strand
gagaucaacuauacuuggu

SEQ ID NO: 1706499 - RNA, 19 nt, Homo sapiens
  misc_RNA (1)...(19): siRNA sense strand
gagcagaacacgacaggau

SEQ ID NO: 1706500 - RNA, 19 nt, Homo sapiens
  misc_RNA (1)...(19): siRNA sense strand
aagcauagccacucaguau

SEQ ID NO: 1706501 - RNA, 19 nt, Homo sapiens
  misc_RNA (1)...(19): siRNA sense strand
uagcugaaauaacccuuga

SEQ ID NO: 1706502 - RNA, 19 nt, Homo sapiens
  misc_RNA (1)...(19): siRNA sense strand
ggacauccuuaaagacaac

SEQ ID NO: 1706503 - RNA, 19 nt, Homo sapiens
  misc_RNA (1)...(19): siRNA sense strand
cauagccacucaguauuug

SEQ ID NO: 1706504 - RNA, 19 nt, Homo sapiens
  misc_RNA (1)...(19): siRNA sense strand
gaagaacaagaggaaagaa

SEQ ID NO: 1706505 - RNA, 19 nt, Homo sapiens
  misc_RNA (1)...(19): siRNA sense strand
gaagcauagccacucagua

SEQ ID NO: 1706506 - RNA, 19 nt, Homo sapiens
  misc_RNA (1)...(19): siRNA sense strand
ccuaaaggagauaacauuu

SEQ ID NO: 1706507 - RNA, 19 nt, Homo sapiens
  misc_RNA (1)...(19): siRNA sense strand
ugaauggagaucaacuaua

SEQ ID NO: 1706508 - RNA, 19 nt, Homo sapiens
  misc_RNA (1)...(19): siRNA sense strand
gcaaaaccacugcuaaguu

SEQ ID NO: 1706509 - RNA, 19 nt, Homo sapiens
  misc_RNA (1)...(19): siRNA sense strand
ccaagagauacgcaacaua

SEQ ID NO: 1706510 - RNA, 19 nt, Homo sapiens
  misc_RNA (1)...(19): siRNA sense strand
gcagaacacgacaggauag

SEQ ID NO: 1706511 - RNA, 19 nt, Homo sapiens
  misc_RNA (1)...(19): siRNA sense strand
guuauccacuagugcuaaa

SEQ ID NO: 1706512 - RNA, 19 nt, Homo sapiens
  misc_RNA (1)...(19): siRNA sense strand
gccagacaguggaccaaga

SEQ ID NO: 1706513 - RNA, 19 nt, Homo sapiens
  misc_RNA (1)...(19): siRNA sense strand
ggcaaagguccgaugauga

SEQ ID NO: 1706514 - RNA, 19 nt, Homo sapiens
  misc_RNA (1)...(19): siRNA sense strand
gccuaaaggagauaacauu

SEQ ID NO: 1706515 - RNA, 19 nt, Homo sapiens
  misc_RNA (1)...(19): siRNA sense strand
aggcaaagguccgaugaug

SEQ ID NO: 1706516 - RNA, 19 nt, Homo sapiens
  misc_RNA (1)...(19): siRNA sense strand
gucuggacauccuuaaaga

SEQ ID NO: 1706517 - RNA, 19 nt, Homo sapiens
  misc_RNA (1)...(19): siRNA sense strand
cuaaaagaauucagaagga

SEQ ID NO: 1706518 - RNA, 19 nt, Homo sapiens
  misc_RNA (1)...(19): siRNA sense strand
uuuaagccaccaaagguua

SEQ ID NO: 1706519 - RNA, 19 nt, Homo sapiens
  misc_RNA (1)...(19): siRNA sense strand
ugaaauaacccuugauccu

SEQ ID NO: 1706520 - RNA, 19 nt, Homo sapiens
  misc_RNA (1)...(19): siRNA sense strand
uccagagccugaagaacaa

SEQ ID NO: 1706521 - RNA, 19 nt, Homo sapiens
  misc_RNA (1)...(19): siRNA sense strand
gcugaaauaacccuugauc

SEQ ID NO: 1706522 - RNA, 19 nt, Homo sapiens
  misc_RNA (1)...(19): siRNA sense strand
ggaagcauagccacucagu

SEQ ID NO: 1706523 - RNA, 19 nt, Homo sapiens
  misc_RNA (1)...(19): siRNA sense strand
caccagcaguggcaguuca

SEQ ID NO: 1706524 - RNA, 19 nt, Homo sapiens
  misc_RNA (1)...(19): siRNA sense strand
ugaagaacaagaggaaaga

SEQ ID NO: 1706525 - RNA, 19 nt, Homo sapiens
  misc_RNA (1)...(19): siRNA sense strand
caccaaacucucuagcaaa

SEQ ID NO: 1706526 - RNA, 19 nt, Homo sapiens
  misc_RNA (1)...(19): siRNA sense strand
aagaacaagaggaaagaaa

SEQ ID NO: 1706527 - RNA, 19 nt, Homo sapiens
  misc_RNA (1)...(19): siRNA sense strand
cagaaggagcuagcugaaa

SEQ ID NO: 1706528 - RNA, 19 nt, Homo sapiens
  misc_RNA (1)...(19): siRNA sense strand
ccaccggguucuguauaug

SEQ ID NO: 1706529 - RNA, 19 nt, Homo sapiens
  misc_RNA (1)...(19): siRNA sense strand
acugcuaaguuauccacua

SEQ ID NO: 1706530 - RNA, 19 nt, Homo sapiens
  misc_RNA (1)...(19): siRNA sense strand
uaugaauggagaucaacua

SEQ ID NO: 1706531 - RNA, 19 nt, Homo sapiens
  misc_RNA (1)...(19): siRNA sense strand
cugcuaaguuauccacuag

SEQ ID NO: 1706532 - RNA, 19 nt, Homo sapiens
  misc_RNA (1)...(19): siRNA sense strand
gaaucuaucacugcaacau

SEQ ID NO: 1706533 - RNA, 19 nt, Homo sapiens
  misc_RNA (1)...(19): siRNA sense strand
ccacucaguauuugaccaa

SEQ ID NO: 1706534 - RNA, 19 nt, Homo sapiens
  misc_RNA (1)...(19): siRNA sense strand
cuccagagccugaagaaca

SEQ ID NO: 1706535 - RNA, 19 nt, Homo sapiens
  misc_RNA (1)...(19): siRNA sense strand
caacagucagggagucauc

SEQ ID NO: 1706536 - RNA, 19 nt, Homo sapiens
  misc_RNA (1)...(19): siRNA sense strand
gaccaagagauacgcaaca

SEQ ID NO: 1706537 - RNA, 19 nt, Homo sapiens
  misc_RNA (1)...(19): siRNA sense strand
caccggguucuguauauga

SEQ ID NO: 1706538 - RNA, 19 nt, Homo sapiens
  misc_RNA (1)...(19): siRNA sense strand
cauuuaagccaccaaaggu

SEQ ID NO: 1706539 - RNA, 19 nt, Homo sapiens
  misc_RNA (1)...(19): siRNA sense strand
ggauaucacauuuucauca

SEQ ID NO: 1706540 - RNA, 19 nt, Homo sapiens
  misc_RNA (1)...(19): siRNA sense strand
gacaggauagccagacagu

SEQ ID NO: 1706541 - RNA, 19 nt, Homo sapiens
  misc_RNA (1)...(19): siRNA sense strand
aaaccacugcuaaguuauc

SEQ ID NO: 1706542 - RNA, 19 nt, Homo sapiens
  misc_RNA (1)...(19): siRNA sense strand
uggacauccuuaaagacaa

SEQ ID NO: 1706543 - RNA, 19 nt, Homo sapiens
  misc_RNA (1)...(19): siRNA sense strand
ggaaugagcucuucaacaa

SEQ ID NO: 1706544 - RNA, 19 nt, Homo sapiens
  misc_RNA (1)...(19): siRNA sense strand
ggaaaggucucagaugaaa

SEQ ID NO: 1706545 - RNA, 19 nt, Homo sapiens
  misc_RNA (1)...(19): siRNA sense strand
ggaagaagcuacagcaucu

SEQ ID NO: 1706546 - RNA, 19 nt, Homo sapiens
  misc_RNA (1)...(19): siRNA sense strand
caaagauucugacugauga

SEQ ID NO: 1706547 - RNA, 19 nt, Homo sapiens
  misc_RNA (1)...(19): siRNA sense strand
gagagaagccaaacaaaga

SEQ ID NO: 1706548 - RNA, 19 nt, Homo sapiens
  misc_RNA (1)...(19): siRNA sense strand
gcagagagcaaaccaauca

SEQ ID NO: 1706549 - RNA, 19 nt, Homo sapiens
  misc_RNA (1)...(19): siRNA sense strand
ggaggacgcugcaggaaca

SEQ ID NO: 1706550 - RNA, 19 nt, Homo sapiens
  misc_RNA (1)...(19): siRNA sense strand
gaaagagaggguacaacua

SEQ ID NO: 1706551 - RNA, 19 nt, Homo sapiens
  misc_RNA (1)...(19): siRNA sense strand
aaggaaaggucucagauga

SEQ ID NO: 1706552 - RNA, 19 nt, Homo sapiens
  misc_RNA (1)...(19): siRNA sense strand
gaaagaagaggcagcaaca

SEQ ID NO: 1706553 - RNA, 19 nt, Homo sapiens
  misc_RNA (1)...(19): siRNA sense strand
aaagagaggguacaacuaa

SEQ ID NO: 1706554 - RNA, 19 nt, Homo sapiens
  misc_RNA (1)...(19): siRNA sense strand
gaagauagaggugaggaaa

SEQ ID NO: 1706555 - RNA, 19 nt, Homo sapiens
  misc_RNA (1)...(19): siRNA sense strand
cuaaggagaccacccguua

SEQ ID NO: 1706556 - RNA, 19 nt, Homo sapiens
  misc_RNA (1)...(19): siRNA sense strand
ccaacuugcuguaucagaa

SEQ ID NO: 1706557 - RNA, 19 nt, Homo sapiens
  misc_RNA (1)...(19): siRNA sense strand
gcagaaagaggaggaagaa

SEQ ID NO: 1706558 - RNA, 19 nt, Homo sapiens
  misc_RNA (1)...(19): siRNA sense strand
ggaaugaugcagaugagaa

SEQ ID NO: 1706559 - RNA, 19 nt, Homo sapiens
  misc_RNA (1)...(19): siRNA sense strand
gaaggagaaugguaucacu

SEQ ID NO: 1706560 - RNA, 19 nt, Homo sapiens
  misc_RNA (1)...(19): siRNA sense strand
gaagcuacagcaucugaaa

SEQ ID NO: 1706561 - RNA, 19 nt, Homo sapiens
  misc_RNA (1)...(19): siRNA sense strand
caacuaaagggaaugagaa

SEQ ID NO: 1706562 - RNA, 19 nt, Homo sapiens
  misc_RNA (1)...(19): siRNA sense strand
gaaggaaaggucucagaug

SEQ ID NO: 1706563 - RNA, 19 nt, Homo sapiens
  misc_RNA (1)...(19): siRNA sense strand
ugaaaggaaugaugcagau

SEQ ID NO: 1706564 - RNA, 19 nt, Homo sapiens
  misc_RNA (1)...(19): siRNA sense strand
ggagagaagccaaacaaag

SEQ ID NO: 1706565 - RNA, 19 nt, Homo sapiens
  misc_RNA (1)...(19): siRNA sense strand
ccaaggaguucacaaacca

SEQ ID NO: 1706566 - RNA, 19 nt, Homo sapiens
  misc_RNA (1)...(19): siRNA sense strand
ggacuugaaccuagaagau

SEQ ID NO: 1706567 - RNA, 19 nt, Homo sapiens
  misc_RNA (1)...(19): siRNA sense strand
acacaaggcugcccgucuu

SEQ ID NO: 1706568 - RNA, 19 nt, Homo sapiens
  misc_RNA (1)...(19): siRNA sense strand
gcaggauggaguacagaua

SEQ ID NO: 1706569 - RNA, 19 nt, Homo sapiens
  misc_RNA (1)...(19): siRNA sense strand
ccaaagauucugacugaug

SEQ ID NO: 1706570 - RNA, 19 nt, Homo sapiens
  misc_RNA (1)...(19): siRNA sense strand
gacaugacccugccaagga

SEQ ID NO: 1706571 - RNA, 19 nt, Homo sapiens
  misc_RNA (1)...(19): siRNA sense strand
ggagaccacccguuauaau

SEQ ID NO: 1706572 - RNA, 19 nt, Homo sapiens
  misc_RNA (1)...(19): siRNA sense strand
gauucugacugaugagaug

SEQ ID NO: 1706573 - RNA, 19 nt, Homo sapiens
  misc_RNA (1)...(19): siRNA sense strand
caggauggaguacagauaa

SEQ ID NO: 1706574 - RNA, 19 nt, Homo sapiens
  misc_RNA (1)...(19): siRNA sense strand
gggugacacugaagcaaga

SEQ ID NO: 1706575 - RNA, 19 nt, Homo sapiens
  misc_RNA (1)...(19): siRNA sense strand
gacuugaaccuagaagaua

SEQ ID NO: 1706576 - RNA, 19 nt, Homo sapiens
  misc_RNA (1)...(19): siRNA sense strand
guagagagcagggcauaug

SEQ ID NO: 1706577 - RNA, 19 nt, Homo sapiens
  misc_RNA (1)...(19): siRNA sense strand
gagaagcacccagaacaug

SEQ ID NO: 1706578 - RNA, 19 nt, Homo sapiens
  misc_RNA (1)...(19): siRNA sense strand
uggauggacucaaggcaaa

SEQ ID NO: 1706579 - RNA, 19 nt, Homo sapiens
  misc_RNA (1)...(19): siRNA sense strand
ccaugcagccgaagaaaga

SEQ ID NO: 1706580 - RNA, 19 nt, Homo sapiens
  misc_RNA (1)...(19): siRNA sense strand
aaggagaccacccguuaua

SEQ ID NO: 1706581 - RNA, 19 nt, Homo sapiens
  misc_RNA (1)...(19): siRNA sense strand
gaaagaggaggaagaagcu

SEQ ID NO: 1706582 - RNA, 19 nt, Homo sapiens
  misc_RNA (1)...(19): siRNA sense strand
gaagccaaacaaagacuug

SEQ ID NO: 1706583 - RNA, 19 nt, Homo sapiens
  misc_RNA (1)...(19): siRNA sense strand
gagaccacccguuauaauc

SEQ ID NO: 1706584 - RNA, 19 nt, Homo sapiens
  misc_RNA (1)...(19): siRNA sense strand
cuuccuggcucgucucaaa

SEQ ID NO: 1706585 - RNA, 19 nt, Homo sapiens
  misc_RNA (1)...(19): siRNA sense strand
aagcauggauggacucaag

SEQ ID NO: 1706586 - RNA, 19 nt, Homo sapiens
  misc_RNA (1)...(19): siRNA sense strand
ggaggaggacuugaaccua

SEQ ID NO: 1706587 - RNA, 19 nt, Homo sapiens
  misc_RNA (1)...(19): siRNA sense strand
aaaggaaugaugcagauga

SEQ ID NO: 1706588 - RNA, 19 nt, Homo sapiens
  misc_RNA (1)...(19): siRNA sense strand
aaaggucucagaugaaaga

SEQ ID NO: 1706589 - RNA, 19 nt, Homo sapiens
  misc_RNA (1)...(19): siRNA sense strand
gaaaaggcgacaucaagaa

SEQ ID NO: 1706590 - RNA, 19 nt, Homo sapiens
  misc_RNA (1)...(19): siRNA sense strand
caagcuugcucgccuagag

SEQ ID NO: 1706591 - RNA, 19 nt, Homo sapiens
  misc_RNA (1)...(19): siRNA sense strand
gcagagagcagagcaugca

SEQ ID NO: 1706592 - RNA, 19 nt, Homo sapiens
  misc_RNA (1)...(19): siRNA sense strand
cuaaagggaaugagaagga

SEQ ID NO: 1706593 - RNA, 19 nt, Homo sapiens
  misc_RNA (1)...(19): siRNA sense strand
aagagaggguacaacuaaa

SEQ ID NO: 1706594 - RNA, 19 nt, Homo sapiens
  misc_RNA (1)...(19): siRNA sense strand
ggguacaacuaaagggaau

SEQ ID NO: 1706595 - RNA, 19 nt, Homo sapiens
  misc_RNA (1)...(19): siRNA sense strand
ggagcggacccagcaauga

SEQ ID NO: 1706596 - RNA, 19 nt, Homo sapiens
  misc_RNA (1)...(19): siRNA sense strand
guacaacuaaagggaauga

SEQ ID NO: 1706597 - RNA, 19 nt, Homo sapiens
  misc_RNA (1)...(19): siRNA sense strand
uacagcaucugaaaggaau

SEQ ID NO: 1706598 - RNA, 19 nt, Homo sapiens
  misc_RNA (1)...(19): siRNA sense strand
ccaaucagucccucaggaa

SEQ ID NO: 1706599 - RNA, 19 nt, Homo sapiens
  misc_RNA (1)...(19): siRNA sense strand
gaccacccguuauaaucau

SEQ ID NO: 1706600 - RNA, 19 nt, Homo sapiens
  misc_RNA (1)...(19): siRNA sense strand
gaaugaugcagaugagaag

SEQ ID NO: 1706601 - RNA, 19 nt, Homo sapiens
  misc_RNA (1)...(19): siRNA sense strand
guggagagaagccaaacaa

SEQ ID NO: 1706602 - RNA, 19 nt, Homo sapiens
  misc_RNA (1)...(19): siRNA sense strand
ugaaagagaggguacaacu

SEQ ID NO: 1706603 - RNA, 19 nt, Homo sapiens
  misc_RNA (1)...(19): siRNA sense strand
cgucuugggaucacaauga

SEQ ID NO: 1706604 - RNA, 19 nt, Homo sapiens
  misc_RNA (1)...(19): siRNA sense strand
ccccaaagauucugacuga

SEQ ID NO: 1706605 - RNA, 19 nt, Homo sapiens
  misc_RNA (1)...(19): siRNA sense strand
gaaaggaaugaugcagaug

SEQ ID NO: 1706606 - RNA, 19 nt, Homo sapiens
  misc_RNA (1)...(19): siRNA sense strand
uagcagagagcaaaccaau

SEQ ID NO: 1706607 - RNA, 19 nt, Homo sapiens
  misc_RNA (1)...(19): siRNA sense strand
gaugaaagagaggguacaa

SEQ ID NO: 1706608 - RNA, 19 nt, Homo sapiens
  misc_RNA (1)...(19): siRNA sense strand
gcuacagcaucugaaagga

SEQ ID NO: 1706609 - RNA, 19 nt, Homo sapiens
  misc_RNA (1)...(19): siRNA sense strand
cuacagcaucugaaaggaa

SEQ ID NO: 1706610 - RNA, 19 nt, Homo sapiens
  misc_RNA (1)...(19): siRNA sense strand
caaucagucccucaggaaa

SEQ ID NO: 1706611 - RNA, 19 nt, Homo sapiens
  misc_RNA (1)...(19): siRNA sense strand
gauggaguacagauaagga

SEQ ID NO: 1706612 - RNA, 19 nt, Homo sapiens
  misc_RNA (1)...(19): siRNA sense strand
agauagaggugaggaaacu

SEQ ID NO: 1706613 - RNA, 19 nt, Homo sapiens
  misc_RNA (1)...(19): siRNA sense strand
gaagaaaaggcgacaucaa

SEQ ID NO: 1706614 - RNA, 19 nt, Homo sapiens
  misc_RNA (1)...(19): siRNA sense strand
uaaggagaccacccguuau

SEQ ID NO: 1706615 - RNA, 19 nt, Homo sapiens
  misc_RNA (1)...(19): siRNA sense strand
gucuugggaucacaaugaa

SEQ ID NO: 1706616 - RNA, 19 nt, Homo sapiens
  misc_RNA (1)...(19): siRNA sense strand
gaaugagcucuucaacaag

SEQ ID NO: 1706617 - RNA, 19 nt, Homo sapiens
  misc_RNA (1)...(19): siRNA sense strand
aaggcgacaucaagaagga

SEQ ID NO: 1706618 - RNA, 19 nt, Homo sapiens
  misc_RNA (1)...(19): siRNA sense strand
agaccacccguuauaauca

SEQ ID NO: 1706619 - RNA, 19 nt, Homo sapiens
  misc_RNA (1)...(19): siRNA sense strand
ggacgcugcaggaacaagu

SEQ ID NO: 1706620 - RNA, 19 nt, Homo sapiens
  misc_RNA (1)...(19): siRNA sense strand
caagagucgugggaugaag

SEQ ID NO: 1706621 - RNA, 19 nt, Homo sapiens
  misc_RNA (1)...(19): siRNA sense strand
ggaggacuugaaccuagaa

SEQ ID NO: 1706622 - RNA, 19 nt, Homo sapiens
  misc_RNA (1)...(19): siRNA sense strand
ggcagaaagaggaggaaga

SEQ ID NO: 1706623 - RNA, 19 nt, Homo sapiens
  misc_RNA (1)...(19): siRNA sense strand
auagaggugaggaaacuuu

SEQ ID NO: 1706624 - RNA, 19 nt, Homo sapiens
  misc_RNA (1)...(19): siRNA sense strand
uugaauagcagagagcaaa

SEQ ID NO: 1706625 - RNA, 19 nt, Homo sapiens
  misc_RNA (1)...(19): siRNA sense strand
acaacuaaagggaaugaga

SEQ ID NO: 1706626 - RNA, 19 nt, Homo sapiens
  misc_RNA (1)...(19): siRNA sense strand
aagaagcuacagcaucuga

SEQ ID NO: 1706627 - RNA, 19 nt, Homo sapiens
  misc_RNA (1)...(19): siRNA sense strand
gucaagagucgugggauga

SEQ ID NO: 1706628 - RNA, 19 nt, Homo sapiens
  misc_RNA (1)...(19): siRNA sense strand
ggaggaggaggacuugaac

SEQ ID NO: 1706629 - RNA, 19 nt, Homo sapiens
  misc_RNA (1)...(19): siRNA sense strand
gacccaugcagccgaagaa

SEQ ID NO: 1706630 - RNA, 19 nt, Homo sapiens
  misc_RNA (1)...(19): siRNA sense strand
gagaggguacaacuaaagg

SEQ ID NO: 1706631 - RNA, 19 nt, Homo sapiens
  misc_RNA (1)...(19): siRNA sense strand
gaaaggucucagaugaaag

SEQ ID NO: 1706632 - RNA, 19 nt, Homo sapiens
  misc_RNA (1)...(19): siRNA sense strand
gaugagaagcacccagaac

SEQ ID NO: 1706633 - RNA, 19 nt, Homo sapiens
  misc_RNA (1)...(19): siRNA sense strand
gccaaggaguucacaaacc

SEQ ID NO: 1706634 - RNA, 19 nt, Homo sapiens
  misc_RNA (1)...(19): siRNA sense strand
caacuugcuguaucagaag

SEQ ID NO: 1706635 - RNA, 19 nt, Homo sapiens
  misc_RNA (1)...(19): siRNA sense strand
acuugaaccuagaagauag

SEQ ID NO: 1706636 - RNA, 19 nt, Homo sapiens
  misc_RNA (1)...(19): siRNA sense strand
ggccggaaggagaauggua

SEQ ID NO: 1706637 - RNA, 19 nt, Homo sapiens
  misc_RNA (1)...(19): siRNA sense strand
gagcggacccagcaaugac

SEQ ID NO: 1706638 - RNA, 19 nt, Homo sapiens
  misc_RNA (1)...(19): siRNA sense strand
aggaggacuugaaccuaga

SEQ ID NO: 1706639 - RNA, 19 nt, Homo sapiens
  misc_RNA (1)...(19): siRNA sense strand
aagcccaacuugcuguauc

SEQ ID NO: 1706640 - RNA, 19 nt, Homo sapiens
  misc_RNA (1)...(19): siRNA sense strand
acaagacugcggccaacuu

SEQ ID NO: 1706641 - RNA, 19 nt, Homo sapiens
  misc_RNA (1)...(19): siRNA sense strand
gggaauugaauagcagaga

SEQ ID NO: 1706642 - RNA, 19 nt, Homo sapiens
  misc_RNA (1)...(19): siRNA sense strand
gguggaaugagcucuucaa

SEQ ID NO: 1706643 - RNA, 19 nt, Homo sapiens
  misc_RNA (1)...(19): siRNA sense strand
ggaaugagcucuucaacaa

SEQ ID NO: 1706644 - RNA, 19 nt, Homo sapiens
  misc_RNA (1)...(19): siRNA sense strand
cuaaggagaccacccguua

SEQ ID NO: 1706645 - RNA, 19 nt, Homo sapiens
  misc_RNA (1)...(19): siRNA sense strand
ccaacuugcuguaucagaa

SEQ ID NO: 1706646 - RNA, 19 nt, Homo sapiens
  misc_RNA (1)...(19): siRNA sense strand
gaaggagaaugguaucacu

SEQ ID NO: 1706647 - RNA, 19 nt, Homo sapiens
  misc_RNA (1)...(19): siRNA sense strand
ccaaggaguucacaaacca

SEQ ID NO: 1706648 - RNA, 19 nt, Homo sapiens
  misc_RNA (1)...(19): siRNA sense strand
gcaggauggaguacagaua

SEQ ID NO: 1706649 - RNA, 19 nt, Homo sapiens
  misc_RNA (1)...(19): siRNA sense strand
gacaugacccugccaagga

SEQ ID NO: 1706650 - RNA, 19 nt, Homo sapiens
  misc_RNA (1)...(19): siRNA sense strand
ggagaccacccguuauaau

SEQ ID NO: 1706651 - RNA, 19 nt, Homo sapiens
  misc_RNA (1)...(19): siRNA sense strand
caggauggaguacagauaa

SEQ ID NO: 1706652 - RNA, 19 nt, Homo sapiens
  misc_RNA (1)...(19): siRNA sense strand
gggugacacugaagcaaga

SEQ ID NO: 1706653 - RNA, 19 nt, Homo sapiens
  misc_RNA (1)...(19): siRNA sense strand
uggauggacucaaggcaaa

SEQ ID NO: 1706654 - RNA, 19 nt, Homo sapiens
  misc_RNA (1)...(19): siRNA sense strand
aaggagaccacccguuaua

SEQ ID NO: 1706655 - RNA, 19 nt, Homo sapiens
  misc_RNA (1)...(19): siRNA sense strand
gagaccacccguuauaauc

SEQ ID NO: 1706656 - RNA, 19 nt, Homo sapiens
  misc_RNA (1)...(19): siRNA sense strand
aagcauggauggacucaag

SEQ ID NO: 1706657 - RNA, 19 nt, Homo sapiens
  misc_RNA (1)...(19): siRNA sense strand
gaccacccguuauaaucau

SEQ ID NO: 1706658 - RNA, 19 nt, Homo sapiens
  misc_RNA (1)...(19): siRNA sense strand
gauggaguacagauaagga

SEQ ID NO: 1706659 - RNA, 19 nt, Homo sapiens
  misc_RNA (1)...(19): siRNA sense strand
uaaggagaccacccguuau

SEQ ID NO: 1706660 - RNA, 19 nt, Homo sapiens
  misc_RNA (1)...(19): siRNA sense strand
gaaugagcucuucaacaag

SEQ ID NO: 1706661 - RNA, 19 nt, Homo sapiens
  misc_RNA (1)...(19): siRNA sense strand
agaccacccguuauaauca

SEQ ID NO: 1706662 - RNA, 19 nt, Homo sapiens
  misc_RNA (1)...(19): siRNA sense strand
caagagucgugggaugaag

SEQ ID NO: 1706663 - RNA, 19 nt, Homo sapiens
  misc_RNA (1)...(19): siRNA sense strand
gccaaggaguucacaaacc

SEQ ID NO: 1706664 - RNA, 19 nt, Homo sapiens
  misc_RNA (1)...(19): siRNA sense strand
gucaagagucgugggauga

SEQ ID NO: 1706665 - RNA, 19 nt, Homo sapiens
  misc_RNA (1)...(19): siRNA sense strand
ggccggaaggagaauggua

SEQ ID NO: 1706666 - RNA, 19 nt, Homo sapiens
  misc_RNA (1)...(19): siRNA sense strand
caacuugcuguaucagaag

SEQ ID NO: 1706667 - RNA, 19 nt, Homo sapiens
  misc_RNA (1)...(19): siRNA sense strand
gguggaaugagcucuucaa

SEQ ID NO: 1706668 - RNA, 19 nt, Homo sapiens
  misc_RNA (1)...(19): siRNA sense strand
aagcccaacuugcuguauc

SEQ ID NO: 1706669 - RNA, 19 nt, Homo sapiens
  misc_RNA (1)...(19): siRNA sense strand
gccggaaggagaaugguau

SEQ ID NO: 1706670 - RNA, 19 nt, Homo sapiens
  misc_RNA (1)...(19): siRNA sense strand
acaagacugcggccaacuu

SEQ ID NO: 1706671 - RNA, 19 nt, Homo sapiens
  misc_RNA (1)...(19): siRNA sense strand
ggaaugagcucuucaacaa

SEQ ID NO: 1706672 - RNA, 19 nt, Homo sapiens
  misc_RNA (1)...(19): siRNA sense strand
ggaaaggucucagaugaaa

SEQ ID NO: 1706673 - RNA, 19 nt, Homo sapiens
  misc_RNA (1)...(19): siRNA sense strand
ggaagaagcuacagcaucu

SEQ ID NO: 1706674 - RNA, 19 nt, Homo sapiens
  misc_RNA (1)...(19): siRNA sense strand
caaagauucugacugauga

SEQ ID NO: 1706675 - RNA, 19 nt, Homo sapiens
  misc_RNA (1)...(19): siRNA sense strand
gagagaagccaaacaaaga

SEQ ID NO: 1706676 - RNA, 19 nt, Homo sapiens
  misc_RNA (1)...(19): siRNA sense strand
gcagagagcaaaccaauca

SEQ ID NO: 1706677 - RNA, 19 nt, Homo sapiens
  misc_RNA (1)...(19): siRNA sense strand
ggaggacgcugcaggaaca

SEQ ID NO: 1706678 - RNA, 19 nt, Homo sapiens
  misc_RNA (1)...(19): siRNA sense strand
gaaagagaggguacaacua

SEQ ID NO: 1706679 - RNA, 19 nt, Homo sapiens
  misc_RNA (1)...(19): siRNA sense strand
aaggaaaggucucagauga

SEQ ID NO: 1706680 - RNA, 19 nt, Homo sapiens
  misc_RNA (1)...(19): siRNA sense strand
gaaagaagaggcagcaaca

SEQ ID NO: 1706681 - RNA, 19 nt, Homo sapiens
  misc_RNA (1)...(19): siRNA sense strand
aaagagaggguacaacuaa

SEQ ID NO: 1706682 - RNA, 19 nt, Homo sapiens
  misc_RNA (1)...(19): siRNA sense strand
gaagauagaggugaggaaa

SEQ ID NO: 1706683 - RNA, 19 nt, Homo sapiens
  misc_RNA (1)...(19): siRNA sense strand
cuaaggagaccacccguua

SEQ ID NO: 1706684 - RNA, 19 nt, Homo sapiens
  misc_RNA (1)...(19): siRNA sense strand
ccaacuugcuguaucagaa

SEQ ID NO: 1706685 - RNA, 19 nt, Homo sapiens
  misc_RNA (1)...(19): siRNA sense strand
gcagaaagaggaggaagaa

SEQ ID NO: 1706686 - RNA, 19 nt, Homo sapiens
  misc_RNA (1)...(19): siRNA sense strand
ggaaugaugcagaugagaa

SEQ ID NO: 1706687 - RNA, 19 nt, Homo sapiens
  misc_RNA (1)...(19): siRNA sense strand
gaaggagaaugguaucacu

SEQ ID NO: 1706688 - RNA, 19 nt, Homo sapiens
  misc_RNA (1)...(19): siRNA sense strand
gaagcuacagcaucugaaa

SEQ ID NO: 1706689 - RNA, 19 nt, Homo sapiens
  misc_RNA (1)...(19): siRNA sense strand
caacuaaagggaaugagaa

SEQ ID NO: 1706690 - RNA, 19 nt, Homo sapiens
  misc_RNA (1)...(19): siRNA sense strand
gaaggaaaggucucagaug

SEQ ID NO: 1706691 - RNA, 19 nt, Homo sapiens
  misc_RNA (1)...(19): siRNA sense strand
ugaaaggaaugaugcagau

SEQ ID NO: 1706692 - RNA, 19 nt, Homo sapiens
  misc_RNA (1)...(19): siRNA sense strand
ggagagaagccaaacaaag

SEQ ID NO: 1706693 - RNA, 19 nt, Homo sapiens
  misc_RNA (1)...(19): siRNA sense strand
ccaaggaguucacaaacca

SEQ ID NO: 1706694 - RNA, 19 nt, Homo sapiens
  misc_RNA (1)...(19): siRNA sense strand
ggacuugaaccuagaagau

SEQ ID NO: 1706695 - RNA, 19 nt, Homo sapiens
  misc_RNA (1)...(19): siRNA sense strand
acacaaggcugcccgucuu

SEQ ID NO: 1706696 - RNA, 19 nt, Homo sapiens
  misc_RNA (1)...(19): siRNA sense strand
gcaggauggaguacagaua

SEQ ID NO: 1706697 - RNA, 19 nt, Homo sapiens
  misc_RNA (1)...(19): siRNA sense strand
ccaaagauucugacugaug

SEQ ID NO: 1706698 - RNA, 19 nt, Homo sapiens
  misc_RNA (1)...(19): siRNA sense strand
gacaugacccugccaagga

SEQ ID NO: 1706699 - RNA, 19 nt, Homo sapiens
  misc_RNA (1)...(19): siRNA sense strand
ggagaccacccguuauaau

SEQ ID NO: 1706700 - RNA, 19 nt, Homo sapiens
  misc_RNA (1)...(19): siRNA sense strand
gauucugacugaugagaug

SEQ ID NO: 1706701 - RNA, 19 nt, Homo sapiens
  misc_RNA (1)...(19): siRNA sense strand
caggauggaguacagauaa

SEQ ID NO: 1706702 - RNA, 19 nt, Homo sapiens
  misc_RNA (1)...(19): siRNA sense strand
gggugacacugaagcaaga

SEQ ID NO: 1706703 - RNA, 19 nt, Homo sapiens
  misc_RNA (1)...(19): siRNA sense strand
gacuugaaccuagaagaua

SEQ ID NO: 1706704 - RNA, 19 nt, Homo sapiens
  misc_RNA (1)...(19): siRNA sense strand
guagagagcagggcauaug

SEQ ID NO: 1706705 - RNA, 19 nt, Homo sapiens
  misc_RNA (1)...(19): siRNA sense strand
gagaagcacccagaacaug

SEQ ID NO: 1706706 - RNA, 19 nt, Homo sapiens
  misc_RNA (1)...(19): siRNA sense strand
uggauggacucaaggcaaa

SEQ ID NO: 1706707 - RNA, 19 nt, Homo sapiens
  misc_RNA (1)...(19): siRNA sense strand
ccaugcagccgaagaaaga

SEQ ID NO: 1706708 - RNA, 19 nt, Homo sapiens
  misc_RNA (1)...(19): siRNA sense strand
aaggagaccacccguuaua

SEQ ID NO: 1706709 - RNA, 19 nt, Homo sapiens
  misc_RNA (1)...(19): siRNA sense strand
gaaagaggaggaagaagcu

SEQ ID NO: 1706710 - RNA, 19 nt, Homo sapiens
  misc_RNA (1)...(19): siRNA sense strand
gaagccaaacaaagacuug

SEQ ID NO: 1706711 - RNA, 19 nt, Homo sapiens
  misc_RNA (1)...(19): siRNA sense strand
gagaccacccguuauaauc

SEQ ID NO: 1706712 - RNA, 19 nt, Homo sapiens
  misc_RNA (1)...(19): siRNA sense strand
cuuccuggcucgucucaaa

SEQ ID NO: 1706713 - RNA, 19 nt, Homo sapiens
  misc_RNA (1)...(19): siRNA sense strand
ggaggaggacuugaaccua

SEQ ID NO: 1706714 - RNA, 19 nt, Homo sapiens
  misc_RNA (1)...(19): siRNA sense strand
aagcauggauggacucaag

SEQ ID NO: 1706715 - RNA, 19 nt, Homo sapiens
  misc_RNA (1)...(19): siRNA sense strand
aaaggaaugaugcagauga

SEQ ID NO: 1706716 - RNA, 19 nt, Homo sapiens
  misc_RNA (1)...(19): siRNA sense strand
aaaggucucagaugaaaga

SEQ ID NO: 1706717 - RNA, 19 nt, Homo sapiens
  misc_RNA (1)...(19): siRNA sense strand
gaaaaggcgacaucaagaa

SEQ ID NO: 1706718 - RNA, 19 nt, Homo sapiens
  misc_RNA (1)...(19): siRNA sense strand
caagcuugcucgccuagag

SEQ ID NO: 1706719 - RNA, 19 nt, Homo sapiens
  misc_RNA (1)...(19): siRNA sense strand
gcagagagcagagcaugca

SEQ ID NO: 1706720 - RNA, 19 nt, Homo sapiens
  misc_RNA (1)...(19): siRNA sense strand
cuaaagggaaugagaagga

SEQ ID NO: 1706721 - RNA, 19 nt, Homo sapiens
  misc_RNA (1)...(19): siRNA sense strand
aagagaggguacaacuaaa

SEQ ID NO: 1706722 - RNA, 19 nt, Homo sapiens
  misc_RNA (1)...(19): siRNA sense strand
ggguacaacuaaagggaau

SEQ ID NO: 1706723 - RNA, 19 nt, Homo sapiens
  misc_RNA (1)...(19): siRNA sense strand
uacagcaucugaaaggaau

SEQ ID NO: 1706724 - RNA, 19 nt, Homo sapiens
  misc_RNA (1)...(19): siRNA sense strand
guacaacuaaagggaauga

SEQ ID NO: 1706725 - RNA, 19 nt, Homo sapiens
  misc_RNA (1)...(19): siRNA sense strand
ccaaucagucccucaggaa

SEQ ID NO: 1706726 - RNA, 19 nt, Homo sapiens
  misc_RNA (1)...(19): siRNA sense strand
gaccacccguuauaaucau

SEQ ID NO: 1706727 - RNA, 19 nt, Homo sapiens
  misc_RNA (1)...(19): siRNA sense strand
gaaugaugcagaugagaag

SEQ ID NO: 1706728 - RNA, 19 nt, Homo sapiens
  misc_RNA (1)...(19): siRNA sense strand
guggagagaagccaaacaa

SEQ ID NO: 1706729 - RNA, 19 nt, Homo sapiens
  misc_RNA (1)...(19): siRNA sense strand
ugaaagagaggguacaacu

SEQ ID NO: 1706730 - RNA, 19 nt, Homo sapiens
  misc_RNA (1)...(19): siRNA sense strand
cgucuugggaucacaauga

SEQ ID NO: 1706731 - RNA, 19 nt, Homo sapiens
  misc_RNA (1)...(19): siRNA sense strand
ccccaaagauucugacuga

SEQ ID NO: 1706732 - RNA, 19 nt, Homo sapiens
  misc_RNA (1)...(19): siRNA sense strand
gaaaggaaugaugcagaug

SEQ ID NO: 1706733 - RNA, 19 nt, Homo sapiens
  misc_RNA (1)...(19): siRNA sense strand
uagcagagagcaaaccaau

SEQ ID NO: 1706734 - RNA, 19 nt, Homo sapiens
  misc_RNA (1)...(19): siRNA sense strand
gaugaaagagaggguacaa

SEQ ID NO: 1706735 - RNA, 19 nt, Homo sapiens
  misc_RNA (1)...(19): siRNA sense strand
gcuacagcaucugaaagga

SEQ ID NO: 1706736 - RNA, 19 nt, Homo sapiens
  misc_RNA (1)...(19): siRNA sense strand
cuacagcaucugaaaggaa

SEQ ID NO: 1706737 - RNA, 19 nt, Homo sapiens
  misc_RNA (1)...(19): siRNA sense strand
caaucagucccucaggaaa

SEQ ID NO: 1706738 - RNA, 19 nt, Homo sapiens
  misc_RNA (1)...(19): siRNA sense strand
gauggaguacagauaagga

SEQ ID NO: 1706739 - RNA, 19 nt, Homo sapiens
  misc_RNA (1)...(19): siRNA sense strand
agauagaggugaggaaacu

SEQ ID NO: 1706740 - RNA, 19 nt, Homo sapiens
  misc_RNA (1)...(19): siRNA sense strand
gaagaaaaggcgacaucaa

SEQ ID NO: 1706741 - RNA, 19 nt, Homo sapiens
  misc_RNA (1)...(19): siRNA sense strand
uaaggagaccacccguuau

SEQ ID NO: 1706742 - RNA, 19 nt, Homo sapiens
  misc_RNA (1)...(19): siRNA sense strand
gucuugggaucacaaugaa

SEQ ID NO: 1706743 - RNA, 19 nt, Homo sapiens
  misc_RNA (1)...(19): siRNA sense strand
aaggcgacaucaagaagga

SEQ ID NO: 1706744 - RNA, 19 nt, Homo sapiens
  misc_RNA (1)...(19): siRNA sense strand
gaaugagcucuucaacaag

SEQ ID NO: 1706745 - RNA, 19 nt, Homo sapiens
  misc_RNA (1)...(19): siRNA sense strand
agaccacccguuauaauca

SEQ ID NO: 1706746 - RNA, 19 nt, Homo sapiens
  misc_RNA (1)...(19): siRNA sense strand
ggacgcugcaggaacaagu

SEQ ID NO: 1706747 - RNA, 19 nt, Homo sapiens
  misc_RNA (1)...(19): siRNA sense strand
caagagucgugggaugaag

SEQ ID NO: 1706748 - RNA, 19 nt, Homo sapiens
  misc_RNA (1)...(19): siRNA sense strand
ggaggacuugaaccuagaa

SEQ ID NO: 1706749 - RNA, 19 nt, Homo sapiens
  misc_RNA (1)...(19): siRNA sense strand
ggcagaaagaggaggaaga

SEQ ID NO: 1706750 - RNA, 19 nt, Homo sapiens
  misc_RNA (1)...(19): siRNA sense strand
auagaggugaggaaacuuu

SEQ ID NO: 1706751 - RNA, 19 nt, Homo sapiens
  misc_RNA (1)...(19): siRNA sense strand
uugaauagcagagagcaaa

SEQ ID NO: 1706752 - RNA, 19 nt, Homo sapiens
  misc_RNA (1)...(19): siRNA sense strand
acaacuaaagggaaugaga

SEQ ID NO: 1706753 - RNA, 19 nt, Homo sapiens
  misc_RNA (1)...(19): siRNA sense strand
aagaagcuacagcaucuga

SEQ ID NO: 1706754 - RNA, 19 nt, Homo sapiens
  misc_RNA (1)...(19): siRNA sense strand
gaugagaagcacccagaac

SEQ ID NO: 1706755 - RNA, 19 nt, Homo sapiens
  misc_RNA (1)...(19): siRNA sense strand
ggaggaggaggacuugaac

SEQ ID NO: 1706756 - RNA, 19 nt, Homo sapiens
  misc_RNA (1)...(19): siRNA sense strand
gacccaugcagccgaagaa

SEQ ID NO: 1706757 - RNA, 19 nt, Homo sapiens
  misc_RNA (1)...(19): siRNA sense strand
gucaagagucgugggauga

SEQ ID NO: 1706758 - RNA, 19 nt, Homo sapiens
  misc_RNA (1)...(19): siRNA sense strand
gagaggguacaacuaaagg

SEQ ID NO: 1706759 - RNA, 19 nt, Homo sapiens
  misc_RNA (1)...(19): siRNA sense strand
gccaaggaguucacaaacc

SEQ ID NO: 1706760 - RNA, 19 nt, Homo sapiens
  misc_RNA (1)...(19): siRNA sense strand
gaaaggucucagaugaaag

SEQ ID NO: 1706761 - RNA, 19 nt, Homo sapiens
  misc_RNA (1)...(19): siRNA sense strand
ggccggaaggagaauggua

SEQ ID NO: 1706762 - RNA, 19 nt, Homo sapiens
  misc_RNA (1)...(19): siRNA sense strand
acuugaaccuagaagauag

SEQ ID NO: 1706763 - RNA, 19 nt, Homo sapiens
  misc_RNA (1)...(19): siRNA sense strand
caacuugcuguaucagaag

SEQ ID NO: 1706764 - RNA, 19 nt, Homo sapiens
  misc_RNA (1)...(19): siRNA sense strand
aagcccaacuugcuguauc

SEQ ID NO: 1706765 - RNA, 19 nt, Homo sapiens
  misc_RNA (1)...(19): siRNA sense strand
aggaggacuugaaccuaga

SEQ ID NO: 1706766 - RNA, 19 nt, Homo sapiens
  misc_RNA (1)...(19): siRNA sense strand
gggaauugaauagcagaga

SEQ ID NO: 1706767 - RNA, 19 nt, Homo sapiens
  misc_RNA (1)...(19): siRNA sense strand
gguggaaugagcucuucaa

SEQ ID NO: 1706768 - RNA, 19 nt, Homo sapiens
  misc_RNA (1)...(19): siRNA sense strand
acaagacugcggccaacuu

SEQ ID NO: 1706769 - RNA, 19 nt, Homo sapiens
  misc_RNA (1)...(19): siRNA sense strand
gccggaaggagaaugguau

SEQ ID NO: 1706770 - RNA, 19 nt, Homo sapiens
  misc_RNA (1)...(19): siRNA sense strand
ggaaugagcucuucaacaa

SEQ ID NO: 1706771 - RNA, 19 nt, Homo sapiens
  misc_RNA (1)...(19): siRNA sense strand
ggaaaggucucagaugaaa

SEQ ID NO: 1706772 - RNA, 19 nt, Homo sapiens
  misc_RNA (1)...(19): siRNA sense strand
ggaagaagcuacagcaucu

SEQ ID NO: 1706773 - RNA, 19 nt, Homo sapiens
  misc_RNA (1)...(19): siRNA sense strand
caaagauucugacugauga

SEQ ID NO: 1706774 - RNA, 19 nt, Homo sapiens
  misc_RNA (1)...(19): siRNA sense strand
gagagaagccaaacaaaga

SEQ ID NO: 1706775 - RNA, 19 nt, Homo sapiens
  misc_RNA (1)...(19): siRNA sense strand
gcagagagcaaaccaauca

SEQ ID NO: 1706776 - RNA, 19 nt, Homo sapiens
  misc_RNA (1)...(19): siRNA sense strand
ggaggacgcugcaggaaca

SEQ ID NO: 1706777 - RNA, 19 nt, Homo sapiens
  misc_RNA (1)...(19): siRNA sense strand
gaaagagaggguacaacua

SEQ ID NO: 1706778 - RNA, 19 nt, Homo sapiens
  misc_RNA (1)...(19): siRNA sense strand
aaggaaaggucucagauga

SEQ ID NO: 1706779 - RNA, 19 nt, Homo sapiens
  misc_RNA (1)...(19): siRNA sense strand
gaaagaagaggcagcaaca

SEQ ID NO: 1706780 - RNA, 19 nt, Homo sapiens
  misc_RNA (1)...(19): siRNA sense strand
aaagagaggguacaacuaa

SEQ ID NO: 1706781 - RNA, 19 nt, Homo sapiens
  misc_RNA (1)...(19): siRNA sense strand
gaagauagaggugaggaaa

SEQ ID NO: 1706782 - RNA, 19 nt, Homo sapiens
  misc_RNA (1)...(19): siRNA sense strand
cuaaggagaccacccguua

SEQ ID NO: 1706783 - RNA, 19 nt, Homo sapiens
  misc_RNA (1)...(19): siRNA sense strand
ccaacuugcuguaucagaa

SEQ ID NO: 1706784 - RNA, 19 nt, Homo sapiens
  misc_RNA (1)...(19): siRNA sense strand
gcagaaagaggaggaagaa

SEQ ID NO: 1706785 - RNA, 19 nt, Homo sapiens
  misc_RNA (1)...(19): siRNA sense strand
ggaaugaugcagaugagaa

SEQ ID NO: 1706786 - RNA, 19 nt, Homo sapiens
  misc_RNA (1)...(19): siRNA sense strand
gaaggagaaugguaucacu

SEQ ID NO: 1706787 - RNA, 19 nt, Homo sapiens
  misc_RNA (1)...(19): siRNA sense strand
gaagcuacagcaucugaaa

SEQ ID NO: 1706788 - RNA, 19 nt, Homo sapiens
  misc_RNA (1)...(19): siRNA sense strand
caacuaaagggaaugagaa

SEQ ID NO: 1706789 - RNA, 19 nt, Homo sapiens
  misc_RNA (1)...(19): siRNA sense strand
gaaggaaaggucucagaug

SEQ ID NO: 1706790 - RNA, 19 nt, Homo sapiens
  misc_RNA (1)...(19): siRNA sense strand
ugaaaggaaugaugcagau

SEQ ID NO: 1706791 - RNA, 19 nt, Homo sapiens
  misc_RNA (1)...(19): siRNA sense strand
ggagagaagccaaacaaag

SEQ ID NO: 1706792 - RNA, 19 nt, Homo sapiens
  misc_RNA (1)...(19): siRNA sense strand
ccaaggaguucacaaacca

SEQ ID NO: 1706793 - RNA, 19 nt, Homo sapiens
  misc_RNA (1)...(19): siRNA sense strand
ggacuugaaccuagaagau

SEQ ID NO: 1706794 - RNA, 19 nt, Homo sapiens
  misc_RNA (1)...(19): siRNA sense strand
acacaaggcugcccgucuu

SEQ ID NO: 1706795 - RNA, 19 nt, Homo sapiens
  misc_RNA (1)...(19): siRNA sense strand
gcaggauggaguacagaua

SEQ ID NO: 1706796 - RNA, 19 nt, Homo sapiens
  misc_RNA (1)...(19): siRNA sense strand
ccaaagauucugacugaug

SEQ ID NO: 1706797 - RNA, 19 nt, Homo sapiens
  misc_RNA (1)...(19): siRNA sense strand
gacaugacccugccaagga

SEQ ID NO: 1706798 - RNA, 19 nt, Homo sapiens
  misc_RNA (1)...(19): siRNA sense strand
ggagaccacccguuauaau

SEQ ID NO: 1706799 - RNA, 19 nt, Homo sapiens
  misc_RNA (1)...(19): siRNA sense strand
gauucugacugaugagaug

SEQ ID NO: 1706800 - RNA, 19 nt, Homo sapiens
  misc_RNA (1)...(19): siRNA sense strand
caggauggaguacagauaa

SEQ ID NO: 1706801 - RNA, 19 nt, Homo sapiens
  misc_RNA (1)...(19): siRNA sense strand
gggugacacugaagcaaga

SEQ ID NO: 1706802 - RNA, 19 nt, Homo sapiens
  misc_RNA (1)...(19): siRNA sense strand
gacuugaaccuagaagaua

SEQ ID NO: 1706803 - RNA, 19 nt, Homo sapiens
  misc_RNA (1)...(19): siRNA sense strand
guagagagcagggcauaug

SEQ ID NO: 1706804 - RNA, 19 nt, Homo sapiens
  misc_RNA (1)...(19): siRNA sense strand
gagaagcacccagaacaug

SEQ ID NO: 1706805 - RNA, 19 nt, Homo sapiens
  misc_RNA (1)...(19): siRNA sense strand
uggauggacucaaggcaaa

SEQ ID NO: 1706806 - RNA, 19 nt, Homo sapiens
  misc_RNA (1)...(19): siRNA sense strand
ccaugcagccgaagaaaga

SEQ ID NO: 1706807 - RNA, 19 nt, Homo sapiens
  misc_RNA (1)...(19): siRNA sense strand
aaggagaccacccguuaua

SEQ ID NO: 1706808 - RNA, 19 nt, Homo sapiens
  misc_RNA (1)...(19): siRNA sense strand
gaaagaggaggaagaagcu

SEQ ID NO: 1706809 - RNA, 19 nt, Homo sapiens
  misc_RNA (1)...(19): siRNA sense strand
gaagccaaacaaagacuug

SEQ ID NO: 1706810 - RNA, 19 nt, Homo sapiens
  misc_RNA (1)...(19): siRNA sense strand
gagaccacccguuauaauc

SEQ ID NO: 1706811 - RNA, 19 nt, Homo sapiens
  misc_RNA (1)...(19): siRNA sense strand
cuuccuggcucgucucaaa

SEQ ID NO: 1706812 - RNA, 19 nt, Homo sapiens
  misc_RNA (1)...(19): siRNA sense strand
aagcauggauggacucaag

SEQ ID NO: 1706813 - RNA, 19 nt, Homo sapiens
  misc_RNA (1)...(19): siRNA sense strand
ggaggaggacuugaaccua

SEQ ID NO: 1706814 - RNA, 19 nt, Homo sapiens
  misc_RNA (1)...(19): siRNA sense strand
aaaggaaugaugcagauga

SEQ ID NO: 1706815 - RNA, 19 nt, Homo sapiens
  misc_RNA (1)...(19): siRNA sense strand
aaaggucucagaugaaaga

SEQ ID NO: 1706816 - RNA, 19 nt, Homo sapiens
  misc_RNA (1)...(19): siRNA sense strand
gaaaaggcgacaucaagaa

SEQ ID NO: 1706817 - RNA, 19 nt, Homo sapiens
  misc_RNA (1)...(19): siRNA sense strand
caagcuugcucgccuagag

SEQ ID NO: 1706818 - RNA, 19 nt, Homo sapiens
  misc_RNA (1)...(19): siRNA sense strand
gcagagagcagagcaugca

SEQ ID NO: 1706819 - RNA, 19 nt, Homo sapiens
  misc_RNA (1)...(19): siRNA sense strand
cuaaagggaaugagaagga

SEQ ID NO: 1706820 - RNA, 19 nt, Homo sapiens
  misc_RNA (1)...(19): siRNA sense strand
aagagaggguacaacuaaa

SEQ ID NO: 1706821 - RNA, 19 nt, Homo sapiens
  misc_RNA (1)...(19): siRNA sense strand
ggguacaacuaaagggaau

SEQ ID NO: 1706822 - RNA, 19 nt, Homo sapiens
  misc_RNA (1)...(19): siRNA sense strand
uacagcaucugaaaggaau

SEQ ID NO: 1706823 - RNA, 19 nt, Homo sapiens
  misc_RNA (1)...(19): siRNA sense strand
guacaacuaaagggaauga

SEQ ID NO: 1706824 - RNA, 19 nt, Homo sapiens
  misc_RNA (1)...(19): siRNA sense strand
ggagcggacccagcaauga

SEQ ID NO: 1706825 - RNA, 19 nt, Homo sapiens
  misc_RNA (1)...(19): siRNA sense strand
ccaaucagucccucaggaa

SEQ ID NO: 1706826 - RNA, 19 nt, Homo sapiens
  misc_RNA (1)...(19): siRNA sense strand
gaccacccguuauaaucau

SEQ ID NO: 1706827 - RNA, 19 nt, Homo sapiens
  misc_RNA (1)...(19): siRNA sense strand
gaaugaugcagaugagaag

SEQ ID NO: 1706828 - RNA, 19 nt, Homo sapiens
  misc_RNA (1)...(19): siRNA sense strand
guggagagaagccaaacaa

SEQ ID NO: 1706829 - RNA, 19 nt, Homo sapiens
  misc_RNA (1)...(19): siRNA sense strand
ugaaagagaggguacaacu

SEQ ID NO: 1706830 - RNA, 19 nt, Homo sapiens
  misc_RNA (1)...(19): siRNA sense strand
cgucuugggaucacaauga

SEQ ID NO: 1706831 - RNA, 19 nt, Homo sapiens
  misc_RNA (1)...(19): siRNA sense strand
ccccaaagauucugacuga

SEQ ID NO: 1706832 - RNA, 19 nt, Homo sapiens
  misc_RNA (1)...(19): siRNA sense strand
gaaaggaaugaugcagaug

SEQ ID NO: 1706833 - RNA, 19 nt, Homo sapiens
  misc_RNA (1)...(19): siRNA sense strand
uagcagagagcaaaccaau

SEQ ID NO: 1706834 - RNA, 19 nt, Homo sapiens
  misc_RNA (1)...(19): siRNA sense strand
gaugaaagagaggguacaa

SEQ ID NO: 1706835 - RNA, 19 nt, Homo sapiens
  misc_RNA (1)...(19): siRNA sense strand
gcuacagcaucugaaagga

SEQ ID NO: 1706836 - RNA, 19 nt, Homo sapiens
  misc_RNA (1)...(19): siRNA sense strand
cuacagcaucugaaaggaa

SEQ ID NO: 1706837 - RNA, 19 nt, Homo sapiens
  misc_RNA (1)...(19): siRNA sense strand
caaucagucccucaggaaa

SEQ ID NO: 1706838 - RNA, 19 nt, Homo sapiens
  misc_RNA (1)...(19): siRNA sense strand
gauggaguacagauaagga

SEQ ID NO: 1706839 - RNA, 19 nt, Homo sapiens
  misc_RNA (1)...(19): siRNA sense strand
agauagaggugaggaaacu

SEQ ID NO: 1706840 - RNA, 19 nt, Homo sapiens
  misc_RNA (1)...(19): siRNA sense strand
gaagaaaaggcgacaucaa

SEQ ID NO: 1706841 - RNA, 19 nt, Homo sapiens
  misc_RNA (1)...(19): siRNA sense strand
caagucagguccggcacau

SEQ ID NO: 1706842 - RNA, 19 nt, Homo sapiens
  misc_RNA (1)...(19): siRNA sense strand
uaaggagaccacccguuau

SEQ ID NO: 1706843 - RNA, 19 nt, Homo sapiens
  misc_RNA (1)...(19): siRNA sense strand
gucuugggaucacaaugaa

SEQ ID NO: 1706844 - RNA, 19 nt, Homo sapiens
  misc_RNA (1)...(19): siRNA sense strand
gaaugagcucuucaacaag

SEQ ID NO: 1706845 - RNA, 19 nt, Homo sapiens
  misc_RNA (1)...(19): siRNA sense strand
aaggcgacaucaagaagga

SEQ ID NO: 1706846 - RNA, 19 nt, Homo sapiens
  misc_RNA (1)...(19): siRNA sense strand
agaccacccguuauaauca

SEQ ID NO: 1706847 - RNA, 19 nt, Homo sapiens
  misc_RNA (1)...(19): siRNA sense strand
caagagucgugggaugaag

SEQ ID NO: 1706848 - RNA, 19 nt, Homo sapiens
  misc_RNA (1)...(19): siRNA sense strand
ggacgcugcaggaacaagu

SEQ ID NO: 1706849 - RNA, 19 nt, Homo sapiens
  misc_RNA (1)...(19): siRNA sense strand
ucagguccggcacauguuu

SEQ ID NO: 1706850 - RNA, 19 nt, Homo sapiens
  misc_RNA (1)...(19): siRNA sense strand
ggaggacuugaaccuagaa

SEQ ID NO: 1706851 - RNA, 19 nt, Homo sapiens
  misc_RNA (1)...(19): siRNA sense strand
ggcagaaagaggaggaaga

SEQ ID NO: 1706852 - RNA, 19 nt, Homo sapiens
  misc_RNA (1)...(19): siRNA sense strand
auagaggugaggaaacuuu

SEQ ID NO: 1706853 - RNA, 19 nt, Homo sapiens
  misc_RNA (1)...(19): siRNA sense strand
uugaauagcagagagcaaa

SEQ ID NO: 1706854 - RNA, 19 nt, Homo sapiens
  misc_RNA (1)...(19): siRNA sense strand
acaacuaaagggaaugaga

SEQ ID NO: 1706855 - RNA, 19 nt, Homo sapiens
  misc_RNA (1)...(19): siRNA sense strand
aagaagcuacagcaucuga

SEQ ID NO: 1706856 - RNA, 19 nt, Homo sapiens
  misc_RNA (1)...(19): siRNA sense strand
gaugagaagcacccagaac

SEQ ID NO: 1706857 - RNA, 19 nt, Homo sapiens
  misc_RNA (1)...(19): siRNA sense strand
ggaggaggaggacuugaac

SEQ ID NO: 1706858 - RNA, 19 nt, Homo sapiens
  misc_RNA (1)...(19): siRNA sense strand
gacccaugcagccgaagaa

SEQ ID NO: 1706859 - RNA, 19 nt, Homo sapiens
  misc_RNA (1)...(19): siRNA sense strand
gagaggguacaacuaaagg

SEQ ID NO: 1706860 - RNA, 19 nt, Homo sapiens
  misc_RNA (1)...(19): siRNA sense strand
gucaagagucgugggauga

SEQ ID NO: 1706861 - RNA, 19 nt, Homo sapiens
  misc_RNA (1)...(19): siRNA sense strand
gccaaggaguucacaaacc

SEQ ID NO: 1706862 - RNA, 19 nt, Homo sapiens
  misc_RNA (1)...(19): siRNA sense strand
gaaaggucucagaugaaag

SEQ ID NO: 1706863 - RNA, 19 nt, Homo sapiens
  misc_RNA (1)...(19): siRNA sense strand
caacuugcuguaucagaag

SEQ ID NO: 1706864 - RNA, 19 nt, Homo sapiens
  misc_RNA (1)...(19): siRNA sense strand
acuugaaccuagaagauag

SEQ ID NO: 1706865 - RNA, 19 nt, Homo sapiens
  misc_RNA (1)...(19): siRNA sense strand
ggccggaaggagaauggua

SEQ ID NO: 1706866 - RNA, 19 nt, Homo sapiens
  misc_RNA (1)...(19): siRNA sense strand
gguggaaugagcucuucaa

SEQ ID NO: 1706867 - RNA, 19 nt, Homo sapiens
  misc_RNA (1)...(19): siRNA sense strand
aggaggacuugaaccuaga

SEQ ID NO: 1706868 - RNA, 19 nt, Homo sapiens
  misc_RNA (1)...(19): siRNA sense strand
gagcggacccagcaaugac

SEQ ID NO: 1706869 - RNA, 19 nt, Homo sapiens
  misc_RNA (1)...(19): siRNA sense strand
gggaauugaauagcagaga

SEQ ID NO: 1706870 - RNA, 19 nt, Homo sapiens
  misc_RNA (1)...(19): siRNA sense strand
gaagugguaccagagcaua

SEQ ID NO: 1706871 - RNA, 19 nt, Homo sapiens
  misc_RNA (1)...(19): siRNA sense strand
ucuggaagcuuggccauca

SEQ ID NO: 1706872 - RNA, 19 nt, Homo sapiens
  misc_RNA (1)...(19): siRNA sense strand
cuccaugacuccaauccaa

SEQ ID NO: 1706873 - RNA, 19 nt, Homo sapiens
  misc_RNA (1)...(19): siRNA sense strand
caccguacccuuccuaugg

SEQ ID NO: 1706874 - RNA, 19 nt, Homo sapiens
  misc_RNA (1)...(19): siRNA sense strand
caacacuccaugacuccaa

SEQ ID NO: 1706875 - RNA, 19 nt, Homo sapiens
  misc_RNA (1)...(19): siRNA sense strand
ggaccuggauuuuauuugc

SEQ ID NO: 1706876 - RNA, 19 nt, Homo sapiens
  misc_RNA (1)...(19): siRNA sense strand
aagcuuggccaucaacaga

SEQ ID NO: 1706877 - RNA, 19 nt, Homo sapiens
  misc_RNA (1)...(19): siRNA sense strand
gcuuggccaucaacagaca

SEQ ID NO: 1706878 - RNA, 19 nt, Homo sapiens
  misc_RNA (1)...(19): siRNA sense strand
caucaacagacaagaccaa

SEQ ID NO: 1706879 - RNA, 19 nt, Homo sapiens
  misc_RNA (1)...(19): siRNA sense strand
gaucugacucuggaagcuu

SEQ ID NO: 1706880 - RNA, 19 nt, Homo sapiens
  misc_RNA (1)...(19): siRNA sense strand
gcgggaggaaguggauuaa

SEQ ID NO: 1706881 - RNA, 19 nt, Homo sapiens
  misc_RNA (1)...(19): siRNA sense strand
agaccaagcgggaggaagu

SEQ ID NO: 1706882 - RNA, 19 nt, Homo sapiens
  misc_RNA (1)...(19): siRNA sense strand
gaagugguaccagagcaua

SEQ ID NO: 1706883 - RNA, 19 nt, Homo sapiens
  misc_RNA (1)...(19): siRNA sense strand
ucuggaagcuuggccauca

SEQ ID NO: 1706884 - RNA, 19 nt, Homo sapiens
  misc_RNA (1)...(19): siRNA sense strand
cuccaugacuccaauccaa

SEQ ID NO: 1706885 - RNA, 19 nt, Homo sapiens
  misc_RNA (1)...(19): siRNA sense strand
caccguacccuuccuaugg

SEQ ID NO: 1706886 - RNA, 19 nt, Homo sapiens
  misc_RNA (1)...(19): siRNA sense strand
caacacuccaugacuccaa

SEQ ID NO: 1706887 - RNA, 19 nt, Homo sapiens
  misc_RNA (1)...(19): siRNA sense strand
ggaccuggauuuuauuugc

SEQ ID NO: 1706888 - RNA, 19 nt, Homo sapiens
  misc_RNA (1)...(19): siRNA sense strand
aagcuuggccaucaacaga

SEQ ID NO: 1706889 - RNA, 19 nt, Homo sapiens
  misc_RNA (1)...(19): siRNA sense strand
gcuuggccaucaacagaca

SEQ ID NO: 1706890 - RNA, 19 nt, Homo sapiens
  misc_RNA (1)...(19): siRNA sense strand
caucaacagacaagaccaa

SEQ ID NO: 1706891 - RNA, 19 nt, Homo sapiens
  misc_RNA (1)...(19): siRNA sense strand
gaucugacucuggaagcuu

SEQ ID NO: 1706892 - RNA, 19 nt, Homo sapiens
  misc_RNA (1)...(19): siRNA sense strand
gcgggaggaaguggauuaa

SEQ ID NO: 1706893 - RNA, 19 nt, Homo sapiens
  misc_RNA (1)...(19): siRNA sense strand
agaccaagcgggaggaagu

SEQ ID NO: 1706894 - RNA, 19 nt, Homo sapiens
  misc_RNA (1)...(19): siRNA sense strand
gaagugguaccagagcaua

SEQ ID NO: 1706895 - RNA, 19 nt, Homo sapiens
  misc_RNA (1)...(19): siRNA sense strand
ucuggaagcuuggccauca

SEQ ID NO: 1706896 - RNA, 19 nt, Homo sapiens
  misc_RNA (1)...(19): siRNA sense strand
cuccaugacuccaauccaa

SEQ ID NO: 1706897 - RNA, 19 nt, Homo sapiens
  misc_RNA (1)...(19): siRNA sense strand
caccguacccuuccuaugg

SEQ ID NO: 1706898 - RNA, 19 nt, Homo sapiens
  misc_RNA (1)...(19): siRNA sense strand
caacacuccaugacuccaa

SEQ ID NO: 1706899 - RNA, 19 nt, Homo sapiens
  misc_RNA (1)...(19): siRNA sense strand
ggaccuggauuuuauuugc

SEQ ID NO: 1706900 - RNA, 19 nt, Homo sapiens
  misc_RNA (1)...(19): siRNA sense strand
aagcuuggccaucaacaga

SEQ ID NO: 1706901 - RNA, 19 nt, Homo sapiens
  misc_RNA (1)...(19): siRNA sense strand
gcuuggccaucaacagaca

SEQ ID NO: 1706902 - RNA, 19 nt, Homo sapiens
  misc_RNA (1)...(19): siRNA sense strand
caucaacagacaagaccaa

SEQ ID NO: 1706903 - RNA, 19 nt, Homo sapiens
  misc_RNA (1)...(19): siRNA sense strand
gaucugacucuggaagcuu

SEQ ID NO: 1706904 - RNA, 19 nt, Homo sapiens
  misc_RNA (1)...(19): siRNA sense strand
gcgggaggaaguggauuaa

SEQ ID NO: 1706905 - RNA, 19 nt, Homo sapiens
  misc_RNA (1)...(19): siRNA sense strand
agaccaagcgggaggaagu

SEQ ID NO: 1706906 - RNA, 19 nt, Homo sapiens
  misc_RNA (1)...(19): siRNA sense strand
acaaagauaugcagaacaa

SEQ ID NO: 1706907 - RNA, 19 nt, Homo sapiens
  misc_RNA (1)...(19): siRNA sense strand
ggugagaccugccugaaug

SEQ ID NO: 1706908 - RNA, 19 nt, Homo sapiens
  misc_RNA (1)...(19): siRNA sense strand
gcagaggcguggcagacua

SEQ ID NO: 1706909 - RNA, 19 nt, Homo sapiens
  misc_RNA (1)...(19): siRNA sense strand
gaacugcucugaggagauc

SEQ ID NO: 1706910 - RNA, 19 nt, Homo sapiens
  misc_RNA (1)...(19): siRNA sense strand
acagagagcuccugcuuca

SEQ ID NO: 1706911 - RNA, 19 nt, Homo sapiens
  misc_RNA (1)...(19): siRNA sense strand
ggacaucacggaucauaug

SEQ ID NO: 1706912 - RNA, 19 nt, Homo sapiens
  misc_RNA (1)...(19): siRNA sense strand
caacagcuccuuccacuuc

SEQ ID NO: 1706913 - RNA, 19 nt, Homo sapiens
  misc_RNA (1)...(19): siRNA sense strand
gcgacaagguguugacguu

SEQ ID NO: 1706914 - RNA, 19 nt, Homo sapiens
  misc_RNA (1)...(19): siRNA sense strand
gcacacggccagcagauga

SEQ ID NO: 1706915 - RNA, 19 nt, Homo sapiens
  misc_RNA (1)...(19): siRNA sense strand
gcacagagagcuccugcuu

SEQ ID NO: 1706916 - RNA, 19 nt, Homo sapiens
  misc_RNA (1)...(19): siRNA sense strand
ggccagaacugugaggaaa

SEQ ID NO: 1706917 - RNA, 19 nt, Homo sapiens
  misc_RNA (1)...(19): siRNA sense strand
ggcaagcccugcaagaaug

SEQ ID NO: 1706918 - RNA, 19 nt, Homo sapiens
  misc_RNA (1)...(19): siRNA sense strand
ggagugggaccaacuguga

SEQ ID NO: 1706919 - RNA, 19 nt, Homo sapiens
  misc_RNA (1)...(19): siRNA sense strand
gaacggggcuaacaaagau

SEQ ID NO: 1706920 - RNA, 19 nt, Homo sapiens
  misc_RNA (1)...(19): siRNA sense strand
gcagcgagaacauugauga

SEQ ID NO: 1706921 - RNA, 19 nt, Homo sapiens
  misc_RNA (1)...(19): siRNA sense strand
uaacaaagauaugcagaac

SEQ ID NO: 1706922 - RNA, 19 nt, Homo sapiens
  misc_RNA (1)...(19): siRNA sense strand
caauguggaugccgcaguu

SEQ ID NO: 1706923 - RNA, 19 nt, Homo sapiens
  misc_RNA (1)...(19): siRNA sense strand
ccugagggcuucaaagugu

SEQ ID NO: 1706924 - RNA, 19 nt, Homo sapiens
  misc_RNA (1)...(19): siRNA sense strand
gcaagaauggugccaagug

SEQ ID NO: 1706925 - RNA, 19 nt, Homo sapiens
  misc_RNA (1)...(19): siRNA sense strand
ggacccaacugcgagauca

SEQ ID NO: 1706926 - RNA, 19 nt, Homo sapiens
  misc_RNA (1)...(19): siRNA sense strand
caacgaguguggccagaag

SEQ ID NO: 1706927 - RNA, 19 nt, Homo sapiens
  misc_RNA (1)...(19): siRNA sense strand
gcgcaugcaucacgacauc

SEQ ID NO: 1706928 - RNA, 19 nt, Homo sapiens
  misc_RNA (1)...(19): siRNA sense strand
cgagaacauugaugacugu

SEQ ID NO: 1706929 - RNA, 19 nt, Homo sapiens
  misc_RNA (1)...(19): siRNA sense strand
gaagcaaggaggccaagga

SEQ ID NO: 1706930 - RNA, 19 nt, Homo sapiens
  misc_RNA (1)...(19): siRNA sense strand
cgucaucaauggcugcaaa

SEQ ID NO: 1706931 - RNA, 19 nt, Homo sapiens
  misc_RNA (1)...(19): siRNA sense strand
gaugcgagaucgacgucaa

SEQ ID NO: 1706932 - RNA, 19 nt, Homo sapiens
  misc_RNA (1)...(19): siRNA sense strand
uggacaagaucaaugaguu

SEQ ID NO: 1706933 - RNA, 19 nt, Homo sapiens
  misc_RNA (1)...(19): siRNA sense strand
caacauccaggacaacaug

SEQ ID NO: 1706934 - RNA, 19 nt, Homo sapiens
  misc_RNA (1)...(19): siRNA sense strand
ggacaagaucaaugaguuc

SEQ ID NO: 1706935 - RNA, 19 nt, Homo sapiens
  misc_RNA (1)...(19): siRNA sense strand
ugaggcugcuggacgagua

SEQ ID NO: 1706936 - RNA, 19 nt, Homo sapiens
  misc_RNA (1)...(19): siRNA sense strand
gcgaguccgucaucaaugg

SEQ ID NO: 1706937 - RNA, 19 nt, Homo sapiens
  misc_RNA (1)...(19): siRNA sense strand
caguugugcuccugaagaa

SEQ ID NO: 1706938 - RNA, 19 nt, Homo sapiens
  misc_RNA (1)...(19): siRNA sense strand
gaccaacugugacaucaac

SEQ ID NO: 1706939 - RNA, 19 nt, Homo sapiens
  misc_RNA (1)...(19): siRNA sense strand
gcaguugugcuccugaaga

SEQ ID NO: 1706940 - RNA, 19 nt, Homo sapiens
  misc_RNA (1)...(19): siRNA sense strand
ggacugugcggagcaugua

SEQ ID NO: 1706941 - RNA, 19 nt, Homo sapiens
  misc_RNA (1)...(19): siRNA sense strand
ucagcgggauccacuguga

SEQ ID NO: 1706942 - RNA, 19 nt, Homo sapiens
  misc_RNA (1)...(19): siRNA sense strand
gaauccaacccuuguguca

SEQ ID NO: 1706943 - RNA, 19 nt, Homo sapiens
  misc_RNA (1)...(19): siRNA sense strand
ggacugcagcgagaacauu

SEQ ID NO: 1706944 - RNA, 19 nt, Homo sapiens
  misc_RNA (1)...(19): siRNA sense strand
caacguggacgacugcaau

SEQ ID NO: 1706945 - RNA, 19 nt, Homo sapiens
  misc_RNA (1)...(19): siRNA sense strand
ggacggacccaacacuuac

SEQ ID NO: 1706946 - RNA, 19 nt, Homo sapiens
  misc_RNA (1)...(19): siRNA sense strand
gcacugcgaggucaacaca

SEQ ID NO: 1706947 - RNA, 19 nt, Homo sapiens
  misc_RNA (1)...(19): siRNA sense strand
gcaaaggcaagcccugcaa

SEQ ID NO: 1706948 - RNA, 19 nt, Homo sapiens
  misc_RNA (1)...(19): siRNA sense strand
ccugugaggucgacaucaa

SEQ ID NO: 1706949 - RNA, 19 nt, Homo sapiens
  misc_RNA (1)...(19): siRNA sense strand
ggugugcacugugagauca

SEQ ID NO: 1706950 - RNA, 19 nt, Homo sapiens
  misc_RNA (1)...(19): siRNA sense strand
gaagaacggggcuaacaaa

SEQ ID NO: 1706951 - RNA, 19 nt, Homo sapiens
  misc_RNA (1)...(19): siRNA sense strand
ugacugcucccucaacuuc

SEQ ID NO: 1706952 - RNA, 19 nt, Homo sapiens
  misc_RNA (1)...(19): siRNA sense strand
caaauucaacgggcucuug

SEQ ID NO: 1706953 - RNA, 19 nt, Homo sapiens
  misc_RNA (1)...(19): siRNA sense strand
gggaccaacugugacauca

SEQ ID NO: 1706954 - RNA, 19 nt, Homo sapiens
  misc_RNA (1)...(19): siRNA sense strand
uagaugaccugggcaaguc

SEQ ID NO: 1706955 - RNA, 19 nt, Homo sapiens
  misc_RNA (1)...(19): siRNA sense strand
cgacgucacccacgagugu

SEQ ID NO: 1706956 - RNA, 19 nt, Homo sapiens
  misc_RNA (1)...(19): siRNA sense strand
ccaagaaguuccgguucga

SEQ ID NO: 1706957 - RNA, 19 nt, Homo sapiens
  misc_RNA (1)...(19): siRNA sense strand
acaacgaggucggcuccua

SEQ ID NO: 1706958 - RNA, 19 nt, Homo sapiens
  misc_RNA (1)...(19): siRNA sense strand
acagggagcauguguaaca

SEQ ID NO: 1706959 - RNA, 19 nt, Homo sapiens
  misc_RNA (1)...(19): siRNA sense strand
gaacaacagggaggagaca

SEQ ID NO: 1706960 - RNA, 19 nt, Homo sapiens
  misc_RNA (1)...(19): siRNA sense strand
uggacggacccaacacuua

SEQ ID NO: 1706961 - RNA, 19 nt, Homo sapiens
  misc_RNA (1)...(19): siRNA sense strand
ugucccagaugaugagcua

SEQ ID NO: 1706962 - RNA, 19 nt, Homo sapiens
  misc_RNA (1)...(19): siRNA sense strand
cacaaggugucuuccagau

SEQ ID NO: 1706963 - RNA, 19 nt, Homo sapiens
  misc_RNA (1)...(19): siRNA sense strand
acgaggaccuggagaccaa

SEQ ID NO: 1706964 - RNA, 19 nt, Homo sapiens
  misc_RNA (1)...(19): siRNA sense strand
ggcaauccgaggacuauga

SEQ ID NO: 1706965 - RNA, 19 nt, Homo sapiens
  misc_RNA (1)...(19): siRNA sense strand
gcagccaggacguggauga

SEQ ID NO: 1706966 - RNA, 19 nt, Homo sapiens
  misc_RNA (1)...(19): siRNA sense strand
aaagauaugcagaacaaca

SEQ ID NO: 1706967 - RNA, 19 nt, Homo sapiens
  misc_RNA (1)...(19): siRNA sense strand
gcgugcagcgcgucaauga

SEQ ID NO: 1706968 - RNA, 19 nt, Homo sapiens
  misc_RNA (1)...(19): siRNA sense strand
gcaggcaauccgaggacua

SEQ ID NO: 1706969 - RNA, 19 nt, Homo sapiens
  misc_RNA (1)...(19): siRNA sense strand
aaccagggcacguguauug

SEQ ID NO: 1706970 - RNA, 19 nt, Homo sapiens
  misc_RNA (1)...(19): siRNA sense strand
acugugacaucaacaacaa

SEQ ID NO: 1706971 - RNA, 19 nt, Homo sapiens
  misc_RNA (1)...(19): siRNA sense strand
gaucgauggcuacgagugu

SEQ ID NO: 1706972 - RNA, 19 nt, Homo sapiens
  misc_RNA (1)...(19): siRNA sense strand
ucaacacgcugggcuccuu

SEQ ID NO: 1706973 - RNA, 19 nt, Homo sapiens
  misc_RNA (1)...(19): siRNA sense strand
cacaggagcgcaugcauca

SEQ ID NO: 1706974 - RNA, 19 nt, Homo sapiens
  misc_RNA (1)...(19): siRNA sense strand
ccaggaaacaacugcaaga

SEQ ID NO: 1706975 - RNA, 19 nt, Homo sapiens
  misc_RNA (1)...(19): siRNA sense strand
gcacagacggcaucaacac

SEQ ID NO: 1706976 - RNA, 19 nt, Homo sapiens
  misc_RNA (1)...(19): siRNA sense strand
gcgggcaagugcaucaaca

SEQ ID NO: 1706977 - RNA, 19 nt, Homo sapiens
  misc_RNA (1)...(19): siRNA sense strand
cggcgcagcugcacuucau

SEQ ID NO: 1706978 - RNA, 19 nt, Homo sapiens
  misc_RNA (1)...(19): siRNA sense strand
ucgucuaccuggagauuga

SEQ ID NO: 1706979 - RNA, 19 nt, Homo sapiens
  misc_RNA (1)...(19): siRNA sense strand
gaaccagggcacguguauu

SEQ ID NO: 1706980 - RNA, 19 nt, Homo sapiens
  misc_RNA (1)...(19): siRNA sense strand
gguacaagugcgacuguga

SEQ ID NO: 1706981 - RNA, 19 nt, Homo sapiens
  misc_RNA (1)...(19): siRNA sense strand
gaucaaccuggaugacugu

SEQ ID NO: 1706982 - RNA, 19 nt, Homo sapiens
  misc_RNA (1)...(19): siRNA sense strand
ucgaggccgugcagaguga

SEQ ID NO: 1706983 - RNA, 19 nt, Homo sapiens
  misc_RNA (1)...(19): siRNA sense strand
guacugcaaggaccacuuc

SEQ ID NO: 1706984 - RNA, 19 nt, Homo sapiens
  misc_RNA (1)...(19): siRNA sense strand
gagaacaacacgccugacu

SEQ ID NO: 1706985 - RNA, 19 nt, Homo sapiens
  misc_RNA (1)...(19): siRNA sense strand
ggacgagugccagcugaug

SEQ ID NO: 1706986 - RNA, 19 nt, Homo sapiens
  misc_RNA (1)...(19): siRNA sense strand
gaucgaggccgugcagagu

SEQ ID NO: 1706987 - RNA, 19 nt, Homo sapiens
  misc_RNA (1)...(19): siRNA sense strand
gggauccacugugagaaca

SEQ ID NO: 1706988 - RNA, 19 nt, Homo sapiens
  misc_RNA (1)...(19): siRNA sense strand
ggcggcaccugcaaagaca

SEQ ID NO: 1706989 - RNA, 19 nt, Homo sapiens
  misc_RNA (1)...(19): siRNA sense strand
ucaaugagugcaacagcaa

SEQ ID NO: 1706990 - RNA, 19 nt, Homo sapiens
  misc_RNA (1)...(19): siRNA sense strand
acaccaacccugucaaugg

SEQ ID NO: 1706991 - RNA, 19 nt, Homo sapiens
  misc_RNA (1)...(19): siRNA sense strand
guaacgagggcuccaacug

SEQ ID NO: 1706992 - RNA, 19 nt, Homo sapiens
  misc_RNA (1)...(19): siRNA sense strand
gcuacgagugugccuguga

SEQ ID NO: 1706993 - RNA, 19 nt, Homo sapiens
  misc_RNA (1)...(19): siRNA sense strand
gccuggcggugcacacuau

SEQ ID NO: 1706994 - RNA, 19 nt, Homo sapiens
  misc_RNA (1)...(19): siRNA sense strand
cgucaucuccgacuucauc

SEQ ID NO: 1706995 - RNA, 19 nt, Homo sapiens
  misc_RNA (1)...(19): siRNA sense strand
ggcagacccacacccagua

SEQ ID NO: 1706996 - RNA, 19 nt, Homo sapiens
  misc_RNA (1)...(19): siRNA sense strand
ggaccaacugugacaucaa

SEQ ID NO: 1706997 - RNA, 19 nt, Homo sapiens
  misc_RNA (1)...(19): siRNA sense strand
gggcuucacugggcaucug

SEQ ID NO: 1706998 - RNA, 19 nt, Homo sapiens
  misc_RNA (1)...(19): siRNA sense strand
cuaacaaagauaugcagaa

SEQ ID NO: 1706999 - RNA, 19 nt, Homo sapiens
  misc_RNA (1)...(19): siRNA sense strand
cgacgucaacgccguagau

SEQ ID NO: 1707000 - RNA, 19 nt, Homo sapiens
  misc_RNA (1)...(19): siRNA sense strand
caacauccccuacaagauc

SEQ ID NO: 1707001 - RNA, 19 nt, Homo sapiens
  misc_RNA (1)...(19): siRNA sense strand
ugaauggcgggaaguguga

SEQ ID NO: 1707002 - RNA, 19 nt, Homo sapiens
  misc_RNA (1)...(19): siRNA sense strand
ccagcacgaugucaaugag

SEQ ID NO: 1707003 - RNA, 19 nt, Homo sapiens
  misc_RNA (1)...(19): siRNA sense strand
ucaacgagugugccaguga

SEQ ID NO: 1707004 - RNA, 19 nt, Homo sapiens
  misc_RNA (1)...(19): siRNA sense strand
ugacagccagugcaacuca

SEQ ID NO: 1707005 - RNA, 19 nt, Homo sapiens
  misc_RNA (1)...(19): siRNA sense strand
cagcaggugcagccacaaa

SEQ ID NO: 1707006 - RNA, 19 nt, Homo sapiens
  misc_RNA (1)...(19): siRNA sense strand
caaaugagguugucacaga

SEQ ID NO: 1707007 - RNA, 19 nt, Homo sapiens
  misc_RNA (1)...(19): siRNA sense strand
gcagagaaaccucaagaaa

SEQ ID NO: 1707008 - RNA, 19 nt, Homo sapiens
  misc_RNA (1)...(19): siRNA sense strand
guacgugggucccuaugaa

SEQ ID NO: 1707009 - RNA, 19 nt, Homo sapiens
  misc_RNA (1)...(19): siRNA sense strand
gagcaucauugcaaacaug

SEQ ID NO: 1707010 - RNA, 19 nt, Homo sapiens
  misc_RNA (1)...(19): siRNA sense strand
caagacaugucauucaagu

SEQ ID NO: 1707011 - RNA, 19 nt, Homo sapiens
  misc_RNA (1)...(19): siRNA sense strand
ggagagugcugggauggaa

SEQ ID NO: 1707012 - RNA, 19 nt, Homo sapiens
  misc_RNA (1)...(19): siRNA sense strand
caacggaugcuuuaucaga

SEQ ID NO: 1707013 - RNA, 19 nt, Homo sapiens
  misc_RNA (1)...(19): siRNA sense strand
agacaugucauucaaguuu

SEQ ID NO: 1707014 - RNA, 19 nt, Homo sapiens
  misc_RNA (1)...(19): siRNA sense strand
acacuugccuggcgaacaa

SEQ ID NO: 1707015 - RNA, 19 nt, Homo sapiens
  misc_RNA (1)...(19): siRNA sense strand
guacaagcauccugacaac

SEQ ID NO: 1707016 - RNA, 19 nt, Homo sapiens
  misc_RNA (1)...(19): siRNA sense strand
ccacagagcaccagcaaag

SEQ ID NO: 1707017 - RNA, 19 nt, Homo sapiens
  misc_RNA (1)...(19): siRNA sense strand
ccagaugacuugugagaac

SEQ ID NO: 1707018 - RNA, 19 nt, Homo sapiens
  misc_RNA (1)...(19): siRNA sense strand
cagcagagauaauggaaac

SEQ ID NO: 1707019 - RNA, 19 nt, Homo sapiens
  misc_RNA (1)...(19): siRNA sense strand
ggcgugagcuggagaagca

SEQ ID NO: 1707020 - RNA, 19 nt, Homo sapiens
  misc_RNA (1)...(19): siRNA sense strand
cacaggagcuugcaacaac

SEQ ID NO: 1707021 - RNA, 19 nt, Homo sapiens
  misc_RNA (1)...(19): siRNA sense strand
ggagaacagccacgucuuc

SEQ ID NO: 1707022 - RNA, 19 nt, Homo sapiens
  misc_RNA (1)...(19): siRNA sense strand
gagcguggccgacaagauc

SEQ ID NO: 1707023 - RNA, 19 nt, Homo sapiens
  misc_RNA (1)...(19): siRNA sense strand
cagcaucacuggcaugaac

SEQ ID NO: 1707024 - RNA, 19 nt, Homo sapiens
  misc_RNA (1)...(19): siRNA sense strand
gcacggguaugagcuccaa

SEQ ID NO: 1707025 - RNA, 19 nt, Homo sapiens
  misc_RNA (1)...(19): siRNA sense strand
gguuauggccugcacagaa

SEQ ID NO: 1707026 - RNA, 19 nt, Homo sapiens
  misc_RNA (1)...(19): siRNA sense strand
caaauuccccgaagacuuu

SEQ ID NO: 1707027 - RNA, 19 nt, Homo sapiens
  misc_RNA (1)...(19): siRNA sense strand
gggaaagccugaggagucu

SEQ ID NO: 1707028 - RNA, 19 nt, Homo sapiens
  misc_RNA (1)...(19): siRNA sense strand
guuauggccugcacagaag

SEQ ID NO: 1707029 - RNA, 19 nt, Homo sapiens
  misc_RNA (1)...(19): siRNA sense strand
ccugaaaacucaacaauca

SEQ ID NO: 1707030 - RNA, 19 nt, Homo sapiens
  misc_RNA (1)...(19): siRNA sense strand
ccaacaagcggagugauug

SEQ ID NO: 1707031 - RNA, 19 nt, Homo sapiens
  misc_RNA (1)...(19): siRNA sense strand
ccagagagcguggagaaug

SEQ ID NO: 1707032 - RNA, 19 nt, Homo sapiens
  misc_RNA (1)...(19): siRNA sense strand
gaugaugaccgcuauucug

SEQ ID NO: 1707033 - RNA, 19 nt, Homo sapiens
  misc_RNA (1)...(19): siRNA sense strand
gacaugucauucaaguuuc

SEQ ID NO: 1707034 - RNA, 19 nt, Homo sapiens
  misc_RNA (1)...(19): siRNA sense strand
caagcauccugacaacauc

SEQ ID NO: 1707035 - RNA, 19 nt, Homo sapiens
  misc_RNA (1)...(19): siRNA sense strand
ugaggagucucgugucucu

SEQ ID NO: 1707036 - RNA, 19 nt, Homo sapiens
  misc_RNA (1)...(19): siRNA sense strand
cagagagcguggagaaugg

SEQ ID NO: 1707037 - RNA, 19 nt, Homo sapiens
  misc_RNA (1)...(19): siRNA sense strand
ccgacaagauccuggacuu

SEQ ID NO: 1707038 - RNA, 19 nt, Homo sapiens
  misc_RNA (1)...(19): siRNA sense strand
agagaaaccucaagaaaag

SEQ ID NO: 1707039 - RNA, 19 nt, Homo sapiens
  misc_RNA (1)...(19): siRNA sense strand
gggacuuugugcacuguga

SEQ ID NO: 1707040 - RNA, 19 nt, Homo sapiens
  misc_RNA (1)...(19): siRNA sense strand
uccaacggaugcuuuauca

SEQ ID NO: 1707041 - RNA, 19 nt, Homo sapiens
  misc_RNA (1)...(19): siRNA sense strand
gagauaauggaaacaucaa

SEQ ID NO: 1707042 - RNA, 19 nt, Homo sapiens
  misc_RNA (1)...(19): siRNA sense strand
gccaacaagcggagugauu

SEQ ID NO: 1707043 - RNA, 19 nt, Homo sapiens
  misc_RNA (1)...(19): siRNA sense strand
ugucucgggucaucuguga

SEQ ID NO: 1707044 - RNA, 19 nt, Homo sapiens
  misc_RNA (1)...(19): siRNA sense strand
gagaacagccacgucuuca

SEQ ID NO: 1707045 - RNA, 19 nt, Homo sapiens
  misc_RNA (1)...(19): siRNA sense strand
gagcagcagagauaaugga

SEQ ID NO: 1707046 - RNA, 19 nt, Homo sapiens
  misc_RNA (1)...(19): siRNA sense strand
gcagagauaauggaaacau

SEQ ID NO: 1707047 - RNA, 19 nt, Homo sapiens
  misc_RNA (1)...(19): siRNA sense strand
gagcuugcaacaacagaga

SEQ ID NO: 1707048 - RNA, 19 nt, Homo sapiens
  misc_RNA (1)...(19): siRNA sense strand
caaaaugcccaaacacuug

SEQ ID NO: 1707049 - RNA, 19 nt, Homo sapiens
  misc_RNA (1)...(19): siRNA sense strand
aaagaaaagucaaccugaa

SEQ ID NO: 1707050 - RNA, 19 nt, Homo sapiens
  misc_RNA (1)...(19): siRNA sense strand
cagagauaauggaaacauc

SEQ ID NO: 1707051 - RNA, 19 nt, Homo sapiens
  misc_RNA (1)...(19): siRNA sense strand
aaguguggcuucccagaga

SEQ ID NO: 1707052 - RNA, 19 nt, Homo sapiens
  misc_RNA (1)...(19): siRNA sense strand
gcugggaggcuuagcugaa

SEQ ID NO: 1707053 - RNA, 19 nt, Homo sapiens
  misc_RNA (1)...(19): siRNA sense strand
uacaagcgaugaaaagaaa

SEQ ID NO: 1707054 - RNA, 19 nt, Homo sapiens
  misc_RNA (1)...(19): siRNA sense strand
cagagaaaccucaagaaaa

SEQ ID NO: 1707055 - RNA, 19 nt, Homo sapiens
  misc_RNA (1)...(19): siRNA sense strand
ccgaggccuuccagcagua

SEQ ID NO: 1707056 - RNA, 19 nt, Homo sapiens
  misc_RNA (1)...(19): siRNA sense strand
caaacuuccugagccaaca

SEQ ID NO: 1707057 - RNA, 19 nt, Homo sapiens
  misc_RNA (1)...(19): siRNA sense strand
aacggaugcuuuaucagaa

SEQ ID NO: 1707058 - RNA, 19 nt, Homo sapiens
  misc_RNA (1)...(19): siRNA sense strand
ggcgcgugcugguguauuc

SEQ ID NO: 1707059 - RNA, 19 nt, Homo sapiens
  misc_RNA (1)...(19): siRNA sense strand
cuggaggccuggagggaaa

SEQ ID NO: 1707060 - RNA, 19 nt, Homo sapiens
  misc_RNA (1)...(19): siRNA sense strand
cacagaugaugaccgcuau

SEQ ID NO: 1707061 - RNA, 19 nt, Homo sapiens
  misc_RNA (1)...(19): siRNA sense strand
gcagcagagauaauggaaa

SEQ ID NO: 1707062 - RNA, 19 nt, Homo sapiens
  misc_RNA (1)...(19): siRNA sense strand
cugggaggcuuagcugaaa

SEQ ID NO: 1707063 - RNA, 19 nt, Homo sapiens
  misc_RNA (1)...(19): siRNA sense strand
aaaugagguugucacagau

SEQ ID NO: 1707064 - RNA, 19 nt, Homo sapiens
  misc_RNA (1)...(19): siRNA sense strand
caaauacaggcccaucaca

SEQ ID NO: 1707065 - RNA, 19 nt, Homo sapiens
  misc_RNA (1)...(19): siRNA sense strand
caacaaucacagcauccaa

SEQ ID NO: 1707066 - RNA, 19 nt, Homo sapiens
  misc_RNA (1)...(19): siRNA sense strand
aggcuuagcugaaaacuuc

SEQ ID NO: 1707067 - RNA, 19 nt, Homo sapiens
  misc_RNA (1)...(19): siRNA sense strand
cuucagcccauggacauua

SEQ ID NO: 1707068 - RNA, 19 nt, Homo sapiens
  misc_RNA (1)...(19): siRNA sense strand
acgccacgaugcagagaaa

SEQ ID NO: 1707069 - RNA, 19 nt, Homo sapiens
  misc_RNA (1)...(19): siRNA sense strand
gcaguacgugggucccuau

SEQ ID NO: 1707070 - RNA, 19 nt, Homo sapiens
  misc_RNA (1)...(19): siRNA sense strand
cuguuugccugucucauug

SEQ ID NO: 1707071 - RNA, 19 nt, Homo sapiens
  misc_RNA (1)...(19): siRNA sense strand
acaagcauccugacaacau

SEQ ID NO: 1707072 - RNA, 19 nt, Homo sapiens
  misc_RNA (1)...(19): siRNA sense strand
gagagggaaagaacuccuu

SEQ ID NO: 1707073 - RNA, 19 nt, Homo sapiens
  misc_RNA (1)...(19): siRNA sense strand
agagauaauggaaacauca

SEQ ID NO: 1707074 - RNA, 19 nt, Homo sapiens
  misc_RNA (1)...(19): siRNA sense strand
gacagcaucacuggcauga

SEQ ID NO: 1707075 - RNA, 19 nt, Homo sapiens
  misc_RNA (1)...(19): siRNA sense strand
ccuguuugccugucucauu

SEQ ID NO: 1707076 - RNA, 19 nt, Homo sapiens
  misc_RNA (1)...(19): siRNA sense strand
ucacaggagcuugcaacaa

SEQ ID NO: 1707077 - RNA, 19 nt, Homo sapiens
  misc_RNA (1)...(19): siRNA sense strand
ugcccgagcagcagagaua

SEQ ID NO: 1707078 - RNA, 19 nt, Homo sapiens
  misc_RNA (1)...(19): siRNA sense strand
acugccagaugacuuguga

SEQ ID NO: 1707079 - RNA, 19 nt, Homo sapiens
  misc_RNA (1)...(19): siRNA sense strand
auggaaacaucaauacaag

SEQ ID NO: 1707080 - RNA, 19 nt, Homo sapiens
  misc_RNA (1)...(19): siRNA sense strand
auacaucgaccacgacauc

SEQ ID NO: 1707081 - RNA, 19 nt, Homo sapiens
  misc_RNA (1)...(19): siRNA sense strand
acaugucauucaaguuuca

SEQ ID NO: 1707082 - RNA, 19 nt, Homo sapiens
  misc_RNA (1)...(19): siRNA sense strand
cggaugcuuuaucagaaga

SEQ ID NO: 1707083 - RNA, 19 nt, Homo sapiens
  misc_RNA (1)...(19): siRNA sense strand
gagguugucacagaugaug

SEQ ID NO: 1707084 - RNA, 19 nt, Homo sapiens
  misc_RNA (1)...(19): siRNA sense strand
gcaaauuccccgaagacuu

SEQ ID NO: 1707085 - RNA, 19 nt, Homo sapiens
  misc_RNA (1)...(19): siRNA sense strand
gaugacuugugagaaccaa

SEQ ID NO: 1707086 - RNA, 19 nt, Homo sapiens
  misc_RNA (1)...(19): siRNA sense strand
gagccaacaagcggaguga

SEQ ID NO: 1707087 - RNA, 19 nt, Homo sapiens
  misc_RNA (1)...(19): siRNA sense strand
ccaggaaggaugggauuuc

SEQ ID NO: 1707088 - RNA, 19 nt, Homo sapiens
  misc_RNA (1)...(19): siRNA sense strand
cagaugaugaccgcuauuc

SEQ ID NO: 1707089 - RNA, 19 nt, Homo sapiens
  misc_RNA (1)...(19): siRNA sense strand
ccugaggagucucgugucu

SEQ ID NO: 1707090 - RNA, 19 nt, Homo sapiens
  misc_RNA (1)...(19): siRNA sense strand
uguacaagcauccugacaa

SEQ ID NO: 1707091 - RNA, 19 nt, Homo sapiens
  misc_RNA (1)...(19): siRNA sense strand
caaaugagguugucacaga

SEQ ID NO: 1707092 - RNA, 19 nt, Homo sapiens
  misc_RNA (1)...(19): siRNA sense strand
gcagagaaaccucaagaaa

SEQ ID NO: 1707093 - RNA, 19 nt, Homo sapiens
  misc_RNA (1)...(19): siRNA sense strand
guacgugggucccuaugaa

SEQ ID NO: 1707094 - RNA, 19 nt, Homo sapiens
  misc_RNA (1)...(19): siRNA sense strand
gagcaucauugcaaacaug

SEQ ID NO: 1707095 - RNA, 19 nt, Homo sapiens
  misc_RNA (1)...(19): siRNA sense strand
caagacaugucauucaagu

SEQ ID NO: 1707096 - RNA, 19 nt, Homo sapiens
  misc_RNA (1)...(19): siRNA sense strand
ggagagugcugggauggaa

SEQ ID NO: 1707097 - RNA, 19 nt, Homo sapiens
  misc_RNA (1)...(19): siRNA sense strand
caacggaugcuuuaucaga

SEQ ID NO: 1707098 - RNA, 19 nt, Homo sapiens
  misc_RNA (1)...(19): siRNA sense strand
agacaugucauucaaguuu

SEQ ID NO: 1707099 - RNA, 19 nt, Homo sapiens
  misc_RNA (1)...(19): siRNA sense strand
acacuugccuggcgaacaa

SEQ ID NO: 1707100 - RNA, 19 nt, Homo sapiens
  misc_RNA (1)...(19): siRNA sense strand
guacaagcauccugacaac

SEQ ID NO: 1707101 - RNA, 19 nt, Homo sapiens
  misc_RNA (1)...(19): siRNA sense strand
ccacagagcaccagcaaag

SEQ ID NO: 1707102 - RNA, 19 nt, Homo sapiens
  misc_RNA (1)...(19): siRNA sense strand
ccagaugacuugugagaac

SEQ ID NO: 1707103 - RNA, 19 nt, Homo sapiens
  misc_RNA (1)...(19): siRNA sense strand
cagcagagauaauggaaac

SEQ ID NO: 1707104 - RNA, 19 nt, Homo sapiens
  misc_RNA (1)...(19): siRNA sense strand
ggcgugagcuggagaagca

SEQ ID NO: 1707105 - RNA, 19 nt, Homo sapiens
  misc_RNA (1)...(19): siRNA sense strand
cacaggagcuugcaacaac

SEQ ID NO: 1707106 - RNA, 19 nt, Homo sapiens
  misc_RNA (1)...(19): siRNA sense strand
ggagaacagccacgucuuc

SEQ ID NO: 1707107 - RNA, 19 nt, Homo sapiens
  misc_RNA (1)...(19): siRNA sense strand
gagcguggccgacaagauc

SEQ ID NO: 1707108 - RNA, 19 nt, Homo sapiens
  misc_RNA (1)...(19): siRNA sense strand
cagcaucacuggcaugaac

SEQ ID NO: 1707109 - RNA, 19 nt, Homo sapiens
  misc_RNA (1)...(19): siRNA sense strand
gcacggguaugagcuccaa

SEQ ID NO: 1707110 - RNA, 19 nt, Homo sapiens
  misc_RNA (1)...(19): siRNA sense strand
gguuauggccugcacagaa

SEQ ID NO: 1707111 - RNA, 19 nt, Homo sapiens
  misc_RNA (1)...(19): siRNA sense strand
caaauuccccgaagacuuu

SEQ ID NO: 1707112 - RNA, 19 nt, Homo sapiens
  misc_RNA (1)...(19): siRNA sense strand
gggaaagccugaggagucu

SEQ ID NO: 1707113 - RNA, 19 nt, Homo sapiens
  misc_RNA (1)...(19): siRNA sense strand
guuauggccugcacagaag

SEQ ID NO: 1707114 - RNA, 19 nt, Homo sapiens
  misc_RNA (1)...(19): siRNA sense strand
ccugaaaacucaacaauca

SEQ ID NO: 1707115 - RNA, 19 nt, Homo sapiens
  misc_RNA (1)...(19): siRNA sense strand
ccaacaagcggagugauug

SEQ ID NO: 1707116 - RNA, 19 nt, Homo sapiens
  misc_RNA (1)...(19): siRNA sense strand
ccagagagcguggagaaug

SEQ ID NO: 1707117 - RNA, 19 nt, Homo sapiens
  misc_RNA (1)...(19): siRNA sense strand
gaugaugaccgcuauucug

SEQ ID NO: 1707118 - RNA, 19 nt, Homo sapiens
  misc_RNA (1)...(19): siRNA sense strand
gacaugucauucaaguuuc

SEQ ID NO: 1707119 - RNA, 19 nt, Homo sapiens
  misc_RNA (1)...(19): siRNA sense strand
caagcauccugacaacauc

SEQ ID NO: 1707120 - RNA, 19 nt, Homo sapiens
  misc_RNA (1)...(19): siRNA sense strand
ugaggagucucgugucucu

SEQ ID NO: 1707121 - RNA, 19 nt, Homo sapiens
  misc_RNA (1)...(19): siRNA sense strand
cagagagcguggagaaugg

SEQ ID NO: 1707122 - RNA, 19 nt, Homo sapiens
  misc_RNA (1)...(19): siRNA sense strand
ccgacaagauccuggacuu

SEQ ID NO: 1707123 - RNA, 19 nt, Homo sapiens
  misc_RNA (1)...(19): siRNA sense strand
agagaaaccucaagaaaag

SEQ ID NO: 1707124 - RNA, 19 nt, Homo sapiens
  misc_RNA (1)...(19): siRNA sense strand
gggacuuugugcacuguga

SEQ ID NO: 1707125 - RNA, 19 nt, Homo sapiens
  misc_RNA (1)...(19): siRNA sense strand
uccaacggaugcuuuauca

SEQ ID NO: 1707126 - RNA, 19 nt, Homo sapiens
  misc_RNA (1)...(19): siRNA sense strand
gagauaauggaaacaucaa

SEQ ID NO: 1707127 - RNA, 19 nt, Homo sapiens
  misc_RNA (1)...(19): siRNA sense strand
gccaacaagcggagugauu

SEQ ID NO: 1707128 - RNA, 19 nt, Homo sapiens
  misc_RNA (1)...(19): siRNA sense strand
ugucucgggucaucuguga

SEQ ID NO: 1707129 - RNA, 19 nt, Homo sapiens
  misc_RNA (1)...(19): siRNA sense strand
gagaacagccacgucuuca

SEQ ID NO: 1707130 - RNA, 19 nt, Homo sapiens
  misc_RNA (1)...(19): siRNA sense strand
gagcagcagagauaaugga

SEQ ID NO: 1707131 - RNA, 19 nt, Homo sapiens
  misc_RNA (1)...(19): siRNA sense strand
gcagagauaauggaaacau

SEQ ID NO: 1707132 - RNA, 19 nt, Homo sapiens
  misc_RNA (1)...(19): siRNA sense strand
gagcuugcaacaacagaga

SEQ ID NO: 1707133 - RNA, 19 nt, Homo sapiens
  misc_RNA (1)...(19): siRNA sense strand
caaaaugcccaaacacuug

SEQ ID NO: 1707134 - RNA, 19 nt, Homo sapiens
  misc_RNA (1)...(19): siRNA sense strand
aaagaaaagucaaccugaa

SEQ ID NO: 1707135 - RNA, 19 nt, Homo sapiens
  misc_RNA (1)...(19): siRNA sense strand
cagagauaauggaaacauc

SEQ ID NO: 1707136 - RNA, 19 nt, Homo sapiens
  misc_RNA (1)...(19): siRNA sense strand
aaguguggcuucccagaga

SEQ ID NO: 1707137 - RNA, 19 nt, Homo sapiens
  misc_RNA (1)...(19): siRNA sense strand
gcugggaggcuuagcugaa

SEQ ID NO: 1707138 - RNA, 19 nt, Homo sapiens
  misc_RNA (1)...(19): siRNA sense strand
uacaagcgaugaaaagaaa

SEQ ID NO: 1707139 - RNA, 19 nt, Homo sapiens
  misc_RNA (1)...(19): siRNA sense strand
cagagaaaccucaagaaaa

SEQ ID NO: 1707140 - RNA, 19 nt, Homo sapiens
  misc_RNA (1)...(19): siRNA sense strand
ccgaggccuuccagcagua

SEQ ID NO: 1707141 - RNA, 19 nt, Homo sapiens
  misc_RNA (1)...(19): siRNA sense strand
caaacuuccugagccaaca

SEQ ID NO: 1707142 - RNA, 19 nt, Homo sapiens
  misc_RNA (1)...(19): siRNA sense strand
aacggaugcuuuaucagaa

SEQ ID NO: 1707143 - RNA, 19 nt, Homo sapiens
  misc_RNA (1)...(19): siRNA sense strand
ggcgcgugcugguguauuc

SEQ ID NO: 1707144 - RNA, 19 nt, Homo sapiens
  misc_RNA (1)...(19): siRNA sense strand
cuggaggccuggagggaaa

SEQ ID NO: 1707145 - RNA, 19 nt, Homo sapiens
  misc_RNA (1)...(19): siRNA sense strand
cacagaugaugaccgcuau

SEQ ID NO: 1707146 - RNA, 19 nt, Homo sapiens
  misc_RNA (1)...(19): siRNA sense strand
gcagcagagauaauggaaa

SEQ ID NO: 1707147 - RNA, 19 nt, Homo sapiens
  misc_RNA (1)...(19): siRNA sense strand
cugggaggcuuagcugaaa

SEQ ID NO: 1707148 - RNA, 19 nt, Homo sapiens
  misc_RNA (1)...(19): siRNA sense strand
aaaugagguugucacagau

SEQ ID NO: 1707149 - RNA, 19 nt, Homo sapiens
  misc_RNA (1)...(19): siRNA sense strand
caaauacaggcccaucaca

SEQ ID NO: 1707150 - RNA, 19 nt, Homo sapiens
  misc_RNA (1)...(19): siRNA sense strand
caacaaucacagcauccaa

SEQ ID NO: 1707151 - RNA, 19 nt, Homo sapiens
  misc_RNA (1)...(19): siRNA sense strand
aggcuuagcugaaaacuuc

SEQ ID NO: 1707152 - RNA, 19 nt, Homo sapiens
  misc_RNA (1)...(19): siRNA sense strand
cuucagcccauggacauua

SEQ ID NO: 1707153 - RNA, 19 nt, Homo sapiens
  misc_RNA (1)...(19): siRNA sense strand
acgccacgaugcagagaaa

SEQ ID NO: 1707154 - RNA, 19 nt, Homo sapiens
  misc_RNA (1)...(19): siRNA sense strand
gcaguacgugggucccuau

SEQ ID NO: 1707155 - RNA, 19 nt, Homo sapiens
  misc_RNA (1)...(19): siRNA sense strand
cuguuugccugucucauug

SEQ ID NO: 1707156 - RNA, 19 nt, Homo sapiens
  misc_RNA (1)...(19): siRNA sense strand
acaagcauccugacaacau

SEQ ID NO: 1707157 - RNA, 19 nt, Homo sapiens
  misc_RNA (1)...(19): siRNA sense strand
gagagggaaagaacuccuu

SEQ ID NO: 1707158 - RNA, 19 nt, Homo sapiens
  misc_RNA (1)...(19): siRNA sense strand
agagauaauggaaacauca

SEQ ID NO: 1707159 - RNA, 19 nt, Homo sapiens
  misc_RNA (1)...(19): siRNA sense strand
gacagcaucacuggcauga

SEQ ID NO: 1707160 - RNA, 19 nt, Homo sapiens
  misc_RNA (1)...(19): siRNA sense strand
ccuguuugccugucucauu

SEQ ID NO: 1707161 - RNA, 19 nt, Homo sapiens
  misc_RNA (1)...(19): siRNA sense strand
ucacaggagcuugcaacaa

SEQ ID NO: 1707162 - RNA, 19 nt, Homo sapiens
  misc_RNA (1)...(19): siRNA sense strand
ugcccgagcagcagagaua

SEQ ID NO: 1707163 - RNA, 19 nt, Homo sapiens
  misc_RNA (1)...(19): siRNA sense strand
acugccagaugacuuguga

SEQ ID NO: 1707164 - RNA, 19 nt, Homo sapiens
  misc_RNA (1)...(19): siRNA sense strand
auggaaacaucaauacaag

SEQ ID NO: 1707165 - RNA, 19 nt, Homo sapiens
  misc_RNA (1)...(19): siRNA sense strand
auacaucgaccacgacauc

SEQ ID NO: 1707166 - RNA, 19 nt, Homo sapiens
  misc_RNA (1)...(19): siRNA sense strand
acaugucauucaaguuuca

SEQ ID NO: 1707167 - RNA, 19 nt, Homo sapiens
  misc_RNA (1)...(19): siRNA sense strand
cggaugcuuuaucagaaga

SEQ ID NO: 1707168 - RNA, 19 nt, Homo sapiens
  misc_RNA (1)...(19): siRNA sense strand
gagguugucacagaugaug

SEQ ID NO: 1707169 - RNA, 19 nt, Homo sapiens
  misc_RNA (1)...(19): siRNA sense strand
gcaaauuccccgaagacuu

SEQ ID NO: 1707170 - RNA, 19 nt, Homo sapiens
  misc_RNA (1)...(19): siRNA sense strand
gaugacuugugagaaccaa

SEQ ID NO: 1707171 - RNA, 19 nt, Homo sapiens
  misc_RNA (1)...(19): siRNA sense strand
gagccaacaagcggaguga

SEQ ID NO: 1707172 - RNA, 19 nt, Homo sapiens
  misc_RNA (1)...(19): siRNA sense strand
ccaggaaggaugggauuuc

SEQ ID NO: 1707173 - RNA, 19 nt, Homo sapiens
  misc_RNA (1)...(19): siRNA sense strand
cagaugaugaccgcuauuc

SEQ ID NO: 1707174 - RNA, 19 nt, Homo sapiens
  misc_RNA (1)...(19): siRNA sense strand
ccugaggagucucgugucu

SEQ ID NO: 1707175 - RNA, 19 nt, Homo sapiens
  misc_RNA (1)...(19): siRNA sense strand
uguacaagcauccugacaa

SEQ ID NO: 1707176 - RNA, 19 nt, Homo sapiens
  misc_RNA (1)...(19): siRNA sense strand
caaaugagguugucacaga

SEQ ID NO: 1707177 - RNA, 19 nt, Homo sapiens
  misc_RNA (1)...(19): siRNA sense strand
gcagagaaaccucaagaaa

SEQ ID NO: 1707178 - RNA, 19 nt, Homo sapiens
  misc_RNA (1)...(19): siRNA sense strand
guacgugggucccuaugaa

SEQ ID NO: 1707179 - RNA, 19 nt, Homo sapiens
  misc_RNA (1)...(19): siRNA sense strand
gagcaucauugcaaacaug

SEQ ID NO: 1707180 - RNA, 19 nt, Homo sapiens
  misc_RNA (1)...(19): siRNA sense strand
caagacaugucauucaagu

SEQ ID NO: 1707181 - RNA, 19 nt, Homo sapiens
  misc_RNA (1)...(19): siRNA sense strand
ggagagugcugggauggaa

SEQ ID NO: 1707182 - RNA, 19 nt, Homo sapiens
  misc_RNA (1)...(19): siRNA sense strand
caacggaugcuuuaucaga

SEQ ID NO: 1707183 - RNA, 19 nt, Homo sapiens
  misc_RNA (1)...(19): siRNA sense strand
agacaugucauucaaguuu

SEQ ID NO: 1707184 - RNA, 19 nt, Homo sapiens
  misc_RNA (1)...(19): siRNA sense strand
acacuugccuggcgaacaa

SEQ ID NO: 1707185 - RNA, 19 nt, Homo sapiens
  misc_RNA (1)...(19): siRNA sense strand
guacaagcauccugacaac

SEQ ID NO: 1707186 - RNA, 19 nt, Homo sapiens
  misc_RNA (1)...(19): siRNA sense strand
ccacagagcaccagcaaag

SEQ ID NO: 1707187 - RNA, 19 nt, Homo sapiens
  misc_RNA (1)...(19): siRNA sense strand
ccagaugacuugugagaac

SEQ ID NO: 1707188 - RNA, 19 nt, Homo sapiens
  misc_RNA (1)...(19): siRNA sense strand
cagcagagauaauggaaac

SEQ ID NO: 1707189 - RNA, 19 nt, Homo sapiens
  misc_RNA (1)...(19): siRNA sense strand
ggcgugagcuggagaagca

SEQ ID NO: 1707190 - RNA, 19 nt, Homo sapiens
  misc_RNA (1)...(19): siRNA sense strand
cacaggagcuugcaacaac

SEQ ID NO: 1707191 - RNA, 19 nt, Homo sapiens
  misc_RNA (1)...(19): siRNA sense strand
ggagaacagccacgucuuc

SEQ ID NO: 1707192 - RNA, 19 nt, Homo sapiens
  misc_RNA (1)...(19): siRNA sense strand
gagcguggccgacaagauc

SEQ ID NO: 1707193 - RNA, 19 nt, Homo sapiens
  misc_RNA (1)...(19): siRNA sense strand
cagcaucacuggcaugaac

SEQ ID NO: 1707194 - RNA, 19 nt, Homo sapiens
  misc_RNA (1)...(19): siRNA sense strand
gcacggguaugagcuccaa

SEQ ID NO: 1707195 - RNA, 19 nt, Homo sapiens
  misc_RNA (1)...(19): siRNA sense strand
gguuauggccugcacagaa

SEQ ID NO: 1707196 - RNA, 19 nt, Homo sapiens
  misc_RNA (1)...(19): siRNA sense strand
caaauuccccgaagacuuu

SEQ ID NO: 1707197 - RNA, 19 nt, Homo sapiens
  misc_RNA (1)...(19): siRNA sense strand
gggaaagccugaggagucu

SEQ ID NO: 1707198 - RNA, 19 nt, Homo sapiens
  misc_RNA (1)...(19): siRNA sense strand
guuauggccugcacagaag

SEQ ID NO: 1707199 - RNA, 19 nt, Homo sapiens
  misc_RNA (1)...(19): siRNA sense strand
ccugaaaacucaacaauca

SEQ ID NO: 1707200 - RNA, 19 nt, Homo sapiens
  misc_RNA (1)...(19): siRNA sense strand
ccaacaagcggagugauug

SEQ ID NO: 1707201 - RNA, 19 nt, Homo sapiens
  misc_RNA (1)...(19): siRNA sense strand
ggacacugcagaacagcuu

SEQ ID NO: 1707202 - RNA, 19 nt, Homo sapiens
  misc_RNA (1)...(19): siRNA sense strand
ccagagagcguggagaaug

SEQ ID NO: 1707203 - RNA, 19 nt, Homo sapiens
  misc_RNA (1)...(19): siRNA sense strand
gaugaugaccgcuauucug

SEQ ID NO: 1707204 - RNA, 19 nt, Homo sapiens
  misc_RNA (1)...(19): siRNA sense strand
gacaugucauucaaguuuc

SEQ ID NO: 1707205 - RNA, 19 nt, Homo sapiens
  misc_RNA (1)...(19): siRNA sense strand
caagcauccugacaacauc

SEQ ID NO: 1707206 - RNA, 19 nt, Homo sapiens
  misc_RNA (1)...(19): siRNA sense strand
ccgacaagauccuggacuu

SEQ ID NO: 1707207 - RNA, 19 nt, Homo sapiens
  misc_RNA (1)...(19): siRNA sense strand
cagagagcguggagaaugg

SEQ ID NO: 1707208 - RNA, 19 nt, Homo sapiens
  misc_RNA (1)...(19): siRNA sense strand
ugaggagucucgugucucu

SEQ ID NO: 1707209 - RNA, 19 nt, Homo sapiens
  misc_RNA (1)...(19): siRNA sense strand
agagaaaccucaagaaaag

SEQ ID NO: 1707210 - RNA, 19 nt, Homo sapiens
  misc_RNA (1)...(19): siRNA sense strand
gggacuuugugcacuguga

SEQ ID NO: 1707211 - RNA, 19 nt, Homo sapiens
  misc_RNA (1)...(19): siRNA sense strand
uccaacggaugcuuuauca

SEQ ID NO: 1707212 - RNA, 19 nt, Homo sapiens
  misc_RNA (1)...(19): siRNA sense strand
gagauaauggaaacaucaa

SEQ ID NO: 1707213 - RNA, 19 nt, Homo sapiens
  misc_RNA (1)...(19): siRNA sense strand
gccaacaagcggagugauu

SEQ ID NO: 1707214 - RNA, 19 nt, Homo sapiens
  misc_RNA (1)...(19): siRNA sense strand
ugucucgggucaucuguga

SEQ ID NO: 1707215 - RNA, 19 nt, Homo sapiens
  misc_RNA (1)...(19): siRNA sense strand
gagaacagccacgucuuca

SEQ ID NO: 1707216 - RNA, 19 nt, Homo sapiens
  misc_RNA (1)...(19): siRNA sense strand
gagcagcagagauaaugga

SEQ ID NO: 1707217 - RNA, 19 nt, Homo sapiens
  misc_RNA (1)...(19): siRNA sense strand
gcagagauaauggaaacau

SEQ ID NO: 1707218 - RNA, 19 nt, Homo sapiens
  misc_RNA (1)...(19): siRNA sense strand
gagcuugcaacaacagaga

SEQ ID NO: 1707219 - RNA, 19 nt, Homo sapiens
  misc_RNA (1)...(19): siRNA sense strand
caaaaugcccaaacacuug

SEQ ID NO: 1707220 - RNA, 19 nt, Homo sapiens
  misc_RNA (1)...(19): siRNA sense strand
aaagaaaagucaaccugaa

SEQ ID NO: 1707221 - RNA, 19 nt, Homo sapiens
  misc_RNA (1)...(19): siRNA sense strand
cagagauaauggaaacauc

SEQ ID NO: 1707222 - RNA, 19 nt, Homo sapiens
  misc_RNA (1)...(19): siRNA sense strand
aaguguggcuucccagaga

SEQ ID NO: 1707223 - RNA, 19 nt, Homo sapiens
  misc_RNA (1)...(19): siRNA sense strand
gcugggaggcuuagcugaa

SEQ ID NO: 1707224 - RNA, 19 nt, Homo sapiens
  misc_RNA (1)...(19): siRNA sense strand
uacaagcgaugaaaagaaa

SEQ ID NO: 1707225 - RNA, 19 nt, Homo sapiens
  misc_RNA (1)...(19): siRNA sense strand
cagagaaaccucaagaaaa

SEQ ID NO: 1707226 - RNA, 19 nt, Homo sapiens
  misc_RNA (1)...(19): siRNA sense strand
ccgaggccuuccagcagua

SEQ ID NO: 1707227 - RNA, 19 nt, Homo sapiens
  misc_RNA (1)...(19): siRNA sense strand
caaacuuccugagccaaca

SEQ ID NO: 1707228 - RNA, 19 nt, Homo sapiens
  misc_RNA (1)...(19): siRNA sense strand
aacggaugcuuuaucagaa

SEQ ID NO: 1707229 - RNA, 19 nt, Homo sapiens
  misc_RNA (1)...(19): siRNA sense strand
ggcgcgugcugguguauuc

SEQ ID NO: 1707230 - RNA, 19 nt, Homo sapiens
  misc_RNA (1)...(19): siRNA sense strand
cuggaggccuggagggaaa

SEQ ID NO: 1707231 - RNA, 19 nt, Homo sapiens
  misc_RNA (1)...(19): siRNA sense strand
cacagaugaugaccgcuau

SEQ ID NO: 1707232 - RNA, 19 nt, Homo sapiens
  misc_RNA (1)...(19): siRNA sense strand
gcagcagagauaauggaaa

SEQ ID NO: 1707233 - RNA, 19 nt, Homo sapiens
  misc_RNA (1)...(19): siRNA sense strand
cugggaggcuuagcugaaa

SEQ ID NO: 1707234 - RNA, 19 nt, Homo sapiens
  misc_RNA (1)...(19): siRNA sense strand
aaaugagguugucacagau

SEQ ID NO: 1707235 - RNA, 19 nt, Homo sapiens
  misc_RNA (1)...(19): siRNA sense strand
caaauacaggcccaucaca

SEQ ID NO: 1707236 - RNA, 19 nt, Homo sapiens
  misc_RNA (1)...(19): siRNA sense strand
caacaaucacagcauccaa

SEQ ID NO: 1707237 - RNA, 19 nt, Homo sapiens
  misc_RNA (1)...(19): siRNA sense strand
aggcuuagcugaaaacuuc

SEQ ID NO: 1707238 - RNA, 19 nt, Homo sapiens
  misc_RNA (1)...(19): siRNA sense strand
cuucagcccauggacauua

SEQ ID NO: 1707239 - RNA, 19 nt, Homo sapiens
  misc_RNA (1)...(19): siRNA sense strand
acgccacgaugcagagaaa

SEQ ID NO: 1707240 - RNA, 19 nt, Homo sapiens
  misc_RNA (1)...(19): siRNA sense strand
gcaguacgugggucccuau

SEQ ID NO: 1707241 - RNA, 19 nt, Homo sapiens
  misc_RNA (1)...(19): siRNA sense strand
guacgacucuuuuccaaac

SEQ ID NO: 1707242 - RNA, 19 nt, Homo sapiens
  misc_RNA (1)...(19): siRNA sense strand
cuguuugccugucucauug

SEQ ID NO: 1707243 - RNA, 19 nt, Homo sapiens
  misc_RNA (1)...(19): siRNA sense strand
acaagcauccugacaacau

SEQ ID NO: 1707244 - RNA, 19 nt, Homo sapiens
  misc_RNA (1)...(19): siRNA sense strand
gagagggaaagaacuccuu

SEQ ID NO: 1707245 - RNA, 19 nt, Homo sapiens
  misc_RNA (1)...(19): siRNA sense strand
agagauaauggaaacauca

SEQ ID NO: 1707246 - RNA, 19 nt, Homo sapiens
  misc_RNA (1)...(19): siRNA sense strand
cugcagaacagcuucaugu

SEQ ID NO: 1707247 - RNA, 19 nt, Homo sapiens
  misc_RNA (1)...(19): siRNA sense strand
gacagcaucacuggcauga

SEQ ID NO: 1707248 - RNA, 19 nt, Homo sapiens
  misc_RNA (1)...(19): siRNA sense strand
ccuguuugccugucucauu

SEQ ID NO: 1707249 - RNA, 19 nt, Homo sapiens
  misc_RNA (1)...(19): siRNA sense strand
ucacaggagcuugcaacaa

SEQ ID NO: 1707250 - RNA, 19 nt, Homo sapiens
  misc_RNA (1)...(19): siRNA sense strand
ugcccgagcagcagagaua

SEQ ID NO: 1707251 - RNA, 19 nt, Homo sapiens
  misc_RNA (1)...(19): siRNA sense strand
acugccagaugacuuguga

SEQ ID NO: 1707252 - RNA, 19 nt, Homo sapiens
  misc_RNA (1)...(19): siRNA sense strand
auggaaacaucaauacaag

SEQ ID NO: 1707253 - RNA, 19 nt, Homo sapiens
  misc_RNA (1)...(19): siRNA sense strand
auacaucgaccacgacauc

SEQ ID NO: 1707254 - RNA, 19 nt, Homo sapiens
  misc_RNA (1)...(19): siRNA sense strand
acaugucauucaaguuuca

SEQ ID NO: 1707255 - RNA, 19 nt, Homo sapiens
  misc_RNA (1)...(19): siRNA sense strand
cggaugcuuuaucagaaga

SEQ ID NO: 1707256 - RNA, 19 nt, Homo sapiens
  misc_RNA (1)...(19): siRNA sense strand
gagguugucacagaugaug

SEQ ID NO: 1707257 - RNA, 19 nt, Homo sapiens
  misc_RNA (1)...(19): siRNA sense strand
gcaaauuccccgaagacuu

SEQ ID NO: 1707258 - RNA, 19 nt, Homo sapiens
  misc_RNA (1)...(19): siRNA sense strand
gaugacuugugagaaccaa

SEQ ID NO: 1707259 - RNA, 19 nt, Homo sapiens
  misc_RNA (1)...(19): siRNA sense strand
gagccaacaagcggaguga

SEQ ID NO: 1707260 - RNA, 19 nt, Homo sapiens
  misc_RNA (1)...(19): siRNA sense strand
ccaggaaggaugggauuuc

SEQ ID NO: 1707261 - RNA, 19 nt, Homo sapiens
  misc_RNA (1)...(19): siRNA sense strand
cagaugaugaccgcuauuc

SEQ ID NO: 1707262 - RNA, 19 nt, Homo sapiens
  misc_RNA (1)...(19): siRNA sense strand
ccugaggagucucgugucu

SEQ ID NO: 1707263 - RNA, 19 nt, Homo sapiens
  misc_RNA (1)...(19): siRNA sense strand
uguacaagcauccugacaa

SEQ ID NO: 1707264 - RNA, 19 nt, Homo sapiens
  misc_RNA (1)...(19): siRNA sense strand
caaaugagguugucacaga

SEQ ID NO: 1707265 - RNA, 19 nt, Homo sapiens
  misc_RNA (1)...(19): siRNA sense strand
gcagagaaaccucaagaaa

SEQ ID NO: 1707266 - RNA, 19 nt, Homo sapiens
  misc_RNA (1)...(19): siRNA sense strand
guacgugggucccuaugaa

SEQ ID NO: 1707267 - RNA, 19 nt, Homo sapiens
  misc_RNA (1)...(19): siRNA sense strand
gagcaucauugcaaacaug

SEQ ID NO: 1707268 - RNA, 19 nt, Homo sapiens
  misc_RNA (1)...(19): siRNA sense strand
caagacaugucauucaagu

SEQ ID NO: 1707269 - RNA, 19 nt, Homo sapiens
  misc_RNA (1)...(19): siRNA sense strand
ggagagugcugggauggaa

SEQ ID NO: 1707270 - RNA, 19 nt, Homo sapiens
  misc_RNA (1)...(19): siRNA sense strand
caacggaugcuuuaucaga

SEQ ID NO: 1707271 - RNA, 19 nt, Homo sapiens
  misc_RNA (1)...(19): siRNA sense strand
agacaugucauucaaguuu

SEQ ID NO: 1707272 - RNA, 19 nt, Homo sapiens
  misc_RNA (1)...(19): siRNA sense strand
acacuugccuggcgaacaa

SEQ ID NO: 1707273 - RNA, 19 nt, Homo sapiens
  misc_RNA (1)...(19): siRNA sense strand
guacaagcauccugacaac

SEQ ID NO: 1707274 - RNA, 19 nt, Homo sapiens
  misc_RNA (1)...(19): siRNA sense strand
ccacagagcaccagcaaag

SEQ ID NO: 1707275 - RNA, 19 nt, Homo sapiens
  misc_RNA (1)...(19): siRNA sense strand
ccagaugacuugugagaac

SEQ ID NO: 1707276 - RNA, 19 nt, Homo sapiens
  misc_RNA (1)...(19): siRNA sense strand
cagcagagauaauggaaac

SEQ ID NO: 1707277 - RNA, 19 nt, Homo sapiens
  misc_RNA (1)...(19): siRNA sense strand
ggcgugagcuggagaagca

SEQ ID NO: 1707278 - RNA, 19 nt, Homo sapiens
  misc_RNA (1)...(19): siRNA sense strand
cacaggagcuugcaacaac

SEQ ID NO: 1707279 - RNA, 19 nt, Homo sapiens
  misc_RNA (1)...(19): siRNA sense strand
ggagaacagccacgucuuc

SEQ ID NO: 1707280 - RNA, 19 nt, Homo sapiens
  misc_RNA (1)...(19): siRNA sense strand
gagcguggccgacaagauc

SEQ ID NO: 1707281 - RNA, 19 nt, Homo sapiens
  misc_RNA (1)...(19): siRNA sense strand
cagcaucacuggcaugaac

SEQ ID NO: 1707282 - RNA, 19 nt, Homo sapiens
  misc_RNA (1)...(19): siRNA sense strand
gcacggguaugagcuccaa

SEQ ID NO: 1707283 - RNA, 19 nt, Homo sapiens
  misc_RNA (1)...(19): siRNA sense strand
gguuauggccugcacagaa

SEQ ID NO: 1707284 - RNA, 19 nt, Homo sapiens
  misc_RNA (1)...(19): siRNA sense strand
caaauuccccgaagacuuu

SEQ ID NO: 1707285 - RNA, 19 nt, Homo sapiens
  misc_RNA (1)...(19): siRNA sense strand
gggaaagccugaggagucu

SEQ ID NO: 1707286 - RNA, 19 nt, Homo sapiens
  misc_RNA (1)...(19): siRNA sense strand
guuauggccugcacagaag

SEQ ID NO: 1707287 - RNA, 19 nt, Homo sapiens
  misc_RNA (1)...(19): siRNA sense strand
ccugaaaacucaacaauca

SEQ ID NO: 1707288 - RNA, 19 nt, Homo sapiens
  misc_RNA (1)...(19): siRNA sense strand
ccaacaagcggagugauug

SEQ ID NO: 1707289 - RNA, 19 nt, Homo sapiens
  misc_RNA (1)...(19): siRNA sense strand
ccagagagcguggagaaug

SEQ ID NO: 1707290 - RNA, 19 nt, Homo sapiens
  misc_RNA (1)...(19): siRNA sense strand
gaugaugaccgcuauucug

SEQ ID NO: 1707291 - RNA, 19 nt, Homo sapiens
  misc_RNA (1)...(19): siRNA sense strand
gacaugucauucaaguuuc

SEQ ID NO: 1707292 - RNA, 19 nt, Homo sapiens
  misc_RNA (1)...(19): siRNA sense strand
caagcauccugacaacauc

SEQ ID NO: 1707293 - RNA, 19 nt, Homo sapiens
  misc_RNA (1)...(19): siRNA sense strand
ugaggagucucgugucucu

SEQ ID NO: 1707294 - RNA, 19 nt, Homo sapiens
  misc_RNA (1)...(19): siRNA sense strand
cagagagcguggagaaugg

SEQ ID NO: 1707295 - RNA, 19 nt, Homo sapiens
  misc_RNA (1)...(19): siRNA sense strand
ccgacaagauccuggacuu

SEQ ID NO: 1707296 - RNA, 19 nt, Homo sapiens
  misc_RNA (1)...(19): siRNA sense strand
agagaaaccucaagaaaag

SEQ ID NO: 1707297 - RNA, 19 nt, Homo sapiens
  misc_RNA (1)...(19): siRNA sense strand
gggacuuugugcacuguga

SEQ ID NO: 1707298 - RNA, 19 nt, Homo sapiens
  misc_RNA (1)...(19): siRNA sense strand
uccaacggaugcuuuauca

SEQ ID NO: 1707299 - RNA, 19 nt, Homo sapiens
  misc_RNA (1)...(19): siRNA sense strand
gagauaauggaaacaucaa

SEQ ID NO: 1707300 - RNA, 19 nt, Homo sapiens
  misc_RNA (1)...(19): siRNA sense strand
gccaacaagcggagugauu

SEQ ID NO: 1707301 - RNA, 19 nt, Homo sapiens
  misc_RNA (1)...(19): siRNA sense strand
ugucucgggucaucuguga

SEQ ID NO: 1707302 - RNA, 19 nt, Homo sapiens
  misc_RNA (1)...(19): siRNA sense strand
gagaacagccacgucuuca

SEQ ID NO: 1707303 - RNA, 19 nt, Homo sapiens
  misc_RNA (1)...(19): siRNA sense strand
gagcagcagagauaaugga

SEQ ID NO: 1707304 - RNA, 19 nt, Homo sapiens
  misc_RNA (1)...(19): siRNA sense strand
gcagagauaauggaaacau

SEQ ID NO: 1707305 - RNA, 19 nt, Homo sapiens
  misc_RNA (1)...(19): siRNA sense strand
gagcuugcaacaacagaga

SEQ ID NO: 1707306 - RNA, 19 nt, Homo sapiens
  misc_RNA (1)...(19): siRNA sense strand
caaaaugcccaaacacuug

SEQ ID NO: 1707307 - RNA, 19 nt, Homo sapiens
  misc_RNA (1)...(19): siRNA sense strand
aaagaaaagucaaccugaa

SEQ ID NO: 1707308 - RNA, 19 nt, Homo sapiens
  misc_RNA (1)...(19): siRNA sense strand
cagagauaauggaaacauc

SEQ ID NO: 1707309 - RNA, 19 nt, Homo sapiens
  misc_RNA (1)...(19): siRNA sense strand
aaguguggcuucccagaga

SEQ ID NO: 1707310 - RNA, 19 nt, Homo sapiens
  misc_RNA (1)...(19): siRNA sense strand
gcugggaggcuuagcugaa

SEQ ID NO: 1707311 - RNA, 19 nt, Homo sapiens
  misc_RNA (1)...(19): siRNA sense strand
uacaagcgaugaaaagaaa

SEQ ID NO: 1707312 - RNA, 19 nt, Homo sapiens
  misc_RNA (1)...(19): siRNA sense strand
cagagaaaccucaagaaaa

SEQ ID NO: 1707313 - RNA, 19 nt, Homo sapiens
  misc_RNA (1)...(19): siRNA sense strand
ccgaggccuuccagcagua

SEQ ID NO: 1707314 - RNA, 19 nt, Homo sapiens
  misc_RNA (1)...(19): siRNA sense strand
caaacuuccugagccaaca

SEQ ID NO: 1707315 - RNA, 19 nt, Homo sapiens
  misc_RNA (1)...(19): siRNA sense strand
aacggaugcuuuaucagaa

SEQ ID NO: 1707316 - RNA, 19 nt, Homo sapiens
  misc_RNA (1)...(19): siRNA sense strand
ggcgcgugcugguguauuc

SEQ ID NO: 1707317 - RNA, 19 nt, Homo sapiens
  misc_RNA (1)...(19): siRNA sense strand
cuggaggccuggagggaaa

SEQ ID NO: 1707318 - RNA, 19 nt, Homo sapiens
  misc_RNA (1)...(19): siRNA sense strand
cacagaugaugaccgcuau

SEQ ID NO: 1707319 - RNA, 19 nt, Homo sapiens
  misc_RNA (1)...(19): siRNA sense strand
gcagcagagauaauggaaa

SEQ ID NO: 1707320 - RNA, 19 nt, Homo sapiens
  misc_RNA (1)...(19): siRNA sense strand
cugggaggcuuagcugaaa

SEQ ID NO: 1707321 - RNA, 19 nt, Homo sapiens
  misc_RNA (1)...(19): siRNA sense strand
aaaugagguugucacagau

SEQ ID NO: 1707322 - RNA, 19 nt, Homo sapiens
  misc_RNA (1)...(19): siRNA sense strand
caaauacaggcccaucaca

SEQ ID NO: 1707323 - RNA, 19 nt, Homo sapiens
  misc_RNA (1)...(19): siRNA sense strand
caacaaucacagcauccaa

SEQ ID NO: 1707324 - RNA, 19 nt, Homo sapiens
  misc_RNA (1)...(19): siRNA sense strand
aggcuuagcugaaaacuuc

SEQ ID NO: 1707325 - RNA, 19 nt, Homo sapiens
  misc_RNA (1)...(19): siRNA sense strand
cuucagcccauggacauua

SEQ ID NO: 1707326 - RNA, 19 nt, Homo sapiens
  misc_RNA (1)...(19): siRNA sense strand
acgccacgaugcagagaaa

SEQ ID NO: 1707327 - RNA, 19 nt, Homo sapiens
  misc_RNA (1)...(19): siRNA sense strand
gcaguacgugggucccuau

SEQ ID NO: 1707328 - RNA, 19 nt, Homo sapiens
  misc_RNA (1)...(19): siRNA sense strand
cuguuugccugucucauug

SEQ ID NO: 1707329 - RNA, 19 nt, Homo sapiens
  misc_RNA (1)...(19): siRNA sense strand
acaagcauccugacaacau

SEQ ID NO: 1707330 - RNA, 19 nt, Homo sapiens
  misc_RNA (1)...(19): siRNA sense strand
gagagggaaagaacuccuu

SEQ ID NO: 1707331 - RNA, 19 nt, Homo sapiens
  misc_RNA (1)...(19): siRNA sense strand
agagauaauggaaacauca

SEQ ID NO: 1707332 - RNA, 19 nt, Homo sapiens
  misc_RNA (1)...(19): siRNA sense strand
gacagcaucacuggcauga

SEQ ID NO: 1707333 - RNA, 19 nt, Homo sapiens
  misc_RNA (1)...(19): siRNA sense strand
ccuguuugccugucucauu

SEQ ID NO: 1707334 - RNA, 19 nt, Homo sapiens
  misc_RNA (1)...(19): siRNA sense strand
ucacaggagcuugcaacaa

SEQ ID NO: 1707335 - RNA, 19 nt, Homo sapiens
  misc_RNA (1)...(19): siRNA sense strand
ugcccgagcagcagagaua

SEQ ID NO: 1707336 - RNA, 19 nt, Homo sapiens
  misc_RNA (1)...(19): siRNA sense strand
acugccagaugacuuguga

SEQ ID NO: 1707337 - RNA, 19 nt, Homo sapiens
  misc_RNA (1)...(19): siRNA sense strand
auggaaacaucaauacaag

SEQ ID NO: 1707338 - RNA, 19 nt, Homo sapiens
  misc_RNA (1)...(19): siRNA sense strand
auacaucgaccacgacauc

SEQ ID NO: 1707339 - RNA, 19 nt, Homo sapiens
  misc_RNA (1)...(19): siRNA sense strand
acaugucauucaaguuuca

SEQ ID NO: 1707340 - RNA, 19 nt, Homo sapiens
  misc_RNA (1)...(19): siRNA sense strand
cggaugcuuuaucagaaga

SEQ ID NO: 1707341 - RNA, 19 nt, Homo sapiens
  misc_RNA (1)...(19): siRNA sense strand
gagguugucacagaugaug

SEQ ID NO: 1707342 - RNA, 19 nt, Homo sapiens
  misc_RNA (1)...(19): siRNA sense strand
gcaaauuccccgaagacuu

SEQ ID NO: 1707343 - RNA, 19 nt, Homo sapiens
  misc_RNA (1)...(19): siRNA sense strand
gaugacuugugagaaccaa

SEQ ID NO: 1707344 - RNA, 19 nt, Homo sapiens
  misc_RNA (1)...(19): siRNA sense strand
gagccaacaagcggaguga

SEQ ID NO: 1707345 - RNA, 19 nt, Homo sapiens
  misc_RNA (1)...(19): siRNA sense strand
ccaggaaggaugggauuuc

SEQ ID NO: 1707346 - RNA, 19 nt, Homo sapiens
  misc_RNA (1)...(19): siRNA sense strand
cagaugaugaccgcuauuc

SEQ ID NO: 1707347 - RNA, 19 nt, Homo sapiens
  misc_RNA (1)...(19): siRNA sense strand
ccugaggagucucgugucu

SEQ ID NO: 1707348 - RNA, 19 nt, Homo sapiens
  misc_RNA (1)...(19): siRNA sense strand
uguacaagcauccugacaa

SEQ ID NO: 1707349 - RNA, 19 nt, Homo sapiens
  misc_RNA (1)...(19): siRNA sense strand
caaaugagguugucacaga

SEQ ID NO: 1707350 - RNA, 19 nt, Homo sapiens
  misc_RNA (1)...(19): siRNA sense strand
gcagagaaaccucaagaaa

SEQ ID NO: 1707351 - RNA, 19 nt, Homo sapiens
  misc_RNA (1)...(19): siRNA sense strand
guacgugggucccuaugaa

SEQ ID NO: 1707352 - RNA, 19 nt, Homo sapiens
  misc_RNA (1)...(19): siRNA sense strand
gagcaucauugcaaacaug

SEQ ID NO: 1707353 - RNA, 19 nt, Homo sapiens
  misc_RNA (1)...(19): siRNA sense strand
caagacaugucauucaagu

SEQ ID NO: 1707354 - RNA, 19 nt, Homo sapiens
  misc_RNA (1)...(19): siRNA sense strand
ggagagugcugggauggaa

SEQ ID NO: 1707355 - RNA, 19 nt, Homo sapiens
  misc_RNA (1)...(19): siRNA sense strand
caacggaugcuuuaucaga

SEQ ID NO: 1707356 - RNA, 19 nt, Homo sapiens
  misc_RNA (1)...(19): siRNA sense strand
agacaugucauucaaguuu

SEQ ID NO: 1707357 - RNA, 19 nt, Homo sapiens
  misc_RNA (1)...(19): siRNA sense strand
acacuugccuggcgaacaa

SEQ ID NO: 1707358 - RNA, 19 nt, Homo sapiens
  misc_RNA (1)...(19): siRNA sense strand
guacaagcauccugacaac

SEQ ID NO: 1707359 - RNA, 19 nt, Homo sapiens
  misc_RNA (1)...(19): siRNA sense strand
ccacagagcaccagcaaag

SEQ ID NO: 1707360 - RNA, 19 nt, Homo sapiens
  misc_RNA (1)...(19): siRNA sense strand
ccagaugacuugugagaac

SEQ ID NO: 1707361 - RNA, 19 nt, Homo sapiens
  misc_RNA (1)...(19): siRNA sense strand
cagcagagauaauggaaac

SEQ ID NO: 1707362 - RNA, 19 nt, Homo sapiens
  misc_RNA (1)...(19): siRNA sense strand
ggcgugagcuggagaagca

SEQ ID NO: 1707363 - RNA, 19 nt, Homo sapiens
  misc_RNA (1)...(19): siRNA sense strand
cacaggagcuugcaacaac

SEQ ID NO: 1707364 - RNA, 19 nt, Homo sapiens
  misc_RNA (1)...(19): siRNA sense strand
ggagaacagccacgucuuc

SEQ ID NO: 1707365 - RNA, 19 nt, Homo sapiens
  misc_RNA (1)...(19): siRNA sense strand
gagcguggccgacaagauc

SEQ ID NO: 1707366 - RNA, 19 nt, Homo sapiens
  misc_RNA (1)...(19): siRNA sense strand
cagcaucacuggcaugaac

SEQ ID NO: 1707367 - RNA, 19 nt, Homo sapiens
  misc_RNA (1)...(19): siRNA sense strand
gcacggguaugagcuccaa

SEQ ID NO: 1707368 - RNA, 19 nt, Homo sapiens
  misc_RNA (1)...(19): siRNA sense strand
gguuauggccugcacagaa

SEQ ID NO: 1707369 - RNA, 19 nt, Homo sapiens
  misc_RNA (1)...(19): siRNA sense strand
caaauuccccgaagacuuu

SEQ ID NO: 1707370 - RNA, 19 nt, Homo sapiens
  misc_RNA (1)...(19): siRNA sense strand
gggaaagccugaggagucu

SEQ ID NO: 1707371 - RNA, 19 nt, Homo sapiens
  misc_RNA (1)...(19): siRNA sense strand
guuauggccugcacagaag

SEQ ID NO: 1707372 - RNA, 19 nt, Homo sapiens
  misc_RNA (1)...(19): siRNA sense strand
ccugaaaacucaacaauca

SEQ ID NO: 1707373 - RNA, 19 nt, Homo sapiens
  misc_RNA (1)...(19): siRNA sense strand
ccaacaagcggagugauug

SEQ ID NO: 1707374 - RNA, 19 nt, Homo sapiens
  misc_RNA (1)...(19): siRNA sense strand
ccagagagcguggagaaug

SEQ ID NO: 1707375 - RNA, 19 nt, Homo sapiens
  misc_RNA (1)...(19): siRNA sense strand
gaugaugaccgcuauucug

SEQ ID NO: 1707376 - RNA, 19 nt, Homo sapiens
  misc_RNA (1)...(19): siRNA sense strand
gacaugucauucaaguuuc

SEQ ID NO: 1707377 - RNA, 19 nt, Homo sapiens
  misc_RNA (1)...(19): siRNA sense strand
caagcauccugacaacauc

SEQ ID NO: 1707378 - RNA, 19 nt, Homo sapiens
  misc_RNA (1)...(19): siRNA sense strand
ugaggagucucgugucucu

SEQ ID NO: 1707379 - RNA, 19 nt, Homo sapiens
  misc_RNA (1)...(19): siRNA sense strand
cagagagcguggagaaugg

SEQ ID NO: 1707380 - RNA, 19 nt, Homo sapiens
  misc_RNA (1)...(19): siRNA sense strand
ccgacaagauccuggacuu

SEQ ID NO: 1707381 - RNA, 19 nt, Homo sapiens
  misc_RNA (1)...(19): siRNA sense strand
agagaaaccucaagaaaag

SEQ ID NO: 1707382 - RNA, 19 nt, Homo sapiens
  misc_RNA (1)...(19): siRNA sense strand
gggacuuugugcacuguga

SEQ ID NO: 1707383 - RNA, 19 nt, Homo sapiens
  misc_RNA (1)...(19): siRNA sense strand
uccaacggaugcuuuauca

SEQ ID NO: 1707384 - RNA, 19 nt, Homo sapiens
  misc_RNA (1)...(19): siRNA sense strand
gagauaauggaaacaucaa

SEQ ID NO: 1707385 - RNA, 19 nt, Homo sapiens
  misc_RNA (1)...(19): siRNA sense strand
gccaacaagcggagugauu

SEQ ID NO: 1707386 - RNA, 19 nt, Homo sapiens
  misc_RNA (1)...(19): siRNA sense strand
ugucucgggucaucuguga

SEQ ID NO: 1707387 - RNA, 19 nt, Homo sapiens
  misc_RNA (1)...(19): siRNA sense strand
gagaacagccacgucuuca

SEQ ID NO: 1707388 - RNA, 19 nt, Homo sapiens
  misc_RNA (1)...(19): siRNA sense strand
gagcagcagagauaaugga

SEQ ID NO: 1707389 - RNA, 19 nt, Homo sapiens
  misc_RNA (1)...(19): siRNA sense strand
gcagagauaauggaaacau

SEQ ID NO: 1707390 - RNA, 19 nt, Homo sapiens
  misc_RNA (1)...(19): siRNA sense strand
gagcuugcaacaacagaga

SEQ ID NO: 1707391 - RNA, 19 nt, Homo sapiens
  misc_RNA (1)...(19): siRNA sense strand
caaaaugcccaaacacuug

SEQ ID NO: 1707392 - RNA, 19 nt, Homo sapiens
  misc_RNA (1)...(19): siRNA sense strand
aaagaaaagucaaccugaa

SEQ ID NO: 1707393 - RNA, 19 nt, Homo sapiens
  misc_RNA (1)...(19): siRNA sense strand
cagagauaauggaaacauc

SEQ ID NO: 1707394 - RNA, 19 nt, Homo sapiens
  misc_RNA (1)...(19): siRNA sense strand
aaguguggcuucccagaga

SEQ ID NO: 1707395 - RNA, 19 nt, Homo sapiens
  misc_RNA (1)...(19): siRNA sense strand
gcugggaggcuuagcugaa

SEQ ID NO: 1707396 - RNA, 19 nt, Homo sapiens
  misc_RNA (1)...(19): siRNA sense strand
uacaagcgaugaaaagaaa

SEQ ID NO: 1707397 - RNA, 19 nt, Homo sapiens
  misc_RNA (1)...(19): siRNA sense strand
cagagaaaccucaagaaaa

SEQ ID NO: 1707398 - RNA, 19 nt, Homo sapiens
  misc_RNA (1)...(19): siRNA sense strand
ccgaggccuuccagcagua

SEQ ID NO: 1707399 - RNA, 19 nt, Homo sapiens
  misc_RNA (1)...(19): siRNA sense strand
caaacuuccugagccaaca

SEQ ID NO: 1707400 - RNA, 19 nt, Homo sapiens
  misc_RNA (1)...(19): siRNA sense strand
aacggaugcuuuaucagaa

SEQ ID NO: 1707401 - RNA, 19 nt, Homo sapiens
  misc_RNA (1)...(19): siRNA sense strand
ggcgcgugcugguguauuc

SEQ ID NO: 1707402 - RNA, 19 nt, Homo sapiens
  misc_RNA (1)...(19): siRNA sense strand
cuggaggccuggagggaaa

SEQ ID NO: 1707403 - RNA, 19 nt, Homo sapiens
  misc_RNA (1)...(19): siRNA sense strand
cacagaugaugaccgcuau

SEQ ID NO: 1707404 - RNA, 19 nt, Homo sapiens
  misc_RNA (1)...(19): siRNA sense strand
gcagcagagauaauggaaa

SEQ ID NO: 1707405 - RNA, 19 nt, Homo sapiens
  misc_RNA (1)...(19): siRNA sense strand
cugggaggcuuagcugaaa

SEQ ID NO: 1707406 - RNA, 19 nt, Homo sapiens
  misc_RNA (1)...(19): siRNA sense strand
aaaugagguugucacagau

SEQ ID NO: 1707407 - RNA, 19 nt, Homo sapiens
  misc_RNA (1)...(19): siRNA sense strand
caaauacaggcccaucaca

SEQ ID NO: 1707408 - RNA, 19 nt, Homo sapiens
  misc_RNA (1)...(19): siRNA sense strand
caacaaucacagcauccaa

SEQ ID NO: 1707409 - RNA, 19 nt, Homo sapiens
  misc_RNA (1)...(19): siRNA sense strand
aggcuuagcugaaaacuuc

SEQ ID NO: 1707410 - RNA, 19 nt, Homo sapiens
  misc_RNA (1)...(19): siRNA sense strand
cuucagcccauggacauua

SEQ ID NO: 1707411 - RNA, 19 nt, Homo sapiens
  misc_RNA (1)...(19): siRNA sense strand
acgccacgaugcagagaaa

SEQ ID NO: 1707412 - RNA, 19 nt, Homo sapiens
  misc_RNA (1)...(19): siRNA sense strand
gcaguacgugggucccuau

SEQ ID NO: 1707413 - RNA, 19 nt, Homo sapiens
  misc_RNA (1)...(19): siRNA sense strand
cuguuugccugucucauug

SEQ ID NO: 1707414 - RNA, 19 nt, Homo sapiens
  misc_RNA (1)...(19): siRNA sense strand
acaagcauccugacaacau

SEQ ID NO: 1707415 - RNA, 19 nt, Homo sapiens
  misc_RNA (1)...(19): siRNA sense strand
gagagggaaagaacuccuu

SEQ ID NO: 1707416 - RNA, 19 nt, Homo sapiens
  misc_RNA (1)...(19): siRNA sense strand
agagauaauggaaacauca

SEQ ID NO: 1707417 - RNA, 19 nt, Homo sapiens
  misc_RNA (1)...(19): siRNA sense strand
gacagcaucacuggcauga

SEQ ID NO: 1707418 - RNA, 19 nt, Homo sapiens
  misc_RNA (1)...(19): siRNA sense strand
ccuguuugccugucucauu

SEQ ID NO: 1707419 - RNA, 19 nt, Homo sapiens
  misc_RNA (1)...(19): siRNA sense strand
ucacaggagcuugcaacaa

SEQ ID NO: 1707420 - RNA, 19 nt, Homo sapiens
  misc_RNA (1)...(19): siRNA sense strand
ugcccgagcagcagagaua

SEQ ID NO: 1707421 - RNA, 19 nt, Homo sapiens
  misc_RNA (1)...(19): siRNA sense strand
acugccagaugacuuguga

SEQ ID NO: 1707422 - RNA, 19 nt, Homo sapiens
  misc_RNA (1)...(19): siRNA sense strand
auggaaacaucaauacaag

SEQ ID NO: 1707423 - RNA, 19 nt, Homo sapiens
  misc_RNA (1)...(19): siRNA sense strand
auacaucgaccacgacauc

SEQ ID NO: 1707424 - RNA, 19 nt, Homo sapiens
  misc_RNA (1)...(19): siRNA sense strand
acaugucauucaaguuuca

SEQ ID NO: 1707425 - RNA, 19 nt, Homo sapiens
  misc_RNA (1)...(19): siRNA sense strand
cggaugcuuuaucagaaga

SEQ ID NO: 1707426 - RNA, 19 nt, Homo sapiens
  misc_RNA (1)...(19): siRNA sense strand
gagguugucacagaugaug

SEQ ID NO: 1707427 - RNA, 19 nt, Homo sapiens
  misc_RNA (1)...(19): siRNA sense strand
gcaaauuccccgaagacuu

SEQ ID NO: 1707428 - RNA, 19 nt, Homo sapiens
  misc_RNA (1)...(19): siRNA sense strand
gaugacuugugagaaccaa

SEQ ID NO: 1707429 - RNA, 19 nt, Homo sapiens
  misc_RNA (1)...(19): siRNA sense strand
gagccaacaagcggaguga

SEQ ID NO: 1707430 - RNA, 19 nt, Homo sapiens
  misc_RNA (1)...(19): siRNA sense strand
ccaggaaggaugggauuuc

SEQ ID NO: 1707431 - RNA, 19 nt, Homo sapiens
  misc_RNA (1)...(19): siRNA sense strand
cagaugaugaccgcuauuc

SEQ ID NO: 1707432 - RNA, 19 nt, Homo sapiens
  misc_RNA (1)...(19): siRNA sense strand
ccugaggagucucgugucu

SEQ ID NO: 1707433 - RNA, 19 nt, Homo sapiens
  misc_RNA (1)...(19): siRNA sense strand
uguacaagcauccugacaa

SEQ ID NO: 1707434 - RNA, 19 nt, Homo sapiens
  misc_RNA (1)...(19): siRNA sense strand
gaagugguaccagagcaua

SEQ ID NO: 1707435 - RNA, 19 nt, Homo sapiens
  misc_RNA (1)...(19): siRNA sense strand
ucuggaagcuuggccauca

SEQ ID NO: 1707436 - RNA, 19 nt, Homo sapiens
  misc_RNA (1)...(19): siRNA sense strand
cuccaugacuccaauccaa

SEQ ID NO: 1707437 - RNA, 19 nt, Homo sapiens
  misc_RNA (1)...(19): siRNA sense strand
caccguacccuuccuaugg

SEQ ID NO: 1707438 - RNA, 19 nt, Homo sapiens
  misc_RNA (1)...(19): siRNA sense strand
caacacuccaugacuccaa

SEQ ID NO: 1707439 - RNA, 19 nt, Homo sapiens
  misc_RNA (1)...(19): siRNA sense strand
ggaccuggauuuuauuugc

SEQ ID NO: 1707440 - RNA, 19 nt, Homo sapiens
  misc_RNA (1)...(19): siRNA sense strand
aagcuuggccaucaacaga

SEQ ID NO: 1707441 - RNA, 19 nt, Homo sapiens
  misc_RNA (1)...(19): siRNA sense strand
gcuuggccaucaacagaca

SEQ ID NO: 1707442 - RNA, 19 nt, Homo sapiens
  misc_RNA (1)...(19): siRNA sense strand
caucaacagacaagaccaa

SEQ ID NO: 1707443 - RNA, 19 nt, Homo sapiens
  misc_RNA (1)...(19): siRNA sense strand
gaucugacucuggaagcuu

SEQ ID NO: 1707444 - RNA, 19 nt, Homo sapiens
  misc_RNA (1)...(19): siRNA sense strand
gcgggaggaaguggauuaa

SEQ ID NO: 1707445 - RNA, 19 nt, Homo sapiens
  misc_RNA (1)...(19): siRNA sense strand
agaccaagcgggaggaagu

SEQ ID NO: 1707446 - RNA, 19 nt, Homo sapiens
  misc_RNA (1)...(19): siRNA sense strand
gaagugguaccagagcaua

SEQ ID NO: 1707447 - RNA, 19 nt, Homo sapiens
  misc_RNA (1)...(19): siRNA sense strand
ucuggaagcuuggccauca

SEQ ID NO: 1707448 - RNA, 19 nt, Homo sapiens
  misc_RNA (1)...(19): siRNA sense strand
cuccaugacuccaauccaa

SEQ ID NO: 1707449 - RNA, 19 nt, Homo sapiens
  misc_RNA (1)...(19): siRNA sense strand
caccguacccuuccuaugg

SEQ ID NO: 1707450 - RNA, 19 nt, Homo sapiens
  misc_RNA (1)...(19): siRNA sense strand
caacacuccaugacuccaa

SEQ ID NO: 1707451 - RNA, 19 nt, Homo sapiens
  misc_RNA (1)...(19): siRNA sense strand
ggaccuggauuuuauuugc

SEQ ID NO: 1707452 - RNA, 19 nt, Homo sapiens
  misc_RNA (1)...(19): siRNA sense strand
aagcuuggccaucaacaga

SEQ ID NO: 1707453 - RNA, 19 nt, Homo sapiens
  misc_RNA (1)...(19): siRNA sense strand
gcuuggccaucaacagaca

SEQ ID NO: 1707454 - RNA, 19 nt, Homo sapiens
  misc_RNA (1)...(19): siRNA sense strand
caucaacagacaagaccaa

SEQ ID NO: 1707455 - RNA, 19 nt, Homo sapiens
  misc_RNA (1)...(19): siRNA sense strand
gaucugacucuggaagcuu

SEQ ID NO: 1707456 - RNA, 19 nt, Homo sapiens
  misc_RNA (1)...(19): siRNA sense strand
gcgggaggaaguggauuaa

SEQ ID NO: 1707457 - RNA, 19 nt, Homo sapiens
  misc_RNA (1)...(19): siRNA sense strand
agaccaagcgggaggaagu

SEQ ID NO: 1707458 - RNA, 19 nt, Homo sapiens
  misc_RNA (1)...(19): siRNA sense strand
gaagugguaccagagcaua

SEQ ID NO: 1707459 - RNA, 19 nt, Homo sapiens
  misc_RNA (1)...(19): siRNA sense strand
ucuggaagcuuggccauca

SEQ ID NO: 1707460 - RNA, 19 nt, Homo sapiens
  misc_RNA (1)...(19): siRNA sense strand
cuccaugacuccaauccaa

SEQ ID NO: 1707461 - RNA, 19 nt, Homo sapiens
  misc_RNA (1)...(19): siRNA sense strand
caccguacccuuccuaugg

SEQ ID NO: 1707462 - RNA, 19 nt, Homo sapiens
  misc_RNA (1)...(19): siRNA sense strand
caacacuccaugacuccaa

SEQ ID NO: 1707463 - RNA, 19 nt, Homo sapiens
  misc_RNA (1)...(19): siRNA sense strand
ggaccuggauuuuauuugc

SEQ ID NO: 1707464 - RNA, 19 nt, Homo sapiens
  misc_RNA (1)...(19): siRNA sense strand
aagcuuggccaucaacaga

SEQ ID NO: 1707465 - RNA, 19 nt, Homo sapiens
  misc_RNA (1)...(19): siRNA sense strand
gcuuggccaucaacagaca

SEQ ID NO: 1707466 - RNA, 19 nt, Homo sapiens
  misc_RNA (1)...(19): siRNA sense strand
caucaacagacaagaccaa

SEQ ID NO: 1707467 - RNA, 19 nt, Homo sapiens
  misc_RNA (1)...(19): siRNA sense strand
gaucugacucuggaagcuu

SEQ ID NO: 1707468 - RNA, 19 nt, Homo sapiens
  misc_RNA (1)...(19): siRNA sense strand
gcgggaggaaguggauuaa

SEQ ID NO: 1707469 - RNA, 19 nt, Homo sapiens
  misc_RNA (1)...(19): siRNA sense strand
agaccaagcgggaggaagu

SEQ ID NO: 1707470 - RNA, 19 nt, Homo sapiens
  misc_RNA (1)...(19): siRNA sense strand
gaagacagcuggcagaacu

SEQ ID NO: 1707471 - RNA, 19 nt, Homo sapiens
  misc_RNA (1)...(19): siRNA sense strand
gaugggaaguccuuauuau

SEQ ID NO: 1707472 - RNA, 19 nt, Homo sapiens
  misc_RNA (1)...(19): siRNA sense strand
gagggaagauagaaaugga

SEQ ID NO: 1707473 - RNA, 19 nt, Homo sapiens
  misc_RNA (1)...(19): siRNA sense strand
gggaaguccuuauuauugg

SEQ ID NO: 1707474 - RNA, 19 nt, Homo sapiens
  misc_RNA (1)...(19): siRNA sense strand
gaagauagaaauggagaau

SEQ ID NO: 1707475 - RNA, 19 nt, Homo sapiens
  misc_RNA (1)...(19): siRNA sense strand
aaaguugcccgcuguguaa

SEQ ID NO: 1707476 - RNA, 19 nt, Homo sapiens
  misc_RNA (1)...(19): siRNA sense strand
cgaugggaaguccuuauua

SEQ ID NO: 1707477 - RNA, 19 nt, Homo sapiens
  misc_RNA (1)...(19): siRNA sense strand
ugggaaguccuuauuauug

SEQ ID NO: 1707478 - RNA, 19 nt, Homo sapiens
  misc_RNA (1)...(19): siRNA sense strand
gaauggagggaagauagaa

SEQ ID NO: 1707479 - RNA, 19 nt, Homo sapiens
  misc_RNA (1)...(19): siRNA sense strand
auuauuggcccuccagaua

SEQ ID NO: 1707480 - RNA, 19 nt, Homo sapiens
  misc_RNA (1)...(19): siRNA sense strand
gcuggcagaacucaacaaa

SEQ ID NO: 1707481 - RNA, 19 nt, Homo sapiens
  misc_RNA (1)...(19): siRNA sense strand
cugcagguuuaauagauga

SEQ ID NO: 1707482 - RNA, 19 nt, Homo sapiens
  misc_RNA (1)...(19): siRNA sense strand
gcacugcuacugcgaagac

SEQ ID NO: 1707483 - RNA, 19 nt, Homo sapiens
  misc_RNA (1)...(19): siRNA sense strand
aaagaauggagggaagaua

SEQ ID NO: 1707484 - RNA, 19 nt, Homo sapiens
  misc_RNA (1)...(19): siRNA sense strand
ggagggaagauagaaaugg

SEQ ID NO: 1707485 - RNA, 19 nt, Homo sapiens
  misc_RNA (1)...(19): siRNA sense strand
gccaagagacugcuuuuga

SEQ ID NO: 1707486 - RNA, 19 nt, Homo sapiens
  misc_RNA (1)...(19): siRNA sense strand
ggaagauagaaauggagaa

SEQ ID NO: 1707487 - RNA, 19 nt, Homo sapiens
  misc_RNA (1)...(19): siRNA sense strand
gcgaagacagcuggcagaa

SEQ ID NO: 1707488 - RNA, 19 nt, Homo sapiens
  misc_RNA (1)...(19): siRNA sense strand
ccgaugggaaguccuuauu

SEQ ID NO: 1707489 - RNA, 19 nt, Homo sapiens
  misc_RNA (1)...(19): siRNA sense strand
guugcccgcuguguaagaa

SEQ ID NO: 1707490 - RNA, 19 nt, Homo sapiens
  misc_RNA (1)...(19): siRNA sense strand
uauuggcccuccagauaca

SEQ ID NO: 1707491 - RNA, 19 nt, Homo sapiens
  misc_RNA (1)...(19): siRNA sense strand
aagaauggagggaagauag

SEQ ID NO: 1707492 - RNA, 19 nt, Homo sapiens
  misc_RNA (1)...(19): siRNA sense strand
gcccuccagauacacuuua

SEQ ID NO: 1707493 - RNA, 19 nt, Homo sapiens
  misc_RNA (1)...(19): siRNA sense strand
agagacugcuuuugaguga

SEQ ID NO: 1707494 - RNA, 19 nt, Homo sapiens
  misc_RNA (1)...(19): siRNA sense strand
ccaagagacugcuuuugag

SEQ ID NO: 1707495 - RNA, 19 nt, Homo sapiens
  misc_RNA (1)...(19): siRNA sense strand
gaagacagcuggcagaacu

SEQ ID NO: 1707496 - RNA, 19 nt, Homo sapiens
  misc_RNA (1)...(19): siRNA sense strand
gaugggaaguccuuauuau

SEQ ID NO: 1707497 - RNA, 19 nt, Homo sapiens
  misc_RNA (1)...(19): siRNA sense strand
gggaaguccuuauuauugg

SEQ ID NO: 1707498 - RNA, 19 nt, Homo sapiens
  misc_RNA (1)...(19): siRNA sense strand
cgaugggaaguccuuauua

SEQ ID NO: 1707499 - RNA, 19 nt, Homo sapiens
  misc_RNA (1)...(19): siRNA sense strand
ugggaaguccuuauuauug

SEQ ID NO: 1707500 - RNA, 19 nt, Homo sapiens
  misc_RNA (1)...(19): siRNA sense strand
auuauuggcccuccagaua

SEQ ID NO: 1707501 - RNA, 19 nt, Homo sapiens
  misc_RNA (1)...(19): siRNA sense strand
gcuggcagaacucaacaaa

SEQ ID NO: 1707502 - RNA, 19 nt, Homo sapiens
  misc_RNA (1)...(19): siRNA sense strand
cugcagguuuaauagauga

SEQ ID NO: 1707503 - RNA, 19 nt, Homo sapiens
  misc_RNA (1)...(19): siRNA sense strand
gcacugcuacugcgaagac

SEQ ID NO: 1707504 - RNA, 19 nt, Homo sapiens
  misc_RNA (1)...(19): siRNA sense strand
gcgaagacagcuggcagaa

SEQ ID NO: 1707505 - RNA, 19 nt, Homo sapiens
  misc_RNA (1)...(19): siRNA sense strand
ccgaugggaaguccuuauu

SEQ ID NO: 1707506 - RNA, 19 nt, Homo sapiens
  misc_RNA (1)...(19): siRNA sense strand
uauuggcccuccagauaca

SEQ ID NO: 1707507 - RNA, 19 nt, Homo sapiens
  misc_RNA (1)...(19): siRNA sense strand
gcccuccagauacacuuua

SEQ ID NO: 1707508 - RNA, 19 nt, Homo sapiens
  misc_RNA (1)...(19): siRNA sense strand
gcccuacacaccacagaua

SEQ ID NO: 1707509 - RNA, 19 nt, Homo sapiens
  misc_RNA (1)...(19): siRNA sense strand
gugguggccuucagcaaug

SEQ ID NO: 1707510 - RNA, 19 nt, Homo sapiens
  misc_RNA (1)...(19): siRNA sense strand
ggagacacuggcugacauu

SEQ ID NO: 1707511 - RNA, 19 nt, Homo sapiens
  misc_RNA (1)...(19): siRNA sense strand
cuacaugacccaccacauc

SEQ ID NO: 1707512 - RNA, 19 nt, Homo sapiens
  misc_RNA (1)...(19): siRNA sense strand
gcggaucggcuccuucaug

SEQ ID NO: 1707513 - RNA, 19 nt, Homo sapiens
  misc_RNA (1)...(19): siRNA sense strand
gcugaccgauggccacuac

SEQ ID NO: 1707514 - RNA, 19 nt, Homo sapiens
  misc_RNA (1)...(19): siRNA sense strand
uuaccuccauccucucuuc

SEQ ID NO: 1707515 - RNA, 19 nt, Homo sapiens
  misc_RNA (1)...(19): siRNA sense strand
cggagacacuggcugacau

SEQ ID NO: 1707516 - RNA, 19 nt, Homo sapiens
  misc_RNA (1)...(19): siRNA sense strand
cuacacaccacagauaaca

SEQ ID NO: 1707517 - RNA, 19 nt, Homo sapiens
  misc_RNA (1)...(19): siRNA sense strand
gaccgauggccacuacaug

SEQ ID NO: 1707518 - RNA, 19 nt, Homo sapiens
  misc_RNA (1)...(19): siRNA sense strand
cggcgaaguggcagcauga

SEQ ID NO: 1707519 - RNA, 19 nt, Homo sapiens
  misc_RNA (1)...(19): siRNA sense strand
gcccuacacaccacagaua

SEQ ID NO: 1707520 - RNA, 19 nt, Homo sapiens
  misc_RNA (1)...(19): siRNA sense strand
gugguggccuucagcaaug

SEQ ID NO: 1707521 - RNA, 19 nt, Homo sapiens
  misc_RNA (1)...(19): siRNA sense strand
ggagacacuggcugacauu

SEQ ID NO: 1707522 - RNA, 19 nt, Homo sapiens
  misc_RNA (1)...(19): siRNA sense strand
cuacaugacccaccacauc

SEQ ID NO: 1707523 - RNA, 19 nt, Homo sapiens
  misc_RNA (1)...(19): siRNA sense strand
gcggaucggcuccuucaug

SEQ ID NO: 1707524 - RNA, 19 nt, Homo sapiens
  misc_RNA (1)...(19): siRNA sense strand
gcugaccgauggccacuac

SEQ ID NO: 1707525 - RNA, 19 nt, Homo sapiens
  misc_RNA (1)...(19): siRNA sense strand
uuaccuccauccucucuuc

SEQ ID NO: 1707526 - RNA, 19 nt, Homo sapiens
  misc_RNA (1)...(19): siRNA sense strand
cggagacacuggcugacau

SEQ ID NO: 1707527 - RNA, 19 nt, Homo sapiens
  misc_RNA (1)...(19): siRNA sense strand
cuacacaccacagauaaca

SEQ ID NO: 1707528 - RNA, 19 nt, Homo sapiens
  misc_RNA (1)...(19): siRNA sense strand
gaccgauggccacuacaug

SEQ ID NO: 1707529 - RNA, 19 nt, Homo sapiens
  misc_RNA (1)...(19): siRNA sense strand
cggcgaaguggcagcauga

SEQ ID NO: 1707530 - RNA, 19 nt, Homo sapiens
  misc_RNA (1)...(19): siRNA sense strand
gcccuacacaccacagaua

SEQ ID NO: 1707531 - RNA, 19 nt, Homo sapiens
  misc_RNA (1)...(19): siRNA sense strand
gugguggccuucagcaaug

SEQ ID NO: 1707532 - RNA, 19 nt, Homo sapiens
  misc_RNA (1)...(19): siRNA sense strand
ggagacacuggcugacauu

SEQ ID NO: 1707533 - RNA, 19 nt, Homo sapiens
  misc_RNA (1)...(19): siRNA sense strand
cuacaugacccaccacauc

SEQ ID NO: 1707534 - RNA, 19 nt, Homo sapiens
  misc_RNA (1)...(19): siRNA sense strand
gcggaucggcuccuucaug

SEQ ID NO: 1707535 - RNA, 19 nt, Homo sapiens
  misc_RNA (1)...(19): siRNA sense strand
gcugaccgauggccacuac

SEQ ID NO: 1707536 - RNA, 19 nt, Homo sapiens
  misc_RNA (1)...(19): siRNA sense strand
uuaccuccauccucucuuc

SEQ ID NO: 1707537 - RNA, 19 nt, Homo sapiens
  misc_RNA (1)...(19): siRNA sense strand
cggagacacuggcugacau

SEQ ID NO: 1707538 - RNA, 19 nt, Homo sapiens
  misc_RNA (1)...(19): siRNA sense strand
cuacacaccacagauaaca

SEQ ID NO: 1707539 - RNA, 19 nt, Homo sapiens
  misc_RNA (1)...(19): siRNA sense strand
gaccgauggccacuacaug

SEQ ID NO: 1707540 - RNA, 19 nt, Homo sapiens
  misc_RNA (1)...(19): siRNA sense strand
cggcgaaguggcagcauga

SEQ ID NO: 1707541 - RNA, 19 nt, Homo sapiens
  misc_RNA (1)...(19): siRNA sense strand
gcccuacacaccacagaua

SEQ ID NO: 1707542 - RNA, 19 nt, Homo sapiens
  misc_RNA (1)...(19): siRNA sense strand
gugguggccuucagcaaug

SEQ ID NO: 1707543 - RNA, 19 nt, Homo sapiens
  misc_RNA (1)...(19): siRNA sense strand
ggagacacuggcugacauu

SEQ ID NO: 1707544 - RNA, 19 nt, Homo sapiens
  misc_RNA (1)...(19): siRNA sense strand
cuacaugacccaccacauc

SEQ ID NO: 1707545 - RNA, 19 nt, Homo sapiens
  misc_RNA (1)...(19): siRNA sense strand
gcggaucggcuccuucaug

SEQ ID NO: 1707546 - RNA, 19 nt, Homo sapiens
  misc_RNA (1)...(19): siRNA sense strand
gcugaccgauggccacuac

SEQ ID NO: 1707547 - RNA, 19 nt, Homo sapiens
  misc_RNA (1)...(19): siRNA sense strand
uuaccuccauccucucuuc

SEQ ID NO: 1707548 - RNA, 19 nt, Homo sapiens
  misc_RNA (1)...(19): siRNA sense strand
cggagacacuggcugacau

SEQ ID NO: 1707549 - RNA, 19 nt, Homo sapiens
  misc_RNA (1)...(19): siRNA sense strand
cuacacaccacagauaaca

SEQ ID NO: 1707550 - RNA, 19 nt, Homo sapiens
  misc_RNA (1)...(19): siRNA sense strand
gaccgauggccacuacaug

SEQ ID NO: 1707551 - RNA, 19 nt, Homo sapiens
  misc_RNA (1)...(19): siRNA sense strand
cggcgaaguggcagcauga

SEQ ID NO: 1707552 - RNA, 19 nt, Homo sapiens
  misc_RNA (1)...(19): siRNA sense strand
gcccuacacaccacagaua

SEQ ID NO: 1707553 - RNA, 19 nt, Homo sapiens
  misc_RNA (1)...(19): siRNA sense strand
gugguggccuucagcaaug

SEQ ID NO: 1707554 - RNA, 19 nt, Homo sapiens
  misc_RNA (1)...(19): siRNA sense strand
ggagacacuggcugacauu

SEQ ID NO: 1707555 - RNA, 19 nt, Homo sapiens
  misc_RNA (1)...(19): siRNA sense strand
cuacaugacccaccacauc

SEQ ID NO: 1707556 - RNA, 19 nt, Homo sapiens
  misc_RNA (1)...(19): siRNA sense strand
gcggaucggcuccuucaug

SEQ ID NO: 1707557 - RNA, 19 nt, Homo sapiens
  misc_RNA (1)...(19): siRNA sense strand
gcugaccgauggccacuac

SEQ ID NO: 1707558 - RNA, 19 nt, Homo sapiens
  misc_RNA (1)...(19): siRNA sense strand
uuaccuccauccucucuuc

SEQ ID NO: 1707559 - RNA, 19 nt, Homo sapiens
  misc_RNA (1)...(19): siRNA sense strand
cggagacacuggcugacau

SEQ ID NO: 1707560 - RNA, 19 nt, Homo sapiens
  misc_RNA (1)...(19): siRNA sense strand
cuacacaccacagauaaca

SEQ ID NO: 1707561 - RNA, 19 nt, Homo sapiens
  misc_RNA (1)...(19): siRNA sense strand
gaccgauggccacuacaug

SEQ ID NO: 1707562 - RNA, 19 nt, Homo sapiens
  misc_RNA (1)...(19): siRNA sense strand
cggcgaaguggcagcauga

SEQ ID NO: 1707563 - RNA, 19 nt, Homo sapiens
  misc_RNA (1)...(19): siRNA sense strand
gcccuacacaccacagaua

SEQ ID NO: 1707564 - RNA, 19 nt, Homo sapiens
  misc_RNA (1)...(19): siRNA sense strand
gugguggccuucagcaaug

SEQ ID NO: 1707565 - RNA, 19 nt, Homo sapiens
  misc_RNA (1)...(19): siRNA sense strand
ggagacacuggcugacauu

SEQ ID NO: 1707566 - RNA, 19 nt, Homo sapiens
  misc_RNA (1)...(19): siRNA sense strand
cuacaugacccaccacauc

SEQ ID NO: 1707567 - RNA, 19 nt, Homo sapiens
  misc_RNA (1)...(19): siRNA sense strand
gcggaucggcuccuucaug

SEQ ID NO: 1707568 - RNA, 19 nt, Homo sapiens
  misc_RNA (1)...(19): siRNA sense strand
gcugaccgauggccacuac

SEQ ID NO: 1707569 - RNA, 19 nt, Homo sapiens
  misc_RNA (1)...(19): siRNA sense strand
uuaccuccauccucucuuc

SEQ ID NO: 1707570 - RNA, 19 nt, Homo sapiens
  misc_RNA (1)...(19): siRNA sense strand
cggagacacuggcugacau

SEQ ID NO: 1707571 - RNA, 19 nt, Homo sapiens
  misc_RNA (1)...(19): siRNA sense strand
cuacacaccacagauaaca

SEQ ID NO: 1707572 - RNA, 19 nt, Homo sapiens
  misc_RNA (1)...(19): siRNA sense strand
gaccgauggccacuacaug

SEQ ID NO: 1707573 - RNA, 19 nt, Homo sapiens
  misc_RNA (1)...(19): siRNA sense strand
cggcgaaguggcagcauga

SEQ ID NO: 1707574 - RNA, 19 nt, Homo sapiens
  misc_RNA (1)...(19): siRNA sense strand
ccaauguucuggcccguua

SEQ ID NO: 1707575 - RNA, 19 nt, Homo sapiens
  misc_RNA (1)...(19): siRNA sense strand
ucucuaaccacgccuauua

SEQ ID NO: 1707576 - RNA, 19 nt, Homo sapiens
  misc_RNA (1)...(19): siRNA sense strand
ggaagaaggagaaccugaa

SEQ ID NO: 1707577 - RNA, 19 nt, Homo sapiens
  misc_RNA (1)...(19): siRNA sense strand
gccaguaugugaccgagaa

SEQ ID NO: 1707578 - RNA, 19 nt, Homo sapiens
  misc_RNA (1)...(19): siRNA sense strand
ggacaaauggcgagacuac

SEQ ID NO: 1707579 - RNA, 19 nt, Homo sapiens
  misc_RNA (1)...(19): siRNA sense strand
agaagaaggagcugucuga

SEQ ID NO: 1707580 - RNA, 19 nt, Homo sapiens
  misc_RNA (1)...(19): siRNA sense strand
gaagaaggagaaccugaag

SEQ ID NO: 1707581 - RNA, 19 nt, Homo sapiens
  misc_RNA (1)...(19): siRNA sense strand
ccaagcggcugcaguccau

SEQ ID NO: 1707582 - RNA, 19 nt, Homo sapiens
  misc_RNA (1)...(19): siRNA sense strand
uugaagcgcugccaguaug

SEQ ID NO: 1707583 - RNA, 19 nt, Homo sapiens
  misc_RNA (1)...(19): siRNA sense strand
ugagugaccaccacaucua

SEQ ID NO: 1707584 - RNA, 19 nt, Homo sapiens
  misc_RNA (1)...(19): siRNA sense strand
ggccaugcuugcacucaga

SEQ ID NO: 1707585 - RNA, 19 nt, Homo sapiens
  misc_RNA (1)...(19): siRNA sense strand
ggugcuggcugcugucuac

SEQ ID NO: 1707586 - RNA, 19 nt, Homo sapiens
  misc_RNA (1)...(19): siRNA sense strand
ccugagauccucccugaug

SEQ ID NO: 1707587 - RNA, 19 nt, Homo sapiens
  misc_RNA (1)...(19): siRNA sense strand
gcugugcccaguacaagaa

SEQ ID NO: 1707588 - RNA, 19 nt, Homo sapiens
  misc_RNA (1)...(19): siRNA sense strand
gcaggaggaguaugucaag

SEQ ID NO: 1707589 - RNA, 19 nt, Homo sapiens
  misc_RNA (1)...(19): siRNA sense strand
guugugugcugaagauugg

SEQ ID NO: 1707590 - RNA, 19 nt, Homo sapiens
  misc_RNA (1)...(19): siRNA sense strand
ccucagcccucgccaucau

SEQ ID NO: 1707591 - RNA, 19 nt, Homo sapiens
  misc_RNA (1)...(19): siRNA sense strand
ggaggaggcguccaucaac

SEQ ID NO: 1707592 - RNA, 19 nt, Homo sapiens
  misc_RNA (1)...(19): siRNA sense strand
augagacacucuaccagaa

SEQ ID NO: 1707593 - RNA, 19 nt, Homo sapiens
  misc_RNA (1)...(19): siRNA sense strand
ucuacaaggcucugaguga

SEQ ID NO: 1707594 - RNA, 19 nt, Homo sapiens
  misc_RNA (1)...(19): siRNA sense strand
ggcguugugugcugaagau

SEQ ID NO: 1707595 - RNA, 19 nt, Homo sapiens
  misc_RNA (1)...(19): siRNA sense strand
gcuggcugcugucuacaag

SEQ ID NO: 1707596 - RNA, 19 nt, Homo sapiens
  misc_RNA (1)...(19): siRNA sense strand
ugaguccacugggagcauu

SEQ ID NO: 1707597 - RNA, 19 nt, Homo sapiens
  misc_RNA (1)...(19): siRNA sense strand
ccgagaacaccgaggagaa

SEQ ID NO: 1707598 - RNA, 19 nt, Homo sapiens
  misc_RNA (1)...(19): siRNA sense strand
gaggaggaggcguccauca

SEQ ID NO: 1707599 - RNA, 19 nt, Homo sapiens
  misc_RNA (1)...(19): siRNA sense strand
cccaaguuaucaaauccaa

SEQ ID NO: 1707600 - RNA, 19 nt, Homo sapiens
  misc_RNA (1)...(19): siRNA sense strand
cauggaaaaugccaauguu

SEQ ID NO: 1707601 - RNA, 19 nt, Homo sapiens
  misc_RNA (1)...(19): siRNA sense strand
ucacugggaucaccuuccu

SEQ ID NO: 1707602 - RNA, 19 nt, Homo sapiens
  misc_RNA (1)...(19): siRNA sense strand
gggcaucaagguagacaag

SEQ ID NO: 1707603 - RNA, 19 nt, Homo sapiens
  misc_RNA (1)...(19): siRNA sense strand
gguuggaugggcugucuga

SEQ ID NO: 1707604 - RNA, 19 nt, Homo sapiens
  misc_RNA (1)...(19): siRNA sense strand
ccaauguucuggcccguua

SEQ ID NO: 1707605 - RNA, 19 nt, Homo sapiens
  misc_RNA (1)...(19): siRNA sense strand
ucucuaaccacgccuauua

SEQ ID NO: 1707606 - RNA, 19 nt, Homo sapiens
  misc_RNA (1)...(19): siRNA sense strand
ggaagaaggagaaccugaa

SEQ ID NO: 1707607 - RNA, 19 nt, Homo sapiens
  misc_RNA (1)...(19): siRNA sense strand
gccaguaugugaccgagaa

SEQ ID NO: 1707608 - RNA, 19 nt, Homo sapiens
  misc_RNA (1)...(19): siRNA sense strand
ggacaaauggcgagacuac

SEQ ID NO: 1707609 - RNA, 19 nt, Homo sapiens
  misc_RNA (1)...(19): siRNA sense strand
agaagaaggagcugucuga

SEQ ID NO: 1707610 - RNA, 19 nt, Homo sapiens
  misc_RNA (1)...(19): siRNA sense strand
gaagaaggagaaccugaag

SEQ ID NO: 1707611 - RNA, 19 nt, Homo sapiens
  misc_RNA (1)...(19): siRNA sense strand
ccaagcggcugcaguccau

SEQ ID NO: 1707612 - RNA, 19 nt, Homo sapiens
  misc_RNA (1)...(19): siRNA sense strand
uugaagcgcugccaguaug

SEQ ID NO: 1707613 - RNA, 19 nt, Homo sapiens
  misc_RNA (1)...(19): siRNA sense strand
ugagugaccaccacaucua

SEQ ID NO: 1707614 - RNA, 19 nt, Homo sapiens
  misc_RNA (1)...(19): siRNA sense strand
ggccaugcuugcacucaga

SEQ ID NO: 1707615 - RNA, 19 nt, Homo sapiens
  misc_RNA (1)...(19): siRNA sense strand
ggugcuggcugcugucuac

SEQ ID NO: 1707616 - RNA, 19 nt, Homo sapiens
  misc_RNA (1)...(19): siRNA sense strand
ccugagauccucccugaug

SEQ ID NO: 1707617 - RNA, 19 nt, Homo sapiens
  misc_RNA (1)...(19): siRNA sense strand
gcugugcccaguacaagaa

SEQ ID NO: 1707618 - RNA, 19 nt, Homo sapiens
  misc_RNA (1)...(19): siRNA sense strand
gcaggaggaguaugucaag

SEQ ID NO: 1707619 - RNA, 19 nt, Homo sapiens
  misc_RNA (1)...(19): siRNA sense strand
guugugugcugaagauugg

SEQ ID NO: 1707620 - RNA, 19 nt, Homo sapiens
  misc_RNA (1)...(19): siRNA sense strand
ccucagcccucgccaucau

SEQ ID NO: 1707621 - RNA, 19 nt, Homo sapiens
  misc_RNA (1)...(19): siRNA sense strand
ggaggaggcguccaucaac

SEQ ID NO: 1707622 - RNA, 19 nt, Homo sapiens
  misc_RNA (1)...(19): siRNA sense strand
augagacacucuaccagaa

SEQ ID NO: 1707623 - RNA, 19 nt, Homo sapiens
  misc_RNA (1)...(19): siRNA sense strand
ucuacaaggcucugaguga

SEQ ID NO: 1707624 - RNA, 19 nt, Homo sapiens
  misc_RNA (1)...(19): siRNA sense strand
ggcguugugugcugaagau

SEQ ID NO: 1707625 - RNA, 19 nt, Homo sapiens
  misc_RNA (1)...(19): siRNA sense strand
gcuggcugcugucuacaag

SEQ ID NO: 1707626 - RNA, 19 nt, Homo sapiens
  misc_RNA (1)...(19): siRNA sense strand
ugaguccacugggagcauu

SEQ ID NO: 1707627 - RNA, 19 nt, Homo sapiens
  misc_RNA (1)...(19): siRNA sense strand
ccgagaacaccgaggagaa

SEQ ID NO: 1707628 - RNA, 19 nt, Homo sapiens
  misc_RNA (1)...(19): siRNA sense strand
gaggaggaggcguccauca

SEQ ID NO: 1707629 - RNA, 19 nt, Homo sapiens
  misc_RNA (1)...(19): siRNA sense strand
cccaaguuaucaaauccaa

SEQ ID NO: 1707630 - RNA, 19 nt, Homo sapiens
  misc_RNA (1)...(19): siRNA sense strand
cauggaaaaugccaauguu

SEQ ID NO: 1707631 - RNA, 19 nt, Homo sapiens
  misc_RNA (1)...(19): siRNA sense strand
ucacugggaucaccuuccu

SEQ ID NO: 1707632 - RNA, 19 nt, Homo sapiens
  misc_RNA (1)...(19): siRNA sense strand
gggcaucaagguagacaag

SEQ ID NO: 1707633 - RNA, 19 nt, Homo sapiens
  misc_RNA (1)...(19): siRNA sense strand
gguuggaugggcugucuga

SEQ ID NO: 1707634 - RNA, 19 nt, Homo sapiens
  misc_RNA (1)...(19): siRNA sense strand
ccaauguucuggcccguua

SEQ ID NO: 1707635 - RNA, 19 nt, Homo sapiens
  misc_RNA (1)...(19): siRNA sense strand
ucucuaaccacgccuauua

SEQ ID NO: 1707636 - RNA, 19 nt, Homo sapiens
  misc_RNA (1)...(19): siRNA sense strand
ggaagaaggagaaccugaa

SEQ ID NO: 1707637 - RNA, 19 nt, Homo sapiens
  misc_RNA (1)...(19): siRNA sense strand
gccaguaugugaccgagaa

SEQ ID NO: 1707638 - RNA, 19 nt, Homo sapiens
  misc_RNA (1)...(19): siRNA sense strand
ggacaaauggcgagacuac

SEQ ID NO: 1707639 - RNA, 19 nt, Homo sapiens
  misc_RNA (1)...(19): siRNA sense strand
agaagaaggagcugucuga

SEQ ID NO: 1707640 - RNA, 19 nt, Homo sapiens
  misc_RNA (1)...(19): siRNA sense strand
gaagaaggagaaccugaag

SEQ ID NO: 1707641 - RNA, 19 nt, Homo sapiens
  misc_RNA (1)...(19): siRNA sense strand
ccaagcggcugcaguccau

SEQ ID NO: 1707642 - RNA, 19 nt, Homo sapiens
  misc_RNA (1)...(19): siRNA sense strand
uugaagcgcugccaguaug

SEQ ID NO: 1707643 - RNA, 19 nt, Homo sapiens
  misc_RNA (1)...(19): siRNA sense strand
ugagugaccaccacaucua

SEQ ID NO: 1707644 - RNA, 19 nt, Homo sapiens
  misc_RNA (1)...(19): siRNA sense strand
ggccaugcuugcacucaga

SEQ ID NO: 1707645 - RNA, 19 nt, Homo sapiens
  misc_RNA (1)...(19): siRNA sense strand
ggugcuggcugcugucuac

SEQ ID NO: 1707646 - RNA, 19 nt, Homo sapiens
  misc_RNA (1)...(19): siRNA sense strand
ccugagauccucccugaug

SEQ ID NO: 1707647 - RNA, 19 nt, Homo sapiens
  misc_RNA (1)...(19): siRNA sense strand
gcugugcccaguacaagaa

SEQ ID NO: 1707648 - RNA, 19 nt, Homo sapiens
  misc_RNA (1)...(19): siRNA sense strand
gcaggaggaguaugucaag

SEQ ID NO: 1707649 - RNA, 19 nt, Homo sapiens
  misc_RNA (1)...(19): siRNA sense strand
guugugugcugaagauugg

SEQ ID NO: 1707650 - RNA, 19 nt, Homo sapiens
  misc_RNA (1)...(19): siRNA sense strand
ccucagcccucgccaucau

SEQ ID NO: 1707651 - RNA, 19 nt, Homo sapiens
  misc_RNA (1)...(19): siRNA sense strand
ggaggaggcguccaucaac

SEQ ID NO: 1707652 - RNA, 19 nt, Homo sapiens
  misc_RNA (1)...(19): siRNA sense strand
augagacacucuaccagaa

SEQ ID NO: 1707653 - RNA, 19 nt, Homo sapiens
  misc_RNA (1)...(19): siRNA sense strand
ucuacaaggcucugaguga

SEQ ID NO: 1707654 - RNA, 19 nt, Homo sapiens
  misc_RNA (1)...(19): siRNA sense strand
ggcguugugugcugaagau

SEQ ID NO: 1707655 - RNA, 19 nt, Homo sapiens
  misc_RNA (1)...(19): siRNA sense strand
gcuggcugcugucuacaag

SEQ ID NO: 1707656 - RNA, 19 nt, Homo sapiens
  misc_RNA (1)...(19): siRNA sense strand
ugaguccacugggagcauu

SEQ ID NO: 1707657 - RNA, 19 nt, Homo sapiens
  misc_RNA (1)...(19): siRNA sense strand
ccgagaacaccgaggagaa

SEQ ID NO: 1707658 - RNA, 19 nt, Homo sapiens
  misc_RNA (1)...(19): siRNA sense strand
gaggaggaggcguccauca

SEQ ID NO: 1707659 - RNA, 19 nt, Homo sapiens
  misc_RNA (1)...(19): siRNA sense strand
cccaaguuaucaaauccaa

SEQ ID NO: 1707660 - RNA, 19 nt, Homo sapiens
  misc_RNA (1)...(19): siRNA sense strand
cauggaaaaugccaauguu

SEQ ID NO: 1707661 - RNA, 19 nt, Homo sapiens
  misc_RNA (1)...(19): siRNA sense strand
ucacugggaucaccuuccu

SEQ ID NO: 1707662 - RNA, 19 nt, Homo sapiens
  misc_RNA (1)...(19): siRNA sense strand
gggcaucaagguagacaag

SEQ ID NO: 1707663 - RNA, 19 nt, Homo sapiens
  misc_RNA (1)...(19): siRNA sense strand
gguuggaugggcugucuga

SEQ ID NO: 1707664 - RNA, 19 nt, Homo sapiens
  misc_RNA (1)...(19): siRNA sense strand
gcauaaaggucaagaguua

SEQ ID NO: 1707665 - RNA, 19 nt, Homo sapiens
  misc_RNA (1)...(19): siRNA sense strand
gaccuuacuugucauaaua

SEQ ID NO: 1707666 - RNA, 19 nt, Homo sapiens
  misc_RNA (1)...(19): siRNA sense strand
uuaccaggauccuuuauua

SEQ ID NO: 1707667 - RNA, 19 nt, Homo sapiens
  misc_RNA (1)...(19): siRNA sense strand
gaucgugcauucauggaua

SEQ ID NO: 1707668 - RNA, 19 nt, Homo sapiens
  misc_RNA (1)...(19): siRNA sense strand
gaauugcucuuuacuaugg

SEQ ID NO: 1707669 - RNA, 19 nt, Homo sapiens
  misc_RNA (1)...(19): siRNA sense strand
ucagcaagcucgaguuaaa

SEQ ID NO: 1707670 - RNA, 19 nt, Homo sapiens
  misc_RNA (1)...(19): siRNA sense strand
caugaaagcugugguucua

SEQ ID NO: 1707671 - RNA, 19 nt, Homo sapiens
  misc_RNA (1)...(19): siRNA sense strand
gauaugcuaggaaacauua

SEQ ID NO: 1707672 - RNA, 19 nt, Homo sapiens
  misc_RNA (1)...(19): siRNA sense strand
gugaaucgcuacaucaaga

SEQ ID NO: 1707673 - RNA, 19 nt, Homo sapiens
  misc_RNA (1)...(19): siRNA sense strand
ggaacaggaacugaaauua

SEQ ID NO: 1707674 - RNA, 19 nt, Homo sapiens
  misc_RNA (1)...(19): siRNA sense strand
gaacaggaacugaaauuac

SEQ ID NO: 1707675 - RNA, 19 nt, Homo sapiens
  misc_RNA (1)...(19): siRNA sense strand
gaagaugaaacaagaauag

SEQ ID NO: 1707676 - RNA, 19 nt, Homo sapiens
  misc_RNA (1)...(19): siRNA sense strand
gauacaggaugaccaugaa

SEQ ID NO: 1707677 - RNA, 19 nt, Homo sapiens
  misc_RNA (1)...(19): siRNA sense strand
uagaggaccuuacuuguca

SEQ ID NO: 1707678 - RNA, 19 nt, Homo sapiens
  misc_RNA (1)...(19): siRNA sense strand
ggaccuuacuugucauaau

SEQ ID NO: 1707679 - RNA, 19 nt, Homo sapiens
  misc_RNA (1)...(19): siRNA sense strand
auacaaauguuccuucaga

SEQ ID NO: 1707680 - RNA, 19 nt, Homo sapiens
  misc_RNA (1)...(19): siRNA sense strand
aaaccuaaauuccaagaug

SEQ ID NO: 1707681 - RNA, 19 nt, Homo sapiens
  misc_RNA (1)...(19): siRNA sense strand
uggaauugcucuuuacuau

SEQ ID NO: 1707682 - RNA, 19 nt, Homo sapiens
  misc_RNA (1)...(19): siRNA sense strand
ggacaaaacuggguucaga

SEQ ID NO: 1707683 - RNA, 19 nt, Homo sapiens
  misc_RNA (1)...(19): siRNA sense strand
gaucaacaacugccuaugu

SEQ ID NO: 1707684 - RNA, 19 nt, Homo sapiens
  misc_RNA (1)...(19): siRNA sense strand
uaucacagaucaacaacug

SEQ ID NO: 1707685 - RNA, 19 nt, Homo sapiens
  misc_RNA (1)...(19): siRNA sense strand
uaaagaaggcgaaauagag

SEQ ID NO: 1707686 - RNA, 19 nt, Homo sapiens
  misc_RNA (1)...(19): siRNA sense strand
gaaggauccuauuguuucu

SEQ ID NO: 1707687 - RNA, 19 nt, Homo sapiens
  misc_RNA (1)...(19): siRNA sense strand
ugaaagcugugguucuaau

SEQ ID NO: 1707688 - RNA, 19 nt, Homo sapiens
  misc_RNA (1)...(19): siRNA sense strand
ucagaacucgucuucauuu

SEQ ID NO: 1707689 - RNA, 19 nt, Homo sapiens
  misc_RNA (1)...(19): siRNA sense strand
gcagaauguuauacaguag

SEQ ID NO: 1707690 - RNA, 19 nt, Homo sapiens
  misc_RNA (1)...(19): siRNA sense strand
gaucuacagcuuucacuau

SEQ ID NO: 1707691 - RNA, 19 nt, Homo sapiens
  misc_RNA (1)...(19): siRNA sense strand
uacaguaggugaauuaugg

SEQ ID NO: 1707692 - RNA, 19 nt, Homo sapiens
  misc_RNA (1)...(19): siRNA sense strand
ugcagaauguuauacagua

SEQ ID NO: 1707693 - RNA, 19 nt, Homo sapiens
  misc_RNA (1)...(19): siRNA sense strand
ggauacaggaugaccauga

SEQ ID NO: 1707694 - RNA, 19 nt, Homo sapiens
  misc_RNA (1)...(19): siRNA sense strand
ugaaggauccuauuguuuc

SEQ ID NO: 1707695 - RNA, 19 nt, Homo sapiens
  misc_RNA (1)...(19): siRNA sense strand
caacuuggaauugcucuuu

SEQ ID NO: 1707696 - RNA, 19 nt, Homo sapiens
  misc_RNA (1)...(19): siRNA sense strand
gaaugccagugguaaaaua

SEQ ID NO: 1707697 - RNA, 19 nt, Homo sapiens
  misc_RNA (1)...(19): siRNA sense strand
uaaguggacauauucauga

SEQ ID NO: 1707698 - RNA, 19 nt, Homo sapiens
  misc_RNA (1)...(19): siRNA sense strand
caucaaccaugcaucaaca

SEQ ID NO: 1707699 - RNA, 19 nt, Homo sapiens
  misc_RNA (1)...(19): siRNA sense strand
ccaggauccuuuauuauac

SEQ ID NO: 1707700 - RNA, 19 nt, Homo sapiens
  misc_RNA (1)...(19): siRNA sense strand
ggauauuucugcaacugau

SEQ ID NO: 1707701 - RNA, 19 nt, Homo sapiens
  misc_RNA (1)...(19): siRNA sense strand
gaaagcugugguucuaauu

SEQ ID NO: 1707702 - RNA, 19 nt, Homo sapiens
  misc_RNA (1)...(19): siRNA sense strand
ugccugcaauugugaguua

SEQ ID NO: 1707703 - RNA, 19 nt, Homo sapiens
  misc_RNA (1)...(19): siRNA sense strand
agaguuauauucacagcaa

SEQ ID NO: 1707704 - RNA, 19 nt, Homo sapiens
  misc_RNA (1)...(19): siRNA sense strand
gaaacuuaaggaugggaua

SEQ ID NO: 1707705 - RNA, 19 nt, Homo sapiens
  misc_RNA (1)...(19): siRNA sense strand
cauuacagguucugaagau

SEQ ID NO: 1707706 - RNA, 19 nt, Homo sapiens
  misc_RNA (1)...(19): siRNA sense strand
gaaauagaggaccuuacuu

SEQ ID NO: 1707707 - RNA, 19 nt, Homo sapiens
  misc_RNA (1)...(19): siRNA sense strand
uccuacagauccugacuua

SEQ ID NO: 1707708 - RNA, 19 nt, Homo sapiens
  misc_RNA (1)...(19): siRNA sense strand
uuaaugagcuaugugaauc

SEQ ID NO: 1707709 - RNA, 19 nt, Homo sapiens
  misc_RNA (1)...(19): siRNA sense strand
gaacucgucuucauuuuac

SEQ ID NO: 1707710 - RNA, 19 nt, Homo sapiens
  misc_RNA (1)...(19): siRNA sense strand
gaaacaagaauagauaugc

SEQ ID NO: 1707711 - RNA, 19 nt, Homo sapiens
  misc_RNA (1)...(19): siRNA sense strand
aaauagaggaccuuacuug

SEQ ID NO: 1707712 - RNA, 19 nt, Homo sapiens
  misc_RNA (1)...(19): siRNA sense strand
gauuagacgaguuguaaau

SEQ ID NO: 1707713 - RNA, 19 nt, Homo sapiens
  misc_RNA (1)...(19): siRNA sense strand
cugccuauguuuauucgua

SEQ ID NO: 1707714 - RNA, 19 nt, Homo sapiens
  misc_RNA (1)...(19): siRNA sense strand
gugcauucauggauauuuc

SEQ ID NO: 1707715 - RNA, 19 nt, Homo sapiens
  misc_RNA (1)...(19): siRNA sense strand
ggaacgauccugcaucaac

SEQ ID NO: 1707716 - RNA, 19 nt, Homo sapiens
  misc_RNA (1)...(19): siRNA sense strand
guacaguuugucuugauaa

SEQ ID NO: 1707717 - RNA, 19 nt, Homo sapiens
  misc_RNA (1)...(19): siRNA sense strand
aagaugauaucguccuuuc

SEQ ID NO: 1707718 - RNA, 19 nt, Homo sapiens
  misc_RNA (1)...(19): siRNA sense strand
aaaguuggaugugcuggaa

SEQ ID NO: 1707719 - RNA, 19 nt, Homo sapiens
  misc_RNA (1)...(19): siRNA sense strand
ggaauugcucuuuacuaug

SEQ ID NO: 1707720 - RNA, 19 nt, Homo sapiens
  misc_RNA (1)...(19): siRNA sense strand
accaggauccuuuauuaua

SEQ ID NO: 1707721 - RNA, 19 nt, Homo sapiens
  misc_RNA (1)...(19): siRNA sense strand
ucaauacuauggaaugcau

SEQ ID NO: 1707722 - RNA, 19 nt, Homo sapiens
  misc_RNA (1)...(19): siRNA sense strand
gucaagaguuauauucaca

SEQ ID NO: 1707723 - RNA, 19 nt, Homo sapiens
  misc_RNA (1)...(19): siRNA sense strand
gcucuuuacuauggagaaa

SEQ ID NO: 1707724 - RNA, 19 nt, Homo sapiens
  misc_RNA (1)...(19): siRNA sense strand
cuucagaacucgucuucau

SEQ ID NO: 1707725 - RNA, 19 nt, Homo sapiens
  misc_RNA (1)...(19): siRNA sense strand
gaagaugauaucguccuuu

SEQ ID NO: 1707726 - RNA, 19 nt, Homo sapiens
  misc_RNA (1)...(19): siRNA sense strand
gacgaguuguaaauaaugu

SEQ ID NO: 1707727 - RNA, 19 nt, Homo sapiens
  misc_RNA (1)...(19): siRNA sense strand
ugacuuaccaccagguuau

SEQ ID NO: 1707728 - RNA, 19 nt, Homo sapiens
  misc_RNA (1)...(19): siRNA sense strand
ggaacugaaauuaccauuc

SEQ ID NO: 1707729 - RNA, 19 nt, Homo sapiens
  misc_RNA (1)...(19): siRNA sense strand
uauauucacagcaagauga

SEQ ID NO: 1707730 - RNA, 19 nt, Homo sapiens
  misc_RNA (1)...(19): siRNA sense strand
cgaaauagaggaccuuacu

SEQ ID NO: 1707731 - RNA, 19 nt, Homo sapiens
  misc_RNA (1)...(19): siRNA sense strand
caacugccuauguuuauuc

SEQ ID NO: 1707732 - RNA, 19 nt, Homo sapiens
  misc_RNA (1)...(19): siRNA sense strand
cgucggaucuacagcuuuc

SEQ ID NO: 1707733 - RNA, 19 nt, Homo sapiens
  misc_RNA (1)...(19): siRNA sense strand
gcugagaaagguuaucaau

SEQ ID NO: 1707734 - RNA, 19 nt, Homo sapiens
  misc_RNA (1)...(19): siRNA sense strand
caagcucgaguuaaaguug

SEQ ID NO: 1707735 - RNA, 19 nt, Homo sapiens
  misc_RNA (1)...(19): siRNA sense strand
uuaaagaaggcgaaauaga

SEQ ID NO: 1707736 - RNA, 19 nt, Homo sapiens
  misc_RNA (1)...(19): siRNA sense strand
uguacaguuugucuugaua

SEQ ID NO: 1707737 - RNA, 19 nt, Homo sapiens
  misc_RNA (1)...(19): siRNA sense strand
caggauccuuuauuauaca

SEQ ID NO: 1707738 - RNA, 19 nt, Homo sapiens
  misc_RNA (1)...(19): siRNA sense strand
uuugaaggauccuauuguu

SEQ ID NO: 1707739 - RNA, 19 nt, Homo sapiens
  misc_RNA (1)...(19): siRNA sense strand
cagguuaugugcagagucu

SEQ ID NO: 1707740 - RNA, 19 nt, Homo sapiens
  misc_RNA (1)...(19): siRNA sense strand
ugggaacgauccugcauca

SEQ ID NO: 1707741 - RNA, 19 nt, Homo sapiens
  misc_RNA (1)...(19): siRNA sense strand
ucaugggccugguccuuug

SEQ ID NO: 1707742 - RNA, 19 nt, Homo sapiens
  misc_RNA (1)...(19): siRNA sense strand
ggucaagaguuauauucac

SEQ ID NO: 1707743 - RNA, 19 nt, Homo sapiens
  misc_RNA (1)...(19): siRNA sense strand
cuaggaaacauuacagguu

SEQ ID NO: 1707744 - RNA, 19 nt, Homo sapiens
  misc_RNA (1)...(19): siRNA sense strand
aaacggaaugccaguggua

SEQ ID NO: 1707745 - RNA, 19 nt, Homo sapiens
  misc_RNA (1)...(19): siRNA sense strand
ugaagaugauaucguccuu

SEQ ID NO: 1707746 - RNA, 19 nt, Homo sapiens
  misc_RNA (1)...(19): siRNA sense strand
aggcaacggugacuuucaa

SEQ ID NO: 1707747 - RNA, 19 nt, Homo sapiens
  misc_RNA (1)...(19): siRNA sense strand
aagcacagacuuugaagga

SEQ ID NO: 1707748 - RNA, 19 nt, Homo sapiens
  misc_RNA (1)...(19): siRNA sense strand
aaagauaugcuaggaaaca

SEQ ID NO: 1707749 - RNA, 19 nt, Homo sapiens
  misc_RNA (1)...(19): siRNA sense strand
gcuggaacaggaacugaaa

SEQ ID NO: 1707750 - RNA, 19 nt, Homo sapiens
  misc_RNA (1)...(19): siRNA sense strand
uacaaauguuccuucagaa

SEQ ID NO: 1707751 - RNA, 19 nt, Homo sapiens
  misc_RNA (1)...(19): siRNA sense strand
cugauuuggugcugagaaa

SEQ ID NO: 1707752 - RNA, 19 nt, Homo sapiens
  misc_RNA (1)...(19): siRNA sense strand
uacagguucugaagaugaa

SEQ ID NO: 1707753 - RNA, 19 nt, Homo sapiens
  misc_RNA (1)...(19): siRNA sense strand
gaggaccuuacuugucaua

SEQ ID NO: 1707754 - RNA, 19 nt, Homo sapiens
  misc_RNA (1)...(19): siRNA sense strand
acaacugccuauguuuauu

SEQ ID NO: 1707755 - RNA, 19 nt, Homo sapiens
  misc_RNA (1)...(19): siRNA sense strand
cugauuagacgaguuguaa

SEQ ID NO: 1707756 - RNA, 19 nt, Homo sapiens
  misc_RNA (1)...(19): siRNA sense strand
aaacauuacagguucugaa

SEQ ID NO: 1707757 - RNA, 19 nt, Homo sapiens
  misc_RNA (1)...(19): siRNA sense strand
ggaucuacagcuuucacua

SEQ ID NO: 1707758 - RNA, 19 nt, Homo sapiens
  misc_RNA (1)...(19): siRNA sense strand
gccuauguuuauucguaua

SEQ ID NO: 1707759 - RNA, 19 nt, Homo sapiens
  misc_RNA (1)...(19): siRNA sense strand
guuauacaguaggugaauu

SEQ ID NO: 1707760 - RNA, 19 nt, Homo sapiens
  misc_RNA (1)...(19): siRNA sense strand
agucauauguaacuccaau

SEQ ID NO: 1707761 - RNA, 19 nt, Homo sapiens
  misc_RNA (1)...(19): siRNA sense strand
uuacagguucugaagauga

SEQ ID NO: 1707762 - RNA, 19 nt, Homo sapiens
  misc_RNA (1)...(19): siRNA sense strand
aggaugggauacaggauga

SEQ ID NO: 1707763 - RNA, 19 nt, Homo sapiens
  misc_RNA (1)...(19): siRNA sense strand
ggauccuauuguuucuaua

SEQ ID NO: 1707764 - RNA, 19 nt, Homo sapiens
  misc_RNA (1)...(19): siRNA sense strand
gcauaaaggucaagaguua

SEQ ID NO: 1707765 - RNA, 19 nt, Homo sapiens
  misc_RNA (1)...(19): siRNA sense strand
gaccuuacuugucauaaua

SEQ ID NO: 1707766 - RNA, 19 nt, Homo sapiens
  misc_RNA (1)...(19): siRNA sense strand
uuaccaggauccuuuauua

SEQ ID NO: 1707767 - RNA, 19 nt, Homo sapiens
  misc_RNA (1)...(19): siRNA sense strand
gaucgugcauucauggaua

SEQ ID NO: 1707768 - RNA, 19 nt, Homo sapiens
  misc_RNA (1)...(19): siRNA sense strand
gaauugcucuuuacuaugg

SEQ ID NO: 1707769 - RNA, 19 nt, Homo sapiens
  misc_RNA (1)...(19): siRNA sense strand
ucagcaagcucgaguuaaa

SEQ ID NO: 1707770 - RNA, 19 nt, Homo sapiens
  misc_RNA (1)...(19): siRNA sense strand
caugaaagcugugguucua

SEQ ID NO: 1707771 - RNA, 19 nt, Homo sapiens
  misc_RNA (1)...(19): siRNA sense strand
gauaugcuaggaaacauua

SEQ ID NO: 1707772 - RNA, 19 nt, Homo sapiens
  misc_RNA (1)...(19): siRNA sense strand
gugaaucgcuacaucaaga

SEQ ID NO: 1707773 - RNA, 19 nt, Homo sapiens
  misc_RNA (1)...(19): siRNA sense strand
ggaacaggaacugaaauua

SEQ ID NO: 1707774 - RNA, 19 nt, Homo sapiens
  misc_RNA (1)...(19): siRNA sense strand
gaacaggaacugaaauuac

SEQ ID NO: 1707775 - RNA, 19 nt, Homo sapiens
  misc_RNA (1)...(19): siRNA sense strand
gaagaugaaacaagaauag

SEQ ID NO: 1707776 - RNA, 19 nt, Homo sapiens
  misc_RNA (1)...(19): siRNA sense strand
gauacaggaugaccaugaa

SEQ ID NO: 1707777 - RNA, 19 nt, Homo sapiens
  misc_RNA (1)...(19): siRNA sense strand
uagaggaccuuacuuguca

SEQ ID NO: 1707778 - RNA, 19 nt, Homo sapiens
  misc_RNA (1)...(19): siRNA sense strand
ggaccuuacuugucauaau

SEQ ID NO: 1707779 - RNA, 19 nt, Homo sapiens
  misc_RNA (1)...(19): siRNA sense strand
auacaaauguuccuucaga

SEQ ID NO: 1707780 - RNA, 19 nt, Homo sapiens
  misc_RNA (1)...(19): siRNA sense strand
aaaccuaaauuccaagaug

SEQ ID NO: 1707781 - RNA, 19 nt, Homo sapiens
  misc_RNA (1)...(19): siRNA sense strand
uggaauugcucuuuacuau

SEQ ID NO: 1707782 - RNA, 19 nt, Homo sapiens
  misc_RNA (1)...(19): siRNA sense strand
ggacaaaacuggguucaga

SEQ ID NO: 1707783 - RNA, 19 nt, Homo sapiens
  misc_RNA (1)...(19): siRNA sense strand
gaucaacaacugccuaugu

SEQ ID NO: 1707784 - RNA, 19 nt, Homo sapiens
  misc_RNA (1)...(19): siRNA sense strand
uaucacagaucaacaacug

SEQ ID NO: 1707785 - RNA, 19 nt, Homo sapiens
  misc_RNA (1)...(19): siRNA sense strand
uaaagaaggcgaaauagag

SEQ ID NO: 1707786 - RNA, 19 nt, Homo sapiens
  misc_RNA (1)...(19): siRNA sense strand
gaaggauccuauuguuucu

SEQ ID NO: 1707787 - RNA, 19 nt, Homo sapiens
  misc_RNA (1)...(19): siRNA sense strand
ugaaagcugugguucuaau

SEQ ID NO: 1707788 - RNA, 19 nt, Homo sapiens
  misc_RNA (1)...(19): siRNA sense strand
ucagaacucgucuucauuu

SEQ ID NO: 1707789 - RNA, 19 nt, Homo sapiens
  misc_RNA (1)...(19): siRNA sense strand
gcagaauguuauacaguag

SEQ ID NO: 1707790 - RNA, 19 nt, Homo sapiens
  misc_RNA (1)...(19): siRNA sense strand
gaucuacagcuuucacuau

SEQ ID NO: 1707791 - RNA, 19 nt, Homo sapiens
  misc_RNA (1)...(19): siRNA sense strand
uacaguaggugaauuaugg

SEQ ID NO: 1707792 - RNA, 19 nt, Homo sapiens
  misc_RNA (1)...(19): siRNA sense strand
ugcagaauguuauacagua

SEQ ID NO: 1707793 - RNA, 19 nt, Homo sapiens
  misc_RNA (1)...(19): siRNA sense strand
ggauacaggaugaccauga

SEQ ID NO: 1707794 - RNA, 19 nt, Homo sapiens
  misc_RNA (1)...(19): siRNA sense strand
ugaaggauccuauuguuuc

SEQ ID NO: 1707795 - RNA, 19 nt, Homo sapiens
  misc_RNA (1)...(19): siRNA sense strand
caacuuggaauugcucuuu

SEQ ID NO: 1707796 - RNA, 19 nt, Homo sapiens
  misc_RNA (1)...(19): siRNA sense strand
gaaugccagugguaaaaua

SEQ ID NO: 1707797 - RNA, 19 nt, Homo sapiens
  misc_RNA (1)...(19): siRNA sense strand
uaaguggacauauucauga

SEQ ID NO: 1707798 - RNA, 19 nt, Homo sapiens
  misc_RNA (1)...(19): siRNA sense strand
caucaaccaugcaucaaca

SEQ ID NO: 1707799 - RNA, 19 nt, Homo sapiens
  misc_RNA (1)...(19): siRNA sense strand
ccaggauccuuuauuauac

SEQ ID NO: 1707800 - RNA, 19 nt, Homo sapiens
  misc_RNA (1)...(19): siRNA sense strand
ggauauuucugcaacugau

SEQ ID NO: 1707801 - RNA, 19 nt, Homo sapiens
  misc_RNA (1)...(19): siRNA sense strand
gaaagcugugguucuaauu

SEQ ID NO: 1707802 - RNA, 19 nt, Homo sapiens
  misc_RNA (1)...(19): siRNA sense strand
ugccugcaauugugaguua

SEQ ID NO: 1707803 - RNA, 19 nt, Homo sapiens
  misc_RNA (1)...(19): siRNA sense strand
agaguuauauucacagcaa

SEQ ID NO: 1707804 - RNA, 19 nt, Homo sapiens
  misc_RNA (1)...(19): siRNA sense strand
gaaacuuaaggaugggaua

SEQ ID NO: 1707805 - RNA, 19 nt, Homo sapiens
  misc_RNA (1)...(19): siRNA sense strand
cauuacagguucugaagau

SEQ ID NO: 1707806 - RNA, 19 nt, Homo sapiens
  misc_RNA (1)...(19): siRNA sense strand
gaaauagaggaccuuacuu

SEQ ID NO: 1707807 - RNA, 19 nt, Homo sapiens
  misc_RNA (1)...(19): siRNA sense strand
uccuacagauccugacuua

SEQ ID NO: 1707808 - RNA, 19 nt, Homo sapiens
  misc_RNA (1)...(19): siRNA sense strand
uuaaugagcuaugugaauc

SEQ ID NO: 1707809 - RNA, 19 nt, Homo sapiens
  misc_RNA (1)...(19): siRNA sense strand
gaacucgucuucauuuuac

SEQ ID NO: 1707810 - RNA, 19 nt, Homo sapiens
  misc_RNA (1)...(19): siRNA sense strand
gaaacaagaauagauaugc

SEQ ID NO: 1707811 - RNA, 19 nt, Homo sapiens
  misc_RNA (1)...(19): siRNA sense strand
aaauagaggaccuuacuug

SEQ ID NO: 1707812 - RNA, 19 nt, Homo sapiens
  misc_RNA (1)...(19): siRNA sense strand
gauuagacgaguuguaaau

SEQ ID NO: 1707813 - RNA, 19 nt, Homo sapiens
  misc_RNA (1)...(19): siRNA sense strand
cugccuauguuuauucgua

SEQ ID NO: 1707814 - RNA, 19 nt, Homo sapiens
  misc_RNA (1)...(19): siRNA sense strand
gugcauucauggauauuuc

SEQ ID NO: 1707815 - RNA, 19 nt, Homo sapiens
  misc_RNA (1)...(19): siRNA sense strand
ggaacgauccugcaucaac

SEQ ID NO: 1707816 - RNA, 19 nt, Homo sapiens
  misc_RNA (1)...(19): siRNA sense strand
guacaguuugucuugauaa

SEQ ID NO: 1707817 - RNA, 19 nt, Homo sapiens
  misc_RNA (1)...(19): siRNA sense strand
aagaugauaucguccuuuc

SEQ ID NO: 1707818 - RNA, 19 nt, Homo sapiens
  misc_RNA (1)...(19): siRNA sense strand
aaaguuggaugugcuggaa

SEQ ID NO: 1707819 - RNA, 19 nt, Homo sapiens
  misc_RNA (1)...(19): siRNA sense strand
ggaauugcucuuuacuaug

SEQ ID NO: 1707820 - RNA, 19 nt, Homo sapiens
  misc_RNA (1)...(19): siRNA sense strand
accaggauccuuuauuaua

SEQ ID NO: 1707821 - RNA, 19 nt, Homo sapiens
  misc_RNA (1)...(19): siRNA sense strand
ucaauacuauggaaugcau

SEQ ID NO: 1707822 - RNA, 19 nt, Homo sapiens
  misc_RNA (1)...(19): siRNA sense strand
gucaagaguuauauucaca

SEQ ID NO: 1707823 - RNA, 19 nt, Homo sapiens
  misc_RNA (1)...(19): siRNA sense strand
gcucuuuacuauggagaaa

SEQ ID NO: 1707824 - RNA, 19 nt, Homo sapiens
  misc_RNA (1)...(19): siRNA sense strand
cuucagaacucgucuucau

SEQ ID NO: 1707825 - RNA, 19 nt, Homo sapiens
  misc_RNA (1)...(19): siRNA sense strand
gaagaugauaucguccuuu

SEQ ID NO: 1707826 - RNA, 19 nt, Homo sapiens
  misc_RNA (1)...(19): siRNA sense strand
gacgaguuguaaauaaugu

SEQ ID NO: 1707827 - RNA, 19 nt, Homo sapiens
  misc_RNA (1)...(19): siRNA sense strand
ugacuuaccaccagguuau

SEQ ID NO: 1707828 - RNA, 19 nt, Homo sapiens
  misc_RNA (1)...(19): siRNA sense strand
ggaacugaaauuaccauuc

SEQ ID NO: 1707829 - RNA, 19 nt, Homo sapiens
  misc_RNA (1)...(19): siRNA sense strand
uauauucacagcaagauga

SEQ ID NO: 1707830 - RNA, 19 nt, Homo sapiens
  misc_RNA (1)...(19): siRNA sense strand
cgaaauagaggaccuuacu

SEQ ID NO: 1707831 - RNA, 19 nt, Homo sapiens
  misc_RNA (1)...(19): siRNA sense strand
caacugccuauguuuauuc

SEQ ID NO: 1707832 - RNA, 19 nt, Homo sapiens
  misc_RNA (1)...(19): siRNA sense strand
cgucggaucuacagcuuuc

SEQ ID NO: 1707833 - RNA, 19 nt, Homo sapiens
  misc_RNA (1)...(19): siRNA sense strand
gcugagaaagguuaucaau

SEQ ID NO: 1707834 - RNA, 19 nt, Homo sapiens
  misc_RNA (1)...(19): siRNA sense strand
caagcucgaguuaaaguug

SEQ ID NO: 1707835 - RNA, 19 nt, Homo sapiens
  misc_RNA (1)...(19): siRNA sense strand
uuaaagaaggcgaaauaga

SEQ ID NO: 1707836 - RNA, 19 nt, Homo sapiens
  misc_RNA (1)...(19): siRNA sense strand
uguacaguuugucuugaua

SEQ ID NO: 1707837 - RNA, 19 nt, Homo sapiens
  misc_RNA (1)...(19): siRNA sense strand
caggauccuuuauuauaca

SEQ ID NO: 1707838 - RNA, 19 nt, Homo sapiens
  misc_RNA (1)...(19): siRNA sense strand
uuugaaggauccuauuguu

SEQ ID NO: 1707839 - RNA, 19 nt, Homo sapiens
  misc_RNA (1)...(19): siRNA sense strand
cagguuaugugcagagucu

SEQ ID NO: 1707840 - RNA, 19 nt, Homo sapiens
  misc_RNA (1)...(19): siRNA sense strand
ugggaacgauccugcauca

SEQ ID NO: 1707841 - RNA, 19 nt, Homo sapiens
  misc_RNA (1)...(19): siRNA sense strand
ucaugggccugguccuuug

SEQ ID NO: 1707842 - RNA, 19 nt, Homo sapiens
  misc_RNA (1)...(19): siRNA sense strand
ggucaagaguuauauucac

SEQ ID NO: 1707843 - RNA, 19 nt, Homo sapiens
  misc_RNA (1)...(19): siRNA sense strand
cuaggaaacauuacagguu

SEQ ID NO: 1707844 - RNA, 19 nt, Homo sapiens
  misc_RNA (1)...(19): siRNA sense strand
aaacggaaugccaguggua

SEQ ID NO: 1707845 - RNA, 19 nt, Homo sapiens
  misc_RNA (1)...(19): siRNA sense strand
ugaagaugauaucguccuu

SEQ ID NO: 1707846 - RNA, 19 nt, Homo sapiens
  misc_RNA (1)...(19): siRNA sense strand
aggcaacggugacuuucaa

SEQ ID NO: 1707847 - RNA, 19 nt, Homo sapiens
  misc_RNA (1)...(19): siRNA sense strand
aagcacagacuuugaagga

SEQ ID NO: 1707848 - RNA, 19 nt, Homo sapiens
  misc_RNA (1)...(19): siRNA sense strand
aaagauaugcuaggaaaca

SEQ ID NO: 1707849 - RNA, 19 nt, Homo sapiens
  misc_RNA (1)...(19): siRNA sense strand
gcuggaacaggaacugaaa

SEQ ID NO: 1707850 - RNA, 19 nt, Homo sapiens
  misc_RNA (1)...(19): siRNA sense strand
uacaaauguuccuucagaa

SEQ ID NO: 1707851 - RNA, 19 nt, Homo sapiens
  misc_RNA (1)...(19): siRNA sense strand
cugauuuggugcugagaaa

SEQ ID NO: 1707852 - RNA, 19 nt, Homo sapiens
  misc_RNA (1)...(19): siRNA sense strand
uacagguucugaagaugaa

SEQ ID NO: 1707853 - RNA, 19 nt, Homo sapiens
  misc_RNA (1)...(19): siRNA sense strand
gaggaccuuacuugucaua

SEQ ID NO: 1707854 - RNA, 19 nt, Homo sapiens
  misc_RNA (1)...(19): siRNA sense strand
acaacugccuauguuuauu

SEQ ID NO: 1707855 - RNA, 19 nt, Homo sapiens
  misc_RNA (1)...(19): siRNA sense strand
cugauuagacgaguuguaa

SEQ ID NO: 1707856 - RNA, 19 nt, Homo sapiens
  misc_RNA (1)...(19): siRNA sense strand
aaacauuacagguucugaa

SEQ ID NO: 1707857 - RNA, 19 nt, Homo sapiens
  misc_RNA (1)...(19): siRNA sense strand
ggaucuacagcuuucacua

SEQ ID NO: 1707858 - RNA, 19 nt, Homo sapiens
  misc_RNA (1)...(19): siRNA sense strand
gccuauguuuauucguaua

SEQ ID NO: 1707859 - RNA, 19 nt, Homo sapiens
  misc_RNA (1)...(19): siRNA sense strand
guuauacaguaggugaauu

SEQ ID NO: 1707860 - RNA, 19 nt, Homo sapiens
  misc_RNA (1)...(19): siRNA sense strand
agucauauguaacuccaau

SEQ ID NO: 1707861 - RNA, 19 nt, Homo sapiens
  misc_RNA (1)...(19): siRNA sense strand
uuacagguucugaagauga

SEQ ID NO: 1707862 - RNA, 19 nt, Homo sapiens
  misc_RNA (1)...(19): siRNA sense strand
aggaugggauacaggauga

SEQ ID NO: 1707863 - RNA, 19 nt, Homo sapiens
  misc_RNA (1)...(19): siRNA sense strand
ggauccuauuguuucuaua

SEQ ID NO: 1707864 - RNA, 19 nt, Homo sapiens
  misc_RNA (1)...(19): siRNA sense strand
gcauaaaggucaagaguua

SEQ ID NO: 1707865 - RNA, 19 nt, Homo sapiens
  misc_RNA (1)...(19): siRNA sense strand
gaccuuacuugucauaaua

SEQ ID NO: 1707866 - RNA, 19 nt, Homo sapiens
  misc_RNA (1)...(19): siRNA sense strand
uuaccaggauccuuuauua

SEQ ID NO: 1707867 - RNA, 19 nt, Homo sapiens
  misc_RNA (1)...(19): siRNA sense strand
gaucgugcauucauggaua

SEQ ID NO: 1707868 - RNA, 19 nt, Homo sapiens
  misc_RNA (1)...(19): siRNA sense strand
gaauugcucuuuacuaugg

SEQ ID NO: 1707869 - RNA, 19 nt, Homo sapiens
  misc_RNA (1)...(19): siRNA sense strand
ucagcaagcucgaguuaaa

SEQ ID NO: 1707870 - RNA, 19 nt, Homo sapiens
  misc_RNA (1)...(19): siRNA sense strand
caugaaagcugugguucua

SEQ ID NO: 1707871 - RNA, 19 nt, Homo sapiens
  misc_RNA (1)...(19): siRNA sense strand
gauaugcuaggaaacauua

SEQ ID NO: 1707872 - RNA, 19 nt, Homo sapiens
  misc_RNA (1)...(19): siRNA sense strand
gugaaucgcuacaucaaga

SEQ ID NO: 1707873 - RNA, 19 nt, Homo sapiens
  misc_RNA (1)...(19): siRNA sense strand
ggaacaggaacugaaauua

SEQ ID NO: 1707874 - RNA, 19 nt, Homo sapiens
  misc_RNA (1)...(19): siRNA sense strand
gaacaggaacugaaauuac

SEQ ID NO: 1707875 - RNA, 19 nt, Homo sapiens
  misc_RNA (1)...(19): siRNA sense strand
gaagaugaaacaagaauag

SEQ ID NO: 1707876 - RNA, 19 nt, Homo sapiens
  misc_RNA (1)...(19): siRNA sense strand
gauacaggaugaccaugaa

SEQ ID NO: 1707877 - RNA, 19 nt, Homo sapiens
  misc_RNA (1)...(19): siRNA sense strand
uagaggaccuuacuuguca

SEQ ID NO: 1707878 - RNA, 19 nt, Homo sapiens
  misc_RNA (1)...(19): siRNA sense strand
ggaccuuacuugucauaau

SEQ ID NO: 1707879 - RNA, 19 nt, Homo sapiens
  misc_RNA (1)...(19): siRNA sense strand
auacaaauguuccuucaga

SEQ ID NO: 1707880 - RNA, 19 nt, Homo sapiens
  misc_RNA (1)...(19): siRNA sense strand
aaaccuaaauuccaagaug

SEQ ID NO: 1707881 - RNA, 19 nt, Homo sapiens
  misc_RNA (1)...(19): siRNA sense strand
uggaauugcucuuuacuau

SEQ ID NO: 1707882 - RNA, 19 nt, Homo sapiens
  misc_RNA (1)...(19): siRNA sense strand
ggacaaaacuggguucaga

SEQ ID NO: 1707883 - RNA, 19 nt, Homo sapiens
  misc_RNA (1)...(19): siRNA sense strand
gaucaacaacugccuaugu

SEQ ID NO: 1707884 - RNA, 19 nt, Homo sapiens
  misc_RNA (1)...(19): siRNA sense strand
uaucacagaucaacaacug

SEQ ID NO: 1707885 - RNA, 19 nt, Homo sapiens
  misc_RNA (1)...(19): siRNA sense strand
uaaagaaggcgaaauagag

SEQ ID NO: 1707886 - RNA, 19 nt, Homo sapiens
  misc_RNA (1)...(19): siRNA sense strand
gaaggauccuauuguuucu

SEQ ID NO: 1707887 - RNA, 19 nt, Homo sapiens
  misc_RNA (1)...(19): siRNA sense strand
ugaaagcugugguucuaau

SEQ ID NO: 1707888 - RNA, 19 nt, Homo sapiens
  misc_RNA (1)...(19): siRNA sense strand
ucagaacucgucuucauuu

SEQ ID NO: 1707889 - RNA, 19 nt, Homo sapiens
  misc_RNA (1)...(19): siRNA sense strand
gcagaauguuauacaguag

SEQ ID NO: 1707890 - RNA, 19 nt, Homo sapiens
  misc_RNA (1)...(19): siRNA sense strand
gaucuacagcuuucacuau

SEQ ID NO: 1707891 - RNA, 19 nt, Homo sapiens
  misc_RNA (1)...(19): siRNA sense strand
uacaguaggugaauuaugg

SEQ ID NO: 1707892 - RNA, 19 nt, Homo sapiens
  misc_RNA (1)...(19): siRNA sense strand
ugcagaauguuauacagua

SEQ ID NO: 1707893 - RNA, 19 nt, Homo sapiens
  misc_RNA (1)...(19): siRNA sense strand
ggauacaggaugaccauga

SEQ ID NO: 1707894 - RNA, 19 nt, Homo sapiens
  misc_RNA (1)...(19): siRNA sense strand
ugaaggauccuauuguuuc

SEQ ID NO: 1707895 - RNA, 19 nt, Homo sapiens
  misc_RNA (1)...(19): siRNA sense strand
caacuuggaauugcucuuu

SEQ ID NO: 1707896 - RNA, 19 nt, Homo sapiens
  misc_RNA (1)...(19): siRNA sense strand
gaaugccagugguaaaaua

SEQ ID NO: 1707897 - RNA, 19 nt, Homo sapiens
  misc_RNA (1)...(19): siRNA sense strand
uaaguggacauauucauga

SEQ ID NO: 1707898 - RNA, 19 nt, Homo sapiens
  misc_RNA (1)...(19): siRNA sense strand
caucaaccaugcaucaaca

SEQ ID NO: 1707899 - RNA, 19 nt, Homo sapiens
  misc_RNA (1)...(19): siRNA sense strand
ccaggauccuuuauuauac

SEQ ID NO: 1707900 - RNA, 19 nt, Homo sapiens
  misc_RNA (1)...(19): siRNA sense strand
ggauauuucugcaacugau

SEQ ID NO: 1707901 - RNA, 19 nt, Homo sapiens
  misc_RNA (1)...(19): siRNA sense strand
gaaagcugugguucuaauu

SEQ ID NO: 1707902 - RNA, 19 nt, Homo sapiens
  misc_RNA (1)...(19): siRNA sense strand
ugccugcaauugugaguua

SEQ ID NO: 1707903 - RNA, 19 nt, Homo sapiens
  misc_RNA (1)...(19): siRNA sense strand
agaguuauauucacagcaa

SEQ ID NO: 1707904 - RNA, 19 nt, Homo sapiens
  misc_RNA (1)...(19): siRNA sense strand
gaaacuuaaggaugggaua

SEQ ID NO: 1707905 - RNA, 19 nt, Homo sapiens
  misc_RNA (1)...(19): siRNA sense strand
cauuacagguucugaagau

SEQ ID NO: 1707906 - RNA, 19 nt, Homo sapiens
  misc_RNA (1)...(19): siRNA sense strand
gaaauagaggaccuuacuu

SEQ ID NO: 1707907 - RNA, 19 nt, Homo sapiens
  misc_RNA (1)...(19): siRNA sense strand
uccuacagauccugacuua

SEQ ID NO: 1707908 - RNA, 19 nt, Homo sapiens
  misc_RNA (1)...(19): siRNA sense strand
uuaaugagcuaugugaauc

SEQ ID NO: 1707909 - RNA, 19 nt, Homo sapiens
  misc_RNA (1)...(19): siRNA sense strand
gaacucgucuucauuuuac

SEQ ID NO: 1707910 - RNA, 19 nt, Homo sapiens
  misc_RNA (1)...(19): siRNA sense strand
gaaacaagaauagauaugc

SEQ ID NO: 1707911 - RNA, 19 nt, Homo sapiens
  misc_RNA (1)...(19): siRNA sense strand
aaauagaggaccuuacuug

SEQ ID NO: 1707912 - RNA, 19 nt, Homo sapiens
  misc_RNA (1)...(19): siRNA sense strand
gauuagacgaguuguaaau

SEQ ID NO: 1707913 - RNA, 19 nt, Homo sapiens
  misc_RNA (1)...(19): siRNA sense strand
cugccuauguuuauucgua

SEQ ID NO: 1707914 - RNA, 19 nt, Homo sapiens
  misc_RNA (1)...(19): siRNA sense strand
gugcauucauggauauuuc

SEQ ID NO: 1707915 - RNA, 19 nt, Homo sapiens
  misc_RNA (1)...(19): siRNA sense strand
ggaacgauccugcaucaac

SEQ ID NO: 1707916 - RNA, 19 nt, Homo sapiens
  misc_RNA (1)...(19): siRNA sense strand
guacaguuugucuugauaa

SEQ ID NO: 1707917 - RNA, 19 nt, Homo sapiens
  misc_RNA (1)...(19): siRNA sense strand
aagaugauaucguccuuuc

SEQ ID NO: 1707918 - RNA, 19 nt, Homo sapiens
  misc_RNA (1)...(19): siRNA sense strand
aaaguuggaugugcuggaa

SEQ ID NO: 1707919 - RNA, 19 nt, Homo sapiens
  misc_RNA (1)...(19): siRNA sense strand
ggaauugcucuuuacuaug

SEQ ID NO: 1707920 - RNA, 19 nt, Homo sapiens
  misc_RNA (1)...(19): siRNA sense strand
accaggauccuuuauuaua

SEQ ID NO: 1707921 - RNA, 19 nt, Homo sapiens
  misc_RNA (1)...(19): siRNA sense strand
ucaauacuauggaaugcau

SEQ ID NO: 1707922 - RNA, 19 nt, Homo sapiens
  misc_RNA (1)...(19): siRNA sense strand
gucaagaguuauauucaca

SEQ ID NO: 1707923 - RNA, 19 nt, Homo sapiens
  misc_RNA (1)...(19): siRNA sense strand
gcucuuuacuauggagaaa

SEQ ID NO: 1707924 - RNA, 19 nt, Homo sapiens
  misc_RNA (1)...(19): siRNA sense strand
cuucagaacucgucuucau

SEQ ID NO: 1707925 - RNA, 19 nt, Homo sapiens
  misc_RNA (1)...(19): siRNA sense strand
gaagaugauaucguccuuu

SEQ ID NO: 1707926 - RNA, 19 nt, Homo sapiens
  misc_RNA (1)...(19): siRNA sense strand
gacgaguuguaaauaaugu

SEQ ID NO: 1707927 - RNA, 19 nt, Homo sapiens
  misc_RNA (1)...(19): siRNA sense strand
ugacuuaccaccagguuau

SEQ ID NO: 1707928 - RNA, 19 nt, Homo sapiens
  misc_RNA (1)...(19): siRNA sense strand
ggaacugaaauuaccauuc

SEQ ID NO: 1707929 - RNA, 19 nt, Homo sapiens
  misc_RNA (1)...(19): siRNA sense strand
uauauucacagcaagauga

SEQ ID NO: 1707930 - RNA, 19 nt, Homo sapiens
  misc_RNA (1)...(19): siRNA sense strand
cgaaauagaggaccuuacu

SEQ ID NO: 1707931 - RNA, 19 nt, Homo sapiens
  misc_RNA (1)...(19): siRNA sense strand
caacugccuauguuuauuc

SEQ ID NO: 1707932 - RNA, 19 nt, Homo sapiens
  misc_RNA (1)...(19): siRNA sense strand
cgucggaucuacagcuuuc

SEQ ID NO: 1707933 - RNA, 19 nt, Homo sapiens
  misc_RNA (1)...(19): siRNA sense strand
gcugagaaagguuaucaau

SEQ ID NO: 1707934 - RNA, 19 nt, Homo sapiens
  misc_RNA (1)...(19): siRNA sense strand
caagcucgaguuaaaguug

SEQ ID NO: 1707935 - RNA, 19 nt, Homo sapiens
  misc_RNA (1)...(19): siRNA sense strand
uuaaagaaggcgaaauaga

SEQ ID NO: 1707936 - RNA, 19 nt, Homo sapiens
  misc_RNA (1)...(19): siRNA sense strand
uguacaguuugucuugaua

SEQ ID NO: 1707937 - RNA, 19 nt, Homo sapiens
  misc_RNA (1)...(19): siRNA sense strand
caggauccuuuauuauaca

SEQ ID NO: 1707938 - RNA, 19 nt, Homo sapiens
  misc_RNA (1)...(19): siRNA sense strand
uuugaaggauccuauuguu

SEQ ID NO: 1707939 - RNA, 19 nt, Homo sapiens
  misc_RNA (1)...(19): siRNA sense strand
cagguuaugugcagagucu

SEQ ID NO: 1707940 - RNA, 19 nt, Homo sapiens
  misc_RNA (1)...(19): siRNA sense strand
ugggaacgauccugcauca

SEQ ID NO: 1707941 - RNA, 19 nt, Homo sapiens
  misc_RNA (1)...(19): siRNA sense strand
ucaugggccugguccuuug

SEQ ID NO: 1707942 - RNA, 19 nt, Homo sapiens
  misc_RNA (1)...(19): siRNA sense strand
ggucaagaguuauauucac

SEQ ID NO: 1707943 - RNA, 19 nt, Homo sapiens
  misc_RNA (1)...(19): siRNA sense strand
cuaggaaacauuacagguu

SEQ ID NO: 1707944 - RNA, 19 nt, Homo sapiens
  misc_RNA (1)...(19): siRNA sense strand
aaacggaaugccaguggua

SEQ ID NO: 1707945 - RNA, 19 nt, Homo sapiens
  misc_RNA (1)...(19): siRNA sense strand
ugaagaugauaucguccuu

SEQ ID NO: 1707946 - RNA, 19 nt, Homo sapiens
  misc_RNA (1)...(19): siRNA sense strand
aggcaacggugacuuucaa

SEQ ID NO: 1707947 - RNA, 19 nt, Homo sapiens
  misc_RNA (1)...(19): siRNA sense strand
aagcacagacuuugaagga

SEQ ID NO: 1707948 - RNA, 19 nt, Homo sapiens
  misc_RNA (1)...(19): siRNA sense strand
aaagauaugcuaggaaaca

SEQ ID NO: 1707949 - RNA, 19 nt, Homo sapiens
  misc_RNA (1)...(19): siRNA sense strand
gcuggaacaggaacugaaa

SEQ ID NO: 1707950 - RNA, 19 nt, Homo sapiens
  misc_RNA (1)...(19): siRNA sense strand
uacaaauguuccuucagaa

SEQ ID NO: 1707951 - RNA, 19 nt, Homo sapiens
  misc_RNA (1)...(19): siRNA sense strand
cugauuuggugcugagaaa

SEQ ID NO: 1707952 - RNA, 19 nt, Homo sapiens
  misc_RNA (1)...(19): siRNA sense strand
uacagguucugaagaugaa

SEQ ID NO: 1707953 - RNA, 19 nt, Homo sapiens
  misc_RNA (1)...(19): siRNA sense strand
gaggaccuuacuugucaua

SEQ ID NO: 1707954 - RNA, 19 nt, Homo sapiens
  misc_RNA (1)...(19): siRNA sense strand
acaacugccuauguuuauu

SEQ ID NO: 1707955 - RNA, 19 nt, Homo sapiens
  misc_RNA (1)...(19): siRNA sense strand
cugauuagacgaguuguaa

SEQ ID NO: 1707956 - RNA, 19 nt, Homo sapiens
  misc_RNA (1)...(19): siRNA sense strand
aaacauuacagguucugaa

SEQ ID NO: 1707957 - RNA, 19 nt, Homo sapiens
  misc_RNA (1)...(19): siRNA sense strand
ggaucuacagcuuucacua

SEQ ID NO: 1707958 - RNA, 19 nt, Homo sapiens
  misc_RNA (1)...(19): siRNA sense strand
gccuauguuuauucguaua

SEQ ID NO: 1707959 - RNA, 19 nt, Homo sapiens
  misc_RNA (1)...(19): siRNA sense strand
guuauacaguaggugaauu

SEQ ID NO: 1707960 - RNA, 19 nt, Homo sapiens
  misc_RNA (1)...(19): siRNA sense strand
agucauauguaacuccaau

SEQ ID NO: 1707961 - RNA, 19 nt, Homo sapiens
  misc_RNA (1)...(19): siRNA sense strand
uuacagguucugaagauga

SEQ ID NO: 1707962 - RNA, 19 nt, Homo sapiens
  misc_RNA (1)...(19): siRNA sense strand
aggaugggauacaggauga

SEQ ID NO: 1707963 - RNA, 19 nt, Homo sapiens
  misc_RNA (1)...(19): siRNA sense strand
ggauccuauuguuucuaua

SEQ ID NO: 1707964 - RNA, 19 nt, Homo sapiens
  misc_RNA (1)...(19): siRNA sense strand
gcauaaaggucaagaguua

SEQ ID NO: 1707965 - RNA, 19 nt, Homo sapiens
  misc_RNA (1)...(19): siRNA sense strand
gaccuuacuugucauaaua

SEQ ID NO: 1707966 - RNA, 19 nt, Homo sapiens
  misc_RNA (1)...(19): siRNA sense strand
uuaccaggauccuuuauua

SEQ ID NO: 1707967 - RNA, 19 nt, Homo sapiens
  misc_RNA (1)...(19): siRNA sense strand
gaucgugcauucauggaua

SEQ ID NO: 1707968 - RNA, 19 nt, Homo sapiens
  misc_RNA (1)...(19): siRNA sense strand
gaauugcucuuuacuaugg

SEQ ID NO: 1707969 - RNA, 19 nt, Homo sapiens
  misc_RNA (1)...(19): siRNA sense strand
ucagcaagcucgaguuaaa

SEQ ID NO: 1707970 - RNA, 19 nt, Homo sapiens
  misc_RNA (1)...(19): siRNA sense strand
caugaaagcugugguucua

SEQ ID NO: 1707971 - RNA, 19 nt, Homo sapiens
  misc_RNA (1)...(19): siRNA sense strand
gauaugcuaggaaacauua

SEQ ID NO: 1707972 - RNA, 19 nt, Homo sapiens
  misc_RNA (1)...(19): siRNA sense strand
gugaaucgcuacaucaaga

SEQ ID NO: 1707973 - RNA, 19 nt, Homo sapiens
  misc_RNA (1)...(19): siRNA sense strand
ggaacaggaacugaaauua

SEQ ID NO: 1707974 - RNA, 19 nt, Homo sapiens
  misc_RNA (1)...(19): siRNA sense strand
gaacaggaacugaaauuac

SEQ ID NO: 1707975 - RNA, 19 nt, Homo sapiens
  misc_RNA (1)...(19): siRNA sense strand
gaagaugaaacaagaauag

SEQ ID NO: 1707976 - RNA, 19 nt, Homo sapiens
  misc_RNA (1)...(19): siRNA sense strand
gauacaggaugaccaugaa

SEQ ID NO: 1707977 - RNA, 19 nt, Homo sapiens
  misc_RNA (1)...(19): siRNA sense strand
uagaggaccuuacuuguca

SEQ ID NO: 1707978 - RNA, 19 nt, Homo sapiens
  misc_RNA (1)...(19): siRNA sense strand
ggaccuuacuugucauaau

SEQ ID NO: 1707979 - RNA, 19 nt, Homo sapiens
  misc_RNA (1)...(19): siRNA sense strand
auacaaauguuccuucaga

SEQ ID NO: 1707980 - RNA, 19 nt, Homo sapiens
  misc_RNA (1)...(19): siRNA sense strand
aaaccuaaauuccaagaug

SEQ ID NO: 1707981 - RNA, 19 nt, Homo sapiens
  misc_RNA (1)...(19): siRNA sense strand
uggaauugcucuuuacuau

SEQ ID NO: 1707982 - RNA, 19 nt, Homo sapiens
  misc_RNA (1)...(19): siRNA sense strand
ggacaaaacuggguucaga

SEQ ID NO: 1707983 - RNA, 19 nt, Homo sapiens
  misc_RNA (1)...(19): siRNA sense strand
gaucaacaacugccuaugu

SEQ ID NO: 1707984 - RNA, 19 nt, Homo sapiens
  misc_RNA (1)...(19): siRNA sense strand
uaucacagaucaacaacug

SEQ ID NO: 1707985 - RNA, 19 nt, Homo sapiens
  misc_RNA (1)...(19): siRNA sense strand
uaaagaaggcgaaauagag

SEQ ID NO: 1707986 - RNA, 19 nt, Homo sapiens
  misc_RNA (1)...(19): siRNA sense strand
gaaggauccuauuguuucu

SEQ ID NO: 1707987 - RNA, 19 nt, Homo sapiens
  misc_RNA (1)...(19): siRNA sense strand
ugaaagcugugguucuaau

SEQ ID NO: 1707988 - RNA, 19 nt, Homo sapiens
  misc_RNA (1)...(19): siRNA sense strand
ucagaacucgucuucauuu

SEQ ID NO: 1707989 - RNA, 19 nt, Homo sapiens
  misc_RNA (1)...(19): siRNA sense strand
gcagaauguuauacaguag

SEQ ID NO: 1707990 - RNA, 19 nt, Homo sapiens
  misc_RNA (1)...(19): siRNA sense strand
gaucuacagcuuucacuau

SEQ ID NO: 1707991 - RNA, 19 nt, Homo sapiens
  misc_RNA (1)...(19): siRNA sense strand
uacaguaggugaauuaugg

SEQ ID NO: 1707992 - RNA, 19 nt, Homo sapiens
  misc_RNA (1)...(19): siRNA sense strand
ugcagaauguuauacagua

SEQ ID NO: 1707993 - RNA, 19 nt, Homo sapiens
  misc_RNA (1)...(19): siRNA sense strand
ggauacaggaugaccauga

SEQ ID NO: 1707994 - RNA, 19 nt, Homo sapiens
  misc_RNA (1)...(19): siRNA sense strand
ugaaggauccuauuguuuc

SEQ ID NO: 1707995 - RNA, 19 nt, Homo sapiens
  misc_RNA (1)...(19): siRNA sense strand
caacuuggaauugcucuuu

SEQ ID NO: 1707996 - RNA, 19 nt, Homo sapiens
  misc_RNA (1)...(19): siRNA sense strand
gaaugccagugguaaaaua

SEQ ID NO: 1707997 - RNA, 19 nt, Homo sapiens
  misc_RNA (1)...(19): siRNA sense strand
uaaguggacauauucauga

SEQ ID NO: 1707998 - RNA, 19 nt, Homo sapiens
  misc_RNA (1)...(19): siRNA sense strand
caucaaccaugcaucaaca

SEQ ID NO: 1707999 - RNA, 19 nt, Homo sapiens
  misc_RNA (1)...(19): siRNA sense strand
ccaggauccuuuauuauac

SEQ ID NO: 1708000 - RNA, 19 nt, Homo sapiens
  misc_RNA (1)...(19): siRNA sense strand
ggauauuucugcaacugau

SEQ ID NO: 1708001 - RNA, 19 nt, Homo sapiens
  misc_RNA (1)...(19): siRNA sense strand
gaaagcugugguucuaauu

SEQ ID NO: 1708002 - RNA, 19 nt, Homo sapiens
  misc_RNA (1)...(19): siRNA sense strand
ugccugcaauugugaguua

SEQ ID NO: 1708003 - RNA, 19 nt, Homo sapiens
  misc_RNA (1)...(19): siRNA sense strand
agaguuauauucacagcaa

SEQ ID NO: 1708004 - RNA, 19 nt, Homo sapiens
  misc_RNA (1)...(19): siRNA sense strand
gaaacuuaaggaugggaua

SEQ ID NO: 1708005 - RNA, 19 nt, Homo sapiens
  misc_RNA (1)...(19): siRNA sense strand
cauuacagguucugaagau

SEQ ID NO: 1708006 - RNA, 19 nt, Homo sapiens
  misc_RNA (1)...(19): siRNA sense strand
gaaauagaggaccuuacuu

SEQ ID NO: 1708007 - RNA, 19 nt, Homo sapiens
  misc_RNA (1)...(19): siRNA sense strand
uccuacagauccugacuua

SEQ ID NO: 1708008 - RNA, 19 nt, Homo sapiens
  misc_RNA (1)...(19): siRNA sense strand
uuaaugagcuaugugaauc

SEQ ID NO: 1708009 - RNA, 19 nt, Homo sapiens
  misc_RNA (1)...(19): siRNA sense strand
gaacucgucuucauuuuac

SEQ ID NO: 1708010 - RNA, 19 nt, Homo sapiens
  misc_RNA (1)...(19): siRNA sense strand
gaaacaagaauagauaugc

SEQ ID NO: 1708011 - RNA, 19 nt, Homo sapiens
  misc_RNA (1)...(19): siRNA sense strand
aaauagaggaccuuacuug

SEQ ID NO: 1708012 - RNA, 19 nt, Homo sapiens
  misc_RNA (1)...(19): siRNA sense strand
gauuagacgaguuguaaau

SEQ ID NO: 1708013 - RNA, 19 nt, Homo sapiens
  misc_RNA (1)...(19): siRNA sense strand
cugccuauguuuauucgua

SEQ ID NO: 1708014 - RNA, 19 nt, Homo sapiens
  misc_RNA (1)...(19): siRNA sense strand
gugcauucauggauauuuc

SEQ ID NO: 1708015 - RNA, 19 nt, Homo sapiens
  misc_RNA (1)...(19): siRNA sense strand
ggaacgauccugcaucaac

SEQ ID NO: 1708016 - RNA, 19 nt, Homo sapiens
  misc_RNA (1)...(19): siRNA sense strand
guacaguuugucuugauaa

SEQ ID NO: 1708017 - RNA, 19 nt, Homo sapiens
  misc_RNA (1)...(19): siRNA sense strand
aagaugauaucguccuuuc

SEQ ID NO: 1708018 - RNA, 19 nt, Homo sapiens
  misc_RNA (1)...(19): siRNA sense strand
aaaguuggaugugcuggaa

SEQ ID NO: 1708019 - RNA, 19 nt, Homo sapiens
  misc_RNA (1)...(19): siRNA sense strand
ggaauugcucuuuacuaug

SEQ ID NO: 1708020 - RNA, 19 nt, Homo sapiens
  misc_RNA (1)...(19): siRNA sense strand
accaggauccuuuauuaua

SEQ ID NO: 1708021 - RNA, 19 nt, Homo sapiens
  misc_RNA (1)...(19): siRNA sense strand
ucaauacuauggaaugcau

SEQ ID NO: 1708022 - RNA, 19 nt, Homo sapiens
  misc_RNA (1)...(19): siRNA sense strand
gucaagaguuauauucaca

SEQ ID NO: 1708023 - RNA, 19 nt, Homo sapiens
  misc_RNA (1)...(19): siRNA sense strand
gcucuuuacuauggagaaa

SEQ ID NO: 1708024 - RNA, 19 nt, Homo sapiens
  misc_RNA (1)...(19): siRNA sense strand
cuucagaacucgucuucau

SEQ ID NO: 1708025 - RNA, 19 nt, Homo sapiens
  misc_RNA (1)...(19): siRNA sense strand
gaagaugauaucguccuuu

SEQ ID NO: 1708026 - RNA, 19 nt, Homo sapiens
  misc_RNA (1)...(19): siRNA sense strand
gacgaguuguaaauaaugu

SEQ ID NO: 1708027 - RNA, 19 nt, Homo sapiens
  misc_RNA (1)...(19): siRNA sense strand
ugacuuaccaccagguuau

SEQ ID NO: 1708028 - RNA, 19 nt, Homo sapiens
  misc_RNA (1)...(19): siRNA sense strand
ggaacugaaauuaccauuc

SEQ ID NO: 1708029 - RNA, 19 nt, Homo sapiens
  misc_RNA (1)...(19): siRNA sense strand
uauauucacagcaagauga

SEQ ID NO: 1708030 - RNA, 19 nt, Homo sapiens
  misc_RNA (1)...(19): siRNA sense strand
cgaaauagaggaccuuacu

SEQ ID NO: 1708031 - RNA, 19 nt, Homo sapiens
  misc_RNA (1)...(19): siRNA sense strand
caacugccuauguuuauuc

SEQ ID NO: 1708032 - RNA, 19 nt, Homo sapiens
  misc_RNA (1)...(19): siRNA sense strand
cgucggaucuacagcuuuc

SEQ ID NO: 1708033 - RNA, 19 nt, Homo sapiens
  misc_RNA (1)...(19): siRNA sense strand
gcugagaaagguuaucaau

SEQ ID NO: 1708034 - RNA, 19 nt, Homo sapiens
  misc_RNA (1)...(19): siRNA sense strand
caagcucgaguuaaaguug

SEQ ID NO: 1708035 - RNA, 19 nt, Homo sapiens
  misc_RNA (1)...(19): siRNA sense strand
uuaaagaaggcgaaauaga

SEQ ID NO: 1708036 - RNA, 19 nt, Homo sapiens
  misc_RNA (1)...(19): siRNA sense strand
uguacaguuugucuugaua

SEQ ID NO: 1708037 - RNA, 19 nt, Homo sapiens
  misc_RNA (1)...(19): siRNA sense strand
caggauccuuuauuauaca

SEQ ID NO: 1708038 - RNA, 19 nt, Homo sapiens
  misc_RNA (1)...(19): siRNA sense strand
uuugaaggauccuauuguu

SEQ ID NO: 1708039 - RNA, 19 nt, Homo sapiens
  misc_RNA (1)...(19): siRNA sense strand
cagguuaugugcagagucu

SEQ ID NO: 1708040 - RNA, 19 nt, Homo sapiens
  misc_RNA (1)...(19): siRNA sense strand
ugggaacgauccugcauca

SEQ ID NO: 1708041 - RNA, 19 nt, Homo sapiens
  misc_RNA (1)...(19): siRNA sense strand
ucaugggccugguccuuug

SEQ ID NO: 1708042 - RNA, 19 nt, Homo sapiens
  misc_RNA (1)...(19): siRNA sense strand
ggucaagaguuauauucac

SEQ ID NO: 1708043 - RNA, 19 nt, Homo sapiens
  misc_RNA (1)...(19): siRNA sense strand
cuaggaaacauuacagguu

SEQ ID NO: 1708044 - RNA, 19 nt, Homo sapiens
  misc_RNA (1)...(19): siRNA sense strand
aaacggaaugccaguggua

SEQ ID NO: 1708045 - RNA, 19 nt, Homo sapiens
  misc_RNA (1)...(19): siRNA sense strand
ugaagaugauaucguccuu

SEQ ID NO: 1708046 - RNA, 19 nt, Homo sapiens
  misc_RNA (1)...(19): siRNA sense strand
aggcaacggugacuuucaa

SEQ ID NO: 1708047 - RNA, 19 nt, Homo sapiens
  misc_RNA (1)...(19): siRNA sense strand
aagcacagacuuugaagga

SEQ ID NO: 1708048 - RNA, 19 nt, Homo sapiens
  misc_RNA (1)...(19): siRNA sense strand
aaagauaugcuaggaaaca

SEQ ID NO: 1708049 - RNA, 19 nt, Homo sapiens
  misc_RNA (1)...(19): siRNA sense strand
gcuggaacaggaacugaaa

SEQ ID NO: 1708050 - RNA, 19 nt, Homo sapiens
  misc_RNA (1)...(19): siRNA sense strand
uacaaauguuccuucagaa

SEQ ID NO: 1708051 - RNA, 19 nt, Homo sapiens
  misc_RNA (1)...(19): siRNA sense strand
cugauuuggugcugagaaa

SEQ ID NO: 1708052 - RNA, 19 nt, Homo sapiens
  misc_RNA (1)...(19): siRNA sense strand
uacagguucugaagaugaa

SEQ ID NO: 1708053 - RNA, 19 nt, Homo sapiens
  misc_RNA (1)...(19): siRNA sense strand
gaggaccuuacuugucaua

SEQ ID NO: 1708054 - RNA, 19 nt, Homo sapiens
  misc_RNA (1)...(19): siRNA sense strand
acaacugccuauguuuauu

SEQ ID NO: 1708055 - RNA, 19 nt, Homo sapiens
  misc_RNA (1)...(19): siRNA sense strand
cugauuagacgaguuguaa

SEQ ID NO: 1708056 - RNA, 19 nt, Homo sapiens
  misc_RNA (1)...(19): siRNA sense strand
aaacauuacagguucugaa

SEQ ID NO: 1708057 - RNA, 19 nt, Homo sapiens
  misc_RNA (1)...(19): siRNA sense strand
ggaucuacagcuuucacua

SEQ ID NO: 1708058 - RNA, 19 nt, Homo sapiens
  misc_RNA (1)...(19): siRNA sense strand
gccuauguuuauucguaua

SEQ ID NO: 1708059 - RNA, 19 nt, Homo sapiens
  misc_RNA (1)...(19): siRNA sense strand
guuauacaguaggugaauu

SEQ ID NO: 1708060 - RNA, 19 nt, Homo sapiens
  misc_RNA (1)...(19): siRNA sense strand
agucauauguaacuccaau

SEQ ID NO: 1708061 - RNA, 19 nt, Homo sapiens
  misc_RNA (1)...(19): siRNA sense strand
uuacagguucugaagauga

SEQ ID NO: 1708062 - RNA, 19 nt, Homo sapiens
  misc_RNA (1)...(19): siRNA sense strand
aggaugggauacaggauga

SEQ ID NO: 1708063 - RNA, 19 nt, Homo sapiens
  misc_RNA (1)...(19): siRNA sense strand
ggauccuauuguuucuaua

SEQ ID NO: 1708064 - RNA, 19 nt, Homo sapiens
  misc_RNA (1)...(19): siRNA sense strand
gcauaaaggucaagaguua

SEQ ID NO: 1708065 - RNA, 19 nt, Homo sapiens
  misc_RNA (1)...(19): siRNA sense strand
gaccuuacuugucauaaua

SEQ ID NO: 1708066 - RNA, 19 nt, Homo sapiens
  misc_RNA (1)...(19): siRNA sense strand
uuaccaggauccuuuauua

SEQ ID NO: 1708067 - RNA, 19 nt, Homo sapiens
  misc_RNA (1)...(19): siRNA sense strand
gaucgugcauucauggaua

SEQ ID NO: 1708068 - RNA, 19 nt, Homo sapiens
  misc_RNA (1)...(19): siRNA sense strand
gaauugcucuuuacuaugg

SEQ ID NO: 1708069 - RNA, 19 nt, Homo sapiens
  misc_RNA (1)...(19): siRNA sense strand
ucagcaagcucgaguuaaa

SEQ ID NO: 1708070 - RNA, 19 nt, Homo sapiens
  misc_RNA (1)...(19): siRNA sense strand
caugaaagcugugguucua

SEQ ID NO: 1708071 - RNA, 19 nt, Homo sapiens
  misc_RNA (1)...(19): siRNA sense strand
gauaugcuaggaaacauua

SEQ ID NO: 1708072 - RNA, 19 nt, Homo sapiens
  misc_RNA (1)...(19): siRNA sense strand
gugaaucgcuacaucaaga

SEQ ID NO: 1708073 - RNA, 19 nt, Homo sapiens
  misc_RNA (1)...(19): siRNA sense strand
ggaacaggaacugaaauua

SEQ ID NO: 1708074 - RNA, 19 nt, Homo sapiens
  misc_RNA (1)...(19): siRNA sense strand
gaacaggaacugaaauuac

SEQ ID NO: 1708075 - RNA, 19 nt, Homo sapiens
  misc_RNA (1)...(19): siRNA sense strand
gaagaugaaacaagaauag

SEQ ID NO: 1708076 - RNA, 19 nt, Homo sapiens
  misc_RNA (1)...(19): siRNA sense strand
gauacaggaugaccaugaa

SEQ ID NO: 1708077 - RNA, 19 nt, Homo sapiens
  misc_RNA (1)...(19): siRNA sense strand
uagaggaccuuacuuguca

SEQ ID NO: 1708078 - RNA, 19 nt, Homo sapiens
  misc_RNA (1)...(19): siRNA sense strand
ggaccuuacuugucauaau

SEQ ID NO: 1708079 - RNA, 19 nt, Homo sapiens
  misc_RNA (1)...(19): siRNA sense strand
auacaaauguuccuucaga

SEQ ID NO: 1708080 - RNA, 19 nt, Homo sapiens
  misc_RNA (1)...(19): siRNA sense strand
aaaccuaaauuccaagaug

SEQ ID NO: 1708081 - RNA, 19 nt, Homo sapiens
  misc_RNA (1)...(19): siRNA sense strand
uggaauugcucuuuacuau

SEQ ID NO: 1708082 - RNA, 19 nt, Homo sapiens
  misc_RNA (1)...(19): siRNA sense strand
ggacaaaacuggguucaga

SEQ ID NO: 1708083 - RNA, 19 nt, Homo sapiens
  misc_RNA (1)...(19): siRNA sense strand
gaucaacaacugccuaugu

SEQ ID NO: 1708084 - RNA, 19 nt, Homo sapiens
  misc_RNA (1)...(19): siRNA sense strand
uaucacagaucaacaacug

SEQ ID NO: 1708085 - RNA, 19 nt, Homo sapiens
  misc_RNA (1)...(19): siRNA sense strand
uaaagaaggcgaaauagag

SEQ ID NO: 1708086 - RNA, 19 nt, Homo sapiens
  misc_RNA (1)...(19): siRNA sense strand
gaaggauccuauuguuucu

SEQ ID NO: 1708087 - RNA, 19 nt, Homo sapiens
  misc_RNA (1)...(19): siRNA sense strand
ugaaagcugugguucuaau

SEQ ID NO: 1708088 - RNA, 19 nt, Homo sapiens
  misc_RNA (1)...(19): siRNA sense strand
ucagaacucgucuucauuu

SEQ ID NO: 1708089 - RNA, 19 nt, Homo sapiens
  misc_RNA (1)...(19): siRNA sense strand
gcagaauguuauacaguag

SEQ ID NO: 1708090 - RNA, 19 nt, Homo sapiens
  misc_RNA (1)...(19): siRNA sense strand
gaucuacagcuuucacuau

SEQ ID NO: 1708091 - RNA, 19 nt, Homo sapiens
  misc_RNA (1)...(19): siRNA sense strand
uacaguaggugaauuaugg

SEQ ID NO: 1708092 - RNA, 19 nt, Homo sapiens
  misc_RNA (1)...(19): siRNA sense strand
ugcagaauguuauacagua

SEQ ID NO: 1708093 - RNA, 19 nt, Homo sapiens
  misc_RNA (1)...(19): siRNA sense strand
ggauacaggaugaccauga

SEQ ID NO: 1708094 - RNA, 19 nt, Homo sapiens
  misc_RNA (1)...(19): siRNA sense strand
ugaaggauccuauuguuuc

SEQ ID NO: 1708095 - RNA, 19 nt, Homo sapiens
  misc_RNA (1)...(19): siRNA sense strand
caacuuggaauugcucuuu

SEQ ID NO: 1708096 - RNA, 19 nt, Homo sapiens
  misc_RNA (1)...(19): siRNA sense strand
gaaugccagugguaaaaua

SEQ ID NO: 1708097 - RNA, 19 nt, Homo sapiens
  misc_RNA (1)...(19): siRNA sense strand
uaaguggacauauucauga

SEQ ID NO: 1708098 - RNA, 19 nt, Homo sapiens
  misc_RNA (1)...(19): siRNA sense strand
caucaaccaugcaucaaca

SEQ ID NO: 1708099 - RNA, 19 nt, Homo sapiens
  misc_RNA (1)...(19): siRNA sense strand
ccaggauccuuuauuauac

SEQ ID NO: 1708100 - RNA, 19 nt, Homo sapiens
  misc_RNA (1)...(19): siRNA sense strand
ggauauuucugcaacugau

SEQ ID NO: 1708101 - RNA, 19 nt, Homo sapiens
  misc_RNA (1)...(19): siRNA sense strand
gaaagcugugguucuaauu

SEQ ID NO: 1708102 - RNA, 19 nt, Homo sapiens
  misc_RNA (1)...(19): siRNA sense strand
ugccugcaauugugaguua

SEQ ID NO: 1708103 - RNA, 19 nt, Homo sapiens
  misc_RNA (1)...(19): siRNA sense strand
agaguuauauucacagcaa

SEQ ID NO: 1708104 - RNA, 19 nt, Homo sapiens
  misc_RNA (1)...(19): siRNA sense strand
gaaacuuaaggaugggaua

SEQ ID NO: 1708105 - RNA, 19 nt, Homo sapiens
  misc_RNA (1)...(19): siRNA sense strand
cauuacagguucugaagau

SEQ ID NO: 1708106 - RNA, 19 nt, Homo sapiens
  misc_RNA (1)...(19): siRNA sense strand
gaaauagaggaccuuacuu

SEQ ID NO: 1708107 - RNA, 19 nt, Homo sapiens
  misc_RNA (1)...(19): siRNA sense strand
uccuacagauccugacuua

SEQ ID NO: 1708108 - RNA, 19 nt, Homo sapiens
  misc_RNA (1)...(19): siRNA sense strand
uuaaugagcuaugugaauc

SEQ ID NO: 1708109 - RNA, 19 nt, Homo sapiens
  misc_RNA (1)...(19): siRNA sense strand
gaacucgucuucauuuuac

SEQ ID NO: 1708110 - RNA, 19 nt, Homo sapiens
  misc_RNA (1)...(19): siRNA sense strand
gaaacaagaauagauaugc

SEQ ID NO: 1708111 - RNA, 19 nt, Homo sapiens
  misc_RNA (1)...(19): siRNA sense strand
aaauagaggaccuuacuug

SEQ ID NO: 1708112 - RNA, 19 nt, Homo sapiens
  misc_RNA (1)...(19): siRNA sense strand
gauuagacgaguuguaaau

SEQ ID NO: 1708113 - RNA, 19 nt, Homo sapiens
  misc_RNA (1)...(19): siRNA sense strand
cugccuauguuuauucgua

SEQ ID NO: 1708114 - RNA, 19 nt, Homo sapiens
  misc_RNA (1)...(19): siRNA sense strand
gugcauucauggauauuuc

SEQ ID NO: 1708115 - RNA, 19 nt, Homo sapiens
  misc_RNA (1)...(19): siRNA sense strand
ggaacgauccugcaucaac

SEQ ID NO: 1708116 - RNA, 19 nt, Homo sapiens
  misc_RNA (1)...(19): siRNA sense strand
guacaguuugucuugauaa

SEQ ID NO: 1708117 - RNA, 19 nt, Homo sapiens
  misc_RNA (1)...(19): siRNA sense strand
aagaugauaucguccuuuc

SEQ ID NO: 1708118 - RNA, 19 nt, Homo sapiens
  misc_RNA (1)...(19): siRNA sense strand
aaaguuggaugugcuggaa

SEQ ID NO: 1708119 - RNA, 19 nt, Homo sapiens
  misc_RNA (1)...(19): siRNA sense strand
ggaauugcucuuuacuaug

SEQ ID NO: 1708120 - RNA, 19 nt, Homo sapiens
  misc_RNA (1)...(19): siRNA sense strand
accaggauccuuuauuaua

SEQ ID NO: 1708121 - RNA, 19 nt, Homo sapiens
  misc_RNA (1)...(19): siRNA sense strand
ucaauacuauggaaugcau

SEQ ID NO: 1708122 - RNA, 19 nt, Homo sapiens
  misc_RNA (1)...(19): siRNA sense strand
gucaagaguuauauucaca

SEQ ID NO: 1708123 - RNA, 19 nt, Homo sapiens
  misc_RNA (1)...(19): siRNA sense strand
gcucuuuacuauggagaaa

SEQ ID NO: 1708124 - RNA, 19 nt, Homo sapiens
  misc_RNA (1)...(19): siRNA sense strand
cuucagaacucgucuucau

SEQ ID NO: 1708125 - RNA, 19 nt, Homo sapiens
  misc_RNA (1)...(19): siRNA sense strand
gaagaugauaucguccuuu

SEQ ID NO: 1708126 - RNA, 19 nt, Homo sapiens
  misc_RNA (1)...(19): siRNA sense strand
gacgaguuguaaauaaugu

SEQ ID NO: 1708127 - RNA, 19 nt, Homo sapiens
  misc_RNA (1)...(19): siRNA sense strand
ugacuuaccaccagguuau

SEQ ID NO: 1708128 - RNA, 19 nt, Homo sapiens
  misc_RNA (1)...(19): siRNA sense strand
ggaacugaaauuaccauuc

SEQ ID NO: 1708129 - RNA, 19 nt, Homo sapiens
  misc_RNA (1)...(19): siRNA sense strand
uauauucacagcaagauga

SEQ ID NO: 1708130 - RNA, 19 nt, Homo sapiens
  misc_RNA (1)...(19): siRNA sense strand
cgaaauagaggaccuuacu

SEQ ID NO: 1708131 - RNA, 19 nt, Homo sapiens
  misc_RNA (1)...(19): siRNA sense strand
caacugccuauguuuauuc

SEQ ID NO: 1708132 - RNA, 19 nt, Homo sapiens
  misc_RNA (1)...(19): siRNA sense strand
cgucggaucuacagcuuuc

SEQ ID NO: 1708133 - RNA, 19 nt, Homo sapiens
  misc_RNA (1)...(19): siRNA sense strand
gcugagaaagguuaucaau

SEQ ID NO: 1708134 - RNA, 19 nt, Homo sapiens
  misc_RNA (1)...(19): siRNA sense strand
caagcucgaguuaaaguug

SEQ ID NO: 1708135 - RNA, 19 nt, Homo sapiens
  misc_RNA (1)...(19): siRNA sense strand
uuaaagaaggcgaaauaga

SEQ ID NO: 1708136 - RNA, 19 nt, Homo sapiens
  misc_RNA (1)...(19): siRNA sense strand
uguacaguuugucuugaua

SEQ ID NO: 1708137 - RNA, 19 nt, Homo sapiens
  misc_RNA (1)...(19): siRNA sense strand
caggauccuuuauuauaca

SEQ ID NO: 1708138 - RNA, 19 nt, Homo sapiens
  misc_RNA (1)...(19): siRNA sense strand
uuugaaggauccuauuguu

SEQ ID NO: 1708139 - RNA, 19 nt, Homo sapiens
  misc_RNA (1)...(19): siRNA sense strand
cagguuaugugcagagucu

SEQ ID NO: 1708140 - RNA, 19 nt, Homo sapiens
  misc_RNA (1)...(19): siRNA sense strand
ugggaacgauccugcauca

SEQ ID NO: 1708141 - RNA, 19 nt, Homo sapiens
  misc_RNA (1)...(19): siRNA sense strand
ucaugggccugguccuuug

SEQ ID NO: 1708142 - RNA, 19 nt, Homo sapiens
  misc_RNA (1)...(19): siRNA sense strand
ggucaagaguuauauucac

SEQ ID NO: 1708143 - RNA, 19 nt, Homo sapiens
  misc_RNA (1)...(19): siRNA sense strand
cuaggaaacauuacagguu

SEQ ID NO: 1708144 - RNA, 19 nt, Homo sapiens
  misc_RNA (1)...(19): siRNA sense strand
aaacggaaugccaguggua

SEQ ID NO: 1708145 - RNA, 19 nt, Homo sapiens
  misc_RNA (1)...(19): siRNA sense strand
ugaagaugauaucguccuu

SEQ ID NO: 1708146 - RNA, 19 nt, Homo sapiens
  misc_RNA (1)...(19): siRNA sense strand
aggcaacggugacuuucaa

SEQ ID NO: 1708147 - RNA, 19 nt, Homo sapiens
  misc_RNA (1)...(19): siRNA sense strand
aagcacagacuuugaagga

SEQ ID NO: 1708148 - RNA, 19 nt, Homo sapiens
  misc_RNA (1)...(19): siRNA sense strand
aaagauaugcuaggaaaca

SEQ ID NO: 1708149 - RNA, 19 nt, Homo sapiens
  misc_RNA (1)...(19): siRNA sense strand
gcuggaacaggaacugaaa

SEQ ID NO: 1708150 - RNA, 19 nt, Homo sapiens
  misc_RNA (1)...(19): siRNA sense strand
uacaaauguuccuucagaa

SEQ ID NO: 1708151 - RNA, 19 nt, Homo sapiens
  misc_RNA (1)...(19): siRNA sense strand
cugauuuggugcugagaaa

SEQ ID NO: 1708152 - RNA, 19 nt, Homo sapiens
  misc_RNA (1)...(19): siRNA sense strand
uacagguucugaagaugaa

SEQ ID NO: 1708153 - RNA, 19 nt, Homo sapiens
  misc_RNA (1)...(19): siRNA sense strand
gaggaccuuacuugucaua

SEQ ID NO: 1708154 - RNA, 19 nt, Homo sapiens
  misc_RNA (1)...(19): siRNA sense strand
acaacugccuauguuuauu

SEQ ID NO: 1708155 - RNA, 19 nt, Homo sapiens
  misc_RNA (1)...(19): siRNA sense strand
cugauuagacgaguuguaa

SEQ ID NO: 1708156 - RNA, 19 nt, Homo sapiens
  misc_RNA (1)...(19): siRNA sense strand
aaacauuacagguucugaa

SEQ ID NO: 1708157 - RNA, 19 nt, Homo sapiens
  misc_RNA (1)...(19): siRNA sense strand
ggaucuacagcuuucacua

SEQ ID NO: 1708158 - RNA, 19 nt, Homo sapiens
  misc_RNA (1)...(19): siRNA sense strand
gccuauguuuauucguaua

SEQ ID NO: 1708159 - RNA, 19 nt, Homo sapiens
  misc_RNA (1)...(19): siRNA sense strand
guuauacaguaggugaauu

SEQ ID NO: 1708160 - RNA, 19 nt, Homo sapiens
  misc_RNA (1)...(19): siRNA sense strand
agucauauguaacuccaau

SEQ ID NO: 1708161 - RNA, 19 nt, Homo sapiens
  misc_RNA (1)...(19): siRNA sense strand
uuacagguucugaagauga

SEQ ID NO: 1708162 - RNA, 19 nt, Homo sapiens
  misc_RNA (1)...(19): siRNA sense strand
aggaugggauacaggauga

SEQ ID NO: 1708163 - RNA, 19 nt, Homo sapiens
  misc_RNA (1)...(19): siRNA sense strand
ggauccuauuguuucuaua

SEQ ID NO: 1708164 - RNA, 19 nt, Homo sapiens
  misc_RNA (1)...(19): siRNA sense strand
ccaauguucuggcccguua

SEQ ID NO: 1708165 - RNA, 19 nt, Homo sapiens
  misc_RNA (1)...(19): siRNA sense strand
ucucuaaccacgccuauua

SEQ ID NO: 1708166 - RNA, 19 nt, Homo sapiens
  misc_RNA (1)...(19): siRNA sense strand
ggaagaaggagaaccugaa

SEQ ID NO: 1708167 - RNA, 19 nt, Homo sapiens
  misc_RNA (1)...(19): siRNA sense strand
gccaguaugugaccgagaa

SEQ ID NO: 1708168 - RNA, 19 nt, Homo sapiens
  misc_RNA (1)...(19): siRNA sense strand
ggacaaauggcgagacuac

SEQ ID NO: 1708169 - RNA, 19 nt, Homo sapiens
  misc_RNA (1)...(19): siRNA sense strand
agaagaaggagcugucuga

SEQ ID NO: 1708170 - RNA, 19 nt, Homo sapiens
  misc_RNA (1)...(19): siRNA sense strand
gaagaaggagaaccugaag

SEQ ID NO: 1708171 - RNA, 19 nt, Homo sapiens
  misc_RNA (1)...(19): siRNA sense strand
ccaagcggcugcaguccau

SEQ ID NO: 1708172 - RNA, 19 nt, Homo sapiens
  misc_RNA (1)...(19): siRNA sense strand
uugaagcgcugccaguaug

SEQ ID NO: 1708173 - RNA, 19 nt, Homo sapiens
  misc_RNA (1)...(19): siRNA sense strand
ugagugaccaccacaucua

SEQ ID NO: 1708174 - RNA, 19 nt, Homo sapiens
  misc_RNA (1)...(19): siRNA sense strand
ggccaugcuugcacucaga

SEQ ID NO: 1708175 - RNA, 19 nt, Homo sapiens
  misc_RNA (1)...(19): siRNA sense strand
ggugcuggcugcugucuac

SEQ ID NO: 1708176 - RNA, 19 nt, Homo sapiens
  misc_RNA (1)...(19): siRNA sense strand
ccugagauccucccugaug

SEQ ID NO: 1708177 - RNA, 19 nt, Homo sapiens
  misc_RNA (1)...(19): siRNA sense strand
gcugugcccaguacaagaa

SEQ ID NO: 1708178 - RNA, 19 nt, Homo sapiens
  misc_RNA (1)...(19): siRNA sense strand
gcaggaggaguaugucaag

SEQ ID NO: 1708179 - RNA, 19 nt, Homo sapiens
  misc_RNA (1)...(19): siRNA sense strand
guugugugcugaagauugg

SEQ ID NO: 1708180 - RNA, 19 nt, Homo sapiens
  misc_RNA (1)...(19): siRNA sense strand
ccucagcccucgccaucau

SEQ ID NO: 1708181 - RNA, 19 nt, Homo sapiens
  misc_RNA (1)...(19): siRNA sense strand
ggaggaggcguccaucaac

SEQ ID NO: 1708182 - RNA, 19 nt, Homo sapiens
  misc_RNA (1)...(19): siRNA sense strand
augagacacucuaccagaa

SEQ ID NO: 1708183 - RNA, 19 nt, Homo sapiens
  misc_RNA (1)...(19): siRNA sense strand
ucuacaaggcucugaguga

SEQ ID NO: 1708184 - RNA, 19 nt, Homo sapiens
  misc_RNA (1)...(19): siRNA sense strand
ggcguugugugcugaagau

SEQ ID NO: 1708185 - RNA, 19 nt, Homo sapiens
  misc_RNA (1)...(19): siRNA sense strand
gcuggcugcugucuacaag

SEQ ID NO: 1708186 - RNA, 19 nt, Homo sapiens
  misc_RNA (1)...(19): siRNA sense strand
ugaguccacugggagcauu

SEQ ID NO: 1708187 - RNA, 19 nt, Homo sapiens
  misc_RNA (1)...(19): siRNA sense strand
ccgagaacaccgaggagaa

SEQ ID NO: 1708188 - RNA, 19 nt, Homo sapiens
  misc_RNA (1)...(19): siRNA sense strand
gaggaggaggcguccauca

SEQ ID NO: 1708189 - RNA, 19 nt, Homo sapiens
  misc_RNA (1)...(19): siRNA sense strand
cccaaguuaucaaauccaa

SEQ ID NO: 1708190 - RNA, 19 nt, Homo sapiens
  misc_RNA (1)...(19): siRNA sense strand
cauggaaaaugccaauguu

SEQ ID NO: 1708191 - RNA, 19 nt, Homo sapiens
  misc_RNA (1)...(19): siRNA sense strand
ucacugggaucaccuuccu

SEQ ID NO: 1708192 - RNA, 19 nt, Homo sapiens
  misc_RNA (1)...(19): siRNA sense strand
gggcaucaagguagacaag

SEQ ID NO: 1708193 - RNA, 19 nt, Homo sapiens
  misc_RNA (1)...(19): siRNA sense strand
gguuggaugggcugucuga

SEQ ID NO: 1708194 - RNA, 19 nt, Homo sapiens
  misc_RNA (1)...(19): siRNA sense strand
ccaauguucuggcccguua

SEQ ID NO: 1708195 - RNA, 19 nt, Homo sapiens
  misc_RNA (1)...(19): siRNA sense strand
ucucuaaccacgccuauua

SEQ ID NO: 1708196 - RNA, 19 nt, Homo sapiens
  misc_RNA (1)...(19): siRNA sense strand
ggaagaaggagaaccugaa

SEQ ID NO: 1708197 - RNA, 19 nt, Homo sapiens
  misc_RNA (1)...(19): siRNA sense strand
gccaguaugugaccgagaa

SEQ ID NO: 1708198 - RNA, 19 nt, Homo sapiens
  misc_RNA (1)...(19): siRNA sense strand
ggacaaauggcgagacuac

SEQ ID NO: 1708199 - RNA, 19 nt, Homo sapiens
  misc_RNA (1)...(19): siRNA sense strand
agaagaaggagcugucuga

SEQ ID NO: 1708200 - RNA, 19 nt, Homo sapiens
  misc_RNA (1)...(19): siRNA sense strand
gaagaaggagaaccugaag

SEQ ID NO: 1708201 - RNA, 19 nt, Homo sapiens
  misc_RNA (1)...(19): siRNA sense strand
ccaagcggcugcaguccau

SEQ ID NO: 1708202 - RNA, 19 nt, Homo sapiens
  misc_RNA (1)...(19): siRNA sense strand
uugaagcgcugccaguaug

SEQ ID NO: 1708203 - RNA, 19 nt, Homo sapiens
  misc_RNA (1)...(19): siRNA sense strand
ugagugaccaccacaucua

SEQ ID NO: 1708204 - RNA, 19 nt, Homo sapiens
  misc_RNA (1)...(19): siRNA sense strand
ggccaugcuugcacucaga

SEQ ID NO: 1708205 - RNA, 19 nt, Homo sapiens
  misc_RNA (1)...(19): siRNA sense strand
ggugcuggcugcugucuac

SEQ ID NO: 1708206 - RNA, 19 nt, Homo sapiens
  misc_RNA (1)...(19): siRNA sense strand
ccugagauccucccugaug

SEQ ID NO: 1708207 - RNA, 19 nt, Homo sapiens
  misc_RNA (1)...(19): siRNA sense strand
gcugugcccaguacaagaa

SEQ ID NO: 1708208 - RNA, 19 nt, Homo sapiens
  misc_RNA (1)...(19): siRNA sense strand
gcaggaggaguaugucaag

SEQ ID NO: 1708209 - RNA, 19 nt, Homo sapiens
  misc_RNA (1)...(19): siRNA sense strand
guugugugcugaagauugg

SEQ ID NO: 1708210 - RNA, 19 nt, Homo sapiens
  misc_RNA (1)...(19): siRNA sense strand
ccucagcccucgccaucau

SEQ ID NO: 1708211 - RNA, 19 nt, Homo sapiens
  misc_RNA (1)...(19): siRNA sense strand
ggaggaggcguccaucaac

SEQ ID NO: 1708212 - RNA, 19 nt, Homo sapiens
  misc_RNA (1)...(19): siRNA sense strand
augagacacucuaccagaa

SEQ ID NO: 1708213 - RNA, 19 nt, Homo sapiens
  misc_RNA (1)...(19): siRNA sense strand
ucuacaaggcucugaguga

SEQ ID NO: 1708214 - RNA, 19 nt, Homo sapiens
  misc_RNA (1)...(19): siRNA sense strand
ggcguugugugcugaagau

SEQ ID NO: 1708215 - RNA, 19 nt, Homo sapiens
  misc_RNA (1)...(19): siRNA sense strand
gcuggcugcugucuacaag

SEQ ID NO: 1708216 - RNA, 19 nt, Homo sapiens
  misc_RNA (1)...(19): siRNA sense strand
ugaguccacugggagcauu

SEQ ID NO: 1708217 - RNA, 19 nt, Homo sapiens
  misc_RNA (1)...(19): siRNA sense strand
ccgagaacaccgaggagaa

SEQ ID NO: 1708218 - RNA, 19 nt, Homo sapiens
  misc_RNA (1)...(19): siRNA sense strand
gaggaggaggcguccauca

SEQ ID NO: 1708219 - RNA, 19 nt, Homo sapiens
  misc_RNA (1)...(19): siRNA sense strand
cccaaguuaucaaauccaa

SEQ ID NO: 1708220 - RNA, 19 nt, Homo sapiens
  misc_RNA (1)...(19): siRNA sense strand
cauggaaaaugccaauguu

SEQ ID NO: 1708221 - RNA, 19 nt, Homo sapiens
  misc_RNA (1)...(19): siRNA sense strand
ucacugggaucaccuuccu

SEQ ID NO: 1708222 - RNA, 19 nt, Homo sapiens
  misc_RNA (1)...(19): siRNA sense strand
gggcaucaagguagacaag

SEQ ID NO: 1708223 - RNA, 19 nt, Homo sapiens
  misc_RNA (1)...(19): siRNA sense strand
gguuggaugggcugucuga

SEQ ID NO: 1708224 - RNA, 19 nt, Homo sapiens
  misc_RNA (1)...(19): siRNA sense strand
ccaauguucuggcccguua

SEQ ID NO: 1708225 - RNA, 19 nt, Homo sapiens
  misc_RNA (1)...(19): siRNA sense strand
ucucuaaccacgccuauua

SEQ ID NO: 1708226 - RNA, 19 nt, Homo sapiens
  misc_RNA (1)...(19): siRNA sense strand
ggaagaaggagaaccugaa

SEQ ID NO: 1708227 - RNA, 19 nt, Homo sapiens
  misc_RNA (1)...(19): siRNA sense strand
gccaguaugugaccgagaa

SEQ ID NO: 1708228 - RNA, 19 nt, Homo sapiens
  misc_RNA (1)...(19): siRNA sense strand
ggacaaauggcgagacuac

SEQ ID NO: 1708229 - RNA, 19 nt, Homo sapiens
  misc_RNA (1)...(19): siRNA sense strand
agaagaaggagcugucuga

SEQ ID NO: 1708230 - RNA, 19 nt, Homo sapiens
  misc_RNA (1)...(19): siRNA sense strand
gaagaaggagaaccugaag

SEQ ID NO: 1708231 - RNA, 19 nt, Homo sapiens
  misc_RNA (1)...(19): siRNA sense strand
ccaagcggcugcaguccau

SEQ ID NO: 1708232 - RNA, 19 nt, Homo sapiens
  misc_RNA (1)...(19): siRNA sense strand
uugaagcgcugccaguaug

SEQ ID NO: 1708233 - RNA, 19 nt, Homo sapiens
  misc_RNA (1)...(19): siRNA sense strand
ugagugaccaccacaucua

SEQ ID NO: 1708234 - RNA, 19 nt, Homo sapiens
  misc_RNA (1)...(19): siRNA sense strand
ggccaugcuugcacucaga

SEQ ID NO: 1708235 - RNA, 19 nt, Homo sapiens
  misc_RNA (1)...(19): siRNA sense strand
ggugcuggcugcugucuac

SEQ ID NO: 1708236 - RNA, 19 nt, Homo sapiens
  misc_RNA (1)...(19): siRNA sense strand
ccugagauccucccugaug

SEQ ID NO: 1708237 - RNA, 19 nt, Homo sapiens
  misc_RNA (1)...(19): siRNA sense strand
gcugugcccaguacaagaa

SEQ ID NO: 1708238 - RNA, 19 nt, Homo sapiens
  misc_RNA (1)...(19): siRNA sense strand
gcaggaggaguaugucaag

SEQ ID NO: 1708239 - RNA, 19 nt, Homo sapiens
  misc_RNA (1)...(19): siRNA sense strand
guugugugcugaagauugg

SEQ ID NO: 1708240 - RNA, 19 nt, Homo sapiens
  misc_RNA (1)...(19): siRNA sense strand
ccucagcccucgccaucau

SEQ ID NO: 1708241 - RNA, 19 nt, Homo sapiens
  misc_RNA (1)...(19): siRNA sense strand
ggaggaggcguccaucaac

SEQ ID NO: 1708242 - RNA, 19 nt, Homo sapiens
  misc_RNA (1)...(19): siRNA sense strand
augagacacucuaccagaa

SEQ ID NO: 1708243 - RNA, 19 nt, Homo sapiens
  misc_RNA (1)...(19): siRNA sense strand
ucuacaaggcucugaguga

SEQ ID NO: 1708244 - RNA, 19 nt, Homo sapiens
  misc_RNA (1)...(19): siRNA sense strand
ggcguugugugcugaagau

SEQ ID NO: 1708245 - RNA, 19 nt, Homo sapiens
  misc_RNA (1)...(19): siRNA sense strand
gcuggcugcugucuacaag

SEQ ID NO: 1708246 - RNA, 19 nt, Homo sapiens
  misc_RNA (1)...(19): siRNA sense strand
ugaguccacugggagcauu

SEQ ID NO: 1708247 - RNA, 19 nt, Homo sapiens
  misc_RNA (1)...(19): siRNA sense strand
ccgagaacaccgaggagaa

SEQ ID NO: 1708248 - RNA, 19 nt, Homo sapiens
  misc_RNA (1)...(19): siRNA sense strand
gaggaggaggcguccauca

SEQ ID NO: 1708249 - RNA, 19 nt, Homo sapiens
  misc_RNA (1)...(19): siRNA sense strand
cccaaguuaucaaauccaa

SEQ ID NO: 1708250 - RNA, 19 nt, Homo sapiens
  misc_RNA (1)...(19): siRNA sense strand
cauggaaaaugccaauguu

SEQ ID NO: 1708251 - RNA, 19 nt, Homo sapiens
  misc_RNA (1)...(19): siRNA sense strand
ucacugggaucaccuuccu

SEQ ID NO: 1708252 - RNA, 19 nt, Homo sapiens
  misc_RNA (1)...(19): siRNA sense strand
gggcaucaagguagacaag

SEQ ID NO: 1708253 - RNA, 19 nt, Homo sapiens
  misc_RNA (1)...(19): siRNA sense strand
gguuggaugggcugucuga

SEQ ID NO: 1708254 - RNA, 19 nt, Homo sapiens
  misc_RNA (1)...(19): siRNA sense strand
ggaaggaaauucucacaga

SEQ ID NO: 1708255 - RNA, 19 nt, Homo sapiens
  misc_RNA (1)...(19): siRNA sense strand
gcacugccaugcuguauga

SEQ ID NO: 1708256 - RNA, 19 nt, Homo sapiens
  misc_RNA (1)...(19): siRNA sense strand
ggaccaggauucacaguau

SEQ ID NO: 1708257 - RNA, 19 nt, Homo sapiens
  misc_RNA (1)...(19): siRNA sense strand
gaaggaaauucucacagau

SEQ ID NO: 1708258 - RNA, 19 nt, Homo sapiens
  misc_RNA (1)...(19): siRNA sense strand
guagaugucuccaaaggau

SEQ ID NO: 1708259 - RNA, 19 nt, Homo sapiens
  misc_RNA (1)...(19): siRNA sense strand
gaucuugccucacugaaag

SEQ ID NO: 1708260 - RNA, 19 nt, Homo sapiens
  misc_RNA (1)...(19): siRNA sense strand
ccagaaagcuaugcuagau

SEQ ID NO: 1708261 - RNA, 19 nt, Homo sapiens
  misc_RNA (1)...(19): siRNA sense strand
ggucaaaucagcaaagguu

SEQ ID NO: 1708262 - RNA, 19 nt, Homo sapiens
  misc_RNA (1)...(19): siRNA sense strand
cagcaaagguugggcgaaa

SEQ ID NO: 1708263 - RNA, 19 nt, Homo sapiens
  misc_RNA (1)...(19): siRNA sense strand
aggaaauucucacagauaa

SEQ ID NO: 1708264 - RNA, 19 nt, Homo sapiens
  misc_RNA (1)...(19): siRNA sense strand
cgaaaccgauacuucauca

SEQ ID NO: 1708265 - RNA, 19 nt, Homo sapiens
  misc_RNA (1)...(19): siRNA sense strand
gagcgaaaccgauacuuca

SEQ ID NO: 1708266 - RNA, 19 nt, Homo sapiens
  misc_RNA (1)...(19): siRNA sense strand
gauaacaacaucccucaug

SEQ ID NO: 1708267 - RNA, 19 nt, Homo sapiens
  misc_RNA (1)...(19): siRNA sense strand
gaaauucucacagauaaca

SEQ ID NO: 1708268 - RNA, 19 nt, Homo sapiens
  misc_RNA (1)...(19): siRNA sense strand
gaacuacaggugauuaaag

SEQ ID NO: 1708269 - RNA, 19 nt, Homo sapiens
  misc_RNA (1)...(19): siRNA sense strand
uaaaggaaauggcagaacu

SEQ ID NO: 1708270 - RNA, 19 nt, Homo sapiens
  misc_RNA (1)...(19): siRNA sense strand
ccucugaaguugaaguauu

SEQ ID NO: 1708271 - RNA, 19 nt, Homo sapiens
  misc_RNA (1)...(19): siRNA sense strand
gcagcaugcuacaaccaaa

SEQ ID NO: 1708272 - RNA, 19 nt, Homo sapiens
  misc_RNA (1)...(19): siRNA sense strand
gaacggaggcacccaaagg

SEQ ID NO: 1708273 - RNA, 19 nt, Homo sapiens
  misc_RNA (1)...(19): siRNA sense strand
gaugaacuacaggugauua

SEQ ID NO: 1708274 - RNA, 19 nt, Homo sapiens
  misc_RNA (1)...(19): siRNA sense strand
gcagagagccccucgugua

SEQ ID NO: 1708275 - RNA, 19 nt, Homo sapiens
  misc_RNA (1)...(19): siRNA sense strand
ugagucagcuguagauguc

SEQ ID NO: 1708276 - RNA, 19 nt, Homo sapiens
  misc_RNA (1)...(19): siRNA sense strand
acagaucucuauccgaaau

SEQ ID NO: 1708277 - RNA, 19 nt, Homo sapiens
  misc_RNA (1)...(19): siRNA sense strand
ggagaucuacaucacuuug

SEQ ID NO: 1708278 - RNA, 19 nt, Homo sapiens
  misc_RNA (1)...(19): siRNA sense strand
cccgaggacuuucagauga

SEQ ID NO: 1708279 - RNA, 19 nt, Homo sapiens
  misc_RNA (1)...(19): siRNA sense strand
gaccaggauucacaguaug

SEQ ID NO: 1708280 - RNA, 19 nt, Homo sapiens
  misc_RNA (1)...(19): siRNA sense strand
ucaucugccucuaugguuu

SEQ ID NO: 1708281 - RNA, 19 nt, Homo sapiens
  misc_RNA (1)...(19): siRNA sense strand
aaggaaauucucacagaua

SEQ ID NO: 1708282 - RNA, 19 nt, Homo sapiens
  misc_RNA (1)...(19): siRNA sense strand
gaagguccuccacaagaga

SEQ ID NO: 1708283 - RNA, 19 nt, Homo sapiens
  misc_RNA (1)...(19): siRNA sense strand
gcgaaacccagaaagcuau

SEQ ID NO: 1708284 - RNA, 19 nt, Homo sapiens
  misc_RNA (1)...(19): siRNA sense strand
ggaaauggcagaacuucac

SEQ ID NO: 1708285 - RNA, 19 nt, Homo sapiens
  misc_RNA (1)...(19): siRNA sense strand
ggacacccgguucuuccua

SEQ ID NO: 1708286 - RNA, 19 nt, Homo sapiens
  misc_RNA (1)...(19): siRNA sense strand
gagagccccucguguauga

SEQ ID NO: 1708287 - RNA, 19 nt, Homo sapiens
  misc_RNA (1)...(19): siRNA sense strand
uagaugaacuacaggugau

SEQ ID NO: 1708288 - RNA, 19 nt, Homo sapiens
  misc_RNA (1)...(19): siRNA sense strand
ugggagaucuacaucacuu

SEQ ID NO: 1708289 - RNA, 19 nt, Homo sapiens
  misc_RNA (1)...(19): siRNA sense strand
ucucacagauaacaacauc

SEQ ID NO: 1708290 - RNA, 19 nt, Homo sapiens
  misc_RNA (1)...(19): siRNA sense strand
gaacuucaccaugggagau

SEQ ID NO: 1708291 - RNA, 19 nt, Homo sapiens
  misc_RNA (1)...(19): siRNA sense strand
uacaggugauuaaaggaaa

SEQ ID NO: 1708292 - RNA, 19 nt, Homo sapiens
  misc_RNA (1)...(19): siRNA sense strand
ggcgaaacccagaaagcua

SEQ ID NO: 1708293 - RNA, 19 nt, Homo sapiens
  misc_RNA (1)...(19): siRNA sense strand
uguaugaucuugccucacu

SEQ ID NO: 1708294 - RNA, 19 nt, Homo sapiens
  misc_RNA (1)...(19): siRNA sense strand
ggugugcaguguccagugu

SEQ ID NO: 1708295 - RNA, 19 nt, Homo sapiens
  misc_RNA (1)...(19): siRNA sense strand
ugagaaagggaaggaaauu

SEQ ID NO: 1708296 - RNA, 19 nt, Homo sapiens
  misc_RNA (1)...(19): siRNA sense strand
gcaggacucgggacugugu

SEQ ID NO: 1708297 - RNA, 19 nt, Homo sapiens
  misc_RNA (1)...(19): siRNA sense strand
ugaagguccuccacaagag

SEQ ID NO: 1708298 - RNA, 19 nt, Homo sapiens
  misc_RNA (1)...(19): siRNA sense strand
gggaaucauugaccuugag

SEQ ID NO: 1708299 - RNA, 19 nt, Homo sapiens
  misc_RNA (1)...(19): siRNA sense strand
gagaaagggaaggaaauuc

SEQ ID NO: 1708300 - RNA, 19 nt, Homo sapiens
  misc_RNA (1)...(19): siRNA sense strand
gaaagggaaggaaauucuc

SEQ ID NO: 1708301 - RNA, 19 nt, Homo sapiens
  misc_RNA (1)...(19): siRNA sense strand
gaacggcagcaugcuacaa

SEQ ID NO: 1708302 - RNA, 19 nt, Homo sapiens
  misc_RNA (1)...(19): siRNA sense strand
cuacaggugauuaaaggaa

SEQ ID NO: 1708303 - RNA, 19 nt, Homo sapiens
  misc_RNA (1)...(19): siRNA sense strand
cccaugaggugccacagau

SEQ ID NO: 1708304 - RNA, 19 nt, Homo sapiens
  misc_RNA (1)...(19): siRNA sense strand
ccucauggccaguguguca

SEQ ID NO: 1708305 - RNA, 19 nt, Homo sapiens
  misc_RNA (1)...(19): siRNA sense strand
cagcacccuugcagcagaa

SEQ ID NO: 1708306 - RNA, 19 nt, Homo sapiens
  misc_RNA (1)...(19): siRNA sense strand
gcugggagcgcucuaaagg

SEQ ID NO: 1708307 - RNA, 19 nt, Homo sapiens
  misc_RNA (1)...(19): siRNA sense strand
cccugggccuggaaucuaa

SEQ ID NO: 1708308 - RNA, 19 nt, Homo sapiens
  misc_RNA (1)...(19): siRNA sense strand
cucugaaguugaaguauug

SEQ ID NO: 1708309 - RNA, 19 nt, Homo sapiens
  misc_RNA (1)...(19): siRNA sense strand
cagaggaccaggauucaca

SEQ ID NO: 1708310 - RNA, 19 nt, Homo sapiens
  misc_RNA (1)...(19): siRNA sense strand
ugugucaucugccucuaug

SEQ ID NO: 1708311 - RNA, 19 nt, Homo sapiens
  misc_RNA (1)...(19): siRNA sense strand
ucuaugguuuccaggagaa

SEQ ID NO: 1708312 - RNA, 19 nt, Homo sapiens
  misc_RNA (1)...(19): siRNA sense strand
gcgaaaccgauacuucauc

SEQ ID NO: 1708313 - RNA, 19 nt, Homo sapiens
  misc_RNA (1)...(19): siRNA sense strand
aggcugagcgaaaccgaua

SEQ ID NO: 1708314 - RNA, 19 nt, Homo sapiens
  misc_RNA (1)...(19): siRNA sense strand
caugggagaucuacaucac

SEQ ID NO: 1708315 - RNA, 19 nt, Homo sapiens
  misc_RNA (1)...(19): siRNA sense strand
ggcagucggugugcagugu

SEQ ID NO: 1708316 - RNA, 19 nt, Homo sapiens
  misc_RNA (1)...(19): siRNA sense strand
gcuucacucuggugcuuca

SEQ ID NO: 1708317 - RNA, 19 nt, Homo sapiens
  misc_RNA (1)...(19): siRNA sense strand
cuaucuagaugaacuacag

SEQ ID NO: 1708318 - RNA, 19 nt, Homo sapiens
  misc_RNA (1)...(19): siRNA sense strand
ucaggucccagcagaguau

SEQ ID NO: 1708319 - RNA, 19 nt, Homo sapiens
  misc_RNA (1)...(19): siRNA sense strand
caggaacggcagcaugcua

SEQ ID NO: 1708320 - RNA, 19 nt, Homo sapiens
  misc_RNA (1)...(19): siRNA sense strand
augaacagauccacacgau

SEQ ID NO: 1708321 - RNA, 19 nt, Homo sapiens
  misc_RNA (1)...(19): siRNA sense strand
ugaacuacaggugauuaaa

SEQ ID NO: 1708322 - RNA, 19 nt, Homo sapiens
  misc_RNA (1)...(19): siRNA sense strand
cgaaauccccgaggacuuu

SEQ ID NO: 1708323 - RNA, 19 nt, Homo sapiens
  misc_RNA (1)...(19): siRNA sense strand
caaggagcccauggaccua

SEQ ID NO: 1708324 - RNA, 19 nt, Homo sapiens
  misc_RNA (1)...(19): siRNA sense strand
ugagcgaaaccgauacuuc

SEQ ID NO: 1708325 - RNA, 19 nt, Homo sapiens
  misc_RNA (1)...(19): siRNA sense strand
aaaggaaauggcagaacuu

SEQ ID NO: 1708326 - RNA, 19 nt, Homo sapiens
  misc_RNA (1)...(19): siRNA sense strand
aaagggaaggaaauucuca

SEQ ID NO: 1708327 - RNA, 19 nt, Homo sapiens
  misc_RNA (1)...(19): siRNA sense strand
uugaagguccuccacaaga

SEQ ID NO: 1708328 - RNA, 19 nt, Homo sapiens
  misc_RNA (1)...(19): siRNA sense strand
acaggugauuaaaggaaau

SEQ ID NO: 1708329 - RNA, 19 nt, Homo sapiens
  misc_RNA (1)...(19): siRNA sense strand
cuacaucacuuugcauccu

SEQ ID NO: 1708330 - RNA, 19 nt, Homo sapiens
  misc_RNA (1)...(19): siRNA sense strand
gggagaucuacaucacuuu

SEQ ID NO: 1708331 - RNA, 19 nt, Homo sapiens
  misc_RNA (1)...(19): siRNA sense strand
aguugaagguccuccacaa

SEQ ID NO: 1708332 - RNA, 19 nt, Homo sapiens
  misc_RNA (1)...(19): siRNA sense strand
cugcagaggaccaggauuc

SEQ ID NO: 1708333 - RNA, 19 nt, Homo sapiens
  misc_RNA (1)...(19): siRNA sense strand
agcuguagaugucuccaaa

SEQ ID NO: 1708334 - RNA, 19 nt, Homo sapiens
  misc_RNA (1)...(19): siRNA sense strand
gauacuucaucagccuuca

SEQ ID NO: 1708335 - RNA, 19 nt, Homo sapiens
  misc_RNA (1)...(19): siRNA sense strand
ugaucuugccucacugaaa

SEQ ID NO: 1708336 - RNA, 19 nt, Homo sapiens
  misc_RNA (1)...(19): siRNA sense strand
agaaugaccuggaugaguu

SEQ ID NO: 1708337 - RNA, 19 nt, Homo sapiens
  misc_RNA (1)...(19): siRNA sense strand
cuacguagcugaugagaca

SEQ ID NO: 1708338 - RNA, 19 nt, Homo sapiens
  misc_RNA (1)...(19): siRNA sense strand
gaccagcaaugccuacgua

SEQ ID NO: 1708339 - RNA, 19 nt, Homo sapiens
  misc_RNA (1)...(19): siRNA sense strand
ccgcagauaucccugauga

SEQ ID NO: 1708340 - RNA, 19 nt, Homo sapiens
  misc_RNA (1)...(19): siRNA sense strand
gcagauaucccugaugaug

SEQ ID NO: 1708341 - RNA, 19 nt, Homo sapiens
  misc_RNA (1)...(19): siRNA sense strand
acaacacgcuggccaagau

SEQ ID NO: 1708342 - RNA, 19 nt, Homo sapiens
  misc_RNA (1)...(19): siRNA sense strand
agacuacuccuacacauga

SEQ ID NO: 1708343 - RNA, 19 nt, Homo sapiens
  misc_RNA (1)...(19): siRNA sense strand
ggacauuaccagcgagaug

SEQ ID NO: 1708344 - RNA, 19 nt, Homo sapiens
  misc_RNA (1)...(19): siRNA sense strand
gcaucccgcugcuggagaa

SEQ ID NO: 1708345 - RNA, 19 nt, Homo sapiens
  misc_RNA (1)...(19): siRNA sense strand
gacaacggcuucaucuacu

SEQ ID NO: 1708346 - RNA, 19 nt, Homo sapiens
  misc_RNA (1)...(19): siRNA sense strand
cgacaacggcuucaucuac

SEQ ID NO: 1708347 - RNA, 19 nt, Homo sapiens
  misc_RNA (1)...(19): siRNA sense strand
ggcaguggcucuggucuuc

SEQ ID NO: 1708348 - RNA, 19 nt, Homo sapiens
  misc_RNA (1)...(19): siRNA sense strand
gacauagacuacuccuaca

SEQ ID NO: 1708349 - RNA, 19 nt, Homo sapiens
  misc_RNA (1)...(19): siRNA sense strand
ucaucuaccuauacgagaa

SEQ ID NO: 1708350 - RNA, 19 nt, Homo sapiens
  misc_RNA (1)...(19): siRNA sense strand
ccaccuacaucaucugcau

SEQ ID NO: 1708351 - RNA, 19 nt, Homo sapiens
  misc_RNA (1)...(19): siRNA sense strand
agagacagccgacagcuau

SEQ ID NO: 1708352 - RNA, 19 nt, Homo sapiens
  misc_RNA (1)...(19): siRNA sense strand
ggaccaagaaggauaacuc

SEQ ID NO: 1708353 - RNA, 19 nt, Homo sapiens
  misc_RNA (1)...(19): siRNA sense strand
cccaggaccucaagaccaa

SEQ ID NO: 1708354 - RNA, 19 nt, Homo sapiens
  misc_RNA (1)...(19): siRNA sense strand
gagaaugaccuggaugagu

SEQ ID NO: 1708355 - RNA, 19 nt, Homo sapiens
  misc_RNA (1)...(19): siRNA sense strand
gaacaaccagaucaacaac

SEQ ID NO: 1708356 - RNA, 19 nt, Homo sapiens
  misc_RNA (1)...(19): siRNA sense strand
ccaagacccuggccaucca

SEQ ID NO: 1708357 - RNA, 19 nt, Homo sapiens
  misc_RNA (1)...(19): siRNA sense strand
ggaaccaccugagcagcau

SEQ ID NO: 1708358 - RNA, 19 nt, Homo sapiens
  misc_RNA (1)...(19): siRNA sense strand
ucagggaccaagaaggaua

SEQ ID NO: 1708359 - RNA, 19 nt, Homo sapiens
  misc_RNA (1)...(19): siRNA sense strand
gcauggccaucaaggacau

SEQ ID NO: 1708360 - RNA, 19 nt, Homo sapiens
  misc_RNA (1)...(19): siRNA sense strand
ccaagaaggauaacuccau

SEQ ID NO: 1708361 - RNA, 19 nt, Homo sapiens
  misc_RNA (1)...(19): siRNA sense strand
agaacaaccagaucaacaa

SEQ ID NO: 1708362 - RNA, 19 nt, Homo sapiens
  misc_RNA (1)...(19): siRNA sense strand
gcgagauggacgaguguuu

SEQ ID NO: 1708363 - RNA, 19 nt, Homo sapiens
  misc_RNA (1)...(19): siRNA sense strand
gccuggugcuggacgguaa

SEQ ID NO: 1708364 - RNA, 19 nt, Homo sapiens
  misc_RNA (1)...(19): siRNA sense strand
cagaacaaccagaucaaca

SEQ ID NO: 1708365 - RNA, 19 nt, Homo sapiens
  misc_RNA (1)...(19): siRNA sense strand
caaguccaccuacaucauc

SEQ ID NO: 1708366 - RNA, 19 nt, Homo sapiens
  misc_RNA (1)...(19): siRNA sense strand
gagcccaaguccaccuaca

SEQ ID NO: 1708367 - RNA, 19 nt, Homo sapiens
  misc_RNA (1)...(19): siRNA sense strand
gcaccugcaggacaacaau

SEQ ID NO: 1708368 - RNA, 19 nt, Homo sapiens
  misc_RNA (1)...(19): siRNA sense strand
guaaccugcuggccaacca

SEQ ID NO: 1708369 - RNA, 19 nt, Homo sapiens
  misc_RNA (1)...(19): siRNA sense strand
gcgacaacggcuucaucua

SEQ ID NO: 1708370 - RNA, 19 nt, Homo sapiens
  misc_RNA (1)...(19): siRNA sense strand
caaggccacacacaccauu

SEQ ID NO: 1708371 - RNA, 19 nt, Homo sapiens
  misc_RNA (1)...(19): siRNA sense strand
auacgagaaugaccuggau

SEQ ID NO: 1708372 - RNA, 19 nt, Homo sapiens
  misc_RNA (1)...(19): siRNA sense strand
cagagacagccgacagcua

SEQ ID NO: 1708373 - RNA, 19 nt, Homo sapiens
  misc_RNA (1)...(19): siRNA sense strand
gcagacuccauccgcauca

SEQ ID NO: 1708374 - RNA, 19 nt, Homo sapiens
  misc_RNA (1)...(19): siRNA sense strand
gaaugaccuggaugaguuc

SEQ ID NO: 1708375 - RNA, 19 nt, Homo sapiens
  misc_RNA (1)...(19): siRNA sense strand
caacgugcaggucaucuac

SEQ ID NO: 1708376 - RNA, 19 nt, Homo sapiens
  misc_RNA (1)...(19): siRNA sense strand
cagggaccaagaaggauaa

SEQ ID NO: 1708377 - RNA, 19 nt, Homo sapiens
  misc_RNA (1)...(19): siRNA sense strand
ucaacgugcaggucaucua

SEQ ID NO: 1708378 - RNA, 19 nt, Homo sapiens
  misc_RNA (1)...(19): siRNA sense strand
cauagacuacuccuacaca

SEQ ID NO: 1708379 - RNA, 19 nt, Homo sapiens
  misc_RNA (1)...(19): siRNA sense strand
ccaagaccacggccagcaa

SEQ ID NO: 1708380 - RNA, 19 nt, Homo sapiens
  misc_RNA (1)...(19): siRNA sense strand
gcagaacaaccagaucaac

SEQ ID NO: 1708381 - RNA, 19 nt, Homo sapiens
  misc_RNA (1)...(19): siRNA sense strand
agucagggaccaagaagga

SEQ ID NO: 1708382 - RNA, 19 nt, Homo sapiens
  misc_RNA (1)...(19): siRNA sense strand
cagcaaugccuacguagcu

SEQ ID NO: 1708383 - RNA, 19 nt, Homo sapiens
  misc_RNA (1)...(19): siRNA sense strand
cgccuucgccgacagcaaa

SEQ ID NO: 1708384 - RNA, 19 nt, Homo sapiens
  misc_RNA (1)...(19): siRNA sense strand
gagcugcggcuggaugaca

SEQ ID NO: 1708385 - RNA, 19 nt, Homo sapiens
  misc_RNA (1)...(19): siRNA sense strand
gcccaaguccaccuacauc

SEQ ID NO: 1708386 - RNA, 19 nt, Homo sapiens
  misc_RNA (1)...(19): siRNA sense strand
ccaaugcggcugccaagac

SEQ ID NO: 1708387 - RNA, 19 nt, Homo sapiens
  misc_RNA (1)...(19): siRNA sense strand
caacacgcuggccaagaug

SEQ ID NO: 1708388 - RNA, 19 nt, Homo sapiens
  misc_RNA (1)...(19): siRNA sense strand
gcgcaucucugaauuacaa

SEQ ID NO: 1708389 - RNA, 19 nt, Homo sapiens
  misc_RNA (1)...(19): siRNA sense strand
gaagacaccugcaaaacua

SEQ ID NO: 1708390 - RNA, 19 nt, Homo sapiens
  misc_RNA (1)...(19): siRNA sense strand
gaaaugugccagugauauu

SEQ ID NO: 1708391 - RNA, 19 nt, Homo sapiens
  misc_RNA (1)...(19): siRNA sense strand
gcuuagagauguucacgaa

SEQ ID NO: 1708392 - RNA, 19 nt, Homo sapiens
  misc_RNA (1)...(19): siRNA sense strand
caacucaucugucccaucu

SEQ ID NO: 1708393 - RNA, 19 nt, Homo sapiens
  misc_RNA (1)...(19): siRNA sense strand
uauauggacuucagaggaa

SEQ ID NO: 1708394 - RNA, 19 nt, Homo sapiens
  misc_RNA (1)...(19): siRNA sense strand
gcagaccauggauaacuua

SEQ ID NO: 1708395 - RNA, 19 nt, Homo sapiens
  misc_RNA (1)...(19): siRNA sense strand
guacccaccugcucucugu

SEQ ID NO: 1708396 - RNA, 19 nt, Homo sapiens
  misc_RNA (1)...(19): siRNA sense strand
ggaaaugugccagugauau

SEQ ID NO: 1708397 - RNA, 19 nt, Homo sapiens
  misc_RNA (1)...(19): siRNA sense strand
gaccauggauaacuuagag

SEQ ID NO: 1708398 - RNA, 19 nt, Homo sapiens
  misc_RNA (1)...(19): siRNA sense strand
gagcagcagaccauggaua

SEQ ID NO: 1708399 - RNA, 19 nt, Homo sapiens
  misc_RNA (1)...(19): siRNA sense strand
gaagaggagcgcaucaaca

SEQ ID NO: 1708400 - RNA, 19 nt, Homo sapiens
  misc_RNA (1)...(19): siRNA sense strand
cacgaaaccuguggugauu

SEQ ID NO: 1708401 - RNA, 19 nt, Homo sapiens
  misc_RNA (1)...(19): siRNA sense strand
gagcgcaucucugaauuac

SEQ ID NO: 1708402 - RNA, 19 nt, Homo sapiens
  misc_RNA (1)...(19): siRNA sense strand
ccaaagagcagcagaccau

SEQ ID NO: 1708403 - RNA, 19 nt, Homo sapiens
  misc_RNA (1)...(19): siRNA sense strand
gcaucaacaucuacugucu

SEQ ID NO: 1708404 - RNA, 19 nt, Homo sapiens
  misc_RNA (1)...(19): siRNA sense strand
cgaaaccuguggugauucu

SEQ ID NO: 1708405 - RNA, 19 nt, Homo sapiens
  misc_RNA (1)...(19): siRNA sense strand
ggauagacaugggguauau

SEQ ID NO: 1708406 - RNA, 19 nt, Homo sapiens
  misc_RNA (1)...(19): siRNA sense strand
caacaucuacugucugaac

SEQ ID NO: 1708407 - RNA, 19 nt, Homo sapiens
  misc_RNA (1)...(19): siRNA sense strand
ucauugacaucuacaagca

SEQ ID NO: 1708408 - RNA, 19 nt, Homo sapiens
  misc_RNA (1)...(19): siRNA sense strand
gaggagcgcaucaacaucu

SEQ ID NO: 1708409 - RNA, 19 nt, Homo sapiens
  misc_RNA (1)...(19): siRNA sense strand
uuagagauguucacgaaac

SEQ ID NO: 1708410 - RNA, 19 nt, Homo sapiens
  misc_RNA (1)...(19): siRNA sense strand
caaccuguguaggaaaugu

SEQ ID NO: 1708411 - RNA, 19 nt, Homo sapiens
  misc_RNA (1)...(19): siRNA sense strand
uaggaaaugugccagugau

SEQ ID NO: 1708412 - RNA, 19 nt, Homo sapiens
  misc_RNA (1)...(19): siRNA sense strand
caucugucccaucugcuua

SEQ ID NO: 1708413 - RNA, 19 nt, Homo sapiens
  misc_RNA (1)...(19): siRNA sense strand
guaggaaaugugccaguga

SEQ ID NO: 1708414 - RNA, 19 nt, Homo sapiens
  misc_RNA (1)...(19): siRNA sense strand
ugucccaucugcuuagaga

SEQ ID NO: 1708415 - RNA, 19 nt, Homo sapiens
  misc_RNA (1)...(19): siRNA sense strand
gcuggaagacaccugcaaa

SEQ ID NO: 1708416 - RNA, 19 nt, Homo sapiens
  misc_RNA (1)...(19): siRNA sense strand
ggaaccugcugguggaaaa

SEQ ID NO: 1708417 - RNA, 19 nt, Homo sapiens
  misc_RNA (1)...(19): siRNA sense strand
gaucgaguccagggaguga

SEQ ID NO: 1708418 - RNA, 19 nt, Homo sapiens
  misc_RNA (1)...(19): siRNA sense strand
ccaggccucuaacccguau

SEQ ID NO: 1708419 - RNA, 19 nt, Homo sapiens
  misc_RNA (1)...(19): siRNA sense strand
cuguagacaugaagugguu

SEQ ID NO: 1708420 - RNA, 19 nt, Homo sapiens
  misc_RNA (1)...(19): siRNA sense strand
gcgcaucaacaucuacugu

SEQ ID NO: 1708421 - RNA, 19 nt, Homo sapiens
  misc_RNA (1)...(19): siRNA sense strand
gacaugaagugguuuugga

SEQ ID NO: 1708422 - RNA, 19 nt, Homo sapiens
  misc_RNA (1)...(19): siRNA sense strand
ugucugaacugcgaaguac

SEQ ID NO: 1708423 - RNA, 19 nt, Homo sapiens
  misc_RNA (1)...(19): siRNA sense strand
ccauggauaacuuagagaa

SEQ ID NO: 1708424 - RNA, 19 nt, Homo sapiens
  misc_RNA (1)...(19): siRNA sense strand
aucaacaucuacugucuga

SEQ ID NO: 1708425 - RNA, 19 nt, Homo sapiens
  misc_RNA (1)...(19): siRNA sense strand
aagaggagcgcaucaacau

SEQ ID NO: 1708426 - RNA, 19 nt, Homo sapiens
  misc_RNA (1)...(19): siRNA sense strand
uggauaacuuagagaagca

SEQ ID NO: 1708427 - RNA, 19 nt, Homo sapiens
  misc_RNA (1)...(19): siRNA sense strand
ggaagacaccugcaaaacu

SEQ ID NO: 1708428 - RNA, 19 nt, Homo sapiens
  misc_RNA (1)...(19): siRNA sense strand
uagagaagcaacucaucug

SEQ ID NO: 1708429 - RNA, 19 nt, Homo sapiens
  misc_RNA (1)...(19): siRNA sense strand
cagcagaccauggauaacu

SEQ ID NO: 1708430 - RNA, 19 nt, Homo sapiens
  misc_RNA (1)...(19): siRNA sense strand
gcgcaucucugaauuacaa

SEQ ID NO: 1708431 - RNA, 19 nt, Homo sapiens
  misc_RNA (1)...(19): siRNA sense strand
gaagacaccugcaaaacua

SEQ ID NO: 1708432 - RNA, 19 nt, Homo sapiens
  misc_RNA (1)...(19): siRNA sense strand
gaaaugugccagugauauu

SEQ ID NO: 1708433 - RNA, 19 nt, Homo sapiens
  misc_RNA (1)...(19): siRNA sense strand
gcuuagagauguucacgaa

SEQ ID NO: 1708434 - RNA, 19 nt, Homo sapiens
  misc_RNA (1)...(19): siRNA sense strand
caacucaucugucccaucu

SEQ ID NO: 1708435 - RNA, 19 nt, Homo sapiens
  misc_RNA (1)...(19): siRNA sense strand
uauauggacuucagaggaa

SEQ ID NO: 1708436 - RNA, 19 nt, Homo sapiens
  misc_RNA (1)...(19): siRNA sense strand
gcagaccauggauaacuua

SEQ ID NO: 1708437 - RNA, 19 nt, Homo sapiens
  misc_RNA (1)...(19): siRNA sense strand
guacccaccugcucucugu

SEQ ID NO: 1708438 - RNA, 19 nt, Homo sapiens
  misc_RNA (1)...(19): siRNA sense strand
ggaaaugugccagugauau

SEQ ID NO: 1708439 - RNA, 19 nt, Homo sapiens
  misc_RNA (1)...(19): siRNA sense strand
gaccauggauaacuuagag

SEQ ID NO: 1708440 - RNA, 19 nt, Homo sapiens
  misc_RNA (1)...(19): siRNA sense strand
gagcagcagaccauggaua

SEQ ID NO: 1708441 - RNA, 19 nt, Homo sapiens
  misc_RNA (1)...(19): siRNA sense strand
gcaguggagcugauucuga

SEQ ID NO: 1708442 - RNA, 19 nt, Homo sapiens
  misc_RNA (1)...(19): siRNA sense strand
gaagaggagcgcaucaaca

SEQ ID NO: 1708443 - RNA, 19 nt, Homo sapiens
  misc_RNA (1)...(19): siRNA sense strand
cacgaaaccuguggugauu

SEQ ID NO: 1708444 - RNA, 19 nt, Homo sapiens
  misc_RNA (1)...(19): siRNA sense strand
gagcgcaucucugaauuac

SEQ ID NO: 1708445 - RNA, 19 nt, Homo sapiens
  misc_RNA (1)...(19): siRNA sense strand
ccaaagagcagcagaccau

SEQ ID NO: 1708446 - RNA, 19 nt, Homo sapiens
  misc_RNA (1)...(19): siRNA sense strand
ugaacucccuaaaugaaug

SEQ ID NO: 1708447 - RNA, 19 nt, Homo sapiens
  misc_RNA (1)...(19): siRNA sense strand
gcaucaacaucuacugucu

SEQ ID NO: 1708448 - RNA, 19 nt, Homo sapiens
  misc_RNA (1)...(19): siRNA sense strand
ugguugaacucccuaaaug

SEQ ID NO: 1708449 - RNA, 19 nt, Homo sapiens
  misc_RNA (1)...(19): siRNA sense strand
gaacucccuaaaugaauga

SEQ ID NO: 1708450 - RNA, 19 nt, Homo sapiens
  misc_RNA (1)...(19): siRNA sense strand
cgaaaccuguggugauucu

SEQ ID NO: 1708451 - RNA, 19 nt, Homo sapiens
  misc_RNA (1)...(19): siRNA sense strand
guugaacucccuaaaugaa

SEQ ID NO: 1708452 - RNA, 19 nt, Homo sapiens
  misc_RNA (1)...(19): siRNA sense strand
ggauagacaugggguauau

SEQ ID NO: 1708453 - RNA, 19 nt, Homo sapiens
  misc_RNA (1)...(19): siRNA sense strand
caacaucuacugucugaac

SEQ ID NO: 1708454 - RNA, 19 nt, Homo sapiens
  misc_RNA (1)...(19): siRNA sense strand
ucauugacaucuacaagca

SEQ ID NO: 1708455 - RNA, 19 nt, Homo sapiens
  misc_RNA (1)...(19): siRNA sense strand
gaggagcgcaucaacaucu

SEQ ID NO: 1708456 - RNA, 19 nt, Homo sapiens
  misc_RNA (1)...(19): siRNA sense strand
uuagagauguucacgaaac

SEQ ID NO: 1708457 - RNA, 19 nt, Homo sapiens
  misc_RNA (1)...(19): siRNA sense strand
caaccuguguaggaaaugu

SEQ ID NO: 1708458 - RNA, 19 nt, Homo sapiens
  misc_RNA (1)...(19): siRNA sense strand
cgccauaucuucuccuuuu

SEQ ID NO: 1708459 - RNA, 19 nt, Homo sapiens
  misc_RNA (1)...(19): siRNA sense strand
uaggaaaugugccagugau

SEQ ID NO: 1708460 - RNA, 19 nt, Homo sapiens
  misc_RNA (1)...(19): siRNA sense strand
caucugucccaucugcuua

SEQ ID NO: 1708461 - RNA, 19 nt, Homo sapiens
  misc_RNA (1)...(19): siRNA sense strand
gguugaacucccuaaauga

SEQ ID NO: 1708462 - RNA, 19 nt, Homo sapiens
  misc_RNA (1)...(19): siRNA sense strand
guaggaaaugugccaguga

SEQ ID NO: 1708463 - RNA, 19 nt, Homo sapiens
  misc_RNA (1)...(19): siRNA sense strand
ugucccaucugcuuagaga

SEQ ID NO: 1708464 - RNA, 19 nt, Homo sapiens
  misc_RNA (1)...(19): siRNA sense strand
gcuggaagacaccugcaaa

SEQ ID NO: 1708465 - RNA, 19 nt, Homo sapiens
  misc_RNA (1)...(19): siRNA sense strand
ggaaccugcugguggaaaa

SEQ ID NO: 1708466 - RNA, 19 nt, Homo sapiens
  misc_RNA (1)...(19): siRNA sense strand
gaucgaguccagggaguga

SEQ ID NO: 1708467 - RNA, 19 nt, Homo sapiens
  misc_RNA (1)...(19): siRNA sense strand
ccaggccucuaacccguau

SEQ ID NO: 1708468 - RNA, 19 nt, Homo sapiens
  misc_RNA (1)...(19): siRNA sense strand
cuguagacaugaagugguu

SEQ ID NO: 1708469 - RNA, 19 nt, Homo sapiens
  misc_RNA (1)...(19): siRNA sense strand
gcgcaucaacaucuacugu

SEQ ID NO: 1708470 - RNA, 19 nt, Homo sapiens
  misc_RNA (1)...(19): siRNA sense strand
gacaugaagugguuuugga

SEQ ID NO: 1708471 - RNA, 19 nt, Homo sapiens
  misc_RNA (1)...(19): siRNA sense strand
ugucugaacugcgaaguac

SEQ ID NO: 1708472 - RNA, 19 nt, Homo sapiens
  misc_RNA (1)...(19): siRNA sense strand
aucaacaucuacugucuga

SEQ ID NO: 1708473 - RNA, 19 nt, Homo sapiens
  misc_RNA (1)...(19): siRNA sense strand
ccauggauaacuuagagaa

SEQ ID NO: 1708474 - RNA, 19 nt, Homo sapiens
  misc_RNA (1)...(19): siRNA sense strand
aagaggagcgcaucaacau

SEQ ID NO: 1708475 - RNA, 19 nt, Homo sapiens
  misc_RNA (1)...(19): siRNA sense strand
uagagaagcaacucaucug

SEQ ID NO: 1708476 - RNA, 19 nt, Homo sapiens
  misc_RNA (1)...(19): siRNA sense strand
uggauaacuuagagaagca

SEQ ID NO: 1708477 - RNA, 19 nt, Homo sapiens
  misc_RNA (1)...(19): siRNA sense strand
cagcagaccauggauaacu

SEQ ID NO: 1708478 - RNA, 19 nt, Homo sapiens
  misc_RNA (1)...(19): siRNA sense strand
gaguggcaguggagcugau

SEQ ID NO: 1708479 - RNA, 19 nt, Homo sapiens
  misc_RNA (1)...(19): siRNA sense strand
ggaagacaccugcaaaacu

SEQ ID NO: 1708480 - RNA, 19 nt, Homo sapiens
  misc_RNA (1)...(19): siRNA sense strand
gcgcaucucugaauuacaa

SEQ ID NO: 1708481 - RNA, 19 nt, Homo sapiens
  misc_RNA (1)...(19): siRNA sense strand
gaagacaccugcaaaacua

SEQ ID NO: 1708482 - RNA, 19 nt, Homo sapiens
  misc_RNA (1)...(19): siRNA sense strand
gaaaugugccagugauauu

SEQ ID NO: 1708483 - RNA, 19 nt, Homo sapiens
  misc_RNA (1)...(19): siRNA sense strand
gcuuagagauguucacgaa

SEQ ID NO: 1708484 - RNA, 19 nt, Homo sapiens
  misc_RNA (1)...(19): siRNA sense strand
caacucaucugucccaucu

SEQ ID NO: 1708485 - RNA, 19 nt, Homo sapiens
  misc_RNA (1)...(19): siRNA sense strand
uauauggacuucagaggaa

SEQ ID NO: 1708486 - RNA, 19 nt, Homo sapiens
  misc_RNA (1)...(19): siRNA sense strand
gcagaccauggauaacuua

SEQ ID NO: 1708487 - RNA, 19 nt, Homo sapiens
  misc_RNA (1)...(19): siRNA sense strand
guacccaccugcucucugu

SEQ ID NO: 1708488 - RNA, 19 nt, Homo sapiens
  misc_RNA (1)...(19): siRNA sense strand
ggaaaugugccagugauau

SEQ ID NO: 1708489 - RNA, 19 nt, Homo sapiens
  misc_RNA (1)...(19): siRNA sense strand
gaccauggauaacuuagag

SEQ ID NO: 1708490 - RNA, 19 nt, Homo sapiens
  misc_RNA (1)...(19): siRNA sense strand
gagcagcagaccauggaua

SEQ ID NO: 1708491 - RNA, 19 nt, Homo sapiens
  misc_RNA (1)...(19): siRNA sense strand
gcaguggagcugauucuga

SEQ ID NO: 1708492 - RNA, 19 nt, Homo sapiens
  misc_RNA (1)...(19): siRNA sense strand
gaagaggagcgcaucaaca

SEQ ID NO: 1708493 - RNA, 19 nt, Homo sapiens
  misc_RNA (1)...(19): siRNA sense strand
cacgaaaccuguggugauu

SEQ ID NO: 1708494 - RNA, 19 nt, Homo sapiens
  misc_RNA (1)...(19): siRNA sense strand
gagcgcaucucugaauuac

SEQ ID NO: 1708495 - RNA, 19 nt, Homo sapiens
  misc_RNA (1)...(19): siRNA sense strand
ccaaagagcagcagaccau

SEQ ID NO: 1708496 - RNA, 19 nt, Homo sapiens
  misc_RNA (1)...(19): siRNA sense strand
ugaacucccuaaaugaaug

SEQ ID NO: 1708497 - RNA, 19 nt, Homo sapiens
  misc_RNA (1)...(19): siRNA sense strand
gcaucaacaucuacugucu

SEQ ID NO: 1708498 - RNA, 19 nt, Homo sapiens
  misc_RNA (1)...(19): siRNA sense strand
ugguugaacucccuaaaug

SEQ ID NO: 1708499 - RNA, 19 nt, Homo sapiens
  misc_RNA (1)...(19): siRNA sense strand
gaacucccuaaaugaauga

SEQ ID NO: 1708500 - RNA, 19 nt, Homo sapiens
  misc_RNA (1)...(19): siRNA sense strand
cgaaaccuguggugauucu

SEQ ID NO: 1708501 - RNA, 19 nt, Homo sapiens
  misc_RNA (1)...(19): siRNA sense strand
guugaacucccuaaaugaa

SEQ ID NO: 1708502 - RNA, 19 nt, Homo sapiens
  misc_RNA (1)...(19): siRNA sense strand
ggauagacaugggguauau

SEQ ID NO: 1708503 - RNA, 19 nt, Homo sapiens
  misc_RNA (1)...(19): siRNA sense strand
caacaucuacugucugaac

SEQ ID NO: 1708504 - RNA, 19 nt, Homo sapiens
  misc_RNA (1)...(19): siRNA sense strand
ucauugacaucuacaagca

SEQ ID NO: 1708505 - RNA, 19 nt, Homo sapiens
  misc_RNA (1)...(19): siRNA sense strand
gaggagcgcaucaacaucu

SEQ ID NO: 1708506 - RNA, 19 nt, Homo sapiens
  misc_RNA (1)...(19): siRNA sense strand
uuagagauguucacgaaac

SEQ ID NO: 1708507 - RNA, 19 nt, Homo sapiens
  misc_RNA (1)...(19): siRNA sense strand
caaccuguguaggaaaugu

SEQ ID NO: 1708508 - RNA, 19 nt, Homo sapiens
  misc_RNA (1)...(19): siRNA sense strand
cgccauaucuucuccuuuu

SEQ ID NO: 1708509 - RNA, 19 nt, Homo sapiens
  misc_RNA (1)...(19): siRNA sense strand
uaggaaaugugccagugau

SEQ ID NO: 1708510 - RNA, 19 nt, Homo sapiens
  misc_RNA (1)...(19): siRNA sense strand
caucugucccaucugcuua

SEQ ID NO: 1708511 - RNA, 19 nt, Homo sapiens
  misc_RNA (1)...(19): siRNA sense strand
gguugaacucccuaaauga

SEQ ID NO: 1708512 - RNA, 19 nt, Homo sapiens
  misc_RNA (1)...(19): siRNA sense strand
guaggaaaugugccaguga

SEQ ID NO: 1708513 - RNA, 19 nt, Homo sapiens
  misc_RNA (1)...(19): siRNA sense strand
ugucccaucugcuuagaga

SEQ ID NO: 1708514 - RNA, 19 nt, Homo sapiens
  misc_RNA (1)...(19): siRNA sense strand
gcuggaagacaccugcaaa

SEQ ID NO: 1708515 - RNA, 19 nt, Homo sapiens
  misc_RNA (1)...(19): siRNA sense strand
ggaaccugcugguggaaaa

SEQ ID NO: 1708516 - RNA, 19 nt, Homo sapiens
  misc_RNA (1)...(19): siRNA sense strand
gaucgaguccagggaguga

SEQ ID NO: 1708517 - RNA, 19 nt, Homo sapiens
  misc_RNA (1)...(19): siRNA sense strand
ccaggccucuaacccguau

SEQ ID NO: 1708518 - RNA, 19 nt, Homo sapiens
  misc_RNA (1)...(19): siRNA sense strand
cuguagacaugaagugguu

SEQ ID NO: 1708519 - RNA, 19 nt, Homo sapiens
  misc_RNA (1)...(19): siRNA sense strand
gcgcaucaacaucuacugu

SEQ ID NO: 1708520 - RNA, 19 nt, Homo sapiens
  misc_RNA (1)...(19): siRNA sense strand
gacaugaagugguuuugga

SEQ ID NO: 1708521 - RNA, 19 nt, Homo sapiens
  misc_RNA (1)...(19): siRNA sense strand
ugucugaacugcgaaguac

SEQ ID NO: 1708522 - RNA, 19 nt, Homo sapiens
  misc_RNA (1)...(19): siRNA sense strand
aucaacaucuacugucuga

SEQ ID NO: 1708523 - RNA, 19 nt, Homo sapiens
  misc_RNA (1)...(19): siRNA sense strand
ccauggauaacuuagagaa

SEQ ID NO: 1708524 - RNA, 19 nt, Homo sapiens
  misc_RNA (1)...(19): siRNA sense strand
aagaggagcgcaucaacau

SEQ ID NO: 1708525 - RNA, 19 nt, Homo sapiens
  misc_RNA (1)...(19): siRNA sense strand
uagagaagcaacucaucug

SEQ ID NO: 1708526 - RNA, 19 nt, Homo sapiens
  misc_RNA (1)...(19): siRNA sense strand
uggauaacuuagagaagca

SEQ ID NO: 1708527 - RNA, 19 nt, Homo sapiens
  misc_RNA (1)...(19): siRNA sense strand
cagcagaccauggauaacu

SEQ ID NO: 1708528 - RNA, 19 nt, Homo sapiens
  misc_RNA (1)...(19): siRNA sense strand
gaguggcaguggagcugau

SEQ ID NO: 1708529 - RNA, 19 nt, Homo sapiens
  misc_RNA (1)...(19): siRNA sense strand
ggaagacaccugcaaaacu

SEQ ID NO: 1708530 - RNA, 19 nt, Homo sapiens
  misc_RNA (1)...(19): siRNA sense strand
gcgcaucucugaauuacaa

SEQ ID NO: 1708531 - RNA, 19 nt, Homo sapiens
  misc_RNA (1)...(19): siRNA sense strand
gaagacaccugcaaaacua

SEQ ID NO: 1708532 - RNA, 19 nt, Homo sapiens
  misc_RNA (1)...(19): siRNA sense strand
gaaaugugccagugauauu

SEQ ID NO: 1708533 - RNA, 19 nt, Homo sapiens
  misc_RNA (1)...(19): siRNA sense strand
gcuuagagauguucacgaa

SEQ ID NO: 1708534 - RNA, 19 nt, Homo sapiens
  misc_RNA (1)...(19): siRNA sense strand
caacucaucugucccaucu

SEQ ID NO: 1708535 - RNA, 19 nt, Homo sapiens
  misc_RNA (1)...(19): siRNA sense strand
uauauggacuucagaggaa

SEQ ID NO: 1708536 - RNA, 19 nt, Homo sapiens
  misc_RNA (1)...(19): siRNA sense strand
gcagaccauggauaacuua

SEQ ID NO: 1708537 - RNA, 19 nt, Homo sapiens
  misc_RNA (1)...(19): siRNA sense strand
guacccaccugcucucugu

SEQ ID NO: 1708538 - RNA, 19 nt, Homo sapiens
  misc_RNA (1)...(19): siRNA sense strand
ggaaaugugccagugauau

SEQ ID NO: 1708539 - RNA, 19 nt, Homo sapiens
  misc_RNA (1)...(19): siRNA sense strand
gaccauggauaacuuagag

SEQ ID NO: 1708540 - RNA, 19 nt, Homo sapiens
  misc_RNA (1)...(19): siRNA sense strand
gagcagcagaccauggaua

SEQ ID NO: 1708541 - RNA, 19 nt, Homo sapiens
  misc_RNA (1)...(19): siRNA sense strand
gcaguggagcugauucuga

SEQ ID NO: 1708542 - RNA, 19 nt, Homo sapiens
  misc_RNA (1)...(19): siRNA sense strand
gaagaggagcgcaucaaca

SEQ ID NO: 1708543 - RNA, 19 nt, Homo sapiens
  misc_RNA (1)...(19): siRNA sense strand
cacgaaaccuguggugauu

SEQ ID NO: 1708544 - RNA, 19 nt, Homo sapiens
  misc_RNA (1)...(19): siRNA sense strand
gagcgcaucucugaauuac

SEQ ID NO: 1708545 - RNA, 19 nt, Homo sapiens
  misc_RNA (1)...(19): siRNA sense strand
ccaaagagcagcagaccau

SEQ ID NO: 1708546 - RNA, 19 nt, Homo sapiens
  misc_RNA (1)...(19): siRNA sense strand
ugaacucccuaaaugaaug

SEQ ID NO: 1708547 - RNA, 19 nt, Homo sapiens
  misc_RNA (1)...(19): siRNA sense strand
gcaucaacaucuacugucu

SEQ ID NO: 1708548 - RNA, 19 nt, Homo sapiens
  misc_RNA (1)...(19): siRNA sense strand
ugguugaacucccuaaaug

SEQ ID NO: 1708549 - RNA, 19 nt, Homo sapiens
  misc_RNA (1)...(19): siRNA sense strand
gaacucccuaaaugaauga

SEQ ID NO: 1708550 - RNA, 19 nt, Homo sapiens
  misc_RNA (1)...(19): siRNA sense strand
cgaaaccuguggugauucu

SEQ ID NO: 1708551 - RNA, 19 nt, Homo sapiens
  misc_RNA (1)...(19): siRNA sense strand
guugaacucccuaaaugaa

SEQ ID NO: 1708552 - RNA, 19 nt, Homo sapiens
  misc_RNA (1)...(19): siRNA sense strand
ggauagacaugggguauau

SEQ ID NO: 1708553 - RNA, 19 nt, Homo sapiens
  misc_RNA (1)...(19): siRNA sense strand
caacaucuacugucugaac

SEQ ID NO: 1708554 - RNA, 19 nt, Homo sapiens
  misc_RNA (1)...(19): siRNA sense strand
ucauugacaucuacaagca

SEQ ID NO: 1708555 - RNA, 19 nt, Homo sapiens
  misc_RNA (1)...(19): siRNA sense strand
gaggagcgcaucaacaucu

SEQ ID NO: 1708556 - RNA, 19 nt, Homo sapiens
  misc_RNA (1)...(19): siRNA sense strand
uuagagauguucacgaaac

SEQ ID NO: 1708557 - RNA, 19 nt, Homo sapiens
  misc_RNA (1)...(19): siRNA sense strand
caaccuguguaggaaaugu

SEQ ID NO: 1708558 - RNA, 19 nt, Homo sapiens
  misc_RNA (1)...(19): siRNA sense strand
cgccauaucuucuccuuuu

SEQ ID NO: 1708559 - RNA, 19 nt, Homo sapiens
  misc_RNA (1)...(19): siRNA sense strand
uaggaaaugugccagugau

SEQ ID NO: 1708560 - RNA, 19 nt, Homo sapiens
  misc_RNA (1)...(19): siRNA sense strand
caucugucccaucugcuua

SEQ ID NO: 1708561 - RNA, 19 nt, Homo sapiens
  misc_RNA (1)...(19): siRNA sense strand
gguugaacucccuaaauga

SEQ ID NO: 1708562 - RNA, 19 nt, Homo sapiens
  misc_RNA (1)...(19): siRNA sense strand
guaggaaaugugccaguga

SEQ ID NO: 1708563 - RNA, 19 nt, Homo sapiens
  misc_RNA (1)...(19): siRNA sense strand
ugucccaucugcuuagaga

SEQ ID NO: 1708564 - RNA, 19 nt, Homo sapiens
  misc_RNA (1)...(19): siRNA sense strand
gcuggaagacaccugcaaa

SEQ ID NO: 1708565 - RNA, 19 nt, Homo sapiens
  misc_RNA (1)...(19): siRNA sense strand
ggaaccugcugguggaaaa

SEQ ID NO: 1708566 - RNA, 19 nt, Homo sapiens
  misc_RNA (1)...(19): siRNA sense strand
gaucgaguccagggaguga

SEQ ID NO: 1708567 - RNA, 19 nt, Homo sapiens
  misc_RNA (1)...(19): siRNA sense strand
ccaggccucuaacccguau

SEQ ID NO: 1708568 - RNA, 19 nt, Homo sapiens
  misc_RNA (1)...(19): siRNA sense strand
cuguagacaugaagugguu

SEQ ID NO: 1708569 - RNA, 19 nt, Homo sapiens
  misc_RNA (1)...(19): siRNA sense strand
gcgcaucaacaucuacugu

SEQ ID NO: 1708570 - RNA, 19 nt, Homo sapiens
  misc_RNA (1)...(19): siRNA sense strand
gacaugaagugguuuugga

SEQ ID NO: 1708571 - RNA, 19 nt, Homo sapiens
  misc_RNA (1)...(19): siRNA sense strand
ugucugaacugcgaaguac

SEQ ID NO: 1708572 - RNA, 19 nt, Homo sapiens
  misc_RNA (1)...(19): siRNA sense strand
aucaacaucuacugucuga

SEQ ID NO: 1708573 - RNA, 19 nt, Homo sapiens
  misc_RNA (1)...(19): siRNA sense strand
ccauggauaacuuagagaa

SEQ ID NO: 1708574 - RNA, 19 nt, Homo sapiens
  misc_RNA (1)...(19): siRNA sense strand
aagaggagcgcaucaacau

SEQ ID NO: 1708575 - RNA, 19 nt, Homo sapiens
  misc_RNA (1)...(19): siRNA sense strand
uagagaagcaacucaucug

SEQ ID NO: 1708576 - RNA, 19 nt, Homo sapiens
  misc_RNA (1)...(19): siRNA sense strand
uggauaacuuagagaagca

SEQ ID NO: 1708577 - RNA, 19 nt, Homo sapiens
  misc_RNA (1)...(19): siRNA sense strand
cagcagaccauggauaacu

SEQ ID NO: 1708578 - RNA, 19 nt, Homo sapiens
  misc_RNA (1)...(19): siRNA sense strand
gaguggcaguggagcugau

SEQ ID NO: 1708579 - RNA, 19 nt, Homo sapiens
  misc_RNA (1)...(19): siRNA sense strand
ggaagacaccugcaaaacu

SEQ ID NO: 1708580 - RNA, 19 nt, Homo sapiens
  misc_RNA (1)...(19): siRNA sense strand
gcgcaucucugaauuacaa

SEQ ID NO: 1708581 - RNA, 19 nt, Homo sapiens
  misc_RNA (1)...(19): siRNA sense strand
gaagacaccugcaaaacua

SEQ ID NO: 1708582 - RNA, 19 nt, Homo sapiens
  misc_RNA (1)...(19): siRNA sense strand
gaaaugugccagugauauu

SEQ ID NO: 1708583 - RNA, 19 nt, Homo sapiens
  misc_RNA (1)...(19): siRNA sense strand
gcuuagagauguucacgaa

SEQ ID NO: 1708584 - RNA, 19 nt, Homo sapiens
  misc_RNA (1)...(19): siRNA sense strand
caacucaucugucccaucu

SEQ ID NO: 1708585 - RNA, 19 nt, Homo sapiens
  misc_RNA (1)...(19): siRNA sense strand
uauauggacuucagaggaa

SEQ ID NO: 1708586 - RNA, 19 nt, Homo sapiens
  misc_RNA (1)...(19): siRNA sense strand
gcagaccauggauaacuua

SEQ ID NO: 1708587 - RNA, 19 nt, Homo sapiens
  misc_RNA (1)...(19): siRNA sense strand
guacccaccugcucucugu

SEQ ID NO: 1708588 - RNA, 19 nt, Homo sapiens
  misc_RNA (1)...(19): siRNA sense strand
ggaaaugugccagugauau

SEQ ID NO: 1708589 - RNA, 19 nt, Homo sapiens
  misc_RNA (1)...(19): siRNA sense strand
gaccauggauaacuuagag

SEQ ID NO: 1708590 - RNA, 19 nt, Homo sapiens
  misc_RNA (1)...(19): siRNA sense strand
gagcagcagaccauggaua

SEQ ID NO: 1708591 - RNA, 19 nt, Homo sapiens
  misc_RNA (1)...(19): siRNA sense strand
gaagaggagcgcaucaaca

SEQ ID NO: 1708592 - RNA, 19 nt, Homo sapiens
  misc_RNA (1)...(19): siRNA sense strand
cacgaaaccuguggugauu

SEQ ID NO: 1708593 - RNA, 19 nt, Homo sapiens
  misc_RNA (1)...(19): siRNA sense strand
gagcgcaucucugaauuac

SEQ ID NO: 1708594 - RNA, 19 nt, Homo sapiens
  misc_RNA (1)...(19): siRNA sense strand
ccaaagagcagcagaccau

SEQ ID NO: 1708595 - RNA, 19 nt, Homo sapiens
  misc_RNA (1)...(19): siRNA sense strand
gcaucaacaucuacugucu

SEQ ID NO: 1708596 - RNA, 19 nt, Homo sapiens
  misc_RNA (1)...(19): siRNA sense strand
cgaaaccuguggugauucu

SEQ ID NO: 1708597 - RNA, 19 nt, Homo sapiens
  misc_RNA (1)...(19): siRNA sense strand
ggauagacaugggguauau

SEQ ID NO: 1708598 - RNA, 19 nt, Homo sapiens
  misc_RNA (1)...(19): siRNA sense strand
caacaucuacugucugaac

SEQ ID NO: 1708599 - RNA, 19 nt, Homo sapiens
  misc_RNA (1)...(19): siRNA sense strand
ucauugacaucuacaagca

SEQ ID NO: 1708600 - RNA, 19 nt, Homo sapiens
  misc_RNA (1)...(19): siRNA sense strand
gaggagcgcaucaacaucu

SEQ ID NO: 1708601 - RNA, 19 nt, Homo sapiens
  misc_RNA (1)...(19): siRNA sense strand
uuagagauguucacgaaac

SEQ ID NO: 1708602 - RNA, 19 nt, Homo sapiens
  misc_RNA (1)...(19): siRNA sense strand
caaccuguguaggaaaugu

SEQ ID NO: 1708603 - RNA, 19 nt, Homo sapiens
  misc_RNA (1)...(19): siRNA sense strand
uaggaaaugugccagugau

SEQ ID NO: 1708604 - RNA, 19 nt, Homo sapiens
  misc_RNA (1)...(19): siRNA sense strand
caucugucccaucugcuua

SEQ ID NO: 1708605 - RNA, 19 nt, Homo sapiens
  misc_RNA (1)...(19): siRNA sense strand
guaggaaaugugccaguga

SEQ ID NO: 1708606 - RNA, 19 nt, Homo sapiens
  misc_RNA (1)...(19): siRNA sense strand
ugucccaucugcuuagaga

SEQ ID NO: 1708607 - RNA, 19 nt, Homo sapiens
  misc_RNA (1)...(19): siRNA sense strand
gcuggaagacaccugcaaa

SEQ ID NO: 1708608 - RNA, 19 nt, Homo sapiens
  misc_RNA (1)...(19): siRNA sense strand
ggaaccugcugguggaaaa

SEQ ID NO: 1708609 - RNA, 19 nt, Homo sapiens
  misc_RNA (1)...(19): siRNA sense strand
gaucgaguccagggaguga

SEQ ID NO: 1708610 - RNA, 19 nt, Homo sapiens
  misc_RNA (1)...(19): siRNA sense strand
ccaggccucuaacccguau

SEQ ID NO: 1708611 - RNA, 19 nt, Homo sapiens
  misc_RNA (1)...(19): siRNA sense strand
cuguagacaugaagugguu

SEQ ID NO: 1708612 - RNA, 19 nt, Homo sapiens
  misc_RNA (1)...(19): siRNA sense strand
gcgcaucaacaucuacugu

SEQ ID NO: 1708613 - RNA, 19 nt, Homo sapiens
  misc_RNA (1)...(19): siRNA sense strand
gacaugaagugguuuugga

SEQ ID NO: 1708614 - RNA, 19 nt, Homo sapiens
  misc_RNA (1)...(19): siRNA sense strand
ugucugaacugcgaaguac

SEQ ID NO: 1708615 - RNA, 19 nt, Homo sapiens
  misc_RNA (1)...(19): siRNA sense strand
ccauggauaacuuagagaa

SEQ ID NO: 1708616 - RNA, 19 nt, Homo sapiens
  misc_RNA (1)...(19): siRNA sense strand
aucaacaucuacugucuga

SEQ ID NO: 1708617 - RNA, 19 nt, Homo sapiens
  misc_RNA (1)...(19): siRNA sense strand
aagaggagcgcaucaacau

SEQ ID NO: 1708618 - RNA, 19 nt, Homo sapiens
  misc_RNA (1)...(19): siRNA sense strand
uggauaacuuagagaagca

SEQ ID NO: 1708619 - RNA, 19 nt, Homo sapiens
  misc_RNA (1)...(19): siRNA sense strand
ggaagacaccugcaaaacu

SEQ ID NO: 1708620 - RNA, 19 nt, Homo sapiens
  misc_RNA (1)...(19): siRNA sense strand
uagagaagcaacucaucug

SEQ ID NO: 1708621 - RNA, 19 nt, Homo sapiens
  misc_RNA (1)...(19): siRNA sense strand
cagcagaccauggauaacu

SEQ ID NO: 1708622 - RNA, 19 nt, Homo sapiens
  misc_RNA (1)...(19): siRNA sense strand
gcgcaucucugaauuacaa

SEQ ID NO: 1708623 - RNA, 19 nt, Homo sapiens
  misc_RNA (1)...(19): siRNA sense strand
gaagacaccugcaaaacua

SEQ ID NO: 1708624 - RNA, 19 nt, Homo sapiens
  misc_RNA (1)...(19): siRNA sense strand
gaaaugugccagugauauu

SEQ ID NO: 1708625 - RNA, 19 nt, Homo sapiens
  misc_RNA (1)...(19): siRNA sense strand
gcuuagagauguucacgaa

SEQ ID NO: 1708626 - RNA, 19 nt, Homo sapiens
  misc_RNA (1)...(19): siRNA sense strand
caacucaucugucccaucu

SEQ ID NO: 1708627 - RNA, 19 nt, Homo sapiens
  misc_RNA (1)...(19): siRNA sense strand
uauauggacuucagaggaa

SEQ ID NO: 1708628 - RNA, 19 nt, Homo sapiens
  misc_RNA (1)...(19): siRNA sense strand
gcagaccauggauaacuua

SEQ ID NO: 1708629 - RNA, 19 nt, Homo sapiens
  misc_RNA (1)...(19): siRNA sense strand
guacccaccugcucucugu

SEQ ID NO: 1708630 - RNA, 19 nt, Homo sapiens
  misc_RNA (1)...(19): siRNA sense strand
ggaaaugugccagugauau

SEQ ID NO: 1708631 - RNA, 19 nt, Homo sapiens
  misc_RNA (1)...(19): siRNA sense strand
gaccauggauaacuuagag

SEQ ID NO: 1708632 - RNA, 19 nt, Homo sapiens
  misc_RNA (1)...(19): siRNA sense strand
gagcagcagaccauggaua

SEQ ID NO: 1708633 - RNA, 19 nt, Homo sapiens
  misc_RNA (1)...(19): siRNA sense strand
gcaguggagcugauucuga

SEQ ID NO: 1708634 - RNA, 19 nt, Homo sapiens
  misc_RNA (1)...(19): siRNA sense strand
gaagaggagcgcaucaaca

SEQ ID NO: 1708635 - RNA, 19 nt, Homo sapiens
  misc_RNA (1)...(19): siRNA sense strand
cacgaaaccuguggugauu

SEQ ID NO: 1708636 - RNA, 19 nt, Homo sapiens
  misc_RNA (1)...(19): siRNA sense strand
gagcgcaucucugaauuac

SEQ ID NO: 1708637 - RNA, 19 nt, Homo sapiens
  misc_RNA (1)...(19): siRNA sense strand
ccaaagagcagcagaccau

SEQ ID NO: 1708638 - RNA, 19 nt, Homo sapiens
  misc_RNA (1)...(19): siRNA sense strand
ugaacucccuaaaugaaug

SEQ ID NO: 1708639 - RNA, 19 nt, Homo sapiens
  misc_RNA (1)...(19): siRNA sense strand
gcaucaacaucuacugucu

SEQ ID NO: 1708640 - RNA, 19 nt, Homo sapiens
  misc_RNA (1)...(19): siRNA sense strand
ugguugaacucccuaaaug

SEQ ID NO: 1708641 - RNA, 19 nt, Homo sapiens
  misc_RNA (1)...(19): siRNA sense strand
gaacucccuaaaugaauga

SEQ ID NO: 1708642 - RNA, 19 nt, Homo sapiens
  misc_RNA (1)...(19): siRNA sense strand
cgaaaccuguggugauucu

SEQ ID NO: 1708643 - RNA, 19 nt, Homo sapiens
  misc_RNA (1)...(19): siRNA sense strand
guugaacucccuaaaugaa

SEQ ID NO: 1708644 - RNA, 19 nt, Homo sapiens
  misc_RNA (1)...(19): siRNA sense strand
ggauagacaugggguauau

SEQ ID NO: 1708645 - RNA, 19 nt, Homo sapiens
  misc_RNA (1)...(19): siRNA sense strand
caacaucuacugucugaac

SEQ ID NO: 1708646 - RNA, 19 nt, Homo sapiens
  misc_RNA (1)...(19): siRNA sense strand
ucauugacaucuacaagca

SEQ ID NO: 1708647 - RNA, 19 nt, Homo sapiens
  misc_RNA (1)...(19): siRNA sense strand
gaggagcgcaucaacaucu

SEQ ID NO: 1708648 - RNA, 19 nt, Homo sapiens
  misc_RNA (1)...(19): siRNA sense strand
uuagagauguucacgaaac

SEQ ID NO: 1708649 - RNA, 19 nt, Homo sapiens
  misc_RNA (1)...(19): siRNA sense strand
caaccuguguaggaaaugu

SEQ ID NO: 1708650 - RNA, 19 nt, Homo sapiens
  misc_RNA (1)...(19): siRNA sense strand
cgccauaucuucuccuuuu

SEQ ID NO: 1708651 - RNA, 19 nt, Homo sapiens
  misc_RNA (1)...(19): siRNA sense strand
uaggaaaugugccagugau

SEQ ID NO: 1708652 - RNA, 19 nt, Homo sapiens
  misc_RNA (1)...(19): siRNA sense strand
caucugucccaucugcuua

SEQ ID NO: 1708653 - RNA, 19 nt, Homo sapiens
  misc_RNA (1)...(19): siRNA sense strand
gguugaacucccuaaauga

SEQ ID NO: 1708654 - RNA, 19 nt, Homo sapiens
  misc_RNA (1)...(19): siRNA sense strand
guaggaaaugugccaguga

SEQ ID NO: 1708655 - RNA, 19 nt, Homo sapiens
  misc_RNA (1)...(19): siRNA sense strand
ugucccaucugcuuagaga

SEQ ID NO: 1708656 - RNA, 19 nt, Homo sapiens
  misc_RNA (1)...(19): siRNA sense strand
gcuggaagacaccugcaaa

SEQ ID NO: 1708657 - RNA, 19 nt, Homo sapiens
  misc_RNA (1)...(19): siRNA sense strand
ggaaccugcugguggaaaa

SEQ ID NO: 1708658 - RNA, 19 nt, Homo sapiens
  misc_RNA (1)...(19): siRNA sense strand
gaucgaguccagggaguga

SEQ ID NO: 1708659 - RNA, 19 nt, Homo sapiens
  misc_RNA (1)...(19): siRNA sense strand
ccaggccucuaacccguau

SEQ ID NO: 1708660 - RNA, 19 nt, Homo sapiens
  misc_RNA (1)...(19): siRNA sense strand
cuguagacaugaagugguu

SEQ ID NO: 1708661 - RNA, 19 nt, Homo sapiens
  misc_RNA (1)...(19): siRNA sense strand
gcgcaucaacaucuacugu

SEQ ID NO: 1708662 - RNA, 19 nt, Homo sapiens
  misc_RNA (1)...(19): siRNA sense strand
gacaugaagugguuuugga

SEQ ID NO: 1708663 - RNA, 19 nt, Homo sapiens
  misc_RNA (1)...(19): siRNA sense strand
ugucugaacugcgaaguac

SEQ ID NO: 1708664 - RNA, 19 nt, Homo sapiens
  misc_RNA (1)...(19): siRNA sense strand
aucaacaucuacugucuga

SEQ ID NO: 1708665 - RNA, 19 nt, Homo sapiens
  misc_RNA (1)...(19): siRNA sense strand
ccauggauaacuuagagaa

SEQ ID NO: 1708666 - RNA, 19 nt, Homo sapiens
  misc_RNA (1)...(19): siRNA sense strand
aagaggagcgcaucaacau

SEQ ID NO: 1708667 - RNA, 19 nt, Homo sapiens
  misc_RNA (1)...(19): siRNA sense strand
uagagaagcaacucaucug

SEQ ID NO: 1708668 - RNA, 19 nt, Homo sapiens
  misc_RNA (1)...(19): siRNA sense strand
uggauaacuuagagaagca

SEQ ID NO: 1708669 - RNA, 19 nt, Homo sapiens
  misc_RNA (1)...(19): siRNA sense strand
cagcagaccauggauaacu

SEQ ID NO: 1708670 - RNA, 19 nt, Homo sapiens
  misc_RNA (1)...(19): siRNA sense strand
gaguggcaguggagcugau

SEQ ID NO: 1708671 - RNA, 19 nt, Homo sapiens
  misc_RNA (1)...(19): siRNA sense strand
ggaagacaccugcaaaacu

SEQ ID NO: 1708672 - RNA, 19 nt, Homo sapiens
  misc_RNA (1)...(19): siRNA sense strand
gcgcaucucugaauuacaa

SEQ ID NO: 1708673 - RNA, 19 nt, Homo sapiens
  misc_RNA (1)...(19): siRNA sense strand
gaagacaccugcaaaacua

SEQ ID NO: 1708674 - RNA, 19 nt, Homo sapiens
  misc_RNA (1)...(19): siRNA sense strand
gaaaugugccagugauauu

SEQ ID NO: 1708675 - RNA, 19 nt, Homo sapiens
  misc_RNA (1)...(19): siRNA sense strand
gcuuagagauguucacgaa

SEQ ID NO: 1708676 - RNA, 19 nt, Homo sapiens
  misc_RNA (1)...(19): siRNA sense strand
caacucaucugucccaucu

SEQ ID NO: 1708677 - RNA, 19 nt, Homo sapiens
  misc_RNA (1)...(19): siRNA sense strand
uauauggacuucagaggaa

SEQ ID NO: 1708678 - RNA, 19 nt, Homo sapiens
  misc_RNA (1)...(19): siRNA sense strand
gcagaccauggauaacuua

SEQ ID NO: 1708679 - RNA, 19 nt, Homo sapiens
  misc_RNA (1)...(19): siRNA sense strand
guacccaccugcucucugu

SEQ ID NO: 1708680 - RNA, 19 nt, Homo sapiens
  misc_RNA (1)...(19): siRNA sense strand
ggaaaugugccagugauau

SEQ ID NO: 1708681 - RNA, 19 nt, Homo sapiens
  misc_RNA (1)...(19): siRNA sense strand
gaccauggauaacuuagag

SEQ ID NO: 1708682 - RNA, 19 nt, Homo sapiens
  misc_RNA (1)...(19): siRNA sense strand
gagcagcagaccauggaua

SEQ ID NO: 1708683 - RNA, 19 nt, Homo sapiens
  misc_RNA (1)...(19): siRNA sense strand
gcaguggagcugauucuga

SEQ ID NO: 1708684 - RNA, 19 nt, Homo sapiens
  misc_RNA (1)...(19): siRNA sense strand
gaagaggagcgcaucaaca

SEQ ID NO: 1708685 - RNA, 19 nt, Homo sapiens
  misc_RNA (1)...(19): siRNA sense strand
cacgaaaccuguggugauu

SEQ ID NO: 1708686 - RNA, 19 nt, Homo sapiens
  misc_RNA (1)...(19): siRNA sense strand
gagcgcaucucugaauuac

SEQ ID NO: 1708687 - RNA, 19 nt, Homo sapiens
  misc_RNA (1)...(19): siRNA sense strand
ccaaagagcagcagaccau

SEQ ID NO: 1708688 - RNA, 19 nt, Homo sapiens
  misc_RNA (1)...(19): siRNA sense strand
ugaacucccuaaaugaaug

SEQ ID NO: 1708689 - RNA, 19 nt, Homo sapiens
  misc_RNA (1)...(19): siRNA sense strand
gcaucaacaucuacugucu

SEQ ID NO: 1708690 - RNA, 19 nt, Homo sapiens
  misc_RNA (1)...(19): siRNA sense strand
ugguugaacucccuaaaug

SEQ ID NO: 1708691 - RNA, 19 nt, Homo sapiens
  misc_RNA (1)...(19): siRNA sense strand
gaacucccuaaaugaauga

SEQ ID NO: 1708692 - RNA, 19 nt, Homo sapiens
  misc_RNA (1)...(19): siRNA sense strand
cgaaaccuguggugauucu

SEQ ID NO: 1708693 - RNA, 19 nt, Homo sapiens
  misc_RNA (1)...(19): siRNA sense strand
guugaacucccuaaaugaa

SEQ ID NO: 1708694 - RNA, 19 nt, Homo sapiens
  misc_RNA (1)...(19): siRNA sense strand
ggauagacaugggguauau

SEQ ID NO: 1708695 - RNA, 19 nt, Homo sapiens
  misc_RNA (1)...(19): siRNA sense strand
caacaucuacugucugaac

SEQ ID NO: 1708696 - RNA, 19 nt, Homo sapiens
  misc_RNA (1)...(19): siRNA sense strand
ucauugacaucuacaagca

SEQ ID NO: 1708697 - RNA, 19 nt, Homo sapiens
  misc_RNA (1)...(19): siRNA sense strand
gaggagcgcaucaacaucu

SEQ ID NO: 1708698 - RNA, 19 nt, Homo sapiens
  misc_RNA (1)...(19): siRNA sense strand
uuagagauguucacgaaac

SEQ ID NO: 1708699 - RNA, 19 nt, Homo sapiens
  misc_RNA (1)...(19): siRNA sense strand
caaccuguguaggaaaugu

SEQ ID NO: 1708700 - RNA, 19 nt, Homo sapiens
  misc_RNA (1)...(19): siRNA sense strand
cgccauaucuucuccuuuu

SEQ ID NO: 1708701 - RNA, 19 nt, Homo sapiens
  misc_RNA (1)...(19): siRNA sense strand
uaggaaaugugccagugau

SEQ ID NO: 1708702 - RNA, 19 nt, Homo sapiens
  misc_RNA (1)...(19): siRNA sense strand
caucugucccaucugcuua

SEQ ID NO: 1708703 - RNA, 19 nt, Homo sapiens
  misc_RNA (1)...(19): siRNA sense strand
gguugaacucccuaaauga

SEQ ID NO: 1708704 - RNA, 19 nt, Homo sapiens
  misc_RNA (1)...(19): siRNA sense strand
guaggaaaugugccaguga

SEQ ID NO: 1708705 - RNA, 19 nt, Homo sapiens
  misc_RNA (1)...(19): siRNA sense strand
ugucccaucugcuuagaga

SEQ ID NO: 1708706 - RNA, 19 nt, Homo sapiens
  misc_RNA (1)...(19): siRNA sense strand
gcuggaagacaccugcaaa

SEQ ID NO: 1708707 - RNA, 19 nt, Homo sapiens
  misc_RNA (1)...(19): siRNA sense strand
ggaaccugcugguggaaaa

SEQ ID NO: 1708708 - RNA, 19 nt, Homo sapiens
  misc_RNA (1)...(19): siRNA sense strand
gaucgaguccagggaguga

SEQ ID NO: 1708709 - RNA, 19 nt, Homo sapiens
  misc_RNA (1)...(19): siRNA sense strand
ccaggccucuaacccguau

SEQ ID NO: 1708710 - RNA, 19 nt, Homo sapiens
  misc_RNA (1)...(19): siRNA sense strand
cuguagacaugaagugguu

SEQ ID NO: 1708711 - RNA, 19 nt, Homo sapiens
  misc_RNA (1)...(19): siRNA sense strand
gcgcaucaacaucuacugu

SEQ ID NO: 1708712 - RNA, 19 nt, Homo sapiens
  misc_RNA (1)...(19): siRNA sense strand
gacaugaagugguuuugga

SEQ ID NO: 1708713 - RNA, 19 nt, Homo sapiens
  misc_RNA (1)...(19): siRNA sense strand
ugucugaacugcgaaguac

SEQ ID NO: 1708714 - RNA, 19 nt, Homo sapiens
  misc_RNA (1)...(19): siRNA sense strand
aucaacaucuacugucuga

SEQ ID NO: 1708715 - RNA, 19 nt, Homo sapiens
  misc_RNA (1)...(19): siRNA sense strand
ccauggauaacuuagagaa

SEQ ID NO: 1708716 - RNA, 19 nt, Homo sapiens
  misc_RNA (1)...(19): siRNA sense strand
aagaggagcgcaucaacau

SEQ ID NO: 1708717 - RNA, 19 nt, Homo sapiens
  misc_RNA (1)...(19): siRNA sense strand
uagagaagcaacucaucug

SEQ ID NO: 1708718 - RNA, 19 nt, Homo sapiens
  misc_RNA (1)...(19): siRNA sense strand
uggauaacuuagagaagca

SEQ ID NO: 1708719 - RNA, 19 nt, Homo sapiens
  misc_RNA (1)...(19): siRNA sense strand
cagcagaccauggauaacu

SEQ ID NO: 1708720 - RNA, 19 nt, Homo sapiens
  misc_RNA (1)...(19): siRNA sense strand
gaguggcaguggagcugau

SEQ ID NO: 1708721 - RNA, 19 nt, Homo sapiens
  misc_RNA (1)...(19): siRNA sense strand
ggaagacaccugcaaaacu

SEQ ID NO: 1708722 - RNA, 19 nt, Homo sapiens
  misc_RNA (1)...(19): siRNA sense strand
gcgcaucucugaauuacaa

SEQ ID NO: 1708723 - RNA, 19 nt, Homo sapiens
  misc_RNA (1)...(19): siRNA sense strand
gaagacaccugcaaaacua

SEQ ID NO: 1708724 - RNA, 19 nt, Homo sapiens
  misc_RNA (1)...(19): siRNA sense strand
gaaaugugccagugauauu

SEQ ID NO: 1708725 - RNA, 19 nt, Homo sapiens
  misc_RNA (1)...(19): siRNA sense strand
gcuuagagauguucacgaa

SEQ ID NO: 1708726 - RNA, 19 nt, Homo sapiens
  misc_RNA (1)...(19): siRNA sense strand
caacucaucugucccaucu

SEQ ID NO: 1708727 - RNA, 19 nt, Homo sapiens
  misc_RNA (1)...(19): siRNA sense strand
uauauggacuucagaggaa

SEQ ID NO: 1708728 - RNA, 19 nt, Homo sapiens
  misc_RNA (1)...(19): siRNA sense strand
gcagaccauggauaacuua

SEQ ID NO: 1708729 - RNA, 19 nt, Homo sapiens
  misc_RNA (1)...(19): siRNA sense strand
guacccaccugcucucugu

SEQ ID NO: 1708730 - RNA, 19 nt, Homo sapiens
  misc_RNA (1)...(19): siRNA sense strand
ggaaaugugccagugauau

SEQ ID NO: 1708731 - RNA, 19 nt, Homo sapiens
  misc_RNA (1)...(19): siRNA sense strand
gaccauggauaacuuagag

SEQ ID NO: 1708732 - RNA, 19 nt, Homo sapiens
  misc_RNA (1)...(19): siRNA sense strand
gagcagcagaccauggaua

SEQ ID NO: 1708733 - RNA, 19 nt, Homo sapiens
  misc_RNA (1)...(19): siRNA sense strand
gcaguggagcugauucuga

SEQ ID NO: 1708734 - RNA, 19 nt, Homo sapiens
  misc_RNA (1)...(19): siRNA sense strand
gaagaggagcgcaucaaca

SEQ ID NO: 1708735 - RNA, 19 nt, Homo sapiens
  misc_RNA (1)...(19): siRNA sense strand
cacgaaaccuguggugauu

SEQ ID NO: 1708736 - RNA, 19 nt, Homo sapiens
  misc_RNA (1)...(19): siRNA sense strand
gagcgcaucucugaauuac

SEQ ID NO: 1708737 - RNA, 19 nt, Homo sapiens
  misc_RNA (1)...(19): siRNA sense strand
ccaaagagcagcagaccau

SEQ ID NO: 1708738 - RNA, 19 nt, Homo sapiens
  misc_RNA (1)...(19): siRNA sense strand
ugaacucccuaaaugaaug

SEQ ID NO: 1708739 - RNA, 19 nt, Homo sapiens
  misc_RNA (1)...(19): siRNA sense strand
gcaucaacaucuacugucu

SEQ ID NO: 1708740 - RNA, 19 nt, Homo sapiens
  misc_RNA (1)...(19): siRNA sense strand
ugguugaacucccuaaaug

SEQ ID NO: 1708741 - RNA, 19 nt, Homo sapiens
  misc_RNA (1)...(19): siRNA sense strand
gaacucccuaaaugaauga

SEQ ID NO: 1708742 - RNA, 19 nt, Homo sapiens
  misc_RNA (1)...(19): siRNA sense strand
cgaaaccuguggugauucu

SEQ ID NO: 1708743 - RNA, 19 nt, Homo sapiens
  misc_RNA (1)...(19): siRNA sense strand
guugaacucccuaaaugaa

SEQ ID NO: 1708744 - RNA, 19 nt, Homo sapiens
  misc_RNA (1)...(19): siRNA sense strand
ggauagacaugggguauau

SEQ ID NO: 1708745 - RNA, 19 nt, Homo sapiens
  misc_RNA (1)...(19): siRNA sense strand
caacaucuacugucugaac

SEQ ID NO: 1708746 - RNA, 19 nt, Homo sapiens
  misc_RNA (1)...(19): siRNA sense strand
ucauugacaucuacaagca

SEQ ID NO: 1708747 - RNA, 19 nt, Homo sapiens
  misc_RNA (1)...(19): siRNA sense strand
gaggagcgcaucaacaucu

SEQ ID NO: 1708748 - RNA, 19 nt, Homo sapiens
  misc_RNA (1)...(19): siRNA sense strand
uuagagauguucacgaaac

SEQ ID NO: 1708749 - RNA, 19 nt, Homo sapiens
  misc_RNA (1)...(19): siRNA sense strand
caaccuguguaggaaaugu

SEQ ID NO: 1708750 - RNA, 19 nt, Homo sapiens
  misc_RNA (1)...(19): siRNA sense strand
cgccauaucuucuccuuuu

SEQ ID NO: 1708751 - RNA, 19 nt, Homo sapiens
  misc_RNA (1)...(19): siRNA sense strand
uaggaaaugugccagugau

SEQ ID NO: 1708752 - RNA, 19 nt, Homo sapiens
  misc_RNA (1)...(19): siRNA sense strand
caucugucccaucugcuua

SEQ ID NO: 1708753 - RNA, 19 nt, Homo sapiens
  misc_RNA (1)...(19): siRNA sense strand
gguugaacucccuaaauga

SEQ ID NO: 1708754 - RNA, 19 nt, Homo sapiens
  misc_RNA (1)...(19): siRNA sense strand
guaggaaaugugccaguga

SEQ ID NO: 1708755 - RNA, 19 nt, Homo sapiens
  misc_RNA (1)...(19): siRNA sense strand
ugucccaucugcuuagaga

SEQ ID NO: 1708756 - RNA, 19 nt, Homo sapiens
  misc_RNA (1)...(19): siRNA sense strand
gcuggaagacaccugcaaa

SEQ ID NO: 1708757 - RNA, 19 nt, Homo sapiens
  misc_RNA (1)...(19): siRNA sense strand
ggaaccugcugguggaaaa

SEQ ID NO: 1708758 - RNA, 19 nt, Homo sapiens
  misc_RNA (1)...(19): siRNA sense strand
gaucgaguccagggaguga

SEQ ID NO: 1708759 - RNA, 19 nt, Homo sapiens
  misc_RNA (1)...(19): siRNA sense strand
ccaggccucuaacccguau

SEQ ID NO: 1708760 - RNA, 19 nt, Homo sapiens
  misc_RNA (1)...(19): siRNA sense strand
cuguagacaugaagugguu

SEQ ID NO: 1708761 - RNA, 19 nt, Homo sapiens
  misc_RNA (1)...(19): siRNA sense strand
gcgcaucaacaucuacugu

SEQ ID NO: 1708762 - RNA, 19 nt, Homo sapiens
  misc_RNA (1)...(19): siRNA sense strand
gacaugaagugguuuugga

SEQ ID NO: 1708763 - RNA, 19 nt, Homo sapiens
  misc_RNA (1)...(19): siRNA sense strand
ugucugaacugcgaaguac

SEQ ID NO: 1708764 - RNA, 19 nt, Homo sapiens
  misc_RNA (1)...(19): siRNA sense strand
aucaacaucuacugucuga

SEQ ID NO: 1708765 - RNA, 19 nt, Homo sapiens
  misc_RNA (1)...(19): siRNA sense strand
ccauggauaacuuagagaa

SEQ ID NO: 1708766 - RNA, 19 nt, Homo sapiens
  misc_RNA (1)...(19): siRNA sense strand
aagaggagcgcaucaacau

SEQ ID NO: 1708767 - RNA, 19 nt, Homo sapiens
  misc_RNA (1)...(19): siRNA sense strand
uagagaagcaacucaucug

SEQ ID NO: 1708768 - RNA, 19 nt, Homo sapiens
  misc_RNA (1)...(19): siRNA sense strand
uggauaacuuagagaagca

SEQ ID NO: 1708769 - RNA, 19 nt, Homo sapiens
  misc_RNA (1)...(19): siRNA sense strand
cagcagaccauggauaacu

SEQ ID NO: 1708770 - RNA, 19 nt, Homo sapiens
  misc_RNA (1)...(19): siRNA sense strand
gaguggcaguggagcugau

SEQ ID NO: 1708771 - RNA, 19 nt, Homo sapiens
  misc_RNA (1)...(19): siRNA sense strand
ggaagacaccugcaaaacu

SEQ ID NO: 1708772 - RNA, 19 nt, Homo sapiens
  misc_RNA (1)...(19): siRNA sense strand
gcgcaucucugaauuacaa

SEQ ID NO: 1708773 - RNA, 19 nt, Homo sapiens
  misc_RNA (1)...(19): siRNA sense strand
gaagacaccugcaaaacua

SEQ ID NO: 1708774 - RNA, 19 nt, Homo sapiens
  misc_RNA (1)...(19): siRNA sense strand
gaaaugugccagugauauu

SEQ ID NO: 1708775 - RNA, 19 nt, Homo sapiens
  misc_RNA (1)...(19): siRNA sense strand
gcuuagagauguucacgaa

SEQ ID NO: 1708776 - RNA, 19 nt, Homo sapiens
  misc_RNA (1)...(19): siRNA sense strand
caacucaucugucccaucu

SEQ ID NO: 1708777 - RNA, 19 nt, Homo sapiens
  misc_RNA (1)...(19): siRNA sense strand
uauauggacuucagaggaa

SEQ ID NO: 1708778 - RNA, 19 nt, Homo sapiens
  misc_RNA (1)...(19): siRNA sense strand
gcagaccauggauaacuua

SEQ ID NO: 1708779 - RNA, 19 nt, Homo sapiens
  misc_RNA (1)...(19): siRNA sense strand
guacccaccugcucucugu

SEQ ID NO: 1708780 - RNA, 19 nt, Homo sapiens
  misc_RNA (1)...(19): siRNA sense strand
ggaaaugugccagugauau

SEQ ID NO: 1708781 - RNA, 19 nt, Homo sapiens
  misc_RNA (1)...(19): siRNA sense strand
gaccauggauaacuuagag

SEQ ID NO: 1708782 - RNA, 19 nt, Homo sapiens
  misc_RNA (1)...(19): siRNA sense strand
gagcagcagaccauggaua

SEQ ID NO: 1708783 - RNA, 19 nt, Homo sapiens
  misc_RNA (1)...(19): siRNA sense strand
gaagaggagcgcaucaaca

SEQ ID NO: 1708784 - RNA, 19 nt, Homo sapiens
  misc_RNA (1)...(19): siRNA sense strand
cacgaaaccuguggugauu

SEQ ID NO: 1708785 - RNA, 19 nt, Homo sapiens
  misc_RNA (1)...(19): siRNA sense strand
gagcgcaucucugaauuac

SEQ ID NO: 1708786 - RNA, 19 nt, Homo sapiens
  misc_RNA (1)...(19): siRNA sense strand
ccaaagagcagcagaccau

SEQ ID NO: 1708787 - RNA, 19 nt, Homo sapiens
  misc_RNA (1)...(19): siRNA sense strand
gcaucaacaucuacugucu

SEQ ID NO: 1708788 - RNA, 19 nt, Homo sapiens
  misc_RNA (1)...(19): siRNA sense strand
cgaaaccuguggugauucu

SEQ ID NO: 1708789 - RNA, 19 nt, Homo sapiens
  misc_RNA (1)...(19): siRNA sense strand
ggauagacaugggguauau

SEQ ID NO: 1708790 - RNA, 19 nt, Homo sapiens
  misc_RNA (1)...(19): siRNA sense strand
caacaucuacugucugaac

SEQ ID NO: 1708791 - RNA, 19 nt, Homo sapiens
  misc_RNA (1)...(19): siRNA sense strand
ucauugacaucuacaagca

SEQ ID NO: 1708792 - RNA, 19 nt, Homo sapiens
  misc_RNA (1)...(19): siRNA sense strand
gaggagcgcaucaacaucu

SEQ ID NO: 1708793 - RNA, 19 nt, Homo sapiens
  misc_RNA (1)...(19): siRNA sense strand
uuagagauguucacgaaac

SEQ ID NO: 1708794 - RNA, 19 nt, Homo sapiens
  misc_RNA (1)...(19): siRNA sense strand
caaccuguguaggaaaugu

SEQ ID NO: 1708795 - RNA, 19 nt, Homo sapiens
  misc_RNA (1)...(19): siRNA sense strand
uaggaaaugugccagugau

SEQ ID NO: 1708796 - RNA, 19 nt, Homo sapiens
  misc_RNA (1)...(19): siRNA sense strand
caucugucccaucugcuua

SEQ ID NO: 1708797 - RNA, 19 nt, Homo sapiens
  misc_RNA (1)...(19): siRNA sense strand
guaggaaaugugccaguga

SEQ ID NO: 1708798 - RNA, 19 nt, Homo sapiens
  misc_RNA (1)...(19): siRNA sense strand
ugucccaucugcuuagaga

SEQ ID NO: 1708799 - RNA, 19 nt, Homo sapiens
  misc_RNA (1)...(19): siRNA sense strand
gcuggaagacaccugcaaa

SEQ ID NO: 1708800 - RNA, 19 nt, Homo sapiens
  misc_RNA (1)...(19): siRNA sense strand
ggaaccugcugguggaaaa

SEQ ID NO: 1708801 - RNA, 19 nt, Homo sapiens
  misc_RNA (1)...(19): siRNA sense strand
gaucgaguccagggaguga

SEQ ID NO: 1708802 - RNA, 19 nt, Homo sapiens
  misc_RNA (1)...(19): siRNA sense strand
ccaggccucuaacccguau

SEQ ID NO: 1708803 - RNA, 19 nt, Homo sapiens
  misc_RNA (1)...(19): siRNA sense strand
cuguagacaugaagugguu

SEQ ID NO: 1708804 - RNA, 19 nt, Homo sapiens
  misc_RNA (1)...(19): siRNA sense strand
gcgcaucaacaucuacugu

SEQ ID NO: 1708805 - RNA, 19 nt, Homo sapiens
  misc_RNA (1)...(19): siRNA sense strand
gacaugaagugguuuugga

SEQ ID NO: 1708806 - RNA, 19 nt, Homo sapiens
  misc_RNA (1)...(19): siRNA sense strand
ugucugaacugcgaaguac

SEQ ID NO: 1708807 - RNA, 19 nt, Homo sapiens
  misc_RNA (1)...(19): siRNA sense strand
ccauggauaacuuagagaa

SEQ ID NO: 1708808 - RNA, 19 nt, Homo sapiens
  misc_RNA (1)...(19): siRNA sense strand
aucaacaucuacugucuga

SEQ ID NO: 1708809 - RNA, 19 nt, Homo sapiens
  misc_RNA (1)...(19): siRNA sense strand
aagaggagcgcaucaacau

SEQ ID NO: 1708810 - RNA, 19 nt, Homo sapiens
  misc_RNA (1)...(19): siRNA sense strand
uggauaacuuagagaagca

SEQ ID NO: 1708811 - RNA, 19 nt, Homo sapiens
  misc_RNA (1)...(19): siRNA sense strand
ggaagacaccugcaaaacu

SEQ ID NO: 1708812 - RNA, 19 nt, Homo sapiens
  misc_RNA (1)...(19): siRNA sense strand
uagagaagcaacucaucug

SEQ ID NO: 1708813 - RNA, 19 nt, Homo sapiens
  misc_RNA (1)...(19): siRNA sense strand
cagcagaccauggauaacu

SEQ ID NO: 1708814 - RNA, 19 nt, Homo sapiens
  misc_RNA (1)...(19): siRNA sense strand
gcgcaucucugaauuacaa

SEQ ID NO: 1708815 - RNA, 19 nt, Homo sapiens
  misc_RNA (1)...(19): siRNA sense strand
gaagacaccugcaaaacua

SEQ ID NO: 1708816 - RNA, 19 nt, Homo sapiens
  misc_RNA (1)...(19): siRNA sense strand
gaaaugugccagugauauu

SEQ ID NO: 1708817 - RNA, 19 nt, Homo sapiens
  misc_RNA (1)...(19): siRNA sense strand
gcuuagagauguucacgaa

SEQ ID NO: 1708818 - RNA, 19 nt, Homo sapiens
  misc_RNA (1)...(19): siRNA sense strand
caacucaucugucccaucu

SEQ ID NO: 1708819 - RNA, 19 nt, Homo sapiens
  misc_RNA (1)...(19): siRNA sense strand
uauauggacuucagaggaa

SEQ ID NO: 1708820 - RNA, 19 nt, Homo sapiens
  misc_RNA (1)...(19): siRNA sense strand
gcagaccauggauaacuua

SEQ ID NO: 1708821 - RNA, 19 nt, Homo sapiens
  misc_RNA (1)...(19): siRNA sense strand
guacccaccugcucucugu

SEQ ID NO: 1708822 - RNA, 19 nt, Homo sapiens
  misc_RNA (1)...(19): siRNA sense strand
ggaaaugugccagugauau

SEQ ID NO: 1708823 - RNA, 19 nt, Homo sapiens
  misc_RNA (1)...(19): siRNA sense strand
gaccauggauaacuuagag

SEQ ID NO: 1708824 - RNA, 19 nt, Homo sapiens
  misc_RNA (1)...(19): siRNA sense strand
gagcagcagaccauggaua

SEQ ID NO: 1708825 - RNA, 19 nt, Homo sapiens
  misc_RNA (1)...(19): siRNA sense strand
gcaguggagcugauucuga

SEQ ID NO: 1708826 - RNA, 19 nt, Homo sapiens
  misc_RNA (1)...(19): siRNA sense strand
gaagaggagcgcaucaaca

SEQ ID NO: 1708827 - RNA, 19 nt, Homo sapiens
  misc_RNA (1)...(19): siRNA sense strand
cacgaaaccuguggugauu

SEQ ID NO: 1708828 - RNA, 19 nt, Homo sapiens
  misc_RNA (1)...(19): siRNA sense strand
gagcgcaucucugaauuac

SEQ ID NO: 1708829 - RNA, 19 nt, Homo sapiens
  misc_RNA (1)...(19): siRNA sense strand
ccaaagagcagcagaccau

SEQ ID NO: 1708830 - RNA, 19 nt, Homo sapiens
  misc_RNA (1)...(19): siRNA sense strand
ugaacucccuaaaugaaug

SEQ ID NO: 1708831 - RNA, 19 nt, Homo sapiens
  misc_RNA (1)...(19): siRNA sense strand
gcaucaacaucuacugucu

SEQ ID NO: 1708832 - RNA, 19 nt, Homo sapiens
  misc_RNA (1)...(19): siRNA sense strand
ugguugaacucccuaaaug

SEQ ID NO: 1708833 - RNA, 19 nt, Homo sapiens
  misc_RNA (1)...(19): siRNA sense strand
gaacucccuaaaugaauga

SEQ ID NO: 1708834 - RNA, 19 nt, Homo sapiens
  misc_RNA (1)...(19): siRNA sense strand
cgaaaccuguggugauucu

SEQ ID NO: 1708835 - RNA, 19 nt, Homo sapiens
  misc_RNA (1)...(19): siRNA sense strand
guugaacucccuaaaugaa

SEQ ID NO: 1708836 - RNA, 19 nt, Homo sapiens
  misc_RNA (1)...(19): siRNA sense strand
ggauagacaugggguauau

SEQ ID NO: 1708837 - RNA, 19 nt, Homo sapiens
  misc_RNA (1)...(19): siRNA sense strand
caacaucuacugucugaac

SEQ ID NO: 1708838 - RNA, 19 nt, Homo sapiens
  misc_RNA (1)...(19): siRNA sense strand
ucauugacaucuacaagca

SEQ ID NO: 1708839 - RNA, 19 nt, Homo sapiens
  misc_RNA (1)...(19): siRNA sense strand
gaggagcgcaucaacaucu

SEQ ID NO: 1708840 - RNA, 19 nt, Homo sapiens
  misc_RNA (1)...(19): siRNA sense strand
uuagagauguucacgaaac

SEQ ID NO: 1708841 - RNA, 19 nt, Homo sapiens
  misc_RNA (1)...(19): siRNA sense strand
caaccuguguaggaaaugu

SEQ ID NO: 1708842 - RNA, 19 nt, Homo sapiens
  misc_RNA (1)...(19): siRNA sense strand
cgccauaucuucuccuuuu

SEQ ID NO: 1708843 - RNA, 19 nt, Homo sapiens
  misc_RNA (1)...(19): siRNA sense strand
uaggaaaugugccagugau

SEQ ID NO: 1708844 - RNA, 19 nt, Homo sapiens
  misc_RNA (1)...(19): siRNA sense strand
caucugucccaucugcuua

SEQ ID NO: 1708845 - RNA, 19 nt, Homo sapiens
  misc_RNA (1)...(19): siRNA sense strand
gguugaacucccuaaauga

SEQ ID NO: 1708846 - RNA, 19 nt, Homo sapiens
  misc_RNA (1)...(19): siRNA sense strand
guaggaaaugugccaguga

SEQ ID NO: 1708847 - RNA, 19 nt, Homo sapiens
  misc_RNA (1)...(19): siRNA sense strand
ugucccaucugcuuagaga

SEQ ID NO: 1708848 - RNA, 19 nt, Homo sapiens
  misc_RNA (1)...(19): siRNA sense strand
gcuggaagacaccugcaaa

SEQ ID NO: 1708849 - RNA, 19 nt, Homo sapiens
  misc_RNA (1)...(19): siRNA sense strand
ggaaccugcugguggaaaa

SEQ ID NO: 1708850 - RNA, 19 nt, Homo sapiens
  misc_RNA (1)...(19): siRNA sense strand
gaucgaguccagggaguga

SEQ ID NO: 1708851 - RNA, 19 nt, Homo sapiens
  misc_RNA (1)...(19): siRNA sense strand
ccaggccucuaacccguau

SEQ ID NO: 1708852 - RNA, 19 nt, Homo sapiens
  misc_RNA (1)...(19): siRNA sense strand
cuguagacaugaagugguu

SEQ ID NO: 1708853 - RNA, 19 nt, Homo sapiens
  misc_RNA (1)...(19): siRNA sense strand
gcgcaucaacaucuacugu

SEQ ID NO: 1708854 - RNA, 19 nt, Homo sapiens
  misc_RNA (1)...(19): siRNA sense strand
gacaugaagugguuuugga

SEQ ID NO: 1708855 - RNA, 19 nt, Homo sapiens
  misc_RNA (1)...(19): siRNA sense strand
ugucugaacugcgaaguac

SEQ ID NO: 1708856 - RNA, 19 nt, Homo sapiens
  misc_RNA (1)...(19): siRNA sense strand
aucaacaucuacugucuga

SEQ ID NO: 1708857 - RNA, 19 nt, Homo sapiens
  misc_RNA (1)...(19): siRNA sense strand
ccauggauaacuuagagaa

SEQ ID NO: 1708858 - RNA, 19 nt, Homo sapiens
  misc_RNA (1)...(19): siRNA sense strand
aagaggagcgcaucaacau

SEQ ID NO: 1708859 - RNA, 19 nt, Homo sapiens
  misc_RNA (1)...(19): siRNA sense strand
uagagaagcaacucaucug

SEQ ID NO: 1708860 - RNA, 19 nt, Homo sapiens
  misc_RNA (1)...(19): siRNA sense strand
uggauaacuuagagaagca

SEQ ID NO: 1708861 - RNA, 19 nt, Homo sapiens
  misc_RNA (1)...(19): siRNA sense strand
cagcagaccauggauaacu

SEQ ID NO: 1708862 - RNA, 19 nt, Homo sapiens
  misc_RNA (1)...(19): siRNA sense strand
gaguggcaguggagcugau

SEQ ID NO: 1708863 - RNA, 19 nt, Homo sapiens
  misc_RNA (1)...(19): siRNA sense strand
ggaagacaccugcaaaacu

SEQ ID NO: 1708864 - RNA, 19 nt, Homo sapiens
  misc_RNA (1)...(19): siRNA sense strand
gcgcaucucugaauuacaa

SEQ ID NO: 1708865 - RNA, 19 nt, Homo sapiens
  misc_RNA (1)...(19): siRNA sense strand
gaagacaccugcaaaacua

SEQ ID NO: 1708866 - RNA, 19 nt, Homo sapiens
  misc_RNA (1)...(19): siRNA sense strand
gaaaugugccagugauauu

SEQ ID NO: 1708867 - RNA, 19 nt, Homo sapiens
  misc_RNA (1)...(19): siRNA sense strand
gcuuagagauguucacgaa

SEQ ID NO: 1708868 - RNA, 19 nt, Homo sapiens
  misc_RNA (1)...(19): siRNA sense strand
caacucaucugucccaucu

SEQ ID NO: 1708869 - RNA, 19 nt, Homo sapiens
  misc_RNA (1)...(19): siRNA sense strand
uauauggacuucagaggaa

SEQ ID NO: 1708870 - RNA, 19 nt, Homo sapiens
  misc_RNA (1)...(19): siRNA sense strand
gcagaccauggauaacuua

SEQ ID NO: 1708871 - RNA, 19 nt, Homo sapiens
  misc_RNA (1)...(19): siRNA sense strand
guacccaccugcucucugu

SEQ ID NO: 1708872 - RNA, 19 nt, Homo sapiens
  misc_RNA (1)...(19): siRNA sense strand
ggaaaugugccagugauau

SEQ ID NO: 1708873 - RNA, 19 nt, Homo sapiens
  misc_RNA (1)...(19): siRNA sense strand
gaccauggauaacuuagag

SEQ ID NO: 1708874 - RNA, 19 nt, Homo sapiens
  misc_RNA (1)...(19): siRNA sense strand
gagcagcagaccauggaua

SEQ ID NO: 1708875 - RNA, 19 nt, Homo sapiens
  misc_RNA (1)...(19): siRNA sense strand
gcaguggagcugauucuga

SEQ ID NO: 1708876 - RNA, 19 nt, Homo sapiens
  misc_RNA (1)...(19): siRNA sense strand
gaagaggagcgcaucaaca

SEQ ID NO: 1708877 - RNA, 19 nt, Homo sapiens
  misc_RNA (1)...(19): siRNA sense strand
cacgaaaccuguggugauu

SEQ ID NO: 1708878 - RNA, 19 nt, Homo sapiens
  misc_RNA (1)...(19): siRNA sense strand
gagcgcaucucugaauuac

SEQ ID NO: 1708879 - RNA, 19 nt, Homo sapiens
  misc_RNA (1)...(19): siRNA sense strand
ccaaagagcagcagaccau

SEQ ID NO: 1708880 - RNA, 19 nt, Homo sapiens
  misc_RNA (1)...(19): siRNA sense strand
ugaacucccuaaaugaaug

SEQ ID NO: 1708881 - RNA, 19 nt, Homo sapiens
  misc_RNA (1)...(19): siRNA sense strand
gcaucaacaucuacugucu

SEQ ID NO: 1708882 - RNA, 19 nt, Homo sapiens
  misc_RNA (1)...(19): siRNA sense strand
ugguugaacucccuaaaug

SEQ ID NO: 1708883 - RNA, 19 nt, Homo sapiens
  misc_RNA (1)...(19): siRNA sense strand
gaacucccuaaaugaauga

SEQ ID NO: 1708884 - RNA, 19 nt, Homo sapiens
  misc_RNA (1)...(19): siRNA sense strand
cgaaaccuguggugauucu

SEQ ID NO: 1708885 - RNA, 19 nt, Homo sapiens
  misc_RNA (1)...(19): siRNA sense strand
guugaacucccuaaaugaa

SEQ ID NO: 1708886 - RNA, 19 nt, Homo sapiens
  misc_RNA (1)...(19): siRNA sense strand
ggauagacaugggguauau

SEQ ID NO: 1708887 - RNA, 19 nt, Homo sapiens
  misc_RNA (1)...(19): siRNA sense strand
caacaucuacugucugaac

SEQ ID NO: 1708888 - RNA, 19 nt, Homo sapiens
  misc_RNA (1)...(19): siRNA sense strand
ucauugacaucuacaagca

SEQ ID NO: 1708889 - RNA, 19 nt, Homo sapiens
  misc_RNA (1)...(19): siRNA sense strand
gaggagcgcaucaacaucu

SEQ ID NO: 1708890 - RNA, 19 nt, Homo sapiens
  misc_RNA (1)...(19): siRNA sense strand
uuagagauguucacgaaac

SEQ ID NO: 1708891 - RNA, 19 nt, Homo sapiens
  misc_RNA (1)...(19): siRNA sense strand
caaccuguguaggaaaugu

SEQ ID NO: 1708892 - RNA, 19 nt, Homo sapiens
  misc_RNA (1)...(19): siRNA sense strand
cgccauaucuucuccuuuu

SEQ ID NO: 1708893 - RNA, 19 nt, Homo sapiens
  misc_RNA (1)...(19): siRNA sense strand
uaggaaaugugccagugau

SEQ ID NO: 1708894 - RNA, 19 nt, Homo sapiens
  misc_RNA (1)...(19): siRNA sense strand
caucugucccaucugcuua

SEQ ID NO: 1708895 - RNA, 19 nt, Homo sapiens
  misc_RNA (1)...(19): siRNA sense strand
gguugaacucccuaaauga

SEQ ID NO: 1708896 - RNA, 19 nt, Homo sapiens
  misc_RNA (1)...(19): siRNA sense strand
guaggaaaugugccaguga

SEQ ID NO: 1708897 - RNA, 19 nt, Homo sapiens
  misc_RNA (1)...(19): siRNA sense strand
ugucccaucugcuuagaga

SEQ ID NO: 1708898 - RNA, 19 nt, Homo sapiens
  misc_RNA (1)...(19): siRNA sense strand
gcuggaagacaccugcaaa

SEQ ID NO: 1708899 - RNA, 19 nt, Homo sapiens
  misc_RNA (1)...(19): siRNA sense strand
ggaaccugcugguggaaaa

SEQ ID NO: 1708900 - RNA, 19 nt, Homo sapiens
  misc_RNA (1)...(19): siRNA sense strand
gaucgaguccagggaguga

SEQ ID NO: 1708901 - RNA, 19 nt, Homo sapiens
  misc_RNA (1)...(19): siRNA sense strand
ccaggccucuaacccguau

SEQ ID NO: 1708902 - RNA, 19 nt, Homo sapiens
  misc_RNA (1)...(19): siRNA sense strand
cuguagacaugaagugguu

SEQ ID NO: 1708903 - RNA, 19 nt, Homo sapiens
  misc_RNA (1)...(19): siRNA sense strand
gcgcaucaacaucuacugu

SEQ ID NO: 1708904 - RNA, 19 nt, Homo sapiens
  misc_RNA (1)...(19): siRNA sense strand
gacaugaagugguuuugga

SEQ ID NO: 1708905 - RNA, 19 nt, Homo sapiens
  misc_RNA (1)...(19): siRNA sense strand
ugucugaacugcgaaguac

SEQ ID NO: 1708906 - RNA, 19 nt, Homo sapiens
  misc_RNA (1)...(19): siRNA sense strand
aucaacaucuacugucuga

SEQ ID NO: 1708907 - RNA, 19 nt, Homo sapiens
  misc_RNA (1)...(19): siRNA sense strand
ccauggauaacuuagagaa

SEQ ID NO: 1708908 - RNA, 19 nt, Homo sapiens
  misc_RNA (1)...(19): siRNA sense strand
aagaggagcgcaucaacau

SEQ ID NO: 1708909 - RNA, 19 nt, Homo sapiens
  misc_RNA (1)...(19): siRNA sense strand
uagagaagcaacucaucug

SEQ ID NO: 1708910 - RNA, 19 nt, Homo sapiens
  misc_RNA (1)...(19): siRNA sense strand
uggauaacuuagagaagca

SEQ ID NO: 1708911 - RNA, 19 nt, Homo sapiens
  misc_RNA (1)...(19): siRNA sense strand
cagcagaccauggauaacu

SEQ ID NO: 1708912 - RNA, 19 nt, Homo sapiens
  misc_RNA (1)...(19): siRNA sense strand
gaguggcaguggagcugau

SEQ ID NO: 1708913 - RNA, 19 nt, Homo sapiens
  misc_RNA (1)...(19): siRNA sense strand
ggaagacaccugcaaaacu

SEQ ID NO: 1708914 - RNA, 19 nt, Homo sapiens
  misc_RNA (1)...(19): siRNA sense strand
gcgcaucucugaauuacaa

SEQ ID NO: 1708915 - RNA, 19 nt, Homo sapiens
  misc_RNA (1)...(19): siRNA sense strand
gaagacaccugcaaaacua

SEQ ID NO: 1708916 - RNA, 19 nt, Homo sapiens
  misc_RNA (1)...(19): siRNA sense strand
gaaaugugccagugauauu

SEQ ID NO: 1708917 - RNA, 19 nt, Homo sapiens
  misc_RNA (1)...(19): siRNA sense strand
gcuuagagauguucacgaa

SEQ ID NO: 1708918 - RNA, 19 nt, Homo sapiens
  misc_RNA (1)...(19): siRNA sense strand
caacucaucugucccaucu

SEQ ID NO: 1708919 - RNA, 19 nt, Homo sapiens
  misc_RNA (1)...(19): siRNA sense strand
uauauggacuucagaggaa

SEQ ID NO: 1708920 - RNA, 19 nt, Homo sapiens
  misc_RNA (1)...(19): siRNA sense strand
gcagaccauggauaacuua

SEQ ID NO: 1708921 - RNA, 19 nt, Homo sapiens
  misc_RNA (1)...(19): siRNA sense strand
guacccaccugcucucugu

SEQ ID NO: 1708922 - RNA, 19 nt, Homo sapiens
  misc_RNA (1)...(19): siRNA sense strand
ggaaaugugccagugauau

SEQ ID NO: 1708923 - RNA, 19 nt, Homo sapiens
  misc_RNA (1)...(19): siRNA sense strand
gaccauggauaacuuagag

SEQ ID NO: 1708924 - RNA, 19 nt, Homo sapiens
  misc_RNA (1)...(19): siRNA sense strand
gagcagcagaccauggaua

SEQ ID NO: 1708925 - RNA, 19 nt, Homo sapiens
  misc_RNA (1)...(19): siRNA sense strand
gcaguggagcugauucuga

SEQ ID NO: 1708926 - RNA, 19 nt, Homo sapiens
  misc_RNA (1)...(19): siRNA sense strand
gaagaggagcgcaucaaca

SEQ ID NO: 1708927 - RNA, 19 nt, Homo sapiens
  misc_RNA (1)...(19): siRNA sense strand
cacgaaaccuguggugauu

SEQ ID NO: 1708928 - RNA, 19 nt, Homo sapiens
  misc_RNA (1)...(19): siRNA sense strand
gagcgcaucucugaauuac

SEQ ID NO: 1708929 - RNA, 19 nt, Homo sapiens
  misc_RNA (1)...(19): siRNA sense strand
ccaaagagcagcagaccau

SEQ ID NO: 1708930 - RNA, 19 nt, Homo sapiens
  misc_RNA (1)...(19): siRNA sense strand
ugaacucccuaaaugaaug

SEQ ID NO: 1708931 - RNA, 19 nt, Homo sapiens
  misc_RNA (1)...(19): siRNA sense strand
gcaucaacaucuacugucu

SEQ ID NO: 1708932 - RNA, 19 nt, Homo sapiens
  misc_RNA (1)...(19): siRNA sense strand
ugguugaacucccuaaaug

SEQ ID NO: 1708933 - RNA, 19 nt, Homo sapiens
  misc_RNA (1)...(19): siRNA sense strand
gaacucccuaaaugaauga

SEQ ID NO: 1708934 - RNA, 19 nt, Homo sapiens
  misc_RNA (1)...(19): siRNA sense strand
cgaaaccuguggugauucu

SEQ ID NO: 1708935 - RNA, 19 nt, Homo sapiens
  misc_RNA (1)...(19): siRNA sense strand
guugaacucccuaaaugaa

SEQ ID NO: 1708936 - RNA, 19 nt, Homo sapiens
  misc_RNA (1)...(19): siRNA sense strand
ggauagacaugggguauau

SEQ ID NO: 1708937 - RNA, 19 nt, Homo sapiens
  misc_RNA (1)...(19): siRNA sense strand
caacaucuacugucugaac

SEQ ID NO: 1708938 - RNA, 19 nt, Homo sapiens
  misc_RNA (1)...(19): siRNA sense strand
ucauugacaucuacaagca

SEQ ID NO: 1708939 - RNA, 19 nt, Homo sapiens
  misc_RNA (1)...(19): siRNA sense strand
gaggagcgcaucaacaucu

SEQ ID NO: 1708940 - RNA, 19 nt, Homo sapiens
  misc_RNA (1)...(19): siRNA sense strand
uuagagauguucacgaaac

SEQ ID NO: 1708941 - RNA, 19 nt, Homo sapiens
  misc_RNA (1)...(19): siRNA sense strand
caaccuguguaggaaaugu

SEQ ID NO: 1708942 - RNA, 19 nt, Homo sapiens
  misc_RNA (1)...(19): siRNA sense strand
cgccauaucuucuccuuuu

SEQ ID NO: 1708943 - RNA, 19 nt, Homo sapiens
  misc_RNA (1)...(19): siRNA sense strand
uaggaaaugugccagugau

SEQ ID NO: 1708944 - RNA, 19 nt, Homo sapiens
  misc_RNA (1)...(19): siRNA sense strand
caucugucccaucugcuua

SEQ ID NO: 1708945 - RNA, 19 nt, Homo sapiens
  misc_RNA (1)...(19): siRNA sense strand
gguugaacucccuaaauga

SEQ ID NO: 1708946 - RNA, 19 nt, Homo sapiens
  misc_RNA (1)...(19): siRNA sense strand
guaggaaaugugccaguga

SEQ ID NO: 1708947 - RNA, 19 nt, Homo sapiens
  misc_RNA (1)...(19): siRNA sense strand
ugucccaucugcuuagaga

SEQ ID NO: 1708948 - RNA, 19 nt, Homo sapiens
  misc_RNA (1)...(19): siRNA sense strand
gcuggaagacaccugcaaa

SEQ ID NO: 1708949 - RNA, 19 nt, Homo sapiens
  misc_RNA (1)...(19): siRNA sense strand
ggaaccugcugguggaaaa

SEQ ID NO: 1708950 - RNA, 19 nt, Homo sapiens
  misc_RNA (1)...(19): siRNA sense strand
gaucgaguccagggaguga

SEQ ID NO: 1708951 - RNA, 19 nt, Homo sapiens
  misc_RNA (1)...(19): siRNA sense strand
ccaggccucuaacccguau

SEQ ID NO: 1708952 - RNA, 19 nt, Homo sapiens
  misc_RNA (1)...(19): siRNA sense strand
cuguagacaugaagugguu

SEQ ID NO: 1708953 - RNA, 19 nt, Homo sapiens
  misc_RNA (1)...(19): siRNA sense strand
gcgcaucaacaucuacugu

SEQ ID NO: 1708954 - RNA, 19 nt, Homo sapiens
  misc_RNA (1)...(19): siRNA sense strand
gacaugaagugguuuugga

SEQ ID NO: 1708955 - RNA, 19 nt, Homo sapiens
  misc_RNA (1)...(19): siRNA sense strand
ugucugaacugcgaaguac

SEQ ID NO: 1708956 - RNA, 19 nt, Homo sapiens
  misc_RNA (1)...(19): siRNA sense strand
aucaacaucuacugucuga

SEQ ID NO: 1708957 - RNA, 19 nt, Homo sapiens
  misc_RNA (1)...(19): siRNA sense strand
ccauggauaacuuagagaa

SEQ ID NO: 1708958 - RNA, 19 nt, Homo sapiens
  misc_RNA (1)...(19): siRNA sense strand
aagaggagcgcaucaacau

SEQ ID NO: 1708959 - RNA, 19 nt, Homo sapiens
  misc_RNA (1)...(19): siRNA sense strand
uagagaagcaacucaucug

SEQ ID NO: 1708960 - RNA, 19 nt, Homo sapiens
  misc_RNA (1)...(19): siRNA sense strand
uggauaacuuagagaagca

SEQ ID NO: 1708961 - RNA, 19 nt, Homo sapiens
  misc_RNA (1)...(19): siRNA sense strand
cagcagaccauggauaacu

SEQ ID NO: 1708962 - RNA, 19 nt, Homo sapiens
  misc_RNA (1)...(19): siRNA sense strand
gaguggcaguggagcugau

SEQ ID NO: 1708963 - RNA, 19 nt, Homo sapiens
  misc_RNA (1)...(19): siRNA sense strand
ggaagacaccugcaaaacu

SEQ ID NO: 1708964 - RNA, 19 nt, Homo sapiens
  misc_RNA (1)...(19): siRNA sense strand
gcgcaucucugaauuacaa

SEQ ID NO: 1708965 - RNA, 19 nt, Homo sapiens
  misc_RNA (1)...(19): siRNA sense strand
gaagacaccugcaaaacua

SEQ ID NO: 1708966 - RNA, 19 nt, Homo sapiens
  misc_RNA (1)...(19): siRNA sense strand
gaaaugugccagugauauu

SEQ ID NO: 1708967 - RNA, 19 nt, Homo sapiens
  misc_RNA (1)...(19): siRNA sense strand
gcuuagagauguucacgaa

SEQ ID NO: 1708968 - RNA, 19 nt, Homo sapiens
  misc_RNA (1)...(19): siRNA sense strand
caacucaucugucccaucu

SEQ ID NO: 1708969 - RNA, 19 nt, Homo sapiens
  misc_RNA (1)...(19): siRNA sense strand
uauauggacuucagaggaa

SEQ ID NO: 1708970 - RNA, 19 nt, Homo sapiens
  misc_RNA (1)...(19): siRNA sense strand
gcagaccauggauaacuua

SEQ ID NO: 1708971 - RNA, 19 nt, Homo sapiens
  misc_RNA (1)...(19): siRNA sense strand
guacccaccugcucucugu

SEQ ID NO: 1708972 - RNA, 19 nt, Homo sapiens
  misc_RNA (1)...(19): siRNA sense strand
ggaaaugugccagugauau

SEQ ID NO: 1708973 - RNA, 19 nt, Homo sapiens
  misc_RNA (1)...(19): siRNA sense strand
gaccauggauaacuuagag

SEQ ID NO: 1708974 - RNA, 19 nt, Homo sapiens
  misc_RNA (1)...(19): siRNA sense strand
gagcagcagaccauggaua

SEQ ID NO: 1708975 - RNA, 19 nt, Homo sapiens
  misc_RNA (1)...(19): siRNA sense strand
gaagaggagcgcaucaaca

SEQ ID NO: 1708976 - RNA, 19 nt, Homo sapiens
  misc_RNA (1)...(19): siRNA sense strand
cacgaaaccuguggugauu

SEQ ID NO: 1708977 - RNA, 19 nt, Homo sapiens
  misc_RNA (1)...(19): siRNA sense strand
gagcgcaucucugaauuac

SEQ ID NO: 1708978 - RNA, 19 nt, Homo sapiens
  misc_RNA (1)...(19): siRNA sense strand
ccaaagagcagcagaccau

SEQ ID NO: 1708979 - RNA, 19 nt, Homo sapiens
  misc_RNA (1)...(19): siRNA sense strand
gcaucaacaucuacugucu

SEQ ID NO: 1708980 - RNA, 19 nt, Homo sapiens
  misc_RNA (1)...(19): siRNA sense strand
cgaaaccuguggugauucu

SEQ ID NO: 1708981 - RNA, 19 nt, Homo sapiens
  misc_RNA (1)...(19): siRNA sense strand
ggauagacaugggguauau

SEQ ID NO: 1708982 - RNA, 19 nt, Homo sapiens
  misc_RNA (1)...(19): siRNA sense strand
caacaucuacugucugaac

SEQ ID NO: 1708983 - RNA, 19 nt, Homo sapiens
  misc_RNA (1)...(19): siRNA sense strand
ucauugacaucuacaagca

SEQ ID NO: 1708984 - RNA, 19 nt, Homo sapiens
  misc_RNA (1)...(19): siRNA sense strand
gaggagcgcaucaacaucu

SEQ ID NO: 1708985 - RNA, 19 nt, Homo sapiens
  misc_RNA (1)...(19): siRNA sense strand
uuagagauguucacgaaac

SEQ ID NO: 1708986 - RNA, 19 nt, Homo sapiens
  misc_RNA (1)...(19): siRNA sense strand
caaccuguguaggaaaugu

SEQ ID NO: 1708987 - RNA, 19 nt, Homo sapiens
  misc_RNA (1)...(19): siRNA sense strand
uaggaaaugugccagugau

SEQ ID NO: 1708988 - RNA, 19 nt, Homo sapiens
  misc_RNA (1)...(19): siRNA sense strand
caucugucccaucugcuua

SEQ ID NO: 1708989 - RNA, 19 nt, Homo sapiens
  misc_RNA (1)...(19): siRNA sense strand
guaggaaaugugccaguga

SEQ ID NO: 1708990 - RNA, 19 nt, Homo sapiens
  misc_RNA (1)...(19): siRNA sense strand
ugucccaucugcuuagaga

SEQ ID NO: 1708991 - RNA, 19 nt, Homo sapiens
  misc_RNA (1)...(19): siRNA sense strand
gcuggaagacaccugcaaa

SEQ ID NO: 1708992 - RNA, 19 nt, Homo sapiens
  misc_RNA (1)...(19): siRNA sense strand
ggaaccugcugguggaaaa

SEQ ID NO: 1708993 - RNA, 19 nt, Homo sapiens
  misc_RNA (1)...(19): siRNA sense strand
gaucgaguccagggaguga

SEQ ID NO: 1708994 - RNA, 19 nt, Homo sapiens
  misc_RNA (1)...(19): siRNA sense strand
ccaggccucuaacccguau

SEQ ID NO: 1708995 - RNA, 19 nt, Homo sapiens
  misc_RNA (1)...(19): siRNA sense strand
cuguagacaugaagugguu

SEQ ID NO: 1708996 - RNA, 19 nt, Homo sapiens
  misc_RNA (1)...(19): siRNA sense strand
gcgcaucaacaucuacugu

SEQ ID NO: 1708997 - RNA, 19 nt, Homo sapiens
  misc_RNA (1)...(19): siRNA sense strand
gacaugaagugguuuugga

SEQ ID NO: 1708998 - RNA, 19 nt, Homo sapiens
  misc_RNA (1)...(19): siRNA sense strand
ugucugaacugcgaaguac

SEQ ID NO: 1708999 - RNA, 19 nt, Homo sapiens
  misc_RNA (1)...(19): siRNA sense strand
ccauggauaacuuagagaa

SEQ ID NO: 1709000 - RNA, 19 nt, Homo sapiens
  misc_RNA (1)...(19): siRNA sense strand
aucaacaucuacugucuga

SEQ ID NO: 1709001 - RNA, 19 nt, Homo sapiens
  misc_RNA (1)...(19): siRNA sense strand
aagaggagcgcaucaacau

SEQ ID NO: 1709002 - RNA, 19 nt, Homo sapiens
  misc_RNA (1)...(19): siRNA sense strand
uggauaacuuagagaagca

SEQ ID NO: 1709003 - RNA, 19 nt, Homo sapiens
  misc_RNA (1)...(19): siRNA sense strand
ggaagacaccugcaaaacu

SEQ ID NO: 1709004 - RNA, 19 nt, Homo sapiens
  misc_RNA (1)...(19): siRNA sense strand
uagagaagcaacucaucug

SEQ ID NO: 1709005 - RNA, 19 nt, Homo sapiens
  misc_RNA (1)...(19): siRNA sense strand
cagcagaccauggauaacu

SEQ ID NO: 1709006 - RNA, 19 nt, Homo sapiens
  misc_RNA (1)...(19): siRNA sense strand
gcgcaucucugaauuacaa

SEQ ID NO: 1709007 - RNA, 19 nt, Homo sapiens
  misc_RNA (1)...(19): siRNA sense strand
gaagacaccugcaaaacua

SEQ ID NO: 1709008 - RNA, 19 nt, Homo sapiens
  misc_RNA (1)...(19): siRNA sense strand
gaaaugugccagugauauu

SEQ ID NO: 1709009 - RNA, 19 nt, Homo sapiens
  misc_RNA (1)...(19): siRNA sense strand
gcuuagagauguucacgaa

SEQ ID NO: 1709010 - RNA, 19 nt, Homo sapiens
  misc_RNA (1)...(19): siRNA sense strand
caacucaucugucccaucu

SEQ ID NO: 1709011 - RNA, 19 nt, Homo sapiens
  misc_RNA (1)...(19): siRNA sense strand
uauauggacuucagaggaa

SEQ ID NO: 1709012 - RNA, 19 nt, Homo sapiens
  misc_RNA (1)...(19): siRNA sense strand
gcagaccauggauaacuua

SEQ ID NO: 1709013 - RNA, 19 nt, Homo sapiens
  misc_RNA (1)...(19): siRNA sense strand
guacccaccugcucucugu

SEQ ID NO: 1709014 - RNA, 19 nt, Homo sapiens
  misc_RNA (1)...(19): siRNA sense strand
ggaaaugugccagugauau

SEQ ID NO: 1709015 - RNA, 19 nt, Homo sapiens
  misc_RNA (1)...(19): siRNA sense strand
gaccauggauaacuuagag

SEQ ID NO: 1709016 - RNA, 19 nt, Homo sapiens
  misc_RNA (1)...(19): siRNA sense strand
gagcagcagaccauggaua

SEQ ID NO: 1709017 - RNA, 19 nt, Homo sapiens
  misc_RNA (1)...(19): siRNA sense strand
gcaguggagcugauucuga

SEQ ID NO: 1709018 - RNA, 19 nt, Homo sapiens
  misc_RNA (1)...(19): siRNA sense strand
gaagaggagcgcaucaaca

SEQ ID NO: 1709019 - RNA, 19 nt, Homo sapiens
  misc_RNA (1)...(19): siRNA sense strand
cacgaaaccuguggugauu

SEQ ID NO: 1709020 - RNA, 19 nt, Homo sapiens
  misc_RNA (1)...(19): siRNA sense strand
gagcgcaucucugaauuac

SEQ ID NO: 1709021 - RNA, 19 nt, Homo sapiens
  misc_RNA (1)...(19): siRNA sense strand
ccaaagagcagcagaccau

SEQ ID NO: 1709022 - RNA, 19 nt, Homo sapiens
  misc_RNA (1)...(19): siRNA sense strand
ugaacucccuaaaugaaug

SEQ ID NO: 1709023 - RNA, 19 nt, Homo sapiens
  misc_RNA (1)...(19): siRNA sense strand
gcaucaacaucuacugucu

SEQ ID NO: 1709024 - RNA, 19 nt, Homo sapiens
  misc_RNA (1)...(19): siRNA sense strand
ugguugaacucccuaaaug

SEQ ID NO: 1709025 - RNA, 19 nt, Homo sapiens
  misc_RNA (1)...(19): siRNA sense strand
gaacucccuaaaugaauga

SEQ ID NO: 1709026 - RNA, 19 nt, Homo sapiens
  misc_RNA (1)...(19): siRNA sense strand
cgaaaccuguggugauucu

SEQ ID NO: 1709027 - RNA, 19 nt, Homo sapiens
  misc_RNA (1)...(19): siRNA sense strand
guugaacucccuaaaugaa

SEQ ID NO: 1709028 - RNA, 19 nt, Homo sapiens
  misc_RNA (1)...(19): siRNA sense strand
ggauagacaugggguauau

SEQ ID NO: 1709029 - RNA, 19 nt, Homo sapiens
  misc_RNA (1)...(19): siRNA sense strand
caacaucuacugucugaac

SEQ ID NO: 1709030 - RNA, 19 nt, Homo sapiens
  misc_RNA (1)...(19): siRNA sense strand
ucauugacaucuacaagca

SEQ ID NO: 1709031 - RNA, 19 nt, Homo sapiens
  misc_RNA (1)...(19): siRNA sense strand
gaggagcgcaucaacaucu

SEQ ID NO: 1709032 - RNA, 19 nt, Homo sapiens
  misc_RNA (1)...(19): siRNA sense strand
uuagagauguucacgaaac

SEQ ID NO: 1709033 - RNA, 19 nt, Homo sapiens
  misc_RNA (1)...(19): siRNA sense strand
caaccuguguaggaaaugu

SEQ ID NO: 1709034 - RNA, 19 nt, Homo sapiens
  misc_RNA (1)...(19): siRNA sense strand
cgccauaucuucuccuuuu

SEQ ID NO: 1709035 - RNA, 19 nt, Homo sapiens
  misc_RNA (1)...(19): siRNA sense strand
uaggaaaugugccagugau

SEQ ID NO: 1709036 - RNA, 19 nt, Homo sapiens
  misc_RNA (1)...(19): siRNA sense strand
caucugucccaucugcuua

SEQ ID NO: 1709037 - RNA, 19 nt, Homo sapiens
  misc_RNA (1)...(19): siRNA sense strand
gguugaacucccuaaauga

SEQ ID NO: 1709038 - RNA, 19 nt, Homo sapiens
  misc_RNA (1)...(19): siRNA sense strand
guaggaaaugugccaguga

SEQ ID NO: 1709039 - RNA, 19 nt, Homo sapiens
  misc_RNA (1)...(19): siRNA sense strand
ugucccaucugcuuagaga

SEQ ID NO: 1709040 - RNA, 19 nt, Homo sapiens
  misc_RNA (1)...(19): siRNA sense strand
gcuggaagacaccugcaaa

SEQ ID NO: 1709041 - RNA, 19 nt, Homo sapiens
  misc_RNA (1)...(19): siRNA sense strand
ggaaccugcugguggaaaa

SEQ ID NO: 1709042 - RNA, 19 nt, Homo sapiens
  misc_RNA (1)...(19): siRNA sense strand
gaucgaguccagggaguga

SEQ ID NO: 1709043 - RNA, 19 nt, Homo sapiens
  misc_RNA (1)...(19): siRNA sense strand
ccaggccucuaacccguau

SEQ ID NO: 1709044 - RNA, 19 nt, Homo sapiens
  misc_RNA (1)...(19): siRNA sense strand
cuguagacaugaagugguu

SEQ ID NO: 1709045 - RNA, 19 nt, Homo sapiens
  misc_RNA (1)...(19): siRNA sense strand
gcgcaucaacaucuacugu

SEQ ID NO: 1709046 - RNA, 19 nt, Homo sapiens
  misc_RNA (1)...(19): siRNA sense strand
gacaugaagugguuuugga

SEQ ID NO: 1709047 - RNA, 19 nt, Homo sapiens
  misc_RNA (1)...(19): siRNA sense strand
ugucugaacugcgaaguac

SEQ ID NO: 1709048 - RNA, 19 nt, Homo sapiens
  misc_RNA (1)...(19): siRNA sense strand
aucaacaucuacugucuga

SEQ ID NO: 1709049 - RNA, 19 nt, Homo sapiens
  misc_RNA (1)...(19): siRNA sense strand
ccauggauaacuuagagaa

SEQ ID NO: 1709050 - RNA, 19 nt, Homo sapiens
  misc_RNA (1)...(19): siRNA sense strand
aagaggagcgcaucaacau

SEQ ID NO: 1709051 - RNA, 19 nt, Homo sapiens
  misc_RNA (1)...(19): siRNA sense strand
uagagaagcaacucaucug

SEQ ID NO: 1709052 - RNA, 19 nt, Homo sapiens
  misc_RNA (1)...(19): siRNA sense strand
uggauaacuuagagaagca

SEQ ID NO: 1709053 - RNA, 19 nt, Homo sapiens
  misc_RNA (1)...(19): siRNA sense strand
cagcagaccauggauaacu

SEQ ID NO: 1709054 - RNA, 19 nt, Homo sapiens
  misc_RNA (1)...(19): siRNA sense strand
gaguggcaguggagcugau

SEQ ID NO: 1709055 - RNA, 19 nt, Homo sapiens
  misc_RNA (1)...(19): siRNA sense strand
ggaagacaccugcaaaacu

SEQ ID NO: 1709056 - RNA, 19 nt, Homo sapiens
  misc_RNA (1)...(19): siRNA sense strand
gcgcaucucugaauuacaa

SEQ ID NO: 1709057 - RNA, 19 nt, Homo sapiens
  misc_RNA (1)...(19): siRNA sense strand
gaagacaccugcaaaacua

SEQ ID NO: 1709058 - RNA, 19 nt, Homo sapiens
  misc_RNA (1)...(19): siRNA sense strand
gaaaugugccagugauauu

SEQ ID NO: 1709059 - RNA, 19 nt, Homo sapiens
  misc_RNA (1)...(19): siRNA sense strand
gcuuagagauguucacgaa

SEQ ID NO: 1709060 - RNA, 19 nt, Homo sapiens
  misc_RNA (1)...(19): siRNA sense strand
caacucaucugucccaucu

SEQ ID NO: 1709061 - RNA, 19 nt, Homo sapiens
  misc_RNA (1)...(19): siRNA sense strand
uauauggacuucagaggaa

SEQ ID NO: 1709062 - RNA, 19 nt, Homo sapiens
  misc_RNA (1)...(19): siRNA sense strand
gcagaccauggauaacuua

SEQ ID NO: 1709063 - RNA, 19 nt, Homo sapiens
  misc_RNA (1)...(19): siRNA sense strand
guacccaccugcucucugu

SEQ ID NO: 1709064 - RNA, 19 nt, Homo sapiens
  misc_RNA (1)...(19): siRNA sense strand
ggaaaugugccagugauau

SEQ ID NO: 1709065 - RNA, 19 nt, Homo sapiens
  misc_RNA (1)...(19): siRNA sense strand
gaccauggauaacuuagag

SEQ ID NO: 1709066 - RNA, 19 nt, Homo sapiens
  misc_RNA (1)...(19): siRNA sense strand
gagcagcagaccauggaua

SEQ ID NO: 1709067 - RNA, 19 nt, Homo sapiens
  misc_RNA (1)...(19): siRNA sense strand
gcaguggagcugauucuga

SEQ ID NO: 1709068 - RNA, 19 nt, Homo sapiens
  misc_RNA (1)...(19): siRNA sense strand
gaagaggagcgcaucaaca

SEQ ID NO: 1709069 - RNA, 19 nt, Homo sapiens
  misc_RNA (1)...(19): siRNA sense strand
cacgaaaccuguggugauu

SEQ ID NO: 1709070 - RNA, 19 nt, Homo sapiens
  misc_RNA (1)...(19): siRNA sense strand
gagcgcaucucugaauuac

SEQ ID NO: 1709071 - RNA, 19 nt, Homo sapiens
  misc_RNA (1)...(19): siRNA sense strand
ccaaagagcagcagaccau

SEQ ID NO: 1709072 - RNA, 19 nt, Homo sapiens
  misc_RNA (1)...(19): siRNA sense strand
ugaacucccuaaaugaaug

SEQ ID NO: 1709073 - RNA, 19 nt, Homo sapiens
  misc_RNA (1)...(19): siRNA sense strand
gcaucaacaucuacugucu

SEQ ID NO: 1709074 - RNA, 19 nt, Homo sapiens
  misc_RNA (1)...(19): siRNA sense strand
ugguugaacucccuaaaug

SEQ ID NO: 1709075 - RNA, 19 nt, Homo sapiens
  misc_RNA (1)...(19): siRNA sense strand
gaacucccuaaaugaauga

SEQ ID NO: 1709076 - RNA, 19 nt, Homo sapiens
  misc_RNA (1)...(19): siRNA sense strand
cgaaaccuguggugauucu

SEQ ID NO: 1709077 - RNA, 19 nt, Homo sapiens
  misc_RNA (1)...(19): siRNA sense strand
guugaacucccuaaaugaa

SEQ ID NO: 1709078 - RNA, 19 nt, Homo sapiens
  misc_RNA (1)...(19): siRNA sense strand
ggauagacaugggguauau

SEQ ID NO: 1709079 - RNA, 19 nt, Homo sapiens
  misc_RNA (1)...(19): siRNA sense strand
caacaucuacugucugaac

SEQ ID NO: 1709080 - RNA, 19 nt, Homo sapiens
  misc_RNA (1)...(19): siRNA sense strand
ucauugacaucuacaagca

SEQ ID NO: 1709081 - RNA, 19 nt, Homo sapiens
  misc_RNA (1)...(19): siRNA sense strand
gaggagcgcaucaacaucu

SEQ ID NO: 1709082 - RNA, 19 nt, Homo sapiens
  misc_RNA (1)...(19): siRNA sense strand
uuagagauguucacgaaac

SEQ ID NO: 1709083 - RNA, 19 nt, Homo sapiens
  misc_RNA (1)...(19): siRNA sense strand
caaccuguguaggaaaugu

SEQ ID NO: 1709084 - RNA, 19 nt, Homo sapiens
  misc_RNA (1)...(19): siRNA sense strand
cgccauaucuucuccuuuu

SEQ ID NO: 1709085 - RNA, 19 nt, Homo sapiens
  misc_RNA (1)...(19): siRNA sense strand
uaggaaaugugccagugau

SEQ ID NO: 1709086 - RNA, 19 nt, Homo sapiens
  misc_RNA (1)...(19): siRNA sense strand
caucugucccaucugcuua

SEQ ID NO: 1709087 - RNA, 19 nt, Homo sapiens
  misc_RNA (1)...(19): siRNA sense strand
gguugaacucccuaaauga

SEQ ID NO: 1709088 - RNA, 19 nt, Homo sapiens
  misc_RNA (1)...(19): siRNA sense strand
guaggaaaugugccaguga

SEQ ID NO: 1709089 - RNA, 19 nt, Homo sapiens
  misc_RNA (1)...(19): siRNA sense strand
ugucccaucugcuuagaga

SEQ ID NO: 1709090 - RNA, 19 nt, Homo sapiens
  misc_RNA (1)...(19): siRNA sense strand
gcuggaagacaccugcaaa

SEQ ID NO: 1709091 - RNA, 19 nt, Homo sapiens
  misc_RNA (1)...(19): siRNA sense strand
ggaaccugcugguggaaaa

SEQ ID NO: 1709092 - RNA, 19 nt, Homo sapiens
  misc_RNA (1)...(19): siRNA sense strand
gaucgaguccagggaguga

SEQ ID NO: 1709093 - RNA, 19 nt, Homo sapiens
  misc_RNA (1)...(19): siRNA sense strand
ccaggccucuaacccguau

SEQ ID NO: 1709094 - RNA, 19 nt, Homo sapiens
  misc_RNA (1)...(19): siRNA sense strand
cuguagacaugaagugguu

SEQ ID NO: 1709095 - RNA, 19 nt, Homo sapiens
  misc_RNA (1)...(19): siRNA sense strand
gcgcaucaacaucuacugu

SEQ ID NO: 1709096 - RNA, 19 nt, Homo sapiens
  misc_RNA (1)...(19): siRNA sense strand
gacaugaagugguuuugga

SEQ ID NO: 1709097 - RNA, 19 nt, Homo sapiens
  misc_RNA (1)...(19): siRNA sense strand
ugucugaacugcgaaguac

SEQ ID NO: 1709098 - RNA, 19 nt, Homo sapiens
  misc_RNA (1)...(19): siRNA sense strand
aucaacaucuacugucuga

SEQ ID NO: 1709099 - RNA, 19 nt, Homo sapiens
  misc_RNA (1)...(19): siRNA sense strand
ccauggauaacuuagagaa

SEQ ID NO: 1709100 - RNA, 19 nt, Homo sapiens
  misc_RNA (1)...(19): siRNA sense strand
aagaggagcgcaucaacau

SEQ ID NO: 1709101 - RNA, 19 nt, Homo sapiens
  misc_RNA (1)...(19): siRNA sense strand
uagagaagcaacucaucug

SEQ ID NO: 1709102 - RNA, 19 nt, Homo sapiens
  misc_RNA (1)...(19): siRNA sense strand
uggauaacuuagagaagca

SEQ ID NO: 1709103 - RNA, 19 nt, Homo sapiens
  misc_RNA (1)...(19): siRNA sense strand
cagcagaccauggauaacu

SEQ ID NO: 1709104 - RNA, 19 nt, Homo sapiens
  misc_RNA (1)...(19): siRNA sense strand
gaguggcaguggagcugau

SEQ ID NO: 1709105 - RNA, 19 nt, Homo sapiens
  misc_RNA (1)...(19): siRNA sense strand
ggaagacaccugcaaaacu

SEQ ID NO: 1709106 - RNA, 19 nt, Homo sapiens
  misc_RNA (1)...(19): siRNA sense strand
gcgcaucucugaauuacaa

SEQ ID NO: 1709107 - RNA, 19 nt, Homo sapiens
  misc_RNA (1)...(19): siRNA sense strand
gaagacaccugcaaaacua

SEQ ID NO: 1709108 - RNA, 19 nt, Homo sapiens
  misc_RNA (1)...(19): siRNA sense strand
gaaaugugccagugauauu

SEQ ID NO: 1709109 - RNA, 19 nt, Homo sapiens
  misc_RNA (1)...(19): siRNA sense strand
gcuuagagauguucacgaa

SEQ ID NO: 1709110 - RNA, 19 nt, Homo sapiens
  misc_RNA (1)...(19): siRNA sense strand
caacucaucugucccaucu

SEQ ID NO: 1709111 - RNA, 19 nt, Homo sapiens
  misc_RNA (1)...(19): siRNA sense strand
uauauggacuucagaggaa

SEQ ID NO: 1709112 - RNA, 19 nt, Homo sapiens
  misc_RNA (1)...(19): siRNA sense strand
gcagaccauggauaacuua

SEQ ID NO: 1709113 - RNA, 19 nt, Homo sapiens
  misc_RNA (1)...(19): siRNA sense strand
guacccaccugcucucugu

SEQ ID NO: 1709114 - RNA, 19 nt, Homo sapiens
  misc_RNA (1)...(19): siRNA sense strand
ggaaaugugccagugauau

SEQ ID NO: 1709115 - RNA, 19 nt, Homo sapiens
  misc_RNA (1)...(19): siRNA sense strand
gaccauggauaacuuagag

SEQ ID NO: 1709116 - RNA, 19 nt, Homo sapiens
  misc_RNA (1)...(19): siRNA sense strand
gagcagcagaccauggaua

SEQ ID NO: 1709117 - RNA, 19 nt, Homo sapiens
  misc_RNA (1)...(19): siRNA sense strand
gcaguggagcugauucuga

SEQ ID NO: 1709118 - RNA, 19 nt, Homo sapiens
  misc_RNA (1)...(19): siRNA sense strand
gaagaggagcgcaucaaca

SEQ ID NO: 1709119 - RNA, 19 nt, Homo sapiens
  misc_RNA (1)...(19): siRNA sense strand
cacgaaaccuguggugauu

SEQ ID NO: 1709120 - RNA, 19 nt, Homo sapiens
  misc_RNA (1)...(19): siRNA sense strand
gagcgcaucucugaauuac

SEQ ID NO: 1709121 - RNA, 19 nt, Homo sapiens
  misc_RNA (1)...(19): siRNA sense strand
ccaaagagcagcagaccau

SEQ ID NO: 1709122 - RNA, 19 nt, Homo sapiens
  misc_RNA (1)...(19): siRNA sense strand
ugaacucccuaaaugaaug

SEQ ID NO: 1709123 - RNA, 19 nt, Homo sapiens
  misc_RNA (1)...(19): siRNA sense strand
gcaucaacaucuacugucu

SEQ ID NO: 1709124 - RNA, 19 nt, Homo sapiens
  misc_RNA (1)...(19): siRNA sense strand
ugguugaacucccuaaaug

SEQ ID NO: 1709125 - RNA, 19 nt, Homo sapiens
  misc_RNA (1)...(19): siRNA sense strand
gaacucccuaaaugaauga

SEQ ID NO: 1709126 - RNA, 19 nt, Homo sapiens
  misc_RNA (1)...(19): siRNA sense strand
cgaaaccuguggugauucu

SEQ ID NO: 1709127 - RNA, 19 nt, Homo sapiens
  misc_RNA (1)...(19): siRNA sense strand
guugaacucccuaaaugaa

SEQ ID NO: 1709128 - RNA, 19 nt, Homo sapiens
  misc_RNA (1)...(19): siRNA sense strand
ggauagacaugggguauau

SEQ ID NO: 1709129 - RNA, 19 nt, Homo sapiens
  misc_RNA (1)...(19): siRNA sense strand
caacaucuacugucugaac

SEQ ID NO: 1709130 - RNA, 19 nt, Homo sapiens
  misc_RNA (1)...(19): siRNA sense strand
ucauugacaucuacaagca

SEQ ID NO: 1709131 - RNA, 19 nt, Homo sapiens
  misc_RNA (1)...(19): siRNA sense strand
gaggagcgcaucaacaucu

SEQ ID NO: 1709132 - RNA, 19 nt, Homo sapiens
  misc_RNA (1)...(19): siRNA sense strand
uuagagauguucacgaaac

SEQ ID NO: 1709133 - RNA, 19 nt, Homo sapiens
  misc_RNA (1)...(19): siRNA sense strand
caaccuguguaggaaaugu

SEQ ID NO: 1709134 - RNA, 19 nt, Homo sapiens
  misc_RNA (1)...(19): siRNA sense strand
cgccauaucuucuccuuuu

SEQ ID NO: 1709135 - RNA, 19 nt, Homo sapiens
  misc_RNA (1)...(19): siRNA sense strand
uaggaaaugugccagugau

SEQ ID NO: 1709136 - RNA, 19 nt, Homo sapiens
  misc_RNA (1)...(19): siRNA sense strand
caucugucccaucugcuua

SEQ ID NO: 1709137 - RNA, 19 nt, Homo sapiens
  misc_RNA (1)...(19): siRNA sense strand
gguugaacucccuaaauga

SEQ ID NO: 1709138 - RNA, 19 nt, Homo sapiens
  misc_RNA (1)...(19): siRNA sense strand
guaggaaaugugccaguga

SEQ ID NO: 1709139 - RNA, 19 nt, Homo sapiens
  misc_RNA (1)...(19): siRNA sense strand
ugucccaucugcuuagaga

SEQ ID NO: 1709140 - RNA, 19 nt, Homo sapiens
  misc_RNA (1)...(19): siRNA sense strand
gcuggaagacaccugcaaa

SEQ ID NO: 1709141 - RNA, 19 nt, Homo sapiens
  misc_RNA (1)...(19): siRNA sense strand
ggaaccugcugguggaaaa

SEQ ID NO: 1709142 - RNA, 19 nt, Homo sapiens
  misc_RNA (1)...(19): siRNA sense strand
gaucgaguccagggaguga

SEQ ID NO: 1709143 - RNA, 19 nt, Homo sapiens
  misc_RNA (1)...(19): siRNA sense strand
ccaggccucuaacccguau

SEQ ID NO: 1709144 - RNA, 19 nt, Homo sapiens
  misc_RNA (1)...(19): siRNA sense strand
cuguagacaugaagugguu

SEQ ID NO: 1709145 - RNA, 19 nt, Homo sapiens
  misc_RNA (1)...(19): siRNA sense strand
gcgcaucaacaucuacugu

SEQ ID NO: 1709146 - RNA, 19 nt, Homo sapiens
  misc_RNA (1)...(19): siRNA sense strand
gacaugaagugguuuugga

SEQ ID NO: 1709147 - RNA, 19 nt, Homo sapiens
  misc_RNA (1)...(19): siRNA sense strand
ugucugaacugcgaaguac

SEQ ID NO: 1709148 - RNA, 19 nt, Homo sapiens
  misc_RNA (1)...(19): siRNA sense strand
aucaacaucuacugucuga

SEQ ID NO: 1709149 - RNA, 19 nt, Homo sapiens
  misc_RNA (1)...(19): siRNA sense strand
ccauggauaacuuagagaa

SEQ ID NO: 1709150 - RNA, 19 nt, Homo sapiens
  misc_RNA (1)...(19): siRNA sense strand
aagaggagcgcaucaacau

SEQ ID NO: 1709151 - RNA, 19 nt, Homo sapiens
  misc_RNA (1)...(19): siRNA sense strand
uagagaagcaacucaucug

SEQ ID NO: 1709152 - RNA, 19 nt, Homo sapiens
  misc_RNA (1)...(19): siRNA sense strand
uggauaacuuagagaagca

SEQ ID NO: 1709153 - RNA, 19 nt, Homo sapiens
  misc_RNA (1)...(19): siRNA sense strand
cagcagaccauggauaacu

SEQ ID NO: 1709154 - RNA, 19 nt, Homo sapiens
  misc_RNA (1)...(19): siRNA sense strand
gaguggcaguggagcugau

SEQ ID NO: 1709155 - RNA, 19 nt, Homo sapiens
  misc_RNA (1)...(19): siRNA sense strand
ggaagacaccugcaaaacu

SEQ ID NO: 1709156 - RNA, 19 nt, Homo sapiens
  misc_RNA (1)...(19): siRNA sense strand
caaaugagguugucacaga

SEQ ID NO: 1709157 - RNA, 19 nt, Homo sapiens
  misc_RNA (1)...(19): siRNA sense strand
gcagagaaaccucaagaaa

SEQ ID NO: 1709158 - RNA, 19 nt, Homo sapiens
  misc_RNA (1)...(19): siRNA sense strand
guacgugggucccuaugaa

SEQ ID NO: 1709159 - RNA, 19 nt, Homo sapiens
  misc_RNA (1)...(19): siRNA sense strand
gagcaucauugcaaacaug

SEQ ID NO: 1709160 - RNA, 19 nt, Homo sapiens
  misc_RNA (1)...(19): siRNA sense strand
caagacaugucauucaagu

SEQ ID NO: 1709161 - RNA, 19 nt, Homo sapiens
  misc_RNA (1)...(19): siRNA sense strand
ggagagugcugggauggaa

SEQ ID NO: 1709162 - RNA, 19 nt, Homo sapiens
  misc_RNA (1)...(19): siRNA sense strand
caacggaugcuuuaucaga

SEQ ID NO: 1709163 - RNA, 19 nt, Homo sapiens
  misc_RNA (1)...(19): siRNA sense strand
agacaugucauucaaguuu

SEQ ID NO: 1709164 - RNA, 19 nt, Homo sapiens
  misc_RNA (1)...(19): siRNA sense strand
acacuugccuggcgaacaa

SEQ ID NO: 1709165 - RNA, 19 nt, Homo sapiens
  misc_RNA (1)...(19): siRNA sense strand
guacaagcauccugacaac

SEQ ID NO: 1709166 - RNA, 19 nt, Homo sapiens
  misc_RNA (1)...(19): siRNA sense strand
ccacagagcaccagcaaag

SEQ ID NO: 1709167 - RNA, 19 nt, Homo sapiens
  misc_RNA (1)...(19): siRNA sense strand
ccagaugacuugugagaac

SEQ ID NO: 1709168 - RNA, 19 nt, Homo sapiens
  misc_RNA (1)...(19): siRNA sense strand
cagcagagauaauggaaac

SEQ ID NO: 1709169 - RNA, 19 nt, Homo sapiens
  misc_RNA (1)...(19): siRNA sense strand
ggcgugagcuggagaagca

SEQ ID NO: 1709170 - RNA, 19 nt, Homo sapiens
  misc_RNA (1)...(19): siRNA sense strand
cacaggagcuugcaacaac

SEQ ID NO: 1709171 - RNA, 19 nt, Homo sapiens
  misc_RNA (1)...(19): siRNA sense strand
ggagaacagccacgucuuc

SEQ ID NO: 1709172 - RNA, 19 nt, Homo sapiens
  misc_RNA (1)...(19): siRNA sense strand
gagcguggccgacaagauc

SEQ ID NO: 1709173 - RNA, 19 nt, Homo sapiens
  misc_RNA (1)...(19): siRNA sense strand
cagcaucacuggcaugaac

SEQ ID NO: 1709174 - RNA, 19 nt, Homo sapiens
  misc_RNA (1)...(19): siRNA sense strand
gcacggguaugagcuccaa

SEQ ID NO: 1709175 - RNA, 19 nt, Homo sapiens
  misc_RNA (1)...(19): siRNA sense strand
gguuauggccugcacagaa

SEQ ID NO: 1709176 - RNA, 19 nt, Homo sapiens
  misc_RNA (1)...(19): siRNA sense strand
caaauuccccgaagacuuu

SEQ ID NO: 1709177 - RNA, 19 nt, Homo sapiens
  misc_RNA (1)...(19): siRNA sense strand
gggaaagccugaggagucu

SEQ ID NO: 1709178 - RNA, 19 nt, Homo sapiens
  misc_RNA (1)...(19): siRNA sense strand
guuauggccugcacagaag

SEQ ID NO: 1709179 - RNA, 19 nt, Homo sapiens
  misc_RNA (1)...(19): siRNA sense strand
ccugaaaacucaacaauca

SEQ ID NO: 1709180 - RNA, 19 nt, Homo sapiens
  misc_RNA (1)...(19): siRNA sense strand
ccaacaagcggagugauug

SEQ ID NO: 1709181 - RNA, 19 nt, Homo sapiens
  misc_RNA (1)...(19): siRNA sense strand
ccagagagcguggagaaug

SEQ ID NO: 1709182 - RNA, 19 nt, Homo sapiens
  misc_RNA (1)...(19): siRNA sense strand
gaugaugaccgcuauucug

SEQ ID NO: 1709183 - RNA, 19 nt, Homo sapiens
  misc_RNA (1)...(19): siRNA sense strand
gacaugucauucaaguuuc

SEQ ID NO: 1709184 - RNA, 19 nt, Homo sapiens
  misc_RNA (1)...(19): siRNA sense strand
caagcauccugacaacauc

SEQ ID NO: 1709185 - RNA, 19 nt, Homo sapiens
  misc_RNA (1)...(19): siRNA sense strand
ugaggagucucgugucucu

SEQ ID NO: 1709186 - RNA, 19 nt, Homo sapiens
  misc_RNA (1)...(19): siRNA sense strand
cagagagcguggagaaugg

SEQ ID NO: 1709187 - RNA, 19 nt, Homo sapiens
  misc_RNA (1)...(19): siRNA sense strand
ccgacaagauccuggacuu

SEQ ID NO: 1709188 - RNA, 19 nt, Homo sapiens
  misc_RNA (1)...(19): siRNA sense strand
agagaaaccucaagaaaag

SEQ ID NO: 1709189 - RNA, 19 nt, Homo sapiens
  misc_RNA (1)...(19): siRNA sense strand
gggacuuugugcacuguga

SEQ ID NO: 1709190 - RNA, 19 nt, Homo sapiens
  misc_RNA (1)...(19): siRNA sense strand
uccaacggaugcuuuauca

SEQ ID NO: 1709191 - RNA, 19 nt, Homo sapiens
  misc_RNA (1)...(19): siRNA sense strand
gagauaauggaaacaucaa

SEQ ID NO: 1709192 - RNA, 19 nt, Homo sapiens
  misc_RNA (1)...(19): siRNA sense strand
gccaacaagcggagugauu

SEQ ID NO: 1709193 - RNA, 19 nt, Homo sapiens
  misc_RNA (1)...(19): siRNA sense strand
ugucucgggucaucuguga

SEQ ID NO: 1709194 - RNA, 19 nt, Homo sapiens
  misc_RNA (1)...(19): siRNA sense strand
gagaacagccacgucuuca

SEQ ID NO: 1709195 - RNA, 19 nt, Homo sapiens
  misc_RNA (1)...(19): siRNA sense strand
gagcagcagagauaaugga

SEQ ID NO: 1709196 - RNA, 19 nt, Homo sapiens
  misc_RNA (1)...(19): siRNA sense strand
gcagagauaauggaaacau

SEQ ID NO: 1709197 - RNA, 19 nt, Homo sapiens
  misc_RNA (1)...(19): siRNA sense strand
gagcuugcaacaacagaga

SEQ ID NO: 1709198 - RNA, 19 nt, Homo sapiens
  misc_RNA (1)...(19): siRNA sense strand
caaaaugcccaaacacuug

SEQ ID NO: 1709199 - RNA, 19 nt, Homo sapiens
  misc_RNA (1)...(19): siRNA sense strand
aaagaaaagucaaccugaa

SEQ ID NO: 1709200 - RNA, 19 nt, Homo sapiens
  misc_RNA (1)...(19): siRNA sense strand
cagagauaauggaaacauc

SEQ ID NO: 1709201 - RNA, 19 nt, Homo sapiens
  misc_RNA (1)...(19): siRNA sense strand
aaguguggcuucccagaga

SEQ ID NO: 1709202 - RNA, 19 nt, Homo sapiens
  misc_RNA (1)...(19): siRNA sense strand
gcugggaggcuuagcugaa

SEQ ID NO: 1709203 - RNA, 19 nt, Homo sapiens
  misc_RNA (1)...(19): siRNA sense strand
uacaagcgaugaaaagaaa

SEQ ID NO: 1709204 - RNA, 19 nt, Homo sapiens
  misc_RNA (1)...(19): siRNA sense strand
cagagaaaccucaagaaaa

SEQ ID NO: 1709205 - RNA, 19 nt, Homo sapiens
  misc_RNA (1)...(19): siRNA sense strand
ccgaggccuuccagcagua

SEQ ID NO: 1709206 - RNA, 19 nt, Homo sapiens
  misc_RNA (1)...(19): siRNA sense strand
caaacuuccugagccaaca

SEQ ID NO: 1709207 - RNA, 19 nt, Homo sapiens
  misc_RNA (1)...(19): siRNA sense strand
aacggaugcuuuaucagaa

SEQ ID NO: 1709208 - RNA, 19 nt, Homo sapiens
  misc_RNA (1)...(19): siRNA sense strand
ggcgcgugcugguguauuc

SEQ ID NO: 1709209 - RNA, 19 nt, Homo sapiens
  misc_RNA (1)...(19): siRNA sense strand
cuggaggccuggagggaaa

SEQ ID NO: 1709210 - RNA, 19 nt, Homo sapiens
  misc_RNA (1)...(19): siRNA sense strand
cacagaugaugaccgcuau

SEQ ID NO: 1709211 - RNA, 19 nt, Homo sapiens
  misc_RNA (1)...(19): siRNA sense strand
gcagcagagauaauggaaa

SEQ ID NO: 1709212 - RNA, 19 nt, Homo sapiens
  misc_RNA (1)...(19): siRNA sense strand
cugggaggcuuagcugaaa

SEQ ID NO: 1709213 - RNA, 19 nt, Homo sapiens
  misc_RNA (1)...(19): siRNA sense strand
aaaugagguugucacagau

SEQ ID NO: 1709214 - RNA, 19 nt, Homo sapiens
  misc_RNA (1)...(19): siRNA sense strand
caaauacaggcccaucaca

SEQ ID NO: 1709215 - RNA, 19 nt, Homo sapiens
  misc_RNA (1)...(19): siRNA sense strand
caacaaucacagcauccaa

SEQ ID NO: 1709216 - RNA, 19 nt, Homo sapiens
  misc_RNA (1)...(19): siRNA sense strand
aggcuuagcugaaaacuuc

SEQ ID NO: 1709217 - RNA, 19 nt, Homo sapiens
  misc_RNA (1)...(19): siRNA sense strand
cuucagcccauggacauua

SEQ ID NO: 1709218 - RNA, 19 nt, Homo sapiens
  misc_RNA (1)...(19): siRNA sense strand
acgccacgaugcagagaaa

SEQ ID NO: 1709219 - RNA, 19 nt, Homo sapiens
  misc_RNA (1)...(19): siRNA sense strand
gcaguacgugggucccuau

SEQ ID NO: 1709220 - RNA, 19 nt, Homo sapiens
  misc_RNA (1)...(19): siRNA sense strand
cuguuugccugucucauug

SEQ ID NO: 1709221 - RNA, 19 nt, Homo sapiens
  misc_RNA (1)...(19): siRNA sense strand
acaagcauccugacaacau

SEQ ID NO: 1709222 - RNA, 19 nt, Homo sapiens
  misc_RNA (1)...(19): siRNA sense strand
gagagggaaagaacuccuu

SEQ ID NO: 1709223 - RNA, 19 nt, Homo sapiens
  misc_RNA (1)...(19): siRNA sense strand
agagauaauggaaacauca

SEQ ID NO: 1709224 - RNA, 19 nt, Homo sapiens
  misc_RNA (1)...(19): siRNA sense strand
gacagcaucacuggcauga

SEQ ID NO: 1709225 - RNA, 19 nt, Homo sapiens
  misc_RNA (1)...(19): siRNA sense strand
ccuguuugccugucucauu

SEQ ID NO: 1709226 - RNA, 19 nt, Homo sapiens
  misc_RNA (1)...(19): siRNA sense strand
ucacaggagcuugcaacaa

SEQ ID NO: 1709227 - RNA, 19 nt, Homo sapiens
  misc_RNA (1)...(19): siRNA sense strand
ugcccgagcagcagagaua

SEQ ID NO: 1709228 - RNA, 19 nt, Homo sapiens
  misc_RNA (1)...(19): siRNA sense strand
acugccagaugacuuguga

SEQ ID NO: 1709229 - RNA, 19 nt, Homo sapiens
  misc_RNA (1)...(19): siRNA sense strand
auggaaacaucaauacaag

SEQ ID NO: 1709230 - RNA, 19 nt, Homo sapiens
  misc_RNA (1)...(19): siRNA sense strand
auacaucgaccacgacauc

SEQ ID NO: 1709231 - RNA, 19 nt, Homo sapiens
  misc_RNA (1)...(19): siRNA sense strand
acaugucauucaaguuuca

SEQ ID NO: 1709232 - RNA, 19 nt, Homo sapiens
  misc_RNA (1)...(19): siRNA sense strand
cggaugcuuuaucagaaga

SEQ ID NO: 1709233 - RNA, 19 nt, Homo sapiens
  misc_RNA (1)...(19): siRNA sense strand
gagguugucacagaugaug

SEQ ID NO: 1709234 - RNA, 19 nt, Homo sapiens
  misc_RNA (1)...(19): siRNA sense strand
gcaaauuccccgaagacuu

SEQ ID NO: 1709235 - RNA, 19 nt, Homo sapiens
  misc_RNA (1)...(19): siRNA sense strand
gaugacuugugagaaccaa

SEQ ID NO: 1709236 - RNA, 19 nt, Homo sapiens
  misc_RNA (1)...(19): siRNA sense strand
gagccaacaagcggaguga

SEQ ID NO: 1709237 - RNA, 19 nt, Homo sapiens
  misc_RNA (1)...(19): siRNA sense strand
ccaggaaggaugggauuuc

SEQ ID NO: 1709238 - RNA, 19 nt, Homo sapiens
  misc_RNA (1)...(19): siRNA sense strand
cagaugaugaccgcuauuc

SEQ ID NO: 1709239 - RNA, 19 nt, Homo sapiens
  misc_RNA (1)...(19): siRNA sense strand
ccugaggagucucgugucu

SEQ ID NO: 1709240 - RNA, 19 nt, Homo sapiens
  misc_RNA (1)...(19): siRNA sense strand
uguacaagcauccugacaa

SEQ ID NO: 1709241 - RNA, 19 nt, Homo sapiens
  misc_RNA (1)...(19): siRNA sense strand
caaaugagguugucacaga

SEQ ID NO: 1709242 - RNA, 19 nt, Homo sapiens
  misc_RNA (1)...(19): siRNA sense strand
gcagagaaaccucaagaaa

SEQ ID NO: 1709243 - RNA, 19 nt, Homo sapiens
  misc_RNA (1)...(19): siRNA sense strand
guacgugggucccuaugaa

SEQ ID NO: 1709244 - RNA, 19 nt, Homo sapiens
  misc_RNA (1)...(19): siRNA sense strand
gagcaucauugcaaacaug

SEQ ID NO: 1709245 - RNA, 19 nt, Homo sapiens
  misc_RNA (1)...(19): siRNA sense strand
caagacaugucauucaagu

SEQ ID NO: 1709246 - RNA, 19 nt, Homo sapiens
  misc_RNA (1)...(19): siRNA sense strand
ggagagugcugggauggaa

SEQ ID NO: 1709247 - RNA, 19 nt, Homo sapiens
  misc_RNA (1)...(19): siRNA sense strand
caacggaugcuuuaucaga

SEQ ID NO: 1709248 - RNA, 19 nt, Homo sapiens
  misc_RNA (1)...(19): siRNA sense strand
agacaugucauucaaguuu

SEQ ID NO: 1709249 - RNA, 19 nt, Homo sapiens
  misc_RNA (1)...(19): siRNA sense strand
acacuugccuggcgaacaa

SEQ ID NO: 1709250 - RNA, 19 nt, Homo sapiens
  misc_RNA (1)...(19): siRNA sense strand
guacaagcauccugacaac

SEQ ID NO: 1709251 - RNA, 19 nt, Homo sapiens
  misc_RNA (1)...(19): siRNA sense strand
ccacagagcaccagcaaag

SEQ ID NO: 1709252 - RNA, 19 nt, Homo sapiens
  misc_RNA (1)...(19): siRNA sense strand
ccagaugacuugugagaac

SEQ ID NO: 1709253 - RNA, 19 nt, Homo sapiens
  misc_RNA (1)...(19): siRNA sense strand
cagcagagauaauggaaac

SEQ ID NO: 1709254 - RNA, 19 nt, Homo sapiens
  misc_RNA (1)...(19): siRNA sense strand
ggcgugagcuggagaagca

SEQ ID NO: 1709255 - RNA, 19 nt, Homo sapiens
  misc_RNA (1)...(19): siRNA sense strand
cacaggagcuugcaacaac

SEQ ID NO: 1709256 - RNA, 19 nt, Homo sapiens
  misc_RNA (1)...(19): siRNA sense strand
ggagaacagccacgucuuc

SEQ ID NO: 1709257 - RNA, 19 nt, Homo sapiens
  misc_RNA (1)...(19): siRNA sense strand
gagcguggccgacaagauc

SEQ ID NO: 1709258 - RNA, 19 nt, Homo sapiens
  misc_RNA (1)...(19): siRNA sense strand
cagcaucacuggcaugaac

SEQ ID NO: 1709259 - RNA, 19 nt, Homo sapiens
  misc_RNA (1)...(19): siRNA sense strand
gcacggguaugagcuccaa

SEQ ID NO: 1709260 - RNA, 19 nt, Homo sapiens
  misc_RNA (1)...(19): siRNA sense strand
gguuauggccugcacagaa

SEQ ID NO: 1709261 - RNA, 19 nt, Homo sapiens
  misc_RNA (1)...(19): siRNA sense strand
caaauuccccgaagacuuu

SEQ ID NO: 1709262 - RNA, 19 nt, Homo sapiens
  misc_RNA (1)...(19): siRNA sense strand
gggaaagccugaggagucu

SEQ ID NO: 1709263 - RNA, 19 nt, Homo sapiens
  misc_RNA (1)...(19): siRNA sense strand
guuauggccugcacagaag

SEQ ID NO: 1709264 - RNA, 19 nt, Homo sapiens
  misc_RNA (1)...(19): siRNA sense strand
ccugaaaacucaacaauca

SEQ ID NO: 1709265 - RNA, 19 nt, Homo sapiens
  misc_RNA (1)...(19): siRNA sense strand
ccaacaagcggagugauug

SEQ ID NO: 1709266 - RNA, 19 nt, Homo sapiens
  misc_RNA (1)...(19): siRNA sense strand
ccagagagcguggagaaug

SEQ ID NO: 1709267 - RNA, 19 nt, Homo sapiens
  misc_RNA (1)...(19): siRNA sense strand
gaugaugaccgcuauucug

SEQ ID NO: 1709268 - RNA, 19 nt, Homo sapiens
  misc_RNA (1)...(19): siRNA sense strand
gacaugucauucaaguuuc

SEQ ID NO: 1709269 - RNA, 19 nt, Homo sapiens
  misc_RNA (1)...(19): siRNA sense strand
caagcauccugacaacauc

SEQ ID NO: 1709270 - RNA, 19 nt, Homo sapiens
  misc_RNA (1)...(19): siRNA sense strand
ugaggagucucgugucucu

SEQ ID NO: 1709271 - RNA, 19 nt, Homo sapiens
  misc_RNA (1)...(19): siRNA sense strand
cagagagcguggagaaugg

SEQ ID NO: 1709272 - RNA, 19 nt, Homo sapiens
  misc_RNA (1)...(19): siRNA sense strand
ccgacaagauccuggacuu

SEQ ID NO: 1709273 - RNA, 19 nt, Homo sapiens
  misc_RNA (1)...(19): siRNA sense strand
agagaaaccucaagaaaag

SEQ ID NO: 1709274 - RNA, 19 nt, Homo sapiens
  misc_RNA (1)...(19): siRNA sense strand
gggacuuugugcacuguga

SEQ ID NO: 1709275 - RNA, 19 nt, Homo sapiens
  misc_RNA (1)...(19): siRNA sense strand
uccaacggaugcuuuauca

SEQ ID NO: 1709276 - RNA, 19 nt, Homo sapiens
  misc_RNA (1)...(19): siRNA sense strand
gagauaauggaaacaucaa

SEQ ID NO: 1709277 - RNA, 19 nt, Homo sapiens
  misc_RNA (1)...(19): siRNA sense strand
gccaacaagcggagugauu

SEQ ID NO: 1709278 - RNA, 19 nt, Homo sapiens
  misc_RNA (1)...(19): siRNA sense strand
ugucucgggucaucuguga

SEQ ID NO: 1709279 - RNA, 19 nt, Homo sapiens
  misc_RNA (1)...(19): siRNA sense strand
gagaacagccacgucuuca

SEQ ID NO: 1709280 - RNA, 19 nt, Homo sapiens
  misc_RNA (1)...(19): siRNA sense strand
gagcagcagagauaaugga

SEQ ID NO: 1709281 - RNA, 19 nt, Homo sapiens
  misc_RNA (1)...(19): siRNA sense strand
gcagagauaauggaaacau

SEQ ID NO: 1709282 - RNA, 19 nt, Homo sapiens
  misc_RNA (1)...(19): siRNA sense strand
gagcuugcaacaacagaga

SEQ ID NO: 1709283 - RNA, 19 nt, Homo sapiens
  misc_RNA (1)...(19): siRNA sense strand
caaaaugcccaaacacuug

SEQ ID NO: 1709284 - RNA, 19 nt, Homo sapiens
  misc_RNA (1)...(19): siRNA sense strand
aaagaaaagucaaccugaa

SEQ ID NO: 1709285 - RNA, 19 nt, Homo sapiens
  misc_RNA (1)...(19): siRNA sense strand
cagagauaauggaaacauc

SEQ ID NO: 1709286 - RNA, 19 nt, Homo sapiens
  misc_RNA (1)...(19): siRNA sense strand
aaguguggcuucccagaga

SEQ ID NO: 1709287 - RNA, 19 nt, Homo sapiens
  misc_RNA (1)...(19): siRNA sense strand
gcugggaggcuuagcugaa

SEQ ID NO: 1709288 - RNA, 19 nt, Homo sapiens
  misc_RNA (1)...(19): siRNA sense strand
uacaagcgaugaaaagaaa

SEQ ID NO: 1709289 - RNA, 19 nt, Homo sapiens
  misc_RNA (1)...(19): siRNA sense strand
cagagaaaccucaagaaaa

SEQ ID NO: 1709290 - RNA, 19 nt, Homo sapiens
  misc_RNA (1)...(19): siRNA sense strand
ccgaggccuuccagcagua

SEQ ID NO: 1709291 - RNA, 19 nt, Homo sapiens
  misc_RNA (1)...(19): siRNA sense strand
caaacuuccugagccaaca

SEQ ID NO: 1709292 - RNA, 19 nt, Homo sapiens
  misc_RNA (1)...(19): siRNA sense strand
aacggaugcuuuaucagaa

SEQ ID NO: 1709293 - RNA, 19 nt, Homo sapiens
  misc_RNA (1)...(19): siRNA sense strand
ggcgcgugcugguguauuc

SEQ ID NO: 1709294 - RNA, 19 nt, Homo sapiens
  misc_RNA (1)...(19): siRNA sense strand
cuggaggccuggagggaaa

SEQ ID NO: 1709295 - RNA, 19 nt, Homo sapiens
  misc_RNA (1)...(19): siRNA sense strand
cacagaugaugaccgcuau

SEQ ID NO: 1709296 - RNA, 19 nt, Homo sapiens
  misc_RNA (1)...(19): siRNA sense strand
gcagcagagauaauggaaa

SEQ ID NO: 1709297 - RNA, 19 nt, Homo sapiens
  misc_RNA (1)...(19): siRNA sense strand
cugggaggcuuagcugaaa

SEQ ID NO: 1709298 - RNA, 19 nt, Homo sapiens
  misc_RNA (1)...(19): siRNA sense strand
aaaugagguugucacagau

SEQ ID NO: 1709299 - RNA, 19 nt, Homo sapiens
  misc_RNA (1)...(19): siRNA sense strand
caaauacaggcccaucaca

SEQ ID NO: 1709300 - RNA, 19 nt, Homo sapiens
  misc_RNA (1)...(19): siRNA sense strand
caacaaucacagcauccaa

SEQ ID NO: 1709301 - RNA, 19 nt, Homo sapiens
  misc_RNA (1)...(19): siRNA sense strand
aggcuuagcugaaaacuuc

SEQ ID NO: 1709302 - RNA, 19 nt, Homo sapiens
  misc_RNA (1)...(19): siRNA sense strand
cuucagcccauggacauua

SEQ ID NO: 1709303 - RNA, 19 nt, Homo sapiens
  misc_RNA (1)...(19): siRNA sense strand
acgccacgaugcagagaaa

SEQ ID NO: 1709304 - RNA, 19 nt, Homo sapiens
  misc_RNA (1)...(19): siRNA sense strand
gcaguacgugggucccuau

SEQ ID NO: 1709305 - RNA, 19 nt, Homo sapiens
  misc_RNA (1)...(19): siRNA sense strand
cuguuugccugucucauug

SEQ ID NO: 1709306 - RNA, 19 nt, Homo sapiens
  misc_RNA (1)...(19): siRNA sense strand
acaagcauccugacaacau

SEQ ID NO: 1709307 - RNA, 19 nt, Homo sapiens
  misc_RNA (1)...(19): siRNA sense strand
gagagggaaagaacuccuu

SEQ ID NO: 1709308 - RNA, 19 nt, Homo sapiens
  misc_RNA (1)...(19): siRNA sense strand
agagauaauggaaacauca

SEQ ID NO: 1709309 - RNA, 19 nt, Homo sapiens
  misc_RNA (1)...(19): siRNA sense strand
gacagcaucacuggcauga

SEQ ID NO: 1709310 - RNA, 19 nt, Homo sapiens
  misc_RNA (1)...(19): siRNA sense strand
ccuguuugccugucucauu

SEQ ID NO: 1709311 - RNA, 19 nt, Homo sapiens
  misc_RNA (1)...(19): siRNA sense strand
ucacaggagcuugcaacaa

SEQ ID NO: 1709312 - RNA, 19 nt, Homo sapiens
  misc_RNA (1)...(19): siRNA sense strand
ugcccgagcagcagagaua

SEQ ID NO: 1709313 - RNA, 19 nt, Homo sapiens
  misc_RNA (1)...(19): siRNA sense strand
acugccagaugacuuguga

SEQ ID NO: 1709314 - RNA, 19 nt, Homo sapiens
  misc_RNA (1)...(19): siRNA sense strand
auggaaacaucaauacaag

SEQ ID NO: 1709315 - RNA, 19 nt, Homo sapiens
  misc_RNA (1)...(19): siRNA sense strand
auacaucgaccacgacauc

SEQ ID NO: 1709316 - RNA, 19 nt, Homo sapiens
  misc_RNA (1)...(19): siRNA sense strand
acaugucauucaaguuuca

SEQ ID NO: 1709317 - RNA, 19 nt, Homo sapiens
  misc_RNA (1)...(19): siRNA sense strand
cggaugcuuuaucagaaga

SEQ ID NO: 1709318 - RNA, 19 nt, Homo sapiens
  misc_RNA (1)...(19): siRNA sense strand
gagguugucacagaugaug

SEQ ID NO: 1709319 - RNA, 19 nt, Homo sapiens
  misc_RNA (1)...(19): siRNA sense strand
gcaaauuccccgaagacuu

SEQ ID NO: 1709320 - RNA, 19 nt, Homo sapiens
  misc_RNA (1)...(19): siRNA sense strand
gaugacuugugagaaccaa

SEQ ID NO: 1709321 - RNA, 19 nt, Homo sapiens
  misc_RNA (1)...(19): siRNA sense strand
gagccaacaagcggaguga

SEQ ID NO: 1709322 - RNA, 19 nt, Homo sapiens
  misc_RNA (1)...(19): siRNA sense strand
ccaggaaggaugggauuuc

SEQ ID NO: 1709323 - RNA, 19 nt, Homo sapiens
  misc_RNA (1)...(19): siRNA sense strand
cagaugaugaccgcuauuc

SEQ ID NO: 1709324 - RNA, 19 nt, Homo sapiens
  misc_RNA (1)...(19): siRNA sense strand
ccugaggagucucgugucu

SEQ ID NO: 1709325 - RNA, 19 nt, Homo sapiens
  misc_RNA (1)...(19): siRNA sense strand
uguacaagcauccugacaa

SEQ ID NO: 1709326 - RNA, 19 nt, Homo sapiens
  misc_RNA (1)...(19): siRNA sense strand
caaaugagguugucacaga

SEQ ID NO: 1709327 - RNA, 19 nt, Homo sapiens
  misc_RNA (1)...(19): siRNA sense strand
gcagagaaaccucaagaaa

SEQ ID NO: 1709328 - RNA, 19 nt, Homo sapiens
  misc_RNA (1)...(19): siRNA sense strand
guacgugggucccuaugaa

SEQ ID NO: 1709329 - RNA, 19 nt, Homo sapiens
  misc_RNA (1)...(19): siRNA sense strand
gagcaucauugcaaacaug

SEQ ID NO: 1709330 - RNA, 19 nt, Homo sapiens
  misc_RNA (1)...(19): siRNA sense strand
caagacaugucauucaagu

SEQ ID NO: 1709331 - RNA, 19 nt, Homo sapiens
  misc_RNA (1)...(19): siRNA sense strand
ggagagugcugggauggaa

SEQ ID NO: 1709332 - RNA, 19 nt, Homo sapiens
  misc_RNA (1)...(19): siRNA sense strand
caacggaugcuuuaucaga

SEQ ID NO: 1709333 - RNA, 19 nt, Homo sapiens
  misc_RNA (1)...(19): siRNA sense strand
agacaugucauucaaguuu

SEQ ID NO: 1709334 - RNA, 19 nt, Homo sapiens
  misc_RNA (1)...(19): siRNA sense strand
acacuugccuggcgaacaa

SEQ ID NO: 1709335 - RNA, 19 nt, Homo sapiens
  misc_RNA (1)...(19): siRNA sense strand
guacaagcauccugacaac

SEQ ID NO: 1709336 - RNA, 19 nt, Homo sapiens
  misc_RNA (1)...(19): siRNA sense strand
ccacagagcaccagcaaag

SEQ ID NO: 1709337 - RNA, 19 nt, Homo sapiens
  misc_RNA (1)...(19): siRNA sense strand
ccagaugacuugugagaac

SEQ ID NO: 1709338 - RNA, 19 nt, Homo sapiens
  misc_RNA (1)...(19): siRNA sense strand
cagcagagauaauggaaac

SEQ ID NO: 1709339 - RNA, 19 nt, Homo sapiens
  misc_RNA (1)...(19): siRNA sense strand
ggcgugagcuggagaagca

SEQ ID NO: 1709340 - RNA, 19 nt, Homo sapiens
  misc_RNA (1)...(19): siRNA sense strand
cacaggagcuugcaacaac

SEQ ID NO: 1709341 - RNA, 19 nt, Homo sapiens
  misc_RNA (1)...(19): siRNA sense strand
ggagaacagccacgucuuc

SEQ ID NO: 1709342 - RNA, 19 nt, Homo sapiens
  misc_RNA (1)...(19): siRNA sense strand
gagcguggccgacaagauc

SEQ ID NO: 1709343 - RNA, 19 nt, Homo sapiens
  misc_RNA (1)...(19): siRNA sense strand
cagcaucacuggcaugaac

SEQ ID NO: 1709344 - RNA, 19 nt, Homo sapiens
  misc_RNA (1)...(19): siRNA sense strand
gcacggguaugagcuccaa

SEQ ID NO: 1709345 - RNA, 19 nt, Homo sapiens
  misc_RNA (1)...(19): siRNA sense strand
gguuauggccugcacagaa

SEQ ID NO: 1709346 - RNA, 19 nt, Homo sapiens
  misc_RNA (1)...(19): siRNA sense strand
caaauuccccgaagacuuu

SEQ ID NO: 1709347 - RNA, 19 nt, Homo sapiens
  misc_RNA (1)...(19): siRNA sense strand
gggaaagccugaggagucu

SEQ ID NO: 1709348 - RNA, 19 nt, Homo sapiens
  misc_RNA (1)...(19): siRNA sense strand
guuauggccugcacagaag

SEQ ID NO: 1709349 - RNA, 19 nt, Homo sapiens
  misc_RNA (1)...(19): siRNA sense strand
ccugaaaacucaacaauca

SEQ ID NO: 1709350 - RNA, 19 nt, Homo sapiens
  misc_RNA (1)...(19): siRNA sense strand
ccaacaagcggagugauug

SEQ ID NO: 1709351 - RNA, 19 nt, Homo sapiens
  misc_RNA (1)...(19): siRNA sense strand
ggacacugcagaacagcuu

SEQ ID NO: 1709352 - RNA, 19 nt, Homo sapiens
  misc_RNA (1)...(19): siRNA sense strand
ccagagagcguggagaaug

SEQ ID NO: 1709353 - RNA, 19 nt, Homo sapiens
  misc_RNA (1)...(19): siRNA sense strand
gaugaugaccgcuauucug

SEQ ID NO: 1709354 - RNA, 19 nt, Homo sapiens
  misc_RNA (1)...(19): siRNA sense strand
gacaugucauucaaguuuc

SEQ ID NO: 1709355 - RNA, 19 nt, Homo sapiens
  misc_RNA (1)...(19): siRNA sense strand
caagcauccugacaacauc

SEQ ID NO: 1709356 - RNA, 19 nt, Homo sapiens
  misc_RNA (1)...(19): siRNA sense strand
ccgacaagauccuggacuu

SEQ ID NO: 1709357 - RNA, 19 nt, Homo sapiens
  misc_RNA (1)...(19): siRNA sense strand
cagagagcguggagaaugg

SEQ ID NO: 1709358 - RNA, 19 nt, Homo sapiens
  misc_RNA (1)...(19): siRNA sense strand
ugaggagucucgugucucu

SEQ ID NO: 1709359 - RNA, 19 nt, Homo sapiens
  misc_RNA (1)...(19): siRNA sense strand
agagaaaccucaagaaaag

SEQ ID NO: 1709360 - RNA, 19 nt, Homo sapiens
  misc_RNA (1)...(19): siRNA sense strand
gggacuuugugcacuguga

SEQ ID NO: 1709361 - RNA, 19 nt, Homo sapiens
  misc_RNA (1)...(19): siRNA sense strand
uccaacggaugcuuuauca

SEQ ID NO: 1709362 - RNA, 19 nt, Homo sapiens
  misc_RNA (1)...(19): siRNA sense strand
gagauaauggaaacaucaa

SEQ ID NO: 1709363 - RNA, 19 nt, Homo sapiens
  misc_RNA (1)...(19): siRNA sense strand
gccaacaagcggagugauu

SEQ ID NO: 1709364 - RNA, 19 nt, Homo sapiens
  misc_RNA (1)...(19): siRNA sense strand
ugucucgggucaucuguga

SEQ ID NO: 1709365 - RNA, 19 nt, Homo sapiens
  misc_RNA (1)...(19): siRNA sense strand
gagaacagccacgucuuca

SEQ ID NO: 1709366 - RNA, 19 nt, Homo sapiens
  misc_RNA (1)...(19): siRNA sense strand
gagcagcagagauaaugga

SEQ ID NO: 1709367 - RNA, 19 nt, Homo sapiens
  misc_RNA (1)...(19): siRNA sense strand
gcagagauaauggaaacau

SEQ ID NO: 1709368 - RNA, 19 nt, Homo sapiens
  misc_RNA (1)...(19): siRNA sense strand
gagcuugcaacaacagaga

SEQ ID NO: 1709369 - RNA, 19 nt, Homo sapiens
  misc_RNA (1)...(19): siRNA sense strand
caaaaugcccaaacacuug

SEQ ID NO: 1709370 - RNA, 19 nt, Homo sapiens
  misc_RNA (1)...(19): siRNA sense strand
aaagaaaagucaaccugaa

SEQ ID NO: 1709371 - RNA, 19 nt, Homo sapiens
  misc_RNA (1)...(19): siRNA sense strand
cagagauaauggaaacauc

SEQ ID NO: 1709372 - RNA, 19 nt, Homo sapiens
  misc_RNA (1)...(19): siRNA sense strand
aaguguggcuucccagaga

SEQ ID NO: 1709373 - RNA, 19 nt, Homo sapiens
  misc_RNA (1)...(19): siRNA sense strand
gcugggaggcuuagcugaa

SEQ ID NO: 1709374 - RNA, 19 nt, Homo sapiens
  misc_RNA (1)...(19): siRNA sense strand
uacaagcgaugaaaagaaa

SEQ ID NO: 1709375 - RNA, 19 nt, Homo sapiens
  misc_RNA (1)...(19): siRNA sense strand
cagagaaaccucaagaaaa

SEQ ID NO: 1709376 - RNA, 19 nt, Homo sapiens
  misc_RNA (1)...(19): siRNA sense strand
ccgaggccuuccagcagua

SEQ ID NO: 1709377 - RNA, 19 nt, Homo sapiens
  misc_RNA (1)...(19): siRNA sense strand
caaacuuccugagccaaca

SEQ ID NO: 1709378 - RNA, 19 nt, Homo sapiens
  misc_RNA (1)...(19): siRNA sense strand
aacggaugcuuuaucagaa

SEQ ID NO: 1709379 - RNA, 19 nt, Homo sapiens
  misc_RNA (1)...(19): siRNA sense strand
ggcgcgugcugguguauuc

SEQ ID NO: 1709380 - RNA, 19 nt, Homo sapiens
  misc_RNA (1)...(19): siRNA sense strand
cuggaggccuggagggaaa

SEQ ID NO: 1709381 - RNA, 19 nt, Homo sapiens
  misc_RNA (1)...(19): siRNA sense strand
cacagaugaugaccgcuau

SEQ ID NO: 1709382 - RNA, 19 nt, Homo sapiens
  misc_RNA (1)...(19): siRNA sense strand
gcagcagagauaauggaaa

SEQ ID NO: 1709383 - RNA, 19 nt, Homo sapiens
  misc_RNA (1)...(19): siRNA sense strand
cugggaggcuuagcugaaa

SEQ ID NO: 1709384 - RNA, 19 nt, Homo sapiens
  misc_RNA (1)...(19): siRNA sense strand
aaaugagguugucacagau

SEQ ID NO: 1709385 - RNA, 19 nt, Homo sapiens
  misc_RNA (1)...(19): siRNA sense strand
caaauacaggcccaucaca

SEQ ID NO: 1709386 - RNA, 19 nt, Homo sapiens
  misc_RNA (1)...(19): siRNA sense strand
caacaaucacagcauccaa

SEQ ID NO: 1709387 - RNA, 19 nt, Homo sapiens
  misc_RNA (1)...(19): siRNA sense strand
aggcuuagcugaaaacuuc

SEQ ID NO: 1709388 - RNA, 19 nt, Homo sapiens
  misc_RNA (1)...(19): siRNA sense strand
cuucagcccauggacauua

SEQ ID NO: 1709389 - RNA, 19 nt, Homo sapiens
  misc_RNA (1)...(19): siRNA sense strand
acgccacgaugcagagaaa

SEQ ID NO: 1709390 - RNA, 19 nt, Homo sapiens
  misc_RNA (1)...(19): siRNA sense strand
gcaguacgugggucccuau

SEQ ID NO: 1709391 - RNA, 19 nt, Homo sapiens
  misc_RNA (1)...(19): siRNA sense strand
guacgacucuuuuccaaac

SEQ ID NO: 1709392 - RNA, 19 nt, Homo sapiens
  misc_RNA (1)...(19): siRNA sense strand
cuguuugccugucucauug

SEQ ID NO: 1709393 - RNA, 19 nt, Homo sapiens
  misc_RNA (1)...(19): siRNA sense strand
acaagcauccugacaacau

SEQ ID NO: 1709394 - RNA, 19 nt, Homo sapiens
  misc_RNA (1)...(19): siRNA sense strand
gagagggaaagaacuccuu

SEQ ID NO: 1709395 - RNA, 19 nt, Homo sapiens
  misc_RNA (1)...(19): siRNA sense strand
agagauaauggaaacauca

SEQ ID NO: 1709396 - RNA, 19 nt, Homo sapiens
  misc_RNA (1)...(19): siRNA sense strand
cugcagaacagcuucaugu

SEQ ID NO: 1709397 - RNA, 19 nt, Homo sapiens
  misc_RNA (1)...(19): siRNA sense strand
gacagcaucacuggcauga

SEQ ID NO: 1709398 - RNA, 19 nt, Homo sapiens
  misc_RNA (1)...(19): siRNA sense strand
ccuguuugccugucucauu

SEQ ID NO: 1709399 - RNA, 19 nt, Homo sapiens
  misc_RNA (1)...(19): siRNA sense strand
ucacaggagcuugcaacaa

SEQ ID NO: 1709400 - RNA, 19 nt, Homo sapiens
  misc_RNA (1)...(19): siRNA sense strand
ugcccgagcagcagagaua

SEQ ID NO: 1709401 - RNA, 19 nt, Homo sapiens
  misc_RNA (1)...(19): siRNA sense strand
acugccagaugacuuguga

SEQ ID NO: 1709402 - RNA, 19 nt, Homo sapiens
  misc_RNA (1)...(19): siRNA sense strand
auggaaacaucaauacaag

SEQ ID NO: 1709403 - RNA, 19 nt, Homo sapiens
  misc_RNA (1)...(19): siRNA sense strand
auacaucgaccacgacauc

SEQ ID NO: 1709404 - RNA, 19 nt, Homo sapiens
  misc_RNA (1)...(19): siRNA sense strand
acaugucauucaaguuuca

SEQ ID NO: 1709405 - RNA, 19 nt, Homo sapiens
  misc_RNA (1)...(19): siRNA sense strand
cggaugcuuuaucagaaga

SEQ ID NO: 1709406 - RNA, 19 nt, Homo sapiens
  misc_RNA (1)...(19): siRNA sense strand
gagguugucacagaugaug

SEQ ID NO: 1709407 - RNA, 19 nt, Homo sapiens
  misc_RNA (1)...(19): siRNA sense strand
gcaaauuccccgaagacuu

SEQ ID NO: 1709408 - RNA, 19 nt, Homo sapiens
  misc_RNA (1)...(19): siRNA sense strand
gaugacuugugagaaccaa

SEQ ID NO: 1709409 - RNA, 19 nt, Homo sapiens
  misc_RNA (1)...(19): siRNA sense strand
gagccaacaagcggaguga

SEQ ID NO: 1709410 - RNA, 19 nt, Homo sapiens
  misc_RNA (1)...(19): siRNA sense strand
ccaggaaggaugggauuuc

SEQ ID NO: 1709411 - RNA, 19 nt, Homo sapiens
  misc_RNA (1)...(19): siRNA sense strand
cagaugaugaccgcuauuc

SEQ ID NO: 1709412 - RNA, 19 nt, Homo sapiens
  misc_RNA (1)...(19): siRNA sense strand
ccugaggagucucgugucu

SEQ ID NO: 1709413 - RNA, 19 nt, Homo sapiens
  misc_RNA (1)...(19): siRNA sense strand
uguacaagcauccugacaa

SEQ ID NO: 1709414 - RNA, 19 nt, Homo sapiens
  misc_RNA (1)...(19): siRNA sense strand
caaaugagguugucacaga

SEQ ID NO: 1709415 - RNA, 19 nt, Homo sapiens
  misc_RNA (1)...(19): siRNA sense strand
gcagagaaaccucaagaaa

SEQ ID NO: 1709416 - RNA, 19 nt, Homo sapiens
  misc_RNA (1)...(19): siRNA sense strand
guacgugggucccuaugaa

SEQ ID NO: 1709417 - RNA, 19 nt, Homo sapiens
  misc_RNA (1)...(19): siRNA sense strand
gagcaucauugcaaacaug

SEQ ID NO: 1709418 - RNA, 19 nt, Homo sapiens
  misc_RNA (1)...(19): siRNA sense strand
caagacaugucauucaagu

SEQ ID NO: 1709419 - RNA, 19 nt, Homo sapiens
  misc_RNA (1)...(19): siRNA sense strand
ggagagugcugggauggaa

SEQ ID NO: 1709420 - RNA, 19 nt, Homo sapiens
  misc_RNA (1)...(19): siRNA sense strand
caacggaugcuuuaucaga

SEQ ID NO: 1709421 - RNA, 19 nt, Homo sapiens
  misc_RNA (1)...(19): siRNA sense strand
agacaugucauucaaguuu

SEQ ID NO: 1709422 - RNA, 19 nt, Homo sapiens
  misc_RNA (1)...(19): siRNA sense strand
acacuugccuggcgaacaa

SEQ ID NO: 1709423 - RNA, 19 nt, Homo sapiens
  misc_RNA (1)...(19): siRNA sense strand
guacaagcauccugacaac

SEQ ID NO: 1709424 - RNA, 19 nt, Homo sapiens
  misc_RNA (1)...(19): siRNA sense strand
ccacagagcaccagcaaag

SEQ ID NO: 1709425 - RNA, 19 nt, Homo sapiens
  misc_RNA (1)...(19): siRNA sense strand
ccagaugacuugugagaac

SEQ ID NO: 1709426 - RNA, 19 nt, Homo sapiens
  misc_RNA (1)...(19): siRNA sense strand
cagcagagauaauggaaac

SEQ ID NO: 1709427 - RNA, 19 nt, Homo sapiens
  misc_RNA (1)...(19): siRNA sense strand
ggcgugagcuggagaagca

SEQ ID NO: 1709428 - RNA, 19 nt, Homo sapiens
  misc_RNA (1)...(19): siRNA sense strand
cacaggagcuugcaacaac

SEQ ID NO: 1709429 - RNA, 19 nt, Homo sapiens
  misc_RNA (1)...(19): siRNA sense strand
ggagaacagccacgucuuc

SEQ ID NO: 1709430 - RNA, 19 nt, Homo sapiens
  misc_RNA (1)...(19): siRNA sense strand
gagcguggccgacaagauc

SEQ ID NO: 1709431 - RNA, 19 nt, Homo sapiens
  misc_RNA (1)...(19): siRNA sense strand
cagcaucacuggcaugaac

SEQ ID NO: 1709432 - RNA, 19 nt, Homo sapiens
  misc_RNA (1)...(19): siRNA sense strand
gcacggguaugagcuccaa

SEQ ID NO: 1709433 - RNA, 19 nt, Homo sapiens
  misc_RNA (1)...(19): siRNA sense strand
gguuauggccugcacagaa

SEQ ID NO: 1709434 - RNA, 19 nt, Homo sapiens
  misc_RNA (1)...(19): siRNA sense strand
caaauuccccgaagacuuu

SEQ ID NO: 1709435 - RNA, 19 nt, Homo sapiens
  misc_RNA (1)...(19): siRNA sense strand
gggaaagccugaggagucu

SEQ ID NO: 1709436 - RNA, 19 nt, Homo sapiens
  misc_RNA (1)...(19): siRNA sense strand
guuauggccugcacagaag

SEQ ID NO: 1709437 - RNA, 19 nt, Homo sapiens
  misc_RNA (1)...(19): siRNA sense strand
ccugaaaacucaacaauca

SEQ ID NO: 1709438 - RNA, 19 nt, Homo sapiens
  misc_RNA (1)...(19): siRNA sense strand
ccaacaagcggagugauug

SEQ ID NO: 1709439 - RNA, 19 nt, Homo sapiens
  misc_RNA (1)...(19): siRNA sense strand
ccagagagcguggagaaug

SEQ ID NO: 1709440 - RNA, 19 nt, Homo sapiens
  misc_RNA (1)...(19): siRNA sense strand
gaugaugaccgcuauucug

SEQ ID NO: 1709441 - RNA, 19 nt, Homo sapiens
  misc_RNA (1)...(19): siRNA sense strand
gacaugucauucaaguuuc

SEQ ID NO: 1709442 - RNA, 19 nt, Homo sapiens
  misc_RNA (1)...(19): siRNA sense strand
caagcauccugacaacauc

SEQ ID NO: 1709443 - RNA, 19 nt, Homo sapiens
  misc_RNA (1)...(19): siRNA sense strand
ugaggagucucgugucucu

SEQ ID NO: 1709444 - RNA, 19 nt, Homo sapiens
  misc_RNA (1)...(19): siRNA sense strand
cagagagcguggagaaugg

SEQ ID NO: 1709445 - RNA, 19 nt, Homo sapiens
  misc_RNA (1)...(19): siRNA sense strand
ccgacaagauccuggacuu

SEQ ID NO: 1709446 - RNA, 19 nt, Homo sapiens
  misc_RNA (1)...(19): siRNA sense strand
agagaaaccucaagaaaag

SEQ ID NO: 1709447 - RNA, 19 nt, Homo sapiens
  misc_RNA (1)...(19): siRNA sense strand
gggacuuugugcacuguga

SEQ ID NO: 1709448 - RNA, 19 nt, Homo sapiens
  misc_RNA (1)...(19): siRNA sense strand
uccaacggaugcuuuauca

SEQ ID NO: 1709449 - RNA, 19 nt, Homo sapiens
  misc_RNA (1)...(19): siRNA sense strand
gagauaauggaaacaucaa

SEQ ID NO: 1709450 - RNA, 19 nt, Homo sapiens
  misc_RNA (1)...(19): siRNA sense strand
gccaacaagcggagugauu

SEQ ID NO: 1709451 - RNA, 19 nt, Homo sapiens
  misc_RNA (1)...(19): siRNA sense strand
ugucucgggucaucuguga

SEQ ID NO: 1709452 - RNA, 19 nt, Homo sapiens
  misc_RNA (1)...(19): siRNA sense strand
gagaacagccacgucuuca

SEQ ID NO: 1709453 - RNA, 19 nt, Homo sapiens
  misc_RNA (1)...(19): siRNA sense strand
gagcagcagagauaaugga

SEQ ID NO: 1709454 - RNA, 19 nt, Homo sapiens
  misc_RNA (1)...(19): siRNA sense strand
gcagagauaauggaaacau

SEQ ID NO: 1709455 - RNA, 19 nt, Homo sapiens
  misc_RNA (1)...(19): siRNA sense strand
gagcuugcaacaacagaga

SEQ ID NO: 1709456 - RNA, 19 nt, Homo sapiens
  misc_RNA (1)...(19): siRNA sense strand
caaaaugcccaaacacuug

SEQ ID NO: 1709457 - RNA, 19 nt, Homo sapiens
  misc_RNA (1)...(19): siRNA sense strand
aaagaaaagucaaccugaa

SEQ ID NO: 1709458 - RNA, 19 nt, Homo sapiens
  misc_RNA (1)...(19): siRNA sense strand
cagagauaauggaaacauc

SEQ ID NO: 1709459 - RNA, 19 nt, Homo sapiens
  misc_RNA (1)...(19): siRNA sense strand
aaguguggcuucccagaga

SEQ ID NO: 1709460 - RNA, 19 nt, Homo sapiens
  misc_RNA (1)...(19): siRNA sense strand
gcugggaggcuuagcugaa

SEQ ID NO: 1709461 - RNA, 19 nt, Homo sapiens
  misc_RNA (1)...(19): siRNA sense strand
uacaagcgaugaaaagaaa

SEQ ID NO: 1709462 - RNA, 19 nt, Homo sapiens
  misc_RNA (1)...(19): siRNA sense strand
cagagaaaccucaagaaaa

SEQ ID NO: 1709463 - RNA, 19 nt, Homo sapiens
  misc_RNA (1)...(19): siRNA sense strand
ccgaggccuuccagcagua

SEQ ID NO: 1709464 - RNA, 19 nt, Homo sapiens
  misc_RNA (1)...(19): siRNA sense strand
caaacuuccugagccaaca

SEQ ID NO: 1709465 - RNA, 19 nt, Homo sapiens
  misc_RNA (1)...(19): siRNA sense strand
aacggaugcuuuaucagaa

SEQ ID NO: 1709466 - RNA, 19 nt, Homo sapiens
  misc_RNA (1)...(19): siRNA sense strand
ggcgcgugcugguguauuc

SEQ ID NO: 1709467 - RNA, 19 nt, Homo sapiens
  misc_RNA (1)...(19): siRNA sense strand
cuggaggccuggagggaaa

SEQ ID NO: 1709468 - RNA, 19 nt, Homo sapiens
  misc_RNA (1)...(19): siRNA sense strand
cacagaugaugaccgcuau

SEQ ID NO: 1709469 - RNA, 19 nt, Homo sapiens
  misc_RNA (1)...(19): siRNA sense strand
gcagcagagauaauggaaa

SEQ ID NO: 1709470 - RNA, 19 nt, Homo sapiens
  misc_RNA (1)...(19): siRNA sense strand
cugggaggcuuagcugaaa

SEQ ID NO: 1709471 - RNA, 19 nt, Homo sapiens
  misc_RNA (1)...(19): siRNA sense strand
aaaugagguugucacagau

SEQ ID NO: 1709472 - RNA, 19 nt, Homo sapiens
  misc_RNA (1)...(19): siRNA sense strand
caaauacaggcccaucaca

SEQ ID NO: 1709473 - RNA, 19 nt, Homo sapiens
  misc_RNA (1)...(19): siRNA sense strand
caacaaucacagcauccaa

SEQ ID NO: 1709474 - RNA, 19 nt, Homo sapiens
  misc_RNA (1)...(19): siRNA sense strand
aggcuuagcugaaaacuuc

SEQ ID NO: 1709475 - RNA, 19 nt, Homo sapiens
  misc_RNA (1)...(19): siRNA sense strand
cuucagcccauggacauua

SEQ ID NO: 1709476 - RNA, 19 nt, Homo sapiens
  misc_RNA (1)...(19): siRNA sense strand
acgccacgaugcagagaaa

SEQ ID NO: 1709477 - RNA, 19 nt, Homo sapiens
  misc_RNA (1)...(19): siRNA sense strand
gcaguacgugggucccuau

SEQ ID NO: 1709478 - RNA, 19 nt, Homo sapiens
  misc_RNA (1)...(19): siRNA sense strand
cuguuugccugucucauug

SEQ ID NO: 1709479 - RNA, 19 nt, Homo sapiens
  misc_RNA (1)...(19): siRNA sense strand
acaagcauccugacaacau

SEQ ID NO: 1709480 - RNA, 19 nt, Homo sapiens
  misc_RNA (1)...(19): siRNA sense strand
gagagggaaagaacuccuu

SEQ ID NO: 1709481 - RNA, 19 nt, Homo sapiens
  misc_RNA (1)...(19): siRNA sense strand
agagauaauggaaacauca

SEQ ID NO: 1709482 - RNA, 19 nt, Homo sapiens
  misc_RNA (1)...(19): siRNA sense strand
gacagcaucacuggcauga

SEQ ID NO: 1709483 - RNA, 19 nt, Homo sapiens
  misc_RNA (1)...(19): siRNA sense strand
ccuguuugccugucucauu

SEQ ID NO: 1709484 - RNA, 19 nt, Homo sapiens
  misc_RNA (1)...(19): siRNA sense strand
ucacaggagcuugcaacaa

SEQ ID NO: 1709485 - RNA, 19 nt, Homo sapiens
  misc_RNA (1)...(19): siRNA sense strand
ugcccgagcagcagagaua

SEQ ID NO: 1709486 - RNA, 19 nt, Homo sapiens
  misc_RNA (1)...(19): siRNA sense strand
acugccagaugacuuguga

SEQ ID NO: 1709487 - RNA, 19 nt, Homo sapiens
  misc_RNA (1)...(19): siRNA sense strand
auggaaacaucaauacaag

SEQ ID NO: 1709488 - RNA, 19 nt, Homo sapiens
  misc_RNA (1)...(19): siRNA sense strand
auacaucgaccacgacauc

SEQ ID NO: 1709489 - RNA, 19 nt, Homo sapiens
  misc_RNA (1)...(19): siRNA sense strand
acaugucauucaaguuuca

SEQ ID NO: 1709490 - RNA, 19 nt, Homo sapiens
  misc_RNA (1)...(19): siRNA sense strand
cggaugcuuuaucagaaga

SEQ ID NO: 1709491 - RNA, 19 nt, Homo sapiens
  misc_RNA (1)...(19): siRNA sense strand
gagguugucacagaugaug

SEQ ID NO: 1709492 - RNA, 19 nt, Homo sapiens
  misc_RNA (1)...(19): siRNA sense strand
gcaaauuccccgaagacuu

SEQ ID NO: 1709493 - RNA, 19 nt, Homo sapiens
  misc_RNA (1)...(19): siRNA sense strand
gaugacuugugagaaccaa

SEQ ID NO: 1709494 - RNA, 19 nt, Homo sapiens
  misc_RNA (1)...(19): siRNA sense strand
gagccaacaagcggaguga

SEQ ID NO: 1709495 - RNA, 19 nt, Homo sapiens
  misc_RNA (1)...(19): siRNA sense strand
ccaggaaggaugggauuuc

SEQ ID NO: 1709496 - RNA, 19 nt, Homo sapiens
  misc_RNA (1)...(19): siRNA sense strand
cagaugaugaccgcuauuc

SEQ ID NO: 1709497 - RNA, 19 nt, Homo sapiens
  misc_RNA (1)...(19): siRNA sense strand
ccugaggagucucgugucu

SEQ ID NO: 1709498 - RNA, 19 nt, Homo sapiens
  misc_RNA (1)...(19): siRNA sense strand
uguacaagcauccugacaa

SEQ ID NO: 1709499 - RNA, 19 nt, Homo sapiens
  misc_RNA (1)...(19): siRNA sense strand
caaaugagguugucacaga

SEQ ID NO: 1709500 - RNA, 19 nt, Homo sapiens
  misc_RNA (1)...(19): siRNA sense strand
gcagagaaaccucaagaaa

SEQ ID NO: 1709501 - RNA, 19 nt, Homo sapiens
  misc_RNA (1)...(19): siRNA sense strand
guacgugggucccuaugaa

SEQ ID NO: 1709502 - RNA, 19 nt, Homo sapiens
  misc_RNA (1)...(19): siRNA sense strand
gagcaucauugcaaacaug

SEQ ID NO: 1709503 - RNA, 19 nt, Homo sapiens
  misc_RNA (1)...(19): siRNA sense strand
caagacaugucauucaagu

SEQ ID NO: 1709504 - RNA, 19 nt, Homo sapiens
  misc_RNA (1)...(19): siRNA sense strand
ggagagugcugggauggaa

SEQ ID NO: 1709505 - RNA, 19 nt, Homo sapiens
  misc_RNA (1)...(19): siRNA sense strand
caacggaugcuuuaucaga

SEQ ID NO: 1709506 - RNA, 19 nt, Homo sapiens
  misc_RNA (1)...(19): siRNA sense strand
agacaugucauucaaguuu

SEQ ID NO: 1709507 - RNA, 19 nt, Homo sapiens
  misc_RNA (1)...(19): siRNA sense strand
acacuugccuggcgaacaa

SEQ ID NO: 1709508 - RNA, 19 nt, Homo sapiens
  misc_RNA (1)...(19): siRNA sense strand
guacaagcauccugacaac

SEQ ID NO: 1709509 - RNA, 19 nt, Homo sapiens
  misc_RNA (1)...(19): siRNA sense strand
ccacagagcaccagcaaag

SEQ ID NO: 1709510 - RNA, 19 nt, Homo sapiens
  misc_RNA (1)...(19): siRNA sense strand
ccagaugacuugugagaac

SEQ ID NO: 1709511 - RNA, 19 nt, Homo sapiens
  misc_RNA (1)...(19): siRNA sense strand
cagcagagauaauggaaac

SEQ ID NO: 1709512 - RNA, 19 nt, Homo sapiens
  misc_RNA (1)...(19): siRNA sense strand
ggcgugagcuggagaagca

SEQ ID NO: 1709513 - RNA, 19 nt, Homo sapiens
  misc_RNA (1)...(19): siRNA sense strand
cacaggagcuugcaacaac

SEQ ID NO: 1709514 - RNA, 19 nt, Homo sapiens
  misc_RNA (1)...(19): siRNA sense strand
ggagaacagccacgucuuc

SEQ ID NO: 1709515 - RNA, 19 nt, Homo sapiens
  misc_RNA (1)...(19): siRNA sense strand
gagcguggccgacaagauc

SEQ ID NO: 1709516 - RNA, 19 nt, Homo sapiens
  misc_RNA (1)...(19): siRNA sense strand
cagcaucacuggcaugaac

SEQ ID NO: 1709517 - RNA, 19 nt, Homo sapiens
  misc_RNA (1)...(19): siRNA sense strand
gcacggguaugagcuccaa

SEQ ID NO: 1709518 - RNA, 19 nt, Homo sapiens
  misc_RNA (1)...(19): siRNA sense strand
gguuauggccugcacagaa

SEQ ID NO: 1709519 - RNA, 19 nt, Homo sapiens
  misc_RNA (1)...(19): siRNA sense strand
caaauuccccgaagacuuu

SEQ ID NO: 1709520 - RNA, 19 nt, Homo sapiens
  misc_RNA (1)...(19): siRNA sense strand
gggaaagccugaggagucu

SEQ ID NO: 1709521 - RNA, 19 nt, Homo sapiens
  misc_RNA (1)...(19): siRNA sense strand
guuauggccugcacagaag

SEQ ID NO: 1709522 - RNA, 19 nt, Homo sapiens
  misc_RNA (1)...(19): siRNA sense strand
ccugaaaacucaacaauca

SEQ ID NO: 1709523 - RNA, 19 nt, Homo sapiens
  misc_RNA (1)...(19): siRNA sense strand
ccaacaagcggagugauug

SEQ ID NO: 1709524 - RNA, 19 nt, Homo sapiens
  misc_RNA (1)...(19): siRNA sense strand
ccagagagcguggagaaug

SEQ ID NO: 1709525 - RNA, 19 nt, Homo sapiens
  misc_RNA (1)...(19): siRNA sense strand
gaugaugaccgcuauucug

SEQ ID NO: 1709526 - RNA, 19 nt, Homo sapiens
  misc_RNA (1)...(19): siRNA sense strand
gacaugucauucaaguuuc

SEQ ID NO: 1709527 - RNA, 19 nt, Homo sapiens
  misc_RNA (1)...(19): siRNA sense strand
caagcauccugacaacauc

SEQ ID NO: 1709528 - RNA, 19 nt, Homo sapiens
  misc_RNA (1)...(19): siRNA sense strand
ugaggagucucgugucucu

SEQ ID NO: 1709529 - RNA, 19 nt, Homo sapiens
  misc_RNA (1)...(19): siRNA sense strand
cagagagcguggagaaugg

SEQ ID NO: 1709530 - RNA, 19 nt, Homo sapiens
  misc_RNA (1)...(19): siRNA sense strand
ccgacaagauccuggacuu

SEQ ID NO: 1709531 - RNA, 19 nt, Homo sapiens
  misc_RNA (1)...(19): siRNA sense strand
agagaaaccucaagaaaag

SEQ ID NO: 1709532 - RNA, 19 nt, Homo sapiens
  misc_RNA (1)...(19): siRNA sense strand
gggacuuugugcacuguga

SEQ ID NO: 1709533 - RNA, 19 nt, Homo sapiens
  misc_RNA (1)...(19): siRNA sense strand
uccaacggaugcuuuauca

SEQ ID NO: 1709534 - RNA, 19 nt, Homo sapiens
  misc_RNA (1)...(19): siRNA sense strand
gagauaauggaaacaucaa

SEQ ID NO: 1709535 - RNA, 19 nt, Homo sapiens
  misc_RNA (1)...(19): siRNA sense strand
gccaacaagcggagugauu

SEQ ID NO: 1709536 - RNA, 19 nt, Homo sapiens
  misc_RNA (1)...(19): siRNA sense strand
ugucucgggucaucuguga

SEQ ID NO: 1709537 - RNA, 19 nt, Homo sapiens
  misc_RNA (1)...(19): siRNA sense strand
gagaacagccacgucuuca

SEQ ID NO: 1709538 - RNA, 19 nt, Homo sapiens
  misc_RNA (1)...(19): siRNA sense strand
gagcagcagagauaaugga

SEQ ID NO: 1709539 - RNA, 19 nt, Homo sapiens
  misc_RNA (1)...(19): siRNA sense strand
gcagagauaauggaaacau

SEQ ID NO: 1709540 - RNA, 19 nt, Homo sapiens
  misc_RNA (1)...(19): siRNA sense strand
gagcuugcaacaacagaga

SEQ ID NO: 1709541 - RNA, 19 nt, Homo sapiens
  misc_RNA (1)...(19): siRNA sense strand
caaaaugcccaaacacuug

SEQ ID NO: 1709542 - RNA, 19 nt, Homo sapiens
  misc_RNA (1)...(19): siRNA sense strand
aaagaaaagucaaccugaa

SEQ ID NO: 1709543 - RNA, 19 nt, Homo sapiens
  misc_RNA (1)...(19): siRNA sense strand
cagagauaauggaaacauc

SEQ ID NO: 1709544 - RNA, 19 nt, Homo sapiens
  misc_RNA (1)...(19): siRNA sense strand
aaguguggcuucccagaga

SEQ ID NO: 1709545 - RNA, 19 nt, Homo sapiens
  misc_RNA (1)...(19): siRNA sense strand
gcugggaggcuuagcugaa

SEQ ID NO: 1709546 - RNA, 19 nt, Homo sapiens
  misc_RNA (1)...(19): siRNA sense strand
uacaagcgaugaaaagaaa

SEQ ID NO: 1709547 - RNA, 19 nt, Homo sapiens
  misc_RNA (1)...(19): siRNA sense strand
cagagaaaccucaagaaaa

SEQ ID NO: 1709548 - RNA, 19 nt, Homo sapiens
  misc_RNA (1)...(19): siRNA sense strand
ccgaggccuuccagcagua

SEQ ID NO: 1709549 - RNA, 19 nt, Homo sapiens
  misc_RNA (1)...(19): siRNA sense strand
caaacuuccugagccaaca

SEQ ID NO: 1709550 - RNA, 19 nt, Homo sapiens
  misc_RNA (1)...(19): siRNA sense strand
aacggaugcuuuaucagaa

SEQ ID NO: 1709551 - RNA, 19 nt, Homo sapiens
  misc_RNA (1)...(19): siRNA sense strand
ggcgcgugcugguguauuc

SEQ ID NO: 1709552 - RNA, 19 nt, Homo sapiens
  misc_RNA (1)...(19): siRNA sense strand
cuggaggccuggagggaaa

SEQ ID NO: 1709553 - RNA, 19 nt, Homo sapiens
  misc_RNA (1)...(19): siRNA sense strand
cacagaugaugaccgcuau

SEQ ID NO: 1709554 - RNA, 19 nt, Homo sapiens
  misc_RNA (1)...(19): siRNA sense strand
gcagcagagauaauggaaa

SEQ ID NO: 1709555 - RNA, 19 nt, Homo sapiens
  misc_RNA (1)...(19): siRNA sense strand
cugggaggcuuagcugaaa

SEQ ID NO: 1709556 - RNA, 19 nt, Homo sapiens
  misc_RNA (1)...(19): siRNA sense strand
aaaugagguugucacagau

SEQ ID NO: 1709557 - RNA, 19 nt, Homo sapiens
  misc_RNA (1)...(19): siRNA sense strand
caaauacaggcccaucaca

SEQ ID NO: 1709558 - RNA, 19 nt, Homo sapiens
  misc_RNA (1)...(19): siRNA sense strand
caacaaucacagcauccaa

SEQ ID NO: 1709559 - RNA, 19 nt, Homo sapiens
  misc_RNA (1)...(19): siRNA sense strand
aggcuuagcugaaaacuuc

SEQ ID NO: 1709560 - RNA, 19 nt, Homo sapiens
  misc_RNA (1)...(19): siRNA sense strand
cuucagcccauggacauua

SEQ ID NO: 1709561 - RNA, 19 nt, Homo sapiens
  misc_RNA (1)...(19): siRNA sense strand
acgccacgaugcagagaaa

SEQ ID NO: 1709562 - RNA, 19 nt, Homo sapiens
  misc_RNA (1)...(19): siRNA sense strand
gcaguacgugggucccuau

SEQ ID NO: 1709563 - RNA, 19 nt, Homo sapiens
  misc_RNA (1)...(19): siRNA sense strand
cuguuugccugucucauug

SEQ ID NO: 1709564 - RNA, 19 nt, Homo sapiens
  misc_RNA (1)...(19): siRNA sense strand
acaagcauccugacaacau

SEQ ID NO: 1709565 - RNA, 19 nt, Homo sapiens
  misc_RNA (1)...(19): siRNA sense strand
gagagggaaagaacuccuu

SEQ ID NO: 1709566 - RNA, 19 nt, Homo sapiens
  misc_RNA (1)...(19): siRNA sense strand
agagauaauggaaacauca

SEQ ID NO: 1709567 - RNA, 19 nt, Homo sapiens
  misc_RNA (1)...(19): siRNA sense strand
gacagcaucacuggcauga

SEQ ID NO: 1709568 - RNA, 19 nt, Homo sapiens
  misc_RNA (1)...(19): siRNA sense strand
ccuguuugccugucucauu

SEQ ID NO: 1709569 - RNA, 19 nt, Homo sapiens
  misc_RNA (1)...(19): siRNA sense strand
ucacaggagcuugcaacaa

SEQ ID NO: 1709570 - RNA, 19 nt, Homo sapiens
  misc_RNA (1)...(19): siRNA sense strand
ugcccgagcagcagagaua

SEQ ID NO: 1709571 - RNA, 19 nt, Homo sapiens
  misc_RNA (1)...(19): siRNA sense strand
acugccagaugacuuguga

SEQ ID NO: 1709572 - RNA, 19 nt, Homo sapiens
  misc_RNA (1)...(19): siRNA sense strand
auggaaacaucaauacaag

SEQ ID NO: 1709573 - RNA, 19 nt, Homo sapiens
  misc_RNA (1)...(19): siRNA sense strand
auacaucgaccacgacauc

SEQ ID NO: 1709574 - RNA, 19 nt, Homo sapiens
  misc_RNA (1)...(19): siRNA sense strand
acaugucauucaaguuuca

SEQ ID NO: 1709575 - RNA, 19 nt, Homo sapiens
  misc_RNA (1)...(19): siRNA sense strand
cggaugcuuuaucagaaga

SEQ ID NO: 1709576 - RNA, 19 nt, Homo sapiens
  misc_RNA (1)...(19): siRNA sense strand
gagguugucacagaugaug

SEQ ID NO: 1709577 - RNA, 19 nt, Homo sapiens
  misc_RNA (1)...(19): siRNA sense strand
gcaaauuccccgaagacuu

SEQ ID NO: 1709578 - RNA, 19 nt, Homo sapiens
  misc_RNA (1)...(19): siRNA sense strand
gaugacuugugagaaccaa

SEQ ID NO: 1709579 - RNA, 19 nt, Homo sapiens
  misc_RNA (1)...(19): siRNA sense strand
gagccaacaagcggaguga

SEQ ID NO: 1709580 - RNA, 19 nt, Homo sapiens
  misc_RNA (1)...(19): siRNA sense strand
ccaggaaggaugggauuuc

SEQ ID NO: 1709581 - RNA, 19 nt, Homo sapiens
  misc_RNA (1)...(19): siRNA sense strand
cagaugaugaccgcuauuc

SEQ ID NO: 1709582 - RNA, 19 nt, Homo sapiens
  misc_RNA (1)...(19): siRNA sense strand
ccugaggagucucgugucu

SEQ ID NO: 1709583 - RNA, 19 nt, Homo sapiens
  misc_RNA (1)...(19): siRNA sense strand
uguacaagcauccugacaa

SEQ ID NO: 1709584 - RNA, 19 nt, Homo sapiens
  misc_RNA (1)...(19): siRNA sense strand
caaaugagguugucacaga

SEQ ID NO: 1709585 - RNA, 19 nt, Homo sapiens
  misc_RNA (1)...(19): siRNA sense strand
gcagagaaaccucaagaaa

SEQ ID NO: 1709586 - RNA, 19 nt, Homo sapiens
  misc_RNA (1)...(19): siRNA sense strand
guacgugggucccuaugaa

SEQ ID NO: 1709587 - RNA, 19 nt, Homo sapiens
  misc_RNA (1)...(19): siRNA sense strand
gagcaucauugcaaacaug

SEQ ID NO: 1709588 - RNA, 19 nt, Homo sapiens
  misc_RNA (1)...(19): siRNA sense strand
caagacaugucauucaagu

SEQ ID NO: 1709589 - RNA, 19 nt, Homo sapiens
  misc_RNA (1)...(19): siRNA sense strand
ggagagugcugggauggaa

SEQ ID NO: 1709590 - RNA, 19 nt, Homo sapiens
  misc_RNA (1)...(19): siRNA sense strand
caacggaugcuuuaucaga

SEQ ID NO: 1709591 - RNA, 19 nt, Homo sapiens
  misc_RNA (1)...(19): siRNA sense strand
agacaugucauucaaguuu

SEQ ID NO: 1709592 - RNA, 19 nt, Homo sapiens
  misc_RNA (1)...(19): siRNA sense strand
acacuugccuggcgaacaa

SEQ ID NO: 1709593 - RNA, 19 nt, Homo sapiens
  misc_RNA (1)...(19): siRNA sense strand
guacaagcauccugacaac

SEQ ID NO: 1709594 - RNA, 19 nt, Homo sapiens
  misc_RNA (1)...(19): siRNA sense strand
ccacagagcaccagcaaag

SEQ ID NO: 1709595 - RNA, 19 nt, Homo sapiens
  misc_RNA (1)...(19): siRNA sense strand
ccagaugacuugugagaac

SEQ ID NO: 1709596 - RNA, 19 nt, Homo sapiens
  misc_RNA (1)...(19): siRNA sense strand
cagcagagauaauggaaac

SEQ ID NO: 1709597 - RNA, 19 nt, Homo sapiens
  misc_RNA (1)...(19): siRNA sense strand
ggcgugagcuggagaagca

SEQ ID NO: 1709598 - RNA, 19 nt, Homo sapiens
  misc_RNA (1)...(19): siRNA sense strand
cacaggagcuugcaacaac

SEQ ID NO: 1709599 - RNA, 19 nt, Homo sapiens
  misc_RNA (1)...(19): siRNA sense strand
ggagaacagccacgucuuc

SEQ ID NO: 1709600 - RNA, 19 nt, Homo sapiens
  misc_RNA (1)...(19): siRNA sense strand
gagcguggccgacaagauc

SEQ ID NO: 1709601 - RNA, 19 nt, Homo sapiens
  misc_RNA (1)...(19): siRNA sense strand
cagcaucacuggcaugaac

SEQ ID NO: 1709602 - RNA, 19 nt, Homo sapiens
  misc_RNA (1)...(19): siRNA sense strand
gcacggguaugagcuccaa

SEQ ID NO: 1709603 - RNA, 19 nt, Homo sapiens
  misc_RNA (1)...(19): siRNA sense strand
gguuauggccugcacagaa

SEQ ID NO: 1709604 - RNA, 19 nt, Homo sapiens
  misc_RNA (1)...(19): siRNA sense strand
caaauuccccgaagacuuu

SEQ ID NO: 1709605 - RNA, 19 nt, Homo sapiens
  misc_RNA (1)...(19): siRNA sense strand
gggaaagccugaggagucu

SEQ ID NO: 1709606 - RNA, 19 nt, Homo sapiens
  misc_RNA (1)...(19): siRNA sense strand
guuauggccugcacagaag

SEQ ID NO: 1709607 - RNA, 19 nt, Homo sapiens
  misc_RNA (1)...(19): siRNA sense strand
ccugaaaacucaacaauca

SEQ ID NO: 1709608 - RNA, 19 nt, Homo sapiens
  misc_RNA (1)...(19): siRNA sense strand
ccaacaagcggagugauug

SEQ ID NO: 1709609 - RNA, 19 nt, Homo sapiens
  misc_RNA (1)...(19): siRNA sense strand
ccagagagcguggagaaug

SEQ ID NO: 1709610 - RNA, 19 nt, Homo sapiens
  misc_RNA (1)...(19): siRNA sense strand
gaugaugaccgcuauucug

SEQ ID NO: 1709611 - RNA, 19 nt, Homo sapiens
  misc_RNA (1)...(19): siRNA sense strand
gacaugucauucaaguuuc

SEQ ID NO: 1709612 - RNA, 19 nt, Homo sapiens
  misc_RNA (1)...(19): siRNA sense strand
caagcauccugacaacauc

SEQ ID NO: 1709613 - RNA, 19 nt, Homo sapiens
  misc_RNA (1)...(19): siRNA sense strand
ugaggagucucgugucucu

SEQ ID NO: 1709614 - RNA, 19 nt, Homo sapiens
  misc_RNA (1)...(19): siRNA sense strand
cagagagcguggagaaugg

SEQ ID NO: 1709615 - RNA, 19 nt, Homo sapiens
  misc_RNA (1)...(19): siRNA sense strand
ccgacaagauccuggacuu

SEQ ID NO: 1709616 - RNA, 19 nt, Homo sapiens
  misc_RNA (1)...(19): siRNA sense strand
agagaaaccucaagaaaag

SEQ ID NO: 1709617 - RNA, 19 nt, Homo sapiens
  misc_RNA (1)...(19): siRNA sense strand
gggacuuugugcacuguga

SEQ ID NO: 1709618 - RNA, 19 nt, Homo sapiens
  misc_RNA (1)...(19): siRNA sense strand
uccaacggaugcuuuauca

SEQ ID NO: 1709619 - RNA, 19 nt, Homo sapiens
  misc_RNA (1)...(19): siRNA sense strand
gagauaauggaaacaucaa

SEQ ID NO: 1709620 - RNA, 19 nt, Homo sapiens
  misc_RNA (1)...(19): siRNA sense strand
gccaacaagcggagugauu

SEQ ID NO: 1709621 - RNA, 19 nt, Homo sapiens
  misc_RNA (1)...(19): siRNA sense strand
ugucucgggucaucuguga

SEQ ID NO: 1709622 - RNA, 19 nt, Homo sapiens
  misc_RNA (1)...(19): siRNA sense strand
gagaacagccacgucuuca

SEQ ID NO: 1709623 - RNA, 19 nt, Homo sapiens
  misc_RNA (1)...(19): siRNA sense strand
gagcagcagagauaaugga

SEQ ID NO: 1709624 - RNA, 19 nt, Homo sapiens
  misc_RNA (1)...(19): siRNA sense strand
gcagagauaauggaaacau

SEQ ID NO: 1709625 - RNA, 19 nt, Homo sapiens
  misc_RNA (1)...(19): siRNA sense strand
gagcuugcaacaacagaga

SEQ ID NO: 1709626 - RNA, 19 nt, Homo sapiens
  misc_RNA (1)...(19): siRNA sense strand
caaaaugcccaaacacuug

SEQ ID NO: 1709627 - RNA, 19 nt, Homo sapiens
  misc_RNA (1)...(19): siRNA sense strand
aaagaaaagucaaccugaa

SEQ ID NO: 1709628 - RNA, 19 nt, Homo sapiens
  misc_RNA (1)...(19): siRNA sense strand
cagagauaauggaaacauc

SEQ ID NO: 1709629 - RNA, 19 nt, Homo sapiens
  misc_RNA (1)...(19): siRNA sense strand
aaguguggcuucccagaga

SEQ ID NO: 1709630 - RNA, 19 nt, Homo sapiens
  misc_RNA (1)...(19): siRNA sense strand
gcugggaggcuuagcugaa

SEQ ID NO: 1709631 - RNA, 19 nt, Homo sapiens
  misc_RNA (1)...(19): siRNA sense strand
uacaagcgaugaaaagaaa

SEQ ID NO: 1709632 - RNA, 19 nt, Homo sapiens
  misc_RNA (1)...(19): siRNA sense strand
cagagaaaccucaagaaaa

SEQ ID NO: 1709633 - RNA, 19 nt, Homo sapiens
  misc_RNA (1)...(19): siRNA sense strand
ccgaggccuuccagcagua

SEQ ID NO: 1709634 - RNA, 19 nt, Homo sapiens
  misc_RNA (1)...(19): siRNA sense strand
caaacuuccugagccaaca

SEQ ID NO: 1709635 - RNA, 19 nt, Homo sapiens
  misc_RNA (1)...(19): siRNA sense strand
aacggaugcuuuaucagaa

SEQ ID NO: 1709636 - RNA, 19 nt, Homo sapiens
  misc_RNA (1)...(19): siRNA sense strand
ggcgcgugcugguguauuc

SEQ ID NO: 1709637 - RNA, 19 nt, Homo sapiens
  misc_RNA (1)...(19): siRNA sense strand
cuggaggccuggagggaaa

SEQ ID NO: 1709638 - RNA, 19 nt, Homo sapiens
  misc_RNA (1)...(19): siRNA sense strand
cacagaugaugaccgcuau

SEQ ID NO: 1709639 - RNA, 19 nt, Homo sapiens
  misc_RNA (1)...(19): siRNA sense strand
gcagcagagauaauggaaa

SEQ ID NO: 1709640 - RNA, 19 nt, Homo sapiens
  misc_RNA (1)...(19): siRNA sense strand
cugggaggcuuagcugaaa

SEQ ID NO: 1709641 - RNA, 19 nt, Homo sapiens
  misc_RNA (1)...(19): siRNA sense strand
aaaugagguugucacagau

SEQ ID NO: 1709642 - RNA, 19 nt, Homo sapiens
  misc_RNA (1)...(19): siRNA sense strand
caaauacaggcccaucaca

SEQ ID NO: 1709643 - RNA, 19 nt, Homo sapiens
  misc_RNA (1)...(19): siRNA sense strand
caacaaucacagcauccaa

SEQ ID NO: 1709644 - RNA, 19 nt, Homo sapiens
  misc_RNA (1)...(19): siRNA sense strand
aggcuuagcugaaaacuuc

SEQ ID NO: 1709645 - RNA, 19 nt, Homo sapiens
  misc_RNA (1)...(19): siRNA sense strand
cuucagcccauggacauua

SEQ ID NO: 1709646 - RNA, 19 nt, Homo sapiens
  misc_RNA (1)...(19): siRNA sense strand
acgccacgaugcagagaaa

SEQ ID NO: 1709647 - RNA, 19 nt, Homo sapiens
  misc_RNA (1)...(19): siRNA sense strand
gcaguacgugggucccuau

SEQ ID NO: 1709648 - RNA, 19 nt, Homo sapiens
  misc_RNA (1)...(19): siRNA sense strand
cuguuugccugucucauug

SEQ ID NO: 1709649 - RNA, 19 nt, Homo sapiens
  misc_RNA (1)...(19): siRNA sense strand
acaagcauccugacaacau

SEQ ID NO: 1709650 - RNA, 19 nt, Homo sapiens
  misc_RNA (1)...(19): siRNA sense strand
gagagggaaagaacuccuu

SEQ ID NO: 1709651 - RNA, 19 nt, Homo sapiens
  misc_RNA (1)...(19): siRNA sense strand
agagauaauggaaacauca

SEQ ID NO: 1709652 - RNA, 19 nt, Homo sapiens
  misc_RNA (1)...(19): siRNA sense strand
gacagcaucacuggcauga

SEQ ID NO: 1709653 - RNA, 19 nt, Homo sapiens
  misc_RNA (1)...(19): siRNA sense strand
ccuguuugccugucucauu

SEQ ID NO: 1709654 - RNA, 19 nt, Homo sapiens
  misc_RNA (1)...(19): siRNA sense strand
ucacaggagcuugcaacaa

SEQ ID NO: 1709655 - RNA, 19 nt, Homo sapiens
  misc_RNA (1)...(19): siRNA sense strand
ugcccgagcagcagagaua

SEQ ID NO: 1709656 - RNA, 19 nt, Homo sapiens
  misc_RNA (1)...(19): siRNA sense strand
acugccagaugacuuguga

SEQ ID NO: 1709657 - RNA, 19 nt, Homo sapiens
  misc_RNA (1)...(19): siRNA sense strand
auggaaacaucaauacaag

SEQ ID NO: 1709658 - RNA, 19 nt, Homo sapiens
  misc_RNA (1)...(19): siRNA sense strand
auacaucgaccacgacauc

SEQ ID NO: 1709659 - RNA, 19 nt, Homo sapiens
  misc_RNA (1)...(19): siRNA sense strand
acaugucauucaaguuuca

SEQ ID NO: 1709660 - RNA, 19 nt, Homo sapiens
  misc_RNA (1)...(19): siRNA sense strand
cggaugcuuuaucagaaga

SEQ ID NO: 1709661 - RNA, 19 nt, Homo sapiens
  misc_RNA (1)...(19): siRNA sense strand
gagguugucacagaugaug

SEQ ID NO: 1709662 - RNA, 19 nt, Homo sapiens
  misc_RNA (1)...(19): siRNA sense strand
gcaaauuccccgaagacuu

SEQ ID NO: 1709663 - RNA, 19 nt, Homo sapiens
  misc_RNA (1)...(19): siRNA sense strand
gaugacuugugagaaccaa

SEQ ID NO: 1709664 - RNA, 19 nt, Homo sapiens
  misc_RNA (1)...(19): siRNA sense strand
gagccaacaagcggaguga

SEQ ID NO: 1709665 - RNA, 19 nt, Homo sapiens
  misc_RNA (1)...(19): siRNA sense strand
ccaggaaggaugggauuuc

SEQ ID NO: 1709666 - RNA, 19 nt, Homo sapiens
  misc_RNA (1)...(19): siRNA sense strand
cagaugaugaccgcuauuc

SEQ ID NO: 1709667 - RNA, 19 nt, Homo sapiens
  misc_RNA (1)...(19): siRNA sense strand
ccugaggagucucgugucu

SEQ ID NO: 1709668 - RNA, 19 nt, Homo sapiens
  misc_RNA (1)...(19): siRNA sense strand
uguacaagcauccugacaa

SEQ ID NO: 1709669 - RNA, 19 nt, Homo sapiens
  misc_RNA (1)...(19): siRNA sense strand
caaaugagguugucacaga

SEQ ID NO: 1709670 - RNA, 19 nt, Homo sapiens
  misc_RNA (1)...(19): siRNA sense strand
gcagagaaaccucaagaaa

SEQ ID NO: 1709671 - RNA, 19 nt, Homo sapiens
  misc_RNA (1)...(19): siRNA sense strand
guacgugggucccuaugaa

SEQ ID NO: 1709672 - RNA, 19 nt, Homo sapiens
  misc_RNA (1)...(19): siRNA sense strand
gagcaucauugcaaacaug

SEQ ID NO: 1709673 - RNA, 19 nt, Homo sapiens
  misc_RNA (1)...(19): siRNA sense strand
caagacaugucauucaagu

SEQ ID NO: 1709674 - RNA, 19 nt, Homo sapiens
  misc_RNA (1)...(19): siRNA sense strand
ggagagugcugggauggaa

SEQ ID NO: 1709675 - RNA, 19 nt, Homo sapiens
  misc_RNA (1)...(19): siRNA sense strand
caacggaugcuuuaucaga

SEQ ID NO: 1709676 - RNA, 19 nt, Homo sapiens
  misc_RNA (1)...(19): siRNA sense strand
agacaugucauucaaguuu

SEQ ID NO: 1709677 - RNA, 19 nt, Homo sapiens
  misc_RNA (1)...(19): siRNA sense strand
acacuugccuggcgaacaa

SEQ ID NO: 1709678 - RNA, 19 nt, Homo sapiens
  misc_RNA (1)...(19): siRNA sense strand
guacaagcauccugacaac

SEQ ID NO: 1709679 - RNA, 19 nt, Homo sapiens
  misc_RNA (1)...(19): siRNA sense strand
ccacagagcaccagcaaag

SEQ ID NO: 1709680 - RNA, 19 nt, Homo sapiens
  misc_RNA (1)...(19): siRNA sense strand
ccagaugacuugugagaac

SEQ ID NO: 1709681 - RNA, 19 nt, Homo sapiens
  misc_RNA (1)...(19): siRNA sense strand
cagcagagauaauggaaac

SEQ ID NO: 1709682 - RNA, 19 nt, Homo sapiens
  misc_RNA (1)...(19): siRNA sense strand
ggcgugagcuggagaagca

SEQ ID NO: 1709683 - RNA, 19 nt, Homo sapiens
  misc_RNA (1)...(19): siRNA sense strand
cacaggagcuugcaacaac

SEQ ID NO: 1709684 - RNA, 19 nt, Homo sapiens
  misc_RNA (1)...(19): siRNA sense strand
ggagaacagccacgucuuc

SEQ ID NO: 1709685 - RNA, 19 nt, Homo sapiens
  misc_RNA (1)...(19): siRNA sense strand
gagcguggccgacaagauc

SEQ ID NO: 1709686 - RNA, 19 nt, Homo sapiens
  misc_RNA (1)...(19): siRNA sense strand
cagcaucacuggcaugaac

SEQ ID NO: 1709687 - RNA, 19 nt, Homo sapiens
  misc_RNA (1)...(19): siRNA sense strand
gcacggguaugagcuccaa

SEQ ID NO: 1709688 - RNA, 19 nt, Homo sapiens
  misc_RNA (1)...(19): siRNA sense strand
gguuauggccugcacagaa

SEQ ID NO: 1709689 - RNA, 19 nt, Homo sapiens
  misc_RNA (1)...(19): siRNA sense strand
caaauuccccgaagacuuu

SEQ ID NO: 1709690 - RNA, 19 nt, Homo sapiens
  misc_RNA (1)...(19): siRNA sense strand
gggaaagccugaggagucu

SEQ ID NO: 1709691 - RNA, 19 nt, Homo sapiens
  misc_RNA (1)...(19): siRNA sense strand
guuauggccugcacagaag

SEQ ID NO: 1709692 - RNA, 19 nt, Homo sapiens
  misc_RNA (1)...(19): siRNA sense strand
ccugaaaacucaacaauca

SEQ ID NO: 1709693 - RNA, 19 nt, Homo sapiens
  misc_RNA (1)...(19): siRNA sense strand
ccaacaagcggagugauug

SEQ ID NO: 1709694 - RNA, 19 nt, Homo sapiens
  misc_RNA (1)...(19): siRNA sense strand
ccagagagcguggagaaug

SEQ ID NO: 1709695 - RNA, 19 nt, Homo sapiens
  misc_RNA (1)...(19): siRNA sense strand
gaugaugaccgcuauucug

SEQ ID NO: 1709696 - RNA, 19 nt, Homo sapiens
  misc_RNA (1)...(19): siRNA sense strand
gacaugucauucaaguuuc

SEQ ID NO: 1709697 - RNA, 19 nt, Homo sapiens
  misc_RNA (1)...(19): siRNA sense strand
caagcauccugacaacauc

SEQ ID NO: 1709698 - RNA, 19 nt, Homo sapiens
  misc_RNA (1)...(19): siRNA sense strand
ugaggagucucgugucucu

SEQ ID NO: 1709699 - RNA, 19 nt, Homo sapiens
  misc_RNA (1)...(19): siRNA sense strand
cagagagcguggagaaugg

SEQ ID NO: 1709700 - RNA, 19 nt, Homo sapiens
  misc_RNA (1)...(19): siRNA sense strand
ccgacaagauccuggacuu

SEQ ID NO: 1709701 - RNA, 19 nt, Homo sapiens
  misc_RNA (1)...(19): siRNA sense strand
agagaaaccucaagaaaag

SEQ ID NO: 1709702 - RNA, 19 nt, Homo sapiens
  misc_RNA (1)...(19): siRNA sense strand
gggacuuugugcacuguga

SEQ ID NO: 1709703 - RNA, 19 nt, Homo sapiens
  misc_RNA (1)...(19): siRNA sense strand
uccaacggaugcuuuauca

SEQ ID NO: 1709704 - RNA, 19 nt, Homo sapiens
  misc_RNA (1)...(19): siRNA sense strand
gagauaauggaaacaucaa

SEQ ID NO: 1709705 - RNA, 19 nt, Homo sapiens
  misc_RNA (1)...(19): siRNA sense strand
gccaacaagcggagugauu

SEQ ID NO: 1709706 - RNA, 19 nt, Homo sapiens
  misc_RNA (1)...(19): siRNA sense strand
ugucucgggucaucuguga

SEQ ID NO: 1709707 - RNA, 19 nt, Homo sapiens
  misc_RNA (1)...(19): siRNA sense strand
gagaacagccacgucuuca

SEQ ID NO: 1709708 - RNA, 19 nt, Homo sapiens
  misc_RNA (1)...(19): siRNA sense strand
gagcagcagagauaaugga

SEQ ID NO: 1709709 - RNA, 19 nt, Homo sapiens
  misc_RNA (1)...(19): siRNA sense strand
gcagagauaauggaaacau

SEQ ID NO: 1709710 - RNA, 19 nt, Homo sapiens
  misc_RNA (1)...(19): siRNA sense strand
gagcuugcaacaacagaga

SEQ ID NO: 1709711 - RNA, 19 nt, Homo sapiens
  misc_RNA (1)...(19): siRNA sense strand
caaaaugcccaaacacuug

SEQ ID NO: 1709712 - RNA, 19 nt, Homo sapiens
  misc_RNA (1)...(19): siRNA sense strand
aaagaaaagucaaccugaa

SEQ ID NO: 1709713 - RNA, 19 nt, Homo sapiens
  misc_RNA (1)...(19): siRNA sense strand
cagagauaauggaaacauc

SEQ ID NO: 1709714 - RNA, 19 nt, Homo sapiens
  misc_RNA (1)...(19): siRNA sense strand
aaguguggcuucccagaga

SEQ ID NO: 1709715 - RNA, 19 nt, Homo sapiens
  misc_RNA (1)...(19): siRNA sense strand
gcugggaggcuuagcugaa

SEQ ID NO: 1709716 - RNA, 19 nt, Homo sapiens
  misc_RNA (1)...(19): siRNA sense strand
uacaagcgaugaaaagaaa

SEQ ID NO: 1709717 - RNA, 19 nt, Homo sapiens
  misc_RNA (1)...(19): siRNA sense strand
cagagaaaccucaagaaaa

SEQ ID NO: 1709718 - RNA, 19 nt, Homo sapiens
  misc_RNA (1)...(19): siRNA sense strand
ccgaggccuuccagcagua

SEQ ID NO: 1709719 - RNA, 19 nt, Homo sapiens
  misc_RNA (1)...(19): siRNA sense strand
caaacuuccugagccaaca

SEQ ID NO: 1709720 - RNA, 19 nt, Homo sapiens
  misc_RNA (1)...(19): siRNA sense strand
aacggaugcuuuaucagaa

SEQ ID NO: 1709721 - RNA, 19 nt, Homo sapiens
  misc_RNA (1)...(19): siRNA sense strand
ggcgcgugcugguguauuc

SEQ ID NO: 1709722 - RNA, 19 nt, Homo sapiens
  misc_RNA (1)...(19): siRNA sense strand
cuggaggccuggagggaaa

SEQ ID NO: 1709723 - RNA, 19 nt, Homo sapiens
  misc_RNA (1)...(19): siRNA sense strand
cacagaugaugaccgcuau

SEQ ID NO: 1709724 - RNA, 19 nt, Homo sapiens
  misc_RNA (1)...(19): siRNA sense strand
gcagcagagauaauggaaa

SEQ ID NO: 1709725 - RNA, 19 nt, Homo sapiens
  misc_RNA (1)...(19): siRNA sense strand
cugggaggcuuagcugaaa

SEQ ID NO: 1709726 - RNA, 19 nt, Homo sapiens
  misc_RNA (1)...(19): siRNA sense strand
aaaugagguugucacagau

SEQ ID NO: 1709727 - RNA, 19 nt, Homo sapiens
  misc_RNA (1)...(19): siRNA sense strand
caaauacaggcccaucaca

SEQ ID NO: 1709728 - RNA, 19 nt, Homo sapiens
  misc_RNA (1)...(19): siRNA sense strand
caacaaucacagcauccaa

SEQ ID NO: 1709729 - RNA, 19 nt, Homo sapiens
  misc_RNA (1)...(19): siRNA sense strand
aggcuuagcugaaaacuuc

SEQ ID NO: 1709730 - RNA, 19 nt, Homo sapiens
  misc_RNA (1)...(19): siRNA sense strand
cuucagcccauggacauua

SEQ ID NO: 1709731 - RNA, 19 nt, Homo sapiens
  misc_RNA (1)...(19): siRNA sense strand
acgccacgaugcagagaaa

SEQ ID NO: 1709732 - RNA, 19 nt, Homo sapiens
  misc_RNA (1)...(19): siRNA sense strand
gcaguacgugggucccuau

SEQ ID NO: 1709733 - RNA, 19 nt, Homo sapiens
  misc_RNA (1)...(19): siRNA sense strand
cuguuugccugucucauug

SEQ ID NO: 1709734 - RNA, 19 nt, Homo sapiens
  misc_RNA (1)...(19): siRNA sense strand
acaagcauccugacaacau

SEQ ID NO: 1709735 - RNA, 19 nt, Homo sapiens
  misc_RNA (1)...(19): siRNA sense strand
gagagggaaagaacuccuu

SEQ ID NO: 1709736 - RNA, 19 nt, Homo sapiens
  misc_RNA (1)...(19): siRNA sense strand
agagauaauggaaacauca

SEQ ID NO: 1709737 - RNA, 19 nt, Homo sapiens
  misc_RNA (1)...(19): siRNA sense strand
gacagcaucacuggcauga

SEQ ID NO: 1709738 - RNA, 19 nt, Homo sapiens
  misc_RNA (1)...(19): siRNA sense strand
ccuguuugccugucucauu

SEQ ID NO: 1709739 - RNA, 19 nt, Homo sapiens
  misc_RNA (1)...(19): siRNA sense strand
ucacaggagcuugcaacaa

SEQ ID NO: 1709740 - RNA, 19 nt, Homo sapiens
  misc_RNA (1)...(19): siRNA sense strand
ugcccgagcagcagagaua

SEQ ID NO: 1709741 - RNA, 19 nt, Homo sapiens
  misc_RNA (1)...(19): siRNA sense strand
acugccagaugacuuguga

SEQ ID NO: 1709742 - RNA, 19 nt, Homo sapiens
  misc_RNA (1)...(19): siRNA sense strand
auggaaacaucaauacaag

SEQ ID NO: 1709743 - RNA, 19 nt, Homo sapiens
  misc_RNA (1)...(19): siRNA sense strand
auacaucgaccacgacauc

SEQ ID NO: 1709744 - RNA, 19 nt, Homo sapiens
  misc_RNA (1)...(19): siRNA sense strand
acaugucauucaaguuuca

SEQ ID NO: 1709745 - RNA, 19 nt, Homo sapiens
  misc_RNA (1)...(19): siRNA sense strand
cggaugcuuuaucagaaga

SEQ ID NO: 1709746 - RNA, 19 nt, Homo sapiens
  misc_RNA (1)...(19): siRNA sense strand
gagguugucacagaugaug

SEQ ID NO: 1709747 - RNA, 19 nt, Homo sapiens
  misc_RNA (1)...(19): siRNA sense strand
gcaaauuccccgaagacuu

SEQ ID NO: 1709748 - RNA, 19 nt, Homo sapiens
  misc_RNA (1)...(19): siRNA sense strand
gaugacuugugagaaccaa

SEQ ID NO: 1709749 - RNA, 19 nt, Homo sapiens
  misc_RNA (1)...(19): siRNA sense strand
gagccaacaagcggaguga

SEQ ID NO: 1709750 - RNA, 19 nt, Homo sapiens
  misc_RNA (1)...(19): siRNA sense strand
ccaggaaggaugggauuuc

SEQ ID NO: 1709751 - RNA, 19 nt, Homo sapiens
  misc_RNA (1)...(19): siRNA sense strand
cagaugaugaccgcuauuc

SEQ ID NO: 1709752 - RNA, 19 nt, Homo sapiens
  misc_RNA (1)...(19): siRNA sense strand
ccugaggagucucgugucu

SEQ ID NO: 1709753 - RNA, 19 nt, Homo sapiens
  misc_RNA (1)...(19): siRNA sense strand
uguacaagcauccugacaa

SEQ ID NO: 1709754 - RNA, 19 nt, Homo sapiens
  misc_RNA (1)...(19): siRNA sense strand
caaaugagguugucacaga

SEQ ID NO: 1709755 - RNA, 19 nt, Homo sapiens
  misc_RNA (1)...(19): siRNA sense strand
gcagagaaaccucaagaaa

SEQ ID NO: 1709756 - RNA, 19 nt, Homo sapiens
  misc_RNA (1)...(19): siRNA sense strand
guacgugggucccuaugaa

SEQ ID NO: 1709757 - RNA, 19 nt, Homo sapiens
  misc_RNA (1)...(19): siRNA sense strand
gagcaucauugcaaacaug

SEQ ID NO: 1709758 - RNA, 19 nt, Homo sapiens
  misc_RNA (1)...(19): siRNA sense strand
caagacaugucauucaagu

SEQ ID NO: 1709759 - RNA, 19 nt, Homo sapiens
  misc_RNA (1)...(19): siRNA sense strand
ggagagugcugggauggaa

SEQ ID NO: 1709760 - RNA, 19 nt, Homo sapiens
  misc_RNA (1)...(19): siRNA sense strand
caacggaugcuuuaucaga

SEQ ID NO: 1709761 - RNA, 19 nt, Homo sapiens
  misc_RNA (1)...(19): siRNA sense strand
agacaugucauucaaguuu

SEQ ID NO: 1709762 - RNA, 19 nt, Homo sapiens
  misc_RNA (1)...(19): siRNA sense strand
acacuugccuggcgaacaa

SEQ ID NO: 1709763 - RNA, 19 nt, Homo sapiens
  misc_RNA (1)...(19): siRNA sense strand
guacaagcauccugacaac

SEQ ID NO: 1709764 - RNA, 19 nt, Homo sapiens
  misc_RNA (1)...(19): siRNA sense strand
ccacagagcaccagcaaag

SEQ ID NO: 1709765 - RNA, 19 nt, Homo sapiens
  misc_RNA (1)...(19): siRNA sense strand
ccagaugacuugugagaac

SEQ ID NO: 1709766 - RNA, 19 nt, Homo sapiens
  misc_RNA (1)...(19): siRNA sense strand
cagcagagauaauggaaac

SEQ ID NO: 1709767 - RNA, 19 nt, Homo sapiens
  misc_RNA (1)...(19): siRNA sense strand
ggcgugagcuggagaagca

SEQ ID NO: 1709768 - RNA, 19 nt, Homo sapiens
  misc_RNA (1)...(19): siRNA sense strand
cacaggagcuugcaacaac

SEQ ID NO: 1709769 - RNA, 19 nt, Homo sapiens
  misc_RNA (1)...(19): siRNA sense strand
ggagaacagccacgucuuc

SEQ ID NO: 1709770 - RNA, 19 nt, Homo sapiens
  misc_RNA (1)...(19): siRNA sense strand
gagcguggccgacaagauc

SEQ ID NO: 1709771 - RNA, 19 nt, Homo sapiens
  misc_RNA (1)...(19): siRNA sense strand
cagcaucacuggcaugaac

SEQ ID NO: 1709772 - RNA, 19 nt, Homo sapiens
  misc_RNA (1)...(19): siRNA sense strand
gcacggguaugagcuccaa

SEQ ID NO: 1709773 - RNA, 19 nt, Homo sapiens
  misc_RNA (1)...(19): siRNA sense strand
gguuauggccugcacagaa

SEQ ID NO: 1709774 - RNA, 19 nt, Homo sapiens
  misc_RNA (1)...(19): siRNA sense strand
caaauuccccgaagacuuu

SEQ ID NO: 1709775 - RNA, 19 nt, Homo sapiens
  misc_RNA (1)...(19): siRNA sense strand
gggaaagccugaggagucu

SEQ ID NO: 1709776 - RNA, 19 nt, Homo sapiens
  misc_RNA (1)...(19): siRNA sense strand
guuauggccugcacagaag

SEQ ID NO: 1709777 - RNA, 19 nt, Homo sapiens
  misc_RNA (1)...(19): siRNA sense strand
ccugaaaacucaacaauca

SEQ ID NO: 1709778 - RNA, 19 nt, Homo sapiens
  misc_RNA (1)...(19): siRNA sense strand
ccaacaagcggagugauug

SEQ ID NO: 1709779 - RNA, 19 nt, Homo sapiens
  misc_RNA (1)...(19): siRNA sense strand
ggacacugcagaacagcuu

SEQ ID NO: 1709780 - RNA, 19 nt, Homo sapiens
  misc_RNA (1)...(19): siRNA sense strand
ccagagagcguggagaaug

SEQ ID NO: 1709781 - RNA, 19 nt, Homo sapiens
  misc_RNA (1)...(19): siRNA sense strand
gaugaugaccgcuauucug

SEQ ID NO: 1709782 - RNA, 19 nt, Homo sapiens
  misc_RNA (1)...(19): siRNA sense strand
gacaugucauucaaguuuc

SEQ ID NO: 1709783 - RNA, 19 nt, Homo sapiens
  misc_RNA (1)...(19): siRNA sense strand
caagcauccugacaacauc

SEQ ID NO: 1709784 - RNA, 19 nt, Homo sapiens
  misc_RNA (1)...(19): siRNA sense strand
ccgacaagauccuggacuu

SEQ ID NO: 1709785 - RNA, 19 nt, Homo sapiens
  misc_RNA (1)...(19): siRNA sense strand
cagagagcguggagaaugg

SEQ ID NO: 1709786 - RNA, 19 nt, Homo sapiens
  misc_RNA (1)...(19): siRNA sense strand
ugaggagucucgugucucu

SEQ ID NO: 1709787 - RNA, 19 nt, Homo sapiens
  misc_RNA (1)...(19): siRNA sense strand
agagaaaccucaagaaaag

SEQ ID NO: 1709788 - RNA, 19 nt, Homo sapiens
  misc_RNA (1)...(19): siRNA sense strand
gggacuuugugcacuguga

SEQ ID NO: 1709789 - RNA, 19 nt, Homo sapiens
  misc_RNA (1)...(19): siRNA sense strand
uccaacggaugcuuuauca

SEQ ID NO: 1709790 - RNA, 19 nt, Homo sapiens
  misc_RNA (1)...(19): siRNA sense strand
gagauaauggaaacaucaa

SEQ ID NO: 1709791 - RNA, 19 nt, Homo sapiens
  misc_RNA (1)...(19): siRNA sense strand
gccaacaagcggagugauu

SEQ ID NO: 1709792 - RNA, 19 nt, Homo sapiens
  misc_RNA (1)...(19): siRNA sense strand
ugucucgggucaucuguga

SEQ ID NO: 1709793 - RNA, 19 nt, Homo sapiens
  misc_RNA (1)...(19): siRNA sense strand
gagaacagccacgucuuca

SEQ ID NO: 1709794 - RNA, 19 nt, Homo sapiens
  misc_RNA (1)...(19): siRNA sense strand
gagcagcagagauaaugga

SEQ ID NO: 1709795 - RNA, 19 nt, Homo sapiens
  misc_RNA (1)...(19): siRNA sense strand
gcagagauaauggaaacau

SEQ ID NO: 1709796 - RNA, 19 nt, Homo sapiens
  misc_RNA (1)...(19): siRNA sense strand
gagcuugcaacaacagaga

SEQ ID NO: 1709797 - RNA, 19 nt, Homo sapiens
  misc_RNA (1)...(19): siRNA sense strand
caaaaugcccaaacacuug

SEQ ID NO: 1709798 - RNA, 19 nt, Homo sapiens
  misc_RNA (1)...(19): siRNA sense strand
aaagaaaagucaaccugaa

SEQ ID NO: 1709799 - RNA, 19 nt, Homo sapiens
  misc_RNA (1)...(19): siRNA sense strand
cagagauaauggaaacauc

SEQ ID NO: 1709800 - RNA, 19 nt, Homo sapiens
  misc_RNA (1)...(19): siRNA sense strand
aaguguggcuucccagaga

SEQ ID NO: 1709801 - RNA, 19 nt, Homo sapiens
  misc_RNA (1)...(19): siRNA sense strand
gcugggaggcuuagcugaa

SEQ ID NO: 1709802 - RNA, 19 nt, Homo sapiens
  misc_RNA (1)...(19): siRNA sense strand
uacaagcgaugaaaagaaa

SEQ ID NO: 1709803 - RNA, 19 nt, Homo sapiens
  misc_RNA (1)...(19): siRNA sense strand
cagagaaaccucaagaaaa

SEQ ID NO: 1709804 - RNA, 19 nt, Homo sapiens
  misc_RNA (1)...(19): siRNA sense strand
ccgaggccuuccagcagua

SEQ ID NO: 1709805 - RNA, 19 nt, Homo sapiens
  misc_RNA (1)...(19): siRNA sense strand
caaacuuccugagccaaca

SEQ ID NO: 1709806 - RNA, 19 nt, Homo sapiens
  misc_RNA (1)...(19): siRNA sense strand
aacggaugcuuuaucagaa

SEQ ID NO: 1709807 - RNA, 19 nt, Homo sapiens
  misc_RNA (1)...(19): siRNA sense strand
ggcgcgugcugguguauuc

SEQ ID NO: 1709808 - RNA, 19 nt, Homo sapiens
  misc_RNA (1)...(19): siRNA sense strand
cuggaggccuggagggaaa

SEQ ID NO: 1709809 - RNA, 19 nt, Homo sapiens
  misc_RNA (1)...(19): siRNA sense strand
cacagaugaugaccgcuau

SEQ ID NO: 1709810 - RNA, 19 nt, Homo sapiens
  misc_RNA (1)...(19): siRNA sense strand
gcagcagagauaauggaaa

SEQ ID NO: 1709811 - RNA, 19 nt, Homo sapiens
  misc_RNA (1)...(19): siRNA sense strand
cugggaggcuuagcugaaa

SEQ ID NO: 1709812 - RNA, 19 nt, Homo sapiens
  misc_RNA (1)...(19): siRNA sense strand
aaaugagguugucacagau

SEQ ID NO: 1709813 - RNA, 19 nt, Homo sapiens
  misc_RNA (1)...(19): siRNA sense strand
caaauacaggcccaucaca

SEQ ID NO: 1709814 - RNA, 19 nt, Homo sapiens
  misc_RNA (1)...(19): siRNA sense strand
caacaaucacagcauccaa

SEQ ID NO: 1709815 - RNA, 19 nt, Homo sapiens
  misc_RNA (1)...(19): siRNA sense strand
aggcuuagcugaaaacuuc

SEQ ID NO: 1709816 - RNA, 19 nt, Homo sapiens
  misc_RNA (1)...(19): siRNA sense strand
cuucagcccauggacauua

SEQ ID NO: 1709817 - RNA, 19 nt, Homo sapiens
  misc_RNA (1)...(19): siRNA sense strand
acgccacgaugcagagaaa

SEQ ID NO: 1709818 - RNA, 19 nt, Homo sapiens
  misc_RNA (1)...(19): siRNA sense strand
gcaguacgugggucccuau

SEQ ID NO: 1709819 - RNA, 19 nt, Homo sapiens
  misc_RNA (1)...(19): siRNA sense strand
guacgacucuuuuccaaac

SEQ ID NO: 1709820 - RNA, 19 nt, Homo sapiens
  misc_RNA (1)...(19): siRNA sense strand
cuguuugccugucucauug

SEQ ID NO: 1709821 - RNA, 19 nt, Homo sapiens
  misc_RNA (1)...(19): siRNA sense strand
acaagcauccugacaacau

SEQ ID NO: 1709822 - RNA, 19 nt, Homo sapiens
  misc_RNA (1)...(19): siRNA sense strand
gagagggaaagaacuccuu

SEQ ID NO: 1709823 - RNA, 19 nt, Homo sapiens
  misc_RNA (1)...(19): siRNA sense strand
agagauaauggaaacauca

SEQ ID NO: 1709824 - RNA, 19 nt, Homo sapiens
  misc_RNA (1)...(19): siRNA sense strand
cugcagaacagcuucaugu

SEQ ID NO: 1709825 - RNA, 19 nt, Homo sapiens
  misc_RNA (1)...(19): siRNA sense strand
gacagcaucacuggcauga

SEQ ID NO: 1709826 - RNA, 19 nt, Homo sapiens
  misc_RNA (1)...(19): siRNA sense strand
ccuguuugccugucucauu

SEQ ID NO: 1709827 - RNA, 19 nt, Homo sapiens
  misc_RNA (1)...(19): siRNA sense strand
ucacaggagcuugcaacaa

SEQ ID NO: 1709828 - RNA, 19 nt, Homo sapiens
  misc_RNA (1)...(19): siRNA sense strand
ugcccgagcagcagagaua

SEQ ID NO: 1709829 - RNA, 19 nt, Homo sapiens
  misc_RNA (1)...(19): siRNA sense strand
acugccagaugacuuguga

SEQ ID NO: 1709830 - RNA, 19 nt, Homo sapiens
  misc_RNA (1)...(19): siRNA sense strand
auggaaacaucaauacaag

SEQ ID NO: 1709831 - RNA, 19 nt, Homo sapiens
  misc_RNA (1)...(19): siRNA sense strand
auacaucgaccacgacauc

SEQ ID NO: 1709832 - RNA, 19 nt, Homo sapiens
  misc_RNA (1)...(19): siRNA sense strand
acaugucauucaaguuuca

SEQ ID NO: 1709833 - RNA, 19 nt, Homo sapiens
  misc_RNA (1)...(19): siRNA sense strand
cggaugcuuuaucagaaga

SEQ ID NO: 1709834 - RNA, 19 nt, Homo sapiens
  misc_RNA (1)...(19): siRNA sense strand
gagguugucacagaugaug

SEQ ID NO: 1709835 - RNA, 19 nt, Homo sapiens
  misc_RNA (1)...(19): siRNA sense strand
gcaaauuccccgaagacuu

SEQ ID NO: 1709836 - RNA, 19 nt, Homo sapiens
  misc_RNA (1)...(19): siRNA sense strand
gaugacuugugagaaccaa

SEQ ID NO: 1709837 - RNA, 19 nt, Homo sapiens
  misc_RNA (1)...(19): siRNA sense strand
gagccaacaagcggaguga

SEQ ID NO: 1709838 - RNA, 19 nt, Homo sapiens
  misc_RNA (1)...(19): siRNA sense strand
ccaggaaggaugggauuuc

SEQ ID NO: 1709839 - RNA, 19 nt, Homo sapiens
  misc_RNA (1)...(19): siRNA sense strand
cagaugaugaccgcuauuc

SEQ ID NO: 1709840 - RNA, 19 nt, Homo sapiens
  misc_RNA (1)...(19): siRNA sense strand
ccugaggagucucgugucu

SEQ ID NO: 1709841 - RNA, 19 nt, Homo sapiens
  misc_RNA (1)...(19): siRNA sense strand
uguacaagcauccugacaa

SEQ ID NO: 1709842 - RNA, 19 nt, Homo sapiens
  misc_RNA (1)...(19): siRNA sense strand
caaaugagguugucacaga

SEQ ID NO: 1709843 - RNA, 19 nt, Homo sapiens
  misc_RNA (1)...(19): siRNA sense strand
gcagagaaaccucaagaaa

SEQ ID NO: 1709844 - RNA, 19 nt, Homo sapiens
  misc_RNA (1)...(19): siRNA sense strand
guacgugggucccuaugaa

SEQ ID NO: 1709845 - RNA, 19 nt, Homo sapiens
  misc_RNA (1)...(19): siRNA sense strand
gagcaucauugcaaacaug

SEQ ID NO: 1709846 - RNA, 19 nt, Homo sapiens
  misc_RNA (1)...(19): siRNA sense strand
caagacaugucauucaagu

SEQ ID NO: 1709847 - RNA, 19 nt, Homo sapiens
  misc_RNA (1)...(19): siRNA sense strand
ggagagugcugggauggaa

SEQ ID NO: 1709848 - RNA, 19 nt, Homo sapiens
  misc_RNA (1)...(19): siRNA sense strand
caacggaugcuuuaucaga

SEQ ID NO: 1709849 - RNA, 19 nt, Homo sapiens
  misc_RNA (1)...(19): siRNA sense strand
agacaugucauucaaguuu

SEQ ID NO: 1709850 - RNA, 19 nt, Homo sapiens
  misc_RNA (1)...(19): siRNA sense strand
acacuugccuggcgaacaa

SEQ ID NO: 1709851 - RNA, 19 nt, Homo sapiens
  misc_RNA (1)...(19): siRNA sense strand
guacaagcauccugacaac

SEQ ID NO: 1709852 - RNA, 19 nt, Homo sapiens
  misc_RNA (1)...(19): siRNA sense strand
ccacagagcaccagcaaag

SEQ ID NO: 1709853 - RNA, 19 nt, Homo sapiens
  misc_RNA (1)...(19): siRNA sense strand
ccagaugacuugugagaac

SEQ ID NO: 1709854 - RNA, 19 nt, Homo sapiens
  misc_RNA (1)...(19): siRNA sense strand
cagcagagauaauggaaac

SEQ ID NO: 1709855 - RNA, 19 nt, Homo sapiens
  misc_RNA (1)...(19): siRNA sense strand
ggcgugagcuggagaagca

SEQ ID NO: 1709856 - RNA, 19 nt, Homo sapiens
  misc_RNA (1)...(19): siRNA sense strand
cacaggagcuugcaacaac

SEQ ID NO: 1709857 - RNA, 19 nt, Homo sapiens
  misc_RNA (1)...(19): siRNA sense strand
ggagaacagccacgucuuc

SEQ ID NO: 1709858 - RNA, 19 nt, Homo sapiens
  misc_RNA (1)...(19): siRNA sense strand
gagcguggccgacaagauc

SEQ ID NO: 1709859 - RNA, 19 nt, Homo sapiens
  misc_RNA (1)...(19): siRNA sense strand
cagcaucacuggcaugaac

SEQ ID NO: 1709860 - RNA, 19 nt, Homo sapiens
  misc_RNA (1)...(19): siRNA sense strand
gcacggguaugagcuccaa

SEQ ID NO: 1709861 - RNA, 19 nt, Homo sapiens
  misc_RNA (1)...(19): siRNA sense strand
gguuauggccugcacagaa

SEQ ID NO: 1709862 - RNA, 19 nt, Homo sapiens
  misc_RNA (1)...(19): siRNA sense strand
caaauuccccgaagacuuu

SEQ ID NO: 1709863 - RNA, 19 nt, Homo sapiens
  misc_RNA (1)...(19): siRNA sense strand
gggaaagccugaggagucu

SEQ ID NO: 1709864 - RNA, 19 nt, Homo sapiens
  misc_RNA (1)...(19): siRNA sense strand
guuauggccugcacagaag

SEQ ID NO: 1709865 - RNA, 19 nt, Homo sapiens
  misc_RNA (1)...(19): siRNA sense strand
ccugaaaacucaacaauca

SEQ ID NO: 1709866 - RNA, 19 nt, Homo sapiens
  misc_RNA (1)...(19): siRNA sense strand
ccaacaagcggagugauug

SEQ ID NO: 1709867 - RNA, 19 nt, Homo sapiens
  misc_RNA (1)...(19): siRNA sense strand
ccagagagcguggagaaug

SEQ ID NO: 1709868 - RNA, 19 nt, Homo sapiens
  misc_RNA (1)...(19): siRNA sense strand
gaugaugaccgcuauucug

SEQ ID NO: 1709869 - RNA, 19 nt, Homo sapiens
  misc_RNA (1)...(19): siRNA sense strand
gacaugucauucaaguuuc

SEQ ID NO: 1709870 - RNA, 19 nt, Homo sapiens
  misc_RNA (1)...(19): siRNA sense strand
caagcauccugacaacauc

SEQ ID NO: 1709871 - RNA, 19 nt, Homo sapiens
  misc_RNA (1)...(19): siRNA sense strand
ugaggagucucgugucucu

SEQ ID NO: 1709872 - RNA, 19 nt, Homo sapiens
  misc_RNA (1)...(19): siRNA sense strand
cagagagcguggagaaugg

SEQ ID NO: 1709873 - RNA, 19 nt, Homo sapiens
  misc_RNA (1)...(19): siRNA sense strand
ccgacaagauccuggacuu

SEQ ID NO: 1709874 - RNA, 19 nt, Homo sapiens
  misc_RNA (1)...(19): siRNA sense strand
agagaaaccucaagaaaag

SEQ ID NO: 1709875 - RNA, 19 nt, Homo sapiens
  misc_RNA (1)...(19): siRNA sense strand
gggacuuugugcacuguga

SEQ ID NO: 1709876 - RNA, 19 nt, Homo sapiens
  misc_RNA (1)...(19): siRNA sense strand
uccaacggaugcuuuauca

SEQ ID NO: 1709877 - RNA, 19 nt, Homo sapiens
  misc_RNA (1)...(19): siRNA sense strand
gagauaauggaaacaucaa

SEQ ID NO: 1709878 - RNA, 19 nt, Homo sapiens
  misc_RNA (1)...(19): siRNA sense strand
gccaacaagcggagugauu

SEQ ID NO: 1709879 - RNA, 19 nt, Homo sapiens
  misc_RNA (1)...(19): siRNA sense strand
ugucucgggucaucuguga

SEQ ID NO: 1709880 - RNA, 19 nt, Homo sapiens
  misc_RNA (1)...(19): siRNA sense strand
gagaacagccacgucuuca

SEQ ID NO: 1709881 - RNA, 19 nt, Homo sapiens
  misc_RNA (1)...(19): siRNA sense strand
gagcagcagagauaaugga

SEQ ID NO: 1709882 - RNA, 19 nt, Homo sapiens
  misc_RNA (1)...(19): siRNA sense strand
gcagagauaauggaaacau

SEQ ID NO: 1709883 - RNA, 19 nt, Homo sapiens
  misc_RNA (1)...(19): siRNA sense strand
gagcuugcaacaacagaga

SEQ ID NO: 1709884 - RNA, 19 nt, Homo sapiens
  misc_RNA (1)...(19): siRNA sense strand
caaaaugcccaaacacuug

SEQ ID NO: 1709885 - RNA, 19 nt, Homo sapiens
  misc_RNA (1)...(19): siRNA sense strand
aaagaaaagucaaccugaa

SEQ ID NO: 1709886 - RNA, 19 nt, Homo sapiens
  misc_RNA (1)...(19): siRNA sense strand
cagagauaauggaaacauc

SEQ ID NO: 1709887 - RNA, 19 nt, Homo sapiens
  misc_RNA (1)...(19): siRNA sense strand
aaguguggcuucccagaga

SEQ ID NO: 1709888 - RNA, 19 nt, Homo sapiens
  misc_RNA (1)...(19): siRNA sense strand
gcugggaggcuuagcugaa

SEQ ID NO: 1709889 - RNA, 19 nt, Homo sapiens
  misc_RNA (1)...(19): siRNA sense strand
uacaagcgaugaaaagaaa

SEQ ID NO: 1709890 - RNA, 19 nt, Homo sapiens
  misc_RNA (1)...(19): siRNA sense strand
cagagaaaccucaagaaaa

SEQ ID NO: 1709891 - RNA, 19 nt, Homo sapiens
  misc_RNA (1)...(19): siRNA sense strand
ccgaggccuuccagcagua

SEQ ID NO: 1709892 - RNA, 19 nt, Homo sapiens
  misc_RNA (1)...(19): siRNA sense strand
caaacuuccugagccaaca

SEQ ID NO: 1709893 - RNA, 19 nt, Homo sapiens
  misc_RNA (1)...(19): siRNA sense strand
aacggaugcuuuaucagaa

SEQ ID NO: 1709894 - RNA, 19 nt, Homo sapiens
  misc_RNA (1)...(19): siRNA sense strand
ggcgcgugcugguguauuc

SEQ ID NO: 1709895 - RNA, 19 nt, Homo sapiens
  misc_RNA (1)...(19): siRNA sense strand
cuggaggccuggagggaaa

SEQ ID NO: 1709896 - RNA, 19 nt, Homo sapiens
  misc_RNA (1)...(19): siRNA sense strand
cacagaugaugaccgcuau

SEQ ID NO: 1709897 - RNA, 19 nt, Homo sapiens
  misc_RNA (1)...(19): siRNA sense strand
gcagcagagauaauggaaa

SEQ ID NO: 1709898 - RNA, 19 nt, Homo sapiens
  misc_RNA (1)...(19): siRNA sense strand
cugggaggcuuagcugaaa

SEQ ID NO: 1709899 - RNA, 19 nt, Homo sapiens
  misc_RNA (1)...(19): siRNA sense strand
aaaugagguugucacagau

SEQ ID NO: 1709900 - RNA, 19 nt, Homo sapiens
  misc_RNA (1)...(19): siRNA sense strand
caaauacaggcccaucaca

SEQ ID NO: 1709901 - RNA, 19 nt, Homo sapiens
  misc_RNA (1)...(19): siRNA sense strand
caacaaucacagcauccaa

SEQ ID NO: 1709902 - RNA, 19 nt, Homo sapiens
  misc_RNA (1)...(19): siRNA sense strand
aggcuuagcugaaaacuuc

SEQ ID NO: 1709903 - RNA, 19 nt, Homo sapiens
  misc_RNA (1)...(19): siRNA sense strand
cuucagcccauggacauua

SEQ ID NO: 1709904 - RNA, 19 nt, Homo sapiens
  misc_RNA (1)...(19): siRNA sense strand
acgccacgaugcagagaaa

SEQ ID NO: 1709905 - RNA, 19 nt, Homo sapiens
  misc_RNA (1)...(19): siRNA sense strand
gcaguacgugggucccuau

SEQ ID NO: 1709906 - RNA, 19 nt, Homo sapiens
  misc_RNA (1)...(19): siRNA sense strand
cuguuugccugucucauug

SEQ ID NO: 1709907 - RNA, 19 nt, Homo sapiens
  misc_RNA (1)...(19): siRNA sense strand
acaagcauccugacaacau

SEQ ID NO: 1709908 - RNA, 19 nt, Homo sapiens
  misc_RNA (1)...(19): siRNA sense strand
gagagggaaagaacuccuu

SEQ ID NO: 1709909 - RNA, 19 nt, Homo sapiens
  misc_RNA (1)...(19): siRNA sense strand
agagauaauggaaacauca

SEQ ID NO: 1709910 - RNA, 19 nt, Homo sapiens
  misc_RNA (1)...(19): siRNA sense strand
gacagcaucacuggcauga

SEQ ID NO: 1709911 - RNA, 19 nt, Homo sapiens
  misc_RNA (1)...(19): siRNA sense strand
ccuguuugccugucucauu

SEQ ID NO: 1709912 - RNA, 19 nt, Homo sapiens
  misc_RNA (1)...(19): siRNA sense strand
ucacaggagcuugcaacaa

SEQ ID NO: 1709913 - RNA, 19 nt, Homo sapiens
  misc_RNA (1)...(19): siRNA sense strand
ugcccgagcagcagagaua

SEQ ID NO: 1709914 - RNA, 19 nt, Homo sapiens
  misc_RNA (1)...(19): siRNA sense strand
acugccagaugacuuguga

SEQ ID NO: 1709915 - RNA, 19 nt, Homo sapiens
  misc_RNA (1)...(19): siRNA sense strand
auggaaacaucaauacaag

SEQ ID NO: 1709916 - RNA, 19 nt, Homo sapiens
  misc_RNA (1)...(19): siRNA sense strand
auacaucgaccacgacauc

SEQ ID NO: 1709917 - RNA, 19 nt, Homo sapiens
  misc_RNA (1)...(19): siRNA sense strand
acaugucauucaaguuuca

SEQ ID NO: 1709918 - RNA, 19 nt, Homo sapiens
  misc_RNA (1)...(19): siRNA sense strand
cggaugcuuuaucagaaga

SEQ ID NO: 1709919 - RNA, 19 nt, Homo sapiens
  misc_RNA (1)...(19): siRNA sense strand
gagguugucacagaugaug

SEQ ID NO: 1709920 - RNA, 19 nt, Homo sapiens
  misc_RNA (1)...(19): siRNA sense strand
gcaaauuccccgaagacuu

SEQ ID NO: 1709921 - RNA, 19 nt, Homo sapiens
  misc_RNA (1)...(19): siRNA sense strand
gaugacuugugagaaccaa

SEQ ID NO: 1709922 - RNA, 19 nt, Homo sapiens
  misc_RNA (1)...(19): siRNA sense strand
gagccaacaagcggaguga

SEQ ID NO: 1709923 - RNA, 19 nt, Homo sapiens
  misc_RNA (1)...(19): siRNA sense strand
ccaggaaggaugggauuuc

SEQ ID NO: 1709924 - RNA, 19 nt, Homo sapiens
  misc_RNA (1)...(19): siRNA sense strand
cagaugaugaccgcuauuc

SEQ ID NO: 1709925 - RNA, 19 nt, Homo sapiens
  misc_RNA (1)...(19): siRNA sense strand
ccugaggagucucgugucu

SEQ ID NO: 1709926 - RNA, 19 nt, Homo sapiens
  misc_RNA (1)...(19): siRNA sense strand
uguacaagcauccugacaa

SEQ ID NO: 1709927 - RNA, 19 nt, Homo sapiens
  misc_RNA (1)...(19): siRNA sense strand
caaaugagguugucacaga

SEQ ID NO: 1709928 - RNA, 19 nt, Homo sapiens
  misc_RNA (1)...(19): siRNA sense strand
gcagagaaaccucaagaaa

SEQ ID NO: 1709929 - RNA, 19 nt, Homo sapiens
  misc_RNA (1)...(19): siRNA sense strand
guacgugggucccuaugaa

SEQ ID NO: 1709930 - RNA, 19 nt, Homo sapiens
  misc_RNA (1)...(19): siRNA sense strand
gagcaucauugcaaacaug

SEQ ID NO: 1709931 - RNA, 19 nt, Homo sapiens
  misc_RNA (1)...(19): siRNA sense strand
caagacaugucauucaagu

SEQ ID NO: 1709932 - RNA, 19 nt, Homo sapiens
  misc_RNA (1)...(19): siRNA sense strand
ggagagugcugggauggaa

SEQ ID NO: 1709933 - RNA, 19 nt, Homo sapiens
  misc_RNA (1)...(19): siRNA sense strand
caacggaugcuuuaucaga

SEQ ID NO: 1709934 - RNA, 19 nt, Homo sapiens
  misc_RNA (1)...(19): siRNA sense strand
agacaugucauucaaguuu

SEQ ID NO: 1709935 - RNA, 19 nt, Homo sapiens
  misc_RNA (1)...(19): siRNA sense strand
acacuugccuggcgaacaa

SEQ ID NO: 1709936 - RNA, 19 nt, Homo sapiens
  misc_RNA (1)...(19): siRNA sense strand
guacaagcauccugacaac

SEQ ID NO: 1709937 - RNA, 19 nt, Homo sapiens
  misc_RNA (1)...(19): siRNA sense strand
ccacagagcaccagcaaag

SEQ ID NO: 1709938 - RNA, 19 nt, Homo sapiens
  misc_RNA (1)...(19): siRNA sense strand
ccagaugacuugugagaac

SEQ ID NO: 1709939 - RNA, 19 nt, Homo sapiens
  misc_RNA (1)...(19): siRNA sense strand
cagcagagauaauggaaac

SEQ ID NO: 1709940 - RNA, 19 nt, Homo sapiens
  misc_RNA (1)...(19): siRNA sense strand
ggcgugagcuggagaagca

SEQ ID NO: 1709941 - RNA, 19 nt, Homo sapiens
  misc_RNA (1)...(19): siRNA sense strand
cacaggagcuugcaacaac

SEQ ID NO: 1709942 - RNA, 19 nt, Homo sapiens
  misc_RNA (1)...(19): siRNA sense strand
ggagaacagccacgucuuc

SEQ ID NO: 1709943 - RNA, 19 nt, Homo sapiens
  misc_RNA (1)...(19): siRNA sense strand
gagcguggccgacaagauc

SEQ ID NO: 1709944 - RNA, 19 nt, Homo sapiens
  misc_RNA (1)...(19): siRNA sense strand
cagcaucacuggcaugaac

SEQ ID NO: 1709945 - RNA, 19 nt, Homo sapiens
  misc_RNA (1)...(19): siRNA sense strand
gcacggguaugagcuccaa

SEQ ID NO: 1709946 - RNA, 19 nt, Homo sapiens
  misc_RNA (1)...(19): siRNA sense strand
gguuauggccugcacagaa

SEQ ID NO: 1709947 - RNA, 19 nt, Homo sapiens
  misc_RNA (1)...(19): siRNA sense strand
caaauuccccgaagacuuu

SEQ ID NO: 1709948 - RNA, 19 nt, Homo sapiens
  misc_RNA (1)...(19): siRNA sense strand
gggaaagccugaggagucu

SEQ ID NO: 1709949 - RNA, 19 nt, Homo sapiens
  misc_RNA (1)...(19): siRNA sense strand
guuauggccugcacagaag

SEQ ID NO: 1709950 - RNA, 19 nt, Homo sapiens
  misc_RNA (1)...(19): siRNA sense strand
ccugaaaacucaacaauca

SEQ ID NO: 1709951 - RNA, 19 nt, Homo sapiens
  misc_RNA (1)...(19): siRNA sense strand
ccaacaagcggagugauug

SEQ ID NO: 1709952 - RNA, 19 nt, Homo sapiens
  misc_RNA (1)...(19): siRNA sense strand
ccagagagcguggagaaug

SEQ ID NO: 1709953 - RNA, 19 nt, Homo sapiens
  misc_RNA (1)...(19): siRNA sense strand
gaugaugaccgcuauucug

SEQ ID NO: 1709954 - RNA, 19 nt, Homo sapiens
  misc_RNA (1)...(19): siRNA sense strand
gacaugucauucaaguuuc

SEQ ID NO: 1709955 - RNA, 19 nt, Homo sapiens
  misc_RNA (1)...(19): siRNA sense strand
caagcauccugacaacauc

SEQ ID NO: 1709956 - RNA, 19 nt, Homo sapiens
  misc_RNA (1)...(19): siRNA sense strand
ugaggagucucgugucucu

SEQ ID NO: 1709957 - RNA, 19 nt, Homo sapiens
  misc_RNA (1)...(19): siRNA sense strand
cagagagcguggagaaugg

SEQ ID NO: 1709958 - RNA, 19 nt, Homo sapiens
  misc_RNA (1)...(19): siRNA sense strand
ccgacaagauccuggacuu

SEQ ID NO: 1709959 - RNA, 19 nt, Homo sapiens
  misc_RNA (1)...(19): siRNA sense strand
agagaaaccucaagaaaag

SEQ ID NO: 1709960 - RNA, 19 nt, Homo sapiens
  misc_RNA (1)...(19): siRNA sense strand
gggacuuugugcacuguga

SEQ ID NO: 1709961 - RNA, 19 nt, Homo sapiens
  misc_RNA (1)...(19): siRNA sense strand
uccaacggaugcuuuauca

SEQ ID NO: 1709962 - RNA, 19 nt, Homo sapiens
  misc_RNA (1)...(19): siRNA sense strand
gagauaauggaaacaucaa

SEQ ID NO: 1709963 - RNA, 19 nt, Homo sapiens
  misc_RNA (1)...(19): siRNA sense strand
gccaacaagcggagugauu

SEQ ID NO: 1709964 - RNA, 19 nt, Homo sapiens
  misc_RNA (1)...(19): siRNA sense strand
ugucucgggucaucuguga

SEQ ID NO: 1709965 - RNA, 19 nt, Homo sapiens
  misc_RNA (1)...(19): siRNA sense strand
gagaacagccacgucuuca

SEQ ID NO: 1709966 - RNA, 19 nt, Homo sapiens
  misc_RNA (1)...(19): siRNA sense strand
gagcagcagagauaaugga

SEQ ID NO: 1709967 - RNA, 19 nt, Homo sapiens
  misc_RNA (1)...(19): siRNA sense strand
gcagagauaauggaaacau

SEQ ID NO: 1709968 - RNA, 19 nt, Homo sapiens
  misc_RNA (1)...(19): siRNA sense strand
gagcuugcaacaacagaga

SEQ ID NO: 1709969 - RNA, 19 nt, Homo sapiens
  misc_RNA (1)...(19): siRNA sense strand
caaaaugcccaaacacuug

SEQ ID NO: 1709970 - RNA, 19 nt, Homo sapiens
  misc_RNA (1)...(19): siRNA sense strand
aaagaaaagucaaccugaa

SEQ ID NO: 1709971 - RNA, 19 nt, Homo sapiens
  misc_RNA (1)...(19): siRNA sense strand
cagagauaauggaaacauc

SEQ ID NO: 1709972 - RNA, 19 nt, Homo sapiens
  misc_RNA (1)...(19): siRNA sense strand
aaguguggcuucccagaga

SEQ ID NO: 1709973 - RNA, 19 nt, Homo sapiens
  misc_RNA (1)...(19): siRNA sense strand
gcugggaggcuuagcugaa

SEQ ID NO: 1709974 - RNA, 19 nt, Homo sapiens
  misc_RNA (1)...(19): siRNA sense strand
uacaagcgaugaaaagaaa

SEQ ID NO: 1709975 - RNA, 19 nt, Homo sapiens
  misc_RNA (1)...(19): siRNA sense strand
cagagaaaccucaagaaaa

SEQ ID NO: 1709976 - RNA, 19 nt, Homo sapiens
  misc_RNA (1)...(19): siRNA sense strand
ccgaggccuuccagcagua

SEQ ID NO: 1709977 - RNA, 19 nt, Homo sapiens
  misc_RNA (1)...(19): siRNA sense strand
caaacuuccugagccaaca

SEQ ID NO: 1709978 - RNA, 19 nt, Homo sapiens
  misc_RNA (1)...(19): siRNA sense strand
aacggaugcuuuaucagaa

SEQ ID NO: 1709979 - RNA, 19 nt, Homo sapiens
  misc_RNA (1)...(19): siRNA sense strand
ggcgcgugcugguguauuc

SEQ ID NO: 1709980 - RNA, 19 nt, Homo sapiens
  misc_RNA (1)...(19): siRNA sense strand
cuggaggccuggagggaaa

SEQ ID NO: 1709981 - RNA, 19 nt, Homo sapiens
  misc_RNA (1)...(19): siRNA sense strand
cacagaugaugaccgcuau

SEQ ID NO: 1709982 - RNA, 19 nt, Homo sapiens
  misc_RNA (1)...(19): siRNA sense strand
gcagcagagauaauggaaa

SEQ ID NO: 1709983 - RNA, 19 nt, Homo sapiens
  misc_RNA (1)...(19): siRNA sense strand
cugggaggcuuagcugaaa

SEQ ID NO: 1709984 - RNA, 19 nt, Homo sapiens
  misc_RNA (1)...(19): siRNA sense strand
aaaugagguugucacagau

SEQ ID NO: 1709985 - RNA, 19 nt, Homo sapiens
  misc_RNA (1)...(19): siRNA sense strand
caaauacaggcccaucaca

SEQ ID NO: 1709986 - RNA, 19 nt, Homo sapiens
  misc_RNA (1)...(19): siRNA sense strand
caacaaucacagcauccaa

SEQ ID NO: 1709987 - RNA, 19 nt, Homo sapiens
  misc_RNA (1)...(19): siRNA sense strand
aggcuuagcugaaaacuuc

SEQ ID NO: 1709988 - RNA, 19 nt, Homo sapiens
  misc_RNA (1)...(19): siRNA sense strand
cuucagcccauggacauua

SEQ ID NO: 1709989 - RNA, 19 nt, Homo sapiens
  misc_RNA (1)...(19): siRNA sense strand
acgccacgaugcagagaaa

SEQ ID NO: 1709990 - RNA, 19 nt, Homo sapiens
  misc_RNA (1)...(19): siRNA sense strand
gcaguacgugggucccuau

SEQ ID NO: 1709991 - RNA, 19 nt, Homo sapiens
  misc_RNA (1)...(19): siRNA sense strand
cuguuugccugucucauug

SEQ ID NO: 1709992 - RNA, 19 nt, Homo sapiens
  misc_RNA (1)...(19): siRNA sense strand
acaagcauccugacaacau

SEQ ID NO: 1709993 - RNA, 19 nt, Homo sapiens
  misc_RNA (1)...(19): siRNA sense strand
gagagggaaagaacuccuu

SEQ ID NO: 1709994 - RNA, 19 nt, Homo sapiens
  misc_RNA (1)...(19): siRNA sense strand
agagauaauggaaacauca

SEQ ID NO: 1709995 - RNA, 19 nt, Homo sapiens
  misc_RNA (1)...(19): siRNA sense strand
gacagcaucacuggcauga

SEQ ID NO: 1709996 - RNA, 19 nt, Homo sapiens
  misc_RNA (1)...(19): siRNA sense strand
ccuguuugccugucucauu

SEQ ID NO: 1709997 - RNA, 19 nt, Homo sapiens
  misc_RNA (1)...(19): siRNA sense strand
ucacaggagcuugcaacaa

SEQ ID NO: 1709998 - RNA, 19 nt, Homo sapiens
  misc_RNA (1)...(19): siRNA sense strand
ugcccgagcagcagagaua

SEQ ID NO: 1709999 - RNA, 19 nt, Homo sapiens
  misc_RNA (1)...(19): siRNA sense strand
acugccagaugacuuguga

SEQ ID NO: 1710000 - RNA, 19 nt, Homo sapiens
  misc_RNA (1)...(19): siRNA sense strand
auggaaacaucaauacaag

SEQ ID NO: 1710001 - RNA, 19 nt, Homo sapiens
  misc_RNA (1)...(19): siRNA sense strand
auacaucgaccacgacauc

SEQ ID NO: 1710002 - RNA, 19 nt, Homo sapiens
  misc_RNA (1)...(19): siRNA sense strand
acaugucauucaaguuuca

SEQ ID NO: 1710003 - RNA, 19 nt, Homo sapiens
  misc_RNA (1)...(19): siRNA sense strand
cggaugcuuuaucagaaga

SEQ ID NO: 1710004 - RNA, 19 nt, Homo sapiens
  misc_RNA (1)...(19): siRNA sense strand
gagguugucacagaugaug

SEQ ID NO: 1710005 - RNA, 19 nt, Homo sapiens
  misc_RNA (1)...(19): siRNA sense strand
gcaaauuccccgaagacuu

SEQ ID NO: 1710006 - RNA, 19 nt, Homo sapiens
  misc_RNA (1)...(19): siRNA sense strand
gaugacuugugagaaccaa

SEQ ID NO: 1710007 - RNA, 19 nt, Homo sapiens
  misc_RNA (1)...(19): siRNA sense strand
gagccaacaagcggaguga

SEQ ID NO: 1710008 - RNA, 19 nt, Homo sapiens
  misc_RNA (1)...(19): siRNA sense strand
ccaggaaggaugggauuuc

SEQ ID NO: 1710009 - RNA, 19 nt, Homo sapiens
  misc_RNA (1)...(19): siRNA sense strand
cagaugaugaccgcuauuc

SEQ ID NO: 1710010 - RNA, 19 nt, Homo sapiens
  misc_RNA (1)...(19): siRNA sense strand
ccugaggagucucgugucu

SEQ ID NO: 1710011 - RNA, 19 nt, Homo sapiens
  misc_RNA (1)...(19): siRNA sense strand
uguacaagcauccugacaa

SEQ ID NO: 1710012 - RNA, 19 nt, Homo sapiens
  misc_RNA (1)...(19): siRNA sense strand
gcccuacacaccacagaua

SEQ ID NO: 1710013 - RNA, 19 nt, Homo sapiens
  misc_RNA (1)...(19): siRNA sense strand
gugguggccuucagcaaug

SEQ ID NO: 1710014 - RNA, 19 nt, Homo sapiens
  misc_RNA (1)...(19): siRNA sense strand
ggagacacuggcugacauu

SEQ ID NO: 1710015 - RNA, 19 nt, Homo sapiens
  misc_RNA (1)...(19): siRNA sense strand
cuacaugacccaccacauc

SEQ ID NO: 1710016 - RNA, 19 nt, Homo sapiens
  misc_RNA (1)...(19): siRNA sense strand
gcggaucggcuccuucaug

SEQ ID NO: 1710017 - RNA, 19 nt, Homo sapiens
  misc_RNA (1)...(19): siRNA sense strand
gcugaccgauggccacuac

SEQ ID NO: 1710018 - RNA, 19 nt, Homo sapiens
  misc_RNA (1)...(19): siRNA sense strand
uuaccuccauccucucuuc

SEQ ID NO: 1710019 - RNA, 19 nt, Homo sapiens
  misc_RNA (1)...(19): siRNA sense strand
cggagacacuggcugacau

SEQ ID NO: 1710020 - RNA, 19 nt, Homo sapiens
  misc_RNA (1)...(19): siRNA sense strand
cuacacaccacagauaaca

SEQ ID NO: 1710021 - RNA, 19 nt, Homo sapiens
  misc_RNA (1)...(19): siRNA sense strand
gaccgauggccacuacaug

SEQ ID NO: 1710022 - RNA, 19 nt, Homo sapiens
  misc_RNA (1)...(19): siRNA sense strand
cggcgaaguggcagcauga

SEQ ID NO: 1710023 - RNA, 19 nt, Homo sapiens
  misc_RNA (1)...(19): siRNA sense strand
gcccuacacaccacagaua

SEQ ID NO: 1710024 - RNA, 19 nt, Homo sapiens
  misc_RNA (1)...(19): siRNA sense strand
gugguggccuucagcaaug

SEQ ID NO: 1710025 - RNA, 19 nt, Homo sapiens
  misc_RNA (1)...(19): siRNA sense strand
ggagacacuggcugacauu

SEQ ID NO: 1710026 - RNA, 19 nt, Homo sapiens
  misc_RNA (1)...(19): siRNA sense strand
cuacaugacccaccacauc

SEQ ID NO: 1710027 - RNA, 19 nt, Homo sapiens
  misc_RNA (1)...(19): siRNA sense strand
gcggaucggcuccuucaug

SEQ ID NO: 1710028 - RNA, 19 nt, Homo sapiens
  misc_RNA (1)...(19): siRNA sense strand
gcugaccgauggccacuac

SEQ ID NO: 1710029 - RNA, 19 nt, Homo sapiens
  misc_RNA (1)...(19): siRNA sense strand
uuaccuccauccucucuuc

SEQ ID NO: 1710030 - RNA, 19 nt, Homo sapiens
  misc_RNA (1)...(19): siRNA sense strand
cggagacacuggcugacau

SEQ ID NO: 1710031 - RNA, 19 nt, Homo sapiens
  misc_RNA (1)...(19): siRNA sense strand
cuacacaccacagauaaca

SEQ ID NO: 1710032 - RNA, 19 nt, Homo sapiens
  misc_RNA (1)...(19): siRNA sense strand
gaccgauggccacuacaug

SEQ ID NO: 1710033 - RNA, 19 nt, Homo sapiens
  misc_RNA (1)...(19): siRNA sense strand
cggcgaaguggcagcauga

SEQ ID NO: 1710034 - RNA, 19 nt, Homo sapiens
  misc_RNA (1)...(19): siRNA sense strand
gcccuacacaccacagaua

SEQ ID NO: 1710035 - RNA, 19 nt, Homo sapiens
  misc_RNA (1)...(19): siRNA sense strand
gugguggccuucagcaaug

SEQ ID NO: 1710036 - RNA, 19 nt, Homo sapiens
  misc_RNA (1)...(19): siRNA sense strand
ggagacacuggcugacauu

SEQ ID NO: 1710037 - RNA, 19 nt, Homo sapiens
  misc_RNA (1)...(19): siRNA sense strand
cuacaugacccaccacauc

SEQ ID NO: 1710038 - RNA, 19 nt, Homo sapiens
  misc_RNA (1)...(19): siRNA sense strand
gcggaucggcuccuucaug

SEQ ID NO: 1710039 - RNA, 19 nt, Homo sapiens
  misc_RNA (1)...(19): siRNA sense strand
gcugaccgauggccacuac

SEQ ID NO: 1710040 - RNA, 19 nt, Homo sapiens
  misc_RNA (1)...(19): siRNA sense strand
uuaccuccauccucucuuc

SEQ ID NO: 1710041 - RNA, 19 nt, Homo sapiens
  misc_RNA (1)...(19): siRNA sense strand
cggagacacuggcugacau

SEQ ID NO: 1710042 - RNA, 19 nt, Homo sapiens
  misc_RNA (1)...(19): siRNA sense strand
cuacacaccacagauaaca

SEQ ID NO: 1710043 - RNA, 19 nt, Homo sapiens
  misc_RNA (1)...(19): siRNA sense strand
gaccgauggccacuacaug

SEQ ID NO: 1710044 - RNA, 19 nt, Homo sapiens
  misc_RNA (1)...(19): siRNA sense strand
cggcgaaguggcagcauga

SEQ ID NO: 1710045 - RNA, 19 nt, Homo sapiens
  misc_RNA (1)...(19): siRNA sense strand
ggacacagcuacuacuaca

SEQ ID NO: 1710046 - RNA, 19 nt, Homo sapiens
  misc_RNA (1)...(19): siRNA sense strand
gaagagacuugcagcagau

SEQ ID NO: 1710047 - RNA, 19 nt, Homo sapiens
  misc_RNA (1)...(19): siRNA sense strand
cggagaagcugucugagaa

SEQ ID NO: 1710048 - RNA, 19 nt, Homo sapiens
  misc_RNA (1)...(19): siRNA sense strand
gaaugaggacuacaccaua

SEQ ID NO: 1710049 - RNA, 19 nt, Homo sapiens
  misc_RNA (1)...(19): siRNA sense strand
gaagcugucugagaaguuc

SEQ ID NO: 1710050 - RNA, 19 nt, Homo sapiens
  misc_RNA (1)...(19): siRNA sense strand
ccacgccucuucccacuug

SEQ ID NO: 1710051 - RNA, 19 nt, Homo sapiens
  misc_RNA (1)...(19): siRNA sense strand
gggcaaggaguucaaagaa

SEQ ID NO: 1710052 - RNA, 19 nt, Homo sapiens
  misc_RNA (1)...(19): siRNA sense strand
gaggugcggguucuacaua

SEQ ID NO: 1710053 - RNA, 19 nt, Homo sapiens
  misc_RNA (1)...(19): siRNA sense strand
ggacuacaccauacaugug

SEQ ID NO: 1710054 - RNA, 19 nt, Homo sapiens
  misc_RNA (1)...(19): siRNA sense strand
ggaaugaggacuacaccau

SEQ ID NO: 1710055 - RNA, 19 nt, Homo sapiens
  misc_RNA (1)...(19): siRNA sense strand
gagaagcugucugagaagu

SEQ ID NO: 1710056 - RNA, 19 nt, Homo sapiens
  misc_RNA (1)...(19): siRNA sense strand
caucaucuguccgcacuau

SEQ ID NO: 1710057 - RNA, 19 nt, Homo sapiens
  misc_RNA (1)...(19): siRNA sense strand
ggcaaggaguucaaagaag

SEQ ID NO: 1710058 - RNA, 19 nt, Homo sapiens
  misc_RNA (1)...(19): siRNA sense strand
ccauacaugugcagcugaa

SEQ ID NO: 1710059 - RNA, 19 nt, Homo sapiens
  misc_RNA (1)...(19): siRNA sense strand
ucaaagaaggacacagcua

SEQ ID NO: 1710060 - RNA, 19 nt, Homo sapiens
  misc_RNA (1)...(19): siRNA sense strand
ccacuucugcugcugcaaa

SEQ ID NO: 1710061 - RNA, 19 nt, Homo sapiens
  misc_RNA (1)...(19): siRNA sense strand
gcccggagaagcugucuga

SEQ ID NO: 1710062 - RNA, 19 nt, Homo sapiens
  misc_RNA (1)...(19): siRNA sense strand
cuacauagcaucggucaca

SEQ ID NO: 1710063 - RNA, 19 nt, Homo sapiens
  misc_RNA (1)...(19): siRNA sense strand
gcacuaugaagaucacucu

SEQ ID NO: 1710064 - RNA, 19 nt, Homo sapiens
  misc_RNA (1)...(19): siRNA sense strand
caguucaaaucccaaguuc

SEQ ID NO: 1710065 - RNA, 19 nt, Homo sapiens
  misc_RNA (1)...(19): siRNA sense strand
ccacaggagaagagacuug

SEQ ID NO: 1710066 - RNA, 19 nt, Homo sapiens
  misc_RNA (1)...(19): siRNA sense strand
gccacaccgucuucuggaa

SEQ ID NO: 1710067 - RNA, 19 nt, Homo sapiens
  misc_RNA (1)...(19): siRNA sense strand
gugcugcuccuuccacuuc

SEQ ID NO: 1710068 - RNA, 19 nt, Homo sapiens
  misc_RNA (1)...(19): siRNA sense strand
acacagcuacuacuacauc

SEQ ID NO: 1710069 - RNA, 19 nt, Homo sapiens
  misc_RNA (1)...(19): siRNA sense strand
gaaggacacagcuacuacu

SEQ ID NO: 1710070 - RNA, 19 nt, Homo sapiens
  misc_RNA (1)...(19): siRNA sense strand
uuccagcgcuucacaccuu

SEQ ID NO: 1710071 - RNA, 19 nt, Homo sapiens
  misc_RNA (1)...(19): siRNA sense strand
aaugaggacuacaccauac

SEQ ID NO: 1710072 - RNA, 19 nt, Homo sapiens
  misc_RNA (1)...(19): siRNA sense strand
uacaugugcagcugaauga

SEQ ID NO: 1710073 - RNA, 19 nt, Homo sapiens
  misc_RNA (1)...(19): siRNA sense strand
ccggagaagcugucugaga

SEQ ID NO: 1710074 - RNA, 19 nt, Homo sapiens
  misc_RNA (1)...(19): siRNA sense strand
augugcagcugaaugacua

SEQ ID NO: 1710075 - RNA, 19 nt, Homo sapiens
  misc_RNA (1)...(19): siRNA sense strand
aagaaggacacagcuacua

SEQ ID NO: 1710076 - RNA, 19 nt, Homo sapiens
  misc_RNA (1)...(19): siRNA sense strand
aaucccaaguuccggaaug

SEQ ID NO: 1710077 - RNA, 19 nt, Homo sapiens
  misc_RNA (1)...(19): siRNA sense strand
ugguggagcaugaggagua

SEQ ID NO: 1710078 - RNA, 19 nt, Homo sapiens
  misc_RNA (1)...(19): siRNA sense strand
cuacguggacaucaucugu

SEQ ID NO: 1710079 - RNA, 19 nt, Homo sapiens
  misc_RNA (1)...(19): siRNA sense strand
gaggacuacaccauacaug

SEQ ID NO: 1710080 - RNA, 19 nt, Homo sapiens
  misc_RNA (1)...(19): siRNA sense strand
caaggaguucaaagaagga

SEQ ID NO: 1710081 - RNA, 19 nt, Homo sapiens
  misc_RNA (1)...(19): siRNA sense strand
ggagaagcugucugagaag

SEQ ID NO: 1710082 - RNA, 19 nt, Homo sapiens
  misc_RNA (1)...(19): siRNA sense strand
gaaugacuacguggacauc

SEQ ID NO: 1710083 - RNA, 19 nt, Homo sapiens
  misc_RNA (1)...(19): siRNA sense strand
ggacacagcuacuacuaca

SEQ ID NO: 1710084 - RNA, 19 nt, Homo sapiens
  misc_RNA (1)...(19): siRNA sense strand
gaagagacuugcagcagau

SEQ ID NO: 1710085 - RNA, 19 nt, Homo sapiens
  misc_RNA (1)...(19): siRNA sense strand
cggagaagcugucugagaa

SEQ ID NO: 1710086 - RNA, 19 nt, Homo sapiens
  misc_RNA (1)...(19): siRNA sense strand
gaaugaggacuacaccaua

SEQ ID NO: 1710087 - RNA, 19 nt, Homo sapiens
  misc_RNA (1)...(19): siRNA sense strand
gaagcugucugagaaguuc

SEQ ID NO: 1710088 - RNA, 19 nt, Homo sapiens
  misc_RNA (1)...(19): siRNA sense strand
ccacgccucuucccacuug

SEQ ID NO: 1710089 - RNA, 19 nt, Homo sapiens
  misc_RNA (1)...(19): siRNA sense strand
gggcaaggaguucaaagaa

SEQ ID NO: 1710090 - RNA, 19 nt, Homo sapiens
  misc_RNA (1)...(19): siRNA sense strand
gaggugcggguucuacaua

SEQ ID NO: 1710091 - RNA, 19 nt, Homo sapiens
  misc_RNA (1)...(19): siRNA sense strand
ggacuacaccauacaugug

SEQ ID NO: 1710092 - RNA, 19 nt, Homo sapiens
  misc_RNA (1)...(19): siRNA sense strand
ggaaugaggacuacaccau

SEQ ID NO: 1710093 - RNA, 19 nt, Homo sapiens
  misc_RNA (1)...(19): siRNA sense strand
gagaagcugucugagaagu

SEQ ID NO: 1710094 - RNA, 19 nt, Homo sapiens
  misc_RNA (1)...(19): siRNA sense strand
caucaucuguccgcacuau

SEQ ID NO: 1710095 - RNA, 19 nt, Homo sapiens
  misc_RNA (1)...(19): siRNA sense strand
ggcaaggaguucaaagaag

SEQ ID NO: 1710096 - RNA, 19 nt, Homo sapiens
  misc_RNA (1)...(19): siRNA sense strand
ccauacaugugcagcugaa

SEQ ID NO: 1710097 - RNA, 19 nt, Homo sapiens
  misc_RNA (1)...(19): siRNA sense strand
ucaaagaaggacacagcua

SEQ ID NO: 1710098 - RNA, 19 nt, Homo sapiens
  misc_RNA (1)...(19): siRNA sense strand
ccacuucugcugcugcaaa

SEQ ID NO: 1710099 - RNA, 19 nt, Homo sapiens
  misc_RNA (1)...(19): siRNA sense strand
gcccggagaagcugucuga

SEQ ID NO: 1710100 - RNA, 19 nt, Homo sapiens
  misc_RNA (1)...(19): siRNA sense strand
cuacauagcaucggucaca

SEQ ID NO: 1710101 - RNA, 19 nt, Homo sapiens
  misc_RNA (1)...(19): siRNA sense strand
gcacuaugaagaucacucu

SEQ ID NO: 1710102 - RNA, 19 nt, Homo sapiens
  misc_RNA (1)...(19): siRNA sense strand
caguucaaaucccaaguuc

SEQ ID NO: 1710103 - RNA, 19 nt, Homo sapiens
  misc_RNA (1)...(19): siRNA sense strand
ccacaggagaagagacuug

SEQ ID NO: 1710104 - RNA, 19 nt, Homo sapiens
  misc_RNA (1)...(19): siRNA sense strand
gccacaccgucuucuggaa

SEQ ID NO: 1710105 - RNA, 19 nt, Homo sapiens
  misc_RNA (1)...(19): siRNA sense strand
gugcugcuccuuccacuuc

SEQ ID NO: 1710106 - RNA, 19 nt, Homo sapiens
  misc_RNA (1)...(19): siRNA sense strand
acacagcuacuacuacauc

SEQ ID NO: 1710107 - RNA, 19 nt, Homo sapiens
  misc_RNA (1)...(19): siRNA sense strand
gaaggacacagcuacuacu

SEQ ID NO: 1710108 - RNA, 19 nt, Homo sapiens
  misc_RNA (1)...(19): siRNA sense strand
uuccagcgcuucacaccuu

SEQ ID NO: 1710109 - RNA, 19 nt, Homo sapiens
  misc_RNA (1)...(19): siRNA sense strand
aaugaggacuacaccauac

SEQ ID NO: 1710110 - RNA, 19 nt, Homo sapiens
  misc_RNA (1)...(19): siRNA sense strand
uacaugugcagcugaauga

SEQ ID NO: 1710111 - RNA, 19 nt, Homo sapiens
  misc_RNA (1)...(19): siRNA sense strand
ccggagaagcugucugaga

SEQ ID NO: 1710112 - RNA, 19 nt, Homo sapiens
  misc_RNA (1)...(19): siRNA sense strand
augugcagcugaaugacua

SEQ ID NO: 1710113 - RNA, 19 nt, Homo sapiens
  misc_RNA (1)...(19): siRNA sense strand
aagaaggacacagcuacua

SEQ ID NO: 1710114 - RNA, 19 nt, Homo sapiens
  misc_RNA (1)...(19): siRNA sense strand
aaucccaaguuccggaaug

SEQ ID NO: 1710115 - RNA, 19 nt, Homo sapiens
  misc_RNA (1)...(19): siRNA sense strand
ugguggagcaugaggagua

SEQ ID NO: 1710116 - RNA, 19 nt, Homo sapiens
  misc_RNA (1)...(19): siRNA sense strand
cuacguggacaucaucugu

SEQ ID NO: 1710117 - RNA, 19 nt, Homo sapiens
  misc_RNA (1)...(19): siRNA sense strand
gaggacuacaccauacaug

SEQ ID NO: 1710118 - RNA, 19 nt, Homo sapiens
  misc_RNA (1)...(19): siRNA sense strand
caaggaguucaaagaagga

SEQ ID NO: 1710119 - RNA, 19 nt, Homo sapiens
  misc_RNA (1)...(19): siRNA sense strand
ggagaagcugucugagaag

SEQ ID NO: 1710120 - RNA, 19 nt, Homo sapiens
  misc_RNA (1)...(19): siRNA sense strand
gaaugacuacguggacauc

SEQ ID NO: 1710121 - RNA, 19 nt, Homo sapiens
  misc_RNA (1)...(19): siRNA sense strand
gaacaaagcuguggauuac

SEQ ID NO: 1710122 - RNA, 19 nt, Homo sapiens
  misc_RNA (1)...(19): siRNA sense strand
gaagauacagccauauuaa

SEQ ID NO: 1710123 - RNA, 19 nt, Homo sapiens
  misc_RNA (1)...(19): siRNA sense strand
gagcucagaugaucagaaa

SEQ ID NO: 1710124 - RNA, 19 nt, Homo sapiens
  misc_RNA (1)...(19): siRNA sense strand
gaaugacuccaacgaauua

SEQ ID NO: 1710125 - RNA, 19 nt, Homo sapiens
  misc_RNA (1)...(19): siRNA sense strand
gaagauuucugaagauaca

SEQ ID NO: 1710126 - RNA, 19 nt, Homo sapiens
  misc_RNA (1)...(19): siRNA sense strand
gcccagcacucaacaagua

SEQ ID NO: 1710127 - RNA, 19 nt, Homo sapiens
  misc_RNA (1)...(19): siRNA sense strand
ggagagaguguccagauaa

SEQ ID NO: 1710128 - RNA, 19 nt, Homo sapiens
  misc_RNA (1)...(19): siRNA sense strand
uaaaggaacuggugguauc

SEQ ID NO: 1710129 - RNA, 19 nt, Homo sapiens
  misc_RNA (1)...(19): siRNA sense strand
caagauaacugggaaugug

SEQ ID NO: 1710130 - RNA, 19 nt, Homo sapiens
  misc_RNA (1)...(19): siRNA sense strand
ugacguaguuacaccuaua

SEQ ID NO: 1710131 - RNA, 19 nt, Homo sapiens
  misc_RNA (1)...(19): siRNA sense strand
ggaccuauguguucaccuu

SEQ ID NO: 1710132 - RNA, 19 nt, Homo sapiens
  misc_RNA (1)...(19): siRNA sense strand
ucaaagcacugaugaugau

SEQ ID NO: 1710133 - RNA, 19 nt, Homo sapiens
  misc_RNA (1)...(19): siRNA sense strand
gaaagugaccgaugcaaag

SEQ ID NO: 1710134 - RNA, 19 nt, Homo sapiens
  misc_RNA (1)...(19): siRNA sense strand
ggacugugaucuguuguug

SEQ ID NO: 1710135 - RNA, 19 nt, Homo sapiens
  misc_RNA (1)...(19): siRNA sense strand
ugaacaaagcuguggauua

SEQ ID NO: 1710136 - RNA, 19 nt, Homo sapiens
  misc_RNA (1)...(19): siRNA sense strand
ugaagauacagccauauua

SEQ ID NO: 1710137 - RNA, 19 nt, Homo sapiens
  misc_RNA (1)...(19): siRNA sense strand
cagcgaugcucaagaguga

SEQ ID NO: 1710138 - RNA, 19 nt, Homo sapiens
  misc_RNA (1)...(19): siRNA sense strand
ucaagugacuguuauugug

SEQ ID NO: 1710139 - RNA, 19 nt, Homo sapiens
  misc_RNA (1)...(19): siRNA sense strand
ggaaagugguggagaugca

SEQ ID NO: 1710140 - RNA, 19 nt, Homo sapiens
  misc_RNA (1)...(19): siRNA sense strand
gaccaucacccuauccuuu

SEQ ID NO: 1710141 - RNA, 19 nt, Homo sapiens
  misc_RNA (1)...(19): siRNA sense strand
gaagacacaauuuggaguu

SEQ ID NO: 1710142 - RNA, 19 nt, Homo sapiens
  misc_RNA (1)...(19): siRNA sense strand
acaaggcgauuacaauuuc

SEQ ID NO: 1710143 - RNA, 19 nt, Homo sapiens
  misc_RNA (1)...(19): siRNA sense strand
guaguuacaccuauaguga

SEQ ID NO: 1710144 - RNA, 19 nt, Homo sapiens
  misc_RNA (1)...(19): siRNA sense strand
acacagcauucuaaaguga

SEQ ID NO: 1710145 - RNA, 19 nt, Homo sapiens
  misc_RNA (1)...(19): siRNA sense strand
ccacaaggcgauuacaauu

SEQ ID NO: 1710146 - RNA, 19 nt, Homo sapiens
  misc_RNA (1)...(19): siRNA sense strand
cgaauuagguggucugacu

SEQ ID NO: 1710147 - RNA, 19 nt, Homo sapiens
  misc_RNA (1)...(19): siRNA sense strand
cagauaacccugccuaaga

SEQ ID NO: 1710148 - RNA, 19 nt, Homo sapiens
  misc_RNA (1)...(19): siRNA sense strand
gcagaugcaggcccagaua

SEQ ID NO: 1710149 - RNA, 19 nt, Homo sapiens
  misc_RNA (1)...(19): siRNA sense strand
ggacacacuccuccaauuc

SEQ ID NO: 1710150 - RNA, 19 nt, Homo sapiens
  misc_RNA (1)...(19): siRNA sense strand
acugugaucuguuguugua

SEQ ID NO: 1710151 - RNA, 19 nt, Homo sapiens
  misc_RNA (1)...(19): siRNA sense strand
agauaacccugccuaagaa

SEQ ID NO: 1710152 - RNA, 19 nt, Homo sapiens
  misc_RNA (1)...(19): siRNA sense strand
gugaaugacuccaacgaau

SEQ ID NO: 1710153 - RNA, 19 nt, Homo sapiens
  misc_RNA (1)...(19): siRNA sense strand
ugagaagccuguaccuguu

SEQ ID NO: 1710154 - RNA, 19 nt, Homo sapiens
  misc_RNA (1)...(19): siRNA sense strand
agacuacaguggagaaaug

SEQ ID NO: 1710155 - RNA, 19 nt, Homo sapiens
  misc_RNA (1)...(19): siRNA sense strand
gcucuaaguccucagauga

SEQ ID NO: 1710156 - RNA, 19 nt, Homo sapiens
  misc_RNA (1)...(19): siRNA sense strand
ugacacagcauucuaaagu

SEQ ID NO: 1710157 - RNA, 19 nt, Homo sapiens
  misc_RNA (1)...(19): siRNA sense strand
uggagcguguuauauguua

SEQ ID NO: 1710158 - RNA, 19 nt, Homo sapiens
  misc_RNA (1)...(19): siRNA sense strand
gcaccauacccaguuauaa

SEQ ID NO: 1710159 - RNA, 19 nt, Homo sapiens
  misc_RNA (1)...(19): siRNA sense strand
gcagcaagagcucagauga

SEQ ID NO: 1710160 - RNA, 19 nt, Homo sapiens
  misc_RNA (1)...(19): siRNA sense strand
cugcaaaccugacagugaa

SEQ ID NO: 1710161 - RNA, 19 nt, Homo sapiens
  misc_RNA (1)...(19): siRNA sense strand
ccaagaaccaccuaaagga

SEQ ID NO: 1710162 - RNA, 19 nt, Homo sapiens
  misc_RNA (1)...(19): siRNA sense strand
aaucaccucuggcuucuug

SEQ ID NO: 1710163 - RNA, 19 nt, Homo sapiens
  misc_RNA (1)...(19): siRNA sense strand
gcugauuacucauccuaga

SEQ ID NO: 1710164 - RNA, 19 nt, Homo sapiens
  misc_RNA (1)...(19): siRNA sense strand
ccaauuccaugcugguguu

SEQ ID NO: 1710165 - RNA, 19 nt, Homo sapiens
  misc_RNA (1)...(19): siRNA sense strand
acccagagcugcacucaga

SEQ ID NO: 1710166 - RNA, 19 nt, Homo sapiens
  misc_RNA (1)...(19): siRNA sense strand
ggaaccagagcacugauga

SEQ ID NO: 1710167 - RNA, 19 nt, Homo sapiens
  misc_RNA (1)...(19): siRNA sense strand
gagaagaggcugggaguca

SEQ ID NO: 1710168 - RNA, 19 nt, Homo sapiens
  misc_RNA (1)...(19): siRNA sense strand
ggaacuacacuuucagcuu

SEQ ID NO: 1710169 - RNA, 19 nt, Homo sapiens
  misc_RNA (1)...(19): siRNA sense strand
caccauacccaguuauaaa

SEQ ID NO: 1710170 - RNA, 19 nt, Homo sapiens
  misc_RNA (1)...(19): siRNA sense strand
acucagaccugcuguaucu

SEQ ID NO: 1710171 - RNA, 19 nt, Homo sapiens
  misc_RNA (1)...(19): siRNA sense strand
gcacucagaccugcuguau

SEQ ID NO: 1710172 - RNA, 19 nt, Homo sapiens
  misc_RNA (1)...(19): siRNA sense strand
gcuaccaacucuacuacug

SEQ ID NO: 1710173 - RNA, 19 nt, Homo sapiens
  misc_RNA (1)...(19): siRNA sense strand
uaagagaagagaagauuuc

SEQ ID NO: 1710174 - RNA, 19 nt, Homo sapiens
  misc_RNA (1)...(19): siRNA sense strand
gaacuuaaggggccucuaa

SEQ ID NO: 1710175 - RNA, 19 nt, Homo sapiens
  misc_RNA (1)...(19): siRNA sense strand
ccaccuauagccaagauaa

SEQ ID NO: 1710176 - RNA, 19 nt, Homo sapiens
  misc_RNA (1)...(19): siRNA sense strand
gagaagccuguaccuguuu

SEQ ID NO: 1710177 - RNA, 19 nt, Homo sapiens
  misc_RNA (1)...(19): siRNA sense strand
ggagcuaccaacucuacua

SEQ ID NO: 1710178 - RNA, 19 nt, Homo sapiens
  misc_RNA (1)...(19): siRNA sense strand
ucagcaccauacccaguua

SEQ ID NO: 1710179 - RNA, 19 nt, Homo sapiens
  misc_RNA (1)...(19): siRNA sense strand
gaguggagcguguuauaug

SEQ ID NO: 1710180 - RNA, 19 nt, Homo sapiens
  misc_RNA (1)...(19): siRNA sense strand
ggaguuggccugagaucug

SEQ ID NO: 1710181 - RNA, 19 nt, Homo sapiens
  misc_RNA (1)...(19): siRNA sense strand
agucaacacugucacaugu

SEQ ID NO: 1710182 - RNA, 19 nt, Homo sapiens
  misc_RNA (1)...(19): siRNA sense strand
cagagggucuugcuacuac

SEQ ID NO: 1710183 - RNA, 19 nt, Homo sapiens
  misc_RNA (1)...(19): siRNA sense strand
gacacagcauucuaaagug

SEQ ID NO: 1710184 - RNA, 19 nt, Homo sapiens
  misc_RNA (1)...(19): siRNA sense strand
uagaagggaugugcauuca

SEQ ID NO: 1710185 - RNA, 19 nt, Homo sapiens
  misc_RNA (1)...(19): siRNA sense strand
gaugagaggaaccugcaaa

SEQ ID NO: 1710186 - RNA, 19 nt, Homo sapiens
  misc_RNA (1)...(19): siRNA sense strand
aagaaggagacuacacuua

SEQ ID NO: 1710187 - RNA, 19 nt, Homo sapiens
  misc_RNA (1)...(19): siRNA sense strand
gcaagaaggagacuacacu

SEQ ID NO: 1710188 - RNA, 19 nt, Homo sapiens
  misc_RNA (1)...(19): siRNA sense strand
aagcacugaugaugauaaa

SEQ ID NO: 1710189 - RNA, 19 nt, Homo sapiens
  misc_RNA (1)...(19): siRNA sense strand
gcuauugugucaccucagu

SEQ ID NO: 1710190 - RNA, 19 nt, Homo sapiens
  misc_RNA (1)...(19): siRNA sense strand
uaacccugccuaagaauga

SEQ ID NO: 1710191 - RNA, 19 nt, Homo sapiens
  misc_RNA (1)...(19): siRNA sense strand
gagagaguguccagauaac

SEQ ID NO: 1710192 - RNA, 19 nt, Homo sapiens
  misc_RNA (1)...(19): siRNA sense strand
ugaaugacuccaacgaauu

SEQ ID NO: 1710193 - RNA, 19 nt, Homo sapiens
  misc_RNA (1)...(19): siRNA sense strand
cuccaggccuguaugaauu

SEQ ID NO: 1710194 - RNA, 19 nt, Homo sapiens
  misc_RNA (1)...(19): siRNA sense strand
gcagaugauuugggcuuuc

SEQ ID NO: 1710195 - RNA, 19 nt, Homo sapiens
  misc_RNA (1)...(19): siRNA sense strand
ucaacacugucacauguca

SEQ ID NO: 1710196 - RNA, 19 nt, Homo sapiens
  misc_RNA (1)...(19): siRNA sense strand
ggagaugcaggguguuaga

SEQ ID NO: 1710197 - RNA, 19 nt, Homo sapiens
  misc_RNA (1)...(19): siRNA sense strand
cacaaggcgauuacaauuu

SEQ ID NO: 1710198 - RNA, 19 nt, Homo sapiens
  misc_RNA (1)...(19): siRNA sense strand
gaauuagguggucugacua

SEQ ID NO: 1710199 - RNA, 19 nt, Homo sapiens
  misc_RNA (1)...(19): siRNA sense strand
gaauucaaagugauuguag

SEQ ID NO: 1710200 - RNA, 19 nt, Homo sapiens
  misc_RNA (1)...(19): siRNA sense strand
gugaguggagcguguuaua

SEQ ID NO: 1710201 - RNA, 19 nt, Homo sapiens
  misc_RNA (1)...(19): siRNA sense strand
acaagggaauagucagcua

SEQ ID NO: 1710202 - RNA, 19 nt, Homo sapiens
  misc_RNA (1)...(19): siRNA sense strand
cagcuugacuguaguagac

SEQ ID NO: 1710203 - RNA, 19 nt, Homo sapiens
  misc_RNA (1)...(19): siRNA sense strand
agugcaaccugaaauauca

SEQ ID NO: 1710204 - RNA, 19 nt, Homo sapiens
  misc_RNA (1)...(19): siRNA sense strand
ugaaagugaccgaugcaaa

SEQ ID NO: 1710205 - RNA, 19 nt, Homo sapiens
  misc_RNA (1)...(19): siRNA sense strand
gaaggagacuacacuuacc

SEQ ID NO: 1710206 - RNA, 19 nt, Homo sapiens
  misc_RNA (1)...(19): siRNA sense strand
ugauggagcuaccaacucu

SEQ ID NO: 1710207 - RNA, 19 nt, Homo sapiens
  misc_RNA (1)...(19): siRNA sense strand
ccugggaacuacacuuuca

SEQ ID NO: 1710208 - RNA, 19 nt, Homo sapiens
  misc_RNA (1)...(19): siRNA sense strand
augcauauguucuccaaga

SEQ ID NO: 1710209 - RNA, 19 nt, Homo sapiens
  misc_RNA (1)...(19): siRNA sense strand
gguaucugcuggagagagu

SEQ ID NO: 1710210 - RNA, 19 nt, Homo sapiens
  misc_RNA (1)...(19): siRNA sense strand
ugacuguaguagacucuga

SEQ ID NO: 1710211 - RNA, 19 nt, Homo sapiens
  misc_RNA (1)...(19): siRNA sense strand
agaaccaccuaaaggagaa

SEQ ID NO: 1710212 - RNA, 19 nt, Homo sapiens
  misc_RNA (1)...(19): siRNA sense strand
ucccagauccucaaacuau

SEQ ID NO: 1710213 - RNA, 19 nt, Homo sapiens
  misc_RNA (1)...(19): siRNA sense strand
uaucauugcuaccuuuguc

SEQ ID NO: 1710214 - RNA, 19 nt, Homo sapiens
  misc_RNA (1)...(19): siRNA sense strand
gauauucagagccuuggaa

SEQ ID NO: 1710215 - RNA, 19 nt, Homo sapiens
  misc_RNA (1)...(19): siRNA sense strand
agagugagcugcggaagca

SEQ ID NO: 1710216 - RNA, 19 nt, Homo sapiens
  misc_RNA (1)...(19): siRNA sense strand
caacgucagucagcuaacu

SEQ ID NO: 1710217 - RNA, 19 nt, Homo sapiens
  misc_RNA (1)...(19): siRNA sense strand
ucaguaccauugggaagaa

SEQ ID NO: 1710218 - RNA, 19 nt, Homo sapiens
  misc_RNA (1)...(19): siRNA sense strand
ccacuucuacagucauuga

SEQ ID NO: 1710219 - RNA, 19 nt, Homo sapiens
  misc_RNA (1)...(19): siRNA sense strand
ccaaccacuucuacaguca

SEQ ID NO: 1710220 - RNA, 19 nt, Homo sapiens
  misc_RNA (1)...(19): siRNA sense strand
gggugcagcucgagaaugc

SEQ ID NO: 1710221 - RNA, 19 nt, Homo sapiens
  misc_RNA (1)...(19): siRNA sense strand
gaacaaagcuguggauuac

SEQ ID NO: 1710222 - RNA, 19 nt, Homo sapiens
  misc_RNA (1)...(19): siRNA sense strand
gaagauacagccauauuaa

SEQ ID NO: 1710223 - RNA, 19 nt, Homo sapiens
  misc_RNA (1)...(19): siRNA sense strand
gagcucagaugaucagaaa

SEQ ID NO: 1710224 - RNA, 19 nt, Homo sapiens
  misc_RNA (1)...(19): siRNA sense strand
gaaugacuccaacgaauua

SEQ ID NO: 1710225 - RNA, 19 nt, Homo sapiens
  misc_RNA (1)...(19): siRNA sense strand
gaagauuucugaagauaca

SEQ ID NO: 1710226 - RNA, 19 nt, Homo sapiens
  misc_RNA (1)...(19): siRNA sense strand
gcccagcacucaacaagua

SEQ ID NO: 1710227 - RNA, 19 nt, Homo sapiens
  misc_RNA (1)...(19): siRNA sense strand
ggagagaguguccagauaa

SEQ ID NO: 1710228 - RNA, 19 nt, Homo sapiens
  misc_RNA (1)...(19): siRNA sense strand
uaaaggaacuggugguauc

SEQ ID NO: 1710229 - RNA, 19 nt, Homo sapiens
  misc_RNA (1)...(19): siRNA sense strand
caagauaacugggaaugug

SEQ ID NO: 1710230 - RNA, 19 nt, Homo sapiens
  misc_RNA (1)...(19): siRNA sense strand
ugacguaguuacaccuaua

SEQ ID NO: 1710231 - RNA, 19 nt, Homo sapiens
  misc_RNA (1)...(19): siRNA sense strand
ggaccuauguguucaccuu

SEQ ID NO: 1710232 - RNA, 19 nt, Homo sapiens
  misc_RNA (1)...(19): siRNA sense strand
ucaaagcacugaugaugau

SEQ ID NO: 1710233 - RNA, 19 nt, Homo sapiens
  misc_RNA (1)...(19): siRNA sense strand
gaaagugaccgaugcaaag

SEQ ID NO: 1710234 - RNA, 19 nt, Homo sapiens
  misc_RNA (1)...(19): siRNA sense strand
ggacugugaucuguuguug

SEQ ID NO: 1710235 - RNA, 19 nt, Homo sapiens
  misc_RNA (1)...(19): siRNA sense strand
ugaacaaagcuguggauua

SEQ ID NO: 1710236 - RNA, 19 nt, Homo sapiens
  misc_RNA (1)...(19): siRNA sense strand
ugaagauacagccauauua

SEQ ID NO: 1710237 - RNA, 19 nt, Homo sapiens
  misc_RNA (1)...(19): siRNA sense strand
cagcgaugcucaagaguga

SEQ ID NO: 1710238 - RNA, 19 nt, Homo sapiens
  misc_RNA (1)...(19): siRNA sense strand
ucaagugacuguuauugug

SEQ ID NO: 1710239 - RNA, 19 nt, Homo sapiens
  misc_RNA (1)...(19): siRNA sense strand
ggaaagugguggagaugca

SEQ ID NO: 1710240 - RNA, 19 nt, Homo sapiens
  misc_RNA (1)...(19): siRNA sense strand
gaccaucacccuauccuuu

SEQ ID NO: 1710241 - RNA, 19 nt, Homo sapiens
  misc_RNA (1)...(19): siRNA sense strand
gaagacacaauuuggaguu

SEQ ID NO: 1710242 - RNA, 19 nt, Homo sapiens
  misc_RNA (1)...(19): siRNA sense strand
acaaggcgauuacaauuuc

SEQ ID NO: 1710243 - RNA, 19 nt, Homo sapiens
  misc_RNA (1)...(19): siRNA sense strand
guaguuacaccuauaguga

SEQ ID NO: 1710244 - RNA, 19 nt, Homo sapiens
  misc_RNA (1)...(19): siRNA sense strand
acacagcauucuaaaguga

SEQ ID NO: 1710245 - RNA, 19 nt, Homo sapiens
  misc_RNA (1)...(19): siRNA sense strand
ccacaaggcgauuacaauu

SEQ ID NO: 1710246 - RNA, 19 nt, Homo sapiens
  misc_RNA (1)...(19): siRNA sense strand
cgaauuagguggucugacu

SEQ ID NO: 1710247 - RNA, 19 nt, Homo sapiens
  misc_RNA (1)...(19): siRNA sense strand
cagauaacccugccuaaga

SEQ ID NO: 1710248 - RNA, 19 nt, Homo sapiens
  misc_RNA (1)...(19): siRNA sense strand
gcagaugcaggcccagaua

SEQ ID NO: 1710249 - RNA, 19 nt, Homo sapiens
  misc_RNA (1)...(19): siRNA sense strand
ggacacacuccuccaauuc

SEQ ID NO: 1710250 - RNA, 19 nt, Homo sapiens
  misc_RNA (1)...(19): siRNA sense strand
acugugaucuguuguugua

SEQ ID NO: 1710251 - RNA, 19 nt, Homo sapiens
  misc_RNA (1)...(19): siRNA sense strand
agauaacccugccuaagaa

SEQ ID NO: 1710252 - RNA, 19 nt, Homo sapiens
  misc_RNA (1)...(19): siRNA sense strand
gugaaugacuccaacgaau

SEQ ID NO: 1710253 - RNA, 19 nt, Homo sapiens
  misc_RNA (1)...(19): siRNA sense strand
ugagaagccuguaccuguu

SEQ ID NO: 1710254 - RNA, 19 nt, Homo sapiens
  misc_RNA (1)...(19): siRNA sense strand
agacuacaguggagaaaug

SEQ ID NO: 1710255 - RNA, 19 nt, Homo sapiens
  misc_RNA (1)...(19): siRNA sense strand
gcucuaaguccucagauga

SEQ ID NO: 1710256 - RNA, 19 nt, Homo sapiens
  misc_RNA (1)...(19): siRNA sense strand
ugacacagcauucuaaagu

SEQ ID NO: 1710257 - RNA, 19 nt, Homo sapiens
  misc_RNA (1)...(19): siRNA sense strand
uggagcguguuauauguua

SEQ ID NO: 1710258 - RNA, 19 nt, Homo sapiens
  misc_RNA (1)...(19): siRNA sense strand
gcaccauacccaguuauaa

SEQ ID NO: 1710259 - RNA, 19 nt, Homo sapiens
  misc_RNA (1)...(19): siRNA sense strand
gcagcaagagcucagauga

SEQ ID NO: 1710260 - RNA, 19 nt, Homo sapiens
  misc_RNA (1)...(19): siRNA sense strand
cugcaaaccugacagugaa

SEQ ID NO: 1710261 - RNA, 19 nt, Homo sapiens
  misc_RNA (1)...(19): siRNA sense strand
ccaagaaccaccuaaagga

SEQ ID NO: 1710262 - RNA, 19 nt, Homo sapiens
  misc_RNA (1)...(19): siRNA sense strand
aaucaccucuggcuucuug

SEQ ID NO: 1710263 - RNA, 19 nt, Homo sapiens
  misc_RNA (1)...(19): siRNA sense strand
gcugauuacucauccuaga

SEQ ID NO: 1710264 - RNA, 19 nt, Homo sapiens
  misc_RNA (1)...(19): siRNA sense strand
ccaauuccaugcugguguu

SEQ ID NO: 1710265 - RNA, 19 nt, Homo sapiens
  misc_RNA (1)...(19): siRNA sense strand
acccagagcugcacucaga

SEQ ID NO: 1710266 - RNA, 19 nt, Homo sapiens
  misc_RNA (1)...(19): siRNA sense strand
ggaaccagagcacugauga

SEQ ID NO: 1710267 - RNA, 19 nt, Homo sapiens
  misc_RNA (1)...(19): siRNA sense strand
gagaagaggcugggaguca

SEQ ID NO: 1710268 - RNA, 19 nt, Homo sapiens
  misc_RNA (1)...(19): siRNA sense strand
ggaacuacacuuucagcuu

SEQ ID NO: 1710269 - RNA, 19 nt, Homo sapiens
  misc_RNA (1)...(19): siRNA sense strand
caccauacccaguuauaaa

SEQ ID NO: 1710270 - RNA, 19 nt, Homo sapiens
  misc_RNA (1)...(19): siRNA sense strand
acucagaccugcuguaucu

SEQ ID NO: 1710271 - RNA, 19 nt, Homo sapiens
  misc_RNA (1)...(19): siRNA sense strand
gcacucagaccugcuguau

SEQ ID NO: 1710272 - RNA, 19 nt, Homo sapiens
  misc_RNA (1)...(19): siRNA sense strand
gcuaccaacucuacuacug

SEQ ID NO: 1710273 - RNA, 19 nt, Homo sapiens
  misc_RNA (1)...(19): siRNA sense strand
uaagagaagagaagauuuc

SEQ ID NO: 1710274 - RNA, 19 nt, Homo sapiens
  misc_RNA (1)...(19): siRNA sense strand
gaacuuaaggggccucuaa

SEQ ID NO: 1710275 - RNA, 19 nt, Homo sapiens
  misc_RNA (1)...(19): siRNA sense strand
ccaccuauagccaagauaa

SEQ ID NO: 1710276 - RNA, 19 nt, Homo sapiens
  misc_RNA (1)...(19): siRNA sense strand
gagaagccuguaccuguuu

SEQ ID NO: 1710277 - RNA, 19 nt, Homo sapiens
  misc_RNA (1)...(19): siRNA sense strand
ggagcuaccaacucuacua

SEQ ID NO: 1710278 - RNA, 19 nt, Homo sapiens
  misc_RNA (1)...(19): siRNA sense strand
ucagcaccauacccaguua

SEQ ID NO: 1710279 - RNA, 19 nt, Homo sapiens
  misc_RNA (1)...(19): siRNA sense strand
gaguggagcguguuauaug

SEQ ID NO: 1710280 - RNA, 19 nt, Homo sapiens
  misc_RNA (1)...(19): siRNA sense strand
ggaguuggccugagaucug

SEQ ID NO: 1710281 - RNA, 19 nt, Homo sapiens
  misc_RNA (1)...(19): siRNA sense strand
agucaacacugucacaugu

SEQ ID NO: 1710282 - RNA, 19 nt, Homo sapiens
  misc_RNA (1)...(19): siRNA sense strand
cagagggucuugcuacuac

SEQ ID NO: 1710283 - RNA, 19 nt, Homo sapiens
  misc_RNA (1)...(19): siRNA sense strand
gacacagcauucuaaagug

SEQ ID NO: 1710284 - RNA, 19 nt, Homo sapiens
  misc_RNA (1)...(19): siRNA sense strand
uagaagggaugugcauuca

SEQ ID NO: 1710285 - RNA, 19 nt, Homo sapiens
  misc_RNA (1)...(19): siRNA sense strand
gaugagaggaaccugcaaa

SEQ ID NO: 1710286 - RNA, 19 nt, Homo sapiens
  misc_RNA (1)...(19): siRNA sense strand
aagaaggagacuacacuua

SEQ ID NO: 1710287 - RNA, 19 nt, Homo sapiens
  misc_RNA (1)...(19): siRNA sense strand
gcaagaaggagacuacacu

SEQ ID NO: 1710288 - RNA, 19 nt, Homo sapiens
  misc_RNA (1)...(19): siRNA sense strand
aagcacugaugaugauaaa

SEQ ID NO: 1710289 - RNA, 19 nt, Homo sapiens
  misc_RNA (1)...(19): siRNA sense strand
gcuauugugucaccucagu

SEQ ID NO: 1710290 - RNA, 19 nt, Homo sapiens
  misc_RNA (1)...(19): siRNA sense strand
uaacccugccuaagaauga

SEQ ID NO: 1710291 - RNA, 19 nt, Homo sapiens
  misc_RNA (1)...(19): siRNA sense strand
gagagaguguccagauaac

SEQ ID NO: 1710292 - RNA, 19 nt, Homo sapiens
  misc_RNA (1)...(19): siRNA sense strand
ugaaugacuccaacgaauu

SEQ ID NO: 1710293 - RNA, 19 nt, Homo sapiens
  misc_RNA (1)...(19): siRNA sense strand
cuccaggccuguaugaauu

SEQ ID NO: 1710294 - RNA, 19 nt, Homo sapiens
  misc_RNA (1)...(19): siRNA sense strand
gcagaugauuugggcuuuc

SEQ ID NO: 1710295 - RNA, 19 nt, Homo sapiens
  misc_RNA (1)...(19): siRNA sense strand
ucaacacugucacauguca

SEQ ID NO: 1710296 - RNA, 19 nt, Homo sapiens
  misc_RNA (1)...(19): siRNA sense strand
ggagaugcaggguguuaga

SEQ ID NO: 1710297 - RNA, 19 nt, Homo sapiens
  misc_RNA (1)...(19): siRNA sense strand
cacaaggcgauuacaauuu

SEQ ID NO: 1710298 - RNA, 19 nt, Homo sapiens
  misc_RNA (1)...(19): siRNA sense strand
gaauuagguggucugacua

SEQ ID NO: 1710299 - RNA, 19 nt, Homo sapiens
  misc_RNA (1)...(19): siRNA sense strand
gaauucaaagugauuguag

SEQ ID NO: 1710300 - RNA, 19 nt, Homo sapiens
  misc_RNA (1)...(19): siRNA sense strand
gugaguggagcguguuaua

SEQ ID NO: 1710301 - RNA, 19 nt, Homo sapiens
  misc_RNA (1)...(19): siRNA sense strand
acaagggaauagucagcua

SEQ ID NO: 1710302 - RNA, 19 nt, Homo sapiens
  misc_RNA (1)...(19): siRNA sense strand
cagcuugacuguaguagac

SEQ ID NO: 1710303 - RNA, 19 nt, Homo sapiens
  misc_RNA (1)...(19): siRNA sense strand
agugcaaccugaaauauca

SEQ ID NO: 1710304 - RNA, 19 nt, Homo sapiens
  misc_RNA (1)...(19): siRNA sense strand
ugaaagugaccgaugcaaa

SEQ ID NO: 1710305 - RNA, 19 nt, Homo sapiens
  misc_RNA (1)...(19): siRNA sense strand
gaaggagacuacacuuacc

SEQ ID NO: 1710306 - RNA, 19 nt, Homo sapiens
  misc_RNA (1)...(19): siRNA sense strand
ugauggagcuaccaacucu

SEQ ID NO: 1710307 - RNA, 19 nt, Homo sapiens
  misc_RNA (1)...(19): siRNA sense strand
ccugggaacuacacuuuca

SEQ ID NO: 1710308 - RNA, 19 nt, Homo sapiens
  misc_RNA (1)...(19): siRNA sense strand
augcauauguucuccaaga

SEQ ID NO: 1710309 - RNA, 19 nt, Homo sapiens
  misc_RNA (1)...(19): siRNA sense strand
gguaucugcuggagagagu

SEQ ID NO: 1710310 - RNA, 19 nt, Homo sapiens
  misc_RNA (1)...(19): siRNA sense strand
ugacuguaguagacucuga

SEQ ID NO: 1710311 - RNA, 19 nt, Homo sapiens
  misc_RNA (1)...(19): siRNA sense strand
agaaccaccuaaaggagaa

SEQ ID NO: 1710312 - RNA, 19 nt, Homo sapiens
  misc_RNA (1)...(19): siRNA sense strand
ucccagauccucaaacuau

SEQ ID NO: 1710313 - RNA, 19 nt, Homo sapiens
  misc_RNA (1)...(19): siRNA sense strand
uaucauugcuaccuuuguc

SEQ ID NO: 1710314 - RNA, 19 nt, Homo sapiens
  misc_RNA (1)...(19): siRNA sense strand
gauauucagagccuuggaa

SEQ ID NO: 1710315 - RNA, 19 nt, Homo sapiens
  misc_RNA (1)...(19): siRNA sense strand
agagugagcugcggaagca

SEQ ID NO: 1710316 - RNA, 19 nt, Homo sapiens
  misc_RNA (1)...(19): siRNA sense strand
caacgucagucagcuaacu

SEQ ID NO: 1710317 - RNA, 19 nt, Homo sapiens
  misc_RNA (1)...(19): siRNA sense strand
ucaguaccauugggaagaa

SEQ ID NO: 1710318 - RNA, 19 nt, Homo sapiens
  misc_RNA (1)...(19): siRNA sense strand
ccacuucuacagucauuga

SEQ ID NO: 1710319 - RNA, 19 nt, Homo sapiens
  misc_RNA (1)...(19): siRNA sense strand
ccaaccacuucuacaguca

SEQ ID NO: 1710320 - RNA, 19 nt, Homo sapiens
  misc_RNA (1)...(19): siRNA sense strand
gggugcagcucgagaaugc

SEQ ID NO: 1710321 - RNA, 19 nt, Homo sapiens
  misc_RNA (1)...(19): siRNA sense strand
gcagacagaugcacuauua

SEQ ID NO: 1710322 - RNA, 19 nt, Homo sapiens
  misc_RNA (1)...(19): siRNA sense strand
gaauaaagauccaacaaga

SEQ ID NO: 1710323 - RNA, 19 nt, Homo sapiens
  misc_RNA (1)...(19): siRNA sense strand
ggagacaaauuggauauua

SEQ ID NO: 1710324 - RNA, 19 nt, Homo sapiens
  misc_RNA (1)...(19): siRNA sense strand
ggaagaaguucgacaacaa

SEQ ID NO: 1710325 - RNA, 19 nt, Homo sapiens
  misc_RNA (1)...(19): siRNA sense strand
gacaaggacugguacuaua

SEQ ID NO: 1710326 - RNA, 19 nt, Homo sapiens
  misc_RNA (1)...(19): siRNA sense strand
gagccuaucuauuggaauu

SEQ ID NO: 1710327 - RNA, 19 nt, Homo sapiens
  misc_RNA (1)...(19): siRNA sense strand
gauaucaaauucaccauca

SEQ ID NO: 1710328 - RNA, 19 nt, Homo sapiens
  misc_RNA (1)...(19): siRNA sense strand
caaauucaccaucaaguuu

SEQ ID NO: 1710329 - RNA, 19 nt, Homo sapiens
  misc_RNA (1)...(19): siRNA sense strand
caucaaguuucaagaauuc

SEQ ID NO: 1710330 - RNA, 19 nt, Homo sapiens
  misc_RNA (1)...(19): siRNA sense strand
ggucuagaauuucagaaga

SEQ ID NO: 1710331 - RNA, 19 nt, Homo sapiens
  misc_RNA (1)...(19): siRNA sense strand
ggacaaggacugguacuau

SEQ ID NO: 1710332 - RNA, 19 nt, Homo sapiens
  misc_RNA (1)...(19): siRNA sense strand
caugaaaguuggacaagau

SEQ ID NO: 1710333 - RNA, 19 nt, Homo sapiens
  misc_RNA (1)...(19): siRNA sense strand
agaccaagauaucaaauuc

SEQ ID NO: 1710334 - RNA, 19 nt, Homo sapiens
  misc_RNA (1)...(19): siRNA sense strand
acuagaagcugguacaaau

SEQ ID NO: 1710335 - RNA, 19 nt, Homo sapiens
  misc_RNA (1)...(19): siRNA sense strand
gaucaaccaggaauaaaga

SEQ ID NO: 1710336 - RNA, 19 nt, Homo sapiens
  misc_RNA (1)...(19): siRNA sense strand
gacauuaucaucccgcuaa

SEQ ID NO: 1710337 - RNA, 19 nt, Homo sapiens
  misc_RNA (1)...(19): siRNA sense strand
aacaagacguccagaacua

SEQ ID NO: 1710338 - RNA, 19 nt, Homo sapiens
  misc_RNA (1)...(19): siRNA sense strand
acagauaggagacaaauug

SEQ ID NO: 1710339 - RNA, 19 nt, Homo sapiens
  misc_RNA (1)...(19): siRNA sense strand
ccaucaaguuucaagaauu

SEQ ID NO: 1710340 - RNA, 19 nt, Homo sapiens
  misc_RNA (1)...(19): siRNA sense strand
cggcgaacauuuacuacaa

SEQ ID NO: 1710341 - RNA, 19 nt, Homo sapiens
  misc_RNA (1)...(19): siRNA sense strand
gaugcacuauuaagaagga

SEQ ID NO: 1710342 - RNA, 19 nt, Homo sapiens
  misc_RNA (1)...(19): siRNA sense strand
ugaagauccucaugaaagu

SEQ ID NO: 1710343 - RNA, 19 nt, Homo sapiens
  misc_RNA (1)...(19): siRNA sense strand
ggaauaaagauccaacaag

SEQ ID NO: 1710344 - RNA, 19 nt, Homo sapiens
  misc_RNA (1)...(19): siRNA sense strand
gaagggacuccguguggaa

SEQ ID NO: 1710345 - RNA, 19 nt, Homo sapiens
  misc_RNA (1)...(19): siRNA sense strand
gauaggagacaaauuggau

SEQ ID NO: 1710346 - RNA, 19 nt, Homo sapiens
  misc_RNA (1)...(19): siRNA sense strand
guuccgaaguggccuuauu

SEQ ID NO: 1710347 - RNA, 19 nt, Homo sapiens
  misc_RNA (1)...(19): siRNA sense strand
gacagaugcacuauuaaga

SEQ ID NO: 1710348 - RNA, 19 nt, Homo sapiens
  misc_RNA (1)...(19): siRNA sense strand
ggccuuauuugcagggauu

SEQ ID NO: 1710349 - RNA, 19 nt, Homo sapiens
  misc_RNA (1)...(19): siRNA sense strand
gaagaaguucgacaacaag

SEQ ID NO: 1710350 - RNA, 19 nt, Homo sapiens
  misc_RNA (1)...(19): siRNA sense strand
cagaugcacuauuaagaag

SEQ ID NO: 1710351 - RNA, 19 nt, Homo sapiens
  misc_RNA (1)...(19): siRNA sense strand
ccaaaucgauaguuuuaga

SEQ ID NO: 1710352 - RNA, 19 nt, Homo sapiens
  misc_RNA (1)...(19): siRNA sense strand
ucagagcccagugacauua

SEQ ID NO: 1710353 - RNA, 19 nt, Homo sapiens
  misc_RNA (1)...(19): siRNA sense strand
cgaaguggccuuauuugca

SEQ ID NO: 1710354 - RNA, 19 nt, Homo sapiens
  misc_RNA (1)...(19): siRNA sense strand
ucaaauucaccaucaaguu

SEQ ID NO: 1710355 - RNA, 19 nt, Homo sapiens
  misc_RNA (1)...(19): siRNA sense strand
gaacuagaagcugguacaa

SEQ ID NO: 1710356 - RNA, 19 nt, Homo sapiens
  misc_RNA (1)...(19): siRNA sense strand
gggacuccguguggaagua

SEQ ID NO: 1710357 - RNA, 19 nt, Homo sapiens
  misc_RNA (1)...(19): siRNA sense strand
acagaugcacuauuaagaa

SEQ ID NO: 1710358 - RNA, 19 nt, Homo sapiens
  misc_RNA (1)...(19): siRNA sense strand
caaaccagaccaagauauc

SEQ ID NO: 1710359 - RNA, 19 nt, Homo sapiens
  misc_RNA (1)...(19): siRNA sense strand
gaagauccucaugaaaguu

SEQ ID NO: 1710360 - RNA, 19 nt, Homo sapiens
  misc_RNA (1)...(19): siRNA sense strand
gacaagagccaugaagauc

SEQ ID NO: 1710361 - RNA, 19 nt, Homo sapiens
  misc_RNA (1)...(19): siRNA sense strand
gucuagaauuucagaagaa

SEQ ID NO: 1710362 - RNA, 19 nt, Homo sapiens
  misc_RNA (1)...(19): siRNA sense strand
ggaauuccucgaacuccaa

SEQ ID NO: 1710363 - RNA, 19 nt, Homo sapiens
  misc_RNA (1)...(19): siRNA sense strand
gaagcugguacaaauggaa

SEQ ID NO: 1710364 - RNA, 19 nt, Homo sapiens
  misc_RNA (1)...(19): siRNA sense strand
caacaagacguccagaacu

SEQ ID NO: 1710365 - RNA, 19 nt, Homo sapiens
  misc_RNA (1)...(19): siRNA sense strand
ccucuggggucuagaauuu

SEQ ID NO: 1710366 - RNA, 19 nt, Homo sapiens
  misc_RNA (1)...(19): siRNA sense strand
gaaaguuggacaagaugca

SEQ ID NO: 1710367 - RNA, 19 nt, Homo sapiens
  misc_RNA (1)...(19): siRNA sense strand
ggaucaaccaggaauaaag

SEQ ID NO: 1710368 - RNA, 19 nt, Homo sapiens
  misc_RNA (1)...(19): siRNA sense strand
ucaugaaaguuggacaaga

SEQ ID NO: 1710369 - RNA, 19 nt, Homo sapiens
  misc_RNA (1)...(19): siRNA sense strand
uaaagaccaagcagacaga

SEQ ID NO: 1710370 - RNA, 19 nt, Homo sapiens
  misc_RNA (1)...(19): siRNA sense strand
guacaaauggaagaaguuc

SEQ ID NO: 1710371 - RNA, 19 nt, Homo sapiens
  misc_RNA (1)...(19): siRNA sense strand
caagcagacagaugcacua

SEQ ID NO: 1710372 - RNA, 19 nt, Homo sapiens
  misc_RNA (1)...(19): siRNA sense strand
ccacagauaggagacaaau

SEQ ID NO: 1710373 - RNA, 19 nt, Homo sapiens
  misc_RNA (1)...(19): siRNA sense strand
ccaaaccagaccaagauau

SEQ ID NO: 1710374 - RNA, 19 nt, Homo sapiens
  misc_RNA (1)...(19): siRNA sense strand
gauaaagaccaagcagaca

SEQ ID NO: 1710375 - RNA, 19 nt, Homo sapiens
  misc_RNA (1)...(19): siRNA sense strand
gccaaaccagaccaagaua

SEQ ID NO: 1710376 - RNA, 19 nt, Homo sapiens
  misc_RNA (1)...(19): siRNA sense strand
caagagccaugaagauccu

SEQ ID NO: 1710377 - RNA, 19 nt, Homo sapiens
  misc_RNA (1)...(19): siRNA sense strand
agacaagagccaugaagau

SEQ ID NO: 1710378 - RNA, 19 nt, Homo sapiens
  misc_RNA (1)...(19): siRNA sense strand
caccaucaaguuucaagaa

SEQ ID NO: 1710379 - RNA, 19 nt, Homo sapiens
  misc_RNA (1)...(19): siRNA sense strand
uggaagaaguucgacaaca

SEQ ID NO: 1710380 - RNA, 19 nt, Homo sapiens
  misc_RNA (1)...(19): siRNA sense strand
caagacguccagaacuaga

SEQ ID NO: 1710381 - RNA, 19 nt, Homo sapiens
  misc_RNA (1)...(19): siRNA sense strand
cuacaucaaaugggucuuu

SEQ ID NO: 1710382 - RNA, 19 nt, Homo sapiens
  misc_RNA (1)...(19): siRNA sense strand
cagaccaagauaucaaauu

SEQ ID NO: 1710383 - RNA, 19 nt, Homo sapiens
  misc_RNA (1)...(19): siRNA sense strand
ccaaauccagguucuagca

SEQ ID NO: 1710384 - RNA, 19 nt, Homo sapiens
  misc_RNA (1)...(19): siRNA sense strand
gguacaaauggaagaaguu

SEQ ID NO: 1710385 - RNA, 19 nt, Homo sapiens
  misc_RNA (1)...(19): siRNA sense strand
gaugcaaguucugcuggau

SEQ ID NO: 1710386 - RNA, 19 nt, Homo sapiens
  misc_RNA (1)...(19): siRNA sense strand
ggacaagaugcaaguucug

SEQ ID NO: 1710387 - RNA, 19 nt, Homo sapiens
  misc_RNA (1)...(19): siRNA sense strand
cagacaagagccaugaaga

SEQ ID NO: 1710388 - RNA, 19 nt, Homo sapiens
  misc_RNA (1)...(19): siRNA sense strand
gaauuccucgaacuccaaa

SEQ ID NO: 1710389 - RNA, 19 nt, Homo sapiens
  misc_RNA (1)...(19): siRNA sense strand
gaccaagauaucaaauuca

SEQ ID NO: 1710390 - RNA, 19 nt, Homo sapiens
  misc_RNA (1)...(19): siRNA sense strand
ccucaacugugccaaacca

SEQ ID NO: 1710391 - RNA, 19 nt, Homo sapiens
  misc_RNA (1)...(19): siRNA sense strand
agacagaugcacuauuaag

SEQ ID NO: 1710392 - RNA, 19 nt, Homo sapiens
  misc_RNA (1)...(19): siRNA sense strand
ggcgaacauuuacuacaag

SEQ ID NO: 1710393 - RNA, 19 nt, Homo sapiens
  misc_RNA (1)...(19): siRNA sense strand
gcaacaacaacggcucaga

SEQ ID NO: 1710394 - RNA, 19 nt, Homo sapiens
  misc_RNA (1)...(19): siRNA sense strand
ugcaaguucugcuggauca

SEQ ID NO: 1710395 - RNA, 19 nt, Homo sapiens
  misc_RNA (1)...(19): siRNA sense strand
ccaacaagacguccagaac

SEQ ID NO: 1710396 - RNA, 19 nt, Homo sapiens
  misc_RNA (1)...(19): siRNA sense strand
acaaauggaagaaguucga

SEQ ID NO: 1710397 - RNA, 19 nt, Homo sapiens
  misc_RNA (1)...(19): siRNA sense strand
uggacaagaugcaaguucu

SEQ ID NO: 1710398 - RNA, 19 nt, Homo sapiens
  misc_RNA (1)...(19): siRNA sense strand
gcagggauugcuucaggau

SEQ ID NO: 1710399 - RNA, 19 nt, Homo sapiens
  misc_RNA (1)...(19): siRNA sense strand
gccccaaaguggacucuaa

SEQ ID NO: 1710400 - RNA, 19 nt, Homo sapiens
  misc_RNA (1)...(19): siRNA sense strand
uaggagacaaauuggauau

SEQ ID NO: 1710401 - RNA, 19 nt, Homo sapiens
  misc_RNA (1)...(19): siRNA sense strand
aaaguggacucuaaaacug

SEQ ID NO: 1710402 - RNA, 19 nt, Homo sapiens
  misc_RNA (1)...(19): siRNA sense strand
gugccaaaccagaccaaga

SEQ ID NO: 1710403 - RNA, 19 nt, Homo sapiens
  misc_RNA (1)...(19): siRNA sense strand
gugguccucuugcugaagu

SEQ ID NO: 1710404 - RNA, 19 nt, Homo sapiens
  misc_RNA (1)...(19): siRNA sense strand
gaauuucagaagaacaaag

SEQ ID NO: 1710405 - RNA, 19 nt, Homo sapiens
  misc_RNA (1)...(19): siRNA sense strand
uggagggccuggauaacca

SEQ ID NO: 1710406 - RNA, 19 nt, Homo sapiens
  misc_RNA (1)...(19): siRNA sense strand
gaacuccaaauuucuaccu

SEQ ID NO: 1710407 - RNA, 19 nt, Homo sapiens
  misc_RNA (1)...(19): siRNA sense strand
aaaccagaccaagauauca

SEQ ID NO: 1710408 - RNA, 19 nt, Homo sapiens
  misc_RNA (1)...(19): siRNA sense strand
uagaagcugguacaaaugg

SEQ ID NO: 1710409 - RNA, 19 nt, Homo sapiens
  misc_RNA (1)...(19): siRNA sense strand
accaucaaguuucaagaau

SEQ ID NO: 1710410 - RNA, 19 nt, Homo sapiens
  misc_RNA (1)...(19): siRNA sense strand
ugagagggcuugcaaagac

SEQ ID NO: 1710411 - RNA, 19 nt, Homo sapiens
  misc_RNA (1)...(19): siRNA sense strand
gacaccacguucaccaaga

SEQ ID NO: 1710412 - RNA, 19 nt, Homo sapiens
  misc_RNA (1)...(19): siRNA sense strand
caacgugaaccuggcauau

SEQ ID NO: 1710413 - RNA, 19 nt, Homo sapiens
  misc_RNA (1)...(19): siRNA sense strand
acgccucgcucaggaagua

SEQ ID NO: 1710414 - RNA, 19 nt, Homo sapiens
  misc_RNA (1)...(19): siRNA sense strand
acaccacguucaccaagau

SEQ ID NO: 1710415 - RNA, 19 nt, Homo sapiens
  misc_RNA (1)...(19): siRNA sense strand
gcugagagggcuugcaaag

SEQ ID NO: 1710416 - RNA, 19 nt, Homo sapiens
  misc_RNA (1)...(19): siRNA sense strand
ggccugccguaccacacua

SEQ ID NO: 1710417 - RNA, 19 nt, Homo sapiens
  misc_RNA (1)...(19): siRNA sense strand
cagcugagagggcuugcaa

SEQ ID NO: 1710418 - RNA, 19 nt, Homo sapiens
  misc_RNA (1)...(19): siRNA sense strand
ccacuuucgugcaguacca

SEQ ID NO: 1710419 - RNA, 19 nt, Homo sapiens
  misc_RNA (1)...(19): siRNA sense strand
uguccucgcccuacauuga

SEQ ID NO: 1710420 - RNA, 19 nt, Homo sapiens
  misc_RNA (1)...(19): siRNA sense strand
cagaaggacaccacguuca

SEQ ID NO: 1710421 - RNA, 19 nt, Homo sapiens
  misc_RNA (1)...(19): siRNA sense strand
ggccaccuaugaccaguac

SEQ ID NO: 1710422 - RNA, 19 nt, Homo sapiens
  misc_RNA (1)...(19): siRNA sense strand
ccaacgugaaccuggcaua

SEQ ID NO: 1710423 - RNA, 19 nt, Homo sapiens
  misc_RNA (1)...(19): siRNA sense strand
acgugaaccuggcauaucu

SEQ ID NO: 1710424 - RNA, 19 nt, Homo sapiens
  misc_RNA (1)...(19): siRNA sense strand
guacccaccggccaccuau

SEQ ID NO: 1710425 - RNA, 19 nt, Homo sapiens
  misc_RNA (1)...(19): siRNA sense strand
gaggaggccguggucauca

SEQ ID NO: 1710426 - RNA, 19 nt, Homo sapiens
  misc_RNA (1)...(19): siRNA sense strand
ugagagggcuugcaaagac

SEQ ID NO: 1710427 - RNA, 19 nt, Homo sapiens
  misc_RNA (1)...(19): siRNA sense strand
gacaccacguucaccaaga

SEQ ID NO: 1710428 - RNA, 19 nt, Homo sapiens
  misc_RNA (1)...(19): siRNA sense strand
caacgugaaccuggcauau

SEQ ID NO: 1710429 - RNA, 19 nt, Homo sapiens
  misc_RNA (1)...(19): siRNA sense strand
acgccucgcucaggaagua

SEQ ID NO: 1710430 - RNA, 19 nt, Homo sapiens
  misc_RNA (1)...(19): siRNA sense strand
acaccacguucaccaagau

SEQ ID NO: 1710431 - RNA, 19 nt, Homo sapiens
  misc_RNA (1)...(19): siRNA sense strand
gcugagagggcuugcaaag

SEQ ID NO: 1710432 - RNA, 19 nt, Homo sapiens
  misc_RNA (1)...(19): siRNA sense strand
ggccugccguaccacacua

SEQ ID NO: 1710433 - RNA, 19 nt, Homo sapiens
  misc_RNA (1)...(19): siRNA sense strand
cagcugagagggcuugcaa

SEQ ID NO: 1710434 - RNA, 19 nt, Homo sapiens
  misc_RNA (1)...(19): siRNA sense strand
cagaaggacaccacguuca

SEQ ID NO: 1710435 - RNA, 19 nt, Homo sapiens
  misc_RNA (1)...(19): siRNA sense strand
ccaacgugaaccuggcaua

SEQ ID NO: 1710436 - RNA, 19 nt, Homo sapiens
  misc_RNA (1)...(19): siRNA sense strand
acgugaaccuggcauaucu

SEQ ID NO: 1710437 - RNA, 19 nt, Homo sapiens
  misc_RNA (1)...(19): siRNA sense strand
gaggaggccguggucauca

SEQ ID NO: 1710438 - RNA, 19 nt, Homo sapiens
  misc_RNA (1)...(19): siRNA sense strand
gagcuacagugccaaauuu

SEQ ID NO: 1710439 - RNA, 19 nt, Homo sapiens
  misc_RNA (1)...(19): siRNA sense strand
caaauuugcuuccuguuuc

SEQ ID NO: 1710440 - RNA, 19 nt, Homo sapiens
  misc_RNA (1)...(19): siRNA sense strand
ucacggauguuccugauga

SEQ ID NO: 1710441 - RNA, 19 nt, Homo sapiens
  misc_RNA (1)...(19): siRNA sense strand
ggguaucggugaugagcua

SEQ ID NO: 1710442 - RNA, 19 nt, Homo sapiens
  misc_RNA (1)...(19): siRNA sense strand
ccaaauuugcuuccuguuu

SEQ ID NO: 1710443 - RNA, 19 nt, Homo sapiens
  misc_RNA (1)...(19): siRNA sense strand
caauccaucuguugaggaa

SEQ ID NO: 1710444 - RNA, 19 nt, Homo sapiens
  misc_RNA (1)...(19): siRNA sense strand
ggacuuggcaacaggguau

SEQ ID NO: 1710445 - RNA, 19 nt, Homo sapiens
  misc_RNA (1)...(19): siRNA sense strand
ugaagcggcuggaagagau

SEQ ID NO: 1710446 - RNA, 19 nt, Homo sapiens
  misc_RNA (1)...(19): siRNA sense strand
ucucaaggcugccguacug

SEQ ID NO: 1710447 - RNA, 19 nt, Homo sapiens
  misc_RNA (1)...(19): siRNA sense strand
ggccuacgcugugucuuga

SEQ ID NO: 1710448 - RNA, 19 nt, Homo sapiens
  misc_RNA (1)...(19): siRNA sense strand
gcacauggacuuggcaaca

SEQ ID NO: 1710449 - RNA, 19 nt, Homo sapiens
  misc_RNA (1)...(19): siRNA sense strand
ggcaggaugucagguggua

SEQ ID NO: 1710450 - RNA, 19 nt, Homo sapiens
  misc_RNA (1)...(19): siRNA sense strand
caucaucaccuacuacaca

SEQ ID NO: 1710451 - RNA, 19 nt, Homo sapiens
  misc_RNA (1)...(19): siRNA sense strand
gaugacauacagccuauca

SEQ ID NO: 1710452 - RNA, 19 nt, Homo sapiens
  misc_RNA (1)...(19): siRNA sense strand
ggacaucgugcgggaggua

SEQ ID NO: 1710453 - RNA, 19 nt, Homo sapiens
  misc_RNA (1)...(19): siRNA sense strand
gcaacaggguaucggugau

SEQ ID NO: 1710454 - RNA, 19 nt, Homo sapiens
  misc_RNA (1)...(19): siRNA sense strand
gaggcaauccaucuguuga

SEQ ID NO: 1710455 - RNA, 19 nt, Homo sapiens
  misc_RNA (1)...(19): siRNA sense strand
ggccagguauggugugaag

SEQ ID NO: 1710456 - RNA, 19 nt, Homo sapiens
  misc_RNA (1)...(19): siRNA sense strand
ccagcagaguucccaagga

SEQ ID NO: 1710457 - RNA, 19 nt, Homo sapiens
  misc_RNA (1)...(19): siRNA sense strand
gaugagcuacagugccaaa

SEQ ID NO: 1710458 - RNA, 19 nt, Homo sapiens
  misc_RNA (1)...(19): siRNA sense strand
gggccuacgcugugucuug

SEQ ID NO: 1710459 - RNA, 19 nt, Homo sapiens
  misc_RNA (1)...(19): siRNA sense strand
ucccaggaguggccaggua

SEQ ID NO: 1710460 - RNA, 19 nt, Homo sapiens
  misc_RNA (1)...(19): siRNA sense strand
gcguggaagccaucaaaga

SEQ ID NO: 1710461 - RNA, 19 nt, Homo sapiens
  misc_RNA (1)...(19): siRNA sense strand
ugagcuacagugccaaauu

SEQ ID NO: 1710462 - RNA, 19 nt, Homo sapiens
  misc_RNA (1)...(19): siRNA sense strand
cugaugacauacagccuau

SEQ ID NO: 1710463 - RNA, 19 nt, Homo sapiens
  misc_RNA (1)...(19): siRNA sense strand
caacaggguaucggugaug

SEQ ID NO: 1710464 - RNA, 19 nt, Homo sapiens
  misc_RNA (1)...(19): siRNA sense strand
acugcgggcuccugaguga

SEQ ID NO: 1710465 - RNA, 19 nt, Homo sapiens
  misc_RNA (1)...(19): siRNA sense strand
gagguggcauuggcguaug

SEQ ID NO: 1710466 - RNA, 19 nt, Homo sapiens
  misc_RNA (1)...(19): siRNA sense strand
cuacuuccacccacuacuu

SEQ ID NO: 1710467 - RNA, 19 nt, Homo sapiens
  misc_RNA (1)...(19): siRNA sense strand
gcugaggcccuugguggaa

SEQ ID NO: 1710468 - RNA, 19 nt, Homo sapiens
  misc_RNA (1)...(19): siRNA sense strand
gugugaagcggcuggaaga

SEQ ID NO: 1710469 - RNA, 19 nt, Homo sapiens
  misc_RNA (1)...(19): siRNA sense strand
gugaagcggcuggaagaga

SEQ ID NO: 1710470 - RNA, 19 nt, Homo sapiens
  misc_RNA (1)...(19): siRNA sense strand
gugcugacaucaucaucac

SEQ ID NO: 1710471 - RNA, 19 nt, Homo sapiens
  misc_RNA (1)...(19): siRNA sense strand
ugucacggauguuccugau

SEQ ID NO: 1710472 - RNA, 19 nt, Homo sapiens
  misc_RNA (1)...(19): siRNA sense strand
gggaugcagcuaagucaag

SEQ ID NO: 1710473 - RNA, 19 nt, Homo sapiens
  misc_RNA (1)...(19): siRNA sense strand
cgcugugucuugaucuuug

SEQ ID NO: 1710474 - RNA, 19 nt, Homo sapiens
  misc_RNA (1)...(19): siRNA sense strand
ugaggcaauccaucuguug

SEQ ID NO: 1710475 - RNA, 19 nt, Homo sapiens
  misc_RNA (1)...(19): siRNA sense strand
aaauuugcuuccuguuucu

SEQ ID NO: 1710476 - RNA, 19 nt, Homo sapiens
  misc_RNA (1)...(19): siRNA sense strand
ccugauggcacauggacuu

SEQ ID NO: 1710477 - RNA, 19 nt, Homo sapiens
  misc_RNA (1)...(19): siRNA sense strand
ccaacgagauccagaguga

SEQ ID NO: 1710478 - RNA, 19 nt, Homo sapiens
  misc_RNA (1)...(19): siRNA sense strand
gaaccaaggcaacuacaaa

SEQ ID NO: 1710479 - RNA, 19 nt, Homo sapiens
  misc_RNA (1)...(19): siRNA sense strand
ggauggcucuguuaacuuc

SEQ ID NO: 1710480 - RNA, 19 nt, Homo sapiens
  misc_RNA (1)...(19): siRNA sense strand
gaacauugacggcgaauac

SEQ ID NO: 1710481 - RNA, 19 nt, Homo sapiens
  misc_RNA (1)...(19): siRNA sense strand
acaaggaccuggagcacaa

SEQ ID NO: 1710482 - RNA, 19 nt, Homo sapiens
  misc_RNA (1)...(19): siRNA sense strand
caagagaguucauuuaccu

SEQ ID NO: 1710483 - RNA, 19 nt, Homo sapiens
  misc_RNA (1)...(19): siRNA sense strand
ucaagaaaguggugaugau

SEQ ID NO: 1710484 - RNA, 19 nt, Homo sapiens
  misc_RNA (1)...(19): siRNA sense strand
gcaaggguuugggaacauu

SEQ ID NO: 1710485 - RNA, 19 nt, Homo sapiens
  misc_RNA (1)...(19): siRNA sense strand
gaacaccaaccgccucaug

SEQ ID NO: 1710486 - RNA, 19 nt, Homo sapiens
  misc_RNA (1)...(19): siRNA sense strand
aagggaggcuggugguaua

SEQ ID NO: 1710487 - RNA, 19 nt, Homo sapiens
  misc_RNA (1)...(19): siRNA sense strand
ucacgcagcucuacaugca

SEQ ID NO: 1710488 - RNA, 19 nt, Homo sapiens
  misc_RNA (1)...(19): siRNA sense strand
caugaugucuacacaggaa

SEQ ID NO: 1710489 - RNA, 19 nt, Homo sapiens
  misc_RNA (1)...(19): siRNA sense strand
ccugagagcgaguauuaua

SEQ ID NO: 1710490 - RNA, 19 nt, Homo sapiens
  misc_RNA (1)...(19): siRNA sense strand
aaggagagccgcaacauga

SEQ ID NO: 1710491 - RNA, 19 nt, Homo sapiens
  misc_RNA (1)...(19): siRNA sense strand
caaugcgggugacuccuuu

SEQ ID NO: 1710492 - RNA, 19 nt, Homo sapiens
  misc_RNA (1)...(19): siRNA sense strand
gcaccuacaccuucauugu

SEQ ID NO: 1710493 - RNA, 19 nt, Homo sapiens
  misc_RNA (1)...(19): siRNA sense strand
gaagggaggcuggugguau

SEQ ID NO: 1710494 - RNA, 19 nt, Homo sapiens
  misc_RNA (1)...(19): siRNA sense strand
aaccugagagcgaguauua

SEQ ID NO: 1710495 - RNA, 19 nt, Homo sapiens
  misc_RNA (1)...(19): siRNA sense strand
gaaccagacagccgacaug

SEQ ID NO: 1710496 - RNA, 19 nt, Homo sapiens
  misc_RNA (1)...(19): siRNA sense strand
ucaaccagaucucuaccaa

SEQ ID NO: 1710497 - RNA, 19 nt, Homo sapiens
  misc_RNA (1)...(19): siRNA sense strand
ucaccacccuggacagaga

SEQ ID NO: 1710498 - RNA, 19 nt, Homo sapiens
  misc_RNA (1)...(19): siRNA sense strand
ucaccagccucccaucuuc

SEQ ID NO: 1710499 - RNA, 19 nt, Homo sapiens
  misc_RNA (1)...(19): siRNA sense strand
agaaaguggugaugaugau

SEQ ID NO: 1710500 - RNA, 19 nt, Homo sapiens
  misc_RNA (1)...(19): siRNA sense strand
gcgggugacuccuuuacau

SEQ ID NO: 1710501 - RNA, 19 nt, Homo sapiens
  misc_RNA (1)...(19): siRNA sense strand
caaggagccugaggugcuu

SEQ ID NO: 1710502 - RNA, 19 nt, Homo sapiens
  misc_RNA (1)...(19): siRNA sense strand
gcaaugcgggugacuccuu

SEQ ID NO: 1710503 - RNA, 19 nt, Homo sapiens
  misc_RNA (1)...(19): siRNA sense strand
ggaacugggagacguacaa

SEQ ID NO: 1710504 - RNA, 19 nt, Homo sapiens
  misc_RNA (1)...(19): siRNA sense strand
acagagaucaugaugucua

SEQ ID NO: 1710505 - RNA, 19 nt, Homo sapiens
  misc_RNA (1)...(19): siRNA sense strand
gcacaacggcaagcaguuc

SEQ ID NO: 1710506 - RNA, 19 nt, Homo sapiens
  misc_RNA (1)...(19): siRNA sense strand
caagaaaguggugaugaug

SEQ ID NO: 1710507 - RNA, 19 nt, Homo sapiens
  misc_RNA (1)...(19): siRNA sense strand
gccaagagaguucauuuac

SEQ ID NO: 1710508 - RNA, 19 nt, Homo sapiens
  misc_RNA (1)...(19): siRNA sense strand
cgccaagagaguucauuua

SEQ ID NO: 1710509 - RNA, 19 nt, Homo sapiens
  misc_RNA (1)...(19): siRNA sense strand
gcaaggagagccgcaacau

SEQ ID NO: 1710510 - RNA, 19 nt, Homo sapiens
  misc_RNA (1)...(19): siRNA sense strand
gaaacugugcccacuacca

SEQ ID NO: 1710511 - RNA, 19 nt, Homo sapiens
  misc_RNA (1)...(19): siRNA sense strand
caaggagagccgcaacaug

SEQ ID NO: 1710512 - RNA, 19 nt, Homo sapiens
  misc_RNA (1)...(19): siRNA sense strand
ccgaggaggcucuuacuca

SEQ ID NO: 1710513 - RNA, 19 nt, Homo sapiens
  misc_RNA (1)...(19): siRNA sense strand
agagaguucauuuaccuaa

SEQ ID NO: 1710514 - RNA, 19 nt, Homo sapiens
  misc_RNA (1)...(19): siRNA sense strand
gauccagagugaccagaac

SEQ ID NO: 1710515 - RNA, 19 nt, Homo sapiens
  misc_RNA (1)...(19): siRNA sense strand
gcccacaaccaaucagaga

SEQ ID NO: 1710516 - RNA, 19 nt, Homo sapiens
  misc_RNA (1)...(19): siRNA sense strand
cuuacucacucaagaaagu

SEQ ID NO: 1710517 - RNA, 19 nt, Homo sapiens
  misc_RNA (1)...(19): siRNA sense strand
uggagaaccgagugcauaa

SEQ ID NO: 1710518 - RNA, 19 nt, Homo sapiens
  misc_RNA (1)...(19): siRNA sense strand
caaccaaucagagaucauc

SEQ ID NO: 1710519 - RNA, 19 nt, Homo sapiens
  misc_RNA (1)...(19): siRNA sense strand
ccacaaccaaucagagauc

SEQ ID NO: 1710520 - RNA, 19 nt, Homo sapiens
  misc_RNA (1)...(19): siRNA sense strand
ugaagcugcugcgcaagga

SEQ ID NO: 1710521 - RNA, 19 nt, Homo sapiens
  misc_RNA (1)...(19): siRNA sense strand
aagaaaguggugaugauga

SEQ ID NO: 1710522 - RNA, 19 nt, Homo sapiens
  misc_RNA (1)...(19): siRNA sense strand
caggacaagugcaccuaca

SEQ ID NO: 1710523 - RNA, 19 nt, Homo sapiens
  misc_RNA (1)...(19): siRNA sense strand
ugacgaaccaaggcaacua

SEQ ID NO: 1710524 - RNA, 19 nt, Homo sapiens
  misc_RNA (1)...(19): siRNA sense strand
aagcaaggguuugggaaca

SEQ ID NO: 1710525 - RNA, 19 nt, Homo sapiens
  misc_RNA (1)...(19): siRNA sense strand
ggaccuggagcacaaguac

SEQ ID NO: 1710526 - RNA, 19 nt, Homo sapiens
  misc_RNA (1)...(19): siRNA sense strand
cagagaucaugaugucuac

SEQ ID NO: 1710527 - RNA, 19 nt, Homo sapiens
  misc_RNA (1)...(19): siRNA sense strand
gagagcgaguauuauaagc

SEQ ID NO: 1710528 - RNA, 19 nt, Homo sapiens
  misc_RNA (1)...(19): siRNA sense strand
guuaacuucuucaggaacu

SEQ ID NO: 1710529 - RNA, 19 nt, Homo sapiens
  misc_RNA (1)...(19): siRNA sense strand
ccaagagaguucauuuacc

SEQ ID NO: 1710530 - RNA, 19 nt, Homo sapiens
  misc_RNA (1)...(19): siRNA sense strand
ugagagcgaguauuauaag

SEQ ID NO: 1710531 - RNA, 19 nt, Homo sapiens
  misc_RNA (1)...(19): siRNA sense strand
gaaccugagagcgaguauu

SEQ ID NO: 1710532 - RNA, 19 nt, Homo sapiens
  misc_RNA (1)...(19): siRNA sense strand
gaucaucgcgcagcuugag

SEQ ID NO: 1710533 - RNA, 19 nt, Homo sapiens
  misc_RNA (1)...(19): siRNA sense strand
ggaggcuggugguauaacg

SEQ ID NO: 1710534 - RNA, 19 nt, Homo sapiens
  misc_RNA (1)...(19): siRNA sense strand
cugagagcgaguauuauaa

SEQ ID NO: 1710535 - RNA, 19 nt, Homo sapiens
  misc_RNA (1)...(19): siRNA sense strand
gaacugggagacguacaag

SEQ ID NO: 1710536 - RNA, 19 nt, Homo sapiens
  misc_RNA (1)...(19): siRNA sense strand
gaaaguggugaugaugauc

SEQ ID NO: 1710537 - RNA, 19 nt, Homo sapiens
  misc_RNA (1)...(19): siRNA sense strand
ggaacauugacggcgaaua

SEQ ID NO: 1710538 - RNA, 19 nt, Homo sapiens
  misc_RNA (1)...(19): siRNA sense strand
ucaggaacugggagacgua

SEQ ID NO: 1710539 - RNA, 19 nt, Homo sapiens
  misc_RNA (1)...(19): siRNA sense strand
cuggagaaccgagugcaua

SEQ ID NO: 1710540 - RNA, 19 nt, Homo sapiens
  misc_RNA (1)...(19): siRNA sense strand
ccaaggcaacuacaaacuc

SEQ ID NO: 1710541 - RNA, 19 nt, Homo sapiens
  misc_RNA (1)...(19): siRNA sense strand
gacguacaagcaaggguuu

SEQ ID NO: 1710542 - RNA, 19 nt, Homo sapiens
  misc_RNA (1)...(19): siRNA sense strand
cacaaccaaucagagauca

SEQ ID NO: 1710543 - RNA, 19 nt, Homo sapiens
  misc_RNA (1)...(19): siRNA sense strand
ggagucuacugggcugagu

SEQ ID NO: 1710544 - RNA, 19 nt, Homo sapiens
  misc_RNA (1)...(19): siRNA sense strand
agagugaccagaaccugaa

SEQ ID NO: 1710545 - RNA, 19 nt, Homo sapiens
  misc_RNA (1)...(19): siRNA sense strand
caccuacaccuucauugug

SEQ ID NO: 1710546 - RNA, 19 nt, Homo sapiens
  misc_RNA (1)...(19): siRNA sense strand
caggaaacugugcccacua

SEQ ID NO: 1710547 - RNA, 19 nt, Homo sapiens
  misc_RNA (1)...(19): siRNA sense strand
gagaaccgagugcauaagc

SEQ ID NO: 1710548 - RNA, 19 nt, Homo sapiens
  misc_RNA (1)...(19): siRNA sense strand
cuggauggcucuguuaacu

SEQ ID NO: 1710549 - RNA, 19 nt, Homo sapiens
  misc_RNA (1)...(19): siRNA sense strand
aggaaacugugcccacuac

SEQ ID NO: 1710550 - RNA, 19 nt, Homo sapiens
  misc_RNA (1)...(19): siRNA sense strand
ccaauguucuggcccguua

SEQ ID NO: 1710551 - RNA, 19 nt, Homo sapiens
  misc_RNA (1)...(19): siRNA sense strand
ucucuaaccacgccuauua

SEQ ID NO: 1710552 - RNA, 19 nt, Homo sapiens
  misc_RNA (1)...(19): siRNA sense strand
ggaagaaggagaaccugaa

SEQ ID NO: 1710553 - RNA, 19 nt, Homo sapiens
  misc_RNA (1)...(19): siRNA sense strand
gccaguaugugaccgagaa

SEQ ID NO: 1710554 - RNA, 19 nt, Homo sapiens
  misc_RNA (1)...(19): siRNA sense strand
ggacaaauggcgagacuac

SEQ ID NO: 1710555 - RNA, 19 nt, Homo sapiens
  misc_RNA (1)...(19): siRNA sense strand
agaagaaggagcugucuga

SEQ ID NO: 1710556 - RNA, 19 nt, Homo sapiens
  misc_RNA (1)...(19): siRNA sense strand
gaagaaggagaaccugaag

SEQ ID NO: 1710557 - RNA, 19 nt, Homo sapiens
  misc_RNA (1)...(19): siRNA sense strand
ccaagcggcugcaguccau

SEQ ID NO: 1710558 - RNA, 19 nt, Homo sapiens
  misc_RNA (1)...(19): siRNA sense strand
uugaagcgcugccaguaug

SEQ ID NO: 1710559 - RNA, 19 nt, Homo sapiens
  misc_RNA (1)...(19): siRNA sense strand
ugagugaccaccacaucua

SEQ ID NO: 1710560 - RNA, 19 nt, Homo sapiens
  misc_RNA (1)...(19): siRNA sense strand
ggccaugcuugcacucaga

SEQ ID NO: 1710561 - RNA, 19 nt, Homo sapiens
  misc_RNA (1)...(19): siRNA sense strand
ggugcuggcugcugucuac

SEQ ID NO: 1710562 - RNA, 19 nt, Homo sapiens
  misc_RNA (1)...(19): siRNA sense strand
ccugagauccucccugaug

SEQ ID NO: 1710563 - RNA, 19 nt, Homo sapiens
  misc_RNA (1)...(19): siRNA sense strand
gcugugcccaguacaagaa

SEQ ID NO: 1710564 - RNA, 19 nt, Homo sapiens
  misc_RNA (1)...(19): siRNA sense strand
gcaggaggaguaugucaag

SEQ ID NO: 1710565 - RNA, 19 nt, Homo sapiens
  misc_RNA (1)...(19): siRNA sense strand
guugugugcugaagauugg

SEQ ID NO: 1710566 - RNA, 19 nt, Homo sapiens
  misc_RNA (1)...(19): siRNA sense strand
ccucagcccucgccaucau

SEQ ID NO: 1710567 - RNA, 19 nt, Homo sapiens
  misc_RNA (1)...(19): siRNA sense strand
ggaggaggcguccaucaac

SEQ ID NO: 1710568 - RNA, 19 nt, Homo sapiens
  misc_RNA (1)...(19): siRNA sense strand
augagacacucuaccagaa

SEQ ID NO: 1710569 - RNA, 19 nt, Homo sapiens
  misc_RNA (1)...(19): siRNA sense strand
ucuacaaggcucugaguga

SEQ ID NO: 1710570 - RNA, 19 nt, Homo sapiens
  misc_RNA (1)...(19): siRNA sense strand
ggcguugugugcugaagau

SEQ ID NO: 1710571 - RNA, 19 nt, Homo sapiens
  misc_RNA (1)...(19): siRNA sense strand
gcuggcugcugucuacaag

SEQ ID NO: 1710572 - RNA, 19 nt, Homo sapiens
  misc_RNA (1)...(19): siRNA sense strand
ugaguccacugggagcauu

SEQ ID NO: 1710573 - RNA, 19 nt, Homo sapiens
  misc_RNA (1)...(19): siRNA sense strand
ccgagaacaccgaggagaa

SEQ ID NO: 1710574 - RNA, 19 nt, Homo sapiens
  misc_RNA (1)...(19): siRNA sense strand
gaggaggaggcguccauca

SEQ ID NO: 1710575 - RNA, 19 nt, Homo sapiens
  misc_RNA (1)...(19): siRNA sense strand
cccaaguuaucaaauccaa

SEQ ID NO: 1710576 - RNA, 19 nt, Homo sapiens
  misc_RNA (1)...(19): siRNA sense strand
cauggaaaaugccaauguu

SEQ ID NO: 1710577 - RNA, 19 nt, Homo sapiens
  misc_RNA (1)...(19): siRNA sense strand
ucacugggaucaccuuccu

SEQ ID NO: 1710578 - RNA, 19 nt, Homo sapiens
  misc_RNA (1)...(19): siRNA sense strand
gggcaucaagguagacaag

SEQ ID NO: 1710579 - RNA, 19 nt, Homo sapiens
  misc_RNA (1)...(19): siRNA sense strand
gguuggaugggcugucuga

SEQ ID NO: 1710580 - RNA, 19 nt, Homo sapiens
  misc_RNA (1)...(19): siRNA sense strand
ccaauguucuggcccguua

SEQ ID NO: 1710581 - RNA, 19 nt, Homo sapiens
  misc_RNA (1)...(19): siRNA sense strand
ucucuaaccacgccuauua

SEQ ID NO: 1710582 - RNA, 19 nt, Homo sapiens
  misc_RNA (1)...(19): siRNA sense strand
ggaagaaggagaaccugaa

SEQ ID NO: 1710583 - RNA, 19 nt, Homo sapiens
  misc_RNA (1)...(19): siRNA sense strand
gccaguaugugaccgagaa

SEQ ID NO: 1710584 - RNA, 19 nt, Homo sapiens
  misc_RNA (1)...(19): siRNA sense strand
ggacaaauggcgagacuac

SEQ ID NO: 1710585 - RNA, 19 nt, Homo sapiens
  misc_RNA (1)...(19): siRNA sense strand
agaagaaggagcugucuga

SEQ ID NO: 1710586 - RNA, 19 nt, Homo sapiens
  misc_RNA (1)...(19): siRNA sense strand
gaagaaggagaaccugaag

SEQ ID NO: 1710587 - RNA, 19 nt, Homo sapiens
  misc_RNA (1)...(19): siRNA sense strand
ccaagcggcugcaguccau

SEQ ID NO: 1710588 - RNA, 19 nt, Homo sapiens
  misc_RNA (1)...(19): siRNA sense strand
uugaagcgcugccaguaug

SEQ ID NO: 1710589 - RNA, 19 nt, Homo sapiens
  misc_RNA (1)...(19): siRNA sense strand
ugagugaccaccacaucua

SEQ ID NO: 1710590 - RNA, 19 nt, Homo sapiens
  misc_RNA (1)...(19): siRNA sense strand
ggccaugcuugcacucaga

SEQ ID NO: 1710591 - RNA, 19 nt, Homo sapiens
  misc_RNA (1)...(19): siRNA sense strand
ggugcuggcugcugucuac

SEQ ID NO: 1710592 - RNA, 19 nt, Homo sapiens
  misc_RNA (1)...(19): siRNA sense strand
ccugagauccucccugaug

SEQ ID NO: 1710593 - RNA, 19 nt, Homo sapiens
  misc_RNA (1)...(19): siRNA sense strand
gcugugcccaguacaagaa

SEQ ID NO: 1710594 - RNA, 19 nt, Homo sapiens
  misc_RNA (1)...(19): siRNA sense strand
gcaggaggaguaugucaag

SEQ ID NO: 1710595 - RNA, 19 nt, Homo sapiens
  misc_RNA (1)...(19): siRNA sense strand
guugugugcugaagauugg

SEQ ID NO: 1710596 - RNA, 19 nt, Homo sapiens
  misc_RNA (1)...(19): siRNA sense strand
ccucagcccucgccaucau

SEQ ID NO: 1710597 - RNA, 19 nt, Homo sapiens
  misc_RNA (1)...(19): siRNA sense strand
ggaggaggcguccaucaac

SEQ ID NO: 1710598 - RNA, 19 nt, Homo sapiens
  misc_RNA (1)...(19): siRNA sense strand
augagacacucuaccagaa

SEQ ID NO: 1710599 - RNA, 19 nt, Homo sapiens
  misc_RNA (1)...(19): siRNA sense strand
ucuacaaggcucugaguga

SEQ ID NO: 1710600 - RNA, 19 nt, Homo sapiens
  misc_RNA (1)...(19): siRNA sense strand
ggcguugugugcugaagau

SEQ ID NO: 1710601 - RNA, 19 nt, Homo sapiens
  misc_RNA (1)...(19): siRNA sense strand
gcuggcugcugucuacaag

SEQ ID NO: 1710602 - RNA, 19 nt, Homo sapiens
  misc_RNA (1)...(19): siRNA sense strand
ugaguccacugggagcauu

SEQ ID NO: 1710603 - RNA, 19 nt, Homo sapiens
  misc_RNA (1)...(19): siRNA sense strand
ccgagaacaccgaggagaa

SEQ ID NO: 1710604 - RNA, 19 nt, Homo sapiens
  misc_RNA (1)...(19): siRNA sense strand
gaggaggaggcguccauca

SEQ ID NO: 1710605 - RNA, 19 nt, Homo sapiens
  misc_RNA (1)...(19): siRNA sense strand
cccaaguuaucaaauccaa

SEQ ID NO: 1710606 - RNA, 19 nt, Homo sapiens
  misc_RNA (1)...(19): siRNA sense strand
cauggaaaaugccaauguu

SEQ ID NO: 1710607 - RNA, 19 nt, Homo sapiens
  misc_RNA (1)...(19): siRNA sense strand
ucacugggaucaccuuccu

SEQ ID NO: 1710608 - RNA, 19 nt, Homo sapiens
  misc_RNA (1)...(19): siRNA sense strand
gggcaucaagguagacaag

SEQ ID NO: 1710609 - RNA, 19 nt, Homo sapiens
  misc_RNA (1)...(19): siRNA sense strand
gguuggaugggcugucuga

SEQ ID NO: 1710610 - RNA, 19 nt, Homo sapiens
  misc_RNA (1)...(19): siRNA sense strand
ccaauguucuggcccguua

SEQ ID NO: 1710611 - RNA, 19 nt, Homo sapiens
  misc_RNA (1)...(19): siRNA sense strand
ucucuaaccacgccuauua

SEQ ID NO: 1710612 - RNA, 19 nt, Homo sapiens
  misc_RNA (1)...(19): siRNA sense strand
ggaagaaggagaaccugaa

SEQ ID NO: 1710613 - RNA, 19 nt, Homo sapiens
  misc_RNA (1)...(19): siRNA sense strand
gccaguaugugaccgagaa

SEQ ID NO: 1710614 - RNA, 19 nt, Homo sapiens
  misc_RNA (1)...(19): siRNA sense strand
ggacaaauggcgagacuac

SEQ ID NO: 1710615 - RNA, 19 nt, Homo sapiens
  misc_RNA (1)...(19): siRNA sense strand
agaagaaggagcugucuga

SEQ ID NO: 1710616 - RNA, 19 nt, Homo sapiens
  misc_RNA (1)...(19): siRNA sense strand
gaagaaggagaaccugaag

SEQ ID NO: 1710617 - RNA, 19 nt, Homo sapiens
  misc_RNA (1)...(19): siRNA sense strand
ccaagcggcugcaguccau

SEQ ID NO: 1710618 - RNA, 19 nt, Homo sapiens
  misc_RNA (1)...(19): siRNA sense strand
uugaagcgcugccaguaug

SEQ ID NO: 1710619 - RNA, 19 nt, Homo sapiens
  misc_RNA (1)...(19): siRNA sense strand
ugagugaccaccacaucua

SEQ ID NO: 1710620 - RNA, 19 nt, Homo sapiens
  misc_RNA (1)...(19): siRNA sense strand
ggccaugcuugcacucaga

SEQ ID NO: 1710621 - RNA, 19 nt, Homo sapiens
  misc_RNA (1)...(19): siRNA sense strand
ggugcuggcugcugucuac

SEQ ID NO: 1710622 - RNA, 19 nt, Homo sapiens
  misc_RNA (1)...(19): siRNA sense strand
ccugagauccucccugaug

SEQ ID NO: 1710623 - RNA, 19 nt, Homo sapiens
  misc_RNA (1)...(19): siRNA sense strand
gcugugcccaguacaagaa

SEQ ID NO: 1710624 - RNA, 19 nt, Homo sapiens
  misc_RNA (1)...(19): siRNA sense strand
gcaggaggaguaugucaag

SEQ ID NO: 1710625 - RNA, 19 nt, Homo sapiens
  misc_RNA (1)...(19): siRNA sense strand
guugugugcugaagauugg

SEQ ID NO: 1710626 - RNA, 19 nt, Homo sapiens
  misc_RNA (1)...(19): siRNA sense strand
ccucagcccucgccaucau

SEQ ID NO: 1710627 - RNA, 19 nt, Homo sapiens
  misc_RNA (1)...(19): siRNA sense strand
ggaggaggcguccaucaac

SEQ ID NO: 1710628 - RNA, 19 nt, Homo sapiens
  misc_RNA (1)...(19): siRNA sense strand
augagacacucuaccagaa

SEQ ID NO: 1710629 - RNA, 19 nt, Homo sapiens
  misc_RNA (1)...(19): siRNA sense strand
ucuacaaggcucugaguga

SEQ ID NO: 1710630 - RNA, 19 nt, Homo sapiens
  misc_RNA (1)...(19): siRNA sense strand
ggcguugugugcugaagau

SEQ ID NO: 1710631 - RNA, 19 nt, Homo sapiens
  misc_RNA (1)...(19): siRNA sense strand
gcuggcugcugucuacaag

SEQ ID NO: 1710632 - RNA, 19 nt, Homo sapiens
  misc_RNA (1)...(19): siRNA sense strand
ugaguccacugggagcauu

SEQ ID NO: 1710633 - RNA, 19 nt, Homo sapiens
  misc_RNA (1)...(19): siRNA sense strand
ccgagaacaccgaggagaa

SEQ ID NO: 1710634 - RNA, 19 nt, Homo sapiens
  misc_RNA (1)...(19): siRNA sense strand
gaggaggaggcguccauca

SEQ ID NO: 1710635 - RNA, 19 nt, Homo sapiens
  misc_RNA (1)...(19): siRNA sense strand
cccaaguuaucaaauccaa

SEQ ID NO: 1710636 - RNA, 19 nt, Homo sapiens
  misc_RNA (1)...(19): siRNA sense strand
cauggaaaaugccaauguu

SEQ ID NO: 1710637 - RNA, 19 nt, Homo sapiens
  misc_RNA (1)...(19): siRNA sense strand
ucacugggaucaccuuccu

SEQ ID NO: 1710638 - RNA, 19 nt, Homo sapiens
  misc_RNA (1)...(19): siRNA sense strand
gggcaucaagguagacaag

SEQ ID NO: 1710639 - RNA, 19 nt, Homo sapiens
  misc_RNA (1)...(19): siRNA sense strand
gguuggaugggcugucuga

SEQ ID NO: 1710640 - RNA, 19 nt, Homo sapiens
  misc_RNA (1)...(19): siRNA sense strand
gaagagaccauuccuguga

SEQ ID NO: 1710641 - RNA, 19 nt, Homo sapiens
  misc_RNA (1)...(19): siRNA sense strand
guacaaggauucucuucuu

SEQ ID NO: 1710642 - RNA, 19 nt, Homo sapiens
  misc_RNA (1)...(19): siRNA sense strand
ggaagaugcuggcuauuac

SEQ ID NO: 1710643 - RNA, 19 nt, Homo sapiens
  misc_RNA (1)...(19): siRNA sense strand
ggauaaagacaaugagaaa

SEQ ID NO: 1710644 - RNA, 19 nt, Homo sapiens
  misc_RNA (1)...(19): siRNA sense strand
ucacuggccuucuugguuu

SEQ ID NO: 1710645 - RNA, 19 nt, Homo sapiens
  misc_RNA (1)...(19): siRNA sense strand
gaaaugcuucuuacuguga

SEQ ID NO: 1710646 - RNA, 19 nt, Homo sapiens
  misc_RNA (1)...(19): siRNA sense strand
caacaucacuaggaguauu

SEQ ID NO: 1710647 - RNA, 19 nt, Homo sapiens
  misc_RNA (1)...(19): siRNA sense strand
gccagaagcugccgguuuc

SEQ ID NO: 1710648 - RNA, 19 nt, Homo sapiens
  misc_RNA (1)...(19): siRNA sense strand
gcuauggccucaucaucaa

SEQ ID NO: 1710649 - RNA, 19 nt, Homo sapiens
  misc_RNA (1)...(19): siRNA sense strand
gagaggauuugcacaugga

SEQ ID NO: 1710650 - RNA, 19 nt, Homo sapiens
  misc_RNA (1)...(19): siRNA sense strand
gcccugaccugagugaauu

SEQ ID NO: 1710651 - RNA, 19 nt, Homo sapiens
  misc_RNA (1)...(19): siRNA sense strand
gaccauuccugugaucauu

SEQ ID NO: 1710652 - RNA, 19 nt, Homo sapiens
  misc_RNA (1)...(19): siRNA sense strand
uacaaggauucucuucuuu

SEQ ID NO: 1710653 - RNA, 19 nt, Homo sapiens
  misc_RNA (1)...(19): siRNA sense strand
ucaauccuaucccaaguga

SEQ ID NO: 1710654 - RNA, 19 nt, Homo sapiens
  misc_RNA (1)...(19): siRNA sense strand
uggaagaugcuggcuauua

SEQ ID NO: 1710655 - RNA, 19 nt, Homo sapiens
  misc_RNA (1)...(19): siRNA sense strand
gaagaagagacacggaugu

SEQ ID NO: 1710656 - RNA, 19 nt, Homo sapiens
  misc_RNA (1)...(19): siRNA sense strand
gacugacaaucccguguaa

SEQ ID NO: 1710657 - RNA, 19 nt, Homo sapiens
  misc_RNA (1)...(19): siRNA sense strand
ccaaugacacccacauaga

SEQ ID NO: 1710658 - RNA, 19 nt, Homo sapiens
  misc_RNA (1)...(19): siRNA sense strand
gcaaacacagaacuggaaa

SEQ ID NO: 1710659 - RNA, 19 nt, Homo sapiens
  misc_RNA (1)...(19): siRNA sense strand
ucaagacuuucaauccuau

SEQ ID NO: 1710660 - RNA, 19 nt, Homo sapiens
  misc_RNA (1)...(19): siRNA sense strand
caauacaacaucacuagga

SEQ ID NO: 1710661 - RNA, 19 nt, Homo sapiens
  misc_RNA (1)...(19): siRNA sense strand
ggaaccggcacacccuuaa

SEQ ID NO: 1710662 - RNA, 19 nt, Homo sapiens
  misc_RNA (1)...(19): siRNA sense strand
ccuggaagaugcuggcuau

SEQ ID NO: 1710663 - RNA, 19 nt, Homo sapiens
  misc_RNA (1)...(19): siRNA sense strand
gcaccuacgucugcacuac

SEQ ID NO: 1710664 - RNA, 19 nt, Homo sapiens
  misc_RNA (1)...(19): siRNA sense strand
caagagaggauuugcacau

SEQ ID NO: 1710665 - RNA, 19 nt, Homo sapiens
  misc_RNA (1)...(19): siRNA sense strand
ugacaaaacugacgugaag

SEQ ID NO: 1710666 - RNA, 19 nt, Homo sapiens
  misc_RNA (1)...(19): siRNA sense strand
ggccagcaauacaacauca

SEQ ID NO: 1710667 - RNA, 19 nt, Homo sapiens
  misc_RNA (1)...(19): siRNA sense strand
gggaaccggcacacccuua

SEQ ID NO: 1710668 - RNA, 19 nt, Homo sapiens
  misc_RNA (1)...(19): siRNA sense strand
ccaggaauauucagaaaau

SEQ ID NO: 1710669 - RNA, 19 nt, Homo sapiens
  misc_RNA (1)...(19): siRNA sense strand
cgucugcacuacuagaaau

SEQ ID NO: 1710670 - RNA, 19 nt, Homo sapiens
  misc_RNA (1)...(19): siRNA sense strand
caucaagacuuucaauccu

SEQ ID NO: 1710671 - RNA, 19 nt, Homo sapiens
  misc_RNA (1)...(19): siRNA sense strand
caaggauucucuucuuuug

SEQ ID NO: 1710672 - RNA, 19 nt, Homo sapiens
  misc_RNA (1)...(19): siRNA sense strand
acacagaacuggaaaagca

SEQ ID NO: 1710673 - RNA, 19 nt, Homo sapiens
  misc_RNA (1)...(19): siRNA sense strand
uacaacaucacuaggagua

SEQ ID NO: 1710674 - RNA, 19 nt, Homo sapiens
  misc_RNA (1)...(19): siRNA sense strand
gcuuguacguguugguaau

SEQ ID NO: 1710675 - RNA, 19 nt, Homo sapiens
  misc_RNA (1)...(19): siRNA sense strand
cgccaggaauauucagaaa

SEQ ID NO: 1710676 - RNA, 19 nt, Homo sapiens
  misc_RNA (1)...(19): siRNA sense strand
cacagacggugcaaacaca

SEQ ID NO: 1710677 - RNA, 19 nt, Homo sapiens
  misc_RNA (1)...(19): siRNA sense strand
ccauugagcucagaguuuu

SEQ ID NO: 1710678 - RNA, 19 nt, Homo sapiens
  misc_RNA (1)...(19): siRNA sense strand
ggccaaugacacccacaua

SEQ ID NO: 1710679 - RNA, 19 nt, Homo sapiens
  misc_RNA (1)...(19): siRNA sense strand
gagcuacgcaucaagaaaa

SEQ ID NO: 1710680 - RNA, 19 nt, Homo sapiens
  misc_RNA (1)...(19): siRNA sense strand
caaccugacauggcauaaa

SEQ ID NO: 1710681 - RNA, 19 nt, Homo sapiens
  misc_RNA (1)...(19): siRNA sense strand
aagagaggauuugcacaug

SEQ ID NO: 1710682 - RNA, 19 nt, Homo sapiens
  misc_RNA (1)...(19): siRNA sense strand
acacuacgcaccacaguca

SEQ ID NO: 1710683 - RNA, 19 nt, Homo sapiens
  misc_RNA (1)...(19): siRNA sense strand
cauaauacccugaguuuuc

SEQ ID NO: 1710684 - RNA, 19 nt, Homo sapiens
  misc_RNA (1)...(19): siRNA sense strand
uccauaauacccugaguuu

SEQ ID NO: 1710685 - RNA, 19 nt, Homo sapiens
  misc_RNA (1)...(19): siRNA sense strand
ccauuccugugaucauuuc

SEQ ID NO: 1710686 - RNA, 19 nt, Homo sapiens
  misc_RNA (1)...(19): siRNA sense strand
acauugaagugccauugau

SEQ ID NO: 1710687 - RNA, 19 nt, Homo sapiens
  misc_RNA (1)...(19): siRNA sense strand
gcacacccuuaaccaccau

SEQ ID NO: 1710688 - RNA, 19 nt, Homo sapiens
  misc_RNA (1)...(19): siRNA sense strand
ucucauacccgcaaauuuu

SEQ ID NO: 1710689 - RNA, 19 nt, Homo sapiens
  misc_RNA (1)...(19): siRNA sense strand
agacugacaaucccgugua

SEQ ID NO: 1710690 - RNA, 19 nt, Homo sapiens
  misc_RNA (1)...(19): siRNA sense strand
ccugacauuugcccaugaa

SEQ ID NO: 1710691 - RNA, 19 nt, Homo sapiens
  misc_RNA (1)...(19): siRNA sense strand
gaccacucacuuacucgua

SEQ ID NO: 1710692 - RNA, 19 nt, Homo sapiens
  misc_RNA (1)...(19): siRNA sense strand
caucucauacccgcaaauu

SEQ ID NO: 1710693 - RNA, 19 nt, Homo sapiens
  misc_RNA (1)...(19): siRNA sense strand
caaugacacccacauagag

SEQ ID NO: 1710694 - RNA, 19 nt, Homo sapiens
  misc_RNA (1)...(19): siRNA sense strand
gccaaugacacccacauag

SEQ ID NO: 1710695 - RNA, 19 nt, Homo sapiens
  misc_RNA (1)...(19): siRNA sense strand
caugaaggccagcaauaca

SEQ ID NO: 1710696 - RNA, 19 nt, Homo sapiens
  misc_RNA (1)...(19): siRNA sense strand
gcgcuuguacguguuggua

SEQ ID NO: 1710697 - RNA, 19 nt, Homo sapiens
  misc_RNA (1)...(19): siRNA sense strand
gucaaccucugggguauua

SEQ ID NO: 1710698 - RNA, 19 nt, Homo sapiens
  misc_RNA (1)...(19): siRNA sense strand
gacggucccaggagaagaa

SEQ ID NO: 1710699 - RNA, 19 nt, Homo sapiens
  misc_RNA (1)...(19): siRNA sense strand
ugagaacuacauugaagug

SEQ ID NO: 1710700 - RNA, 19 nt, Homo sapiens
  misc_RNA (1)...(19): siRNA sense strand
aucaagacuuucaauccua

SEQ ID NO: 1710701 - RNA, 19 nt, Homo sapiens
  misc_RNA (1)...(19): siRNA sense strand
gauguggcccuggaagaug

SEQ ID NO: 1710702 - RNA, 19 nt, Homo sapiens
  misc_RNA (1)...(19): siRNA sense strand
gaagccuccuccacguucu

SEQ ID NO: 1710703 - RNA, 19 nt, Homo sapiens
  misc_RNA (1)...(19): siRNA sense strand
cagcaauacaacaucacua

SEQ ID NO: 1710704 - RNA, 19 nt, Homo sapiens
  misc_RNA (1)...(19): siRNA sense strand
cccaugaaggccagcaaua

SEQ ID NO: 1710705 - RNA, 19 nt, Homo sapiens
  misc_RNA (1)...(19): siRNA sense strand
gaaggccagcaauacaaca

SEQ ID NO: 1710706 - RNA, 19 nt, Homo sapiens
  misc_RNA (1)...(19): siRNA sense strand
aggauuugcacauggauuu

SEQ ID NO: 1710707 - RNA, 19 nt, Homo sapiens
  misc_RNA (1)...(19): siRNA sense strand
ggccacgccaggaauauuc

SEQ ID NO: 1710708 - RNA, 19 nt, Homo sapiens
  misc_RNA (1)...(19): siRNA sense strand
aguaugcccugaccugagu

SEQ ID NO: 1710709 - RNA, 19 nt, Homo sapiens
  misc_RNA (1)...(19): siRNA sense strand
gaggauuugcacauggauu

SEQ ID NO: 1710710 - RNA, 19 nt, Homo sapiens
  misc_RNA (1)...(19): siRNA sense strand
cauugaagugccauugauu

SEQ ID NO: 1710711 - RNA, 19 nt, Homo sapiens
  misc_RNA (1)...(19): siRNA sense strand
caggugcccuacugguugu

SEQ ID NO: 1710712 - RNA, 19 nt, Homo sapiens
  misc_RNA (1)...(19): siRNA sense strand
cacuaggaguauugagcua

SEQ ID NO: 1710713 - RNA, 19 nt, Homo sapiens
  misc_RNA (1)...(19): siRNA sense strand
uggauaaagacaaugagaa

SEQ ID NO: 1710714 - RNA, 19 nt, Homo sapiens
  misc_RNA (1)...(19): siRNA sense strand
ccacucacuuacucguaca

SEQ ID NO: 1710715 - RNA, 19 nt, Homo sapiens
  misc_RNA (1)...(19): siRNA sense strand
caucaucaagacuuucaau

SEQ ID NO: 1710716 - RNA, 19 nt, Homo sapiens
  misc_RNA (1)...(19): siRNA sense strand
aaccugacauggcauaaaa

SEQ ID NO: 1710717 - RNA, 19 nt, Homo sapiens
  misc_RNA (1)...(19): siRNA sense strand
ugagcuacgcaucaagaaa

SEQ ID NO: 1710718 - RNA, 19 nt, Homo sapiens
  misc_RNA (1)...(19): siRNA sense strand
gaagauucaaugguacaag

SEQ ID NO: 1710719 - RNA, 19 nt, Homo sapiens
  misc_RNA (1)...(19): siRNA sense strand
gggaauauggaugcacaga

SEQ ID NO: 1710720 - RNA, 19 nt, Homo sapiens
  misc_RNA (1)...(19): siRNA sense strand
cacuuucacuggccuucuu

SEQ ID NO: 1710721 - RNA, 19 nt, Homo sapiens
  misc_RNA (1)...(19): siRNA sense strand
ugugguggacggccaauga

SEQ ID NO: 1710722 - RNA, 19 nt, Homo sapiens
  misc_RNA (1)...(19): siRNA sense strand
ugccagaagcugccgguuu

SEQ ID NO: 1710723 - RNA, 19 nt, Homo sapiens
  misc_RNA (1)...(19): siRNA sense strand
gaagagaccauuccuguga

SEQ ID NO: 1710724 - RNA, 19 nt, Homo sapiens
  misc_RNA (1)...(19): siRNA sense strand
guacaaggauucucuucuu

SEQ ID NO: 1710725 - RNA, 19 nt, Homo sapiens
  misc_RNA (1)...(19): siRNA sense strand
ggaagaugcuggcuauuac

SEQ ID NO: 1710726 - RNA, 19 nt, Homo sapiens
  misc_RNA (1)...(19): siRNA sense strand
ggauaaagacaaugagaaa

SEQ ID NO: 1710727 - RNA, 19 nt, Homo sapiens
  misc_RNA (1)...(19): siRNA sense strand
ucacuggccuucuugguuu

SEQ ID NO: 1710728 - RNA, 19 nt, Homo sapiens
  misc_RNA (1)...(19): siRNA sense strand
gaaaugcuucuuacuguga

SEQ ID NO: 1710729 - RNA, 19 nt, Homo sapiens
  misc_RNA (1)...(19): siRNA sense strand
caacaucacuaggaguauu

SEQ ID NO: 1710730 - RNA, 19 nt, Homo sapiens
  misc_RNA (1)...(19): siRNA sense strand
gccagaagcugccgguuuc

SEQ ID NO: 1710731 - RNA, 19 nt, Homo sapiens
  misc_RNA (1)...(19): siRNA sense strand
gcuauggccucaucaucaa

SEQ ID NO: 1710732 - RNA, 19 nt, Homo sapiens
  misc_RNA (1)...(19): siRNA sense strand
gagaggauuugcacaugga

SEQ ID NO: 1710733 - RNA, 19 nt, Homo sapiens
  misc_RNA (1)...(19): siRNA sense strand
gcccugaccugagugaauu

SEQ ID NO: 1710734 - RNA, 19 nt, Homo sapiens
  misc_RNA (1)...(19): siRNA sense strand
gaccauuccugugaucauu

SEQ ID NO: 1710735 - RNA, 19 nt, Homo sapiens
  misc_RNA (1)...(19): siRNA sense strand
uacaaggauucucuucuuu

SEQ ID NO: 1710736 - RNA, 19 nt, Homo sapiens
  misc_RNA (1)...(19): siRNA sense strand
ucaauccuaucccaaguga

SEQ ID NO: 1710737 - RNA, 19 nt, Homo sapiens
  misc_RNA (1)...(19): siRNA sense strand
uggaagaugcuggcuauua

SEQ ID NO: 1710738 - RNA, 19 nt, Homo sapiens
  misc_RNA (1)...(19): siRNA sense strand
gaagaagagacacggaugu

SEQ ID NO: 1710739 - RNA, 19 nt, Homo sapiens
  misc_RNA (1)...(19): siRNA sense strand
gacugacaaucccguguaa

SEQ ID NO: 1710740 - RNA, 19 nt, Homo sapiens
  misc_RNA (1)...(19): siRNA sense strand
ccaaugacacccacauaga

SEQ ID NO: 1710741 - RNA, 19 nt, Homo sapiens
  misc_RNA (1)...(19): siRNA sense strand
gcaaacacagaacuggaaa

SEQ ID NO: 1710742 - RNA, 19 nt, Homo sapiens
  misc_RNA (1)...(19): siRNA sense strand
ucaagacuuucaauccuau

SEQ ID NO: 1710743 - RNA, 19 nt, Homo sapiens
  misc_RNA (1)...(19): siRNA sense strand
caauacaacaucacuagga

SEQ ID NO: 1710744 - RNA, 19 nt, Homo sapiens
  misc_RNA (1)...(19): siRNA sense strand
ggaaccggcacacccuuaa

SEQ ID NO: 1710745 - RNA, 19 nt, Homo sapiens
  misc_RNA (1)...(19): siRNA sense strand
ccuggaagaugcuggcuau

SEQ ID NO: 1710746 - RNA, 19 nt, Homo sapiens
  misc_RNA (1)...(19): siRNA sense strand
gcaccuacgucugcacuac

SEQ ID NO: 1710747 - RNA, 19 nt, Homo sapiens
  misc_RNA (1)...(19): siRNA sense strand
caagagaggauuugcacau

SEQ ID NO: 1710748 - RNA, 19 nt, Homo sapiens
  misc_RNA (1)...(19): siRNA sense strand
ugacaaaacugacgugaag

SEQ ID NO: 1710749 - RNA, 19 nt, Homo sapiens
  misc_RNA (1)...(19): siRNA sense strand
ggccagcaauacaacauca

SEQ ID NO: 1710750 - RNA, 19 nt, Homo sapiens
  misc_RNA (1)...(19): siRNA sense strand
gggaaccggcacacccuua

SEQ ID NO: 1710751 - RNA, 19 nt, Homo sapiens
  misc_RNA (1)...(19): siRNA sense strand
ccaggaauauucagaaaau

SEQ ID NO: 1710752 - RNA, 19 nt, Homo sapiens
  misc_RNA (1)...(19): siRNA sense strand
cgucugcacuacuagaaau

SEQ ID NO: 1710753 - RNA, 19 nt, Homo sapiens
  misc_RNA (1)...(19): siRNA sense strand
caucaagacuuucaauccu

SEQ ID NO: 1710754 - RNA, 19 nt, Homo sapiens
  misc_RNA (1)...(19): siRNA sense strand
caaggauucucuucuuuug

SEQ ID NO: 1710755 - RNA, 19 nt, Homo sapiens
  misc_RNA (1)...(19): siRNA sense strand
acacagaacuggaaaagca

SEQ ID NO: 1710756 - RNA, 19 nt, Homo sapiens
  misc_RNA (1)...(19): siRNA sense strand
uacaacaucacuaggagua

SEQ ID NO: 1710757 - RNA, 19 nt, Homo sapiens
  misc_RNA (1)...(19): siRNA sense strand
gcuuguacguguugguaau

SEQ ID NO: 1710758 - RNA, 19 nt, Homo sapiens
  misc_RNA (1)...(19): siRNA sense strand
cgccaggaauauucagaaa

SEQ ID NO: 1710759 - RNA, 19 nt, Homo sapiens
  misc_RNA (1)...(19): siRNA sense strand
cacagacggugcaaacaca

SEQ ID NO: 1710760 - RNA, 19 nt, Homo sapiens
  misc_RNA (1)...(19): siRNA sense strand
ccauugagcucagaguuuu

SEQ ID NO: 1710761 - RNA, 19 nt, Homo sapiens
  misc_RNA (1)...(19): siRNA sense strand
ggccaaugacacccacaua

SEQ ID NO: 1710762 - RNA, 19 nt, Homo sapiens
  misc_RNA (1)...(19): siRNA sense strand
gagcuacgcaucaagaaaa

SEQ ID NO: 1710763 - RNA, 19 nt, Homo sapiens
  misc_RNA (1)...(19): siRNA sense strand
caaccugacauggcauaaa

SEQ ID NO: 1710764 - RNA, 19 nt, Homo sapiens
  misc_RNA (1)...(19): siRNA sense strand
aagagaggauuugcacaug

SEQ ID NO: 1710765 - RNA, 19 nt, Homo sapiens
  misc_RNA (1)...(19): siRNA sense strand
acacuacgcaccacaguca

SEQ ID NO: 1710766 - RNA, 19 nt, Homo sapiens
  misc_RNA (1)...(19): siRNA sense strand
cauaauacccugaguuuuc

SEQ ID NO: 1710767 - RNA, 19 nt, Homo sapiens
  misc_RNA (1)...(19): siRNA sense strand
uccauaauacccugaguuu

SEQ ID NO: 1710768 - RNA, 19 nt, Homo sapiens
  misc_RNA (1)...(19): siRNA sense strand
ccauuccugugaucauuuc

SEQ ID NO: 1710769 - RNA, 19 nt, Homo sapiens
  misc_RNA (1)...(19): siRNA sense strand
acauugaagugccauugau

SEQ ID NO: 1710770 - RNA, 19 nt, Homo sapiens
  misc_RNA (1)...(19): siRNA sense strand
gcacacccuuaaccaccau

SEQ ID NO: 1710771 - RNA, 19 nt, Homo sapiens
  misc_RNA (1)...(19): siRNA sense strand
ucucauacccgcaaauuuu

SEQ ID NO: 1710772 - RNA, 19 nt, Homo sapiens
  misc_RNA (1)...(19): siRNA sense strand
agacugacaaucccgugua

SEQ ID NO: 1710773 - RNA, 19 nt, Homo sapiens
  misc_RNA (1)...(19): siRNA sense strand
ccugacauuugcccaugaa

SEQ ID NO: 1710774 - RNA, 19 nt, Homo sapiens
  misc_RNA (1)...(19): siRNA sense strand
gaccacucacuuacucgua

SEQ ID NO: 1710775 - RNA, 19 nt, Homo sapiens
  misc_RNA (1)...(19): siRNA sense strand
caucucauacccgcaaauu

SEQ ID NO: 1710776 - RNA, 19 nt, Homo sapiens
  misc_RNA (1)...(19): siRNA sense strand
caaugacacccacauagag

SEQ ID NO: 1710777 - RNA, 19 nt, Homo sapiens
  misc_RNA (1)...(19): siRNA sense strand
gccaaugacacccacauag

SEQ ID NO: 1710778 - RNA, 19 nt, Homo sapiens
  misc_RNA (1)...(19): siRNA sense strand
caugaaggccagcaauaca

SEQ ID NO: 1710779 - RNA, 19 nt, Homo sapiens
  misc_RNA (1)...(19): siRNA sense strand
gcgcuuguacguguuggua

SEQ ID NO: 1710780 - RNA, 19 nt, Homo sapiens
  misc_RNA (1)...(19): siRNA sense strand
gucaaccucugggguauua

SEQ ID NO: 1710781 - RNA, 19 nt, Homo sapiens
  misc_RNA (1)...(19): siRNA sense strand
gacggucccaggagaagaa

SEQ ID NO: 1710782 - RNA, 19 nt, Homo sapiens
  misc_RNA (1)...(19): siRNA sense strand
ugagaacuacauugaagug

SEQ ID NO: 1710783 - RNA, 19 nt, Homo sapiens
  misc_RNA (1)...(19): siRNA sense strand
aucaagacuuucaauccua

SEQ ID NO: 1710784 - RNA, 19 nt, Homo sapiens
  misc_RNA (1)...(19): siRNA sense strand
gauguggcccuggaagaug

SEQ ID NO: 1710785 - RNA, 19 nt, Homo sapiens
  misc_RNA (1)...(19): siRNA sense strand
gaagccuccuccacguucu

SEQ ID NO: 1710786 - RNA, 19 nt, Homo sapiens
  misc_RNA (1)...(19): siRNA sense strand
cagcaauacaacaucacua

SEQ ID NO: 1710787 - RNA, 19 nt, Homo sapiens
  misc_RNA (1)...(19): siRNA sense strand
cccaugaaggccagcaaua

SEQ ID NO: 1710788 - RNA, 19 nt, Homo sapiens
  misc_RNA (1)...(19): siRNA sense strand
gaaggccagcaauacaaca

SEQ ID NO: 1710789 - RNA, 19 nt, Homo sapiens
  misc_RNA (1)...(19): siRNA sense strand
aggauuugcacauggauuu

SEQ ID NO: 1710790 - RNA, 19 nt, Homo sapiens
  misc_RNA (1)...(19): siRNA sense strand
ggccacgccaggaauauuc

SEQ ID NO: 1710791 - RNA, 19 nt, Homo sapiens
  misc_RNA (1)...(19): siRNA sense strand
aguaugcccugaccugagu

SEQ ID NO: 1710792 - RNA, 19 nt, Homo sapiens
  misc_RNA (1)...(19): siRNA sense strand
gaggauuugcacauggauu

SEQ ID NO: 1710793 - RNA, 19 nt, Homo sapiens
  misc_RNA (1)...(19): siRNA sense strand
cauugaagugccauugauu

SEQ ID NO: 1710794 - RNA, 19 nt, Homo sapiens
  misc_RNA (1)...(19): siRNA sense strand
caggugcccuacugguugu

SEQ ID NO: 1710795 - RNA, 19 nt, Homo sapiens
  misc_RNA (1)...(19): siRNA sense strand
cacuaggaguauugagcua

SEQ ID NO: 1710796 - RNA, 19 nt, Homo sapiens
  misc_RNA (1)...(19): siRNA sense strand
uggauaaagacaaugagaa

SEQ ID NO: 1710797 - RNA, 19 nt, Homo sapiens
  misc_RNA (1)...(19): siRNA sense strand
ccacucacuuacucguaca

SEQ ID NO: 1710798 - RNA, 19 nt, Homo sapiens
  misc_RNA (1)...(19): siRNA sense strand
caucaucaagacuuucaau

SEQ ID NO: 1710799 - RNA, 19 nt, Homo sapiens
  misc_RNA (1)...(19): siRNA sense strand
aaccugacauggcauaaaa

SEQ ID NO: 1710800 - RNA, 19 nt, Homo sapiens
  misc_RNA (1)...(19): siRNA sense strand
ugagcuacgcaucaagaaa

SEQ ID NO: 1710801 - RNA, 19 nt, Homo sapiens
  misc_RNA (1)...(19): siRNA sense strand
gaagauucaaugguacaag

SEQ ID NO: 1710802 - RNA, 19 nt, Homo sapiens
  misc_RNA (1)...(19): siRNA sense strand
gggaauauggaugcacaga

SEQ ID NO: 1710803 - RNA, 19 nt, Homo sapiens
  misc_RNA (1)...(19): siRNA sense strand
cacuuucacuggccuucuu

SEQ ID NO: 1710804 - RNA, 19 nt, Homo sapiens
  misc_RNA (1)...(19): siRNA sense strand
ugugguggacggccaauga

SEQ ID NO: 1710805 - RNA, 19 nt, Homo sapiens
  misc_RNA (1)...(19): siRNA sense strand
ugccagaagcugccgguuu

SEQ ID NO: 1710806 - RNA, 19 nt, Homo sapiens
  misc_RNA (1)...(19): siRNA sense strand
gaacggagaugacaccuuu

SEQ ID NO: 1710807 - RNA, 19 nt, Homo sapiens
  misc_RNA (1)...(19): siRNA sense strand
ccaaauacuucucuaagga

SEQ ID NO: 1710808 - RNA, 19 nt, Homo sapiens
  misc_RNA (1)...(19): siRNA sense strand
ucaaauaccagagaagaua

SEQ ID NO: 1710809 - RNA, 19 nt, Homo sapiens
  misc_RNA (1)...(19): siRNA sense strand
gcagaggaaggaaauguuu

SEQ ID NO: 1710810 - RNA, 19 nt, Homo sapiens
  misc_RNA (1)...(19): siRNA sense strand
caaaaggccuucgaugaua

SEQ ID NO: 1710811 - RNA, 19 nt, Homo sapiens
  misc_RNA (1)...(19): siRNA sense strand
guaauaaacgggucacaga

SEQ ID NO: 1710812 - RNA, 19 nt, Homo sapiens
  misc_RNA (1)...(19): siRNA sense strand
ccaacuaccucugagaaga

SEQ ID NO: 1710813 - RNA, 19 nt, Homo sapiens
  misc_RNA (1)...(19): siRNA sense strand
cgaagaucaugcccaagaa

SEQ ID NO: 1710814 - RNA, 19 nt, Homo sapiens
  misc_RNA (1)...(19): siRNA sense strand
gaaaaucgucuauguguau

SEQ ID NO: 1710815 - RNA, 19 nt, Homo sapiens
  misc_RNA (1)...(19): siRNA sense strand
caucuuucaugcguaauaa

SEQ ID NO: 1710816 - RNA, 19 nt, Homo sapiens
  misc_RNA (1)...(19): siRNA sense strand
ggagaugacaccuuugcaa

SEQ ID NO: 1710817 - RNA, 19 nt, Homo sapiens
  misc_RNA (1)...(19): siRNA sense strand
cacgguuggugcucaaaua

SEQ ID NO: 1710818 - RNA, 19 nt, Homo sapiens
  misc_RNA (1)...(19): siRNA sense strand
caaauacuucucuaaggaa

SEQ ID NO: 1710819 - RNA, 19 nt, Homo sapiens
  misc_RNA (1)...(19): siRNA sense strand
caagaagccagcagaggaa

SEQ ID NO: 1710820 - RNA, 19 nt, Homo sapiens
  misc_RNA (1)...(19): siRNA sense strand
agaagcaucuggcccacaa

SEQ ID NO: 1710821 - RNA, 19 nt, Homo sapiens
  misc_RNA (1)...(19): siRNA sense strand
cugagaagauuaacaugau

SEQ ID NO: 1710822 - RNA, 19 nt, Homo sapiens
  misc_RNA (1)...(19): siRNA sense strand
gccaaauacuucucuaagg

SEQ ID NO: 1710823 - RNA, 19 nt, Homo sapiens
  misc_RNA (1)...(19): siRNA sense strand
gaaggaagugccagaagca

SEQ ID NO: 1710824 - RNA, 19 nt, Homo sapiens
  misc_RNA (1)...(19): siRNA sense strand
aguaugaggccaugacuaa

SEQ ID NO: 1710825 - RNA, 19 nt, Homo sapiens
  misc_RNA (1)...(19): siRNA sense strand
gcucaaauaccagagaaga

SEQ ID NO: 1710826 - RNA, 19 nt, Homo sapiens
  misc_RNA (1)...(19): siRNA sense strand
ggccaugacuaaacuaggu

SEQ ID NO: 1710827 - RNA, 19 nt, Homo sapiens
  misc_RNA (1)...(19): siRNA sense strand
guucaacguccucagauga

SEQ ID NO: 1710828 - RNA, 19 nt, Homo sapiens
  misc_RNA (1)...(19): siRNA sense strand
gaaaaccaacuaccucuga

SEQ ID NO: 1710829 - RNA, 19 nt, Homo sapiens
  misc_RNA (1)...(19): siRNA sense strand
ggaagugccagaagcaucu

SEQ ID NO: 1710830 - RNA, 19 nt, Homo sapiens
  misc_RNA (1)...(19): siRNA sense strand
gaaaguaugaggccaugac

SEQ ID NO: 1710831 - RNA, 19 nt, Homo sapiens
  misc_RNA (1)...(19): siRNA sense strand
ccgaagaucaugcccaaga

SEQ ID NO: 1710832 - RNA, 19 nt, Homo sapiens
  misc_RNA (1)...(19): siRNA sense strand
gagaaaaucgucuaugugu

SEQ ID NO: 1710833 - RNA, 19 nt, Homo sapiens
  misc_RNA (1)...(19): siRNA sense strand
gugcucaaauaccagagaa

SEQ ID NO: 1710834 - RNA, 19 nt, Homo sapiens
  misc_RNA (1)...(19): siRNA sense strand
auaaacgggucacagacuu

SEQ ID NO: 1710835 - RNA, 19 nt, Homo sapiens
  misc_RNA (1)...(19): siRNA sense strand
caacuaccucugagaagau

SEQ ID NO: 1710836 - RNA, 19 nt, Homo sapiens
  misc_RNA (1)...(19): siRNA sense strand
gaagccagcagaggaagga

SEQ ID NO: 1710837 - RNA, 19 nt, Homo sapiens
  misc_RNA (1)...(19): siRNA sense strand
gaagaucaugcccaagaag

SEQ ID NO: 1710838 - RNA, 19 nt, Homo sapiens
  misc_RNA (1)...(19): siRNA sense strand
gguucaacguccucagaug

SEQ ID NO: 1710839 - RNA, 19 nt, Homo sapiens
  misc_RNA (1)...(19): siRNA sense strand
ucccaucuuucaugcguaa

SEQ ID NO: 1710840 - RNA, 19 nt, Homo sapiens
  misc_RNA (1)...(19): siRNA sense strand
ucugagaagauuaacauga

SEQ ID NO: 1710841 - RNA, 19 nt, Homo sapiens
  misc_RNA (1)...(19): siRNA sense strand
ccaucuuucaugcguaaua

SEQ ID NO: 1710842 - RNA, 19 nt, Homo sapiens
  misc_RNA (1)...(19): siRNA sense strand
aaucgucuauguguauaug

SEQ ID NO: 1710843 - RNA, 19 nt, Homo sapiens
  misc_RNA (1)...(19): siRNA sense strand
cuaccucugagaagauuaa

SEQ ID NO: 1710844 - RNA, 19 nt, Homo sapiens
  misc_RNA (1)...(19): siRNA sense strand
cggagaaaaucgucuaugu

SEQ ID NO: 1710845 - RNA, 19 nt, Homo sapiens
  misc_RNA (1)...(19): siRNA sense strand
ccucugagaagauuaacau

SEQ ID NO: 1710846 - RNA, 19 nt, Homo sapiens
  misc_RNA (1)...(19): siRNA sense strand
cagcagaggaaggaaaugu

SEQ ID NO: 1710847 - RNA, 19 nt, Homo sapiens
  misc_RNA (1)...(19): siRNA sense strand
ggggaaugauuuugauaau

SEQ ID NO: 1710848 - RNA, 19 nt, Homo sapiens
  misc_RNA (1)...(19): siRNA sense strand
aggccauccucccaucuuu

SEQ ID NO: 1710849 - RNA, 19 nt, Homo sapiens
  misc_RNA (1)...(19): siRNA sense strand
gggaaugauuuugauaaug

SEQ ID NO: 1710850 - RNA, 19 nt, Homo sapiens
  misc_RNA (1)...(19): siRNA sense strand
caaauaccagagaagauac

SEQ ID NO: 1710851 - RNA, 19 nt, Homo sapiens
  misc_RNA (1)...(19): siRNA sense strand
agaaaaucgucuaugugua

SEQ ID NO: 1710852 - RNA, 19 nt, Homo sapiens
  misc_RNA (1)...(19): siRNA sense strand
guaugaggccaugacuaaa

SEQ ID NO: 1710853 - RNA, 19 nt, Homo sapiens
  misc_RNA (1)...(19): siRNA sense strand
gucuauguguauaugaaga

SEQ ID NO: 1710854 - RNA, 19 nt, Homo sapiens
  misc_RNA (1)...(19): siRNA sense strand
ucgucuauguguauaugaa

SEQ ID NO: 1710855 - RNA, 19 nt, Homo sapiens
  misc_RNA (1)...(19): siRNA sense strand
aaaaggccuucgaugauau

SEQ ID NO: 1710856 - RNA, 19 nt, Homo sapiens
  misc_RNA (1)...(19): siRNA sense strand
cuucgaugauauugccaaa

SEQ ID NO: 1710857 - RNA, 19 nt, Homo sapiens
  misc_RNA (1)...(19): siRNA sense strand
gaagagugggaaaagauga

SEQ ID NO: 1710858 - RNA, 19 nt, Homo sapiens
  misc_RNA (1)...(19): siRNA sense strand
gccauccucccaucuuuca

SEQ ID NO: 1710859 - RNA, 19 nt, Homo sapiens
  misc_RNA (1)...(19): siRNA sense strand
gaacggagaugacaccuuu

SEQ ID NO: 1710860 - RNA, 19 nt, Homo sapiens
  misc_RNA (1)...(19): siRNA sense strand
ccaaauacuucucuaagga

SEQ ID NO: 1710861 - RNA, 19 nt, Homo sapiens
  misc_RNA (1)...(19): siRNA sense strand
ucaaauaccagagaagaua

SEQ ID NO: 1710862 - RNA, 19 nt, Homo sapiens
  misc_RNA (1)...(19): siRNA sense strand
gcagaggaaggaaauguuu

SEQ ID NO: 1710863 - RNA, 19 nt, Homo sapiens
  misc_RNA (1)...(19): siRNA sense strand
caaaaggccuucgaugaua

SEQ ID NO: 1710864 - RNA, 19 nt, Homo sapiens
  misc_RNA (1)...(19): siRNA sense strand
guaauaaacgggucacaga

SEQ ID NO: 1710865 - RNA, 19 nt, Homo sapiens
  misc_RNA (1)...(19): siRNA sense strand
ccaacuaccucugagaaga

SEQ ID NO: 1710866 - RNA, 19 nt, Homo sapiens
  misc_RNA (1)...(19): siRNA sense strand
cgaagaucaugcccaagaa

SEQ ID NO: 1710867 - RNA, 19 nt, Homo sapiens
  misc_RNA (1)...(19): siRNA sense strand
gaaaaucgucuauguguau

SEQ ID NO: 1710868 - RNA, 19 nt, Homo sapiens
  misc_RNA (1)...(19): siRNA sense strand
caucuuucaugcguaauaa

SEQ ID NO: 1710869 - RNA, 19 nt, Homo sapiens
  misc_RNA (1)...(19): siRNA sense strand
ggagaugacaccuuugcaa

SEQ ID NO: 1710870 - RNA, 19 nt, Homo sapiens
  misc_RNA (1)...(19): siRNA sense strand
cacgguuggugcucaaaua

SEQ ID NO: 1710871 - RNA, 19 nt, Homo sapiens
  misc_RNA (1)...(19): siRNA sense strand
caaauacuucucuaaggaa

SEQ ID NO: 1710872 - RNA, 19 nt, Homo sapiens
  misc_RNA (1)...(19): siRNA sense strand
caagaagccagcagaggaa

SEQ ID NO: 1710873 - RNA, 19 nt, Homo sapiens
  misc_RNA (1)...(19): siRNA sense strand
agaagcaucuggcccacaa

SEQ ID NO: 1710874 - RNA, 19 nt, Homo sapiens
  misc_RNA (1)...(19): siRNA sense strand
cugagaagauuaacaugau

SEQ ID NO: 1710875 - RNA, 19 nt, Homo sapiens
  misc_RNA (1)...(19): siRNA sense strand
gccaaauacuucucuaagg

SEQ ID NO: 1710876 - RNA, 19 nt, Homo sapiens
  misc_RNA (1)...(19): siRNA sense strand
gaaggaagugccagaagca

SEQ ID NO: 1710877 - RNA, 19 nt, Homo sapiens
  misc_RNA (1)...(19): siRNA sense strand
aguaugaggccaugacuaa

SEQ ID NO: 1710878 - RNA, 19 nt, Homo sapiens
  misc_RNA (1)...(19): siRNA sense strand
gcucaaauaccagagaaga

SEQ ID NO: 1710879 - RNA, 19 nt, Homo sapiens
  misc_RNA (1)...(19): siRNA sense strand
ggccaugacuaaacuaggu

SEQ ID NO: 1710880 - RNA, 19 nt, Homo sapiens
  misc_RNA (1)...(19): siRNA sense strand
guucaacguccucagauga

SEQ ID NO: 1710881 - RNA, 19 nt, Homo sapiens
  misc_RNA (1)...(19): siRNA sense strand
gaaaaccaacuaccucuga

SEQ ID NO: 1710882 - RNA, 19 nt, Homo sapiens
  misc_RNA (1)...(19): siRNA sense strand
ggaagugccagaagcaucu

SEQ ID NO: 1710883 - RNA, 19 nt, Homo sapiens
  misc_RNA (1)...(19): siRNA sense strand
gaaaguaugaggccaugac

SEQ ID NO: 1710884 - RNA, 19 nt, Homo sapiens
  misc_RNA (1)...(19): siRNA sense strand
ccgaagaucaugcccaaga

SEQ ID NO: 1710885 - RNA, 19 nt, Homo sapiens
  misc_RNA (1)...(19): siRNA sense strand
gagaaaaucgucuaugugu

SEQ ID NO: 1710886 - RNA, 19 nt, Homo sapiens
  misc_RNA (1)...(19): siRNA sense strand
gugcucaaauaccagagaa

SEQ ID NO: 1710887 - RNA, 19 nt, Homo sapiens
  misc_RNA (1)...(19): siRNA sense strand
auaaacgggucacagacuu

SEQ ID NO: 1710888 - RNA, 19 nt, Homo sapiens
  misc_RNA (1)...(19): siRNA sense strand
caacuaccucugagaagau

SEQ ID NO: 1710889 - RNA, 19 nt, Homo sapiens
  misc_RNA (1)...(19): siRNA sense strand
gaagccagcagaggaagga

SEQ ID NO: 1710890 - RNA, 19 nt, Homo sapiens
  misc_RNA (1)...(19): siRNA sense strand
gaagaucaugcccaagaag

SEQ ID NO: 1710891 - RNA, 19 nt, Homo sapiens
  misc_RNA (1)...(19): siRNA sense strand
gguucaacguccucagaug

SEQ ID NO: 1710892 - RNA, 19 nt, Homo sapiens
  misc_RNA (1)...(19): siRNA sense strand
ucccaucuuucaugcguaa

SEQ ID NO: 1710893 - RNA, 19 nt, Homo sapiens
  misc_RNA (1)...(19): siRNA sense strand
ucugagaagauuaacauga

SEQ ID NO: 1710894 - RNA, 19 nt, Homo sapiens
  misc_RNA (1)...(19): siRNA sense strand
ccaucuuucaugcguaaua

SEQ ID NO: 1710895 - RNA, 19 nt, Homo sapiens
  misc_RNA (1)...(19): siRNA sense strand
aaucgucuauguguauaug

SEQ ID NO: 1710896 - RNA, 19 nt, Homo sapiens
  misc_RNA (1)...(19): siRNA sense strand
cuaccucugagaagauuaa

SEQ ID NO: 1710897 - RNA, 19 nt, Homo sapiens
  misc_RNA (1)...(19): siRNA sense strand
cggagaaaaucgucuaugu

SEQ ID NO: 1710898 - RNA, 19 nt, Homo sapiens
  misc_RNA (1)...(19): siRNA sense strand
ccucugagaagauuaacau

SEQ ID NO: 1710899 - RNA, 19 nt, Homo sapiens
  misc_RNA (1)...(19): siRNA sense strand
cagcagaggaaggaaaugu

SEQ ID NO: 1710900 - RNA, 19 nt, Homo sapiens
  misc_RNA (1)...(19): siRNA sense strand
ggggaaugauuuugauaau

SEQ ID NO: 1710901 - RNA, 19 nt, Homo sapiens
  misc_RNA (1)...(19): siRNA sense strand
aggccauccucccaucuuu

SEQ ID NO: 1710902 - RNA, 19 nt, Homo sapiens
  misc_RNA (1)...(19): siRNA sense strand
gggaaugauuuugauaaug

SEQ ID NO: 1710903 - RNA, 19 nt, Homo sapiens
  misc_RNA (1)...(19): siRNA sense strand
caaauaccagagaagauac

SEQ ID NO: 1710904 - RNA, 19 nt, Homo sapiens
  misc_RNA (1)...(19): siRNA sense strand
agaaaaucgucuaugugua

SEQ ID NO: 1710905 - RNA, 19 nt, Homo sapiens
  misc_RNA (1)...(19): siRNA sense strand
guaugaggccaugacuaaa

SEQ ID NO: 1710906 - RNA, 19 nt, Homo sapiens
  misc_RNA (1)...(19): siRNA sense strand
gucuauguguauaugaaga

SEQ ID NO: 1710907 - RNA, 19 nt, Homo sapiens
  misc_RNA (1)...(19): siRNA sense strand
ucgucuauguguauaugaa

SEQ ID NO: 1710908 - RNA, 19 nt, Homo sapiens
  misc_RNA (1)...(19): siRNA sense strand
aaaaggccuucgaugauau

SEQ ID NO: 1710909 - RNA, 19 nt, Homo sapiens
  misc_RNA (1)...(19): siRNA sense strand
cuucgaugauauugccaaa

SEQ ID NO: 1710910 - RNA, 19 nt, Homo sapiens
  misc_RNA (1)...(19): siRNA sense strand
gaagagugggaaaagauga

SEQ ID NO: 1710911 - RNA, 19 nt, Homo sapiens
  misc_RNA (1)...(19): siRNA sense strand
gccauccucccaucuuuca

SEQ ID NO: 1710912 - RNA, 19 nt, Homo sapiens
  misc_RNA (1)...(19): siRNA sense strand
uaagugacaucaacucaga

SEQ ID NO: 1710913 - RNA, 19 nt, Homo sapiens
  misc_RNA (1)...(19): siRNA sense strand
gguaaagcguuccauguca

SEQ ID NO: 1710914 - RNA, 19 nt, Homo sapiens
  misc_RNA (1)...(19): siRNA sense strand
ggaccuaagugacaucaac

SEQ ID NO: 1710915 - RNA, 19 nt, Homo sapiens
  misc_RNA (1)...(19): siRNA sense strand
ggacagcagcggauguguu

SEQ ID NO: 1710916 - RNA, 19 nt, Homo sapiens
  misc_RNA (1)...(19): siRNA sense strand
cagcggauguguucagucu

SEQ ID NO: 1710917 - RNA, 19 nt, Homo sapiens
  misc_RNA (1)...(19): siRNA sense strand
gaaccuccucagccuguuu

SEQ ID NO: 1710918 - RNA, 19 nt, Homo sapiens
  misc_RNA (1)...(19): siRNA sense strand
ugucaagccugccaacauc

SEQ ID NO: 1710919 - RNA, 19 nt, Homo sapiens
  misc_RNA (1)...(19): siRNA sense strand
gcugcaagcugggugacuu

SEQ ID NO: 1710920 - RNA, 19 nt, Homo sapiens
  misc_RNA (1)...(19): siRNA sense strand
gggaugcccuggaccuaag

SEQ ID NO: 1710921 - RNA, 19 nt, Homo sapiens
  misc_RNA (1)...(19): siRNA sense strand
gacagcagcggauguguuc

SEQ ID NO: 1710922 - RNA, 19 nt, Homo sapiens
  misc_RNA (1)...(19): siRNA sense strand
gcucaccacccugcaguuu

SEQ ID NO: 1710923 - RNA, 19 nt, Homo sapiens
  misc_RNA (1)...(19): siRNA sense strand
gcagagcccuggguaugac

SEQ ID NO: 1710924 - RNA, 19 nt, Homo sapiens
  misc_RNA (1)...(19): siRNA sense strand
guucuguccuugucaugau

SEQ ID NO: 1710925 - RNA, 19 nt, Homo sapiens
  misc_RNA (1)...(19): siRNA sense strand
acggagaggucuucaaggu

SEQ ID NO: 1710926 - RNA, 19 nt, Homo sapiens
  misc_RNA (1)...(19): siRNA sense strand
ccacgcagaaccuggauuc

SEQ ID NO: 1710927 - RNA, 19 nt, Homo sapiens
  misc_RNA (1)...(19): siRNA sense strand
gcgguaaagcguuccaugu

SEQ ID NO: 1710928 - RNA, 19 nt, Homo sapiens
  misc_RNA (1)...(19): siRNA sense strand
ccuggauucucccucaaga

SEQ ID NO: 1710929 - RNA, 19 nt, Homo sapiens
  misc_RNA (1)...(19): siRNA sense strand
ucaccacccugcaguuugc

SEQ ID NO: 1710930 - RNA, 19 nt, Homo sapiens
  misc_RNA (1)...(19): siRNA sense strand
ucaaggugcgcuccaagga

SEQ ID NO: 1710931 - RNA, 19 nt, Homo sapiens
  misc_RNA (1)...(19): siRNA sense strand
cgagcugcguucuguccuu

SEQ ID NO: 1710932 - RNA, 19 nt, Homo sapiens
  misc_RNA (1)...(19): siRNA sense strand
cuacggagaggucuucaag

SEQ ID NO: 1710933 - RNA, 19 nt, Homo sapiens
  misc_RNA (1)...(19): siRNA sense strand
acagcagccucuccagcaa

SEQ ID NO: 1710934 - RNA, 19 nt, Homo sapiens
  misc_RNA (1)...(19): siRNA sense strand
cuuccgagcugcguucugu

SEQ ID NO: 1710935 - RNA, 19 nt, Homo sapiens
  misc_RNA (1)...(19): siRNA sense strand
ggaaccuccucagccuguu

SEQ ID NO: 1710936 - RNA, 19 nt, Homo sapiens
  misc_RNA (1)...(19): siRNA sense strand
cuacuuccgccacgcagaa

SEQ ID NO: 1710937 - RNA, 19 nt, Homo sapiens
  misc_RNA (1)...(19): siRNA sense strand
gcccuggaccuaagugaca

SEQ ID NO: 1710938 - RNA, 19 nt, Homo sapiens
  misc_RNA (1)...(19): siRNA sense strand
gguaaagcguuccauguca

SEQ ID NO: 1710939 - RNA, 19 nt, Homo sapiens
  misc_RNA (1)...(19): siRNA sense strand
ggacagcagcggauguguu

SEQ ID NO: 1710940 - RNA, 19 nt, Homo sapiens
  misc_RNA (1)...(19): siRNA sense strand
cagcggauguguucagucu

SEQ ID NO: 1710941 - RNA, 19 nt, Homo sapiens
  misc_RNA (1)...(19): siRNA sense strand
ugucaagccugccaacauc

SEQ ID NO: 1710942 - RNA, 19 nt, Homo sapiens
  misc_RNA (1)...(19): siRNA sense strand
gcugcaagcugggugacuu

SEQ ID NO: 1710943 - RNA, 19 nt, Homo sapiens
  misc_RNA (1)...(19): siRNA sense strand
gacagcagcggauguguuc

SEQ ID NO: 1710944 - RNA, 19 nt, Homo sapiens
  misc_RNA (1)...(19): siRNA sense strand
gcucaccacccugcaguuu

SEQ ID NO: 1710945 - RNA, 19 nt, Homo sapiens
  misc_RNA (1)...(19): siRNA sense strand
gcagagcccuggguaugac

SEQ ID NO: 1710946 - RNA, 19 nt, Homo sapiens
  misc_RNA (1)...(19): siRNA sense strand
guucuguccuugucaugau

SEQ ID NO: 1710947 - RNA, 19 nt, Homo sapiens
  misc_RNA (1)...(19): siRNA sense strand
acggagaggucuucaaggu

SEQ ID NO: 1710948 - RNA, 19 nt, Homo sapiens
  misc_RNA (1)...(19): siRNA sense strand
ccacgcagaaccuggauuc

SEQ ID NO: 1710949 - RNA, 19 nt, Homo sapiens
  misc_RNA (1)...(19): siRNA sense strand
gcgguaaagcguuccaugu

SEQ ID NO: 1710950 - RNA, 19 nt, Homo sapiens
  misc_RNA (1)...(19): siRNA sense strand
ccuggauucucccucaaga

SEQ ID NO: 1710951 - RNA, 19 nt, Homo sapiens
  misc_RNA (1)...(19): siRNA sense strand
ucaccacccugcaguuugc

SEQ ID NO: 1710952 - RNA, 19 nt, Homo sapiens
  misc_RNA (1)...(19): siRNA sense strand
ucaaggugcgcuccaagga

SEQ ID NO: 1710953 - RNA, 19 nt, Homo sapiens
  misc_RNA (1)...(19): siRNA sense strand
cgagcugcguucuguccuu

SEQ ID NO: 1710954 - RNA, 19 nt, Homo sapiens
  misc_RNA (1)...(19): siRNA sense strand
cuacggagaggucuucaag

SEQ ID NO: 1710955 - RNA, 19 nt, Homo sapiens
  misc_RNA (1)...(19): siRNA sense strand
acagcagccucuccagcaa

SEQ ID NO: 1710956 - RNA, 19 nt, Homo sapiens
  misc_RNA (1)...(19): siRNA sense strand
cuuccgagcugcguucugu

SEQ ID NO: 1710957 - RNA, 19 nt, Homo sapiens
  misc_RNA (1)...(19): siRNA sense strand
cuacuuccgccacgcagaa

SEQ ID NO: 1710958 - RNA, 19 nt, Homo sapiens
  misc_RNA (1)...(19): siRNA sense strand
gaagacaccugcuuugagu

SEQ ID NO: 1710959 - RNA, 19 nt, Homo sapiens
  misc_RNA (1)...(19): siRNA sense strand
gagcaguucuauaagauug

SEQ ID NO: 1710960 - RNA, 19 nt, Homo sapiens
  misc_RNA (1)...(19): siRNA sense strand
ccaagcagaucguccagaa

SEQ ID NO: 1710961 - RNA, 19 nt, Homo sapiens
  misc_RNA (1)...(19): siRNA sense strand
gaugggagagucugcauuu

SEQ ID NO: 1710962 - RNA, 19 nt, Homo sapiens
  misc_RNA (1)...(19): siRNA sense strand
gggagcaguucuauaagau

SEQ ID NO: 1710963 - RNA, 19 nt, Homo sapiens
  misc_RNA (1)...(19): siRNA sense strand
ucuauaagauugccaagca

SEQ ID NO: 1710964 - RNA, 19 nt, Homo sapiens
  misc_RNA (1)...(19): siRNA sense strand
ccacuugauuacccguuaa

SEQ ID NO: 1710965 - RNA, 19 nt, Homo sapiens
  misc_RNA (1)...(19): siRNA sense strand
cgggagcaguucuauaaga

SEQ ID NO: 1710966 - RNA, 19 nt, Homo sapiens
  misc_RNA (1)...(19): siRNA sense strand
gcugauggccgaguacaaa

SEQ ID NO: 1710967 - RNA, 19 nt, Homo sapiens
  misc_RNA (1)...(19): siRNA sense strand
ggaguccugugcagagugu

SEQ ID NO: 1710968 - RNA, 19 nt, Homo sapiens
  misc_RNA (1)...(19): siRNA sense strand
gagauuuaccugugagaug

SEQ ID NO: 1710969 - RNA, 19 nt, Homo sapiens
  misc_RNA (1)...(19): siRNA sense strand
ugaguuucccacuugauua

SEQ ID NO: 1710970 - RNA, 19 nt, Homo sapiens
  misc_RNA (1)...(19): siRNA sense strand
gggagagucugcauuucca

SEQ ID NO: 1710971 - RNA, 19 nt, Homo sapiens
  misc_RNA (1)...(19): siRNA sense strand
cagaagacaccugcuuuga

SEQ ID NO: 1710972 - RNA, 19 nt, Homo sapiens
  misc_RNA (1)...(19): siRNA sense strand
gcgaugaccgggagcaguu

SEQ ID NO: 1710973 - RNA, 19 nt, Homo sapiens
  misc_RNA (1)...(19): siRNA sense strand
agacaccugcuuugaguuu

SEQ ID NO: 1710974 - RNA, 19 nt, Homo sapiens
  misc_RNA (1)...(19): siRNA sense strand
ggagcaguucuauaagauu

SEQ ID NO: 1710975 - RNA, 19 nt, Homo sapiens
  misc_RNA (1)...(19): siRNA sense strand
gaucaugggcccagaagac

SEQ ID NO: 1710976 - RNA, 19 nt, Homo sapiens
  misc_RNA (1)...(19): siRNA sense strand
ccagaagacaccugcuuug

SEQ ID NO: 1710977 - RNA, 19 nt, Homo sapiens
  misc_RNA (1)...(19): siRNA sense strand
agauuuaccugugagaugu

SEQ ID NO: 1710978 - RNA, 19 nt, Homo sapiens
  misc_RNA (1)...(19): siRNA sense strand
ugacgaaaguggagcuaac

SEQ ID NO: 1710979 - RNA, 19 nt, Homo sapiens
  misc_RNA (1)...(19): siRNA sense strand
cccacuugauuacccguua

SEQ ID NO: 1710980 - RNA, 19 nt, Homo sapiens
  misc_RNA (1)...(19): siRNA sense strand
agaugagauuuaccuguga

SEQ ID NO: 1710981 - RNA, 19 nt, Homo sapiens
  misc_RNA (1)...(19): siRNA sense strand
cauccugaguuucccacuu

SEQ ID NO: 1710982 - RNA, 19 nt, Homo sapiens
  misc_RNA (1)...(19): siRNA sense strand
accgggagcaguucuauaa

SEQ ID NO: 1710983 - RNA, 19 nt, Homo sapiens
  misc_RNA (1)...(19): siRNA sense strand
gaccgggagcaguucuaua

SEQ ID NO: 1710984 - RNA, 19 nt, Homo sapiens
  misc_RNA (1)...(19): siRNA sense strand
gcagagcccaaugacgaaa

SEQ ID NO: 1710985 - RNA, 19 nt, Homo sapiens
  misc_RNA (1)...(19): siRNA sense strand
agaggcugauggccgagua

SEQ ID NO: 1710986 - RNA, 19 nt, Homo sapiens
  misc_RNA (1)...(19): siRNA sense strand
ccaaagaugagauuuaccu

SEQ ID NO: 1710987 - RNA, 19 nt, Homo sapiens
  misc_RNA (1)...(19): siRNA sense strand
gacaccugcuuugaguuug

SEQ ID NO: 1710988 - RNA, 19 nt, Homo sapiens
  misc_RNA (1)...(19): siRNA sense strand
aagcagaucguccagaagu

SEQ ID NO: 1710989 - RNA, 19 nt, Homo sapiens
  misc_RNA (1)...(19): siRNA sense strand
aaguggagcuaacguggau

SEQ ID NO: 1710990 - RNA, 19 nt, Homo sapiens
  misc_RNA (1)...(19): siRNA sense strand
uuccugccauccugaguuu

SEQ ID NO: 1710991 - RNA, 19 nt, Homo sapiens
  misc_RNA (1)...(19): siRNA sense strand
gcagaucguccagaagucu

SEQ ID NO: 1710992 - RNA, 19 nt, Homo sapiens
  misc_RNA (1)...(19): siRNA sense strand
caugaaugaagagaacuuu

SEQ ID NO: 1710993 - RNA, 19 nt, Homo sapiens
  misc_RNA (1)...(19): siRNA sense strand
cccagaagacaccugcuuu

SEQ ID NO: 1710994 - RNA, 19 nt, Homo sapiens
  misc_RNA (1)...(19): siRNA sense strand
auccugaguuucccacuug

SEQ ID NO: 1710995 - RNA, 19 nt, Homo sapiens
  misc_RNA (1)...(19): siRNA sense strand
uagcaggccccaugaauga

SEQ ID NO: 1710996 - RNA, 19 nt, Homo sapiens
  misc_RNA (1)...(19): siRNA sense strand
ggcagagcccaaugacgaa

SEQ ID NO: 1710997 - RNA, 19 nt, Homo sapiens
  misc_RNA (1)...(19): siRNA sense strand
gcccagaagacaccugcuu

SEQ ID NO: 1710998 - RNA, 19 nt, Homo sapiens
  misc_RNA (1)...(19): siRNA sense strand
gaagacaccugcuuugagu

SEQ ID NO: 1710999 - RNA, 19 nt, Homo sapiens
  misc_RNA (1)...(19): siRNA sense strand
gagcaguucuauaagauug

SEQ ID NO: 1711000 - RNA, 19 nt, Homo sapiens
  misc_RNA (1)...(19): siRNA sense strand
ccaagcagaucguccagaa

SEQ ID NO: 1711001 - RNA, 19 nt, Homo sapiens
  misc_RNA (1)...(19): siRNA sense strand
gaugggagagucugcauuu

SEQ ID NO: 1711002 - RNA, 19 nt, Homo sapiens
  misc_RNA (1)...(19): siRNA sense strand
gggagcaguucuauaagau

SEQ ID NO: 1711003 - RNA, 19 nt, Homo sapiens
  misc_RNA (1)...(19): siRNA sense strand
ucuauaagauugccaagca

SEQ ID NO: 1711004 - RNA, 19 nt, Homo sapiens
  misc_RNA (1)...(19): siRNA sense strand
ccacuugauuacccguuaa

SEQ ID NO: 1711005 - RNA, 19 nt, Homo sapiens
  misc_RNA (1)...(19): siRNA sense strand
cgggagcaguucuauaaga

SEQ ID NO: 1711006 - RNA, 19 nt, Homo sapiens
  misc_RNA (1)...(19): siRNA sense strand
gagauuuaccugugagaug

SEQ ID NO: 1711007 - RNA, 19 nt, Homo sapiens
  misc_RNA (1)...(19): siRNA sense strand
ggaguccugugcagagugu

SEQ ID NO: 1711008 - RNA, 19 nt, Homo sapiens
  misc_RNA (1)...(19): siRNA sense strand
ugaguuucccacuugauua

SEQ ID NO: 1711009 - RNA, 19 nt, Homo sapiens
  misc_RNA (1)...(19): siRNA sense strand
gggagagucugcauuucca

SEQ ID NO: 1711010 - RNA, 19 nt, Homo sapiens
  misc_RNA (1)...(19): siRNA sense strand
agacaccugcuuugaguuu

SEQ ID NO: 1711011 - RNA, 19 nt, Homo sapiens
  misc_RNA (1)...(19): siRNA sense strand
gcgaugaccgggagcaguu

SEQ ID NO: 1711012 - RNA, 19 nt, Homo sapiens
  misc_RNA (1)...(19): siRNA sense strand
cagaagacaccugcuuuga

SEQ ID NO: 1711013 - RNA, 19 nt, Homo sapiens
  misc_RNA (1)...(19): siRNA sense strand
ggagcaguucuauaagauu

SEQ ID NO: 1711014 - RNA, 19 nt, Homo sapiens
  misc_RNA (1)...(19): siRNA sense strand
ccagaagacaccugcuuug

SEQ ID NO: 1711015 - RNA, 19 nt, Homo sapiens
  misc_RNA (1)...(19): siRNA sense strand
gaucaugggcccagaagac

SEQ ID NO: 1711016 - RNA, 19 nt, Homo sapiens
  misc_RNA (1)...(19): siRNA sense strand
agauuuaccugugagaugu

SEQ ID NO: 1711017 - RNA, 19 nt, Homo sapiens
  misc_RNA (1)...(19): siRNA sense strand
ugacgaaaguggagcuaac

SEQ ID NO: 1711018 - RNA, 19 nt, Homo sapiens
  misc_RNA (1)...(19): siRNA sense strand
cccacuugauuacccguua

SEQ ID NO: 1711019 - RNA, 19 nt, Homo sapiens
  misc_RNA (1)...(19): siRNA sense strand
agaugagauuuaccuguga

SEQ ID NO: 1711020 - RNA, 19 nt, Homo sapiens
  misc_RNA (1)...(19): siRNA sense strand
cauccugaguuucccacuu

SEQ ID NO: 1711021 - RNA, 19 nt, Homo sapiens
  misc_RNA (1)...(19): siRNA sense strand
accgggagcaguucuauaa

SEQ ID NO: 1711022 - RNA, 19 nt, Homo sapiens
  misc_RNA (1)...(19): siRNA sense strand
gaccgggagcaguucuaua

SEQ ID NO: 1711023 - RNA, 19 nt, Homo sapiens
  misc_RNA (1)...(19): siRNA sense strand
gcagagcccaaugacgaaa

SEQ ID NO: 1711024 - RNA, 19 nt, Homo sapiens
  misc_RNA (1)...(19): siRNA sense strand
ccaaagaugagauuuaccu

SEQ ID NO: 1711025 - RNA, 19 nt, Homo sapiens
  misc_RNA (1)...(19): siRNA sense strand
gacaccugcuuugaguuug

SEQ ID NO: 1711026 - RNA, 19 nt, Homo sapiens
  misc_RNA (1)...(19): siRNA sense strand
aagcagaucguccagaagu

SEQ ID NO: 1711027 - RNA, 19 nt, Homo sapiens
  misc_RNA (1)...(19): siRNA sense strand
aaguggagcuaacguggau

SEQ ID NO: 1711028 - RNA, 19 nt, Homo sapiens
  misc_RNA (1)...(19): siRNA sense strand
uuccugccauccugaguuu

SEQ ID NO: 1711029 - RNA, 19 nt, Homo sapiens
  misc_RNA (1)...(19): siRNA sense strand
gcagaucguccagaagucu

SEQ ID NO: 1711030 - RNA, 19 nt, Homo sapiens
  misc_RNA (1)...(19): siRNA sense strand
cccagaagacaccugcuuu

SEQ ID NO: 1711031 - RNA, 19 nt, Homo sapiens
  misc_RNA (1)...(19): siRNA sense strand
auccugaguuucccacuug

SEQ ID NO: 1711032 - RNA, 19 nt, Homo sapiens
  misc_RNA (1)...(19): siRNA sense strand
gcccagaagacaccugcuu

SEQ ID NO: 1711033 - RNA, 19 nt, Homo sapiens
  misc_RNA (1)...(19): siRNA sense strand
ggcagagcccaaugacgaa

SEQ ID NO: 1711034 - RNA, 19 nt, Homo sapiens
  misc_RNA (1)...(19): siRNA sense strand
gaaguuagaugcaaucacu

SEQ ID NO: 1711035 - RNA, 19 nt, Homo sapiens
  misc_RNA (1)...(19): siRNA sense strand
gaagaucacauauaugaga

SEQ ID NO: 1711036 - RNA, 19 nt, Homo sapiens
  misc_RNA (1)...(19): siRNA sense strand
ggugaaacauuaacaacca

SEQ ID NO: 1711037 - RNA, 19 nt, Homo sapiens
  misc_RNA (1)...(19): siRNA sense strand
gaucuggcauauggacuaa

SEQ ID NO: 1711038 - RNA, 19 nt, Homo sapiens
  misc_RNA (1)...(19): siRNA sense strand
gugauucucugcuagaugu

SEQ ID NO: 1711039 - RNA, 19 nt, Homo sapiens
  misc_RNA (1)...(19): siRNA sense strand
ccugucaccucaucuuuga

SEQ ID NO: 1711040 - RNA, 19 nt, Homo sapiens
  misc_RNA (1)...(19): siRNA sense strand
ucacugaugaggagaauga

SEQ ID NO: 1711041 - RNA, 19 nt, Homo sapiens
  misc_RNA (1)...(19): siRNA sense strand
gcauauggacuaacagaca

SEQ ID NO: 1711042 - RNA, 19 nt, Homo sapiens
  misc_RNA (1)...(19): siRNA sense strand
gaucacauauaugagaagu

SEQ ID NO: 1711043 - RNA, 19 nt, Homo sapiens
  misc_RNA (1)...(19): siRNA sense strand
agaaugacaugcucgaucu

SEQ ID NO: 1711044 - RNA, 19 nt, Homo sapiens
  misc_RNA (1)...(19): siRNA sense strand
uaugagaaguuagaugcaa

SEQ ID NO: 1711045 - RNA, 19 nt, Homo sapiens
  misc_RNA (1)...(19): siRNA sense strand
ucugcuagauguugugguu

SEQ ID NO: 1711046 - RNA, 19 nt, Homo sapiens
  misc_RNA (1)...(19): siRNA sense strand
gauggugaaacauuaacaa

SEQ ID NO: 1711047 - RNA, 19 nt, Homo sapiens
  misc_RNA (1)...(19): siRNA sense strand
gugaaacauuaacaaccaa

SEQ ID NO: 1711048 - RNA, 19 nt, Homo sapiens
  misc_RNA (1)...(19): siRNA sense strand
gacaaaaucuauggacaau

SEQ ID NO: 1711049 - RNA, 19 nt, Homo sapiens
  misc_RNA (1)...(19): siRNA sense strand
gcuagauguugugguugaa

SEQ ID NO: 1711050 - RNA, 19 nt, Homo sapiens
  misc_RNA (1)...(19): siRNA sense strand
caaccugucaccucaucuu

SEQ ID NO: 1711051 - RNA, 19 nt, Homo sapiens
  misc_RNA (1)...(19): siRNA sense strand
cagcucagaagauaaaaua

SEQ ID NO: 1711052 - RNA, 19 nt, Homo sapiens
  misc_RNA (1)...(19): siRNA sense strand
gaaacauuaacaaccaaag

SEQ ID NO: 1711053 - RNA, 19 nt, Homo sapiens
  misc_RNA (1)...(19): siRNA sense strand
cauuaacaaccaaaggaaa

SEQ ID NO: 1711054 - RNA, 19 nt, Homo sapiens
  misc_RNA (1)...(19): siRNA sense strand
ugcuagauguugugguuga

SEQ ID NO: 1711055 - RNA, 19 nt, Homo sapiens
  misc_RNA (1)...(19): siRNA sense strand
cgaucuggcauauggacua

SEQ ID NO: 1711056 - RNA, 19 nt, Homo sapiens
  misc_RNA (1)...(19): siRNA sense strand
ucuggcauauggacuaaca

SEQ ID NO: 1711057 - RNA, 19 nt, Homo sapiens
  misc_RNA (1)...(19): siRNA sense strand
gcugauaucuucauugcua

SEQ ID NO: 1711058 - RNA, 19 nt, Homo sapiens
  misc_RNA (1)...(19): siRNA sense strand
gagaacagaugcacgagaa

SEQ ID NO: 1711059 - RNA, 19 nt, Homo sapiens
  misc_RNA (1)...(19): siRNA sense strand
gcgcucagcugauaucuuc

SEQ ID NO: 1711060 - RNA, 19 nt, Homo sapiens
  misc_RNA (1)...(19): siRNA sense strand
gcacuggcccugugacuuu

SEQ ID NO: 1711061 - RNA, 19 nt, Homo sapiens
  misc_RNA (1)...(19): siRNA sense strand
ggaggaagguggugauuuu

SEQ ID NO: 1711062 - RNA, 19 nt, Homo sapiens
  misc_RNA (1)...(19): siRNA sense strand
ccaucaugcugaccuguua

SEQ ID NO: 1711063 - RNA, 19 nt, Homo sapiens
  misc_RNA (1)...(19): siRNA sense strand
aagaggcgcucagcugaua

SEQ ID NO: 1711064 - RNA, 19 nt, Homo sapiens
  misc_RNA (1)...(19): siRNA sense strand
gaacagaugcacgagaaau

SEQ ID NO: 1711065 - RNA, 19 nt, Homo sapiens
  misc_RNA (1)...(19): siRNA sense strand
gacuaugacuggcccuuug

SEQ ID NO: 1711066 - RNA, 19 nt, Homo sapiens
  misc_RNA (1)...(19): siRNA sense strand
acacguaccgggacuauga

SEQ ID NO: 1711067 - RNA, 19 nt, Homo sapiens
  misc_RNA (1)...(19): siRNA sense strand
gcagcuaccucaucuucgu

SEQ ID NO: 1711068 - RNA, 19 nt, Homo sapiens
  misc_RNA (1)...(19): siRNA sense strand
gaagucagccagcuacucu

SEQ ID NO: 1711069 - RNA, 19 nt, Homo sapiens
  misc_RNA (1)...(19): siRNA sense strand
aaccaucgcuggccacuuc

SEQ ID NO: 1711070 - RNA, 19 nt, Homo sapiens
  misc_RNA (1)...(19): siRNA sense strand
gggcaaggguggagaacag

SEQ ID NO: 1711071 - RNA, 19 nt, Homo sapiens
  misc_RNA (1)...(19): siRNA sense strand
gcugaccuguuacuucuuc

SEQ ID NO: 1711072 - RNA, 19 nt, Homo sapiens
  misc_RNA (1)...(19): siRNA sense strand
ugaagacgcuguacaugcu

SEQ ID NO: 1711073 - RNA, 19 nt, Homo sapiens
  misc_RNA (1)...(19): siRNA sense strand
cagcugauaucuucauugc

SEQ ID NO: 1711074 - RNA, 19 nt, Homo sapiens
  misc_RNA (1)...(19): siRNA sense strand
ccucaucccugccaucuac

SEQ ID NO: 1711075 - RNA, 19 nt, Homo sapiens
  misc_RNA (1)...(19): siRNA sense strand
ggacuaugacuggcccuuu

SEQ ID NO: 1711076 - RNA, 19 nt, Homo sapiens
  misc_RNA (1)...(19): siRNA sense strand
gaagaggcgcucagcugau

SEQ ID NO: 1711077 - RNA, 19 nt, Homo sapiens
  misc_RNA (1)...(19): siRNA sense strand
ccaggagacccuugugguu

SEQ ID NO: 1711078 - RNA, 19 nt, Homo sapiens
  misc_RNA (1)...(19): siRNA sense strand
aggagacccuugugguuga

SEQ ID NO: 1711079 - RNA, 19 nt, Homo sapiens
  misc_RNA (1)...(19): siRNA sense strand
cagcagcuaccucaucuuc

SEQ ID NO: 1711080 - RNA, 19 nt, Homo sapiens
  misc_RNA (1)...(19): siRNA sense strand
gggagaagucagccagcua

SEQ ID NO: 1711081 - RNA, 19 nt, Homo sapiens
  misc_RNA (1)...(19): siRNA sense strand
uuugaccucuuccucauga

SEQ ID NO: 1711082 - RNA, 19 nt, Homo sapiens
  misc_RNA (1)...(19): siRNA sense strand
gcucagcagcuaccucauc

SEQ ID NO: 1711083 - RNA, 19 nt, Homo sapiens
  misc_RNA (1)...(19): siRNA sense strand
ugaguacacagacuggaaa

SEQ ID NO: 1711084 - RNA, 19 nt, Homo sapiens
  misc_RNA (1)...(19): siRNA sense strand
ccaucuacauguuggucuu

SEQ ID NO: 1711085 - RNA, 19 nt, Homo sapiens
  misc_RNA (1)...(19): siRNA sense strand
guacacagacuggaaaucc

SEQ ID NO: 1711086 - RNA, 19 nt, Homo sapiens
  misc_RNA (1)...(19): siRNA sense strand
ucaucuucgucaacaugua

SEQ ID NO: 1711087 - RNA, 19 nt, Homo sapiens
  misc_RNA (1)...(19): siRNA sense strand
gugaguacacagacuggaa

SEQ ID NO: 1711088 - RNA, 19 nt, Homo sapiens
  misc_RNA (1)...(19): siRNA sense strand
gcaccugcaucagcuacgu

SEQ ID NO: 1711089 - RNA, 19 nt, Homo sapiens
  misc_RNA (1)...(19): siRNA sense strand
uggcugaccugaccuucgu

SEQ ID NO: 1711090 - RNA, 19 nt, Homo sapiens
  misc_RNA (1)...(19): siRNA sense strand
caaggguggagaacagaug

SEQ ID NO: 1711091 - RNA, 19 nt, Homo sapiens
  misc_RNA (1)...(19): siRNA sense strand
uaaggugcagugcuacaug

SEQ ID NO: 1711092 - RNA, 19 nt, Homo sapiens
  misc_RNA (1)...(19): siRNA sense strand
acaaccagucugaguguga

SEQ ID NO: 1711093 - RNA, 19 nt, Homo sapiens
  misc_RNA (1)...(19): siRNA sense strand
guggugauuuugacaacua

SEQ ID NO: 1711094 - RNA, 19 nt, Homo sapiens
  misc_RNA (1)...(19): siRNA sense strand
gcaaggguggagaacagau

SEQ ID NO: 1711095 - RNA, 19 nt, Homo sapiens
  misc_RNA (1)...(19): siRNA sense strand
uaccucaucuucgucaaca

SEQ ID NO: 1711096 - RNA, 19 nt, Homo sapiens
  misc_RNA (1)...(19): siRNA sense strand
caugcugaccuguuacuuc

SEQ ID NO: 1711097 - RNA, 19 nt, Homo sapiens
  misc_RNA (1)...(19): siRNA sense strand
ucccugccaucuacauguu

SEQ ID NO: 1711098 - RNA, 19 nt, Homo sapiens
  misc_RNA (1)...(19): siRNA sense strand
ggugaagacgcuguacaug

SEQ ID NO: 1711099 - RNA, 19 nt, Homo sapiens
  misc_RNA (1)...(19): siRNA sense strand
ggaaugauuuggauaauga

SEQ ID NO: 1711100 - RNA, 19 nt, Homo sapiens
  misc_RNA (1)...(19): siRNA sense strand
gaacggagacgacgccuuu

SEQ ID NO: 1711101 - RNA, 19 nt, Homo sapiens
  misc_RNA (1)...(19): siRNA sense strand
ccaaauacuucucuaagga

SEQ ID NO: 1711102 - RNA, 19 nt, Homo sapiens
  misc_RNA (1)...(19): siRNA sense strand
gaugaaagccucggagaaa

SEQ ID NO: 1711103 - RNA, 19 nt, Homo sapiens
  misc_RNA (1)...(19): siRNA sense strand
caaaaggccuucgaugaua

SEQ ID NO: 1711104 - RNA, 19 nt, Homo sapiens
  misc_RNA (1)...(19): siRNA sense strand
gaaaugauucggaggaagu

SEQ ID NO: 1711105 - RNA, 19 nt, Homo sapiens
  misc_RNA (1)...(19): siRNA sense strand
ccaacuaccucugagaaga

SEQ ID NO: 1711106 - RNA, 19 nt, Homo sapiens
  misc_RNA (1)...(19): siRNA sense strand
gcagaggaaggaaaugauu

SEQ ID NO: 1711107 - RNA, 19 nt, Homo sapiens
  misc_RNA (1)...(19): siRNA sense strand
gagaaaguaugaggcuaug

SEQ ID NO: 1711108 - RNA, 19 nt, Homo sapiens
  misc_RNA (1)...(19): siRNA sense strand
cgaagaucaugcccaagaa

SEQ ID NO: 1711109 - RNA, 19 nt, Homo sapiens
  misc_RNA (1)...(19): siRNA sense strand
gggaaugauuuggauaaug

SEQ ID NO: 1711110 - RNA, 19 nt, Homo sapiens
  misc_RNA (1)...(19): siRNA sense strand
cacgguuggugcucaaaua

SEQ ID NO: 1711111 - RNA, 19 nt, Homo sapiens
  misc_RNA (1)...(19): siRNA sense strand
caaauacuucucuaaggaa

SEQ ID NO: 1711112 - RNA, 19 nt, Homo sapiens
  misc_RNA (1)...(19): siRNA sense strand
ccaccuuucauguguaaua

SEQ ID NO: 1711113 - RNA, 19 nt, Homo sapiens
  misc_RNA (1)...(19): siRNA sense strand
aguaugaggcuaugacuaa

SEQ ID NO: 1711114 - RNA, 19 nt, Homo sapiens
  misc_RNA (1)...(19): siRNA sense strand
agaagcaucuggcccacaa

SEQ ID NO: 1711115 - RNA, 19 nt, Homo sapiens
  misc_RNA (1)...(19): siRNA sense strand
caagaagccagcagaggaa

SEQ ID NO: 1711116 - RNA, 19 nt, Homo sapiens
  misc_RNA (1)...(19): siRNA sense strand
guaugaggcuaugacuaaa

SEQ ID NO: 1711117 - RNA, 19 nt, Homo sapiens
  misc_RNA (1)...(19): siRNA sense strand
ugagaagauucacgagaga

SEQ ID NO: 1711118 - RNA, 19 nt, Homo sapiens
  misc_RNA (1)...(19): siRNA sense strand
gccaaauacuucucuaagg

SEQ ID NO: 1711119 - RNA, 19 nt, Homo sapiens
  misc_RNA (1)...(19): siRNA sense strand
gguugaacguccucagaug

SEQ ID NO: 1711120 - RNA, 19 nt, Homo sapiens
  misc_RNA (1)...(19): siRNA sense strand
gcucaaauaccagagaaga

SEQ ID NO: 1711121 - RNA, 19 nt, Homo sapiens
  misc_RNA (1)...(19): siRNA sense strand
gaaaguaugaggcuaugac

SEQ ID NO: 1711122 - RNA, 19 nt, Homo sapiens
  misc_RNA (1)...(19): siRNA sense strand
caccuuucauguguaauaa

SEQ ID NO: 1711123 - RNA, 19 nt, Homo sapiens
  misc_RNA (1)...(19): siRNA sense strand
gaaaaccaacuaccucuga

SEQ ID NO: 1711124 - RNA, 19 nt, Homo sapiens
  misc_RNA (1)...(19): siRNA sense strand
ggaagugccagaagcaucu

SEQ ID NO: 1711125 - RNA, 19 nt, Homo sapiens
  misc_RNA (1)...(19): siRNA sense strand
ccgaagaucaugcccaaga

SEQ ID NO: 1711126 - RNA, 19 nt, Homo sapiens
  misc_RNA (1)...(19): siRNA sense strand
gugcucaaauaccagagaa

SEQ ID NO: 1711127 - RNA, 19 nt, Homo sapiens
  misc_RNA (1)...(19): siRNA sense strand
cagcagaggaaggaaauga

SEQ ID NO: 1711128 - RNA, 19 nt, Homo sapiens
  misc_RNA (1)...(19): siRNA sense strand
ucaaauaccagagaagauc

SEQ ID NO: 1711129 - RNA, 19 nt, Homo sapiens
  misc_RNA (1)...(19): siRNA sense strand
caacuaccucugagaagau

SEQ ID NO: 1711130 - RNA, 19 nt, Homo sapiens
  misc_RNA (1)...(19): siRNA sense strand
gaacguccucagaugacuu

SEQ ID NO: 1711131 - RNA, 19 nt, Homo sapiens
  misc_RNA (1)...(19): siRNA sense strand
gaagccagcagaggaagga

SEQ ID NO: 1711132 - RNA, 19 nt, Homo sapiens
  misc_RNA (1)...(19): siRNA sense strand
ccucccaccuuucaugugu

SEQ ID NO: 1711133 - RNA, 19 nt, Homo sapiens
  misc_RNA (1)...(19): siRNA sense strand
ccacagacugcgugagaga

SEQ ID NO: 1711134 - RNA, 19 nt, Homo sapiens
  misc_RNA (1)...(19): siRNA sense strand
ggagacgacgccuuugcaa

SEQ ID NO: 1711135 - RNA, 19 nt, Homo sapiens
  misc_RNA (1)...(19): siRNA sense strand
gaagaucaugcccaagaag

SEQ ID NO: 1711136 - RNA, 19 nt, Homo sapiens
  misc_RNA (1)...(19): siRNA sense strand
ggaggaagugccagaagca

SEQ ID NO: 1711137 - RNA, 19 nt, Homo sapiens
  misc_RNA (1)...(19): siRNA sense strand
guugaacguccucagauga

SEQ ID NO: 1711138 - RNA, 19 nt, Homo sapiens
  misc_RNA (1)...(19): siRNA sense strand
agagaaaguaugaggcuau

SEQ ID NO: 1711139 - RNA, 19 nt, Homo sapiens
  misc_RNA (1)...(19): siRNA sense strand
ggcuaugacuaaacuaggu

SEQ ID NO: 1711140 - RNA, 19 nt, Homo sapiens
  misc_RNA (1)...(19): siRNA sense strand
ucccaccuuucauguguaa

SEQ ID NO: 1711141 - RNA, 19 nt, Homo sapiens
  misc_RNA (1)...(19): siRNA sense strand
gaggcuaugacuaaacuag

SEQ ID NO: 1711142 - RNA, 19 nt, Homo sapiens
  misc_RNA (1)...(19): siRNA sense strand
aggccacccucccaccuuu

SEQ ID NO: 1711143 - RNA, 19 nt, Homo sapiens
  misc_RNA (1)...(19): siRNA sense strand
ccaaaaggccuucgaugau

SEQ ID NO: 1711144 - RNA, 19 nt, Homo sapiens
  misc_RNA (1)...(19): siRNA sense strand
gcuaugacuaaacuagguu

SEQ ID NO: 1711145 - RNA, 19 nt, Homo sapiens
  misc_RNA (1)...(19): siRNA sense strand
cagaggaaggaaaugauuc

SEQ ID NO: 1711146 - RNA, 19 nt, Homo sapiens
  misc_RNA (1)...(19): siRNA sense strand
aaaaggccuucgaugauau

SEQ ID NO: 1711147 - RNA, 19 nt, Homo sapiens
  misc_RNA (1)...(19): siRNA sense strand
acagacugcgugagagaaa

SEQ ID NO: 1711148 - RNA, 19 nt, Homo sapiens
  misc_RNA (1)...(19): siRNA sense strand
cuucgaugauauugccaaa

SEQ ID NO: 1711149 - RNA, 19 nt, Homo sapiens
  misc_RNA (1)...(19): siRNA sense strand
aggaaaugauucggaggaa

SEQ ID NO: 1711150 - RNA, 19 nt, Homo sapiens
  misc_RNA (1)...(19): siRNA sense strand
gaagagugggaaaagauga

SEQ ID NO: 1711151 - RNA, 19 nt, Homo sapiens
  misc_RNA (1)...(19): siRNA sense strand
gagaagauucacgagagau

SEQ ID NO: 1711152 - RNA, 19 nt, Homo sapiens
  misc_RNA (1)...(19): siRNA sense strand
gaaaacagcuggugauuua

SEQ ID NO: 1711153 - RNA, 19 nt, Homo sapiens
  misc_RNA (1)...(19): siRNA sense strand
ggaaugauuuggauaauga

SEQ ID NO: 1711154 - RNA, 19 nt, Homo sapiens
  misc_RNA (1)...(19): siRNA sense strand
gaacggagacgacgccuuu

SEQ ID NO: 1711155 - RNA, 19 nt, Homo sapiens
  misc_RNA (1)...(19): siRNA sense strand
ugaggaagaugacgaguaa

SEQ ID NO: 1711156 - RNA, 19 nt, Homo sapiens
  misc_RNA (1)...(19): siRNA sense strand
ccaaauacuucucuaagga

SEQ ID NO: 1711157 - RNA, 19 nt, Homo sapiens
  misc_RNA (1)...(19): siRNA sense strand
gaugaaagccucggagaaa

SEQ ID NO: 1711158 - RNA, 19 nt, Homo sapiens
  misc_RNA (1)...(19): siRNA sense strand
caaaaggccuucgaugaua

SEQ ID NO: 1711159 - RNA, 19 nt, Homo sapiens
  misc_RNA (1)...(19): siRNA sense strand
gaaaugauucggaggaagu

SEQ ID NO: 1711160 - RNA, 19 nt, Homo sapiens
  misc_RNA (1)...(19): siRNA sense strand
ccaacuaccucugagaaga

SEQ ID NO: 1711161 - RNA, 19 nt, Homo sapiens
  misc_RNA (1)...(19): siRNA sense strand
gcagaggaaggaaaugauu

SEQ ID NO: 1711162 - RNA, 19 nt, Homo sapiens
  misc_RNA (1)...(19): siRNA sense strand
gagaaaguaugaggcuaug

SEQ ID NO: 1711163 - RNA, 19 nt, Homo sapiens
  misc_RNA (1)...(19): siRNA sense strand
cgaagaucaugcccaagaa

SEQ ID NO: 1711164 - RNA, 19 nt, Homo sapiens
  misc_RNA (1)...(19): siRNA sense strand
gggaaugauuuggauaaug

SEQ ID NO: 1711165 - RNA, 19 nt, Homo sapiens
  misc_RNA (1)...(19): siRNA sense strand
cacgguuggugcucaaaua

SEQ ID NO: 1711166 - RNA, 19 nt, Homo sapiens
  misc_RNA (1)...(19): siRNA sense strand
caaauacuucucuaaggaa

SEQ ID NO: 1711167 - RNA, 19 nt, Homo sapiens
  misc_RNA (1)...(19): siRNA sense strand
ccaccuuucauguguaaua

SEQ ID NO: 1711168 - RNA, 19 nt, Homo sapiens
  misc_RNA (1)...(19): siRNA sense strand
aguaugaggcuaugacuaa

SEQ ID NO: 1711169 - RNA, 19 nt, Homo sapiens
  misc_RNA (1)...(19): siRNA sense strand
agaagcaucuggcccacaa

SEQ ID NO: 1711170 - RNA, 19 nt, Homo sapiens
  misc_RNA (1)...(19): siRNA sense strand
caagaagccagcagaggaa

SEQ ID NO: 1711171 - RNA, 19 nt, Homo sapiens
  misc_RNA (1)...(19): siRNA sense strand
guaugaggcuaugacuaaa

SEQ ID NO: 1711172 - RNA, 19 nt, Homo sapiens
  misc_RNA (1)...(19): siRNA sense strand
ugagaagauucacgagaga

SEQ ID NO: 1711173 - RNA, 19 nt, Homo sapiens
  misc_RNA (1)...(19): siRNA sense strand
gccaaauacuucucuaagg

SEQ ID NO: 1711174 - RNA, 19 nt, Homo sapiens
  misc_RNA (1)...(19): siRNA sense strand
gcucaaauaccagagaaga

SEQ ID NO: 1711175 - RNA, 19 nt, Homo sapiens
  misc_RNA (1)...(19): siRNA sense strand
gguugaacguccucagaug

SEQ ID NO: 1711176 - RNA, 19 nt, Homo sapiens
  misc_RNA (1)...(19): siRNA sense strand
gaaaguaugaggcuaugac

SEQ ID NO: 1711177 - RNA, 19 nt, Homo sapiens
  misc_RNA (1)...(19): siRNA sense strand
ggugauuuaugaagagauc

SEQ ID NO: 1711178 - RNA, 19 nt, Homo sapiens
  misc_RNA (1)...(19): siRNA sense strand
caccuuucauguguaauaa

SEQ ID NO: 1711179 - RNA, 19 nt, Homo sapiens
  misc_RNA (1)...(19): siRNA sense strand
gaaaaccaacuaccucuga

SEQ ID NO: 1711180 - RNA, 19 nt, Homo sapiens
  misc_RNA (1)...(19): siRNA sense strand
ggaagugccagaagcaucu

SEQ ID NO: 1711181 - RNA, 19 nt, Homo sapiens
  misc_RNA (1)...(19): siRNA sense strand
ccgaagaucaugcccaaga

SEQ ID NO: 1711182 - RNA, 19 nt, Homo sapiens
  misc_RNA (1)...(19): siRNA sense strand
aaacagcuggugauuuaug

SEQ ID NO: 1711183 - RNA, 19 nt, Homo sapiens
  misc_RNA (1)...(19): siRNA sense strand
gugcucaaauaccagagaa

SEQ ID NO: 1711184 - RNA, 19 nt, Homo sapiens
  misc_RNA (1)...(19): siRNA sense strand
ucaaauaccagagaagauc

SEQ ID NO: 1711185 - RNA, 19 nt, Homo sapiens
  misc_RNA (1)...(19): siRNA sense strand
caacuaccucugagaagau

SEQ ID NO: 1711186 - RNA, 19 nt, Homo sapiens
  misc_RNA (1)...(19): siRNA sense strand
cagcagaggaaggaaauga

SEQ ID NO: 1711187 - RNA, 19 nt, Homo sapiens
  misc_RNA (1)...(19): siRNA sense strand
gaacguccucagaugacuu

SEQ ID NO: 1711188 - RNA, 19 nt, Homo sapiens
  misc_RNA (1)...(19): siRNA sense strand
gaagccagcagaggaagga

SEQ ID NO: 1711189 - RNA, 19 nt, Homo sapiens
  misc_RNA (1)...(19): siRNA sense strand
ccucccaccuuucaugugu

SEQ ID NO: 1711190 - RNA, 19 nt, Homo sapiens
  misc_RNA (1)...(19): siRNA sense strand
cagcgacccugaggaagau

SEQ ID NO: 1711191 - RNA, 19 nt, Homo sapiens
  misc_RNA (1)...(19): siRNA sense strand
ccacagacugcgugagaga

SEQ ID NO: 1711192 - RNA, 19 nt, Homo sapiens
  misc_RNA (1)...(19): siRNA sense strand
gaagaucaugcccaagaag

SEQ ID NO: 1711193 - RNA, 19 nt, Homo sapiens
  misc_RNA (1)...(19): siRNA sense strand
ggagacgacgccuuugcaa

SEQ ID NO: 1711194 - RNA, 19 nt, Homo sapiens
  misc_RNA (1)...(19): siRNA sense strand
ggaggaagugccagaagca

SEQ ID NO: 1711195 - RNA, 19 nt, Homo sapiens
  misc_RNA (1)...(19): siRNA sense strand
guugaacguccucagauga

SEQ ID NO: 1711196 - RNA, 19 nt, Homo sapiens
  misc_RNA (1)...(19): siRNA sense strand
aacagcuggugauuuauga

SEQ ID NO: 1711197 - RNA, 19 nt, Homo sapiens
  misc_RNA (1)...(19): siRNA sense strand
gcuggugauuuaugaagag

SEQ ID NO: 1711198 - RNA, 19 nt, Homo sapiens
  misc_RNA (1)...(19): siRNA sense strand
agagaaaguaugaggcuau

SEQ ID NO: 1711199 - RNA, 19 nt, Homo sapiens
  misc_RNA (1)...(19): siRNA sense strand
ggcuaugacuaaacuaggu

SEQ ID NO: 1711200 - RNA, 19 nt, Homo sapiens
  misc_RNA (1)...(19): siRNA sense strand
ucccaccuuucauguguaa

SEQ ID NO: 1711201 - RNA, 19 nt, Homo sapiens
  misc_RNA (1)...(19): siRNA sense strand
gaggcuaugacuaaacuag

SEQ ID NO: 1711202 - RNA, 19 nt, Homo sapiens
  misc_RNA (1)...(19): siRNA sense strand
aggccacccucccaccuuu

SEQ ID NO: 1711203 - RNA, 19 nt, Homo sapiens
  misc_RNA (1)...(19): siRNA sense strand
ccaaaaggccuucgaugau

SEQ ID NO: 1711204 - RNA, 19 nt, Homo sapiens
  misc_RNA (1)...(19): siRNA sense strand
gcuaugacuaaacuagguu

SEQ ID NO: 1711205 - RNA, 19 nt, Homo sapiens
  misc_RNA (1)...(19): siRNA sense strand
cagaggaaggaaaugauuc

SEQ ID NO: 1711206 - RNA, 19 nt, Homo sapiens
  misc_RNA (1)...(19): siRNA sense strand
cuucgaugauauugccaaa

SEQ ID NO: 1711207 - RNA, 19 nt, Homo sapiens
  misc_RNA (1)...(19): siRNA sense strand
aaaaggccuucgaugauau

SEQ ID NO: 1711208 - RNA, 19 nt, Homo sapiens
  misc_RNA (1)...(19): siRNA sense strand
acagacugcgugagagaaa

SEQ ID NO: 1711209 - RNA, 19 nt, Homo sapiens
  misc_RNA (1)...(19): siRNA sense strand
gaagagugggaaaagauga

SEQ ID NO: 1711210 - RNA, 19 nt, Homo sapiens
  misc_RNA (1)...(19): siRNA sense strand
cugaggaagaugacgagua

SEQ ID NO: 1711211 - RNA, 19 nt, Homo sapiens
  misc_RNA (1)...(19): siRNA sense strand
gagaagauucacgagagau

SEQ ID NO: 1711212 - RNA, 19 nt, Homo sapiens
  misc_RNA (1)...(19): siRNA sense strand
aggaaaugauucggaggaa

SEQ ID NO: 1711213 - RNA, 19 nt, Homo sapiens
  misc_RNA (1)...(19): siRNA sense strand
ggaaagaaaugccugcuua

SEQ ID NO: 1711214 - RNA, 19 nt, Homo sapiens
  misc_RNA (1)...(19): siRNA sense strand
caagagagguuauagcaua

SEQ ID NO: 1711215 - RNA, 19 nt, Homo sapiens
  misc_RNA (1)...(19): siRNA sense strand
gcaaugaccuguauuugga

SEQ ID NO: 1711216 - RNA, 19 nt, Homo sapiens
  misc_RNA (1)...(19): siRNA sense strand
ggaaugcccuucuaaaugu

SEQ ID NO: 1711217 - RNA, 19 nt, Homo sapiens
  misc_RNA (1)...(19): siRNA sense strand
gagaugaguuguagcuaua

SEQ ID NO: 1711218 - RNA, 19 nt, Homo sapiens
  misc_RNA (1)...(19): siRNA sense strand
ggauucaucucaauagaaa

SEQ ID NO: 1711219 - RNA, 19 nt, Homo sapiens
  misc_RNA (1)...(19): siRNA sense strand
gaaccgagccuugauauug

SEQ ID NO: 1711220 - RNA, 19 nt, Homo sapiens
  misc_RNA (1)...(19): siRNA sense strand
gaaauggaauuaugaggau

SEQ ID NO: 1711221 - RNA, 19 nt, Homo sapiens
  misc_RNA (1)...(19): siRNA sense strand
caacucauguaacagauuu

SEQ ID NO: 1711222 - RNA, 19 nt, Homo sapiens
  misc_RNA (1)...(19): siRNA sense strand
gcacaugaauuaucacaag

SEQ ID NO: 1711223 - RNA, 19 nt, Homo sapiens
  misc_RNA (1)...(19): siRNA sense strand
cagcagagucuaagaaaua

SEQ ID NO: 1711224 - RNA, 19 nt, Homo sapiens
  misc_RNA (1)...(19): siRNA sense strand
ugagucaucuucauacuuu

SEQ ID NO: 1711225 - RNA, 19 nt, Homo sapiens
  misc_RNA (1)...(19): siRNA sense strand
ggacaacuuucucucauuc

SEQ ID NO: 1711226 - RNA, 19 nt, Homo sapiens
  misc_RNA (1)...(19): siRNA sense strand
gauaaacucugacacucuu

SEQ ID NO: 1711227 - RNA, 19 nt, Homo sapiens
  misc_RNA (1)...(19): siRNA sense strand
auaacacucugcacuauua

SEQ ID NO: 1711228 - RNA, 19 nt, Homo sapiens
  misc_RNA (1)...(19): siRNA sense strand
gauuggcuauagaguauua

SEQ ID NO: 1711229 - RNA, 19 nt, Homo sapiens
  misc_RNA (1)...(19): siRNA sense strand
aaacggaaguuauagaaga

SEQ ID NO: 1711230 - RNA, 19 nt, Homo sapiens
  misc_RNA (1)...(19): siRNA sense strand
ccgcagggcuggugucuaa

SEQ ID NO: 1711231 - RNA, 19 nt, Homo sapiens
  misc_RNA (1)...(19): siRNA sense strand
acaccaagcacaugaauua

SEQ ID NO: 1711232 - RNA, 19 nt, Homo sapiens
  misc_RNA (1)...(19): siRNA sense strand
uaagauugcucuauugugu

SEQ ID NO: 1711233 - RNA, 19 nt, Homo sapiens
  misc_RNA (1)...(19): siRNA sense strand
gcaauaugcuagguuuaaa

SEQ ID NO: 1711234 - RNA, 19 nt, Homo sapiens
  misc_RNA (1)...(19): siRNA sense strand
gagaacucguuguaugaua

SEQ ID NO: 1711235 - RNA, 19 nt, Homo sapiens
  misc_RNA (1)...(19): siRNA sense strand
caagaaauauccagagaag

SEQ ID NO: 1711236 - RNA, 19 nt, Homo sapiens
  misc_RNA (1)...(19): siRNA sense strand
gaaaugaagcccagguuug

SEQ ID NO: 1711237 - RNA, 19 nt, Homo sapiens
  misc_RNA (1)...(19): siRNA sense strand
aagaaaugccugcuuauua

SEQ ID NO: 1711238 - RNA, 19 nt, Homo sapiens
  misc_RNA (1)...(19): siRNA sense strand
cuaggaggcuuauauaaau

SEQ ID NO: 1711239 - RNA, 19 nt, Homo sapiens
  misc_RNA (1)...(19): siRNA sense strand
caagagagaacucguugua

SEQ ID NO: 1711240 - RNA, 19 nt, Homo sapiens
  misc_RNA (1)...(19): siRNA sense strand
gguagaaacuauuuaugga

SEQ ID NO: 1711241 - RNA, 19 nt, Homo sapiens
  misc_RNA (1)...(19): siRNA sense strand
ccaagcacaugaauuauca

SEQ ID NO: 1711242 - RNA, 19 nt, Homo sapiens
  misc_RNA (1)...(19): siRNA sense strand
gacaugguauggaaguaua

SEQ ID NO: 1711243 - RNA, 19 nt, Homo sapiens
  misc_RNA (1)...(19): siRNA sense strand
gaacugaaccgagccuuga

SEQ ID NO: 1711244 - RNA, 19 nt, Homo sapiens
  misc_RNA (1)...(19): siRNA sense strand
gcaaagaaguugggaaugc

SEQ ID NO: 1711245 - RNA, 19 nt, Homo sapiens
  misc_RNA (1)...(19): siRNA sense strand
cagauuuccugguauauga

SEQ ID NO: 1711246 - RNA, 19 nt, Homo sapiens
  misc_RNA (1)...(19): siRNA sense strand
cagauuggcuauagaguau

SEQ ID NO: 1711247 - RNA, 19 nt, Homo sapiens
  misc_RNA (1)...(19): siRNA sense strand
guagcacccauuuaaauua

SEQ ID NO: 1711248 - RNA, 19 nt, Homo sapiens
  misc_RNA (1)...(19): siRNA sense strand
gcagggcgaggacugauua

SEQ ID NO: 1711249 - RNA, 19 nt, Homo sapiens
  misc_RNA (1)...(19): siRNA sense strand
gaaaugcgcuaugaaugca

SEQ ID NO: 1711250 - RNA, 19 nt, Homo sapiens
  misc_RNA (1)...(19): siRNA sense strand
ccaaaucacuggagacucu

SEQ ID NO: 1711251 - RNA, 19 nt, Homo sapiens
  misc_RNA (1)...(19): siRNA sense strand
gcaaggauaaacuccauuu

SEQ ID NO: 1711252 - RNA, 19 nt, Homo sapiens
  misc_RNA (1)...(19): siRNA sense strand
gagcaaguagagaagauua

SEQ ID NO: 1711253 - RNA, 19 nt, Homo sapiens
  misc_RNA (1)...(19): siRNA sense strand
caaaguuucuuacugaagu

SEQ ID NO: 1711254 - RNA, 19 nt, Homo sapiens
  misc_RNA (1)...(19): siRNA sense strand
gaucaucacugcccuacca

SEQ ID NO: 1711255 - RNA, 19 nt, Homo sapiens
  misc_RNA (1)...(19): siRNA sense strand
ccagguuuguuauuucaua

SEQ ID NO: 1711256 - RNA, 19 nt, Homo sapiens
  misc_RNA (1)...(19): siRNA sense strand
gcacugcucucaggcuuau

SEQ ID NO: 1711257 - RNA, 19 nt, Homo sapiens
  misc_RNA (1)...(19): siRNA sense strand
gcaacucaauaaaugcauu

SEQ ID NO: 1711258 - RNA, 19 nt, Homo sapiens
  misc_RNA (1)...(19): siRNA sense strand
gagagaacucguuguauga

SEQ ID NO: 1711259 - RNA, 19 nt, Homo sapiens
  misc_RNA (1)...(19): siRNA sense strand
agagagaacucguuguaug

SEQ ID NO: 1711260 - RNA, 19 nt, Homo sapiens
  misc_RNA (1)...(19): siRNA sense strand
caaaucuccuggucccuuu

SEQ ID NO: 1711261 - RNA, 19 nt, Homo sapiens
  misc_RNA (1)...(19): siRNA sense strand
gaucugagaccgaggagaa

SEQ ID NO: 1711262 - RNA, 19 nt, Homo sapiens
  misc_RNA (1)...(19): siRNA sense strand
gggaaugcccuucuaaaug

SEQ ID NO: 1711263 - RNA, 19 nt, Homo sapiens
  misc_RNA (1)...(19): siRNA sense strand
ggaaaugaagcccagguuu

SEQ ID NO: 1711264 - RNA, 19 nt, Homo sapiens
  misc_RNA (1)...(19): siRNA sense strand
ggauuuaucagucagcuuu

SEQ ID NO: 1711265 - RNA, 19 nt, Homo sapiens
  misc_RNA (1)...(19): siRNA sense strand
ccaguggauuguuaaguuu

SEQ ID NO: 1711266 - RNA, 19 nt, Homo sapiens
  misc_RNA (1)...(19): siRNA sense strand
agaaauauccagagaaguu

SEQ ID NO: 1711267 - RNA, 19 nt, Homo sapiens
  misc_RNA (1)...(19): siRNA sense strand
guauggaaguauaacauug

SEQ ID NO: 1711268 - RNA, 19 nt, Homo sapiens
  misc_RNA (1)...(19): siRNA sense strand
uuaaugacaugguauggaa

SEQ ID NO: 1711269 - RNA, 19 nt, Homo sapiens
  misc_RNA (1)...(19): siRNA sense strand
caugggagcucugguagaa

SEQ ID NO: 1711270 - RNA, 19 nt, Homo sapiens
  misc_RNA (1)...(19): siRNA sense strand
gcaauucauuucuggaagu

SEQ ID NO: 1711271 - RNA, 19 nt, Homo sapiens
  misc_RNA (1)...(19): siRNA sense strand
agaaaugccugcuuauuac

SEQ ID NO: 1711272 - RNA, 19 nt, Homo sapiens
  misc_RNA (1)...(19): siRNA sense strand
gaagaccgaauuccaguug

SEQ ID NO: 1711273 - RNA, 19 nt, Homo sapiens
  misc_RNA (1)...(19): siRNA sense strand
agacugcuuuguugagaua

SEQ ID NO: 1711274 - RNA, 19 nt, Homo sapiens
  misc_RNA (1)...(19): siRNA sense strand
uagcauauaucuuggaaag

SEQ ID NO: 1711275 - RNA, 19 nt, Homo sapiens
  misc_RNA (1)...(19): siRNA sense strand
ugaaagagcaaguagagaa

SEQ ID NO: 1711276 - RNA, 19 nt, Homo sapiens
  misc_RNA (1)...(19): siRNA sense strand
gaauuccaguugcuuuaug

SEQ ID NO: 1711277 - RNA, 19 nt, Homo sapiens
  misc_RNA (1)...(19): siRNA sense strand
cauauuggauuguucuuca

SEQ ID NO: 1711278 - RNA, 19 nt, Homo sapiens
  misc_RNA (1)...(19): siRNA sense strand
guauaacacucugcacuau

SEQ ID NO: 1711279 - RNA, 19 nt, Homo sapiens
  misc_RNA (1)...(19): siRNA sense strand
gagcacugguuacagaaug

SEQ ID NO: 1711280 - RNA, 19 nt, Homo sapiens
  misc_RNA (1)...(19): siRNA sense strand
gagcaacucauguaacaga

SEQ ID NO: 1711281 - RNA, 19 nt, Homo sapiens
  misc_RNA (1)...(19): siRNA sense strand
ucaaaggauuuaucaguca

SEQ ID NO: 1711282 - RNA, 19 nt, Homo sapiens
  misc_RNA (1)...(19): siRNA sense strand
gagaagauuuugacaauuc

SEQ ID NO: 1711283 - RNA, 19 nt, Homo sapiens
  misc_RNA (1)...(19): siRNA sense strand
ccagugacuuaucuguaua

SEQ ID NO: 1711284 - RNA, 19 nt, Homo sapiens
  misc_RNA (1)...(19): siRNA sense strand
gucagcaacucaauaaaug

SEQ ID NO: 1711285 - RNA, 19 nt, Homo sapiens
  misc_RNA (1)...(19): siRNA sense strand
gaaagaaaugccugcuuau

SEQ ID NO: 1711286 - RNA, 19 nt, Homo sapiens
  misc_RNA (1)...(19): siRNA sense strand
ugguggaucugguuguuua

SEQ ID NO: 1711287 - RNA, 19 nt, Homo sapiens
  misc_RNA (1)...(19): siRNA sense strand
gaggacauuugcagauuuc

SEQ ID NO: 1711288 - RNA, 19 nt, Homo sapiens
  misc_RNA (1)...(19): siRNA sense strand
uagagcaacucauguaaca

SEQ ID NO: 1711289 - RNA, 19 nt, Homo sapiens
  misc_RNA (1)...(19): siRNA sense strand
guuuacagaugaaugacua

SEQ ID NO: 1711290 - RNA, 19 nt, Homo sapiens
  misc_RNA (1)...(19): siRNA sense strand
agaaccagcuccaucuuug

SEQ ID NO: 1711291 - RNA, 19 nt, Homo sapiens
  misc_RNA (1)...(19): siRNA sense strand
ccagagccauauuggauug

SEQ ID NO: 1711292 - RNA, 19 nt, Homo sapiens
  misc_RNA (1)...(19): siRNA sense strand
cagaugacaccuacuauug

SEQ ID NO: 1711293 - RNA, 19 nt, Homo sapiens
  misc_RNA (1)...(19): siRNA sense strand
gaaagccguuuuaaucuga

SEQ ID NO: 1711294 - RNA, 19 nt, Homo sapiens
  misc_RNA (1)...(19): siRNA sense strand
ggaacuugguguaaagaca

SEQ ID NO: 1711295 - RNA, 19 nt, Homo sapiens
  misc_RNA (1)...(19): siRNA sense strand
gcuuugggccuuaacauuu

SEQ ID NO: 1711296 - RNA, 19 nt, Homo sapiens
  misc_RNA (1)...(19): siRNA sense strand
ugagaugaguuguagcuau

SEQ ID NO: 1711297 - RNA, 19 nt, Homo sapiens
  misc_RNA (1)...(19): siRNA sense strand
uacaggcucugauucaauu

SEQ ID NO: 1711298 - RNA, 19 nt, Homo sapiens
  misc_RNA (1)...(19): siRNA sense strand
gcagcagagucuaagaaau

SEQ ID NO: 1711299 - RNA, 19 nt, Homo sapiens
  misc_RNA (1)...(19): siRNA sense strand
gaaacuggauccugcuacu

SEQ ID NO: 1711300 - RNA, 19 nt, Homo sapiens
  misc_RNA (1)...(19): siRNA sense strand
ccacacugguuacuuggaa

SEQ ID NO: 1711301 - RNA, 19 nt, Homo sapiens
  misc_RNA (1)...(19): siRNA sense strand
cgagaucucuuaaaaguga

SEQ ID NO: 1711302 - RNA, 19 nt, Homo sapiens
  misc_RNA (1)...(19): siRNA sense strand
cgauucaucacacacauua

SEQ ID NO: 1711303 - RNA, 19 nt, Homo sapiens
  misc_RNA (1)...(19): siRNA sense strand
gaaugcaauugguuugauc

SEQ ID NO: 1711304 - RNA, 19 nt, Homo sapiens
  misc_RNA (1)...(19): siRNA sense strand
gggaaugugugucuucgau

SEQ ID NO: 1711305 - RNA, 19 nt, Homo sapiens
  misc_RNA (1)...(19): siRNA sense strand
cacaagaaauauccagaga

SEQ ID NO: 1711306 - RNA, 19 nt, Homo sapiens
  misc_RNA (1)...(19): siRNA sense strand
ugaggacauuugcagauuu

SEQ ID NO: 1711307 - RNA, 19 nt, Homo sapiens
  misc_RNA (1)...(19): siRNA sense strand
ggaagucaaugagcaacga

SEQ ID NO: 1711308 - RNA, 19 nt, Homo sapiens
  misc_RNA (1)...(19): siRNA sense strand
ucagggaacuugguguaaa

SEQ ID NO: 1711309 - RNA, 19 nt, Homo sapiens
  misc_RNA (1)...(19): siRNA sense strand
gagguacaaccgcaguuua

SEQ ID NO: 1711310 - RNA, 19 nt, Homo sapiens
  misc_RNA (1)...(19): siRNA sense strand
ggucagcaacucaauaaau

SEQ ID NO: 1711311 - RNA, 19 nt, Homo sapiens
  misc_RNA (1)...(19): siRNA sense strand
gaugacaccuacuauugca

SEQ ID NO: 1711312 - RNA, 19 nt, Homo sapiens
  misc_RNA (1)...(19): siRNA sense strand
caucuaggaggcuuauaua

SEQ ID NO: 1711313 - RNA, 19 nt, Homo sapiens
  misc_RNA (1)...(19): siRNA sense strand
ggaaagaaaugccugcuua

SEQ ID NO: 1711314 - RNA, 19 nt, Homo sapiens
  misc_RNA (1)...(19): siRNA sense strand
caagagagguuauagcaua

SEQ ID NO: 1711315 - RNA, 19 nt, Homo sapiens
  misc_RNA (1)...(19): siRNA sense strand
gcaaugaccuguauuugga

SEQ ID NO: 1711316 - RNA, 19 nt, Homo sapiens
  misc_RNA (1)...(19): siRNA sense strand
ggaaugcccuucuaaaugu

SEQ ID NO: 1711317 - RNA, 19 nt, Homo sapiens
  misc_RNA (1)...(19): siRNA sense strand
gagaugaguuguagcuaua

SEQ ID NO: 1711318 - RNA, 19 nt, Homo sapiens
  misc_RNA (1)...(19): siRNA sense strand
ggauucaucucaauagaaa

SEQ ID NO: 1711319 - RNA, 19 nt, Homo sapiens
  misc_RNA (1)...(19): siRNA sense strand
gaaccgagccuugauauug

SEQ ID NO: 1711320 - RNA, 19 nt, Homo sapiens
  misc_RNA (1)...(19): siRNA sense strand
gaaauggaauuaugaggau

SEQ ID NO: 1711321 - RNA, 19 nt, Homo sapiens
  misc_RNA (1)...(19): siRNA sense strand
caacucauguaacagauuu

SEQ ID NO: 1711322 - RNA, 19 nt, Homo sapiens
  misc_RNA (1)...(19): siRNA sense strand
gcacaugaauuaucacaag

SEQ ID NO: 1711323 - RNA, 19 nt, Homo sapiens
  misc_RNA (1)...(19): siRNA sense strand
cagcagagucuaagaaaua

SEQ ID NO: 1711324 - RNA, 19 nt, Homo sapiens
  misc_RNA (1)...(19): siRNA sense strand
ugagucaucuucauacuuu

SEQ ID NO: 1711325 - RNA, 19 nt, Homo sapiens
  misc_RNA (1)...(19): siRNA sense strand
ggacaacuuucucucauuc

SEQ ID NO: 1711326 - RNA, 19 nt, Homo sapiens
  misc_RNA (1)...(19): siRNA sense strand
gauaaacucugacacucuu

SEQ ID NO: 1711327 - RNA, 19 nt, Homo sapiens
  misc_RNA (1)...(19): siRNA sense strand
auaacacucugcacuauua

SEQ ID NO: 1711328 - RNA, 19 nt, Homo sapiens
  misc_RNA (1)...(19): siRNA sense strand
gauuggcuauagaguauua

SEQ ID NO: 1711329 - RNA, 19 nt, Homo sapiens
  misc_RNA (1)...(19): siRNA sense strand
aaacggaaguuauagaaga

SEQ ID NO: 1711330 - RNA, 19 nt, Homo sapiens
  misc_RNA (1)...(19): siRNA sense strand
ccgcagggcuggugucuaa

SEQ ID NO: 1711331 - RNA, 19 nt, Homo sapiens
  misc_RNA (1)...(19): siRNA sense strand
acaccaagcacaugaauua

SEQ ID NO: 1711332 - RNA, 19 nt, Homo sapiens
  misc_RNA (1)...(19): siRNA sense strand
uaagauugcucuauugugu

SEQ ID NO: 1711333 - RNA, 19 nt, Homo sapiens
  misc_RNA (1)...(19): siRNA sense strand
gcaauaugcuagguuuaaa

SEQ ID NO: 1711334 - RNA, 19 nt, Homo sapiens
  misc_RNA (1)...(19): siRNA sense strand
gagaacucguuguaugaua

SEQ ID NO: 1711335 - RNA, 19 nt, Homo sapiens
  misc_RNA (1)...(19): siRNA sense strand
caagaaauauccagagaag

SEQ ID NO: 1711336 - RNA, 19 nt, Homo sapiens
  misc_RNA (1)...(19): siRNA sense strand
gaaaugaagcccagguuug

SEQ ID NO: 1711337 - RNA, 19 nt, Homo sapiens
  misc_RNA (1)...(19): siRNA sense strand
aagaaaugccugcuuauua

SEQ ID NO: 1711338 - RNA, 19 nt, Homo sapiens
  misc_RNA (1)...(19): siRNA sense strand
cuaggaggcuuauauaaau

SEQ ID NO: 1711339 - RNA, 19 nt, Homo sapiens
  misc_RNA (1)...(19): siRNA sense strand
caagagagaacucguugua

SEQ ID NO: 1711340 - RNA, 19 nt, Homo sapiens
  misc_RNA (1)...(19): siRNA sense strand
gguagaaacuauuuaugga

SEQ ID NO: 1711341 - RNA, 19 nt, Homo sapiens
  misc_RNA (1)...(19): siRNA sense strand
ccaagcacaugaauuauca

SEQ ID NO: 1711342 - RNA, 19 nt, Homo sapiens
  misc_RNA (1)...(19): siRNA sense strand
gacaugguauggaaguaua

SEQ ID NO: 1711343 - RNA, 19 nt, Homo sapiens
  misc_RNA (1)...(19): siRNA sense strand
gaacugaaccgagccuuga

SEQ ID NO: 1711344 - RNA, 19 nt, Homo sapiens
  misc_RNA (1)...(19): siRNA sense strand
gcaaagaaguugggaaugc

SEQ ID NO: 1711345 - RNA, 19 nt, Homo sapiens
  misc_RNA (1)...(19): siRNA sense strand
cagauuuccugguauauga

SEQ ID NO: 1711346 - RNA, 19 nt, Homo sapiens
  misc_RNA (1)...(19): siRNA sense strand
cagauuggcuauagaguau

SEQ ID NO: 1711347 - RNA, 19 nt, Homo sapiens
  misc_RNA (1)...(19): siRNA sense strand
guagcacccauuuaaauua

SEQ ID NO: 1711348 - RNA, 19 nt, Homo sapiens
  misc_RNA (1)...(19): siRNA sense strand
gcagggcgaggacugauua

SEQ ID NO: 1711349 - RNA, 19 nt, Homo sapiens
  misc_RNA (1)...(19): siRNA sense strand
gaaaugcgcuaugaaugca

SEQ ID NO: 1711350 - RNA, 19 nt, Homo sapiens
  misc_RNA (1)...(19): siRNA sense strand
ccaaaucacuggagacucu

SEQ ID NO: 1711351 - RNA, 19 nt, Homo sapiens
  misc_RNA (1)...(19): siRNA sense strand
gcaaggauaaacuccauuu

SEQ ID NO: 1711352 - RNA, 19 nt, Homo sapiens
  misc_RNA (1)...(19): siRNA sense strand
gagcaaguagagaagauua

SEQ ID NO: 1711353 - RNA, 19 nt, Homo sapiens
  misc_RNA (1)...(19): siRNA sense strand
caaaguuucuuacugaagu

SEQ ID NO: 1711354 - RNA, 19 nt, Homo sapiens
  misc_RNA (1)...(19): siRNA sense strand
gaucaucacugcccuacca

SEQ ID NO: 1711355 - RNA, 19 nt, Homo sapiens
  misc_RNA (1)...(19): siRNA sense strand
ccagguuuguuauuucaua

SEQ ID NO: 1711356 - RNA, 19 nt, Homo sapiens
  misc_RNA (1)...(19): siRNA sense strand
gcacugcucucaggcuuau

SEQ ID NO: 1711357 - RNA, 19 nt, Homo sapiens
  misc_RNA (1)...(19): siRNA sense strand
gcaacucaauaaaugcauu

SEQ ID NO: 1711358 - RNA, 19 nt, Homo sapiens
  misc_RNA (1)...(19): siRNA sense strand
gagagaacucguuguauga

SEQ ID NO: 1711359 - RNA, 19 nt, Homo sapiens
  misc_RNA (1)...(19): siRNA sense strand
agagagaacucguuguaug

SEQ ID NO: 1711360 - RNA, 19 nt, Homo sapiens
  misc_RNA (1)...(19): siRNA sense strand
caaaucuccuggucccuuu

SEQ ID NO: 1711361 - RNA, 19 nt, Homo sapiens
  misc_RNA (1)...(19): siRNA sense strand
gaucugagaccgaggagaa

SEQ ID NO: 1711362 - RNA, 19 nt, Homo sapiens
  misc_RNA (1)...(19): siRNA sense strand
gggaaugcccuucuaaaug

SEQ ID NO: 1711363 - RNA, 19 nt, Homo sapiens
  misc_RNA (1)...(19): siRNA sense strand
ggaaaugaagcccagguuu

SEQ ID NO: 1711364 - RNA, 19 nt, Homo sapiens
  misc_RNA (1)...(19): siRNA sense strand
ggauuuaucagucagcuuu

SEQ ID NO: 1711365 - RNA, 19 nt, Homo sapiens
  misc_RNA (1)...(19): siRNA sense strand
ccaguggauuguuaaguuu

SEQ ID NO: 1711366 - RNA, 19 nt, Homo sapiens
  misc_RNA (1)...(19): siRNA sense strand
agaaauauccagagaaguu

SEQ ID NO: 1711367 - RNA, 19 nt, Homo sapiens
  misc_RNA (1)...(19): siRNA sense strand
guauggaaguauaacauug

SEQ ID NO: 1711368 - RNA, 19 nt, Homo sapiens
  misc_RNA (1)...(19): siRNA sense strand
uuaaugacaugguauggaa

SEQ ID NO: 1711369 - RNA, 19 nt, Homo sapiens
  misc_RNA (1)...(19): siRNA sense strand
caugggagcucugguagaa

SEQ ID NO: 1711370 - RNA, 19 nt, Homo sapiens
  misc_RNA (1)...(19): siRNA sense strand
gcaauucauuucuggaagu

SEQ ID NO: 1711371 - RNA, 19 nt, Homo sapiens
  misc_RNA (1)...(19): siRNA sense strand
agaaaugccugcuuauuac

SEQ ID NO: 1711372 - RNA, 19 nt, Homo sapiens
  misc_RNA (1)...(19): siRNA sense strand
gaagaccgaauuccaguug

SEQ ID NO: 1711373 - RNA, 19 nt, Homo sapiens
  misc_RNA (1)...(19): siRNA sense strand
agacugcuuuguugagaua

SEQ ID NO: 1711374 - RNA, 19 nt, Homo sapiens
  misc_RNA (1)...(19): siRNA sense strand
uagcauauaucuuggaaag

SEQ ID NO: 1711375 - RNA, 19 nt, Homo sapiens
  misc_RNA (1)...(19): siRNA sense strand
ugaaagagcaaguagagaa

SEQ ID NO: 1711376 - RNA, 19 nt, Homo sapiens
  misc_RNA (1)...(19): siRNA sense strand
gaauuccaguugcuuuaug

SEQ ID NO: 1711377 - RNA, 19 nt, Homo sapiens
  misc_RNA (1)...(19): siRNA sense strand
cauauuggauuguucuuca

SEQ ID NO: 1711378 - RNA, 19 nt, Homo sapiens
  misc_RNA (1)...(19): siRNA sense strand
guauaacacucugcacuau

SEQ ID NO: 1711379 - RNA, 19 nt, Homo sapiens
  misc_RNA (1)...(19): siRNA sense strand
gagcacugguuacagaaug

SEQ ID NO: 1711380 - RNA, 19 nt, Homo sapiens
  misc_RNA (1)...(19): siRNA sense strand
gagcaacucauguaacaga

SEQ ID NO: 1711381 - RNA, 19 nt, Homo sapiens
  misc_RNA (1)...(19): siRNA sense strand
ucaaaggauuuaucaguca

SEQ ID NO: 1711382 - RNA, 19 nt, Homo sapiens
  misc_RNA (1)...(19): siRNA sense strand
gagaagauuuugacaauuc

SEQ ID NO: 1711383 - RNA, 19 nt, Homo sapiens
  misc_RNA (1)...(19): siRNA sense strand
ccagugacuuaucuguaua

SEQ ID NO: 1711384 - RNA, 19 nt, Homo sapiens
  misc_RNA (1)...(19): siRNA sense strand
gucagcaacucaauaaaug

SEQ ID NO: 1711385 - RNA, 19 nt, Homo sapiens
  misc_RNA (1)...(19): siRNA sense strand
gaaagaaaugccugcuuau

SEQ ID NO: 1711386 - RNA, 19 nt, Homo sapiens
  misc_RNA (1)...(19): siRNA sense strand
ugguggaucugguuguuua

SEQ ID NO: 1711387 - RNA, 19 nt, Homo sapiens
  misc_RNA (1)...(19): siRNA sense strand
gaggacauuugcagauuuc

SEQ ID NO: 1711388 - RNA, 19 nt, Homo sapiens
  misc_RNA (1)...(19): siRNA sense strand
uagagcaacucauguaaca

SEQ ID NO: 1711389 - RNA, 19 nt, Homo sapiens
  misc_RNA (1)...(19): siRNA sense strand
guuuacagaugaaugacua

SEQ ID NO: 1711390 - RNA, 19 nt, Homo sapiens
  misc_RNA (1)...(19): siRNA sense strand
agaaccagcuccaucuuug

SEQ ID NO: 1711391 - RNA, 19 nt, Homo sapiens
  misc_RNA (1)...(19): siRNA sense strand
ccagagccauauuggauug

SEQ ID NO: 1711392 - RNA, 19 nt, Homo sapiens
  misc_RNA (1)...(19): siRNA sense strand
cagaugacaccuacuauug

SEQ ID NO: 1711393 - RNA, 19 nt, Homo sapiens
  misc_RNA (1)...(19): siRNA sense strand
gaaagccguuuuaaucuga

SEQ ID NO: 1711394 - RNA, 19 nt, Homo sapiens
  misc_RNA (1)...(19): siRNA sense strand
ggaacuugguguaaagaca

SEQ ID NO: 1711395 - RNA, 19 nt, Homo sapiens
  misc_RNA (1)...(19): siRNA sense strand
gcuuugggccuuaacauuu

SEQ ID NO: 1711396 - RNA, 19 nt, Homo sapiens
  misc_RNA (1)...(19): siRNA sense strand
ugagaugaguuguagcuau

SEQ ID NO: 1711397 - RNA, 19 nt, Homo sapiens
  misc_RNA (1)...(19): siRNA sense strand
uacaggcucugauucaauu

SEQ ID NO: 1711398 - RNA, 19 nt, Homo sapiens
  misc_RNA (1)...(19): siRNA sense strand
gcagcagagucuaagaaau

SEQ ID NO: 1711399 - RNA, 19 nt, Homo sapiens
  misc_RNA (1)...(19): siRNA sense strand
gaaacuggauccugcuacu

SEQ ID NO: 1711400 - RNA, 19 nt, Homo sapiens
  misc_RNA (1)...(19): siRNA sense strand
ccacacugguuacuuggaa

SEQ ID NO: 1711401 - RNA, 19 nt, Homo sapiens
  misc_RNA (1)...(19): siRNA sense strand
cgagaucucuuaaaaguga

SEQ ID NO: 1711402 - RNA, 19 nt, Homo sapiens
  misc_RNA (1)...(19): siRNA sense strand
cgauucaucacacacauua

SEQ ID NO: 1711403 - RNA, 19 nt, Homo sapiens
  misc_RNA (1)...(19): siRNA sense strand
gaaugcaauugguuugauc

SEQ ID NO: 1711404 - RNA, 19 nt, Homo sapiens
  misc_RNA (1)...(19): siRNA sense strand
gggaaugugugucuucgau

SEQ ID NO: 1711405 - RNA, 19 nt, Homo sapiens
  misc_RNA (1)...(19): siRNA sense strand
cacaagaaauauccagaga

SEQ ID NO: 1711406 - RNA, 19 nt, Homo sapiens
  misc_RNA (1)...(19): siRNA sense strand
ugaggacauuugcagauuu

SEQ ID NO: 1711407 - RNA, 19 nt, Homo sapiens
  misc_RNA (1)...(19): siRNA sense strand
ggaagucaaugagcaacga

SEQ ID NO: 1711408 - RNA, 19 nt, Homo sapiens
  misc_RNA (1)...(19): siRNA sense strand
ucagggaacuugguguaaa

SEQ ID NO: 1711409 - RNA, 19 nt, Homo sapiens
  misc_RNA (1)...(19): siRNA sense strand
gagguacaaccgcaguuua

SEQ ID NO: 1711410 - RNA, 19 nt, Homo sapiens
  misc_RNA (1)...(19): siRNA sense strand
ggucagcaacucaauaaau

SEQ ID NO: 1711411 - RNA, 19 nt, Homo sapiens
  misc_RNA (1)...(19): siRNA sense strand
gaugacaccuacuauugca

SEQ ID NO: 1711412 - RNA, 19 nt, Homo sapiens
  misc_RNA (1)...(19): siRNA sense strand
caucuaggaggcuuauaua

SEQ ID NO: 1711413 - RNA, 19 nt, Homo sapiens
  misc_RNA (1)...(19): siRNA sense strand
gagcugggccucaacgauu

SEQ ID NO: 1711414 - RNA, 19 nt, Homo sapiens
  misc_RNA (1)...(19): siRNA sense strand
ggagagacuuacuacuaca

SEQ ID NO: 1711415 - RNA, 19 nt, Homo sapiens
  misc_RNA (1)...(19): siRNA sense strand
ccgagacguuugcuuugua

SEQ ID NO: 1711416 - RNA, 19 nt, Homo sapiens
  misc_RNA (1)...(19): siRNA sense strand
caacgauuaccuagacauu

SEQ ID NO: 1711417 - RNA, 19 nt, Homo sapiens
  misc_RNA (1)...(19): siRNA sense strand
guucuuaccuggagagacu

SEQ ID NO: 1711418 - RNA, 19 nt, Homo sapiens
  misc_RNA (1)...(19): siRNA sense strand
gacguuugcuuuguacaug

SEQ ID NO: 1711419 - RNA, 19 nt, Homo sapiens
  misc_RNA (1)...(19): siRNA sense strand
cuggagagacuuacuacua

SEQ ID NO: 1711420 - RNA, 19 nt, Homo sapiens
  misc_RNA (1)...(19): siRNA sense strand
ccucggcuuugaguucuua

SEQ ID NO: 1711421 - RNA, 19 nt, Homo sapiens
  misc_RNA (1)...(19): siRNA sense strand
ccucaacgauuaccuagac

SEQ ID NO: 1711422 - RNA, 19 nt, Homo sapiens
  misc_RNA (1)...(19): siRNA sense strand
acgauuaccuagacauugu

SEQ ID NO: 1711423 - RNA, 19 nt, Homo sapiens
  misc_RNA (1)...(19): siRNA sense strand
uggagagacuuacuacuac

SEQ ID NO: 1711424 - RNA, 19 nt, Homo sapiens
  misc_RNA (1)...(19): siRNA sense strand
gagacuuacuacuacaucu

SEQ ID NO: 1711425 - RNA, 19 nt, Homo sapiens
  misc_RNA (1)...(19): siRNA sense strand
agcugggccucaacgauua

SEQ ID NO: 1711426 - RNA, 19 nt, Homo sapiens
  misc_RNA (1)...(19): siRNA sense strand
ggacuggccaggcuaugag

SEQ ID NO: 1711427 - RNA, 19 nt, Homo sapiens
  misc_RNA (1)...(19): siRNA sense strand
cgagacguuugcuuuguac

SEQ ID NO: 1711428 - RNA, 19 nt, Homo sapiens
  misc_RNA (1)...(19): siRNA sense strand
gggccucaacgauuaccua

SEQ ID NO: 1711429 - RNA, 19 nt, Homo sapiens
  misc_RNA (1)...(19): siRNA sense strand
ggagcugggccucaacgau

SEQ ID NO: 1711430 - RNA, 19 nt, Homo sapiens
  misc_RNA (1)...(19): siRNA sense strand
ggugugcucccugcccuuu

SEQ ID NO: 1711431 - RNA, 19 nt, Homo sapiens
  misc_RNA (1)...(19): siRNA sense strand
gagcugggccucaacgauu

SEQ ID NO: 1711432 - RNA, 19 nt, Homo sapiens
  misc_RNA (1)...(19): siRNA sense strand
ccgacaagauggagcauug

SEQ ID NO: 1711433 - RNA, 19 nt, Homo sapiens
  misc_RNA (1)...(19): siRNA sense strand
ggagagacuuacuacuaca

SEQ ID NO: 1711434 - RNA, 19 nt, Homo sapiens
  misc_RNA (1)...(19): siRNA sense strand
ccgagacguuugcuuugua

SEQ ID NO: 1711435 - RNA, 19 nt, Homo sapiens
  misc_RNA (1)...(19): siRNA sense strand
caacgauuaccuagacauu

SEQ ID NO: 1711436 - RNA, 19 nt, Homo sapiens
  misc_RNA (1)...(19): siRNA sense strand
guucuuaccuggagagacu

SEQ ID NO: 1711437 - RNA, 19 nt, Homo sapiens
  misc_RNA (1)...(19): siRNA sense strand
ccagaguccucccaagauc

SEQ ID NO: 1711438 - RNA, 19 nt, Homo sapiens
  misc_RNA (1)...(19): siRNA sense strand
gacguuugcuuuguacaug

SEQ ID NO: 1711439 - RNA, 19 nt, Homo sapiens
  misc_RNA (1)...(19): siRNA sense strand
cuggagagacuuacuacua

SEQ ID NO: 1711440 - RNA, 19 nt, Homo sapiens
  misc_RNA (1)...(19): siRNA sense strand
ccucggcuuugaguucuua

SEQ ID NO: 1711441 - RNA, 19 nt, Homo sapiens
  misc_RNA (1)...(19): siRNA sense strand
ccucaacgauuaccuagac

SEQ ID NO: 1711442 - RNA, 19 nt, Homo sapiens
  misc_RNA (1)...(19): siRNA sense strand
acgauuaccuagacauugu

SEQ ID NO: 1711443 - RNA, 19 nt, Homo sapiens
  misc_RNA (1)...(19): siRNA sense strand
uggagagacuuacuacuac

SEQ ID NO: 1711444 - RNA, 19 nt, Homo sapiens
  misc_RNA (1)...(19): siRNA sense strand
caauucagaccgacaagau

SEQ ID NO: 1711445 - RNA, 19 nt, Homo sapiens
  misc_RNA (1)...(19): siRNA sense strand
gagacuuacuacuacaucu

SEQ ID NO: 1711446 - RNA, 19 nt, Homo sapiens
  misc_RNA (1)...(19): siRNA sense strand
agcugggccucaacgauua

SEQ ID NO: 1711447 - RNA, 19 nt, Homo sapiens
  misc_RNA (1)...(19): siRNA sense strand
ggacuggccaggcuaugag

SEQ ID NO: 1711448 - RNA, 19 nt, Homo sapiens
  misc_RNA (1)...(19): siRNA sense strand
cgagacguuugcuuuguac

SEQ ID NO: 1711449 - RNA, 19 nt, Homo sapiens
  misc_RNA (1)...(19): siRNA sense strand
gggccucaacgauuaccua

SEQ ID NO: 1711450 - RNA, 19 nt, Homo sapiens
  misc_RNA (1)...(19): siRNA sense strand
gccagaguccucccaagau

SEQ ID NO: 1711451 - RNA, 19 nt, Homo sapiens
  misc_RNA (1)...(19): siRNA sense strand
ggagcugggccucaacgau

SEQ ID NO: 1711452 - RNA, 19 nt, Homo sapiens
  misc_RNA (1)...(19): siRNA sense strand
gacaagauggagcauugau

SEQ ID NO: 1711453 - RNA, 19 nt, Homo sapiens
  misc_RNA (1)...(19): siRNA sense strand
ggugugcucccugcccuuu

SEQ ID NO: 1711454 - RNA, 19 nt, Homo sapiens
  misc_RNA (1)...(19): siRNA sense strand
cgacaagauggagcauuga

SEQ ID NO: 1711455 - RNA, 19 nt, Homo sapiens
  misc_RNA (1)...(19): siRNA sense strand
gagcugggccucaacgauu

SEQ ID NO: 1711456 - RNA, 19 nt, Homo sapiens
  misc_RNA (1)...(19): siRNA sense strand
ccgacaagauggagcauug

SEQ ID NO: 1711457 - RNA, 19 nt, Homo sapiens
  misc_RNA (1)...(19): siRNA sense strand
ggagagacuuacuacuaca

SEQ ID NO: 1711458 - RNA, 19 nt, Homo sapiens
  misc_RNA (1)...(19): siRNA sense strand
ccgagacguuugcuuugua

SEQ ID NO: 1711459 - RNA, 19 nt, Homo sapiens
  misc_RNA (1)...(19): siRNA sense strand
caacgauuaccuagacauu

SEQ ID NO: 1711460 - RNA, 19 nt, Homo sapiens
  misc_RNA (1)...(19): siRNA sense strand
guucuuaccuggagagacu

SEQ ID NO: 1711461 - RNA, 19 nt, Homo sapiens
  misc_RNA (1)...(19): siRNA sense strand
ccagaguccucccaagauc

SEQ ID NO: 1711462 - RNA, 19 nt, Homo sapiens
  misc_RNA (1)...(19): siRNA sense strand
gacguuugcuuuguacaug

SEQ ID NO: 1711463 - RNA, 19 nt, Homo sapiens
  misc_RNA (1)...(19): siRNA sense strand
cuggagagacuuacuacua

SEQ ID NO: 1711464 - RNA, 19 nt, Homo sapiens
  misc_RNA (1)...(19): siRNA sense strand
ccucggcuuugaguucuua

SEQ ID NO: 1711465 - RNA, 19 nt, Homo sapiens
  misc_RNA (1)...(19): siRNA sense strand
ccucaacgauuaccuagac

SEQ ID NO: 1711466 - RNA, 19 nt, Homo sapiens
  misc_RNA (1)...(19): siRNA sense strand
acgauuaccuagacauugu

SEQ ID NO: 1711467 - RNA, 19 nt, Homo sapiens
  misc_RNA (1)...(19): siRNA sense strand
uggagagacuuacuacuac

SEQ ID NO: 1711468 - RNA, 19 nt, Homo sapiens
  misc_RNA (1)...(19): siRNA sense strand
caauucagaccgacaagau

SEQ ID NO: 1711469 - RNA, 19 nt, Homo sapiens
  misc_RNA (1)...(19): siRNA sense strand
gagacuuacuacuacaucu

SEQ ID NO: 1711470 - RNA, 19 nt, Homo sapiens
  misc_RNA (1)...(19): siRNA sense strand
agcugggccucaacgauua

SEQ ID NO: 1711471 - RNA, 19 nt, Homo sapiens
  misc_RNA (1)...(19): siRNA sense strand
ggacuggccaggcuaugag

SEQ ID NO: 1711472 - RNA, 19 nt, Homo sapiens
  misc_RNA (1)...(19): siRNA sense strand
cgagacguuugcuuuguac

SEQ ID NO: 1711473 - RNA, 19 nt, Homo sapiens
  misc_RNA (1)...(19): siRNA sense strand
gggccucaacgauuaccua

SEQ ID NO: 1711474 - RNA, 19 nt, Homo sapiens
  misc_RNA (1)...(19): siRNA sense strand
gccagaguccucccaagau

SEQ ID NO: 1711475 - RNA, 19 nt, Homo sapiens
  misc_RNA (1)...(19): siRNA sense strand
ggagcugggccucaacgau

SEQ ID NO: 1711476 - RNA, 19 nt, Homo sapiens
  misc_RNA (1)...(19): siRNA sense strand
gacaagauggagcauugau

SEQ ID NO: 1711477 - RNA, 19 nt, Homo sapiens
  misc_RNA (1)...(19): siRNA sense strand
ggugugcucccugcccuuu

SEQ ID NO: 1711478 - RNA, 19 nt, Homo sapiens
  misc_RNA (1)...(19): siRNA sense strand
cgacaagauggagcauuga

SEQ ID NO: 1711479 - RNA, 19 nt, Homo sapiens
  misc_RNA (1)...(19): siRNA sense strand
gagcugggccucaacgauu

SEQ ID NO: 1711480 - RNA, 19 nt, Homo sapiens
  misc_RNA (1)...(19): siRNA sense strand
ggagagacuuacuacuaca

SEQ ID NO: 1711481 - RNA, 19 nt, Homo sapiens
  misc_RNA (1)...(19): siRNA sense strand
ccgagacguuugcuuugua

SEQ ID NO: 1711482 - RNA, 19 nt, Homo sapiens
  misc_RNA (1)...(19): siRNA sense strand
caacgauuaccuagacauu

SEQ ID NO: 1711483 - RNA, 19 nt, Homo sapiens
  misc_RNA (1)...(19): siRNA sense strand
guucuuaccuggagagacu

SEQ ID NO: 1711484 - RNA, 19 nt, Homo sapiens
  misc_RNA (1)...(19): siRNA sense strand
gacguuugcuuuguacaug

SEQ ID NO: 1711485 - RNA, 19 nt, Homo sapiens
  misc_RNA (1)...(19): siRNA sense strand
cuggagagacuuacuacua

SEQ ID NO: 1711486 - RNA, 19 nt, Homo sapiens
  misc_RNA (1)...(19): siRNA sense strand
ccucggcuuugaguucuua

SEQ ID NO: 1711487 - RNA, 19 nt, Homo sapiens
  misc_RNA (1)...(19): siRNA sense strand
ccucaacgauuaccuagac

SEQ ID NO: 1711488 - RNA, 19 nt, Homo sapiens
  misc_RNA (1)...(19): siRNA sense strand
acgauuaccuagacauugu

SEQ ID NO: 1711489 - RNA, 19 nt, Homo sapiens
  misc_RNA (1)...(19): siRNA sense strand
uggagagacuuacuacuac

SEQ ID NO: 1711490 - RNA, 19 nt, Homo sapiens
  misc_RNA (1)...(19): siRNA sense strand
gagacuuacuacuacaucu

SEQ ID NO: 1711491 - RNA, 19 nt, Homo sapiens
  misc_RNA (1)...(19): siRNA sense strand
agcugggccucaacgauua

SEQ ID NO: 1711492 - RNA, 19 nt, Homo sapiens
  misc_RNA (1)...(19): siRNA sense strand
ggacuggccaggcuaugag

SEQ ID NO: 1711493 - RNA, 19 nt, Homo sapiens
  misc_RNA (1)...(19): siRNA sense strand
cgagacguuugcuuuguac

SEQ ID NO: 1711494 - RNA, 19 nt, Homo sapiens
  misc_RNA (1)...(19): siRNA sense strand
gggccucaacgauuaccua

SEQ ID NO: 1711495 - RNA, 19 nt, Homo sapiens
  misc_RNA (1)...(19): siRNA sense strand
ggagcugggccucaacgau

SEQ ID NO: 1711496 - RNA, 19 nt, Homo sapiens
  misc_RNA (1)...(19): siRNA sense strand
ggugugcucccugcccuuu

SEQ ID NO: 1711497 - RNA, 19 nt, Homo sapiens
  misc_RNA (1)...(19): siRNA sense strand
gagcugggccucaacgauu

SEQ ID NO: 1711498 - RNA, 19 nt, Homo sapiens
  misc_RNA (1)...(19): siRNA sense strand
ccgacaagauggagcauug

SEQ ID NO: 1711499 - RNA, 19 nt, Homo sapiens
  misc_RNA (1)...(19): siRNA sense strand
ggagagacuuacuacuaca

SEQ ID NO: 1711500 - RNA, 19 nt, Homo sapiens
  misc_RNA (1)...(19): siRNA sense strand
ccgagacguuugcuuugua

SEQ ID NO: 1711501 - RNA, 19 nt, Homo sapiens
  misc_RNA (1)...(19): siRNA sense strand
caacgauuaccuagacauu

SEQ ID NO: 1711502 - RNA, 19 nt, Homo sapiens
  misc_RNA (1)...(19): siRNA sense strand
guucuuaccuggagagacu

SEQ ID NO: 1711503 - RNA, 19 nt, Homo sapiens
  misc_RNA (1)...(19): siRNA sense strand
ccagaguccucccaagauc

SEQ ID NO: 1711504 - RNA, 19 nt, Homo sapiens
  misc_RNA (1)...(19): siRNA sense strand
gacguuugcuuuguacaug

SEQ ID NO: 1711505 - RNA, 19 nt, Homo sapiens
  misc_RNA (1)...(19): siRNA sense strand
cuggagagacuuacuacua

SEQ ID NO: 1711506 - RNA, 19 nt, Homo sapiens
  misc_RNA (1)...(19): siRNA sense strand
ccucggcuuugaguucuua

SEQ ID NO: 1711507 - RNA, 19 nt, Homo sapiens
  misc_RNA (1)...(19): siRNA sense strand
ccucaacgauuaccuagac

SEQ ID NO: 1711508 - RNA, 19 nt, Homo sapiens
  misc_RNA (1)...(19): siRNA sense strand
acgauuaccuagacauugu

SEQ ID NO: 1711509 - RNA, 19 nt, Homo sapiens
  misc_RNA (1)...(19): siRNA sense strand
uggagagacuuacuacuac

SEQ ID NO: 1711510 - RNA, 19 nt, Homo sapiens
  misc_RNA (1)...(19): siRNA sense strand
caauucagaccgacaagau

SEQ ID NO: 1711511 - RNA, 19 nt, Homo sapiens
  misc_RNA (1)...(19): siRNA sense strand
gagacuuacuacuacaucu

SEQ ID NO: 1711512 - RNA, 19 nt, Homo sapiens
  misc_RNA (1)...(19): siRNA sense strand
agcugggccucaacgauua

SEQ ID NO: 1711513 - RNA, 19 nt, Homo sapiens
  misc_RNA (1)...(19): siRNA sense strand
ggacuggccaggcuaugag

SEQ ID NO: 1711514 - RNA, 19 nt, Homo sapiens
  misc_RNA (1)...(19): siRNA sense strand
cgagacguuugcuuuguac

SEQ ID NO: 1711515 - RNA, 19 nt, Homo sapiens
  misc_RNA (1)...(19): siRNA sense strand
gggccucaacgauuaccua

SEQ ID NO: 1711516 - RNA, 19 nt, Homo sapiens
  misc_RNA (1)...(19): siRNA sense strand
gccagaguccucccaagau

SEQ ID NO: 1711517 - RNA, 19 nt, Homo sapiens
  misc_RNA (1)...(19): siRNA sense strand
ggagcugggccucaacgau

SEQ ID NO: 1711518 - RNA, 19 nt, Homo sapiens
  misc_RNA (1)...(19): siRNA sense strand
gacaagauggagcauugau

SEQ ID NO: 1711519 - RNA, 19 nt, Homo sapiens
  misc_RNA (1)...(19): siRNA sense strand
ggugugcucccugcccuuu

SEQ ID NO: 1711520 - RNA, 19 nt, Homo sapiens
  misc_RNA (1)...(19): siRNA sense strand
cgacaagauggagcauuga

SEQ ID NO: 1711521 - RNA, 19 nt, Homo sapiens
  misc_RNA (1)...(19): siRNA sense strand
gagcugggccucaacgauu

SEQ ID NO: 1711522 - RNA, 19 nt, Homo sapiens
  misc_RNA (1)...(19): siRNA sense strand
ccgacaagauggagcauug

SEQ ID NO: 1711523 - RNA, 19 nt, Homo sapiens
  misc_RNA (1)...(19): siRNA sense strand
ggagagacuuacuacuaca

SEQ ID NO: 1711524 - RNA, 19 nt, Homo sapiens
  misc_RNA (1)...(19): siRNA sense strand
ccgagacguuugcuuugua

SEQ ID NO: 1711525 - RNA, 19 nt, Homo sapiens
  misc_RNA (1)...(19): siRNA sense strand
caacgauuaccuagacauu

SEQ ID NO: 1711526 - RNA, 19 nt, Homo sapiens
  misc_RNA (1)...(19): siRNA sense strand
guucuuaccuggagagacu

SEQ ID NO: 1711527 - RNA, 19 nt, Homo sapiens
  misc_RNA (1)...(19): siRNA sense strand
ccagaguccucccaagauc

SEQ ID NO: 1711528 - RNA, 19 nt, Homo sapiens
  misc_RNA (1)...(19): siRNA sense strand
gacguuugcuuuguacaug

SEQ ID NO: 1711529 - RNA, 19 nt, Homo sapiens
  misc_RNA (1)...(19): siRNA sense strand
cuggagagacuuacuacua

SEQ ID NO: 1711530 - RNA, 19 nt, Homo sapiens
  misc_RNA (1)...(19): siRNA sense strand
ccucggcuuugaguucuua

SEQ ID NO: 1711531 - RNA, 19 nt, Homo sapiens
  misc_RNA (1)...(19): siRNA sense strand
ccucaacgauuaccuagac

SEQ ID NO: 1711532 - RNA, 19 nt, Homo sapiens
  misc_RNA (1)...(19): siRNA sense strand
acgauuaccuagacauugu

SEQ ID NO: 1711533 - RNA, 19 nt, Homo sapiens
  misc_RNA (1)...(19): siRNA sense strand
uggagagacuuacuacuac

SEQ ID NO: 1711534 - RNA, 19 nt, Homo sapiens
  misc_RNA (1)...(19): siRNA sense strand
caauucagaccgacaagau

SEQ ID NO: 1711535 - RNA, 19 nt, Homo sapiens
  misc_RNA (1)...(19): siRNA sense strand
gagacuuacuacuacaucu

SEQ ID NO: 1711536 - RNA, 19 nt, Homo sapiens
  misc_RNA (1)...(19): siRNA sense strand
agcugggccucaacgauua

SEQ ID NO: 1711537 - RNA, 19 nt, Homo sapiens
  misc_RNA (1)...(19): siRNA sense strand
ggacuggccaggcuaugag

SEQ ID NO: 1711538 - RNA, 19 nt, Homo sapiens
  misc_RNA (1)...(19): siRNA sense strand
cgagacguuugcuuuguac

SEQ ID NO: 1711539 - RNA, 19 nt, Homo sapiens
  misc_RNA (1)...(19): siRNA sense strand
gggccucaacgauuaccua

SEQ ID NO: 1711540 - RNA, 19 nt, Homo sapiens
  misc_RNA (1)...(19): siRNA sense strand
gccagaguccucccaagau

SEQ ID NO: 1711541 - RNA, 19 nt, Homo sapiens
  misc_RNA (1)...(19): siRNA sense strand
ggagcugggccucaacgau

SEQ ID NO: 1711542 - RNA, 19 nt, Homo sapiens
  misc_RNA (1)...(19): siRNA sense strand
gacaagauggagcauugau

SEQ ID NO: 1711543 - RNA, 19 nt, Homo sapiens
  misc_RNA (1)...(19): siRNA sense strand
ggugugcucccugcccuuu

SEQ ID NO: 1711544 - RNA, 19 nt, Homo sapiens
  misc_RNA (1)...(19): siRNA sense strand
cgacaagauggagcauuga

SEQ ID NO: 1711545 - RNA, 19 nt, Homo sapiens
  misc_RNA (1)...(19): siRNA sense strand
gagcugggccucaacgauu

SEQ ID NO: 1711546 - RNA, 19 nt, Homo sapiens
  misc_RNA (1)...(19): siRNA sense strand
ggagagacuuacuacuaca

SEQ ID NO: 1711547 - RNA, 19 nt, Homo sapiens
  misc_RNA (1)...(19): siRNA sense strand
ccgagacguuugcuuugua

SEQ ID NO: 1711548 - RNA, 19 nt, Homo sapiens
  misc_RNA (1)...(19): siRNA sense strand
caacgauuaccuagacauu

SEQ ID NO: 1711549 - RNA, 19 nt, Homo sapiens
  misc_RNA (1)...(19): siRNA sense strand
guucuuaccuggagagacu

SEQ ID NO: 1711550 - RNA, 19 nt, Homo sapiens
  misc_RNA (1)...(19): siRNA sense strand
gacguuugcuuuguacaug

SEQ ID NO: 1711551 - RNA, 19 nt, Homo sapiens
  misc_RNA (1)...(19): siRNA sense strand
cuggagagacuuacuacua

SEQ ID NO: 1711552 - RNA, 19 nt, Homo sapiens
  misc_RNA (1)...(19): siRNA sense strand
ccucggcuuugaguucuua

SEQ ID NO: 1711553 - RNA, 19 nt, Homo sapiens
  misc_RNA (1)...(19): siRNA sense strand
ccucaacgauuaccuagac

SEQ ID NO: 1711554 - RNA, 19 nt, Homo sapiens
  misc_RNA (1)...(19): siRNA sense strand
acgauuaccuagacauugu

SEQ ID NO: 1711555 - RNA, 19 nt, Homo sapiens
  misc_RNA (1)...(19): siRNA sense strand
uggagagacuuacuacuac

SEQ ID NO: 1711556 - RNA, 19 nt, Homo sapiens
  misc_RNA (1)...(19): siRNA sense strand
gagacuuacuacuacaucu

SEQ ID NO: 1711557 - RNA, 19 nt, Homo sapiens
  misc_RNA (1)...(19): siRNA sense strand
agcugggccucaacgauua

SEQ ID NO: 1711558 - RNA, 19 nt, Homo sapiens
  misc_RNA (1)...(19): siRNA sense strand
ggacuggccaggcuaugag

SEQ ID NO: 1711559 - RNA, 19 nt, Homo sapiens
  misc_RNA (1)...(19): siRNA sense strand
cgagacguuugcuuuguac

SEQ ID NO: 1711560 - RNA, 19 nt, Homo sapiens
  misc_RNA (1)...(19): siRNA sense strand
gggccucaacgauuaccua

SEQ ID NO: 1711561 - RNA, 19 nt, Homo sapiens
  misc_RNA (1)...(19): siRNA sense strand
ggagcugggccucaacgau

SEQ ID NO: 1711562 - RNA, 19 nt, Homo sapiens
  misc_RNA (1)...(19): siRNA sense strand
ggugugcucccugcccuuu

SEQ ID NO: 1711563 - RNA, 19 nt, Homo sapiens
  misc_RNA (1)...(19): siRNA sense strand
gagcugggccucaacgauu

SEQ ID NO: 1711564 - RNA, 19 nt, Homo sapiens
  misc_RNA (1)...(19): siRNA sense strand
ccgacaagauggagcauug

SEQ ID NO: 1711565 - RNA, 19 nt, Homo sapiens
  misc_RNA (1)...(19): siRNA sense strand
ggagagacuuacuacuaca

SEQ ID NO: 1711566 - RNA, 19 nt, Homo sapiens
  misc_RNA (1)...(19): siRNA sense strand
ccgagacguuugcuuugua

SEQ ID NO: 1711567 - RNA, 19 nt, Homo sapiens
  misc_RNA (1)...(19): siRNA sense strand
caacgauuaccuagacauu

SEQ ID NO: 1711568 - RNA, 19 nt, Homo sapiens
  misc_RNA (1)...(19): siRNA sense strand
guucuuaccuggagagacu

SEQ ID NO: 1711569 - RNA, 19 nt, Homo sapiens
  misc_RNA (1)...(19): siRNA sense strand
ccagaguccucccaagauc

SEQ ID NO: 1711570 - RNA, 19 nt, Homo sapiens
  misc_RNA (1)...(19): siRNA sense strand
gacguuugcuuuguacaug

SEQ ID NO: 1711571 - RNA, 19 nt, Homo sapiens
  misc_RNA (1)...(19): siRNA sense strand
cuggagagacuuacuacua

SEQ ID NO: 1711572 - RNA, 19 nt, Homo sapiens
  misc_RNA (1)...(19): siRNA sense strand
ccucggcuuugaguucuua

SEQ ID NO: 1711573 - RNA, 19 nt, Homo sapiens
  misc_RNA (1)...(19): siRNA sense strand
ccucaacgauuaccuagac

SEQ ID NO: 1711574 - RNA, 19 nt, Homo sapiens
  misc_RNA (1)...(19): siRNA sense strand
acgauuaccuagacauugu

SEQ ID NO: 1711575 - RNA, 19 nt, Homo sapiens
  misc_RNA (1)...(19): siRNA sense strand
uggagagacuuacuacuac

SEQ ID NO: 1711576 - RNA, 19 nt, Homo sapiens
  misc_RNA (1)...(19): siRNA sense strand
caauucagaccgacaagau

SEQ ID NO: 1711577 - RNA, 19 nt, Homo sapiens
  misc_RNA (1)...(19): siRNA sense strand
gagacuuacuacuacaucu

SEQ ID NO: 1711578 - RNA, 19 nt, Homo sapiens
  misc_RNA (1)...(19): siRNA sense strand
agcugggccucaacgauua

SEQ ID NO: 1711579 - RNA, 19 nt, Homo sapiens
  misc_RNA (1)...(19): siRNA sense strand
ggacuggccaggcuaugag

SEQ ID NO: 1711580 - RNA, 19 nt, Homo sapiens
  misc_RNA (1)...(19): siRNA sense strand
cgagacguuugcuuuguac

SEQ ID NO: 1711581 - RNA, 19 nt, Homo sapiens
  misc_RNA (1)...(19): siRNA sense strand
gggccucaacgauuaccua

SEQ ID NO: 1711582 - RNA, 19 nt, Homo sapiens
  misc_RNA (1)...(19): siRNA sense strand
gccagaguccucccaagau

SEQ ID NO: 1711583 - RNA, 19 nt, Homo sapiens
  misc_RNA (1)...(19): siRNA sense strand
ggagcugggccucaacgau

SEQ ID NO: 1711584 - RNA, 19 nt, Homo sapiens
  misc_RNA (1)...(19): siRNA sense strand
gacaagauggagcauugau

SEQ ID NO: 1711585 - RNA, 19 nt, Homo sapiens
  misc_RNA (1)...(19): siRNA sense strand
ggugugcucccugcccuuu

SEQ ID NO: 1711586 - RNA, 19 nt, Homo sapiens
  misc_RNA (1)...(19): siRNA sense strand
cgacaagauggagcauuga

SEQ ID NO: 1711587 - RNA, 19 nt, Homo sapiens
  misc_RNA (1)...(19): siRNA sense strand
gagcugggccucaacgauu

SEQ ID NO: 1711588 - RNA, 19 nt, Homo sapiens
  misc_RNA (1)...(19): siRNA sense strand
ccgacaagauggagcauug

SEQ ID NO: 1711589 - RNA, 19 nt, Homo sapiens
  misc_RNA (1)...(19): siRNA sense strand
ggagagacuuacuacuaca

SEQ ID NO: 1711590 - RNA, 19 nt, Homo sapiens
  misc_RNA (1)...(19): siRNA sense strand
ccgagacguuugcuuugua

SEQ ID NO: 1711591 - RNA, 19 nt, Homo sapiens
  misc_RNA (1)...(19): siRNA sense strand
caacgauuaccuagacauu

SEQ ID NO: 1711592 - RNA, 19 nt, Homo sapiens
  misc_RNA (1)...(19): siRNA sense strand
guucuuaccuggagagacu

SEQ ID NO: 1711593 - RNA, 19 nt, Homo sapiens
  misc_RNA (1)...(19): siRNA sense strand
ccagaguccucccaagauc

SEQ ID NO: 1711594 - RNA, 19 nt, Homo sapiens
  misc_RNA (1)...(19): siRNA sense strand
gacguuugcuuuguacaug

SEQ ID NO: 1711595 - RNA, 19 nt, Homo sapiens
  misc_RNA (1)...(19): siRNA sense strand
cuggagagacuuacuacua

SEQ ID NO: 1711596 - RNA, 19 nt, Homo sapiens
  misc_RNA (1)...(19): siRNA sense strand
ccucggcuuugaguucuua

SEQ ID NO: 1711597 - RNA, 19 nt, Homo sapiens
  misc_RNA (1)...(19): siRNA sense strand
ccucaacgauuaccuagac

SEQ ID NO: 1711598 - RNA, 19 nt, Homo sapiens
  misc_RNA (1)...(19): siRNA sense strand
acgauuaccuagacauugu

SEQ ID NO: 1711599 - RNA, 19 nt, Homo sapiens
  misc_RNA (1)...(19): siRNA sense strand
uggagagacuuacuacuac

SEQ ID NO: 1711600 - RNA, 19 nt, Homo sapiens
  misc_RNA (1)...(19): siRNA sense strand
caauucagaccgacaagau

SEQ ID NO: 1711601 - RNA, 19 nt, Homo sapiens
  misc_RNA (1)...(19): siRNA sense strand
gagacuuacuacuacaucu

SEQ ID NO: 1711602 - RNA, 19 nt, Homo sapiens
  misc_RNA (1)...(19): siRNA sense strand
agcugggccucaacgauua

SEQ ID NO: 1711603 - RNA, 19 nt, Homo sapiens
  misc_RNA (1)...(19): siRNA sense strand
ggacuggccaggcuaugag

SEQ ID NO: 1711604 - RNA, 19 nt, Homo sapiens
  misc_RNA (1)...(19): siRNA sense strand
cgagacguuugcuuuguac

SEQ ID NO: 1711605 - RNA, 19 nt, Homo sapiens
  misc_RNA (1)...(19): siRNA sense strand
gggccucaacgauuaccua

SEQ ID NO: 1711606 - RNA, 19 nt, Homo sapiens
  misc_RNA (1)...(19): siRNA sense strand
gccagaguccucccaagau

SEQ ID NO: 1711607 - RNA, 19 nt, Homo sapiens
  misc_RNA (1)...(19): siRNA sense strand
ggagcugggccucaacgau

SEQ ID NO: 1711608 - RNA, 19 nt, Homo sapiens
  misc_RNA (1)...(19): siRNA sense strand
gacaagauggagcauugau

SEQ ID NO: 1711609 - RNA, 19 nt, Homo sapiens
  misc_RNA (1)...(19): siRNA sense strand
ggugugcucccugcccuuu

SEQ ID NO: 1711610 - RNA, 19 nt, Homo sapiens
  misc_RNA (1)...(19): siRNA sense strand
cgacaagauggagcauuga

SEQ ID NO: 1711611 - RNA, 19 nt, Homo sapiens
  misc_RNA (1)...(19): siRNA sense strand
ggaagugucugaggaugaa

SEQ ID NO: 1711612 - RNA, 19 nt, Homo sapiens
  misc_RNA (1)...(19): siRNA sense strand
ggcaugcgguguacuggaa

SEQ ID NO: 1711613 - RNA, 19 nt, Homo sapiens
  misc_RNA (1)...(19): siRNA sense strand
gaagaucaacgugcuggaa

SEQ ID NO: 1711614 - RNA, 19 nt, Homo sapiens
  misc_RNA (1)...(19): siRNA sense strand
gaacgugaacgacuaucug

SEQ ID NO: 1711615 - RNA, 19 nt, Homo sapiens
  misc_RNA (1)...(19): siRNA sense strand
caacgugcuggaagacuuu

SEQ ID NO: 1711616 - RNA, 19 nt, Homo sapiens
  misc_RNA (1)...(19): siRNA sense strand
ucaacgugcuggaagacuu

SEQ ID NO: 1711617 - RNA, 19 nt, Homo sapiens
  misc_RNA (1)...(19): siRNA sense strand
ugacguucuuggccuccua

SEQ ID NO: 1711618 - RNA, 19 nt, Homo sapiens
  misc_RNA (1)...(19): siRNA sense strand
ugcccaagcuugagaagag

SEQ ID NO: 1711619 - RNA, 19 nt, Homo sapiens
  misc_RNA (1)...(19): siRNA sense strand
cucacaaccugcacuggaa

SEQ ID NO: 1711620 - RNA, 19 nt, Homo sapiens
  misc_RNA (1)...(19): siRNA sense strand
agaucaacgugcuggaaga

SEQ ID NO: 1711621 - RNA, 19 nt, Homo sapiens
  misc_RNA (1)...(19): siRNA sense strand
gcacagccccaucaaguuc

SEQ ID NO: 1711622 - RNA, 19 nt, Homo sapiens
  misc_RNA (1)...(19): siRNA sense strand
gagaaguuccagcgcuaca

SEQ ID NO: 1711623 - RNA, 19 nt, Homo sapiens
  misc_RNA (1)...(19): siRNA sense strand
aggugaacgugaacgacua

SEQ ID NO: 1711624 - RNA, 19 nt, Homo sapiens
  misc_RNA (1)...(19): siRNA sense strand
ggacacagcuacuacuaca

SEQ ID NO: 1711625 - RNA, 19 nt, Homo sapiens
  misc_RNA (1)...(19): siRNA sense strand
gaagagacuugcagcagau

SEQ ID NO: 1711626 - RNA, 19 nt, Homo sapiens
  misc_RNA (1)...(19): siRNA sense strand
cggagaagcugucugagaa

SEQ ID NO: 1711627 - RNA, 19 nt, Homo sapiens
  misc_RNA (1)...(19): siRNA sense strand
gaaugaggacuacaccaua

SEQ ID NO: 1711628 - RNA, 19 nt, Homo sapiens
  misc_RNA (1)...(19): siRNA sense strand
gaagcugucugagaaguuc

SEQ ID NO: 1711629 - RNA, 19 nt, Homo sapiens
  misc_RNA (1)...(19): siRNA sense strand
ccacgccucuucccacuug

SEQ ID NO: 1711630 - RNA, 19 nt, Homo sapiens
  misc_RNA (1)...(19): siRNA sense strand
gggcaaggaguucaaagaa

SEQ ID NO: 1711631 - RNA, 19 nt, Homo sapiens
  misc_RNA (1)...(19): siRNA sense strand
gaggugcggguucuacaua

SEQ ID NO: 1711632 - RNA, 19 nt, Homo sapiens
  misc_RNA (1)...(19): siRNA sense strand
ggacuacaccauacaugug

SEQ ID NO: 1711633 - RNA, 19 nt, Homo sapiens
  misc_RNA (1)...(19): siRNA sense strand
ggaaugaggacuacaccau

SEQ ID NO: 1711634 - RNA, 19 nt, Homo sapiens
  misc_RNA (1)...(19): siRNA sense strand
gagaagcugucugagaagu

SEQ ID NO: 1711635 - RNA, 19 nt, Homo sapiens
  misc_RNA (1)...(19): siRNA sense strand
caucaucuguccgcacuau

SEQ ID NO: 1711636 - RNA, 19 nt, Homo sapiens
  misc_RNA (1)...(19): siRNA sense strand
ggcaaggaguucaaagaag

SEQ ID NO: 1711637 - RNA, 19 nt, Homo sapiens
  misc_RNA (1)...(19): siRNA sense strand
ccauacaugugcagcugaa

SEQ ID NO: 1711638 - RNA, 19 nt, Homo sapiens
  misc_RNA (1)...(19): siRNA sense strand
ucaaagaaggacacagcua

SEQ ID NO: 1711639 - RNA, 19 nt, Homo sapiens
  misc_RNA (1)...(19): siRNA sense strand
ccacuucugcugcugcaaa

SEQ ID NO: 1711640 - RNA, 19 nt, Homo sapiens
  misc_RNA (1)...(19): siRNA sense strand
gcccggagaagcugucuga

SEQ ID NO: 1711641 - RNA, 19 nt, Homo sapiens
  misc_RNA (1)...(19): siRNA sense strand
cuacauagcaucggucaca

SEQ ID NO: 1711642 - RNA, 19 nt, Homo sapiens
  misc_RNA (1)...(19): siRNA sense strand
gcacuaugaagaucacucu

SEQ ID NO: 1711643 - RNA, 19 nt, Homo sapiens
  misc_RNA (1)...(19): siRNA sense strand
caguucaaaucccaaguuc

SEQ ID NO: 1711644 - RNA, 19 nt, Homo sapiens
  misc_RNA (1)...(19): siRNA sense strand
ccacaggagaagagacuug

SEQ ID NO: 1711645 - RNA, 19 nt, Homo sapiens
  misc_RNA (1)...(19): siRNA sense strand
gccacaccgucuucuggaa

SEQ ID NO: 1711646 - RNA, 19 nt, Homo sapiens
  misc_RNA (1)...(19): siRNA sense strand
gugcugcuccuuccacuuc

SEQ ID NO: 1711647 - RNA, 19 nt, Homo sapiens
  misc_RNA (1)...(19): siRNA sense strand
acacagcuacuacuacauc

SEQ ID NO: 1711648 - RNA, 19 nt, Homo sapiens
  misc_RNA (1)...(19): siRNA sense strand
gaaggacacagcuacuacu

SEQ ID NO: 1711649 - RNA, 19 nt, Homo sapiens
  misc_RNA (1)...(19): siRNA sense strand
uuccagcgcuucacaccuu

SEQ ID NO: 1711650 - RNA, 19 nt, Homo sapiens
  misc_RNA (1)...(19): siRNA sense strand
aaugaggacuacaccauac

SEQ ID NO: 1711651 - RNA, 19 nt, Homo sapiens
  misc_RNA (1)...(19): siRNA sense strand
uacaugugcagcugaauga

SEQ ID NO: 1711652 - RNA, 19 nt, Homo sapiens
  misc_RNA (1)...(19): siRNA sense strand
ccggagaagcugucugaga

SEQ ID NO: 1711653 - RNA, 19 nt, Homo sapiens
  misc_RNA (1)...(19): siRNA sense strand
augugcagcugaaugacua

SEQ ID NO: 1711654 - RNA, 19 nt, Homo sapiens
  misc_RNA (1)...(19): siRNA sense strand
aagaaggacacagcuacua

SEQ ID NO: 1711655 - RNA, 19 nt, Homo sapiens
  misc_RNA (1)...(19): siRNA sense strand
aaucccaaguuccggaaug

SEQ ID NO: 1711656 - RNA, 19 nt, Homo sapiens
  misc_RNA (1)...(19): siRNA sense strand
ugguggagcaugaggagua

SEQ ID NO: 1711657 - RNA, 19 nt, Homo sapiens
  misc_RNA (1)...(19): siRNA sense strand
cuacguggacaucaucugu

SEQ ID NO: 1711658 - RNA, 19 nt, Homo sapiens
  misc_RNA (1)...(19): siRNA sense strand
gaggacuacaccauacaug

SEQ ID NO: 1711659 - RNA, 19 nt, Homo sapiens
  misc_RNA (1)...(19): siRNA sense strand
caaggaguucaaagaagga

SEQ ID NO: 1711660 - RNA, 19 nt, Homo sapiens
  misc_RNA (1)...(19): siRNA sense strand
ggagaagcugucugagaag

SEQ ID NO: 1711661 - RNA, 19 nt, Homo sapiens
  misc_RNA (1)...(19): siRNA sense strand
gaaugacuacguggacauc

SEQ ID NO: 1711662 - RNA, 19 nt, Homo sapiens
  misc_RNA (1)...(19): siRNA sense strand
ggacacagcuacuacuaca

SEQ ID NO: 1711663 - RNA, 19 nt, Homo sapiens
  misc_RNA (1)...(19): siRNA sense strand
gaagagacuugcagcagau

SEQ ID NO: 1711664 - RNA, 19 nt, Homo sapiens
  misc_RNA (1)...(19): siRNA sense strand
cggagaagcugucugagaa

SEQ ID NO: 1711665 - RNA, 19 nt, Homo sapiens
  misc_RNA (1)...(19): siRNA sense strand
gaaugaggacuacaccaua

SEQ ID NO: 1711666 - RNA, 19 nt, Homo sapiens
  misc_RNA (1)...(19): siRNA sense strand
gaagcugucugagaaguuc

SEQ ID NO: 1711667 - RNA, 19 nt, Homo sapiens
  misc_RNA (1)...(19): siRNA sense strand
ccacgccucuucccacuug

SEQ ID NO: 1711668 - RNA, 19 nt, Homo sapiens
  misc_RNA (1)...(19): siRNA sense strand
gggcaaggaguucaaagaa

SEQ ID NO: 1711669 - RNA, 19 nt, Homo sapiens
  misc_RNA (1)...(19): siRNA sense strand
gaggugcggguucuacaua

SEQ ID NO: 1711670 - RNA, 19 nt, Homo sapiens
  misc_RNA (1)...(19): siRNA sense strand
ggacuacaccauacaugug

SEQ ID NO: 1711671 - RNA, 19 nt, Homo sapiens
  misc_RNA (1)...(19): siRNA sense strand
ggaaugaggacuacaccau

SEQ ID NO: 1711672 - RNA, 19 nt, Homo sapiens
  misc_RNA (1)...(19): siRNA sense strand
gagaagcugucugagaagu

SEQ ID NO: 1711673 - RNA, 19 nt, Homo sapiens
  misc_RNA (1)...(19): siRNA sense strand
caucaucuguccgcacuau

SEQ ID NO: 1711674 - RNA, 19 nt, Homo sapiens
  misc_RNA (1)...(19): siRNA sense strand
ggcaaggaguucaaagaag

SEQ ID NO: 1711675 - RNA, 19 nt, Homo sapiens
  misc_RNA (1)...(19): siRNA sense strand
ccauacaugugcagcugaa

SEQ ID NO: 1711676 - RNA, 19 nt, Homo sapiens
  misc_RNA (1)...(19): siRNA sense strand
ucaaagaaggacacagcua

SEQ ID NO: 1711677 - RNA, 19 nt, Homo sapiens
  misc_RNA (1)...(19): siRNA sense strand
ccacuucugcugcugcaaa

SEQ ID NO: 1711678 - RNA, 19 nt, Homo sapiens
  misc_RNA (1)...(19): siRNA sense strand
gcccggagaagcugucuga

SEQ ID NO: 1711679 - RNA, 19 nt, Homo sapiens
  misc_RNA (1)...(19): siRNA sense strand
cuacauagcaucggucaca

SEQ ID NO: 1711680 - RNA, 19 nt, Homo sapiens
  misc_RNA (1)...(19): siRNA sense strand
gcacuaugaagaucacucu

SEQ ID NO: 1711681 - RNA, 19 nt, Homo sapiens
  misc_RNA (1)...(19): siRNA sense strand
caguucaaaucccaaguuc

SEQ ID NO: 1711682 - RNA, 19 nt, Homo sapiens
  misc_RNA (1)...(19): siRNA sense strand
ccacaggagaagagacuug

SEQ ID NO: 1711683 - RNA, 19 nt, Homo sapiens
  misc_RNA (1)...(19): siRNA sense strand
gccacaccgucuucuggaa

SEQ ID NO: 1711684 - RNA, 19 nt, Homo sapiens
  misc_RNA (1)...(19): siRNA sense strand
gugcugcuccuuccacuuc

SEQ ID NO: 1711685 - RNA, 19 nt, Homo sapiens
  misc_RNA (1)...(19): siRNA sense strand
acacagcuacuacuacauc

SEQ ID NO: 1711686 - RNA, 19 nt, Homo sapiens
  misc_RNA (1)...(19): siRNA sense strand
gaaggacacagcuacuacu

SEQ ID NO: 1711687 - RNA, 19 nt, Homo sapiens
  misc_RNA (1)...(19): siRNA sense strand
uuccagcgcuucacaccuu

SEQ ID NO: 1711688 - RNA, 19 nt, Homo sapiens
  misc_RNA (1)...(19): siRNA sense strand
aaugaggacuacaccauac

SEQ ID NO: 1711689 - RNA, 19 nt, Homo sapiens
  misc_RNA (1)...(19): siRNA sense strand
uacaugugcagcugaauga

SEQ ID NO: 1711690 - RNA, 19 nt, Homo sapiens
  misc_RNA (1)...(19): siRNA sense strand
ccggagaagcugucugaga

SEQ ID NO: 1711691 - RNA, 19 nt, Homo sapiens
  misc_RNA (1)...(19): siRNA sense strand
augugcagcugaaugacua

SEQ ID NO: 1711692 - RNA, 19 nt, Homo sapiens
  misc_RNA (1)...(19): siRNA sense strand
aagaaggacacagcuacua

SEQ ID NO: 1711693 - RNA, 19 nt, Homo sapiens
  misc_RNA (1)...(19): siRNA sense strand
aaucccaaguuccggaaug

SEQ ID NO: 1711694 - RNA, 19 nt, Homo sapiens
  misc_RNA (1)...(19): siRNA sense strand
ugguggagcaugaggagua

SEQ ID NO: 1711695 - RNA, 19 nt, Homo sapiens
  misc_RNA (1)...(19): siRNA sense strand
cuacguggacaucaucugu

SEQ ID NO: 1711696 - RNA, 19 nt, Homo sapiens
  misc_RNA (1)...(19): siRNA sense strand
gaggacuacaccauacaug

SEQ ID NO: 1711697 - RNA, 19 nt, Homo sapiens
  misc_RNA (1)...(19): siRNA sense strand
caaggaguucaaagaagga

SEQ ID NO: 1711698 - RNA, 19 nt, Homo sapiens
  misc_RNA (1)...(19): siRNA sense strand
ggagaagcugucugagaag

SEQ ID NO: 1711699 - RNA, 19 nt, Homo sapiens
  misc_RNA (1)...(19): siRNA sense strand
gaaugacuacguggacauc

SEQ ID NO: 1711700 - RNA, 19 nt, Homo sapiens
  misc_RNA (1)...(19): siRNA sense strand
gaacaacaguuauuggaau

SEQ ID NO: 1711701 - RNA, 19 nt, Homo sapiens
  misc_RNA (1)...(19): siRNA sense strand
acagagaccucaagaguaa

SEQ ID NO: 1711702 - RNA, 19 nt, Homo sapiens
  misc_RNA (1)...(19): siRNA sense strand
acaaagagaacaacaguua

SEQ ID NO: 1711703 - RNA, 19 nt, Homo sapiens
  misc_RNA (1)...(19): siRNA sense strand
caauagaaccugucaauau

SEQ ID NO: 1711704 - RNA, 19 nt, Homo sapiens
  misc_RNA (1)...(19): siRNA sense strand
ccacugauguguguuaauu

SEQ ID NO: 1711705 - RNA, 19 nt, Homo sapiens
  misc_RNA (1)...(19): siRNA sense strand
gauuagagaccaaggauuu

SEQ ID NO: 1711706 - RNA, 19 nt, Homo sapiens
  misc_RNA (1)...(19): siRNA sense strand
gaagacaggaaucgaauga

SEQ ID NO: 1711707 - RNA, 19 nt, Homo sapiens
  misc_RNA (1)...(19): siRNA sense strand
gaggagguguggaauauca

SEQ ID NO: 1711708 - RNA, 19 nt, Homo sapiens
  misc_RNA (1)...(19): siRNA sense strand
guacagaaguuccacugau

SEQ ID NO: 1711709 - RNA, 19 nt, Homo sapiens
  misc_RNA (1)...(19): siRNA sense strand
caaauucucgccucuauug

SEQ ID NO: 1711710 - RNA, 19 nt, Homo sapiens
  misc_RNA (1)...(19): siRNA sense strand
agacaggaaucgaaugaaa

SEQ ID NO: 1711711 - RNA, 19 nt, Homo sapiens
  misc_RNA (1)...(19): siRNA sense strand
gugaaagccuuacagaaau

SEQ ID NO: 1711712 - RNA, 19 nt, Homo sapiens
  misc_RNA (1)...(19): siRNA sense strand
caacagggaccagauaauu

SEQ ID NO: 1711713 - RNA, 19 nt, Homo sapiens
  misc_RNA (1)...(19): siRNA sense strand
caacaacagggaccagaua

SEQ ID NO: 1711714 - RNA, 19 nt, Homo sapiens
  misc_RNA (1)...(19): siRNA sense strand
gaaucgggcugguuuccaa

SEQ ID NO: 1711715 - RNA, 19 nt, Homo sapiens
  misc_RNA (1)...(19): siRNA sense strand
caacuugauuugcuguuug

SEQ ID NO: 1711716 - RNA, 19 nt, Homo sapiens
  misc_RNA (1)...(19): siRNA sense strand
uuaccuggcucacuaacua

SEQ ID NO: 1711717 - RNA, 19 nt, Homo sapiens
  misc_RNA (1)...(19): siRNA sense strand
ccagagugcugugcuguuu

SEQ ID NO: 1711718 - RNA, 19 nt, Homo sapiens
  misc_RNA (1)...(19): siRNA sense strand
ugucaaacaugugguuaua

SEQ ID NO: 1711719 - RNA, 19 nt, Homo sapiens
  misc_RNA (1)...(19): siRNA sense strand
caagcuagaugcacuccaa

SEQ ID NO: 1711720 - RNA, 19 nt, Homo sapiens
  misc_RNA (1)...(19): siRNA sense strand
cgugaaagccuuacagaaa

SEQ ID NO: 1711721 - RNA, 19 nt, Homo sapiens
  misc_RNA (1)...(19): siRNA sense strand
ggagagaagaaaccaauug

SEQ ID NO: 1711722 - RNA, 19 nt, Homo sapiens
  misc_RNA (1)...(19): siRNA sense strand
gauauuuccuggcuuacug

SEQ ID NO: 1711723 - RNA, 19 nt, Homo sapiens
  misc_RNA (1)...(19): siRNA sense strand
caucagaacccuccuugaa

SEQ ID NO: 1711724 - RNA, 19 nt, Homo sapiens
  misc_RNA (1)...(19): siRNA sense strand
gagaugaucaaacuuauag

SEQ ID NO: 1711725 - RNA, 19 nt, Homo sapiens
  misc_RNA (1)...(19): siRNA sense strand
gaagaucaucgaaaucaau

SEQ ID NO: 1711726 - RNA, 19 nt, Homo sapiens
  misc_RNA (1)...(19): siRNA sense strand
gcauaauccaccaucaaua

SEQ ID NO: 1711727 - RNA, 19 nt, Homo sapiens
  misc_RNA (1)...(19): siRNA sense strand
caugaagaccucacaguaa

SEQ ID NO: 1711728 - RNA, 19 nt, Homo sapiens
  misc_RNA (1)...(19): siRNA sense strand
gaccucaagaguaauaaua

SEQ ID NO: 1711729 - RNA, 19 nt, Homo sapiens
  misc_RNA (1)...(19): siRNA sense strand
gcaguuacaagccuucaaa

SEQ ID NO: 1711730 - RNA, 19 nt, Homo sapiens
  misc_RNA (1)...(19): siRNA sense strand
gaaaguggcauggugaugu

SEQ ID NO: 1711731 - RNA, 19 nt, Homo sapiens
  misc_RNA (1)...(19): siRNA sense strand
caaaagccaugaagagauu

SEQ ID NO: 1711732 - RNA, 19 nt, Homo sapiens
  misc_RNA (1)...(19): siRNA sense strand
cauaauccaccaucaauau

SEQ ID NO: 1711733 - RNA, 19 nt, Homo sapiens
  misc_RNA (1)...(19): siRNA sense strand
ucagaacccuccuugaauc

SEQ ID NO: 1711734 - RNA, 19 nt, Homo sapiens
  misc_RNA (1)...(19): siRNA sense strand
ucaguaagguacggaguaa

SEQ ID NO: 1711735 - RNA, 19 nt, Homo sapiens
  misc_RNA (1)...(19): siRNA sense strand
caccagaagucaucagaau

SEQ ID NO: 1711736 - RNA, 19 nt, Homo sapiens
  misc_RNA (1)...(19): siRNA sense strand
ggagaauguuccacuuaca

SEQ ID NO: 1711737 - RNA, 19 nt, Homo sapiens
  misc_RNA (1)...(19): siRNA sense strand
gagaacaacaguuauugga

SEQ ID NO: 1711738 - RNA, 19 nt, Homo sapiens
  misc_RNA (1)...(19): siRNA sense strand
gagaccaaauuugagauga

SEQ ID NO: 1711739 - RNA, 19 nt, Homo sapiens
  misc_RNA (1)...(19): siRNA sense strand
ccacagagaccucaagagu

SEQ ID NO: 1711740 - RNA, 19 nt, Homo sapiens
  misc_RNA (1)...(19): siRNA sense strand
caacaaagagaacaacagu

SEQ ID NO: 1711741 - RNA, 19 nt, Homo sapiens
  misc_RNA (1)...(19): siRNA sense strand
aaacacgacaugugaauau

SEQ ID NO: 1711742 - RNA, 19 nt, Homo sapiens
  misc_RNA (1)...(19): siRNA sense strand
acugauauuuccuggcuua

SEQ ID NO: 1711743 - RNA, 19 nt, Homo sapiens
  misc_RNA (1)...(19): siRNA sense strand
cuaaagaaagcacugauga

SEQ ID NO: 1711744 - RNA, 19 nt, Homo sapiens
  misc_RNA (1)...(19): siRNA sense strand
ggaggccuaugaagaauac

SEQ ID NO: 1711745 - RNA, 19 nt, Homo sapiens
  misc_RNA (1)...(19): siRNA sense strand
acaguugucuggauccauu

SEQ ID NO: 1711746 - RNA, 19 nt, Homo sapiens
  misc_RNA (1)...(19): siRNA sense strand
augaagaccucacaguaaa

SEQ ID NO: 1711747 - RNA, 19 nt, Homo sapiens
  misc_RNA (1)...(19): siRNA sense strand
cggaggagguguggaauau

SEQ ID NO: 1711748 - RNA, 19 nt, Homo sapiens
  misc_RNA (1)...(19): siRNA sense strand
gugcuaccuucaucucuuu

SEQ ID NO: 1711749 - RNA, 19 nt, Homo sapiens
  misc_RNA (1)...(19): siRNA sense strand
agaaagcacugaugaugag

SEQ ID NO: 1711750 - RNA, 19 nt, Homo sapiens
  misc_RNA (1)...(19): siRNA sense strand
acaguuaccuuauucaaac

SEQ ID NO: 1711751 - RNA, 19 nt, Homo sapiens
  misc_RNA (1)...(19): siRNA sense strand
ggacucgagugaugauugg

SEQ ID NO: 1711752 - RNA, 19 nt, Homo sapiens
  misc_RNA (1)...(19): siRNA sense strand
agacgggacucgagugaug

SEQ ID NO: 1711753 - RNA, 19 nt, Homo sapiens
  misc_RNA (1)...(19): siRNA sense strand
ccaacuugauuugcuguuu

SEQ ID NO: 1711754 - RNA, 19 nt, Homo sapiens
  misc_RNA (1)...(19): siRNA sense strand
gagcauaauccaccaucaa

SEQ ID NO: 1711755 - RNA, 19 nt, Homo sapiens
  misc_RNA (1)...(19): siRNA sense strand
gacaguuaccuuauucaaa

SEQ ID NO: 1711756 - RNA, 19 nt, Homo sapiens
  misc_RNA (1)...(19): siRNA sense strand
ggacaguuaccuuauucaa

SEQ ID NO: 1711757 - RNA, 19 nt, Homo sapiens
  misc_RNA (1)...(19): siRNA sense strand
ucauugagaccaaauuuga

SEQ ID NO: 1711758 - RNA, 19 nt, Homo sapiens
  misc_RNA (1)...(19): siRNA sense strand
gugaaaauguugaauguga

SEQ ID NO: 1711759 - RNA, 19 nt, Homo sapiens
  misc_RNA (1)...(19): siRNA sense strand
gagaauguuccacuuacaa

SEQ ID NO: 1711760 - RNA, 19 nt, Homo sapiens
  misc_RNA (1)...(19): siRNA sense strand
ccugcaagguguggaguua

SEQ ID NO: 1711761 - RNA, 19 nt, Homo sapiens
  misc_RNA (1)...(19): siRNA sense strand
gggcauggauuacuuacac

SEQ ID NO: 1711762 - RNA, 19 nt, Homo sapiens
  misc_RNA (1)...(19): siRNA sense strand
aaagaaagcacugaugaug

SEQ ID NO: 1711763 - RNA, 19 nt, Homo sapiens
  misc_RNA (1)...(19): siRNA sense strand
ucaugaagaccucacagua

SEQ ID NO: 1711764 - RNA, 19 nt, Homo sapiens
  misc_RNA (1)...(19): siRNA sense strand
gaccaaauuugagaugauc

SEQ ID NO: 1711765 - RNA, 19 nt, Homo sapiens
  misc_RNA (1)...(19): siRNA sense strand
ggacaaagaauuggaucug

SEQ ID NO: 1711766 - RNA, 19 nt, Homo sapiens
  misc_RNA (1)...(19): siRNA sense strand
ucaucagaaugcaagauaa

SEQ ID NO: 1711767 - RNA, 19 nt, Homo sapiens
  misc_RNA (1)...(19): siRNA sense strand
uagaugcacuccaacaaag

SEQ ID NO: 1711768 - RNA, 19 nt, Homo sapiens
  misc_RNA (1)...(19): siRNA sense strand
caucagaaugcaagauaaa

SEQ ID NO: 1711769 - RNA, 19 nt, Homo sapiens
  misc_RNA (1)...(19): siRNA sense strand
ugaaagccuuacagaaauc

SEQ ID NO: 1711770 - RNA, 19 nt, Homo sapiens
  misc_RNA (1)...(19): siRNA sense strand
uacagaaguuccacugaug

SEQ ID NO: 1711771 - RNA, 19 nt, Homo sapiens
  misc_RNA (1)...(19): siRNA sense strand
agucagauguauaugcauu

SEQ ID NO: 1711772 - RNA, 19 nt, Homo sapiens
  misc_RNA (1)...(19): siRNA sense strand
acagugaaaucucgaugga

SEQ ID NO: 1711773 - RNA, 19 nt, Homo sapiens
  misc_RNA (1)...(19): siRNA sense strand
gaacagucuacaagggaaa

SEQ ID NO: 1711774 - RNA, 19 nt, Homo sapiens
  misc_RNA (1)...(19): siRNA sense strand
cucauuaccuggcucacua

SEQ ID NO: 1711775 - RNA, 19 nt, Homo sapiens
  misc_RNA (1)...(19): siRNA sense strand
ucagucagauguauaugca

SEQ ID NO: 1711776 - RNA, 19 nt, Homo sapiens
  misc_RNA (1)...(19): siRNA sense strand
ggauaccugucuccagauc

SEQ ID NO: 1711777 - RNA, 19 nt, Homo sapiens
  misc_RNA (1)...(19): siRNA sense strand
gguguggaauaucaaacaa

SEQ ID NO: 1711778 - RNA, 19 nt, Homo sapiens
  misc_RNA (1)...(19): siRNA sense strand
caaagagaacaacaguuau

SEQ ID NO: 1711779 - RNA, 19 nt, Homo sapiens
  misc_RNA (1)...(19): siRNA sense strand
ucagauguauaugcauuug

SEQ ID NO: 1711780 - RNA, 19 nt, Homo sapiens
  misc_RNA (1)...(19): siRNA sense strand
ccaaggauuucguggugau

SEQ ID NO: 1711781 - RNA, 19 nt, Homo sapiens
  misc_RNA (1)...(19): siRNA sense strand
ggagcauaauccaccauca

SEQ ID NO: 1711782 - RNA, 19 nt, Homo sapiens
  misc_RNA (1)...(19): siRNA sense strand
ugaagaucaucgaaaucaa

SEQ ID NO: 1711783 - RNA, 19 nt, Homo sapiens
  misc_RNA (1)...(19): siRNA sense strand
gaacaguugucuggaucca

SEQ ID NO: 1711784 - RNA, 19 nt, Homo sapiens
  misc_RNA (1)...(19): siRNA sense strand
cacagagaccucaagagua

SEQ ID NO: 1711785 - RNA, 19 nt, Homo sapiens
  misc_RNA (1)...(19): siRNA sense strand
gaauauccuacucuucaug

SEQ ID NO: 1711786 - RNA, 19 nt, Homo sapiens
  misc_RNA (1)...(19): siRNA sense strand
cccaaauucucgccucuau

SEQ ID NO: 1711787 - RNA, 19 nt, Homo sapiens
  misc_RNA (1)...(19): siRNA sense strand
cugcacagggcauggauua

SEQ ID NO: 1711788 - RNA, 19 nt, Homo sapiens
  misc_RNA (1)...(19): siRNA sense strand
gcaucaauggauaccguua

SEQ ID NO: 1711789 - RNA, 19 nt, Homo sapiens
  misc_RNA (1)...(19): siRNA sense strand
guugacacaggaacauaua

SEQ ID NO: 1711790 - RNA, 19 nt, Homo sapiens
  misc_RNA (1)...(19): siRNA sense strand
ucaccgcagugcaucagaa

SEQ ID NO: 1711791 - RNA, 19 nt, Homo sapiens
  misc_RNA (1)...(19): siRNA sense strand
cacaauagaaccugucaau

SEQ ID NO: 1711792 - RNA, 19 nt, Homo sapiens
  misc_RNA (1)...(19): siRNA sense strand
aagaaagcacugaugauga

SEQ ID NO: 1711793 - RNA, 19 nt, Homo sapiens
  misc_RNA (1)...(19): siRNA sense strand
ggagguguggaauaucaaa

SEQ ID NO: 1711794 - RNA, 19 nt, Homo sapiens
  misc_RNA (1)...(19): siRNA sense strand
gucaucagaaugcaagaua

SEQ ID NO: 1711795 - RNA, 19 nt, Homo sapiens
  misc_RNA (1)...(19): siRNA sense strand
caccaucuccauaucauug

SEQ ID NO: 1711796 - RNA, 19 nt, Homo sapiens
  misc_RNA (1)...(19): siRNA sense strand
aaaguggcauggugaugug

SEQ ID NO: 1711797 - RNA, 19 nt, Homo sapiens
  misc_RNA (1)...(19): siRNA sense strand
cuagaugcacuccaacaaa

SEQ ID NO: 1711798 - RNA, 19 nt, Homo sapiens
  misc_RNA (1)...(19): siRNA sense strand
ucagaagacaggaaucgaa

SEQ ID NO: 1711799 - RNA, 19 nt, Homo sapiens
  misc_RNA (1)...(19): siRNA sense strand
acaauagaaccugucaaua

SEQ ID NO: 1711800 - RNA, 19 nt, Homo sapiens
  misc_RNA (1)...(19): siRNA sense strand
gcaaagaaauagagggaaa

SEQ ID NO: 1711801 - RNA, 19 nt, Homo sapiens
  misc_RNA (1)...(19): siRNA sense strand
caacugauaugcauucaag

SEQ ID NO: 1711802 - RNA, 19 nt, Homo sapiens
  misc_RNA (1)...(19): siRNA sense strand
caaugcaggugaagaugua

SEQ ID NO: 1711803 - RNA, 19 nt, Homo sapiens
  misc_RNA (1)...(19): siRNA sense strand
ugaacuaggcaaagaaaua

SEQ ID NO: 1711804 - RNA, 19 nt, Homo sapiens
  misc_RNA (1)...(19): siRNA sense strand
gaacuaggcaaagaaauag

SEQ ID NO: 1711805 - RNA, 19 nt, Homo sapiens
  misc_RNA (1)...(19): siRNA sense strand
cauaaaacccugcaaauaa

SEQ ID NO: 1711806 - RNA, 19 nt, Homo sapiens
  misc_RNA (1)...(19): siRNA sense strand
ggagaugucaacuuccaaa

SEQ ID NO: 1711807 - RNA, 19 nt, Homo sapiens
  misc_RNA (1)...(19): siRNA sense strand
caaaggacgaccaugcaaa

SEQ ID NO: 1711808 - RNA, 19 nt, Homo sapiens
  misc_RNA (1)...(19): siRNA sense strand
ugcaaugagugaagaauau

SEQ ID NO: 1711809 - RNA, 19 nt, Homo sapiens
  misc_RNA (1)...(19): siRNA sense strand
gaaguucgugaggaucuua

SEQ ID NO: 1711810 - RNA, 19 nt, Homo sapiens
  misc_RNA (1)...(19): siRNA sense strand
gaucuuaaacugccagaag

SEQ ID NO: 1711811 - RNA, 19 nt, Homo sapiens
  misc_RNA (1)...(19): siRNA sense strand
ggacgaccaugcaaaauag

SEQ ID NO: 1711812 - RNA, 19 nt, Homo sapiens
  misc_RNA (1)...(19): siRNA sense strand
gagugaagaauaugcugua

SEQ ID NO: 1711813 - RNA, 19 nt, Homo sapiens
  misc_RNA (1)...(19): siRNA sense strand
uaguggagaugucaacuuc

SEQ ID NO: 1711814 - RNA, 19 nt, Homo sapiens
  misc_RNA (1)...(19): siRNA sense strand
gugcaaugagugaagaaua

SEQ ID NO: 1711815 - RNA, 19 nt, Homo sapiens
  misc_RNA (1)...(19): siRNA sense strand
gauaugcauucaagauggu

SEQ ID NO: 1711816 - RNA, 19 nt, Homo sapiens
  misc_RNA (1)...(19): siRNA sense strand
cauucaagaugguuaccuu

SEQ ID NO: 1711817 - RNA, 19 nt, Homo sapiens
  misc_RNA (1)...(19): siRNA sense strand
ggugaacuaggcaaagaaa

SEQ ID NO: 1711818 - RNA, 19 nt, Homo sapiens
  misc_RNA (1)...(19): siRNA sense strand
gcaaugagugaagaauaug

SEQ ID NO: 1711819 - RNA, 19 nt, Homo sapiens
  misc_RNA (1)...(19): siRNA sense strand
ccauaaaacccugcaaaua

SEQ ID NO: 1711820 - RNA, 19 nt, Homo sapiens
  misc_RNA (1)...(19): siRNA sense strand
aaggugaacuaggcaaaga

SEQ ID NO: 1711821 - RNA, 19 nt, Homo sapiens
  misc_RNA (1)...(19): siRNA sense strand
gaaggugaacuaggcaaag

SEQ ID NO: 1711822 - RNA, 19 nt, Homo sapiens
  misc_RNA (1)...(19): siRNA sense strand
ugauuucacuacuggagau

SEQ ID NO: 1711823 - RNA, 19 nt, Homo sapiens
  misc_RNA (1)...(19): siRNA sense strand
gaugucaacuuccaaaacu

SEQ ID NO: 1711824 - RNA, 19 nt, Homo sapiens
  misc_RNA (1)...(19): siRNA sense strand
uaaacugccagaaggugaa

SEQ ID NO: 1711825 - RNA, 19 nt, Homo sapiens
  misc_RNA (1)...(19): siRNA sense strand
ugacagaaacuggugaagu

SEQ ID NO: 1711826 - RNA, 19 nt, Homo sapiens
  misc_RNA (1)...(19): siRNA sense strand
gcaaaauaguggagauguc

SEQ ID NO: 1711827 - RNA, 19 nt, Homo sapiens
  misc_RNA (1)...(19): siRNA sense strand
gguucaccuuguuggaauu

SEQ ID NO: 1711828 - RNA, 19 nt, Homo sapiens
  misc_RNA (1)...(19): siRNA sense strand
ucaaaggacgaccaugcaa

SEQ ID NO: 1711829 - RNA, 19 nt, Homo sapiens
  misc_RNA (1)...(19): siRNA sense strand
aaaauacaaugcaggugaa

SEQ ID NO: 1711830 - RNA, 19 nt, Homo sapiens
  misc_RNA (1)...(19): siRNA sense strand
caccuuguuggaauugaua

SEQ ID NO: 1711831 - RNA, 19 nt, Homo sapiens
  misc_RNA (1)...(19): siRNA sense strand
ucaagaugguuaccuuucc

SEQ ID NO: 1711832 - RNA, 19 nt, Homo sapiens
  misc_RNA (1)...(19): siRNA sense strand
ucaccuuguuggaauugau

SEQ ID NO: 1711833 - RNA, 19 nt, Homo sapiens
  misc_RNA (1)...(19): siRNA sense strand
uuccagcacuuacccuaug

SEQ ID NO: 1711834 - RNA, 19 nt, Homo sapiens
  misc_RNA (1)...(19): siRNA sense strand
auacaaugcaggugaagau

SEQ ID NO: 1711835 - RNA, 19 nt, Homo sapiens
  misc_RNA (1)...(19): siRNA sense strand
gaaauagagggaaaauaca

SEQ ID NO: 1711836 - RNA, 19 nt, Homo sapiens
  misc_RNA (1)...(19): siRNA sense strand
gauauuuguccuucuacuc

SEQ ID NO: 1711837 - RNA, 19 nt, Homo sapiens
  misc_RNA (1)...(19): siRNA sense strand
gaaagaagaugcugagaaa

SEQ ID NO: 1711838 - RNA, 19 nt, Homo sapiens
  misc_RNA (1)...(19): siRNA sense strand
gaagaagacugcccaaauc

SEQ ID NO: 1711839 - RNA, 19 nt, Homo sapiens
  misc_RNA (1)...(19): siRNA sense strand
gcgagaagcugaaaggaaa

SEQ ID NO: 1711840 - RNA, 19 nt, Homo sapiens
  misc_RNA (1)...(19): siRNA sense strand
gcucaaauguguucgagaa

SEQ ID NO: 1711841 - RNA, 19 nt, Homo sapiens
  misc_RNA (1)...(19): siRNA sense strand
gcaagaucauucauacuga

SEQ ID NO: 1711842 - RNA, 19 nt, Homo sapiens
  misc_RNA (1)...(19): siRNA sense strand
ugaagaugcugcacaguuu

SEQ ID NO: 1711843 - RNA, 19 nt, Homo sapiens
  misc_RNA (1)...(19): siRNA sense strand
gaagaggcaggcugaguua

SEQ ID NO: 1711844 - RNA, 19 nt, Homo sapiens
  misc_RNA (1)...(19): siRNA sense strand
gaucauucauacugacaua

SEQ ID NO: 1711845 - RNA, 19 nt, Homo sapiens
  misc_RNA (1)...(19): siRNA sense strand
gcccagaggugaaacuaaa

SEQ ID NO: 1711846 - RNA, 19 nt, Homo sapiens
  misc_RNA (1)...(19): siRNA sense strand
gaaaagauuuguugcaaug

SEQ ID NO: 1711847 - RNA, 19 nt, Homo sapiens
  misc_RNA (1)...(19): siRNA sense strand
guuguucucuggauccuua

SEQ ID NO: 1711848 - RNA, 19 nt, Homo sapiens
  misc_RNA (1)...(19): siRNA sense strand
gcagaaaccuauaggaaaa

SEQ ID NO: 1711849 - RNA, 19 nt, Homo sapiens
  misc_RNA (1)...(19): siRNA sense strand
ucugagggaucaccacuua

SEQ ID NO: 1711850 - RNA, 19 nt, Homo sapiens
  misc_RNA (1)...(19): siRNA sense strand
ucaaguggaucaucaaauc

SEQ ID NO: 1711851 - RNA, 19 nt, Homo sapiens
  misc_RNA (1)...(19): siRNA sense strand
gaagaugcugcacaguuua

SEQ ID NO: 1711852 - RNA, 19 nt, Homo sapiens
  misc_RNA (1)...(19): siRNA sense strand
cgaugaagaugaugaugaa

SEQ ID NO: 1711853 - RNA, 19 nt, Homo sapiens
  misc_RNA (1)...(19): siRNA sense strand
ugaagaugaugaugaagaa

SEQ ID NO: 1711854 - RNA, 19 nt, Homo sapiens
  misc_RNA (1)...(19): siRNA sense strand
gacagaagcagaacgguuu

SEQ ID NO: 1711855 - RNA, 19 nt, Homo sapiens
  misc_RNA (1)...(19): siRNA sense strand
gaggcaggcugaguuauug

SEQ ID NO: 1711856 - RNA, 19 nt, Homo sapiens
  misc_RNA (1)...(19): siRNA sense strand
aacgggagauuauuuguuu

SEQ ID NO: 1711857 - RNA, 19 nt, Homo sapiens
  misc_RNA (1)...(19): siRNA sense strand
ggagacagccuuggaugaa

SEQ ID NO: 1711858 - RNA, 19 nt, Homo sapiens
  misc_RNA (1)...(19): siRNA sense strand
gagacagccuuggaugaaa

SEQ ID NO: 1711859 - RNA, 19 nt, Homo sapiens
  misc_RNA (1)...(19): siRNA sense strand
caaauguguucgagaaagu

SEQ ID NO: 1711860 - RNA, 19 nt, Homo sapiens
  misc_RNA (1)...(19): siRNA sense strand
cugcacaguuuacagauuu

SEQ ID NO: 1711861 - RNA, 19 nt, Homo sapiens
  misc_RNA (1)...(19): siRNA sense strand
gaucaucaaauccaacuau

SEQ ID NO: 1711862 - RNA, 19 nt, Homo sapiens
  misc_RNA (1)...(19): siRNA sense strand
cagaaagugauuacacaua

SEQ ID NO: 1711863 - RNA, 19 nt, Homo sapiens
  misc_RNA (1)...(19): siRNA sense strand
ggaauauaaucuugaugag

SEQ ID NO: 1711864 - RNA, 19 nt, Homo sapiens
  misc_RNA (1)...(19): siRNA sense strand
agaagaugcugagaaagaa

SEQ ID NO: 1711865 - RNA, 19 nt, Homo sapiens
  misc_RNA (1)...(19): siRNA sense strand
gagaaagugaucccaguga

SEQ ID NO: 1711866 - RNA, 19 nt, Homo sapiens
  misc_RNA (1)...(19): siRNA sense strand
agaugaagaugauguagau

SEQ ID NO: 1711867 - RNA, 19 nt, Homo sapiens
  misc_RNA (1)...(19): siRNA sense strand
cagcugcaccuuccaauga

SEQ ID NO: 1711868 - RNA, 19 nt, Homo sapiens
  misc_RNA (1)...(19): siRNA sense strand
cagcagaaaccuauaggaa

SEQ ID NO: 1711869 - RNA, 19 nt, Homo sapiens
  misc_RNA (1)...(19): siRNA sense strand
caucaaauccaacuaucaa

SEQ ID NO: 1711870 - RNA, 19 nt, Homo sapiens
  misc_RNA (1)...(19): siRNA sense strand
ggagaacugcgacacauca

SEQ ID NO: 1711871 - RNA, 19 nt, Homo sapiens
  misc_RNA (1)...(19): siRNA sense strand
gaggagaacugcgacacau

SEQ ID NO: 1711872 - RNA, 19 nt, Homo sapiens
  misc_RNA (1)...(19): siRNA sense strand
ccgggcagcugacuuguug

SEQ ID NO: 1711873 - RNA, 19 nt, Homo sapiens
  misc_RNA (1)...(19): siRNA sense strand
ugaagaagacugcccaaau

SEQ ID NO: 1711874 - RNA, 19 nt, Homo sapiens
  misc_RNA (1)...(19): siRNA sense strand
ucaggaacuugcgaacaua

SEQ ID NO: 1711875 - RNA, 19 nt, Homo sapiens
  misc_RNA (1)...(19): siRNA sense strand
cacaguaagugcaagauca

SEQ ID NO: 1711876 - RNA, 19 nt, Homo sapiens
  misc_RNA (1)...(19): siRNA sense strand
ccagugacccaaacaaaga

SEQ ID NO: 1711877 - RNA, 19 nt, Homo sapiens
  misc_RNA (1)...(19): siRNA sense strand
gcaacuggacgaugaagau

SEQ ID NO: 1711878 - RNA, 19 nt, Homo sapiens
  misc_RNA (1)...(19): siRNA sense strand
gacccuacguggauagaau

SEQ ID NO: 1711879 - RNA, 19 nt, Homo sapiens
  misc_RNA (1)...(19): siRNA sense strand
gccggagccucaacagaaa

SEQ ID NO: 1711880 - RNA, 19 nt, Homo sapiens
  misc_RNA (1)...(19): siRNA sense strand
gaagaugcugagaaagaaa

SEQ ID NO: 1711881 - RNA, 19 nt, Homo sapiens
  misc_RNA (1)...(19): siRNA sense strand
ucaaggguuagauuacuua

SEQ ID NO: 1711882 - RNA, 19 nt, Homo sapiens
  misc_RNA (1)...(19): siRNA sense strand
cagcuccuaugaacaauuc

SEQ ID NO: 1711883 - RNA, 19 nt, Homo sapiens
  misc_RNA (1)...(19): siRNA sense strand
caaaugcagaaagugauua

SEQ ID NO: 1711884 - RNA, 19 nt, Homo sapiens
  misc_RNA (1)...(19): siRNA sense strand
aagaagaugcugagaaaga

SEQ ID NO: 1711885 - RNA, 19 nt, Homo sapiens
  misc_RNA (1)...(19): siRNA sense strand
gaugaugcauaugugagaa

SEQ ID NO: 1711886 - RNA, 19 nt, Homo sapiens
  misc_RNA (1)...(19): siRNA sense strand
gcugcacaguuuacagauu

SEQ ID NO: 1711887 - RNA, 19 nt, Homo sapiens
  misc_RNA (1)...(19): siRNA sense strand
gagccucuuugauguacuu

SEQ ID NO: 1711888 - RNA, 19 nt, Homo sapiens
  misc_RNA (1)...(19): siRNA sense strand
cauagacccuacguggaua

SEQ ID NO: 1711889 - RNA, 19 nt, Homo sapiens
  misc_RNA (1)...(19): siRNA sense strand
ccaaauggacgacauaaaa

SEQ ID NO: 1711890 - RNA, 19 nt, Homo sapiens
  misc_RNA (1)...(19): siRNA sense strand
cggcauccuugguugaauu

SEQ ID NO: 1711891 - RNA, 19 nt, Homo sapiens
  misc_RNA (1)...(19): siRNA sense strand
ugcaggagauagaagaauu

SEQ ID NO: 1711892 - RNA, 19 nt, Homo sapiens
  misc_RNA (1)...(19): siRNA sense strand
ggagauuauuuguuugaac

SEQ ID NO: 1711893 - RNA, 19 nt, Homo sapiens
  misc_RNA (1)...(19): siRNA sense strand
cggcguguauggcauuuga

SEQ ID NO: 1711894 - RNA, 19 nt, Homo sapiens
  misc_RNA (1)...(19): siRNA sense strand
uagcagcuccuaugaacaa

SEQ ID NO: 1711895 - RNA, 19 nt, Homo sapiens
  misc_RNA (1)...(19): siRNA sense strand
gcaggagauagaagaauug

SEQ ID NO: 1711896 - RNA, 19 nt, Homo sapiens
  misc_RNA (1)...(19): siRNA sense strand
agacagccuuggaugaaau

SEQ ID NO: 1711897 - RNA, 19 nt, Homo sapiens
  misc_RNA (1)...(19): siRNA sense strand
caacgggagauuauuuguu

SEQ ID NO: 1711898 - RNA, 19 nt, Homo sapiens
  misc_RNA (1)...(19): siRNA sense strand
cagcugacuuguuggugaa

SEQ ID NO: 1711899 - RNA, 19 nt, Homo sapiens
  misc_RNA (1)...(19): siRNA sense strand
ccugaggaauauaaucuug

SEQ ID NO: 1711900 - RNA, 19 nt, Homo sapiens
  misc_RNA (1)...(19): siRNA sense strand
ugaccaggauggcgaauac

SEQ ID NO: 1711901 - RNA, 19 nt, Homo sapiens
  misc_RNA (1)...(19): siRNA sense strand
aauggccgguaucauguua

SEQ ID NO: 1711902 - RNA, 19 nt, Homo sapiens
  misc_RNA (1)...(19): siRNA sense strand
agaaagaagaugcugagaa

SEQ ID NO: 1711903 - RNA, 19 nt, Homo sapiens
  misc_RNA (1)...(19): siRNA sense strand
guuuacagauuuccugauc

SEQ ID NO: 1711904 - RNA, 19 nt, Homo sapiens
  misc_RNA (1)...(19): siRNA sense strand
ucaaauguguucgagaaag

SEQ ID NO: 1711905 - RNA, 19 nt, Homo sapiens
  misc_RNA (1)...(19): siRNA sense strand
cugcaaagguggauaucau

SEQ ID NO: 1711906 - RNA, 19 nt, Homo sapiens
  misc_RNA (1)...(19): siRNA sense strand
ccaaaugcagaaagugauu

SEQ ID NO: 1711907 - RNA, 19 nt, Homo sapiens
  misc_RNA (1)...(19): siRNA sense strand
uaaaaccaauggccauauu

SEQ ID NO: 1711908 - RNA, 19 nt, Homo sapiens
  misc_RNA (1)...(19): siRNA sense strand
guggauagaaucaccuaaa

SEQ ID NO: 1711909 - RNA, 19 nt, Homo sapiens
  misc_RNA (1)...(19): siRNA sense strand
ggaaaagauuuguugcaau

SEQ ID NO: 1711910 - RNA, 19 nt, Homo sapiens
  misc_RNA (1)...(19): siRNA sense strand
guguguggaugaugcauau

SEQ ID NO: 1711911 - RNA, 19 nt, Homo sapiens
  misc_RNA (1)...(19): siRNA sense strand
gccaccaucuccucaagug

SEQ ID NO: 1711912 - RNA, 19 nt, Homo sapiens
  misc_RNA (1)...(19): siRNA sense strand
uuggagaccucuucaaugg

SEQ ID NO: 1711913 - RNA, 19 nt, Homo sapiens
  misc_RNA (1)...(19): siRNA sense strand
cgaaguacuuggccaccau

SEQ ID NO: 1711914 - RNA, 19 nt, Homo sapiens
  misc_RNA (1)...(19): siRNA sense strand
auccuugguugaauucuua

SEQ ID NO: 1711915 - RNA, 19 nt, Homo sapiens
  misc_RNA (1)...(19): siRNA sense strand
uuagaaaugguuccagaaa

SEQ ID NO: 1711916 - RNA, 19 nt, Homo sapiens
  misc_RNA (1)...(19): siRNA sense strand
gcggcucugugcuuucuga

SEQ ID NO: 1711917 - RNA, 19 nt, Homo sapiens
  misc_RNA (1)...(19): siRNA sense strand
aauggugaauugccaaaug

SEQ ID NO: 1711918 - RNA, 19 nt, Homo sapiens
  misc_RNA (1)...(19): siRNA sense strand
guacggcuccacagcagaa

SEQ ID NO: 1711919 - RNA, 19 nt, Homo sapiens
  misc_RNA (1)...(19): siRNA sense strand
ggaugaugcauaugugaga

SEQ ID NO: 1711920 - RNA, 19 nt, Homo sapiens
  misc_RNA (1)...(19): siRNA sense strand
guaagugcaagaucauuca

SEQ ID NO: 1711921 - RNA, 19 nt, Homo sapiens
  misc_RNA (1)...(19): siRNA sense strand
gggagauuauuuguuugaa

SEQ ID NO: 1711922 - RNA, 19 nt, Homo sapiens
  misc_RNA (1)...(19): siRNA sense strand
gggaaaagauuuguugcaa

SEQ ID NO: 1711923 - RNA, 19 nt, Homo sapiens
  misc_RNA (1)...(19): siRNA sense strand
uaucaaggccucccaguac

SEQ ID NO: 1711924 - RNA, 19 nt, Homo sapiens
  misc_RNA (1)...(19): siRNA sense strand
ccuggagccucuuugaugu

SEQ ID NO: 1711925 - RNA, 19 nt, Homo sapiens
  misc_RNA (1)...(19): siRNA sense strand
ggaccaggaagagaaagaa

SEQ ID NO: 1711926 - RNA, 19 nt, Homo sapiens
  misc_RNA (1)...(19): siRNA sense strand
gggcacuucucuacugucu

SEQ ID NO: 1711927 - RNA, 19 nt, Homo sapiens
  misc_RNA (1)...(19): siRNA sense strand
guacguugugugaagagua

SEQ ID NO: 1711928 - RNA, 19 nt, Homo sapiens
  misc_RNA (1)...(19): siRNA sense strand
ccaguacguugugugaaga

SEQ ID NO: 1711929 - RNA, 19 nt, Homo sapiens
  misc_RNA (1)...(19): siRNA sense strand
cugcauggucuucgaagua

SEQ ID NO: 1711930 - RNA, 19 nt, Homo sapiens
  misc_RNA (1)...(19): siRNA sense strand
uggcaacgggagauuauuu

SEQ ID NO: 1711931 - RNA, 19 nt, Homo sapiens
  misc_RNA (1)...(19): siRNA sense strand
agucacaguucccagaguu

SEQ ID NO: 1711932 - RNA, 19 nt, Homo sapiens
  misc_RNA (1)...(19): siRNA sense strand
gcagaaagugauuacacau

SEQ ID NO: 1711933 - RNA, 19 nt, Homo sapiens
  misc_RNA (1)...(19): siRNA sense strand
aagaggacccugcggacua

SEQ ID NO: 1711934 - RNA, 19 nt, Homo sapiens
  misc_RNA (1)...(19): siRNA sense strand
gcauaugugagaagaaugg

SEQ ID NO: 1711935 - RNA, 19 nt, Homo sapiens
  misc_RNA (1)...(19): siRNA sense strand
ccucuucaauggccgguau

SEQ ID NO: 1711936 - RNA, 19 nt, Homo sapiens
  misc_RNA (1)...(19): siRNA sense strand
gcaacgggagauuauuugu

SEQ ID NO: 1711937 - RNA, 19 nt, Homo sapiens
  misc_RNA (1)...(19): siRNA sense strand
gaaagaagaugcugagaaa

SEQ ID NO: 1711938 - RNA, 19 nt, Homo sapiens
  misc_RNA (1)...(19): siRNA sense strand
gaagaagacugcccaaauc

SEQ ID NO: 1711939 - RNA, 19 nt, Homo sapiens
  misc_RNA (1)...(19): siRNA sense strand
gcgagaagcugaaaggaaa

SEQ ID NO: 1711940 - RNA, 19 nt, Homo sapiens
  misc_RNA (1)...(19): siRNA sense strand
gcucaaauguguucgagaa

SEQ ID NO: 1711941 - RNA, 19 nt, Homo sapiens
  misc_RNA (1)...(19): siRNA sense strand
gcaagaucauucauacuga

SEQ ID NO: 1711942 - RNA, 19 nt, Homo sapiens
  misc_RNA (1)...(19): siRNA sense strand
ugaagaugcugcacaguuu

SEQ ID NO: 1711943 - RNA, 19 nt, Homo sapiens
  misc_RNA (1)...(19): siRNA sense strand
gaagaggcaggcugaguua

SEQ ID NO: 1711944 - RNA, 19 nt, Homo sapiens
  misc_RNA (1)...(19): siRNA sense strand
gaucauucauacugacaua

SEQ ID NO: 1711945 - RNA, 19 nt, Homo sapiens
  misc_RNA (1)...(19): siRNA sense strand
gcccagaggugaaacuaaa

SEQ ID NO: 1711946 - RNA, 19 nt, Homo sapiens
  misc_RNA (1)...(19): siRNA sense strand
gaaaagauuuguugcaaug

SEQ ID NO: 1711947 - RNA, 19 nt, Homo sapiens
  misc_RNA (1)...(19): siRNA sense strand
guuguucucuggauccuua

SEQ ID NO: 1711948 - RNA, 19 nt, Homo sapiens
  misc_RNA (1)...(19): siRNA sense strand
gcagaaaccuauaggaaaa

SEQ ID NO: 1711949 - RNA, 19 nt, Homo sapiens
  misc_RNA (1)...(19): siRNA sense strand
ucugagggaucaccacuua

SEQ ID NO: 1711950 - RNA, 19 nt, Homo sapiens
  misc_RNA (1)...(19): siRNA sense strand
ucaaguggaucaucaaauc

SEQ ID NO: 1711951 - RNA, 19 nt, Homo sapiens
  misc_RNA (1)...(19): siRNA sense strand
gaagaugcugcacaguuua

SEQ ID NO: 1711952 - RNA, 19 nt, Homo sapiens
  misc_RNA (1)...(19): siRNA sense strand
cgaugaagaugaugaugaa

SEQ ID NO: 1711953 - RNA, 19 nt, Homo sapiens
  misc_RNA (1)...(19): siRNA sense strand
ugaagaugaugaugaagaa

SEQ ID NO: 1711954 - RNA, 19 nt, Homo sapiens
  misc_RNA (1)...(19): siRNA sense strand
gacagaagcagaacgguuu

SEQ ID NO: 1711955 - RNA, 19 nt, Homo sapiens
  misc_RNA (1)...(19): siRNA sense strand
gaggcaggcugaguuauug

SEQ ID NO: 1711956 - RNA, 19 nt, Homo sapiens
  misc_RNA (1)...(19): siRNA sense strand
aacgggagauuauuuguuu

SEQ ID NO: 1711957 - RNA, 19 nt, Homo sapiens
  misc_RNA (1)...(19): siRNA sense strand
ggagacagccuuggaugaa

SEQ ID NO: 1711958 - RNA, 19 nt, Homo sapiens
  misc_RNA (1)...(19): siRNA sense strand
gagacagccuuggaugaaa

SEQ ID NO: 1711959 - RNA, 19 nt, Homo sapiens
  misc_RNA (1)...(19): siRNA sense strand
caaauguguucgagaaagu

SEQ ID NO: 1711960 - RNA, 19 nt, Homo sapiens
  misc_RNA (1)...(19): siRNA sense strand
cugcacaguuuacagauuu

SEQ ID NO: 1711961 - RNA, 19 nt, Homo sapiens
  misc_RNA (1)...(19): siRNA sense strand
gaucaucaaauccaacuau

SEQ ID NO: 1711962 - RNA, 19 nt, Homo sapiens
  misc_RNA (1)...(19): siRNA sense strand
cagaaagugauuacacaua

SEQ ID NO: 1711963 - RNA, 19 nt, Homo sapiens
  misc_RNA (1)...(19): siRNA sense strand
ggaauauaaucuugaugag

SEQ ID NO: 1711964 - RNA, 19 nt, Homo sapiens
  misc_RNA (1)...(19): siRNA sense strand
agaagaugcugagaaagaa

SEQ ID NO: 1711965 - RNA, 19 nt, Homo sapiens
  misc_RNA (1)...(19): siRNA sense strand
gagaaagugaucccaguga

SEQ ID NO: 1711966 - RNA, 19 nt, Homo sapiens
  misc_RNA (1)...(19): siRNA sense strand
agaugaagaugauguagau

SEQ ID NO: 1711967 - RNA, 19 nt, Homo sapiens
  misc_RNA (1)...(19): siRNA sense strand
cagcugcaccuuccaauga

SEQ ID NO: 1711968 - RNA, 19 nt, Homo sapiens
  misc_RNA (1)...(19): siRNA sense strand
cagcagaaaccuauaggaa

SEQ ID NO: 1711969 - RNA, 19 nt, Homo sapiens
  misc_RNA (1)...(19): siRNA sense strand
caucaaauccaacuaucaa

SEQ ID NO: 1711970 - RNA, 19 nt, Homo sapiens
  misc_RNA (1)...(19): siRNA sense strand
ggagaacugcgacacauca

SEQ ID NO: 1711971 - RNA, 19 nt, Homo sapiens
  misc_RNA (1)...(19): siRNA sense strand
gaggagaacugcgacacau

SEQ ID NO: 1711972 - RNA, 19 nt, Homo sapiens
  misc_RNA (1)...(19): siRNA sense strand
ccgggcagcugacuuguug

SEQ ID NO: 1711973 - RNA, 19 nt, Homo sapiens
  misc_RNA (1)...(19): siRNA sense strand
ugaagaagacugcccaaau

SEQ ID NO: 1711974 - RNA, 19 nt, Homo sapiens
  misc_RNA (1)...(19): siRNA sense strand
ucaggaacuugcgaacaua

SEQ ID NO: 1711975 - RNA, 19 nt, Homo sapiens
  misc_RNA (1)...(19): siRNA sense strand
cacaguaagugcaagauca

SEQ ID NO: 1711976 - RNA, 19 nt, Homo sapiens
  misc_RNA (1)...(19): siRNA sense strand
ccagugacccaaacaaaga

SEQ ID NO: 1711977 - RNA, 19 nt, Homo sapiens
  misc_RNA (1)...(19): siRNA sense strand
gcaacuggacgaugaagau

SEQ ID NO: 1711978 - RNA, 19 nt, Homo sapiens
  misc_RNA (1)...(19): siRNA sense strand
gacccuacguggauagaau

SEQ ID NO: 1711979 - RNA, 19 nt, Homo sapiens
  misc_RNA (1)...(19): siRNA sense strand
gccggagccucaacagaaa

SEQ ID NO: 1711980 - RNA, 19 nt, Homo sapiens
  misc_RNA (1)...(19): siRNA sense strand
gaagaugcugagaaagaaa

SEQ ID NO: 1711981 - RNA, 19 nt, Homo sapiens
  misc_RNA (1)...(19): siRNA sense strand
ucaaggguuagauuacuua

SEQ ID NO: 1711982 - RNA, 19 nt, Homo sapiens
  misc_RNA (1)...(19): siRNA sense strand
cagcuccuaugaacaauuc

SEQ ID NO: 1711983 - RNA, 19 nt, Homo sapiens
  misc_RNA (1)...(19): siRNA sense strand
caaaugcagaaagugauua

SEQ ID NO: 1711984 - RNA, 19 nt, Homo sapiens
  misc_RNA (1)...(19): siRNA sense strand
aagaagaugcugagaaaga

SEQ ID NO: 1711985 - RNA, 19 nt, Homo sapiens
  misc_RNA (1)...(19): siRNA sense strand
gaugaugcauaugugagaa

SEQ ID NO: 1711986 - RNA, 19 nt, Homo sapiens
  misc_RNA (1)...(19): siRNA sense strand
gcugcacaguuuacagauu

SEQ ID NO: 1711987 - RNA, 19 nt, Homo sapiens
  misc_RNA (1)...(19): siRNA sense strand
gagccucuuugauguacuu

SEQ ID NO: 1711988 - RNA, 19 nt, Homo sapiens
  misc_RNA (1)...(19): siRNA sense strand
cauagacccuacguggaua

SEQ ID NO: 1711989 - RNA, 19 nt, Homo sapiens
  misc_RNA (1)...(19): siRNA sense strand
ccaaauggacgacauaaaa

SEQ ID NO: 1711990 - RNA, 19 nt, Homo sapiens
  misc_RNA (1)...(19): siRNA sense strand
cggcauccuugguugaauu

SEQ ID NO: 1711991 - RNA, 19 nt, Homo sapiens
  misc_RNA (1)...(19): siRNA sense strand
ugcaggagauagaagaauu

SEQ ID NO: 1711992 - RNA, 19 nt, Homo sapiens
  misc_RNA (1)...(19): siRNA sense strand
ggagauuauuuguuugaac

SEQ ID NO: 1711993 - RNA, 19 nt, Homo sapiens
  misc_RNA (1)...(19): siRNA sense strand
cggcguguauggcauuuga

SEQ ID NO: 1711994 - RNA, 19 nt, Homo sapiens
  misc_RNA (1)...(19): siRNA sense strand
uagcagcuccuaugaacaa

SEQ ID NO: 1711995 - RNA, 19 nt, Homo sapiens
  misc_RNA (1)...(19): siRNA sense strand
gcaggagauagaagaauug

SEQ ID NO: 1711996 - RNA, 19 nt, Homo sapiens
  misc_RNA (1)...(19): siRNA sense strand
agacagccuuggaugaaau

SEQ ID NO: 1711997 - RNA, 19 nt, Homo sapiens
  misc_RNA (1)...(19): siRNA sense strand
caacgggagauuauuuguu

SEQ ID NO: 1711998 - RNA, 19 nt, Homo sapiens
  misc_RNA (1)...(19): siRNA sense strand
cagcugacuuguuggugaa

SEQ ID NO: 1711999 - RNA, 19 nt, Homo sapiens
  misc_RNA (1)...(19): siRNA sense strand
ccugaggaauauaaucuug

SEQ ID NO: 1712000 - RNA, 19 nt, Homo sapiens
  misc_RNA (1)...(19): siRNA sense strand
ugaccaggauggcgaauac

SEQ ID NO: 1712001 - RNA, 19 nt, Homo sapiens
  misc_RNA (1)...(19): siRNA sense strand
aauggccgguaucauguua

SEQ ID NO: 1712002 - RNA, 19 nt, Homo sapiens
  misc_RNA (1)...(19): siRNA sense strand
agaaagaagaugcugagaa

SEQ ID NO: 1712003 - RNA, 19 nt, Homo sapiens
  misc_RNA (1)...(19): siRNA sense strand
guuuacagauuuccugauc

SEQ ID NO: 1712004 - RNA, 19 nt, Homo sapiens
  misc_RNA (1)...(19): siRNA sense strand
ucaaauguguucgagaaag

SEQ ID NO: 1712005 - RNA, 19 nt, Homo sapiens
  misc_RNA (1)...(19): siRNA sense strand
cugcaaagguggauaucau

SEQ ID NO: 1712006 - RNA, 19 nt, Homo sapiens
  misc_RNA (1)...(19): siRNA sense strand
ccaaaugcagaaagugauu

SEQ ID NO: 1712007 - RNA, 19 nt, Homo sapiens
  misc_RNA (1)...(19): siRNA sense strand
uaaaaccaauggccauauu

SEQ ID NO: 1712008 - RNA, 19 nt, Homo sapiens
  misc_RNA (1)...(19): siRNA sense strand
guggauagaaucaccuaaa

SEQ ID NO: 1712009 - RNA, 19 nt, Homo sapiens
  misc_RNA (1)...(19): siRNA sense strand
ggaaaagauuuguugcaau

SEQ ID NO: 1712010 - RNA, 19 nt, Homo sapiens
  misc_RNA (1)...(19): siRNA sense strand
guguguggaugaugcauau

SEQ ID NO: 1712011 - RNA, 19 nt, Homo sapiens
  misc_RNA (1)...(19): siRNA sense strand
gccaccaucuccucaagug

SEQ ID NO: 1712012 - RNA, 19 nt, Homo sapiens
  misc_RNA (1)...(19): siRNA sense strand
uuggagaccucuucaaugg

SEQ ID NO: 1712013 - RNA, 19 nt, Homo sapiens
  misc_RNA (1)...(19): siRNA sense strand
cgaaguacuuggccaccau

SEQ ID NO: 1712014 - RNA, 19 nt, Homo sapiens
  misc_RNA (1)...(19): siRNA sense strand
auccuugguugaauucuua

SEQ ID NO: 1712015 - RNA, 19 nt, Homo sapiens
  misc_RNA (1)...(19): siRNA sense strand
uuagaaaugguuccagaaa

SEQ ID NO: 1712016 - RNA, 19 nt, Homo sapiens
  misc_RNA (1)...(19): siRNA sense strand
gcggcucugugcuuucuga

SEQ ID NO: 1712017 - RNA, 19 nt, Homo sapiens
  misc_RNA (1)...(19): siRNA sense strand
aauggugaauugccaaaug

SEQ ID NO: 1712018 - RNA, 19 nt, Homo sapiens
  misc_RNA (1)...(19): siRNA sense strand
guacggcuccacagcagaa

SEQ ID NO: 1712019 - RNA, 19 nt, Homo sapiens
  misc_RNA (1)...(19): siRNA sense strand
ggaugaugcauaugugaga

SEQ ID NO: 1712020 - RNA, 19 nt, Homo sapiens
  misc_RNA (1)...(19): siRNA sense strand
guaagugcaagaucauuca

SEQ ID NO: 1712021 - RNA, 19 nt, Homo sapiens
  misc_RNA (1)...(19): siRNA sense strand
gggagauuauuuguuugaa

SEQ ID NO: 1712022 - RNA, 19 nt, Homo sapiens
  misc_RNA (1)...(19): siRNA sense strand
gggaaaagauuuguugcaa

SEQ ID NO: 1712023 - RNA, 19 nt, Homo sapiens
  misc_RNA (1)...(19): siRNA sense strand
uaucaaggccucccaguac

SEQ ID NO: 1712024 - RNA, 19 nt, Homo sapiens
  misc_RNA (1)...(19): siRNA sense strand
ccuggagccucuuugaugu

SEQ ID NO: 1712025 - RNA, 19 nt, Homo sapiens
  misc_RNA (1)...(19): siRNA sense strand
ggaccaggaagagaaagaa

SEQ ID NO: 1712026 - RNA, 19 nt, Homo sapiens
  misc_RNA (1)...(19): siRNA sense strand
gggcacuucucuacugucu

SEQ ID NO: 1712027 - RNA, 19 nt, Homo sapiens
  misc_RNA (1)...(19): siRNA sense strand
guacguugugugaagagua

SEQ ID NO: 1712028 - RNA, 19 nt, Homo sapiens
  misc_RNA (1)...(19): siRNA sense strand
ccaguacguugugugaaga

SEQ ID NO: 1712029 - RNA, 19 nt, Homo sapiens
  misc_RNA (1)...(19): siRNA sense strand
cugcauggucuucgaagua

SEQ ID NO: 1712030 - RNA, 19 nt, Homo sapiens
  misc_RNA (1)...(19): siRNA sense strand
uggcaacgggagauuauuu

SEQ ID NO: 1712031 - RNA, 19 nt, Homo sapiens
  misc_RNA (1)...(19): siRNA sense strand
agucacaguucccagaguu

SEQ ID NO: 1712032 - RNA, 19 nt, Homo sapiens
  misc_RNA (1)...(19): siRNA sense strand
gcagaaagugauuacacau

SEQ ID NO: 1712033 - RNA, 19 nt, Homo sapiens
  misc_RNA (1)...(19): siRNA sense strand
aagaggacccugcggacua

SEQ ID NO: 1712034 - RNA, 19 nt, Homo sapiens
  misc_RNA (1)...(19): siRNA sense strand
gcauaugugagaagaaugg

SEQ ID NO: 1712035 - RNA, 19 nt, Homo sapiens
  misc_RNA (1)...(19): siRNA sense strand
ccucuucaauggccgguau

SEQ ID NO: 1712036 - RNA, 19 nt, Homo sapiens
  misc_RNA (1)...(19): siRNA sense strand
gcaacgggagauuauuugu

SEQ ID NO: 1712037 - RNA, 19 nt, Homo sapiens
  misc_RNA (1)...(19): siRNA sense strand
gaaagaagaugcugagaaa

SEQ ID NO: 1712038 - RNA, 19 nt, Homo sapiens
  misc_RNA (1)...(19): siRNA sense strand
gaagaagacugcccaaauc

SEQ ID NO: 1712039 - RNA, 19 nt, Homo sapiens
  misc_RNA (1)...(19): siRNA sense strand
gcgagaagcugaaaggaaa

SEQ ID NO: 1712040 - RNA, 19 nt, Homo sapiens
  misc_RNA (1)...(19): siRNA sense strand
gcucaaauguguucgagaa

SEQ ID NO: 1712041 - RNA, 19 nt, Homo sapiens
  misc_RNA (1)...(19): siRNA sense strand
gcaagaucauucauacuga

SEQ ID NO: 1712042 - RNA, 19 nt, Homo sapiens
  misc_RNA (1)...(19): siRNA sense strand
ugaagaugcugcacaguuu

SEQ ID NO: 1712043 - RNA, 19 nt, Homo sapiens
  misc_RNA (1)...(19): siRNA sense strand
gaagaggcaggcugaguua

SEQ ID NO: 1712044 - RNA, 19 nt, Homo sapiens
  misc_RNA (1)...(19): siRNA sense strand
gaucauucauacugacaua

SEQ ID NO: 1712045 - RNA, 19 nt, Homo sapiens
  misc_RNA (1)...(19): siRNA sense strand
gcccagaggugaaacuaaa

SEQ ID NO: 1712046 - RNA, 19 nt, Homo sapiens
  misc_RNA (1)...(19): siRNA sense strand
gaaaagauuuguugcaaug

SEQ ID NO: 1712047 - RNA, 19 nt, Homo sapiens
  misc_RNA (1)...(19): siRNA sense strand
guuguucucuggauccuua

SEQ ID NO: 1712048 - RNA, 19 nt, Homo sapiens
  misc_RNA (1)...(19): siRNA sense strand
gcagaaaccuauaggaaaa

SEQ ID NO: 1712049 - RNA, 19 nt, Homo sapiens
  misc_RNA (1)...(19): siRNA sense strand
ucugagggaucaccacuua

SEQ ID NO: 1712050 - RNA, 19 nt, Homo sapiens
  misc_RNA (1)...(19): siRNA sense strand
ucaaguggaucaucaaauc

SEQ ID NO: 1712051 - RNA, 19 nt, Homo sapiens
  misc_RNA (1)...(19): siRNA sense strand
gaagaugcugcacaguuua

SEQ ID NO: 1712052 - RNA, 19 nt, Homo sapiens
  misc_RNA (1)...(19): siRNA sense strand
cgaugaagaugaugaugaa

SEQ ID NO: 1712053 - RNA, 19 nt, Homo sapiens
  misc_RNA (1)...(19): siRNA sense strand
ugaagaugaugaugaagaa

SEQ ID NO: 1712054 - RNA, 19 nt, Homo sapiens
  misc_RNA (1)...(19): siRNA sense strand
gacagaagcagaacgguuu

SEQ ID NO: 1712055 - RNA, 19 nt, Homo sapiens
  misc_RNA (1)...(19): siRNA sense strand
gaggcaggcugaguuauug

SEQ ID NO: 1712056 - RNA, 19 nt, Homo sapiens
  misc_RNA (1)...(19): siRNA sense strand
aacgggagauuauuuguuu

SEQ ID NO: 1712057 - RNA, 19 nt, Homo sapiens
  misc_RNA (1)...(19): siRNA sense strand
ggagacagccuuggaugaa

SEQ ID NO: 1712058 - RNA, 19 nt, Homo sapiens
  misc_RNA (1)...(19): siRNA sense strand
gagacagccuuggaugaaa

SEQ ID NO: 1712059 - RNA, 19 nt, Homo sapiens
  misc_RNA (1)...(19): siRNA sense strand
caaauguguucgagaaagu

SEQ ID NO: 1712060 - RNA, 19 nt, Homo sapiens
  misc_RNA (1)...(19): siRNA sense strand
cugcacaguuuacagauuu

SEQ ID NO: 1712061 - RNA, 19 nt, Homo sapiens
  misc_RNA (1)...(19): siRNA sense strand
gaucaucaaauccaacuau

SEQ ID NO: 1712062 - RNA, 19 nt, Homo sapiens
  misc_RNA (1)...(19): siRNA sense strand
cagaaagugauuacacaua

SEQ ID NO: 1712063 - RNA, 19 nt, Homo sapiens
  misc_RNA (1)...(19): siRNA sense strand
ggaauauaaucuugaugag

SEQ ID NO: 1712064 - RNA, 19 nt, Homo sapiens
  misc_RNA (1)...(19): siRNA sense strand
agaagaugcugagaaagaa

SEQ ID NO: 1712065 - RNA, 19 nt, Homo sapiens
  misc_RNA (1)...(19): siRNA sense strand
gagaaagugaucccaguga

SEQ ID NO: 1712066 - RNA, 19 nt, Homo sapiens
  misc_RNA (1)...(19): siRNA sense strand
agaugaagaugauguagau

SEQ ID NO: 1712067 - RNA, 19 nt, Homo sapiens
  misc_RNA (1)...(19): siRNA sense strand
cagcugcaccuuccaauga

SEQ ID NO: 1712068 - RNA, 19 nt, Homo sapiens
  misc_RNA (1)...(19): siRNA sense strand
cagcagaaaccuauaggaa

SEQ ID NO: 1712069 - RNA, 19 nt, Homo sapiens
  misc_RNA (1)...(19): siRNA sense strand
caucaaauccaacuaucaa

SEQ ID NO: 1712070 - RNA, 19 nt, Homo sapiens
  misc_RNA (1)...(19): siRNA sense strand
ggagaacugcgacacauca

SEQ ID NO: 1712071 - RNA, 19 nt, Homo sapiens
  misc_RNA (1)...(19): siRNA sense strand
gaggagaacugcgacacau

SEQ ID NO: 1712072 - RNA, 19 nt, Homo sapiens
  misc_RNA (1)...(19): siRNA sense strand
ccgggcagcugacuuguug

SEQ ID NO: 1712073 - RNA, 19 nt, Homo sapiens
  misc_RNA (1)...(19): siRNA sense strand
ugaagaagacugcccaaau

SEQ ID NO: 1712074 - RNA, 19 nt, Homo sapiens
  misc_RNA (1)...(19): siRNA sense strand
ucaggaacuugcgaacaua

SEQ ID NO: 1712075 - RNA, 19 nt, Homo sapiens
  misc_RNA (1)...(19): siRNA sense strand
cacaguaagugcaagauca

SEQ ID NO: 1712076 - RNA, 19 nt, Homo sapiens
  misc_RNA (1)...(19): siRNA sense strand
ccagugacccaaacaaaga

SEQ ID NO: 1712077 - RNA, 19 nt, Homo sapiens
  misc_RNA (1)...(19): siRNA sense strand
gcaacuggacgaugaagau

SEQ ID NO: 1712078 - RNA, 19 nt, Homo sapiens
  misc_RNA (1)...(19): siRNA sense strand
gacccuacguggauagaau

SEQ ID NO: 1712079 - RNA, 19 nt, Homo sapiens
  misc_RNA (1)...(19): siRNA sense strand
gccggagccucaacagaaa

SEQ ID NO: 1712080 - RNA, 19 nt, Homo sapiens
  misc_RNA (1)...(19): siRNA sense strand
gaagaugcugagaaagaaa

SEQ ID NO: 1712081 - RNA, 19 nt, Homo sapiens
  misc_RNA (1)...(19): siRNA sense strand
ucaaggguuagauuacuua

SEQ ID NO: 1712082 - RNA, 19 nt, Homo sapiens
  misc_RNA (1)...(19): siRNA sense strand
cagcuccuaugaacaauuc

SEQ ID NO: 1712083 - RNA, 19 nt, Homo sapiens
  misc_RNA (1)...(19): siRNA sense strand
caaaugcagaaagugauua

SEQ ID NO: 1712084 - RNA, 19 nt, Homo sapiens
  misc_RNA (1)...(19): siRNA sense strand
aagaagaugcugagaaaga

SEQ ID NO: 1712085 - RNA, 19 nt, Homo sapiens
  misc_RNA (1)...(19): siRNA sense strand
gaugaugcauaugugagaa

SEQ ID NO: 1712086 - RNA, 19 nt, Homo sapiens
  misc_RNA (1)...(19): siRNA sense strand
gcugcacaguuuacagauu

SEQ ID NO: 1712087 - RNA, 19 nt, Homo sapiens
  misc_RNA (1)...(19): siRNA sense strand
gagccucuuugauguacuu

SEQ ID NO: 1712088 - RNA, 19 nt, Homo sapiens
  misc_RNA (1)...(19): siRNA sense strand
cauagacccuacguggaua

SEQ ID NO: 1712089 - RNA, 19 nt, Homo sapiens
  misc_RNA (1)...(19): siRNA sense strand
ccaaauggacgacauaaaa

SEQ ID NO: 1712090 - RNA, 19 nt, Homo sapiens
  misc_RNA (1)...(19): siRNA sense strand
cggcauccuugguugaauu

SEQ ID NO: 1712091 - RNA, 19 nt, Homo sapiens
  misc_RNA (1)...(19): siRNA sense strand
ugcaggagauagaagaauu

SEQ ID NO: 1712092 - RNA, 19 nt, Homo sapiens
  misc_RNA (1)...(19): siRNA sense strand
ggagauuauuuguuugaac

SEQ ID NO: 1712093 - RNA, 19 nt, Homo sapiens
  misc_RNA (1)...(19): siRNA sense strand
cggcguguauggcauuuga

SEQ ID NO: 1712094 - RNA, 19 nt, Homo sapiens
  misc_RNA (1)...(19): siRNA sense strand
uagcagcuccuaugaacaa

SEQ ID NO: 1712095 - RNA, 19 nt, Homo sapiens
  misc_RNA (1)...(19): siRNA sense strand
gcaggagauagaagaauug

SEQ ID NO: 1712096 - RNA, 19 nt, Homo sapiens
  misc_RNA (1)...(19): siRNA sense strand
agacagccuuggaugaaau

SEQ ID NO: 1712097 - RNA, 19 nt, Homo sapiens
  misc_RNA (1)...(19): siRNA sense strand
caacgggagauuauuuguu

SEQ ID NO: 1712098 - RNA, 19 nt, Homo sapiens
  misc_RNA (1)...(19): siRNA sense strand
cagcugacuuguuggugaa

SEQ ID NO: 1712099 - RNA, 19 nt, Homo sapiens
  misc_RNA (1)...(19): siRNA sense strand
ccugaggaauauaaucuug

SEQ ID NO: 1712100 - RNA, 19 nt, Homo sapiens
  misc_RNA (1)...(19): siRNA sense strand
ugaccaggauggcgaauac

SEQ ID NO: 1712101 - RNA, 19 nt, Homo sapiens
  misc_RNA (1)...(19): siRNA sense strand
aauggccgguaucauguua

SEQ ID NO: 1712102 - RNA, 19 nt, Homo sapiens
  misc_RNA (1)...(19): siRNA sense strand
agaaagaagaugcugagaa

SEQ ID NO: 1712103 - RNA, 19 nt, Homo sapiens
  misc_RNA (1)...(19): siRNA sense strand
guuuacagauuuccugauc

SEQ ID NO: 1712104 - RNA, 19 nt, Homo sapiens
  misc_RNA (1)...(19): siRNA sense strand
ucaaauguguucgagaaag

SEQ ID NO: 1712105 - RNA, 19 nt, Homo sapiens
  misc_RNA (1)...(19): siRNA sense strand
cugcaaagguggauaucau

SEQ ID NO: 1712106 - RNA, 19 nt, Homo sapiens
  misc_RNA (1)...(19): siRNA sense strand
ccaaaugcagaaagugauu

SEQ ID NO: 1712107 - RNA, 19 nt, Homo sapiens
  misc_RNA (1)...(19): siRNA sense strand
uaaaaccaauggccauauu

SEQ ID NO: 1712108 - RNA, 19 nt, Homo sapiens
  misc_RNA (1)...(19): siRNA sense strand
guggauagaaucaccuaaa

SEQ ID NO: 1712109 - RNA, 19 nt, Homo sapiens
  misc_RNA (1)...(19): siRNA sense strand
ggaaaagauuuguugcaau

SEQ ID NO: 1712110 - RNA, 19 nt, Homo sapiens
  misc_RNA (1)...(19): siRNA sense strand
guguguggaugaugcauau

SEQ ID NO: 1712111 - RNA, 19 nt, Homo sapiens
  misc_RNA (1)...(19): siRNA sense strand
gccaccaucuccucaagug

SEQ ID NO: 1712112 - RNA, 19 nt, Homo sapiens
  misc_RNA (1)...(19): siRNA sense strand
uuggagaccucuucaaugg

SEQ ID NO: 1712113 - RNA, 19 nt, Homo sapiens
  misc_RNA (1)...(19): siRNA sense strand
cgaaguacuuggccaccau

SEQ ID NO: 1712114 - RNA, 19 nt, Homo sapiens
  misc_RNA (1)...(19): siRNA sense strand
auccuugguugaauucuua

SEQ ID NO: 1712115 - RNA, 19 nt, Homo sapiens
  misc_RNA (1)...(19): siRNA sense strand
uuagaaaugguuccagaaa

SEQ ID NO: 1712116 - RNA, 19 nt, Homo sapiens
  misc_RNA (1)...(19): siRNA sense strand
gcggcucugugcuuucuga

SEQ ID NO: 1712117 - RNA, 19 nt, Homo sapiens
  misc_RNA (1)...(19): siRNA sense strand
aauggugaauugccaaaug

SEQ ID NO: 1712118 - RNA, 19 nt, Homo sapiens
  misc_RNA (1)...(19): siRNA sense strand
guacggcuccacagcagaa

SEQ ID NO: 1712119 - RNA, 19 nt, Homo sapiens
  misc_RNA (1)...(19): siRNA sense strand
ggaugaugcauaugugaga

SEQ ID NO: 1712120 - RNA, 19 nt, Homo sapiens
  misc_RNA (1)...(19): siRNA sense strand
guaagugcaagaucauuca

SEQ ID NO: 1712121 - RNA, 19 nt, Homo sapiens
  misc_RNA (1)...(19): siRNA sense strand
gggagauuauuuguuugaa

SEQ ID NO: 1712122 - RNA, 19 nt, Homo sapiens
  misc_RNA (1)...(19): siRNA sense strand
gggaaaagauuuguugcaa

SEQ ID NO: 1712123 - RNA, 19 nt, Homo sapiens
  misc_RNA (1)...(19): siRNA sense strand
uaucaaggccucccaguac

SEQ ID NO: 1712124 - RNA, 19 nt, Homo sapiens
  misc_RNA (1)...(19): siRNA sense strand
ccuggagccucuuugaugu

SEQ ID NO: 1712125 - RNA, 19 nt, Homo sapiens
  misc_RNA (1)...(19): siRNA sense strand
ggaccaggaagagaaagaa

SEQ ID NO: 1712126 - RNA, 19 nt, Homo sapiens
  misc_RNA (1)...(19): siRNA sense strand
gggcacuucucuacugucu

SEQ ID NO: 1712127 - RNA, 19 nt, Homo sapiens
  misc_RNA (1)...(19): siRNA sense strand
guacguugugugaagagua

SEQ ID NO: 1712128 - RNA, 19 nt, Homo sapiens
  misc_RNA (1)...(19): siRNA sense strand
ccaguacguugugugaaga

SEQ ID NO: 1712129 - RNA, 19 nt, Homo sapiens
  misc_RNA (1)...(19): siRNA sense strand
cugcauggucuucgaagua

SEQ ID NO: 1712130 - RNA, 19 nt, Homo sapiens
  misc_RNA (1)...(19): siRNA sense strand
uggcaacgggagauuauuu

SEQ ID NO: 1712131 - RNA, 19 nt, Homo sapiens
  misc_RNA (1)...(19): siRNA sense strand
agucacaguucccagaguu

SEQ ID NO: 1712132 - RNA, 19 nt, Homo sapiens
  misc_RNA (1)...(19): siRNA sense strand
gcagaaagugauuacacau

SEQ ID NO: 1712133 - RNA, 19 nt, Homo sapiens
  misc_RNA (1)...(19): siRNA sense strand
aagaggacccugcggacua

SEQ ID NO: 1712134 - RNA, 19 nt, Homo sapiens
  misc_RNA (1)...(19): siRNA sense strand
gcauaugugagaagaaugg

SEQ ID NO: 1712135 - RNA, 19 nt, Homo sapiens
  misc_RNA (1)...(19): siRNA sense strand
ccucuucaauggccgguau

SEQ ID NO: 1712136 - RNA, 19 nt, Homo sapiens
  misc_RNA (1)...(19): siRNA sense strand
gcaacgggagauuauuugu

SEQ ID NO: 1712137 - RNA, 19 nt, Homo sapiens
  misc_RNA (1)...(19): siRNA sense strand
gaaagaagaugcugagaaa

SEQ ID NO: 1712138 - RNA, 19 nt, Homo sapiens
  misc_RNA (1)...(19): siRNA sense strand
gaagaagacugcccaaauc

SEQ ID NO: 1712139 - RNA, 19 nt, Homo sapiens
  misc_RNA (1)...(19): siRNA sense strand
gcgagaagcugaaaggaaa

SEQ ID NO: 1712140 - RNA, 19 nt, Homo sapiens
  misc_RNA (1)...(19): siRNA sense strand
gcucaaauguguucgagaa

SEQ ID NO: 1712141 - RNA, 19 nt, Homo sapiens
  misc_RNA (1)...(19): siRNA sense strand
gcaagaucauucauacuga

SEQ ID NO: 1712142 - RNA, 19 nt, Homo sapiens
  misc_RNA (1)...(19): siRNA sense strand
ugaagaugcugcacaguuu

SEQ ID NO: 1712143 - RNA, 19 nt, Homo sapiens
  misc_RNA (1)...(19): siRNA sense strand
gaagaggcaggcugaguua

SEQ ID NO: 1712144 - RNA, 19 nt, Homo sapiens
  misc_RNA (1)...(19): siRNA sense strand
gaucauucauacugacaua

SEQ ID NO: 1712145 - RNA, 19 nt, Homo sapiens
  misc_RNA (1)...(19): siRNA sense strand
gcccagaggugaaacuaaa

SEQ ID NO: 1712146 - RNA, 19 nt, Homo sapiens
  misc_RNA (1)...(19): siRNA sense strand
gaaaagauuuguugcaaug

SEQ ID NO: 1712147 - RNA, 19 nt, Homo sapiens
  misc_RNA (1)...(19): siRNA sense strand
guuguucucuggauccuua

SEQ ID NO: 1712148 - RNA, 19 nt, Homo sapiens
  misc_RNA (1)...(19): siRNA sense strand
gcagaaaccuauaggaaaa

SEQ ID NO: 1712149 - RNA, 19 nt, Homo sapiens
  misc_RNA (1)...(19): siRNA sense strand
ucugagggaucaccacuua

SEQ ID NO: 1712150 - RNA, 19 nt, Homo sapiens
  misc_RNA (1)...(19): siRNA sense strand
ucaaguggaucaucaaauc

SEQ ID NO: 1712151 - RNA, 19 nt, Homo sapiens
  misc_RNA (1)...(19): siRNA sense strand
gaagaugcugcacaguuua

SEQ ID NO: 1712152 - RNA, 19 nt, Homo sapiens
  misc_RNA (1)...(19): siRNA sense strand
cgaugaagaugaugaugaa

SEQ ID NO: 1712153 - RNA, 19 nt, Homo sapiens
  misc_RNA (1)...(19): siRNA sense strand
ugaagaugaugaugaagaa

SEQ ID NO: 1712154 - RNA, 19 nt, Homo sapiens
  misc_RNA (1)...(19): siRNA sense strand
gacagaagcagaacgguuu

SEQ ID NO: 1712155 - RNA, 19 nt, Homo sapiens
  misc_RNA (1)...(19): siRNA sense strand
gaggcaggcugaguuauug

SEQ ID NO: 1712156 - RNA, 19 nt, Homo sapiens
  misc_RNA (1)...(19): siRNA sense strand
aacgggagauuauuuguuu

SEQ ID NO: 1712157 - RNA, 19 nt, Homo sapiens
  misc_RNA (1)...(19): siRNA sense strand
gagacagccuuggaugaaa

SEQ ID NO: 1712158 - RNA, 19 nt, Homo sapiens
  misc_RNA (1)...(19): siRNA sense strand
ggagacagccuuggaugaa

SEQ ID NO: 1712159 - RNA, 19 nt, Homo sapiens
  misc_RNA (1)...(19): siRNA sense strand
caaauguguucgagaaagu

SEQ ID NO: 1712160 - RNA, 19 nt, Homo sapiens
  misc_RNA (1)...(19): siRNA sense strand
cugcacaguuuacagauuu

SEQ ID NO: 1712161 - RNA, 19 nt, Homo sapiens
  misc_RNA (1)...(19): siRNA sense strand
gaucaucaaauccaacuau

SEQ ID NO: 1712162 - RNA, 19 nt, Homo sapiens
  misc_RNA (1)...(19): siRNA sense strand
cagaaagugauuacacaua

SEQ ID NO: 1712163 - RNA, 19 nt, Homo sapiens
  misc_RNA (1)...(19): siRNA sense strand
ggaauauaaucuugaugag

SEQ ID NO: 1712164 - RNA, 19 nt, Homo sapiens
  misc_RNA (1)...(19): siRNA sense strand
agaagaugcugagaaagaa

SEQ ID NO: 1712165 - RNA, 19 nt, Homo sapiens
  misc_RNA (1)...(19): siRNA sense strand
gagaaagugaucccaguga

SEQ ID NO: 1712166 - RNA, 19 nt, Homo sapiens
  misc_RNA (1)...(19): siRNA sense strand
agaugaagaugauguagau

SEQ ID NO: 1712167 - RNA, 19 nt, Homo sapiens
  misc_RNA (1)...(19): siRNA sense strand
cagcugcaccuuccaauga

SEQ ID NO: 1712168 - RNA, 19 nt, Homo sapiens
  misc_RNA (1)...(19): siRNA sense strand
cagcagaaaccuauaggaa

SEQ ID NO: 1712169 - RNA, 19 nt, Homo sapiens
  misc_RNA (1)...(19): siRNA sense strand
caucaaauccaacuaucaa

SEQ ID NO: 1712170 - RNA, 19 nt, Homo sapiens
  misc_RNA (1)...(19): siRNA sense strand
ggagaacugcgacacauca

SEQ ID NO: 1712171 - RNA, 19 nt, Homo sapiens
  misc_RNA (1)...(19): siRNA sense strand
gaggagaacugcgacacau

SEQ ID NO: 1712172 - RNA, 19 nt, Homo sapiens
  misc_RNA (1)...(19): siRNA sense strand
ccgggcagcugacuuguug

SEQ ID NO: 1712173 - RNA, 19 nt, Homo sapiens
  misc_RNA (1)...(19): siRNA sense strand
ugaagaagacugcccaaau

SEQ ID NO: 1712174 - RNA, 19 nt, Homo sapiens
  misc_RNA (1)...(19): siRNA sense strand
ucaggaacuugcgaacaua

SEQ ID NO: 1712175 - RNA, 19 nt, Homo sapiens
  misc_RNA (1)...(19): siRNA sense strand
cacaguaagugcaagauca

SEQ ID NO: 1712176 - RNA, 19 nt, Homo sapiens
  misc_RNA (1)...(19): siRNA sense strand
ccagugacccaaacaaaga

SEQ ID NO: 1712177 - RNA, 19 nt, Homo sapiens
  misc_RNA (1)...(19): siRNA sense strand
gcaacuggacgaugaagau

SEQ ID NO: 1712178 - RNA, 19 nt, Homo sapiens
  misc_RNA (1)...(19): siRNA sense strand
gacccuacguggauagaau

SEQ ID NO: 1712179 - RNA, 19 nt, Homo sapiens
  misc_RNA (1)...(19): siRNA sense strand
gaagaugcugagaaagaaa

SEQ ID NO: 1712180 - RNA, 19 nt, Homo sapiens
  misc_RNA (1)...(19): siRNA sense strand
ucaaggguuagauuacuua

SEQ ID NO: 1712181 - RNA, 19 nt, Homo sapiens
  misc_RNA (1)...(19): siRNA sense strand
cagcuccuaugaacaauuc

SEQ ID NO: 1712182 - RNA, 19 nt, Homo sapiens
  misc_RNA (1)...(19): siRNA sense strand
caaaugcagaaagugauua

SEQ ID NO: 1712183 - RNA, 19 nt, Homo sapiens
  misc_RNA (1)...(19): siRNA sense strand
aagaagaugcugagaaaga

SEQ ID NO: 1712184 - RNA, 19 nt, Homo sapiens
  misc_RNA (1)...(19): siRNA sense strand
gaugaugcauaugugagaa

SEQ ID NO: 1712185 - RNA, 19 nt, Homo sapiens
  misc_RNA (1)...(19): siRNA sense strand
gcugcacaguuuacagauu

SEQ ID NO: 1712186 - RNA, 19 nt, Homo sapiens
  misc_RNA (1)...(19): siRNA sense strand
gagccucuuugauguacuu

SEQ ID NO: 1712187 - RNA, 19 nt, Homo sapiens
  misc_RNA (1)...(19): siRNA sense strand
cauagacccuacguggaua

SEQ ID NO: 1712188 - RNA, 19 nt, Homo sapiens
  misc_RNA (1)...(19): siRNA sense strand
ccaaauggacgacauaaaa

SEQ ID NO: 1712189 - RNA, 19 nt, Homo sapiens
  misc_RNA (1)...(19): siRNA sense strand
cggcauccuugguugaauu

SEQ ID NO: 1712190 - RNA, 19 nt, Homo sapiens
  misc_RNA (1)...(19): siRNA sense strand
ugcaggagauagaagaauu

SEQ ID NO: 1712191 - RNA, 19 nt, Homo sapiens
  misc_RNA (1)...(19): siRNA sense strand
ggagauuauuuguuugaac

SEQ ID NO: 1712192 - RNA, 19 nt, Homo sapiens
  misc_RNA (1)...(19): siRNA sense strand
cggcguguauggcauuuga

SEQ ID NO: 1712193 - RNA, 19 nt, Homo sapiens
  misc_RNA (1)...(19): siRNA sense strand
uagcagcuccuaugaacaa

SEQ ID NO: 1712194 - RNA, 19 nt, Homo sapiens
  misc_RNA (1)...(19): siRNA sense strand
gcaggagauagaagaauug

SEQ ID NO: 1712195 - RNA, 19 nt, Homo sapiens
  misc_RNA (1)...(19): siRNA sense strand
ugaccaggauggcgaauac

SEQ ID NO: 1712196 - RNA, 19 nt, Homo sapiens
  misc_RNA (1)...(19): siRNA sense strand
agacagccuuggaugaaau

SEQ ID NO: 1712197 - RNA, 19 nt, Homo sapiens
  misc_RNA (1)...(19): siRNA sense strand
caacgggagauuauuuguu

SEQ ID NO: 1712198 - RNA, 19 nt, Homo sapiens
  misc_RNA (1)...(19): siRNA sense strand
cagcugacuuguuggugaa

SEQ ID NO: 1712199 - RNA, 19 nt, Homo sapiens
  misc_RNA (1)...(19): siRNA sense strand
ccugaggaauauaaucuug

SEQ ID NO: 1712200 - RNA, 19 nt, Homo sapiens
  misc_RNA (1)...(19): siRNA sense strand
agaaagaagaugcugagaa

SEQ ID NO: 1712201 - RNA, 19 nt, Homo sapiens
  misc_RNA (1)...(19): siRNA sense strand
guuuacagauuuccugauc

SEQ ID NO: 1712202 - RNA, 19 nt, Homo sapiens
  misc_RNA (1)...(19): siRNA sense strand
ucaaauguguucgagaaag

SEQ ID NO: 1712203 - RNA, 19 nt, Homo sapiens
  misc_RNA (1)...(19): siRNA sense strand
ggaaaagauuuguugcaau

SEQ ID NO: 1712204 - RNA, 19 nt, Homo sapiens
  misc_RNA (1)...(19): siRNA sense strand
ccaaaugcagaaagugauu

SEQ ID NO: 1712205 - RNA, 19 nt, Homo sapiens
  misc_RNA (1)...(19): siRNA sense strand
uaaaaccaauggccauauu

SEQ ID NO: 1712206 - RNA, 19 nt, Homo sapiens
  misc_RNA (1)...(19): siRNA sense strand
guggauagaaucaccuaaa

SEQ ID NO: 1712207 - RNA, 19 nt, Homo sapiens
  misc_RNA (1)...(19): siRNA sense strand
guguguggaugaugcauau

SEQ ID NO: 1712208 - RNA, 19 nt, Homo sapiens
  misc_RNA (1)...(19): siRNA sense strand
gccaccaucuccucaagug

SEQ ID NO: 1712209 - RNA, 19 nt, Homo sapiens
  misc_RNA (1)...(19): siRNA sense strand
ggaugaugcauaugugaga

SEQ ID NO: 1712210 - RNA, 19 nt, Homo sapiens
  misc_RNA (1)...(19): siRNA sense strand
auccuugguugaauucuua

SEQ ID NO: 1712211 - RNA, 19 nt, Homo sapiens
  misc_RNA (1)...(19): siRNA sense strand
uuagaaaugguuccagaaa

SEQ ID NO: 1712212 - RNA, 19 nt, Homo sapiens
  misc_RNA (1)...(19): siRNA sense strand
gcggcucugugcuuucuga

SEQ ID NO: 1712213 - RNA, 19 nt, Homo sapiens
  misc_RNA (1)...(19): siRNA sense strand
cgaaguacuuggccaccau

SEQ ID NO: 1712214 - RNA, 19 nt, Homo sapiens
  misc_RNA (1)...(19): siRNA sense strand
aauggugaauugccaaaug

SEQ ID NO: 1712215 - RNA, 19 nt, Homo sapiens
  misc_RNA (1)...(19): siRNA sense strand
guacggcuccacagcagaa

SEQ ID NO: 1712216 - RNA, 19 nt, Homo sapiens
  misc_RNA (1)...(19): siRNA sense strand
guaagugcaagaucauuca

SEQ ID NO: 1712217 - RNA, 19 nt, Homo sapiens
  misc_RNA (1)...(19): siRNA sense strand
gggagauuauuuguuugaa

SEQ ID NO: 1712218 - RNA, 19 nt, Homo sapiens
  misc_RNA (1)...(19): siRNA sense strand
gggaaaagauuuguugcaa

SEQ ID NO: 1712219 - RNA, 19 nt, Homo sapiens
  misc_RNA (1)...(19): siRNA sense strand
uaucaaggccucccaguac

SEQ ID NO: 1712220 - RNA, 19 nt, Homo sapiens
  misc_RNA (1)...(19): siRNA sense strand
ccuggagccucuuugaugu

SEQ ID NO: 1712221 - RNA, 19 nt, Homo sapiens
  misc_RNA (1)...(19): siRNA sense strand
ggaccaggaagagaaagaa

SEQ ID NO: 1712222 - RNA, 19 nt, Homo sapiens
  misc_RNA (1)...(19): siRNA sense strand
guacguugugugaagagua

SEQ ID NO: 1712223 - RNA, 19 nt, Homo sapiens
  misc_RNA (1)...(19): siRNA sense strand
ccaguacguugugugaaga

SEQ ID NO: 1712224 - RNA, 19 nt, Homo sapiens
  misc_RNA (1)...(19): siRNA sense strand
cugcauggucuucgaagua

SEQ ID NO: 1712225 - RNA, 19 nt, Homo sapiens
  misc_RNA (1)...(19): siRNA sense strand
uggcaacgggagauuauuu

SEQ ID NO: 1712226 - RNA, 19 nt, Homo sapiens
  misc_RNA (1)...(19): siRNA sense strand
agucacaguucccagaguu

SEQ ID NO: 1712227 - RNA, 19 nt, Homo sapiens
  misc_RNA (1)...(19): siRNA sense strand
gcagaaagugauuacacau

SEQ ID NO: 1712228 - RNA, 19 nt, Homo sapiens
  misc_RNA (1)...(19): siRNA sense strand
gcauaugugagaagaaugg

SEQ ID NO: 1712229 - RNA, 19 nt, Homo sapiens
  misc_RNA (1)...(19): siRNA sense strand
acauaaagccggaaaauau

SEQ ID NO: 1712230 - RNA, 19 nt, Homo sapiens
  misc_RNA (1)...(19): siRNA sense strand
gcaacgggagauuauuugu

SEQ ID NO: 1712231 - RNA, 19 nt, Homo sapiens
  misc_RNA (1)...(19): siRNA sense strand
ggacgaugaagaugaugau

SEQ ID NO: 1712232 - RNA, 19 nt, Homo sapiens
  misc_RNA (1)...(19): siRNA sense strand
gaagcugaaaggaaaauaa

SEQ ID NO: 1712233 - RNA, 19 nt, Homo sapiens
  misc_RNA (1)...(19): siRNA sense strand
agaagaggcaggcugaguu

SEQ ID NO: 1712234 - RNA, 19 nt, Homo sapiens
  misc_RNA (1)...(19): siRNA sense strand
ccucuuugauguacuugug

SEQ ID NO: 1712235 - RNA, 19 nt, Homo sapiens
  misc_RNA (1)...(19): siRNA sense strand
cauccuugguugaauucuu

SEQ ID NO: 1712236 - RNA, 19 nt, Homo sapiens
  misc_RNA (1)...(19): siRNA sense strand
gacagccuuggaugaaaua

SEQ ID NO: 1712237 - RNA, 19 nt, Homo sapiens
  misc_RNA (1)...(19): siRNA sense strand
ggaagaagcuuugucagua

SEQ ID NO: 1712238 - RNA, 19 nt, Homo sapiens
  misc_RNA (1)...(19): siRNA sense strand
gaaaugacacaaauacuca

SEQ ID NO: 1712239 - RNA, 19 nt, Homo sapiens
  misc_RNA (1)...(19): siRNA sense strand
caagugcaauucaagauau

SEQ ID NO: 1712240 - RNA, 19 nt, Homo sapiens
  misc_RNA (1)...(19): siRNA sense strand
ccaguuaacuucauugagu

SEQ ID NO: 1712241 - RNA, 19 nt, Homo sapiens
  misc_RNA (1)...(19): siRNA sense strand
aaucaaagaucuucugcaa

SEQ ID NO: 1712242 - RNA, 19 nt, Homo sapiens
  misc_RNA (1)...(19): siRNA sense strand
gaagaagcuuugucaguac

SEQ ID NO: 1712243 - RNA, 19 nt, Homo sapiens
  misc_RNA (1)...(19): siRNA sense strand
ccacaauccucgcuuaauc

SEQ ID NO: 1712244 - RNA, 19 nt, Homo sapiens
  misc_RNA (1)...(19): siRNA sense strand
caagauauccgaagguuca

SEQ ID NO: 1712245 - RNA, 19 nt, Homo sapiens
  misc_RNA (1)...(19): siRNA sense strand
ccaccacaauccucgcuua

SEQ ID NO: 1712246 - RNA, 19 nt, Homo sapiens
  misc_RNA (1)...(19): siRNA sense strand
ugggaaacaucaauauuug

SEQ ID NO: 1712247 - RNA, 19 nt, Homo sapiens
  misc_RNA (1)...(19): siRNA sense strand
cauauugaauggaaguuga

SEQ ID NO: 1712248 - RNA, 19 nt, Homo sapiens
  misc_RNA (1)...(19): siRNA sense strand
ucaauuauguggucaaacu

SEQ ID NO: 1712249 - RNA, 19 nt, Homo sapiens
  misc_RNA (1)...(19): siRNA sense strand
gcacugcagcauucucuuu

SEQ ID NO: 1712250 - RNA, 19 nt, Homo sapiens
  misc_RNA (1)...(19): siRNA sense strand
gacauuugauccuuucaga

SEQ ID NO: 1712251 - RNA, 19 nt, Homo sapiens
  misc_RNA (1)...(19): siRNA sense strand
ggaaacaucaauauuugga

SEQ ID NO: 1712252 - RNA, 19 nt, Homo sapiens
  misc_RNA (1)...(19): siRNA sense strand
gugggaaacaucaauauuu

SEQ ID NO: 1712253 - RNA, 19 nt, Homo sapiens
  misc_RNA (1)...(19): siRNA sense strand
guacuuugcacuucagaaa

SEQ ID NO: 1712254 - RNA, 19 nt, Homo sapiens
  misc_RNA (1)...(19): siRNA sense strand
gucaaacuguugcagcuaa

SEQ ID NO: 1712255 - RNA, 19 nt, Homo sapiens
  misc_RNA (1)...(19): siRNA sense strand
ucaucgaccucuucaaguu

SEQ ID NO: 1712256 - RNA, 19 nt, Homo sapiens
  misc_RNA (1)...(19): siRNA sense strand
gaauggaaguugauguacu

SEQ ID NO: 1712257 - RNA, 19 nt, Homo sapiens
  misc_RNA (1)...(19): siRNA sense strand
guagacauuugauccuuuc

SEQ ID NO: 1712258 - RNA, 19 nt, Homo sapiens
  misc_RNA (1)...(19): siRNA sense strand
ucuacccucugcauucuua

SEQ ID NO: 1712259 - RNA, 19 nt, Homo sapiens
  misc_RNA (1)...(19): siRNA sense strand
gcguggcacagaagaauua

SEQ ID NO: 1712260 - RNA, 19 nt, Homo sapiens
  misc_RNA (1)...(19): siRNA sense strand
gagacacacugcauuucug

SEQ ID NO: 1712261 - RNA, 19 nt, Homo sapiens
  misc_RNA (1)...(19): siRNA sense strand
ucaagugcaauucaagaua

SEQ ID NO: 1712262 - RNA, 19 nt, Homo sapiens
  misc_RNA (1)...(19): siRNA sense strand
ugacuaagcaagugaacaa

SEQ ID NO: 1712263 - RNA, 19 nt, Homo sapiens
  misc_RNA (1)...(19): siRNA sense strand
guagggaagucuguauuag

SEQ ID NO: 1712264 - RNA, 19 nt, Homo sapiens
  misc_RNA (1)...(19): siRNA sense strand
uauuuggauuugccgauua

SEQ ID NO: 1712265 - RNA, 19 nt, Homo sapiens
  misc_RNA (1)...(19): siRNA sense strand
cuaagcaagugaacaaugg

SEQ ID NO: 1712266 - RNA, 19 nt, Homo sapiens
  misc_RNA (1)...(19): siRNA sense strand
gauauccgaagguucaauu

SEQ ID NO: 1712267 - RNA, 19 nt, Homo sapiens
  misc_RNA (1)...(19): siRNA sense strand
cguuguauaugcuuaguga

SEQ ID NO: 1712268 - RNA, 19 nt, Homo sapiens
  misc_RNA (1)...(19): siRNA sense strand
guucaauuauguggucaaa

SEQ ID NO: 1712269 - RNA, 19 nt, Homo sapiens
  misc_RNA (1)...(19): siRNA sense strand
gcacuucaucgaccucuuc

SEQ ID NO: 1712270 - RNA, 19 nt, Homo sapiens
  misc_RNA (1)...(19): siRNA sense strand
aauccucgcuuaaucaaag

SEQ ID NO: 1712271 - RNA, 19 nt, Homo sapiens
  misc_RNA (1)...(19): siRNA sense strand
ggagacacacugcauuucu

SEQ ID NO: 1712272 - RNA, 19 nt, Homo sapiens
  misc_RNA (1)...(19): siRNA sense strand
ucagaugacuaagcaagug

SEQ ID NO: 1712273 - RNA, 19 nt, Homo sapiens
  misc_RNA (1)...(19): siRNA sense strand
agggaagucuguauuagug

SEQ ID NO: 1712274 - RNA, 19 nt, Homo sapiens
  misc_RNA (1)...(19): siRNA sense strand
agaagccuuuaaucgguua

SEQ ID NO: 1712275 - RNA, 19 nt, Homo sapiens
  misc_RNA (1)...(19): siRNA sense strand
uguagacauuugauccuuu

SEQ ID NO: 1712276 - RNA, 19 nt, Homo sapiens
  misc_RNA (1)...(19): siRNA sense strand
ucaauaaugaagagcauga

SEQ ID NO: 1712277 - RNA, 19 nt, Homo sapiens
  misc_RNA (1)...(19): siRNA sense strand
ggaguagggaagucuguau

SEQ ID NO: 1712278 - RNA, 19 nt, Homo sapiens
  misc_RNA (1)...(19): siRNA sense strand
ugaguggcguggcacagaa

SEQ ID NO: 1712279 - RNA, 19 nt, Homo sapiens
  misc_RNA (1)...(19): siRNA sense strand
ugucggcacugcagcauuc

SEQ ID NO: 1712280 - RNA, 19 nt, Homo sapiens
  misc_RNA (1)...(19): siRNA sense strand
ccucugcauucuuauuaga

SEQ ID NO: 1712281 - RNA, 19 nt, Homo sapiens
  misc_RNA (1)...(19): siRNA sense strand
aaggucauauugaauggaa

SEQ ID NO: 1712282 - RNA, 19 nt, Homo sapiens
  misc_RNA (1)...(19): siRNA sense strand
uguauaugcuuagugaaga

SEQ ID NO: 1712283 - RNA, 19 nt, Homo sapiens
  misc_RNA (1)...(19): siRNA sense strand
gcucuacccucugcauucu

SEQ ID NO: 1712284 - RNA, 19 nt, Homo sapiens
  misc_RNA (1)...(19): siRNA sense strand
caucgaccucuucaaguuu

SEQ ID NO: 1712285 - RNA, 19 nt, Homo sapiens
  misc_RNA (1)...(19): siRNA sense strand
gcaacaacagcuacaggau

SEQ ID NO: 1712286 - RNA, 19 nt, Homo sapiens
  misc_RNA (1)...(19): siRNA sense strand
aguagggaagucuguauua

SEQ ID NO: 1712287 - RNA, 19 nt, Homo sapiens
  misc_RNA (1)...(19): siRNA sense strand
gaguagggaagucuguauu

SEQ ID NO: 1712288 - RNA, 19 nt, Homo sapiens
  misc_RNA (1)...(19): siRNA sense strand
uggauuugccgauuagaaa

SEQ ID NO: 1712289 - RNA, 19 nt, Homo sapiens
  misc_RNA (1)...(19): siRNA sense strand
gauaaaaucguucaaaagg

SEQ ID NO: 1712290 - RNA, 19 nt, Homo sapiens
  misc_RNA (1)...(19): siRNA sense strand
aacaacagcuacaggaucu

SEQ ID NO: 1712291 - RNA, 19 nt, Homo sapiens
  misc_RNA (1)...(19): siRNA sense strand
caaaaucccaguuaacuuc

SEQ ID NO: 1712292 - RNA, 19 nt, Homo sapiens
  misc_RNA (1)...(19): siRNA sense strand
ucaaacuguugcagcuaau

SEQ ID NO: 1712293 - RNA, 19 nt, Homo sapiens
  misc_RNA (1)...(19): siRNA sense strand
guacggagacacacugcau

SEQ ID NO: 1712294 - RNA, 19 nt, Homo sapiens
  misc_RNA (1)...(19): siRNA sense strand
ugauguacuuugcacuuca

SEQ ID NO: 1712295 - RNA, 19 nt, Homo sapiens
  misc_RNA (1)...(19): siRNA sense strand
uccgaagguucaauuaugu

SEQ ID NO: 1712296 - RNA, 19 nt, Homo sapiens
  misc_RNA (1)...(19): siRNA sense strand
caacagcuacaggaucuuc

SEQ ID NO: 1712297 - RNA, 19 nt, Homo sapiens
  misc_RNA (1)...(19): siRNA sense strand
agaaaugacacaaauacuc

SEQ ID NO: 1712298 - RNA, 19 nt, Homo sapiens
  misc_RNA (1)...(19): siRNA sense strand
aaacuguugcagcuaauug

SEQ ID NO: 1712299 - RNA, 19 nt, Homo sapiens
  misc_RNA (1)...(19): siRNA sense strand
aaucccaguuaacuucauu

SEQ ID NO: 1712300 - RNA, 19 nt, Homo sapiens
  misc_RNA (1)...(19): siRNA sense strand
uugaauggaaguugaugua

SEQ ID NO: 1712301 - RNA, 19 nt, Homo sapiens
  misc_RNA (1)...(19): siRNA sense strand
auccgaagguucaauuaug

SEQ ID NO: 1712302 - RNA, 19 nt, Homo sapiens
  misc_RNA (1)...(19): siRNA sense strand
uuagugggaaacaucaaua

SEQ ID NO: 1712303 - RNA, 19 nt, Homo sapiens
  misc_RNA (1)...(19): siRNA sense strand
cuucucaagugcaauucaa

SEQ ID NO: 1712304 - RNA, 19 nt, Homo sapiens
  misc_RNA (1)...(19): siRNA sense strand
gcagcauucucuuuuggaa

SEQ ID NO: 1712305 - RNA, 19 nt, Homo sapiens
  misc_RNA (1)...(19): siRNA sense strand
gcacaugcugaacaacauc

SEQ ID NO: 1712306 - RNA, 19 nt, Homo sapiens
  misc_RNA (1)...(19): siRNA sense strand
uggcacagaagaauuacuu

SEQ ID NO: 1712307 - RNA, 19 nt, Homo sapiens
  misc_RNA (1)...(19): siRNA sense strand
ggucaaacuguugcagcua

SEQ ID NO: 1712308 - RNA, 19 nt, Homo sapiens
  misc_RNA (1)...(19): siRNA sense strand
cacaauccucgcuuaauca

SEQ ID NO: 1712309 - RNA, 19 nt, Homo sapiens
  misc_RNA (1)...(19): siRNA sense strand
gcaaaaucccaguuaacuu

SEQ ID NO: 1712310 - RNA, 19 nt, Homo sapiens
  misc_RNA (1)...(19): siRNA sense strand
cugcaagaccuaagcucua

SEQ ID NO: 1712311 - RNA, 19 nt, Homo sapiens
  misc_RNA (1)...(19): siRNA sense strand
caccacaauccucgcuuaa

SEQ ID NO: 1712312 - RNA, 19 nt, Homo sapiens
  misc_RNA (1)...(19): siRNA sense strand
gauguacuuugcacuucag

SEQ ID NO: 1712313 - RNA, 19 nt, Homo sapiens
  misc_RNA (1)...(19): siRNA sense strand
gcaguuuuguagacauuug

SEQ ID NO: 1712314 - RNA, 19 nt, Homo sapiens
  misc_RNA (1)...(19): siRNA sense strand
uggaagaagcuuugucagu

SEQ ID NO: 1712315 - RNA, 19 nt, Homo sapiens
  misc_RNA (1)...(19): siRNA sense strand
gcugaacaacauccuauac

SEQ ID NO: 1712316 - RNA, 19 nt, Homo sapiens
  misc_RNA (1)...(19): siRNA sense strand
uauccgaagguucaauuau

SEQ ID NO: 1712317 - RNA, 19 nt, Homo sapiens
  misc_RNA (1)...(19): siRNA sense strand
caaacuguugcagcuaauu

SEQ ID NO: 1712318 - RNA, 19 nt, Homo sapiens
  misc_RNA (1)...(19): siRNA sense strand
uugcacuucagaaacauua

SEQ ID NO: 1712319 - RNA, 19 nt, Homo sapiens
  misc_RNA (1)...(19): siRNA sense strand
acuuugcacuucagaaaca

SEQ ID NO: 1712320 - RNA, 19 nt, Homo sapiens
  misc_RNA (1)...(19): siRNA sense strand
guugauguacuuugcacuu

SEQ ID NO: 1712321 - RNA, 19 nt, Homo sapiens
  misc_RNA (1)...(19): siRNA sense strand
acccucugcauucuuauua

SEQ ID NO: 1712322 - RNA, 19 nt, Homo sapiens
  misc_RNA (1)...(19): siRNA sense strand
caccuugggagaagccuuu

SEQ ID NO: 1712323 - RNA, 19 nt, Homo sapiens
  misc_RNA (1)...(19): siRNA sense strand
ggucauauugaauggaagu

SEQ ID NO: 1712324 - RNA, 19 nt, Homo sapiens
  misc_RNA (1)...(19): siRNA sense strand
gaagcuuugucaguaccau

SEQ ID NO: 1712325 - RNA, 19 nt, Homo sapiens
  misc_RNA (1)...(19): siRNA sense strand
ugaccuuccucugcacaug

SEQ ID NO: 1712326 - RNA, 19 nt, Homo sapiens
  misc_RNA (1)...(19): siRNA sense strand
uucaagauauccgaagguu

SEQ ID NO: 1712327 - RNA, 19 nt, Homo sapiens
  misc_RNA (1)...(19): siRNA sense strand
ggagcaguacggagacaca

SEQ ID NO: 1712328 - RNA, 19 nt, Homo sapiens
  misc_RNA (1)...(19): siRNA sense strand
guauaugcuuagugaagac

SEQ ID NO: 1712329 - RNA, 19 nt, Homo sapiens
  misc_RNA (1)...(19): siRNA sense strand
cagaugacuaagcaaguga

SEQ ID NO: 1712330 - RNA, 19 nt, Homo sapiens
  misc_RNA (1)...(19): siRNA sense strand
guauuagugggaaacauca

SEQ ID NO: 1712331 - RNA, 19 nt, Homo sapiens
  misc_RNA (1)...(19): siRNA sense strand
ggaagaagcuuugucagua

SEQ ID NO: 1712332 - RNA, 19 nt, Homo sapiens
  misc_RNA (1)...(19): siRNA sense strand
gaagauggcuggaagagau

SEQ ID NO: 1712333 - RNA, 19 nt, Homo sapiens
  misc_RNA (1)...(19): siRNA sense strand
ggaguuggauuaagacaga

SEQ ID NO: 1712334 - RNA, 19 nt, Homo sapiens
  misc_RNA (1)...(19): siRNA sense strand
gagaauaaccguuguaaca

SEQ ID NO: 1712335 - RNA, 19 nt, Homo sapiens
  misc_RNA (1)...(19): siRNA sense strand
ggauggaguuggauuaaga

SEQ ID NO: 1712336 - RNA, 19 nt, Homo sapiens
  misc_RNA (1)...(19): siRNA sense strand
uagugaagauggagaaaua

SEQ ID NO: 1712337 - RNA, 19 nt, Homo sapiens
  misc_RNA (1)...(19): siRNA sense strand
uaacaucagucacagcauu

SEQ ID NO: 1712338 - RNA, 19 nt, Homo sapiens
  misc_RNA (1)...(19): siRNA sense strand
gaauaaccguuguaacauc

SEQ ID NO: 1712339 - RNA, 19 nt, Homo sapiens
  misc_RNA (1)...(19): siRNA sense strand
caagugcaauucaagauau

SEQ ID NO: 1712340 - RNA, 19 nt, Homo sapiens
  misc_RNA (1)...(19): siRNA sense strand
gaaaugacacaaauacuca

SEQ ID NO: 1712341 - RNA, 19 nt, Homo sapiens
  misc_RNA (1)...(19): siRNA sense strand
ccaguuaacuucauugagu

SEQ ID NO: 1712342 - RNA, 19 nt, Homo sapiens
  misc_RNA (1)...(19): siRNA sense strand
aaucaaagaucuucugcaa

SEQ ID NO: 1712343 - RNA, 19 nt, Homo sapiens
  misc_RNA (1)...(19): siRNA sense strand
gaagaagcuuugucaguac

SEQ ID NO: 1712344 - RNA, 19 nt, Homo sapiens
  misc_RNA (1)...(19): siRNA sense strand
ccacaauccucgcuuaauc

SEQ ID NO: 1712345 - RNA, 19 nt, Homo sapiens
  misc_RNA (1)...(19): siRNA sense strand
caagauauccgaagguuca

SEQ ID NO: 1712346 - RNA, 19 nt, Homo sapiens
  misc_RNA (1)...(19): siRNA sense strand
ccaccacaauccucgcuua

SEQ ID NO: 1712347 - RNA, 19 nt, Homo sapiens
  misc_RNA (1)...(19): siRNA sense strand
gucagaaacuugaaagaga

SEQ ID NO: 1712348 - RNA, 19 nt, Homo sapiens
  misc_RNA (1)...(19): siRNA sense strand
gaagauggagaaauauuca

SEQ ID NO: 1712349 - RNA, 19 nt, Homo sapiens
  misc_RNA (1)...(19): siRNA sense strand
ugggaaacaucaauauuug

SEQ ID NO: 1712350 - RNA, 19 nt, Homo sapiens
  misc_RNA (1)...(19): siRNA sense strand
cauauugaauggaaguuga

SEQ ID NO: 1712351 - RNA, 19 nt, Homo sapiens
  misc_RNA (1)...(19): siRNA sense strand
ucaauuauguggucaaacu

SEQ ID NO: 1712352 - RNA, 19 nt, Homo sapiens
  misc_RNA (1)...(19): siRNA sense strand
gcacugcagcauucucuuu

SEQ ID NO: 1712353 - RNA, 19 nt, Homo sapiens
  misc_RNA (1)...(19): siRNA sense strand
gacauuugauccuuucaga

SEQ ID NO: 1712354 - RNA, 19 nt, Homo sapiens
  misc_RNA (1)...(19): siRNA sense strand
ggaaacaucaauauuugga

SEQ ID NO: 1712355 - RNA, 19 nt, Homo sapiens
  misc_RNA (1)...(19): siRNA sense strand
gugggaaacaucaauauuu

SEQ ID NO: 1712356 - RNA, 19 nt, Homo sapiens
  misc_RNA (1)...(19): siRNA sense strand
guacuuugcacuucagaaa

SEQ ID NO: 1712357 - RNA, 19 nt, Homo sapiens
  misc_RNA (1)...(19): siRNA sense strand
gucaaacuguugcagcuaa

SEQ ID NO: 1712358 - RNA, 19 nt, Homo sapiens
  misc_RNA (1)...(19): siRNA sense strand
ucaucgaccucuucaaguu

SEQ ID NO: 1712359 - RNA, 19 nt, Homo sapiens
  misc_RNA (1)...(19): siRNA sense strand
gaauggaaguugauguacu

SEQ ID NO: 1712360 - RNA, 19 nt, Homo sapiens
  misc_RNA (1)...(19): siRNA sense strand
guagacauuugauccuuuc

SEQ ID NO: 1712361 - RNA, 19 nt, Homo sapiens
  misc_RNA (1)...(19): siRNA sense strand
gagagaauaaccguuguaa

SEQ ID NO: 1712362 - RNA, 19 nt, Homo sapiens
  misc_RNA (1)...(19): siRNA sense strand
ucuacccucugcauucuua

SEQ ID NO: 1712363 - RNA, 19 nt, Homo sapiens
  misc_RNA (1)...(19): siRNA sense strand
gcguggcacagaagaauua

SEQ ID NO: 1712364 - RNA, 19 nt, Homo sapiens
  misc_RNA (1)...(19): siRNA sense strand
gagacacacugcauuucug

SEQ ID NO: 1712365 - RNA, 19 nt, Homo sapiens
  misc_RNA (1)...(19): siRNA sense strand
ucaagugcaauucaagaua

SEQ ID NO: 1712366 - RNA, 19 nt, Homo sapiens
  misc_RNA (1)...(19): siRNA sense strand
ugacuaagcaagugaacaa

SEQ ID NO: 1712367 - RNA, 19 nt, Homo sapiens
  misc_RNA (1)...(19): siRNA sense strand
guagggaagucuguauuag

SEQ ID NO: 1712368 - RNA, 19 nt, Homo sapiens
  misc_RNA (1)...(19): siRNA sense strand
ggucaggacuggagaucuc

SEQ ID NO: 1712369 - RNA, 19 nt, Homo sapiens
  misc_RNA (1)...(19): siRNA sense strand
cuaagcaagugaacaaugg

SEQ ID NO: 1712370 - RNA, 19 nt, Homo sapiens
  misc_RNA (1)...(19): siRNA sense strand
uauuuggauuugccgauua

SEQ ID NO: 1712371 - RNA, 19 nt, Homo sapiens
  misc_RNA (1)...(19): siRNA sense strand
gauauccgaagguucaauu

SEQ ID NO: 1712372 - RNA, 19 nt, Homo sapiens
  misc_RNA (1)...(19): siRNA sense strand
cguuguauaugcuuaguga

SEQ ID NO: 1712373 - RNA, 19 nt, Homo sapiens
  misc_RNA (1)...(19): siRNA sense strand
agucacagcauuaucuuaa

SEQ ID NO: 1712374 - RNA, 19 nt, Homo sapiens
  misc_RNA (1)...(19): siRNA sense strand
guucaauuauguggucaaa

SEQ ID NO: 1712375 - RNA, 19 nt, Homo sapiens
  misc_RNA (1)...(19): siRNA sense strand
gcacuucaucgaccucuuc

SEQ ID NO: 1712376 - RNA, 19 nt, Homo sapiens
  misc_RNA (1)...(19): siRNA sense strand
aauaaccguuguaacauca

SEQ ID NO: 1712377 - RNA, 19 nt, Homo sapiens
  misc_RNA (1)...(19): siRNA sense strand
ggagacacacugcauuucu

SEQ ID NO: 1712378 - RNA, 19 nt, Homo sapiens
  misc_RNA (1)...(19): siRNA sense strand
ucagaugacuaagcaagug

SEQ ID NO: 1712379 - RNA, 19 nt, Homo sapiens
  misc_RNA (1)...(19): siRNA sense strand
agggaagucuguauuagug

SEQ ID NO: 1712380 - RNA, 19 nt, Homo sapiens
  misc_RNA (1)...(19): siRNA sense strand
aauccucgcuuaaucaaag

SEQ ID NO: 1712381 - RNA, 19 nt, Homo sapiens
  misc_RNA (1)...(19): siRNA sense strand
ucaauaaugaagagcauga

SEQ ID NO: 1712382 - RNA, 19 nt, Homo sapiens
  misc_RNA (1)...(19): siRNA sense strand
uguagacauuugauccuuu

SEQ ID NO: 1712383 - RNA, 19 nt, Homo sapiens
  misc_RNA (1)...(19): siRNA sense strand
agaagccuuuaaucgguua

SEQ ID NO: 1712384 - RNA, 19 nt, Homo sapiens
  misc_RNA (1)...(19): siRNA sense strand
gucacagcauuaucuuaaa

SEQ ID NO: 1712385 - RNA, 19 nt, Homo sapiens
  misc_RNA (1)...(19): siRNA sense strand
ggaguagggaagucuguau

SEQ ID NO: 1712386 - RNA, 19 nt, Homo sapiens
  misc_RNA (1)...(19): siRNA sense strand
gugaagauggagaaauauu

SEQ ID NO: 1712387 - RNA, 19 nt, Homo sapiens
  misc_RNA (1)...(19): siRNA sense strand
ugaguggcguggcacagaa

SEQ ID NO: 1712388 - RNA, 19 nt, Homo sapiens
  misc_RNA (1)...(19): siRNA sense strand
ugucggcacugcagcauuc

SEQ ID NO: 1712389 - RNA, 19 nt, Homo sapiens
  misc_RNA (1)...(19): siRNA sense strand
ccucugcauucuuauuaga

SEQ ID NO: 1712390 - RNA, 19 nt, Homo sapiens
  misc_RNA (1)...(19): siRNA sense strand
aaggucauauugaauggaa

SEQ ID NO: 1712391 - RNA, 19 nt, Homo sapiens
  misc_RNA (1)...(19): siRNA sense strand
uguauaugcuuagugaaga

SEQ ID NO: 1712392 - RNA, 19 nt, Homo sapiens
  misc_RNA (1)...(19): siRNA sense strand
gcucuacccucugcauucu

SEQ ID NO: 1712393 - RNA, 19 nt, Homo sapiens
  misc_RNA (1)...(19): siRNA sense strand
caucgaccucuucaaguuu

SEQ ID NO: 1712394 - RNA, 19 nt, Homo sapiens
  misc_RNA (1)...(19): siRNA sense strand
gcaacaacagcuacaggau

SEQ ID NO: 1712395 - RNA, 19 nt, Homo sapiens
  misc_RNA (1)...(19): siRNA sense strand
aguagggaagucuguauua

SEQ ID NO: 1712396 - RNA, 19 nt, Homo sapiens
  misc_RNA (1)...(19): siRNA sense strand
gaguagggaagucuguauu

SEQ ID NO: 1712397 - RNA, 19 nt, Homo sapiens
  misc_RNA (1)...(19): siRNA sense strand
ugaagauggagaaauauuc

SEQ ID NO: 1712398 - RNA, 19 nt, Homo sapiens
  misc_RNA (1)...(19): siRNA sense strand
ugaaucuuguagucagaaa

SEQ ID NO: 1712399 - RNA, 19 nt, Homo sapiens
  misc_RNA (1)...(19): siRNA sense strand
gaaacuugaaagagagaau

SEQ ID NO: 1712400 - RNA, 19 nt, Homo sapiens
  misc_RNA (1)...(19): siRNA sense strand
uggauuugccgauuagaaa

SEQ ID NO: 1712401 - RNA, 19 nt, Homo sapiens
  misc_RNA (1)...(19): siRNA sense strand
gauaaaaucguucaaaagg

SEQ ID NO: 1712402 - RNA, 19 nt, Homo sapiens
  misc_RNA (1)...(19): siRNA sense strand
aacaacagcuacaggaucu

SEQ ID NO: 1712403 - RNA, 19 nt, Homo sapiens
  misc_RNA (1)...(19): siRNA sense strand
caaaaucccaguuaacuuc

SEQ ID NO: 1712404 - RNA, 19 nt, Homo sapiens
  misc_RNA (1)...(19): siRNA sense strand
uccgaagguucaauuaugu

SEQ ID NO: 1712405 - RNA, 19 nt, Homo sapiens
  misc_RNA (1)...(19): siRNA sense strand
guacggagacacacugcau

SEQ ID NO: 1712406 - RNA, 19 nt, Homo sapiens
  misc_RNA (1)...(19): siRNA sense strand
ugauguacuuugcacuuca

SEQ ID NO: 1712407 - RNA, 19 nt, Homo sapiens
  misc_RNA (1)...(19): siRNA sense strand
ucaaacuguugcagcuaau

SEQ ID NO: 1712408 - RNA, 19 nt, Homo sapiens
  misc_RNA (1)...(19): siRNA sense strand
agaaaugacacaaauacuc

SEQ ID NO: 1712409 - RNA, 19 nt, Homo sapiens
  misc_RNA (1)...(19): siRNA sense strand
caacagcuacaggaucuuc

SEQ ID NO: 1712410 - RNA, 19 nt, Homo sapiens
  misc_RNA (1)...(19): siRNA sense strand
aaacuguugcagcuaauug

SEQ ID NO: 1712411 - RNA, 19 nt, Homo sapiens
  misc_RNA (1)...(19): siRNA sense strand
auccgaagguucaauuaug

SEQ ID NO: 1712412 - RNA, 19 nt, Homo sapiens
  misc_RNA (1)...(19): siRNA sense strand
uugaauggaaguugaugua

SEQ ID NO: 1712413 - RNA, 19 nt, Homo sapiens
  misc_RNA (1)...(19): siRNA sense strand
aaucccaguuaacuucauu

SEQ ID NO: 1712414 - RNA, 19 nt, Homo sapiens
  misc_RNA (1)...(19): siRNA sense strand
uuagugggaaacaucaaua

SEQ ID NO: 1712415 - RNA, 19 nt, Homo sapiens
  misc_RNA (1)...(19): siRNA sense strand
cuucucaagugcaauucaa

SEQ ID NO: 1712416 - RNA, 19 nt, Homo sapiens
  misc_RNA (1)...(19): siRNA sense strand
gcagcauucucuuuuggaa

SEQ ID NO: 1712417 - RNA, 19 nt, Homo sapiens
  misc_RNA (1)...(19): siRNA sense strand
gaugugaaucuuguaguca

SEQ ID NO: 1712418 - RNA, 19 nt, Homo sapiens
  misc_RNA (1)...(19): siRNA sense strand
gcacaugcugaacaacauc

SEQ ID NO: 1712419 - RNA, 19 nt, Homo sapiens
  misc_RNA (1)...(19): siRNA sense strand
cuuaaauagugaagaugga

SEQ ID NO: 1712420 - RNA, 19 nt, Homo sapiens
  misc_RNA (1)...(19): siRNA sense strand
ggucaaacuguugcagcua

SEQ ID NO: 1712421 - RNA, 19 nt, Homo sapiens
  misc_RNA (1)...(19): siRNA sense strand
uggcacagaagaauuacuu

SEQ ID NO: 1712422 - RNA, 19 nt, Homo sapiens
  misc_RNA (1)...(19): siRNA sense strand
gcaaaaucccaguuaacuu

SEQ ID NO: 1712423 - RNA, 19 nt, Homo sapiens
  misc_RNA (1)...(19): siRNA sense strand
aacaucagucacagcauua

SEQ ID NO: 1712424 - RNA, 19 nt, Homo sapiens
  misc_RNA (1)...(19): siRNA sense strand
cugcaagaccuaagcucua

SEQ ID NO: 1712425 - RNA, 19 nt, Homo sapiens
  misc_RNA (1)...(19): siRNA sense strand
cacaauccucgcuuaauca

SEQ ID NO: 1712426 - RNA, 19 nt, Homo sapiens
  misc_RNA (1)...(19): siRNA sense strand
caccacaauccucgcuuaa

SEQ ID NO: 1712427 - RNA, 19 nt, Homo sapiens
  misc_RNA (1)...(19): siRNA sense strand
gauguacuuugcacuucag

SEQ ID NO: 1712428 - RNA, 19 nt, Homo sapiens
  misc_RNA (1)...(19): siRNA sense strand
gcaguuuuguagacauuug

SEQ ID NO: 1712429 - RNA, 19 nt, Homo sapiens
  misc_RNA (1)...(19): siRNA sense strand
uggaagaagcuuugucagu

SEQ ID NO: 1712430 - RNA, 19 nt, Homo sapiens
  misc_RNA (1)...(19): siRNA sense strand
gcugaacaacauccuauac

SEQ ID NO: 1712431 - RNA, 19 nt, Homo sapiens
  misc_RNA (1)...(19): siRNA sense strand
ggaagaagcuuugucagua

SEQ ID NO: 1712432 - RNA, 19 nt, Homo sapiens
  misc_RNA (1)...(19): siRNA sense strand
gaagauggcuggaagagau

SEQ ID NO: 1712433 - RNA, 19 nt, Homo sapiens
  misc_RNA (1)...(19): siRNA sense strand
ggaguuggauuaagacaga

SEQ ID NO: 1712434 - RNA, 19 nt, Homo sapiens
  misc_RNA (1)...(19): siRNA sense strand
gagaauaaccguuguaaca

SEQ ID NO: 1712435 - RNA, 19 nt, Homo sapiens
  misc_RNA (1)...(19): siRNA sense strand
ggauggaguuggauuaaga

SEQ ID NO: 1712436 - RNA, 19 nt, Homo sapiens
  misc_RNA (1)...(19): siRNA sense strand
uagugaagauggagaaaua

SEQ ID NO: 1712437 - RNA, 19 nt, Homo sapiens
  misc_RNA (1)...(19): siRNA sense strand
uaacaucagucacagcauu

SEQ ID NO: 1712438 - RNA, 19 nt, Homo sapiens
  misc_RNA (1)...(19): siRNA sense strand
gaauaaccguuguaacauc

SEQ ID NO: 1712439 - RNA, 19 nt, Homo sapiens
  misc_RNA (1)...(19): siRNA sense strand
caagugcaauucaagauau

SEQ ID NO: 1712440 - RNA, 19 nt, Homo sapiens
  misc_RNA (1)...(19): siRNA sense strand
gaaaugacacaaauacuca

SEQ ID NO: 1712441 - RNA, 19 nt, Homo sapiens
  misc_RNA (1)...(19): siRNA sense strand
ccaguuaacuucauugagu

SEQ ID NO: 1712442 - RNA, 19 nt, Homo sapiens
  misc_RNA (1)...(19): siRNA sense strand
aaucaaagaucuucugcaa

SEQ ID NO: 1712443 - RNA, 19 nt, Homo sapiens
  misc_RNA (1)...(19): siRNA sense strand
gaagaagcuuugucaguac

SEQ ID NO: 1712444 - RNA, 19 nt, Homo sapiens
  misc_RNA (1)...(19): siRNA sense strand
ccacaauccucgcuuaauc

SEQ ID NO: 1712445 - RNA, 19 nt, Homo sapiens
  misc_RNA (1)...(19): siRNA sense strand
caagauauccgaagguuca

SEQ ID NO: 1712446 - RNA, 19 nt, Homo sapiens
  misc_RNA (1)...(19): siRNA sense strand
ccaccacaauccucgcuua

SEQ ID NO: 1712447 - RNA, 19 nt, Homo sapiens
  misc_RNA (1)...(19): siRNA sense strand
gucagaaacuugaaagaga

SEQ ID NO: 1712448 - RNA, 19 nt, Homo sapiens
  misc_RNA (1)...(19): siRNA sense strand
gaagauggagaaauauuca

SEQ ID NO: 1712449 - RNA, 19 nt, Homo sapiens
  misc_RNA (1)...(19): siRNA sense strand
ugggaaacaucaauauuug

SEQ ID NO: 1712450 - RNA, 19 nt, Homo sapiens
  misc_RNA (1)...(19): siRNA sense strand
cauauugaauggaaguuga

SEQ ID NO: 1712451 - RNA, 19 nt, Homo sapiens
  misc_RNA (1)...(19): siRNA sense strand
ucaauuauguggucaaacu

SEQ ID NO: 1712452 - RNA, 19 nt, Homo sapiens
  misc_RNA (1)...(19): siRNA sense strand
gcacugcagcauucucuuu

SEQ ID NO: 1712453 - RNA, 19 nt, Homo sapiens
  misc_RNA (1)...(19): siRNA sense strand
gacauuugauccuuucaga

SEQ ID NO: 1712454 - RNA, 19 nt, Homo sapiens
  misc_RNA (1)...(19): siRNA sense strand
ggaaacaucaauauuugga

SEQ ID NO: 1712455 - RNA, 19 nt, Homo sapiens
  misc_RNA (1)...(19): siRNA sense strand
gugggaaacaucaauauuu

SEQ ID NO: 1712456 - RNA, 19 nt, Homo sapiens
  misc_RNA (1)...(19): siRNA sense strand
guacuuugcacuucagaaa

SEQ ID NO: 1712457 - RNA, 19 nt, Homo sapiens
  misc_RNA (1)...(19): siRNA sense strand
gucaaacuguugcagcuaa

SEQ ID NO: 1712458 - RNA, 19 nt, Homo sapiens
  misc_RNA (1)...(19): siRNA sense strand
ucaucgaccucuucaaguu

SEQ ID NO: 1712459 - RNA, 19 nt, Homo sapiens
  misc_RNA (1)...(19): siRNA sense strand
gaauggaaguugauguacu

SEQ ID NO: 1712460 - RNA, 19 nt, Homo sapiens
  misc_RNA (1)...(19): siRNA sense strand
guagacauuugauccuuuc

SEQ ID NO: 1712461 - RNA, 19 nt, Homo sapiens
  misc_RNA (1)...(19): siRNA sense strand
gagagaauaaccguuguaa

SEQ ID NO: 1712462 - RNA, 19 nt, Homo sapiens
  misc_RNA (1)...(19): siRNA sense strand
ucuacccucugcauucuua

SEQ ID NO: 1712463 - RNA, 19 nt, Homo sapiens
  misc_RNA (1)...(19): siRNA sense strand
gcguggcacagaagaauua

SEQ ID NO: 1712464 - RNA, 19 nt, Homo sapiens
  misc_RNA (1)...(19): siRNA sense strand
gagacacacugcauuucug

SEQ ID NO: 1712465 - RNA, 19 nt, Homo sapiens
  misc_RNA (1)...(19): siRNA sense strand
ucaagugcaauucaagaua

SEQ ID NO: 1712466 - RNA, 19 nt, Homo sapiens
  misc_RNA (1)...(19): siRNA sense strand
ugacuaagcaagugaacaa

SEQ ID NO: 1712467 - RNA, 19 nt, Homo sapiens
  misc_RNA (1)...(19): siRNA sense strand
guagggaagucuguauuag

SEQ ID NO: 1712468 - RNA, 19 nt, Homo sapiens
  misc_RNA (1)...(19): siRNA sense strand
ggucaggacuggagaucuc

SEQ ID NO: 1712469 - RNA, 19 nt, Homo sapiens
  misc_RNA (1)...(19): siRNA sense strand
cuaagcaagugaacaaugg

SEQ ID NO: 1712470 - RNA, 19 nt, Homo sapiens
  misc_RNA (1)...(19): siRNA sense strand
uauuuggauuugccgauua

SEQ ID NO: 1712471 - RNA, 19 nt, Homo sapiens
  misc_RNA (1)...(19): siRNA sense strand
gauauccgaagguucaauu

SEQ ID NO: 1712472 - RNA, 19 nt, Homo sapiens
  misc_RNA (1)...(19): siRNA sense strand
cguuguauaugcuuaguga

SEQ ID NO: 1712473 - RNA, 19 nt, Homo sapiens
  misc_RNA (1)...(19): siRNA sense strand
agucacagcauuaucuuaa

SEQ ID NO: 1712474 - RNA, 19 nt, Homo sapiens
  misc_RNA (1)...(19): siRNA sense strand
guucaauuauguggucaaa

SEQ ID NO: 1712475 - RNA, 19 nt, Homo sapiens
  misc_RNA (1)...(19): siRNA sense strand
gcacuucaucgaccucuuc

SEQ ID NO: 1712476 - RNA, 19 nt, Homo sapiens
  misc_RNA (1)...(19): siRNA sense strand
aauaaccguuguaacauca

SEQ ID NO: 1712477 - RNA, 19 nt, Homo sapiens
  misc_RNA (1)...(19): siRNA sense strand
ggagacacacugcauuucu

SEQ ID NO: 1712478 - RNA, 19 nt, Homo sapiens
  misc_RNA (1)...(19): siRNA sense strand
ucagaugacuaagcaagug

SEQ ID NO: 1712479 - RNA, 19 nt, Homo sapiens
  misc_RNA (1)...(19): siRNA sense strand
agggaagucuguauuagug

SEQ ID NO: 1712480 - RNA, 19 nt, Homo sapiens
  misc_RNA (1)...(19): siRNA sense strand
aauccucgcuuaaucaaag

SEQ ID NO: 1712481 - RNA, 19 nt, Homo sapiens
  misc_RNA (1)...(19): siRNA sense strand
ucaauaaugaagagcauga

SEQ ID NO: 1712482 - RNA, 19 nt, Homo sapiens
  misc_RNA (1)...(19): siRNA sense strand
uguagacauuugauccuuu

SEQ ID NO: 1712483 - RNA, 19 nt, Homo sapiens
  misc_RNA (1)...(19): siRNA sense strand
agaagccuuuaaucgguua

SEQ ID NO: 1712484 - RNA, 19 nt, Homo sapiens
  misc_RNA (1)...(19): siRNA sense strand
gucacagcauuaucuuaaa

SEQ ID NO: 1712485 - RNA, 19 nt, Homo sapiens
  misc_RNA (1)...(19): siRNA sense strand
ggaguagggaagucuguau

SEQ ID NO: 1712486 - RNA, 19 nt, Homo sapiens
  misc_RNA (1)...(19): siRNA sense strand
gugaagauggagaaauauu

SEQ ID NO: 1712487 - RNA, 19 nt, Homo sapiens
  misc_RNA (1)...(19): siRNA sense strand
ugaguggcguggcacagaa

SEQ ID NO: 1712488 - RNA, 19 nt, Homo sapiens
  misc_RNA (1)...(19): siRNA sense strand
ugucggcacugcagcauuc

SEQ ID NO: 1712489 - RNA, 19 nt, Homo sapiens
  misc_RNA (1)...(19): siRNA sense strand
ccucugcauucuuauuaga

SEQ ID NO: 1712490 - RNA, 19 nt, Homo sapiens
  misc_RNA (1)...(19): siRNA sense strand
aaggucauauugaauggaa

SEQ ID NO: 1712491 - RNA, 19 nt, Homo sapiens
  misc_RNA (1)...(19): siRNA sense strand
uguauaugcuuagugaaga

SEQ ID NO: 1712492 - RNA, 19 nt, Homo sapiens
  misc_RNA (1)...(19): siRNA sense strand
gcucuacccucugcauucu

SEQ ID NO: 1712493 - RNA, 19 nt, Homo sapiens
  misc_RNA (1)...(19): siRNA sense strand
caucgaccucuucaaguuu

SEQ ID NO: 1712494 - RNA, 19 nt, Homo sapiens
  misc_RNA (1)...(19): siRNA sense strand
gcaacaacagcuacaggau

SEQ ID NO: 1712495 - RNA, 19 nt, Homo sapiens
  misc_RNA (1)...(19): siRNA sense strand
aguagggaagucuguauua

SEQ ID NO: 1712496 - RNA, 19 nt, Homo sapiens
  misc_RNA (1)...(19): siRNA sense strand
gaguagggaagucuguauu

SEQ ID NO: 1712497 - RNA, 19 nt, Homo sapiens
  misc_RNA (1)...(19): siRNA sense strand
ugaagauggagaaauauuc

SEQ ID NO: 1712498 - RNA, 19 nt, Homo sapiens
  misc_RNA (1)...(19): siRNA sense strand
ugaaucuuguagucagaaa

SEQ ID NO: 1712499 - RNA, 19 nt, Homo sapiens
  misc_RNA (1)...(19): siRNA sense strand
gaaacuugaaagagagaau

SEQ ID NO: 1712500 - RNA, 19 nt, Homo sapiens
  misc_RNA (1)...(19): siRNA sense strand
uggauuugccgauuagaaa

SEQ ID NO: 1712501 - RNA, 19 nt, Homo sapiens
  misc_RNA (1)...(19): siRNA sense strand
gauaaaaucguucaaaagg

SEQ ID NO: 1712502 - RNA, 19 nt, Homo sapiens
  misc_RNA (1)...(19): siRNA sense strand
aacaacagcuacaggaucu

SEQ ID NO: 1712503 - RNA, 19 nt, Homo sapiens
  misc_RNA (1)...(19): siRNA sense strand
caaaaucccaguuaacuuc

SEQ ID NO: 1712504 - RNA, 19 nt, Homo sapiens
  misc_RNA (1)...(19): siRNA sense strand
uccgaagguucaauuaugu

SEQ ID NO: 1712505 - RNA, 19 nt, Homo sapiens
  misc_RNA (1)...(19): siRNA sense strand
guacggagacacacugcau

SEQ ID NO: 1712506 - RNA, 19 nt, Homo sapiens
  misc_RNA (1)...(19): siRNA sense strand
ugauguacuuugcacuuca

SEQ ID NO: 1712507 - RNA, 19 nt, Homo sapiens
  misc_RNA (1)...(19): siRNA sense strand
ucaaacuguugcagcuaau

SEQ ID NO: 1712508 - RNA, 19 nt, Homo sapiens
  misc_RNA (1)...(19): siRNA sense strand
agaaaugacacaaauacuc

SEQ ID NO: 1712509 - RNA, 19 nt, Homo sapiens
  misc_RNA (1)...(19): siRNA sense strand
caacagcuacaggaucuuc

SEQ ID NO: 1712510 - RNA, 19 nt, Homo sapiens
  misc_RNA (1)...(19): siRNA sense strand
aaacuguugcagcuaauug

SEQ ID NO: 1712511 - RNA, 19 nt, Homo sapiens
  misc_RNA (1)...(19): siRNA sense strand
auccgaagguucaauuaug

SEQ ID NO: 1712512 - RNA, 19 nt, Homo sapiens
  misc_RNA (1)...(19): siRNA sense strand
uugaauggaaguugaugua

SEQ ID NO: 1712513 - RNA, 19 nt, Homo sapiens
  misc_RNA (1)...(19): siRNA sense strand
aaucccaguuaacuucauu

SEQ ID NO: 1712514 - RNA, 19 nt, Homo sapiens
  misc_RNA (1)...(19): siRNA sense strand
uuagugggaaacaucaaua

SEQ ID NO: 1712515 - RNA, 19 nt, Homo sapiens
  misc_RNA (1)...(19): siRNA sense strand
cuucucaagugcaauucaa

SEQ ID NO: 1712516 - RNA, 19 nt, Homo sapiens
  misc_RNA (1)...(19): siRNA sense strand
gcagcauucucuuuuggaa

SEQ ID NO: 1712517 - RNA, 19 nt, Homo sapiens
  misc_RNA (1)...(19): siRNA sense strand
gaugugaaucuuguaguca

SEQ ID NO: 1712518 - RNA, 19 nt, Homo sapiens
  misc_RNA (1)...(19): siRNA sense strand
gcacaugcugaacaacauc

SEQ ID NO: 1712519 - RNA, 19 nt, Homo sapiens
  misc_RNA (1)...(19): siRNA sense strand
cuuaaauagugaagaugga

SEQ ID NO: 1712520 - RNA, 19 nt, Homo sapiens
  misc_RNA (1)...(19): siRNA sense strand
ggucaaacuguugcagcua

SEQ ID NO: 1712521 - RNA, 19 nt, Homo sapiens
  misc_RNA (1)...(19): siRNA sense strand
uggcacagaagaauuacuu

SEQ ID NO: 1712522 - RNA, 19 nt, Homo sapiens
  misc_RNA (1)...(19): siRNA sense strand
gcaaaaucccaguuaacuu

SEQ ID NO: 1712523 - RNA, 19 nt, Homo sapiens
  misc_RNA (1)...(19): siRNA sense strand
aacaucagucacagcauua

SEQ ID NO: 1712524 - RNA, 19 nt, Homo sapiens
  misc_RNA (1)...(19): siRNA sense strand
cugcaagaccuaagcucua

SEQ ID NO: 1712525 - RNA, 19 nt, Homo sapiens
  misc_RNA (1)...(19): siRNA sense strand
cacaauccucgcuuaauca

SEQ ID NO: 1712526 - RNA, 19 nt, Homo sapiens
  misc_RNA (1)...(19): siRNA sense strand
caccacaauccucgcuuaa

SEQ ID NO: 1712527 - RNA, 19 nt, Homo sapiens
  misc_RNA (1)...(19): siRNA sense strand
gauguacuuugcacuucag

SEQ ID NO: 1712528 - RNA, 19 nt, Homo sapiens
  misc_RNA (1)...(19): siRNA sense strand
gcaguuuuguagacauuug

SEQ ID NO: 1712529 - RNA, 19 nt, Homo sapiens
  misc_RNA (1)...(19): siRNA sense strand
uggaagaagcuuugucagu

SEQ ID NO: 1712530 - RNA, 19 nt, Homo sapiens
  misc_RNA (1)...(19): siRNA sense strand
gcugaacaacauccuauac

SEQ ID NO: 1712531 - RNA, 19 nt, Homo sapiens
  misc_RNA (1)...(19): siRNA sense strand
ggaagaagcuuugucagua

SEQ ID NO: 1712532 - RNA, 19 nt, Homo sapiens
  misc_RNA (1)...(19): siRNA sense strand
gaaaugacacaaauacuca

SEQ ID NO: 1712533 - RNA, 19 nt, Homo sapiens
  misc_RNA (1)...(19): siRNA sense strand
caagugcaauucaagauau

SEQ ID NO: 1712534 - RNA, 19 nt, Homo sapiens
  misc_RNA (1)...(19): siRNA sense strand
ccaguuaacuucauugagu

SEQ ID NO: 1712535 - RNA, 19 nt, Homo sapiens
  misc_RNA (1)...(19): siRNA sense strand
aaucaaagaucuucugcaa

SEQ ID NO: 1712536 - RNA, 19 nt, Homo sapiens
  misc_RNA (1)...(19): siRNA sense strand
gaagaagcuuugucaguac

SEQ ID NO: 1712537 - RNA, 19 nt, Homo sapiens
  misc_RNA (1)...(19): siRNA sense strand
ccacaauccucgcuuaauc

SEQ ID NO: 1712538 - RNA, 19 nt, Homo sapiens
  misc_RNA (1)...(19): siRNA sense strand
caagauauccgaagguuca

SEQ ID NO: 1712539 - RNA, 19 nt, Homo sapiens
  misc_RNA (1)...(19): siRNA sense strand
ccaccacaauccucgcuua

SEQ ID NO: 1712540 - RNA, 19 nt, Homo sapiens
  misc_RNA (1)...(19): siRNA sense strand
ugggaaacaucaauauuug

SEQ ID NO: 1712541 - RNA, 19 nt, Homo sapiens
  misc_RNA (1)...(19): siRNA sense strand
cauauugaauggaaguuga

SEQ ID NO: 1712542 - RNA, 19 nt, Homo sapiens
  misc_RNA (1)...(19): siRNA sense strand
ucaauuauguggucaaacu

SEQ ID NO: 1712543 - RNA, 19 nt, Homo sapiens
  misc_RNA (1)...(19): siRNA sense strand
gcacugcagcauucucuuu

SEQ ID NO: 1712544 - RNA, 19 nt, Homo sapiens
  misc_RNA (1)...(19): siRNA sense strand
gacauuugauccuuucaga

SEQ ID NO: 1712545 - RNA, 19 nt, Homo sapiens
  misc_RNA (1)...(19): siRNA sense strand
ggaaacaucaauauuugga

SEQ ID NO: 1712546 - RNA, 19 nt, Homo sapiens
  misc_RNA (1)...(19): siRNA sense strand
gugggaaacaucaauauuu

SEQ ID NO: 1712547 - RNA, 19 nt, Homo sapiens
  misc_RNA (1)...(19): siRNA sense strand
guacuuugcacuucagaaa

SEQ ID NO: 1712548 - RNA, 19 nt, Homo sapiens
  misc_RNA (1)...(19): siRNA sense strand
gucaaacuguugcagcuaa

SEQ ID NO: 1712549 - RNA, 19 nt, Homo sapiens
  misc_RNA (1)...(19): siRNA sense strand
ucaucgaccucuucaaguu

SEQ ID NO: 1712550 - RNA, 19 nt, Homo sapiens
  misc_RNA (1)...(19): siRNA sense strand
gaauggaaguugauguacu

SEQ ID NO: 1712551 - RNA, 19 nt, Homo sapiens
  misc_RNA (1)...(19): siRNA sense strand
guagacauuugauccuuuc

SEQ ID NO: 1712552 - RNA, 19 nt, Homo sapiens
  misc_RNA (1)...(19): siRNA sense strand
ucuacccucugcauucuua

SEQ ID NO: 1712553 - RNA, 19 nt, Homo sapiens
  misc_RNA (1)...(19): siRNA sense strand
gcguggcacagaagaauua

SEQ ID NO: 1712554 - RNA, 19 nt, Homo sapiens
  misc_RNA (1)...(19): siRNA sense strand
gagacacacugcauuucug

SEQ ID NO: 1712555 - RNA, 19 nt, Homo sapiens
  misc_RNA (1)...(19): siRNA sense strand
ucaagugcaauucaagaua

SEQ ID NO: 1712556 - RNA, 19 nt, Homo sapiens
  misc_RNA (1)...(19): siRNA sense strand
ugacuaagcaagugaacaa

SEQ ID NO: 1712557 - RNA, 19 nt, Homo sapiens
  misc_RNA (1)...(19): siRNA sense strand
guagggaagucuguauuag

SEQ ID NO: 1712558 - RNA, 19 nt, Homo sapiens
  misc_RNA (1)...(19): siRNA sense strand
uauuuggauuugccgauua

SEQ ID NO: 1712559 - RNA, 19 nt, Homo sapiens
  misc_RNA (1)...(19): siRNA sense strand
cuaagcaagugaacaaugg

SEQ ID NO: 1712560 - RNA, 19 nt, Homo sapiens
  misc_RNA (1)...(19): siRNA sense strand
gauauccgaagguucaauu

SEQ ID NO: 1712561 - RNA, 19 nt, Homo sapiens
  misc_RNA (1)...(19): siRNA sense strand
cguuguauaugcuuaguga

SEQ ID NO: 1712562 - RNA, 19 nt, Homo sapiens
  misc_RNA (1)...(19): siRNA sense strand
guucaauuauguggucaaa

SEQ ID NO: 1712563 - RNA, 19 nt, Homo sapiens
  misc_RNA (1)...(19): siRNA sense strand
gcacuucaucgaccucuuc

SEQ ID NO: 1712564 - RNA, 19 nt, Homo sapiens
  misc_RNA (1)...(19): siRNA sense strand
aauccucgcuuaaucaaag

SEQ ID NO: 1712565 - RNA, 19 nt, Homo sapiens
  misc_RNA (1)...(19): siRNA sense strand
ggagacacacugcauuucu

SEQ ID NO: 1712566 - RNA, 19 nt, Homo sapiens
  misc_RNA (1)...(19): siRNA sense strand
ucagaugacuaagcaagug

SEQ ID NO: 1712567 - RNA, 19 nt, Homo sapiens
  misc_RNA (1)...(19): siRNA sense strand
agggaagucuguauuagug

SEQ ID NO: 1712568 - RNA, 19 nt, Homo sapiens
  misc_RNA (1)...(19): siRNA sense strand
agaagccuuuaaucgguua

SEQ ID NO: 1712569 - RNA, 19 nt, Homo sapiens
  misc_RNA (1)...(19): siRNA sense strand
uguagacauuugauccuuu

SEQ ID NO: 1712570 - RNA, 19 nt, Homo sapiens
  misc_RNA (1)...(19): siRNA sense strand
ucaauaaugaagagcauga

SEQ ID NO: 1712571 - RNA, 19 nt, Homo sapiens
  misc_RNA (1)...(19): siRNA sense strand
ggaguagggaagucuguau

SEQ ID NO: 1712572 - RNA, 19 nt, Homo sapiens
  misc_RNA (1)...(19): siRNA sense strand
ugaguggcguggcacagaa

SEQ ID NO: 1712573 - RNA, 19 nt, Homo sapiens
  misc_RNA (1)...(19): siRNA sense strand
ugucggcacugcagcauuc

SEQ ID NO: 1712574 - RNA, 19 nt, Homo sapiens
  misc_RNA (1)...(19): siRNA sense strand
ccucugcauucuuauuaga

SEQ ID NO: 1712575 - RNA, 19 nt, Homo sapiens
  misc_RNA (1)...(19): siRNA sense strand
aaggucauauugaauggaa

SEQ ID NO: 1712576 - RNA, 19 nt, Homo sapiens
  misc_RNA (1)...(19): siRNA sense strand
uguauaugcuuagugaaga

SEQ ID NO: 1712577 - RNA, 19 nt, Homo sapiens
  misc_RNA (1)...(19): siRNA sense strand
gcucuacccucugcauucu

SEQ ID NO: 1712578 - RNA, 19 nt, Homo sapiens
  misc_RNA (1)...(19): siRNA sense strand
caucgaccucuucaaguuu

SEQ ID NO: 1712579 - RNA, 19 nt, Homo sapiens
  misc_RNA (1)...(19): siRNA sense strand
gcaacaacagcuacaggau

SEQ ID NO: 1712580 - RNA, 19 nt, Homo sapiens
  misc_RNA (1)...(19): siRNA sense strand
aguagggaagucuguauua

SEQ ID NO: 1712581 - RNA, 19 nt, Homo sapiens
  misc_RNA (1)...(19): siRNA sense strand
gaguagggaagucuguauu

SEQ ID NO: 1712582 - RNA, 19 nt, Homo sapiens
  misc_RNA (1)...(19): siRNA sense strand
uggauuugccgauuagaaa

SEQ ID NO: 1712583 - RNA, 19 nt, Homo sapiens
  misc_RNA (1)...(19): siRNA sense strand
gauaaaaucguucaaaagg

SEQ ID NO: 1712584 - RNA, 19 nt, Homo sapiens
  misc_RNA (1)...(19): siRNA sense strand
aacaacagcuacaggaucu

SEQ ID NO: 1712585 - RNA, 19 nt, Homo sapiens
  misc_RNA (1)...(19): siRNA sense strand
caaaaucccaguuaacuuc

SEQ ID NO: 1712586 - RNA, 19 nt, Homo sapiens
  misc_RNA (1)...(19): siRNA sense strand
ucaaacuguugcagcuaau

SEQ ID NO: 1712587 - RNA, 19 nt, Homo sapiens
  misc_RNA (1)...(19): siRNA sense strand
guacggagacacacugcau

SEQ ID NO: 1712588 - RNA, 19 nt, Homo sapiens
  misc_RNA (1)...(19): siRNA sense strand
ugauguacuuugcacuuca

SEQ ID NO: 1712589 - RNA, 19 nt, Homo sapiens
  misc_RNA (1)...(19): siRNA sense strand
uccgaagguucaauuaugu

SEQ ID NO: 1712590 - RNA, 19 nt, Homo sapiens
  misc_RNA (1)...(19): siRNA sense strand
caacagcuacaggaucuuc

SEQ ID NO: 1712591 - RNA, 19 nt, Homo sapiens
  misc_RNA (1)...(19): siRNA sense strand
agaaaugacacaaauacuc

SEQ ID NO: 1712592 - RNA, 19 nt, Homo sapiens
  misc_RNA (1)...(19): siRNA sense strand
aaacuguugcagcuaauug

SEQ ID NO: 1712593 - RNA, 19 nt, Homo sapiens
  misc_RNA (1)...(19): siRNA sense strand
aaucccaguuaacuucauu

SEQ ID NO: 1712594 - RNA, 19 nt, Homo sapiens
  misc_RNA (1)...(19): siRNA sense strand
uugaauggaaguugaugua

SEQ ID NO: 1712595 - RNA, 19 nt, Homo sapiens
  misc_RNA (1)...(19): siRNA sense strand
auccgaagguucaauuaug

SEQ ID NO: 1712596 - RNA, 19 nt, Homo sapiens
  misc_RNA (1)...(19): siRNA sense strand
uuagugggaaacaucaaua

SEQ ID NO: 1712597 - RNA, 19 nt, Homo sapiens
  misc_RNA (1)...(19): siRNA sense strand
cuucucaagugcaauucaa

SEQ ID NO: 1712598 - RNA, 19 nt, Homo sapiens
  misc_RNA (1)...(19): siRNA sense strand
gcagcauucucuuuuggaa

SEQ ID NO: 1712599 - RNA, 19 nt, Homo sapiens
  misc_RNA (1)...(19): siRNA sense strand
gcacaugcugaacaacauc

SEQ ID NO: 1712600 - RNA, 19 nt, Homo sapiens
  misc_RNA (1)...(19): siRNA sense strand
uggcacagaagaauuacuu

SEQ ID NO: 1712601 - RNA, 19 nt, Homo sapiens
  misc_RNA (1)...(19): siRNA sense strand
ggucaaacuguugcagcua

SEQ ID NO: 1712602 - RNA, 19 nt, Homo sapiens
  misc_RNA (1)...(19): siRNA sense strand
cacaauccucgcuuaauca

SEQ ID NO: 1712603 - RNA, 19 nt, Homo sapiens
  misc_RNA (1)...(19): siRNA sense strand
gcaaaaucccaguuaacuu

SEQ ID NO: 1712604 - RNA, 19 nt, Homo sapiens
  misc_RNA (1)...(19): siRNA sense strand
cugcaagaccuaagcucua

SEQ ID NO: 1712605 - RNA, 19 nt, Homo sapiens
  misc_RNA (1)...(19): siRNA sense strand
caccacaauccucgcuuaa

SEQ ID NO: 1712606 - RNA, 19 nt, Homo sapiens
  misc_RNA (1)...(19): siRNA sense strand
gauguacuuugcacuucag

SEQ ID NO: 1712607 - RNA, 19 nt, Homo sapiens
  misc_RNA (1)...(19): siRNA sense strand
gcaguuuuguagacauuug

SEQ ID NO: 1712608 - RNA, 19 nt, Homo sapiens
  misc_RNA (1)...(19): siRNA sense strand
uggaagaagcuuugucagu

SEQ ID NO: 1712609 - RNA, 19 nt, Homo sapiens
  misc_RNA (1)...(19): siRNA sense strand
gcugaacaacauccuauac

SEQ ID NO: 1712610 - RNA, 19 nt, Homo sapiens
  misc_RNA (1)...(19): siRNA sense strand
uauccgaagguucaauuau

SEQ ID NO: 1712611 - RNA, 19 nt, Homo sapiens
  misc_RNA (1)...(19): siRNA sense strand
caaacuguugcagcuaauu

SEQ ID NO: 1712612 - RNA, 19 nt, Homo sapiens
  misc_RNA (1)...(19): siRNA sense strand
uugcacuucagaaacauua

SEQ ID NO: 1712613 - RNA, 19 nt, Homo sapiens
  misc_RNA (1)...(19): siRNA sense strand
acuuugcacuucagaaaca

SEQ ID NO: 1712614 - RNA, 19 nt, Homo sapiens
  misc_RNA (1)...(19): siRNA sense strand
guugauguacuuugcacuu

SEQ ID NO: 1712615 - RNA, 19 nt, Homo sapiens
  misc_RNA (1)...(19): siRNA sense strand
acccucugcauucuuauua

SEQ ID NO: 1712616 - RNA, 19 nt, Homo sapiens
  misc_RNA (1)...(19): siRNA sense strand
caccuugggagaagccuuu

SEQ ID NO: 1712617 - RNA, 19 nt, Homo sapiens
  misc_RNA (1)...(19): siRNA sense strand
ggucauauugaauggaagu

SEQ ID NO: 1712618 - RNA, 19 nt, Homo sapiens
  misc_RNA (1)...(19): siRNA sense strand
gaagcuuugucaguaccau

SEQ ID NO: 1712619 - RNA, 19 nt, Homo sapiens
  misc_RNA (1)...(19): siRNA sense strand
ugaccuuccucugcacaug

SEQ ID NO: 1712620 - RNA, 19 nt, Homo sapiens
  misc_RNA (1)...(19): siRNA sense strand
uucaagauauccgaagguu

SEQ ID NO: 1712621 - RNA, 19 nt, Homo sapiens
  misc_RNA (1)...(19): siRNA sense strand
ggagcaguacggagacaca

SEQ ID NO: 1712622 - RNA, 19 nt, Homo sapiens
  misc_RNA (1)...(19): siRNA sense strand
guauaugcuuagugaagac

SEQ ID NO: 1712623 - RNA, 19 nt, Homo sapiens
  misc_RNA (1)...(19): siRNA sense strand
cagaugacuaagcaaguga

SEQ ID NO: 1712624 - RNA, 19 nt, Homo sapiens
  misc_RNA (1)...(19): siRNA sense strand
guauuagugggaaacauca

SEQ ID NO: 1712625 - RNA, 19 nt, Homo sapiens
  misc_RNA (1)...(19): siRNA sense strand
ggaagaagcuuugucagua

SEQ ID NO: 1712626 - RNA, 19 nt, Homo sapiens
  misc_RNA (1)...(19): siRNA sense strand
gaagauggcuggaagagau

SEQ ID NO: 1712627 - RNA, 19 nt, Homo sapiens
  misc_RNA (1)...(19): siRNA sense strand
ggaguuggauuaagacaga

SEQ ID NO: 1712628 - RNA, 19 nt, Homo sapiens
  misc_RNA (1)...(19): siRNA sense strand
gagaauaaccguuguaaca

SEQ ID NO: 1712629 - RNA, 19 nt, Homo sapiens
  misc_RNA (1)...(19): siRNA sense strand
ggauggaguuggauuaaga

SEQ ID NO: 1712630 - RNA, 19 nt, Homo sapiens
  misc_RNA (1)...(19): siRNA sense strand
uagugaagauggagaaaua

SEQ ID NO: 1712631 - RNA, 19 nt, Homo sapiens
  misc_RNA (1)...(19): siRNA sense strand
uaacaucagucacagcauu

SEQ ID NO: 1712632 - RNA, 19 nt, Homo sapiens
  misc_RNA (1)...(19): siRNA sense strand
gaauaaccguuguaacauc

SEQ ID NO: 1712633 - RNA, 19 nt, Homo sapiens
  misc_RNA (1)...(19): siRNA sense strand
caagugcaauucaagauau

SEQ ID NO: 1712634 - RNA, 19 nt, Homo sapiens
  misc_RNA (1)...(19): siRNA sense strand
gaaaugacacaaauacuca

SEQ ID NO: 1712635 - RNA, 19 nt, Homo sapiens
  misc_RNA (1)...(19): siRNA sense strand
ccaguuaacuucauugagu

SEQ ID NO: 1712636 - RNA, 19 nt, Homo sapiens
  misc_RNA (1)...(19): siRNA sense strand
aaucaaagaucuucugcaa

SEQ ID NO: 1712637 - RNA, 19 nt, Homo sapiens
  misc_RNA (1)...(19): siRNA sense strand
gaagaagcuuugucaguac

SEQ ID NO: 1712638 - RNA, 19 nt, Homo sapiens
  misc_RNA (1)...(19): siRNA sense strand
ccacaauccucgcuuaauc

SEQ ID NO: 1712639 - RNA, 19 nt, Homo sapiens
  misc_RNA (1)...(19): siRNA sense strand
caagauauccgaagguuca

SEQ ID NO: 1712640 - RNA, 19 nt, Homo sapiens
  misc_RNA (1)...(19): siRNA sense strand
ccaccacaauccucgcuua

SEQ ID NO: 1712641 - RNA, 19 nt, Homo sapiens
  misc_RNA (1)...(19): siRNA sense strand
gucagaaacuugaaagaga

SEQ ID NO: 1712642 - RNA, 19 nt, Homo sapiens
  misc_RNA (1)...(19): siRNA sense strand
gaagauggagaaauauuca

SEQ ID NO: 1712643 - RNA, 19 nt, Homo sapiens
  misc_RNA (1)...(19): siRNA sense strand
ugggaaacaucaauauuug

SEQ ID NO: 1712644 - RNA, 19 nt, Homo sapiens
  misc_RNA (1)...(19): siRNA sense strand
cauauugaauggaaguuga

SEQ ID NO: 1712645 - RNA, 19 nt, Homo sapiens
  misc_RNA (1)...(19): siRNA sense strand
ucaauuauguggucaaacu

SEQ ID NO: 1712646 - RNA, 19 nt, Homo sapiens
  misc_RNA (1)...(19): siRNA sense strand
gcacugcagcauucucuuu

SEQ ID NO: 1712647 - RNA, 19 nt, Homo sapiens
  misc_RNA (1)...(19): siRNA sense strand
gacauuugauccuuucaga

SEQ ID NO: 1712648 - RNA, 19 nt, Homo sapiens
  misc_RNA (1)...(19): siRNA sense strand
ggaaacaucaauauuugga

SEQ ID NO: 1712649 - RNA, 19 nt, Homo sapiens
  misc_RNA (1)...(19): siRNA sense strand
gugggaaacaucaauauuu

SEQ ID NO: 1712650 - RNA, 19 nt, Homo sapiens
  misc_RNA (1)...(19): siRNA sense strand
guacuuugcacuucagaaa

SEQ ID NO: 1712651 - RNA, 19 nt, Homo sapiens
  misc_RNA (1)...(19): siRNA sense strand
gucaaacuguugcagcuaa

SEQ ID NO: 1712652 - RNA, 19 nt, Homo sapiens
  misc_RNA (1)...(19): siRNA sense strand
ucaucgaccucuucaaguu

SEQ ID NO: 1712653 - RNA, 19 nt, Homo sapiens
  misc_RNA (1)...(19): siRNA sense strand
gaauggaaguugauguacu

SEQ ID NO: 1712654 - RNA, 19 nt, Homo sapiens
  misc_RNA (1)...(19): siRNA sense strand
guagacauuugauccuuuc

SEQ ID NO: 1712655 - RNA, 19 nt, Homo sapiens
  misc_RNA (1)...(19): siRNA sense strand
gagagaauaaccguuguaa

SEQ ID NO: 1712656 - RNA, 19 nt, Homo sapiens
  misc_RNA (1)...(19): siRNA sense strand
ucuacccucugcauucuua

SEQ ID NO: 1712657 - RNA, 19 nt, Homo sapiens
  misc_RNA (1)...(19): siRNA sense strand
gcguggcacagaagaauua

SEQ ID NO: 1712658 - RNA, 19 nt, Homo sapiens
  misc_RNA (1)...(19): siRNA sense strand
gagacacacugcauuucug

SEQ ID NO: 1712659 - RNA, 19 nt, Homo sapiens
  misc_RNA (1)...(19): siRNA sense strand
ucaagugcaauucaagaua

SEQ ID NO: 1712660 - RNA, 19 nt, Homo sapiens
  misc_RNA (1)...(19): siRNA sense strand
ugacuaagcaagugaacaa

SEQ ID NO: 1712661 - RNA, 19 nt, Homo sapiens
  misc_RNA (1)...(19): siRNA sense strand
guagggaagucuguauuag

SEQ ID NO: 1712662 - RNA, 19 nt, Homo sapiens
  misc_RNA (1)...(19): siRNA sense strand
ggucaggacuggagaucuc

SEQ ID NO: 1712663 - RNA, 19 nt, Homo sapiens
  misc_RNA (1)...(19): siRNA sense strand
cuaagcaagugaacaaugg

SEQ ID NO: 1712664 - RNA, 19 nt, Homo sapiens
  misc_RNA (1)...(19): siRNA sense strand
uauuuggauuugccgauua

SEQ ID NO: 1712665 - RNA, 19 nt, Homo sapiens
  misc_RNA (1)...(19): siRNA sense strand
gauauccgaagguucaauu

SEQ ID NO: 1712666 - RNA, 19 nt, Homo sapiens
  misc_RNA (1)...(19): siRNA sense strand
cguuguauaugcuuaguga

SEQ ID NO: 1712667 - RNA, 19 nt, Homo sapiens
  misc_RNA (1)...(19): siRNA sense strand
agucacagcauuaucuuaa

SEQ ID NO: 1712668 - RNA, 19 nt, Homo sapiens
  misc_RNA (1)...(19): siRNA sense strand
guucaauuauguggucaaa

SEQ ID NO: 1712669 - RNA, 19 nt, Homo sapiens
  misc_RNA (1)...(19): siRNA sense strand
gcacuucaucgaccucuuc

SEQ ID NO: 1712670 - RNA, 19 nt, Homo sapiens
  misc_RNA (1)...(19): siRNA sense strand
aauaaccguuguaacauca

SEQ ID NO: 1712671 - RNA, 19 nt, Homo sapiens
  misc_RNA (1)...(19): siRNA sense strand
ggagacacacugcauuucu

SEQ ID NO: 1712672 - RNA, 19 nt, Homo sapiens
  misc_RNA (1)...(19): siRNA sense strand
ucagaugacuaagcaagug

SEQ ID NO: 1712673 - RNA, 19 nt, Homo sapiens
  misc_RNA (1)...(19): siRNA sense strand
agggaagucuguauuagug

SEQ ID NO: 1712674 - RNA, 19 nt, Homo sapiens
  misc_RNA (1)...(19): siRNA sense strand
aauccucgcuuaaucaaag

SEQ ID NO: 1712675 - RNA, 19 nt, Homo sapiens
  misc_RNA (1)...(19): siRNA sense strand
ucaauaaugaagagcauga

SEQ ID NO: 1712676 - RNA, 19 nt, Homo sapiens
  misc_RNA (1)...(19): siRNA sense strand
uguagacauuugauccuuu

SEQ ID NO: 1712677 - RNA, 19 nt, Homo sapiens
  misc_RNA (1)...(19): siRNA sense strand
agaagccuuuaaucgguua

SEQ ID NO: 1712678 - RNA, 19 nt, Homo sapiens
  misc_RNA (1)...(19): siRNA sense strand
gucacagcauuaucuuaaa

SEQ ID NO: 1712679 - RNA, 19 nt, Homo sapiens
  misc_RNA (1)...(19): siRNA sense strand
ggaguagggaagucuguau

SEQ ID NO: 1712680 - RNA, 19 nt, Homo sapiens
  misc_RNA (1)...(19): siRNA sense strand
gugaagauggagaaauauu

SEQ ID NO: 1712681 - RNA, 19 nt, Homo sapiens
  misc_RNA (1)...(19): siRNA sense strand
ugaguggcguggcacagaa

SEQ ID NO: 1712682 - RNA, 19 nt, Homo sapiens
  misc_RNA (1)...(19): siRNA sense strand
ugucggcacugcagcauuc

SEQ ID NO: 1712683 - RNA, 19 nt, Homo sapiens
  misc_RNA (1)...(19): siRNA sense strand
ccucugcauucuuauuaga

SEQ ID NO: 1712684 - RNA, 19 nt, Homo sapiens
  misc_RNA (1)...(19): siRNA sense strand
aaggucauauugaauggaa

SEQ ID NO: 1712685 - RNA, 19 nt, Homo sapiens
  misc_RNA (1)...(19): siRNA sense strand
uguauaugcuuagugaaga

SEQ ID NO: 1712686 - RNA, 19 nt, Homo sapiens
  misc_RNA (1)...(19): siRNA sense strand
gcucuacccucugcauucu

SEQ ID NO: 1712687 - RNA, 19 nt, Homo sapiens
  misc_RNA (1)...(19): siRNA sense strand
caucgaccucuucaaguuu

SEQ ID NO: 1712688 - RNA, 19 nt, Homo sapiens
  misc_RNA (1)...(19): siRNA sense strand
gcaacaacagcuacaggau

SEQ ID NO: 1712689 - RNA, 19 nt, Homo sapiens
  misc_RNA (1)...(19): siRNA sense strand
aguagggaagucuguauua

SEQ ID NO: 1712690 - RNA, 19 nt, Homo sapiens
  misc_RNA (1)...(19): siRNA sense strand
gaguagggaagucuguauu

SEQ ID NO: 1712691 - RNA, 19 nt, Homo sapiens
  misc_RNA (1)...(19): siRNA sense strand
ugaagauggagaaauauuc

SEQ ID NO: 1712692 - RNA, 19 nt, Homo sapiens
  misc_RNA (1)...(19): siRNA sense strand
ugaaucuuguagucagaaa

SEQ ID NO: 1712693 - RNA, 19 nt, Homo sapiens
  misc_RNA (1)...(19): siRNA sense strand
gaaacuugaaagagagaau

SEQ ID NO: 1712694 - RNA, 19 nt, Homo sapiens
  misc_RNA (1)...(19): siRNA sense strand
uggauuugccgauuagaaa

SEQ ID NO: 1712695 - RNA, 19 nt, Homo sapiens
  misc_RNA (1)...(19): siRNA sense strand
gauaaaaucguucaaaagg

SEQ ID NO: 1712696 - RNA, 19 nt, Homo sapiens
  misc_RNA (1)...(19): siRNA sense strand
aacaacagcuacaggaucu

SEQ ID NO: 1712697 - RNA, 19 nt, Homo sapiens
  misc_RNA (1)...(19): siRNA sense strand
caaaaucccaguuaacuuc

SEQ ID NO: 1712698 - RNA, 19 nt, Homo sapiens
  misc_RNA (1)...(19): siRNA sense strand
uccgaagguucaauuaugu

SEQ ID NO: 1712699 - RNA, 19 nt, Homo sapiens
  misc_RNA (1)...(19): siRNA sense strand
guacggagacacacugcau

SEQ ID NO: 1712700 - RNA, 19 nt, Homo sapiens
  misc_RNA (1)...(19): siRNA sense strand
ugauguacuuugcacuuca

SEQ ID NO: 1712701 - RNA, 19 nt, Homo sapiens
  misc_RNA (1)...(19): siRNA sense strand
ucaaacuguugcagcuaau

SEQ ID NO: 1712702 - RNA, 19 nt, Homo sapiens
  misc_RNA (1)...(19): siRNA sense strand
agaaaugacacaaauacuc

SEQ ID NO: 1712703 - RNA, 19 nt, Homo sapiens
  misc_RNA (1)...(19): siRNA sense strand
caacagcuacaggaucuuc

SEQ ID NO: 1712704 - RNA, 19 nt, Homo sapiens
  misc_RNA (1)...(19): siRNA sense strand
aaacuguugcagcuaauug

SEQ ID NO: 1712705 - RNA, 19 nt, Homo sapiens
  misc_RNA (1)...(19): siRNA sense strand
auccgaagguucaauuaug

SEQ ID NO: 1712706 - RNA, 19 nt, Homo sapiens
  misc_RNA (1)...(19): siRNA sense strand
uugaauggaaguugaugua

SEQ ID NO: 1712707 - RNA, 19 nt, Homo sapiens
  misc_RNA (1)...(19): siRNA sense strand
aaucccaguuaacuucauu

SEQ ID NO: 1712708 - RNA, 19 nt, Homo sapiens
  misc_RNA (1)...(19): siRNA sense strand
uuagugggaaacaucaaua

SEQ ID NO: 1712709 - RNA, 19 nt, Homo sapiens
  misc_RNA (1)...(19): siRNA sense strand
cuucucaagugcaauucaa

SEQ ID NO: 1712710 - RNA, 19 nt, Homo sapiens
  misc_RNA (1)...(19): siRNA sense strand
gcagcauucucuuuuggaa

SEQ ID NO: 1712711 - RNA, 19 nt, Homo sapiens
  misc_RNA (1)...(19): siRNA sense strand
gaugugaaucuuguaguca

SEQ ID NO: 1712712 - RNA, 19 nt, Homo sapiens
  misc_RNA (1)...(19): siRNA sense strand
gcacaugcugaacaacauc

SEQ ID NO: 1712713 - RNA, 19 nt, Homo sapiens
  misc_RNA (1)...(19): siRNA sense strand
cuuaaauagugaagaugga

SEQ ID NO: 1712714 - RNA, 19 nt, Homo sapiens
  misc_RNA (1)...(19): siRNA sense strand
ggucaaacuguugcagcua

SEQ ID NO: 1712715 - RNA, 19 nt, Homo sapiens
  misc_RNA (1)...(19): siRNA sense strand
uggcacagaagaauuacuu

SEQ ID NO: 1712716 - RNA, 19 nt, Homo sapiens
  misc_RNA (1)...(19): siRNA sense strand
gcaaaaucccaguuaacuu

SEQ ID NO: 1712717 - RNA, 19 nt, Homo sapiens
  misc_RNA (1)...(19): siRNA sense strand
aacaucagucacagcauua

SEQ ID NO: 1712718 - RNA, 19 nt, Homo sapiens
  misc_RNA (1)...(19): siRNA sense strand
cugcaagaccuaagcucua

SEQ ID NO: 1712719 - RNA, 19 nt, Homo sapiens
  misc_RNA (1)...(19): siRNA sense strand
cacaauccucgcuuaauca

SEQ ID NO: 1712720 - RNA, 19 nt, Homo sapiens
  misc_RNA (1)...(19): siRNA sense strand
caccacaauccucgcuuaa

SEQ ID NO: 1712721 - RNA, 19 nt, Homo sapiens
  misc_RNA (1)...(19): siRNA sense strand
gauguacuuugcacuucag

SEQ ID NO: 1712722 - RNA, 19 nt, Homo sapiens
  misc_RNA (1)...(19): siRNA sense strand
gcaguuuuguagacauuug

SEQ ID NO: 1712723 - RNA, 19 nt, Homo sapiens
  misc_RNA (1)...(19): siRNA sense strand
uggaagaagcuuugucagu

SEQ ID NO: 1712724 - RNA, 19 nt, Homo sapiens
  misc_RNA (1)...(19): siRNA sense strand
gcugaacaacauccuauac

SEQ ID NO: 1712725 - RNA, 19 nt, Homo sapiens
  misc_RNA (1)...(19): siRNA sense strand
ggaagaagcuuugucagua

SEQ ID NO: 1712726 - RNA, 19 nt, Homo sapiens
  misc_RNA (1)...(19): siRNA sense strand
gaagauggcuggaagagau

SEQ ID NO: 1712727 - RNA, 19 nt, Homo sapiens
  misc_RNA (1)...(19): siRNA sense strand
ggaguuggauuaagacaga

SEQ ID NO: 1712728 - RNA, 19 nt, Homo sapiens
  misc_RNA (1)...(19): siRNA sense strand
gagaauaaccguuguaaca

SEQ ID NO: 1712729 - RNA, 19 nt, Homo sapiens
  misc_RNA (1)...(19): siRNA sense strand
ggauggaguuggauuaaga

SEQ ID NO: 1712730 - RNA, 19 nt, Homo sapiens
  misc_RNA (1)...(19): siRNA sense strand
uagugaagauggagaaaua

SEQ ID NO: 1712731 - RNA, 19 nt, Homo sapiens
  misc_RNA (1)...(19): siRNA sense strand
uaacaucagucacagcauu

SEQ ID NO: 1712732 - RNA, 19 nt, Homo sapiens
  misc_RNA (1)...(19): siRNA sense strand
gaauaaccguuguaacauc

SEQ ID NO: 1712733 - RNA, 19 nt, Homo sapiens
  misc_RNA (1)...(19): siRNA sense strand
caagugcaauucaagauau

SEQ ID NO: 1712734 - RNA, 19 nt, Homo sapiens
  misc_RNA (1)...(19): siRNA sense strand
gaaaugacacaaauacuca

SEQ ID NO: 1712735 - RNA, 19 nt, Homo sapiens
  misc_RNA (1)...(19): siRNA sense strand
ccaguuaacuucauugagu

SEQ ID NO: 1712736 - RNA, 19 nt, Homo sapiens
  misc_RNA (1)...(19): siRNA sense strand
aaucaaagaucuucugcaa

SEQ ID NO: 1712737 - RNA, 19 nt, Homo sapiens
  misc_RNA (1)...(19): siRNA sense strand
gaagaagcuuugucaguac

SEQ ID NO: 1712738 - RNA, 19 nt, Homo sapiens
  misc_RNA (1)...(19): siRNA sense strand
ccacaauccucgcuuaauc

SEQ ID NO: 1712739 - RNA, 19 nt, Homo sapiens
  misc_RNA (1)...(19): siRNA sense strand
caagauauccgaagguuca

SEQ ID NO: 1712740 - RNA, 19 nt, Homo sapiens
  misc_RNA (1)...(19): siRNA sense strand
ccaccacaauccucgcuua

SEQ ID NO: 1712741 - RNA, 19 nt, Homo sapiens
  misc_RNA (1)...(19): siRNA sense strand
gucagaaacuugaaagaga

SEQ ID NO: 1712742 - RNA, 19 nt, Homo sapiens
  misc_RNA (1)...(19): siRNA sense strand
gaagauggagaaauauuca

SEQ ID NO: 1712743 - RNA, 19 nt, Homo sapiens
  misc_RNA (1)...(19): siRNA sense strand
ugggaaacaucaauauuug

SEQ ID NO: 1712744 - RNA, 19 nt, Homo sapiens
  misc_RNA (1)...(19): siRNA sense strand
cauauugaauggaaguuga

SEQ ID NO: 1712745 - RNA, 19 nt, Homo sapiens
  misc_RNA (1)...(19): siRNA sense strand
ucaauuauguggucaaacu

SEQ ID NO: 1712746 - RNA, 19 nt, Homo sapiens
  misc_RNA (1)...(19): siRNA sense strand
gcacugcagcauucucuuu

SEQ ID NO: 1712747 - RNA, 19 nt, Homo sapiens
  misc_RNA (1)...(19): siRNA sense strand
gacauuugauccuuucaga

SEQ ID NO: 1712748 - RNA, 19 nt, Homo sapiens
  misc_RNA (1)...(19): siRNA sense strand
ggaaacaucaauauuugga

SEQ ID NO: 1712749 - RNA, 19 nt, Homo sapiens
  misc_RNA (1)...(19): siRNA sense strand
gugggaaacaucaauauuu

SEQ ID NO: 1712750 - RNA, 19 nt, Homo sapiens
  misc_RNA (1)...(19): siRNA sense strand
guacuuugcacuucagaaa

SEQ ID NO: 1712751 - RNA, 19 nt, Homo sapiens
  misc_RNA (1)...(19): siRNA sense strand
gucaaacuguugcagcuaa

SEQ ID NO: 1712752 - RNA, 19 nt, Homo sapiens
  misc_RNA (1)...(19): siRNA sense strand
ucaucgaccucuucaaguu

SEQ ID NO: 1712753 - RNA, 19 nt, Homo sapiens
  misc_RNA (1)...(19): siRNA sense strand
gaauggaaguugauguacu

SEQ ID NO: 1712754 - RNA, 19 nt, Homo sapiens
  misc_RNA (1)...(19): siRNA sense strand
guagacauuugauccuuuc

SEQ ID NO: 1712755 - RNA, 19 nt, Homo sapiens
  misc_RNA (1)...(19): siRNA sense strand
gagagaauaaccguuguaa

SEQ ID NO: 1712756 - RNA, 19 nt, Homo sapiens
  misc_RNA (1)...(19): siRNA sense strand
ucuacccucugcauucuua

SEQ ID NO: 1712757 - RNA, 19 nt, Homo sapiens
  misc_RNA (1)...(19): siRNA sense strand
gcguggcacagaagaauua

SEQ ID NO: 1712758 - RNA, 19 nt, Homo sapiens
  misc_RNA (1)...(19): siRNA sense strand
gagacacacugcauuucug

SEQ ID NO: 1712759 - RNA, 19 nt, Homo sapiens
  misc_RNA (1)...(19): siRNA sense strand
ucaagugcaauucaagaua

SEQ ID NO: 1712760 - RNA, 19 nt, Homo sapiens
  misc_RNA (1)...(19): siRNA sense strand
ugacuaagcaagugaacaa

SEQ ID NO: 1712761 - RNA, 19 nt, Homo sapiens
  misc_RNA (1)...(19): siRNA sense strand
guagggaagucuguauuag

SEQ ID NO: 1712762 - RNA, 19 nt, Homo sapiens
  misc_RNA (1)...(19): siRNA sense strand
ggucaggacuggagaucuc

SEQ ID NO: 1712763 - RNA, 19 nt, Homo sapiens
  misc_RNA (1)...(19): siRNA sense strand
cuaagcaagugaacaaugg

SEQ ID NO: 1712764 - RNA, 19 nt, Homo sapiens
  misc_RNA (1)...(19): siRNA sense strand
uauuuggauuugccgauua

SEQ ID NO: 1712765 - RNA, 19 nt, Homo sapiens
  misc_RNA (1)...(19): siRNA sense strand
gauauccgaagguucaauu

SEQ ID NO: 1712766 - RNA, 19 nt, Homo sapiens
  misc_RNA (1)...(19): siRNA sense strand
cguuguauaugcuuaguga

SEQ ID NO: 1712767 - RNA, 19 nt, Homo sapiens
  misc_RNA (1)...(19): siRNA sense strand
agucacagcauuaucuuaa

SEQ ID NO: 1712768 - RNA, 19 nt, Homo sapiens
  misc_RNA (1)...(19): siRNA sense strand
guucaauuauguggucaaa

SEQ ID NO: 1712769 - RNA, 19 nt, Homo sapiens
  misc_RNA (1)...(19): siRNA sense strand
gcacuucaucgaccucuuc

SEQ ID NO: 1712770 - RNA, 19 nt, Homo sapiens
  misc_RNA (1)...(19): siRNA sense strand
aauaaccguuguaacauca

SEQ ID NO: 1712771 - RNA, 19 nt, Homo sapiens
  misc_RNA (1)...(19): siRNA sense strand
ggagacacacugcauuucu

SEQ ID NO: 1712772 - RNA, 19 nt, Homo sapiens
  misc_RNA (1)...(19): siRNA sense strand
ucagaugacuaagcaagug

SEQ ID NO: 1712773 - RNA, 19 nt, Homo sapiens
  misc_RNA (1)...(19): siRNA sense strand
agggaagucuguauuagug

SEQ ID NO: 1712774 - RNA, 19 nt, Homo sapiens
  misc_RNA (1)...(19): siRNA sense strand
aauccucgcuuaaucaaag

SEQ ID NO: 1712775 - RNA, 19 nt, Homo sapiens
  misc_RNA (1)...(19): siRNA sense strand
ucaauaaugaagagcauga

SEQ ID NO: 1712776 - RNA, 19 nt, Homo sapiens
  misc_RNA (1)...(19): siRNA sense strand
uguagacauuugauccuuu

SEQ ID NO: 1712777 - RNA, 19 nt, Homo sapiens
  misc_RNA (1)...(19): siRNA sense strand
agaagccuuuaaucgguua

SEQ ID NO: 1712778 - RNA, 19 nt, Homo sapiens
  misc_RNA (1)...(19): siRNA sense strand
gucacagcauuaucuuaaa

SEQ ID NO: 1712779 - RNA, 19 nt, Homo sapiens
  misc_RNA (1)...(19): siRNA sense strand
ggaguagggaagucuguau

SEQ ID NO: 1712780 - RNA, 19 nt, Homo sapiens
  misc_RNA (1)...(19): siRNA sense strand
gugaagauggagaaauauu

SEQ ID NO: 1712781 - RNA, 19 nt, Homo sapiens
  misc_RNA (1)...(19): siRNA sense strand
ugaguggcguggcacagaa

SEQ ID NO: 1712782 - RNA, 19 nt, Homo sapiens
  misc_RNA (1)...(19): siRNA sense strand
ugucggcacugcagcauuc

SEQ ID NO: 1712783 - RNA, 19 nt, Homo sapiens
  misc_RNA (1)...(19): siRNA sense strand
ccucugcauucuuauuaga

SEQ ID NO: 1712784 - RNA, 19 nt, Homo sapiens
  misc_RNA (1)...(19): siRNA sense strand
aaggucauauugaauggaa

SEQ ID NO: 1712785 - RNA, 19 nt, Homo sapiens
  misc_RNA (1)...(19): siRNA sense strand
uguauaugcuuagugaaga

SEQ ID NO: 1712786 - RNA, 19 nt, Homo sapiens
  misc_RNA (1)...(19): siRNA sense strand
gcucuacccucugcauucu

SEQ ID NO: 1712787 - RNA, 19 nt, Homo sapiens
  misc_RNA (1)...(19): siRNA sense strand
caucgaccucuucaaguuu

SEQ ID NO: 1712788 - RNA, 19 nt, Homo sapiens
  misc_RNA (1)...(19): siRNA sense strand
gcaacaacagcuacaggau

SEQ ID NO: 1712789 - RNA, 19 nt, Homo sapiens
  misc_RNA (1)...(19): siRNA sense strand
aguagggaagucuguauua

SEQ ID NO: 1712790 - RNA, 19 nt, Homo sapiens
  misc_RNA (1)...(19): siRNA sense strand
gaguagggaagucuguauu

SEQ ID NO: 1712791 - RNA, 19 nt, Homo sapiens
  misc_RNA (1)...(19): siRNA sense strand
ugaagauggagaaauauuc

SEQ ID NO: 1712792 - RNA, 19 nt, Homo sapiens
  misc_RNA (1)...(19): siRNA sense strand
ugaaucuuguagucagaaa

SEQ ID NO: 1712793 - RNA, 19 nt, Homo sapiens
  misc_RNA (1)...(19): siRNA sense strand
gaaacuugaaagagagaau

SEQ ID NO: 1712794 - RNA, 19 nt, Homo sapiens
  misc_RNA (1)...(19): siRNA sense strand
uggauuugccgauuagaaa

SEQ ID NO: 1712795 - RNA, 19 nt, Homo sapiens
  misc_RNA (1)...(19): siRNA sense strand
gauaaaaucguucaaaagg

SEQ ID NO: 1712796 - RNA, 19 nt, Homo sapiens
  misc_RNA (1)...(19): siRNA sense strand
aacaacagcuacaggaucu

SEQ ID NO: 1712797 - RNA, 19 nt, Homo sapiens
  misc_RNA (1)...(19): siRNA sense strand
caaaaucccaguuaacuuc

SEQ ID NO: 1712798 - RNA, 19 nt, Homo sapiens
  misc_RNA (1)...(19): siRNA sense strand
uccgaagguucaauuaugu

SEQ ID NO: 1712799 - RNA, 19 nt, Homo sapiens
  misc_RNA (1)...(19): siRNA sense strand
guacggagacacacugcau

SEQ ID NO: 1712800 - RNA, 19 nt, Homo sapiens
  misc_RNA (1)...(19): siRNA sense strand
ugauguacuuugcacuuca

SEQ ID NO: 1712801 - RNA, 19 nt, Homo sapiens
  misc_RNA (1)...(19): siRNA sense strand
ucaaacuguugcagcuaau

SEQ ID NO: 1712802 - RNA, 19 nt, Homo sapiens
  misc_RNA (1)...(19): siRNA sense strand
agaaaugacacaaauacuc

SEQ ID NO: 1712803 - RNA, 19 nt, Homo sapiens
  misc_RNA (1)...(19): siRNA sense strand
caacagcuacaggaucuuc

SEQ ID NO: 1712804 - RNA, 19 nt, Homo sapiens
  misc_RNA (1)...(19): siRNA sense strand
aaacuguugcagcuaauug

SEQ ID NO: 1712805 - RNA, 19 nt, Homo sapiens
  misc_RNA (1)...(19): siRNA sense strand
auccgaagguucaauuaug

SEQ ID NO: 1712806 - RNA, 19 nt, Homo sapiens
  misc_RNA (1)...(19): siRNA sense strand
uugaauggaaguugaugua

SEQ ID NO: 1712807 - RNA, 19 nt, Homo sapiens
  misc_RNA (1)...(19): siRNA sense strand
aaucccaguuaacuucauu

SEQ ID NO: 1712808 - RNA, 19 nt, Homo sapiens
  misc_RNA (1)...(19): siRNA sense strand
uuagugggaaacaucaaua

SEQ ID NO: 1712809 - RNA, 19 nt, Homo sapiens
  misc_RNA (1)...(19): siRNA sense strand
cuucucaagugcaauucaa

SEQ ID NO: 1712810 - RNA, 19 nt, Homo sapiens
  misc_RNA (1)...(19): siRNA sense strand
gcagcauucucuuuuggaa

SEQ ID NO: 1712811 - RNA, 19 nt, Homo sapiens
  misc_RNA (1)...(19): siRNA sense strand
gaugugaaucuuguaguca

SEQ ID NO: 1712812 - RNA, 19 nt, Homo sapiens
  misc_RNA (1)...(19): siRNA sense strand
gcacaugcugaacaacauc

SEQ ID NO: 1712813 - RNA, 19 nt, Homo sapiens
  misc_RNA (1)...(19): siRNA sense strand
cuuaaauagugaagaugga

SEQ ID NO: 1712814 - RNA, 19 nt, Homo sapiens
  misc_RNA (1)...(19): siRNA sense strand
ggucaaacuguugcagcua

SEQ ID NO: 1712815 - RNA, 19 nt, Homo sapiens
  misc_RNA (1)...(19): siRNA sense strand
uggcacagaagaauuacuu

SEQ ID NO: 1712816 - RNA, 19 nt, Homo sapiens
  misc_RNA (1)...(19): siRNA sense strand
gcaaaaucccaguuaacuu

SEQ ID NO: 1712817 - RNA, 19 nt, Homo sapiens
  misc_RNA (1)...(19): siRNA sense strand
aacaucagucacagcauua

SEQ ID NO: 1712818 - RNA, 19 nt, Homo sapiens
  misc_RNA (1)...(19): siRNA sense strand
cugcaagaccuaagcucua

SEQ ID NO: 1712819 - RNA, 19 nt, Homo sapiens
  misc_RNA (1)...(19): siRNA sense strand
cacaauccucgcuuaauca

SEQ ID NO: 1712820 - RNA, 19 nt, Homo sapiens
  misc_RNA (1)...(19): siRNA sense strand
caccacaauccucgcuuaa

SEQ ID NO: 1712821 - RNA, 19 nt, Homo sapiens
  misc_RNA (1)...(19): siRNA sense strand
gauguacuuugcacuucag

SEQ ID NO: 1712822 - RNA, 19 nt, Homo sapiens
  misc_RNA (1)...(19): siRNA sense strand
gcaguuuuguagacauuug

SEQ ID NO: 1712823 - RNA, 19 nt, Homo sapiens
  misc_RNA (1)...(19): siRNA sense strand
uggaagaagcuuugucagu

SEQ ID NO: 1712824 - RNA, 19 nt, Homo sapiens
  misc_RNA (1)...(19): siRNA sense strand
gcugaacaacauccuauac

SEQ ID NO: 1712825 - RNA, 19 nt, Homo sapiens
  misc_RNA (1)...(19): siRNA sense strand
gaagagaccauuccuguga

SEQ ID NO: 1712826 - RNA, 19 nt, Homo sapiens
  misc_RNA (1)...(19): siRNA sense strand
guacaaggauucucuucuu

SEQ ID NO: 1712827 - RNA, 19 nt, Homo sapiens
  misc_RNA (1)...(19): siRNA sense strand
ggaagaugcuggcuauuac

SEQ ID NO: 1712828 - RNA, 19 nt, Homo sapiens
  misc_RNA (1)...(19): siRNA sense strand
ggauaaagacaaugagaaa

SEQ ID NO: 1712829 - RNA, 19 nt, Homo sapiens
  misc_RNA (1)...(19): siRNA sense strand
ucacuggccuucuugguuu

SEQ ID NO: 1712830 - RNA, 19 nt, Homo sapiens
  misc_RNA (1)...(19): siRNA sense strand
gaaaugcuucuuacuguga

SEQ ID NO: 1712831 - RNA, 19 nt, Homo sapiens
  misc_RNA (1)...(19): siRNA sense strand
caacaucacuaggaguauu

SEQ ID NO: 1712832 - RNA, 19 nt, Homo sapiens
  misc_RNA (1)...(19): siRNA sense strand
gccagaagcugccgguuuc

SEQ ID NO: 1712833 - RNA, 19 nt, Homo sapiens
  misc_RNA (1)...(19): siRNA sense strand
gcuauggccucaucaucaa

SEQ ID NO: 1712834 - RNA, 19 nt, Homo sapiens
  misc_RNA (1)...(19): siRNA sense strand
gagaggauuugcacaugga

SEQ ID NO: 1712835 - RNA, 19 nt, Homo sapiens
  misc_RNA (1)...(19): siRNA sense strand
gcccugaccugagugaauu

SEQ ID NO: 1712836 - RNA, 19 nt, Homo sapiens
  misc_RNA (1)...(19): siRNA sense strand
gaccauuccugugaucauu

SEQ ID NO: 1712837 - RNA, 19 nt, Homo sapiens
  misc_RNA (1)...(19): siRNA sense strand
uacaaggauucucuucuuu

SEQ ID NO: 1712838 - RNA, 19 nt, Homo sapiens
  misc_RNA (1)...(19): siRNA sense strand
ucaauccuaucccaaguga

SEQ ID NO: 1712839 - RNA, 19 nt, Homo sapiens
  misc_RNA (1)...(19): siRNA sense strand
uggaagaugcuggcuauua

SEQ ID NO: 1712840 - RNA, 19 nt, Homo sapiens
  misc_RNA (1)...(19): siRNA sense strand
gaagaagagacacggaugu

SEQ ID NO: 1712841 - RNA, 19 nt, Homo sapiens
  misc_RNA (1)...(19): siRNA sense strand
gacugacaaucccguguaa

SEQ ID NO: 1712842 - RNA, 19 nt, Homo sapiens
  misc_RNA (1)...(19): siRNA sense strand
ccaaugacacccacauaga

SEQ ID NO: 1712843 - RNA, 19 nt, Homo sapiens
  misc_RNA (1)...(19): siRNA sense strand
gcaaacacagaacuggaaa

SEQ ID NO: 1712844 - RNA, 19 nt, Homo sapiens
  misc_RNA (1)...(19): siRNA sense strand
ucaagacuuucaauccuau

SEQ ID NO: 1712845 - RNA, 19 nt, Homo sapiens
  misc_RNA (1)...(19): siRNA sense strand
caauacaacaucacuagga

SEQ ID NO: 1712846 - RNA, 19 nt, Homo sapiens
  misc_RNA (1)...(19): siRNA sense strand
ggaaccggcacacccuuaa

SEQ ID NO: 1712847 - RNA, 19 nt, Homo sapiens
  misc_RNA (1)...(19): siRNA sense strand
ccuggaagaugcuggcuau

SEQ ID NO: 1712848 - RNA, 19 nt, Homo sapiens
  misc_RNA (1)...(19): siRNA sense strand
gcaccuacgucugcacuac

SEQ ID NO: 1712849 - RNA, 19 nt, Homo sapiens
  misc_RNA (1)...(19): siRNA sense strand
caagagaggauuugcacau

SEQ ID NO: 1712850 - RNA, 19 nt, Homo sapiens
  misc_RNA (1)...(19): siRNA sense strand
ugacaaaacugacgugaag

SEQ ID NO: 1712851 - RNA, 19 nt, Homo sapiens
  misc_RNA (1)...(19): siRNA sense strand
ggccagcaauacaacauca

SEQ ID NO: 1712852 - RNA, 19 nt, Homo sapiens
  misc_RNA (1)...(19): siRNA sense strand
gggaaccggcacacccuua

SEQ ID NO: 1712853 - RNA, 19 nt, Homo sapiens
  misc_RNA (1)...(19): siRNA sense strand
ccaggaauauucagaaaau

SEQ ID NO: 1712854 - RNA, 19 nt, Homo sapiens
  misc_RNA (1)...(19): siRNA sense strand
cgucugcacuacuagaaau

SEQ ID NO: 1712855 - RNA, 19 nt, Homo sapiens
  misc_RNA (1)...(19): siRNA sense strand
caucaagacuuucaauccu

SEQ ID NO: 1712856 - RNA, 19 nt, Homo sapiens
  misc_RNA (1)...(19): siRNA sense strand
caaggauucucuucuuuug

SEQ ID NO: 1712857 - RNA, 19 nt, Homo sapiens
  misc_RNA (1)...(19): siRNA sense strand
acacagaacuggaaaagca

SEQ ID NO: 1712858 - RNA, 19 nt, Homo sapiens
  misc_RNA (1)...(19): siRNA sense strand
uacaacaucacuaggagua

SEQ ID NO: 1712859 - RNA, 19 nt, Homo sapiens
  misc_RNA (1)...(19): siRNA sense strand
gcuuguacguguugguaau

SEQ ID NO: 1712860 - RNA, 19 nt, Homo sapiens
  misc_RNA (1)...(19): siRNA sense strand
cgccaggaauauucagaaa

SEQ ID NO: 1712861 - RNA, 19 nt, Homo sapiens
  misc_RNA (1)...(19): siRNA sense strand
cacagacggugcaaacaca

SEQ ID NO: 1712862 - RNA, 19 nt, Homo sapiens
  misc_RNA (1)...(19): siRNA sense strand
ccauugagcucagaguuuu

SEQ ID NO: 1712863 - RNA, 19 nt, Homo sapiens
  misc_RNA (1)...(19): siRNA sense strand
ggccaaugacacccacaua

SEQ ID NO: 1712864 - RNA, 19 nt, Homo sapiens
  misc_RNA (1)...(19): siRNA sense strand
gagcuacgcaucaagaaaa

SEQ ID NO: 1712865 - RNA, 19 nt, Homo sapiens
  misc_RNA (1)...(19): siRNA sense strand
caaccugacauggcauaaa

SEQ ID NO: 1712866 - RNA, 19 nt, Homo sapiens
  misc_RNA (1)...(19): siRNA sense strand
aagagaggauuugcacaug

SEQ ID NO: 1712867 - RNA, 19 nt, Homo sapiens
  misc_RNA (1)...(19): siRNA sense strand
acacuacgcaccacaguca

SEQ ID NO: 1712868 - RNA, 19 nt, Homo sapiens
  misc_RNA (1)...(19): siRNA sense strand
cauaauacccugaguuuuc

SEQ ID NO: 1712869 - RNA, 19 nt, Homo sapiens
  misc_RNA (1)...(19): siRNA sense strand
uccauaauacccugaguuu

SEQ ID NO: 1712870 - RNA, 19 nt, Homo sapiens
  misc_RNA (1)...(19): siRNA sense strand
ccauuccugugaucauuuc

SEQ ID NO: 1712871 - RNA, 19 nt, Homo sapiens
  misc_RNA (1)...(19): siRNA sense strand
acauugaagugccauugau

SEQ ID NO: 1712872 - RNA, 19 nt, Homo sapiens
  misc_RNA (1)...(19): siRNA sense strand
gcacacccuuaaccaccau

SEQ ID NO: 1712873 - RNA, 19 nt, Homo sapiens
  misc_RNA (1)...(19): siRNA sense strand
ucucauacccgcaaauuuu

SEQ ID NO: 1712874 - RNA, 19 nt, Homo sapiens
  misc_RNA (1)...(19): siRNA sense strand
agacugacaaucccgugua

SEQ ID NO: 1712875 - RNA, 19 nt, Homo sapiens
  misc_RNA (1)...(19): siRNA sense strand
ccugacauuugcccaugaa

SEQ ID NO: 1712876 - RNA, 19 nt, Homo sapiens
  misc_RNA (1)...(19): siRNA sense strand
gaccacucacuuacucgua

SEQ ID NO: 1712877 - RNA, 19 nt, Homo sapiens
  misc_RNA (1)...(19): siRNA sense strand
caucucauacccgcaaauu

SEQ ID NO: 1712878 - RNA, 19 nt, Homo sapiens
  misc_RNA (1)...(19): siRNA sense strand
caaugacacccacauagag

SEQ ID NO: 1712879 - RNA, 19 nt, Homo sapiens
  misc_RNA (1)...(19): siRNA sense strand
gccaaugacacccacauag

SEQ ID NO: 1712880 - RNA, 19 nt, Homo sapiens
  misc_RNA (1)...(19): siRNA sense strand
caugaaggccagcaauaca

SEQ ID NO: 1712881 - RNA, 19 nt, Homo sapiens
  misc_RNA (1)...(19): siRNA sense strand
gcgcuuguacguguuggua

SEQ ID NO: 1712882 - RNA, 19 nt, Homo sapiens
  misc_RNA (1)...(19): siRNA sense strand
gucaaccucugggguauua

SEQ ID NO: 1712883 - RNA, 19 nt, Homo sapiens
  misc_RNA (1)...(19): siRNA sense strand
gacggucccaggagaagaa

SEQ ID NO: 1712884 - RNA, 19 nt, Homo sapiens
  misc_RNA (1)...(19): siRNA sense strand
ugagaacuacauugaagug

SEQ ID NO: 1712885 - RNA, 19 nt, Homo sapiens
  misc_RNA (1)...(19): siRNA sense strand
aucaagacuuucaauccua

SEQ ID NO: 1712886 - RNA, 19 nt, Homo sapiens
  misc_RNA (1)...(19): siRNA sense strand
gauguggcccuggaagaug

SEQ ID NO: 1712887 - RNA, 19 nt, Homo sapiens
  misc_RNA (1)...(19): siRNA sense strand
gaagccuccuccacguucu

SEQ ID NO: 1712888 - RNA, 19 nt, Homo sapiens
  misc_RNA (1)...(19): siRNA sense strand
cagcaauacaacaucacua

SEQ ID NO: 1712889 - RNA, 19 nt, Homo sapiens
  misc_RNA (1)...(19): siRNA sense strand
cccaugaaggccagcaaua

SEQ ID NO: 1712890 - RNA, 19 nt, Homo sapiens
  misc_RNA (1)...(19): siRNA sense strand
gaaggccagcaauacaaca

SEQ ID NO: 1712891 - RNA, 19 nt, Homo sapiens
  misc_RNA (1)...(19): siRNA sense strand
aggauuugcacauggauuu

SEQ ID NO: 1712892 - RNA, 19 nt, Homo sapiens
  misc_RNA (1)...(19): siRNA sense strand
ggccacgccaggaauauuc

SEQ ID NO: 1712893 - RNA, 19 nt, Homo sapiens
  misc_RNA (1)...(19): siRNA sense strand
aguaugcccugaccugagu

SEQ ID NO: 1712894 - RNA, 19 nt, Homo sapiens
  misc_RNA (1)...(19): siRNA sense strand
gaggauuugcacauggauu

SEQ ID NO: 1712895 - RNA, 19 nt, Homo sapiens
  misc_RNA (1)...(19): siRNA sense strand
cauugaagugccauugauu

SEQ ID NO: 1712896 - RNA, 19 nt, Homo sapiens
  misc_RNA (1)...(19): siRNA sense strand
caggugcccuacugguugu

SEQ ID NO: 1712897 - RNA, 19 nt, Homo sapiens
  misc_RNA (1)...(19): siRNA sense strand
cacuaggaguauugagcua

SEQ ID NO: 1712898 - RNA, 19 nt, Homo sapiens
  misc_RNA (1)...(19): siRNA sense strand
uggauaaagacaaugagaa

SEQ ID NO: 1712899 - RNA, 19 nt, Homo sapiens
  misc_RNA (1)...(19): siRNA sense strand
ccacucacuuacucguaca

SEQ ID NO: 1712900 - RNA, 19 nt, Homo sapiens
  misc_RNA (1)...(19): siRNA sense strand
caucaucaagacuuucaau

SEQ ID NO: 1712901 - RNA, 19 nt, Homo sapiens
  misc_RNA (1)...(19): siRNA sense strand
aaccugacauggcauaaaa

SEQ ID NO: 1712902 - RNA, 19 nt, Homo sapiens
  misc_RNA (1)...(19): siRNA sense strand
ugagcuacgcaucaagaaa

SEQ ID NO: 1712903 - RNA, 19 nt, Homo sapiens
  misc_RNA (1)...(19): siRNA sense strand
gaagauucaaugguacaag

SEQ ID NO: 1712904 - RNA, 19 nt, Homo sapiens
  misc_RNA (1)...(19): siRNA sense strand
gggaauauggaugcacaga

SEQ ID NO: 1712905 - RNA, 19 nt, Homo sapiens
  misc_RNA (1)...(19): siRNA sense strand
cacuuucacuggccuucuu

SEQ ID NO: 1712906 - RNA, 19 nt, Homo sapiens
  misc_RNA (1)...(19): siRNA sense strand
ugugguggacggccaauga

SEQ ID NO: 1712907 - RNA, 19 nt, Homo sapiens
  misc_RNA (1)...(19): siRNA sense strand
ugccagaagcugccgguuu

SEQ ID NO: 1712908 - RNA, 19 nt, Homo sapiens
  misc_RNA (1)...(19): siRNA sense strand
gaagagaccauuccuguga

SEQ ID NO: 1712909 - RNA, 19 nt, Homo sapiens
  misc_RNA (1)...(19): siRNA sense strand
guacaaggauucucuucuu

SEQ ID NO: 1712910 - RNA, 19 nt, Homo sapiens
  misc_RNA (1)...(19): siRNA sense strand
ggaagaugcuggcuauuac

SEQ ID NO: 1712911 - RNA, 19 nt, Homo sapiens
  misc_RNA (1)...(19): siRNA sense strand
ggauaaagacaaugagaaa

SEQ ID NO: 1712912 - RNA, 19 nt, Homo sapiens
  misc_RNA (1)...(19): siRNA sense strand
ucacuggccuucuugguuu

SEQ ID NO: 1712913 - RNA, 19 nt, Homo sapiens
  misc_RNA (1)...(19): siRNA sense strand
gaaaugcuucuuacuguga

SEQ ID NO: 1712914 - RNA, 19 nt, Homo sapiens
  misc_RNA (1)...(19): siRNA sense strand
caacaucacuaggaguauu

SEQ ID NO: 1712915 - RNA, 19 nt, Homo sapiens
  misc_RNA (1)...(19): siRNA sense strand
gccagaagcugccgguuuc

SEQ ID NO: 1712916 - RNA, 19 nt, Homo sapiens
  misc_RNA (1)...(19): siRNA sense strand
gcuauggccucaucaucaa

SEQ ID NO: 1712917 - RNA, 19 nt, Homo sapiens
  misc_RNA (1)...(19): siRNA sense strand
gagaggauuugcacaugga

SEQ ID NO: 1712918 - RNA, 19 nt, Homo sapiens
  misc_RNA (1)...(19): siRNA sense strand
gcccugaccugagugaauu

SEQ ID NO: 1712919 - RNA, 19 nt, Homo sapiens
  misc_RNA (1)...(19): siRNA sense strand
gaccauuccugugaucauu

SEQ ID NO: 1712920 - RNA, 19 nt, Homo sapiens
  misc_RNA (1)...(19): siRNA sense strand
uacaaggauucucuucuuu

SEQ ID NO: 1712921 - RNA, 19 nt, Homo sapiens
  misc_RNA (1)...(19): siRNA sense strand
ucaauccuaucccaaguga

SEQ ID NO: 1712922 - RNA, 19 nt, Homo sapiens
  misc_RNA (1)...(19): siRNA sense strand
uggaagaugcuggcuauua

SEQ ID NO: 1712923 - RNA, 19 nt, Homo sapiens
  misc_RNA (1)...(19): siRNA sense strand
gaagaagagacacggaugu

SEQ ID NO: 1712924 - RNA, 19 nt, Homo sapiens
  misc_RNA (1)...(19): siRNA sense strand
gacugacaaucccguguaa

SEQ ID NO: 1712925 - RNA, 19 nt, Homo sapiens
  misc_RNA (1)...(19): siRNA sense strand
ccaaugacacccacauaga

SEQ ID NO: 1712926 - RNA, 19 nt, Homo sapiens
  misc_RNA (1)...(19): siRNA sense strand
gcaaacacagaacuggaaa

SEQ ID NO: 1712927 - RNA, 19 nt, Homo sapiens
  misc_RNA (1)...(19): siRNA sense strand
ucaagacuuucaauccuau

SEQ ID NO: 1712928 - RNA, 19 nt, Homo sapiens
  misc_RNA (1)...(19): siRNA sense strand
caauacaacaucacuagga

SEQ ID NO: 1712929 - RNA, 19 nt, Homo sapiens
  misc_RNA (1)...(19): siRNA sense strand
ggaaccggcacacccuuaa

SEQ ID NO: 1712930 - RNA, 19 nt, Homo sapiens
  misc_RNA (1)...(19): siRNA sense strand
ccuggaagaugcuggcuau

SEQ ID NO: 1712931 - RNA, 19 nt, Homo sapiens
  misc_RNA (1)...(19): siRNA sense strand
gcaccuacgucugcacuac

SEQ ID NO: 1712932 - RNA, 19 nt, Homo sapiens
  misc_RNA (1)...(19): siRNA sense strand
caagagaggauuugcacau

SEQ ID NO: 1712933 - RNA, 19 nt, Homo sapiens
  misc_RNA (1)...(19): siRNA sense strand
ugacaaaacugacgugaag

SEQ ID NO: 1712934 - RNA, 19 nt, Homo sapiens
  misc_RNA (1)...(19): siRNA sense strand
ggccagcaauacaacauca

SEQ ID NO: 1712935 - RNA, 19 nt, Homo sapiens
  misc_RNA (1)...(19): siRNA sense strand
gggaaccggcacacccuua

SEQ ID NO: 1712936 - RNA, 19 nt, Homo sapiens
  misc_RNA (1)...(19): siRNA sense strand
ccaggaauauucagaaaau

SEQ ID NO: 1712937 - RNA, 19 nt, Homo sapiens
  misc_RNA (1)...(19): siRNA sense strand
cgucugcacuacuagaaau

SEQ ID NO: 1712938 - RNA, 19 nt, Homo sapiens
  misc_RNA (1)...(19): siRNA sense strand
caucaagacuuucaauccu

SEQ ID NO: 1712939 - RNA, 19 nt, Homo sapiens
  misc_RNA (1)...(19): siRNA sense strand
caaggauucucuucuuuug

SEQ ID NO: 1712940 - RNA, 19 nt, Homo sapiens
  misc_RNA (1)...(19): siRNA sense strand
acacagaacuggaaaagca

SEQ ID NO: 1712941 - RNA, 19 nt, Homo sapiens
  misc_RNA (1)...(19): siRNA sense strand
uacaacaucacuaggagua

SEQ ID NO: 1712942 - RNA, 19 nt, Homo sapiens
  misc_RNA (1)...(19): siRNA sense strand
gcuuguacguguugguaau

SEQ ID NO: 1712943 - RNA, 19 nt, Homo sapiens
  misc_RNA (1)...(19): siRNA sense strand
cgccaggaauauucagaaa

SEQ ID NO: 1712944 - RNA, 19 nt, Homo sapiens
  misc_RNA (1)...(19): siRNA sense strand
cacagacggugcaaacaca

SEQ ID NO: 1712945 - RNA, 19 nt, Homo sapiens
  misc_RNA (1)...(19): siRNA sense strand
ccauugagcucagaguuuu

SEQ ID NO: 1712946 - RNA, 19 nt, Homo sapiens
  misc_RNA (1)...(19): siRNA sense strand
ggccaaugacacccacaua

SEQ ID NO: 1712947 - RNA, 19 nt, Homo sapiens
  misc_RNA (1)...(19): siRNA sense strand
gagcuacgcaucaagaaaa

SEQ ID NO: 1712948 - RNA, 19 nt, Homo sapiens
  misc_RNA (1)...(19): siRNA sense strand
caaccugacauggcauaaa

SEQ ID NO: 1712949 - RNA, 19 nt, Homo sapiens
  misc_RNA (1)...(19): siRNA sense strand
aagagaggauuugcacaug

SEQ ID NO: 1712950 - RNA, 19 nt, Homo sapiens
  misc_RNA (1)...(19): siRNA sense strand
acacuacgcaccacaguca

SEQ ID NO: 1712951 - RNA, 19 nt, Homo sapiens
  misc_RNA (1)...(19): siRNA sense strand
cauaauacccugaguuuuc

SEQ ID NO: 1712952 - RNA, 19 nt, Homo sapiens
  misc_RNA (1)...(19): siRNA sense strand
uccauaauacccugaguuu

SEQ ID NO: 1712953 - RNA, 19 nt, Homo sapiens
  misc_RNA (1)...(19): siRNA sense strand
ccauuccugugaucauuuc

SEQ ID NO: 1712954 - RNA, 19 nt, Homo sapiens
  misc_RNA (1)...(19): siRNA sense strand
acauugaagugccauugau

SEQ ID NO: 1712955 - RNA, 19 nt, Homo sapiens
  misc_RNA (1)...(19): siRNA sense strand
gcacacccuuaaccaccau

SEQ ID NO: 1712956 - RNA, 19 nt, Homo sapiens
  misc_RNA (1)...(19): siRNA sense strand
ucucauacccgcaaauuuu

SEQ ID NO: 1712957 - RNA, 19 nt, Homo sapiens
  misc_RNA (1)...(19): siRNA sense strand
agacugacaaucccgugua

SEQ ID NO: 1712958 - RNA, 19 nt, Homo sapiens
  misc_RNA (1)...(19): siRNA sense strand
ccugacauuugcccaugaa

SEQ ID NO: 1712959 - RNA, 19 nt, Homo sapiens
  misc_RNA (1)...(19): siRNA sense strand
gaccacucacuuacucgua

SEQ ID NO: 1712960 - RNA, 19 nt, Homo sapiens
  misc_RNA (1)...(19): siRNA sense strand
caucucauacccgcaaauu

SEQ ID NO: 1712961 - RNA, 19 nt, Homo sapiens
  misc_RNA (1)...(19): siRNA sense strand
caaugacacccacauagag

SEQ ID NO: 1712962 - RNA, 19 nt, Homo sapiens
  misc_RNA (1)...(19): siRNA sense strand
gccaaugacacccacauag

SEQ ID NO: 1712963 - RNA, 19 nt, Homo sapiens
  misc_RNA (1)...(19): siRNA sense strand
caugaaggccagcaauaca

SEQ ID NO: 1712964 - RNA, 19 nt, Homo sapiens
  misc_RNA (1)...(19): siRNA sense strand
gcgcuuguacguguuggua

SEQ ID NO: 1712965 - RNA, 19 nt, Homo sapiens
  misc_RNA (1)...(19): siRNA sense strand
gucaaccucugggguauua

SEQ ID NO: 1712966 - RNA, 19 nt, Homo sapiens
  misc_RNA (1)...(19): siRNA sense strand
gacggucccaggagaagaa

SEQ ID NO: 1712967 - RNA, 19 nt, Homo sapiens
  misc_RNA (1)...(19): siRNA sense strand
ugagaacuacauugaagug

SEQ ID NO: 1712968 - RNA, 19 nt, Homo sapiens
  misc_RNA (1)...(19): siRNA sense strand
aucaagacuuucaauccua

SEQ ID NO: 1712969 - RNA, 19 nt, Homo sapiens
  misc_RNA (1)...(19): siRNA sense strand
gauguggcccuggaagaug

SEQ ID NO: 1712970 - RNA, 19 nt, Homo sapiens
  misc_RNA (1)...(19): siRNA sense strand
gaagccuccuccacguucu

SEQ ID NO: 1712971 - RNA, 19 nt, Homo sapiens
  misc_RNA (1)...(19): siRNA sense strand
cagcaauacaacaucacua

SEQ ID NO: 1712972 - RNA, 19 nt, Homo sapiens
  misc_RNA (1)...(19): siRNA sense strand
cccaugaaggccagcaaua

SEQ ID NO: 1712973 - RNA, 19 nt, Homo sapiens
  misc_RNA (1)...(19): siRNA sense strand
gaaggccagcaauacaaca

SEQ ID NO: 1712974 - RNA, 19 nt, Homo sapiens
  misc_RNA (1)...(19): siRNA sense strand
aggauuugcacauggauuu

SEQ ID NO: 1712975 - RNA, 19 nt, Homo sapiens
  misc_RNA (1)...(19): siRNA sense strand
ggccacgccaggaauauuc

SEQ ID NO: 1712976 - RNA, 19 nt, Homo sapiens
  misc_RNA (1)...(19): siRNA sense strand
aguaugcccugaccugagu

SEQ ID NO: 1712977 - RNA, 19 nt, Homo sapiens
  misc_RNA (1)...(19): siRNA sense strand
gaggauuugcacauggauu

SEQ ID NO: 1712978 - RNA, 19 nt, Homo sapiens
  misc_RNA (1)...(19): siRNA sense strand
cauugaagugccauugauu

SEQ ID NO: 1712979 - RNA, 19 nt, Homo sapiens
  misc_RNA (1)...(19): siRNA sense strand
caggugcccuacugguugu

SEQ ID NO: 1712980 - RNA, 19 nt, Homo sapiens
  misc_RNA (1)...(19): siRNA sense strand
cacuaggaguauugagcua

SEQ ID NO: 1712981 - RNA, 19 nt, Homo sapiens
  misc_RNA (1)...(19): siRNA sense strand
uggauaaagacaaugagaa

SEQ ID NO: 1712982 - RNA, 19 nt, Homo sapiens
  misc_RNA (1)...(19): siRNA sense strand
ccacucacuuacucguaca

SEQ ID NO: 1712983 - RNA, 19 nt, Homo sapiens
  misc_RNA (1)...(19): siRNA sense strand
caucaucaagacuuucaau

SEQ ID NO: 1712984 - RNA, 19 nt, Homo sapiens
  misc_RNA (1)...(19): siRNA sense strand
aaccugacauggcauaaaa

SEQ ID NO: 1712985 - RNA, 19 nt, Homo sapiens
  misc_RNA (1)...(19): siRNA sense strand
ugagcuacgcaucaagaaa

SEQ ID NO: 1712986 - RNA, 19 nt, Homo sapiens
  misc_RNA (1)...(19): siRNA sense strand
gaagauucaaugguacaag

SEQ ID NO: 1712987 - RNA, 19 nt, Homo sapiens
  misc_RNA (1)...(19): siRNA sense strand
gggaauauggaugcacaga

SEQ ID NO: 1712988 - RNA, 19 nt, Homo sapiens
  misc_RNA (1)...(19): siRNA sense strand
cacuuucacuggccuucuu

SEQ ID NO: 1712989 - RNA, 19 nt, Homo sapiens
  misc_RNA (1)...(19): siRNA sense strand
ugugguggacggccaauga

SEQ ID NO: 1712990 - RNA, 19 nt, Homo sapiens
  misc_RNA (1)...(19): siRNA sense strand
ugccagaagcugccgguuu

SEQ ID NO: 1712991 - RNA, 19 nt, Homo sapiens
  misc_RNA (1)...(19): siRNA sense strand
ggacuuaucuuuguucauu

SEQ ID NO: 1712992 - RNA, 19 nt, Homo sapiens
  misc_RNA (1)...(19): siRNA sense strand
guauaaaggugcacaugua

SEQ ID NO: 1712993 - RNA, 19 nt, Homo sapiens
  misc_RNA (1)...(19): siRNA sense strand
gcaagcagguugguguuua

SEQ ID NO: 1712994 - RNA, 19 nt, Homo sapiens
  misc_RNA (1)...(19): siRNA sense strand
ucagugaacuugcuaauga

SEQ ID NO: 1712995 - RNA, 19 nt, Homo sapiens
  misc_RNA (1)...(19): siRNA sense strand
gaaaguggcagacaaaguu

SEQ ID NO: 1712996 - RNA, 19 nt, Homo sapiens
  misc_RNA (1)...(19): siRNA sense strand
cauggaaacccaauuauua

SEQ ID NO: 1712997 - RNA, 19 nt, Homo sapiens
  misc_RNA (1)...(19): siRNA sense strand
gcacaccacugcuuagaga

SEQ ID NO: 1712998 - RNA, 19 nt, Homo sapiens
  misc_RNA (1)...(19): siRNA sense strand
ccaaaucccuggaaagaga

SEQ ID NO: 1712999 - RNA, 19 nt, Homo sapiens
  misc_RNA (1)...(19): siRNA sense strand
ggaaaauucuaccagauua

SEQ ID NO: 1713000 - RNA, 19 nt, Homo sapiens
  misc_RNA (1)...(19): siRNA sense strand
gauagcaggcuuugaagua

SEQ ID NO: 1713001 - RNA, 19 nt, Homo sapiens
  misc_RNA (1)...(19): siRNA sense strand
gaauauacucgcccuauga

SEQ ID NO: 1713002 - RNA, 19 nt, Homo sapiens
  misc_RNA (1)...(19): siRNA sense strand
ggaacaggaucuuuguaga

SEQ ID NO: 1713003 - RNA, 19 nt, Homo sapiens
  misc_RNA (1)...(19): siRNA sense strand
guaaauuguagcccuauua

SEQ ID NO: 1713004 - RNA, 19 nt, Homo sapiens
  misc_RNA (1)...(19): siRNA sense strand
gcagacaaaguuauaauug

SEQ ID NO: 1713005 - RNA, 19 nt, Homo sapiens
  misc_RNA (1)...(19): siRNA sense strand
uagagcagcuuguguaugu

SEQ ID NO: 1713006 - RNA, 19 nt, Homo sapiens
  misc_RNA (1)...(19): siRNA sense strand
gaacagcgugucccacaaa

SEQ ID NO: 1713007 - RNA, 19 nt, Homo sapiens
  misc_RNA (1)...(19): siRNA sense strand
caaauuaggacaaacaguu

SEQ ID NO: 1713008 - RNA, 19 nt, Homo sapiens
  misc_RNA (1)...(19): siRNA sense strand
cagaugaagugguucuaaa

SEQ ID NO: 1713009 - RNA, 19 nt, Homo sapiens
  misc_RNA (1)...(19): siRNA sense strand
gcugaacauuucuacagua

SEQ ID NO: 1713010 - RNA, 19 nt, Homo sapiens
  misc_RNA (1)...(19): siRNA sense strand
gggaauauaugaggauaau

SEQ ID NO: 1713011 - RNA, 19 nt, Homo sapiens
  misc_RNA (1)...(19): siRNA sense strand
aaacaacuuugcaggugua

SEQ ID NO: 1713012 - RNA, 19 nt, Homo sapiens
  misc_RNA (1)...(19): siRNA sense strand
caauggacauggagugcua

SEQ ID NO: 1713013 - RNA, 19 nt, Homo sapiens
  misc_RNA (1)...(19): siRNA sense strand
gaggacaauucauagagaa

SEQ ID NO: 1713014 - RNA, 19 nt, Homo sapiens
  misc_RNA (1)...(19): siRNA sense strand
ggacgaggccuuauugaag

SEQ ID NO: 1713015 - RNA, 19 nt, Homo sapiens
  misc_RNA (1)...(19): siRNA sense strand
gaagaggacaauucauaga

SEQ ID NO: 1713016 - RNA, 19 nt, Homo sapiens
  misc_RNA (1)...(19): siRNA sense strand
uggauuaccucaaauagug

SEQ ID NO: 1713017 - RNA, 19 nt, Homo sapiens
  misc_RNA (1)...(19): siRNA sense strand
acaguaacccugcaagaua

SEQ ID NO: 1713018 - RNA, 19 nt, Homo sapiens
  misc_RNA (1)...(19): siRNA sense strand
ugacaaaucugcacaacac

SEQ ID NO: 1713019 - RNA, 19 nt, Homo sapiens
  misc_RNA (1)...(19): siRNA sense strand
ugaagaugcuuauguugga

SEQ ID NO: 1713020 - RNA, 19 nt, Homo sapiens
  misc_RNA (1)...(19): siRNA sense strand
gaacauuucuacaguaacc

SEQ ID NO: 1713021 - RNA, 19 nt, Homo sapiens
  misc_RNA (1)...(19): siRNA sense strand
gacaaggaguaauagaaga

SEQ ID NO: 1713022 - RNA, 19 nt, Homo sapiens
  misc_RNA (1)...(19): siRNA sense strand
guuuaacccugaugacaaa

SEQ ID NO: 1713023 - RNA, 19 nt, Homo sapiens
  misc_RNA (1)...(19): siRNA sense strand
caccacugcuuagagauua

SEQ ID NO: 1713024 - RNA, 19 nt, Homo sapiens
  misc_RNA (1)...(19): siRNA sense strand
aggagaaacugccagauga

SEQ ID NO: 1713025 - RNA, 19 nt, Homo sapiens
  misc_RNA (1)...(19): siRNA sense strand
ggacaaggaguaauagaag

SEQ ID NO: 1713026 - RNA, 19 nt, Homo sapiens
  misc_RNA (1)...(19): siRNA sense strand
aaagggacaaggaguaaua

SEQ ID NO: 1713027 - RNA, 19 nt, Homo sapiens
  misc_RNA (1)...(19): siRNA sense strand
aggaggaguuuacaucuuu

SEQ ID NO: 1713028 - RNA, 19 nt, Homo sapiens
  misc_RNA (1)...(19): siRNA sense strand
ggaaaucaaggaggaguuu

SEQ ID NO: 1713029 - RNA, 19 nt, Homo sapiens
  misc_RNA (1)...(19): siRNA sense strand
aauagugacccaacaauaa

SEQ ID NO: 1713030 - RNA, 19 nt, Homo sapiens
  misc_RNA (1)...(19): siRNA sense strand
guguauggauuaccucaaa

SEQ ID NO: 1713031 - RNA, 19 nt, Homo sapiens
  misc_RNA (1)...(19): siRNA sense strand
uggaaacgauuauauaugg

SEQ ID NO: 1713032 - RNA, 19 nt, Homo sapiens
  misc_RNA (1)...(19): siRNA sense strand
ggaaacgauuauauaugga

SEQ ID NO: 1713033 - RNA, 19 nt, Homo sapiens
  misc_RNA (1)...(19): siRNA sense strand
ggaaggcucugaagaugcu

SEQ ID NO: 1713034 - RNA, 19 nt, Homo sapiens
  misc_RNA (1)...(19): siRNA sense strand
caguaacccugcaagauau

SEQ ID NO: 1713035 - RNA, 19 nt, Homo sapiens
  misc_RNA (1)...(19): siRNA sense strand
gaaacugccagaugaagug

SEQ ID NO: 1713036 - RNA, 19 nt, Homo sapiens
  misc_RNA (1)...(19): siRNA sense strand
gacauggagugcuagaaga

SEQ ID NO: 1713037 - RNA, 19 nt, Homo sapiens
  misc_RNA (1)...(19): siRNA sense strand
aggaauauauguccaugaa

SEQ ID NO: 1713038 - RNA, 19 nt, Homo sapiens
  misc_RNA (1)...(19): siRNA sense strand
gaacaggaucuuuguagag

SEQ ID NO: 1713039 - RNA, 19 nt, Homo sapiens
  misc_RNA (1)...(19): siRNA sense strand
gugcaagagugucuggaaa

SEQ ID NO: 1713040 - RNA, 19 nt, Homo sapiens
  misc_RNA (1)...(19): siRNA sense strand
caagcagguugguguuuau

SEQ ID NO: 1713041 - RNA, 19 nt, Homo sapiens
  misc_RNA (1)...(19): siRNA sense strand
gaaaucaaggaggaguuua

SEQ ID NO: 1713042 - RNA, 19 nt, Homo sapiens
  misc_RNA (1)...(19): siRNA sense strand
ggaagaggacaauucauag

SEQ ID NO: 1713043 - RNA, 19 nt, Homo sapiens
  misc_RNA (1)...(19): siRNA sense strand
uggcauggguuacuuugaa

SEQ ID NO: 1713044 - RNA, 19 nt, Homo sapiens
  misc_RNA (1)...(19): siRNA sense strand
aaucauggaaacccaauua

SEQ ID NO: 1713045 - RNA, 19 nt, Homo sapiens
  misc_RNA (1)...(19): siRNA sense strand
gagcaugucccaccaucaa

SEQ ID NO: 1713046 - RNA, 19 nt, Homo sapiens
  misc_RNA (1)...(19): siRNA sense strand
aacaguaucuucaggagaa

SEQ ID NO: 1713047 - RNA, 19 nt, Homo sapiens
  misc_RNA (1)...(19): siRNA sense strand
gagcagcuuguguauguaa

SEQ ID NO: 1713048 - RNA, 19 nt, Homo sapiens
  misc_RNA (1)...(19): siRNA sense strand
gaaaguugcaauauacaca

SEQ ID NO: 1713049 - RNA, 19 nt, Homo sapiens
  misc_RNA (1)...(19): siRNA sense strand
cugaacauuucuacaguaa

SEQ ID NO: 1713050 - RNA, 19 nt, Homo sapiens
  misc_RNA (1)...(19): siRNA sense strand
ggauuuaugugcaugaaaa

SEQ ID NO: 1713051 - RNA, 19 nt, Homo sapiens
  misc_RNA (1)...(19): siRNA sense strand
aauuguagcccuauuauug

SEQ ID NO: 1713052 - RNA, 19 nt, Homo sapiens
  misc_RNA (1)...(19): siRNA sense strand
ggacauggagugcuagaag

SEQ ID NO: 1713053 - RNA, 19 nt, Homo sapiens
  misc_RNA (1)...(19): siRNA sense strand
gcagguugguguuuauuuu

SEQ ID NO: 1713054 - RNA, 19 nt, Homo sapiens
  misc_RNA (1)...(19): siRNA sense strand
aggaagaggacaauucaua

SEQ ID NO: 1713055 - RNA, 19 nt, Homo sapiens
  misc_RNA (1)...(19): siRNA sense strand
ggaggaguuuacaucuuug

SEQ ID NO: 1713056 - RNA, 19 nt, Homo sapiens
  misc_RNA (1)...(19): siRNA sense strand
guauggauuaccucaaaua

SEQ ID NO: 1713057 - RNA, 19 nt, Homo sapiens
  misc_RNA (1)...(19): siRNA sense strand
cauaccaacuucguagaaa

SEQ ID NO: 1713058 - RNA, 19 nt, Homo sapiens
  misc_RNA (1)...(19): siRNA sense strand
ggagaaacugccagaugaa

SEQ ID NO: 1713059 - RNA, 19 nt, Homo sapiens
  misc_RNA (1)...(19): siRNA sense strand
gcaaugcauuagcaggaau

SEQ ID NO: 1713060 - RNA, 19 nt, Homo sapiens
  misc_RNA (1)...(19): siRNA sense strand
gauggacgaggccuuauug

SEQ ID NO: 1713061 - RNA, 19 nt, Homo sapiens
  misc_RNA (1)...(19): siRNA sense strand
aaauagugacccaacaaua

SEQ ID NO: 1713062 - RNA, 19 nt, Homo sapiens
  misc_RNA (1)...(19): siRNA sense strand
caaugcacaccacugcuua

SEQ ID NO: 1713063 - RNA, 19 nt, Homo sapiens
  misc_RNA (1)...(19): siRNA sense strand
ugaauauacucgcccuaug

SEQ ID NO: 1713064 - RNA, 19 nt, Homo sapiens
  misc_RNA (1)...(19): siRNA sense strand
gggacaaggaguaauagaa

SEQ ID NO: 1713065 - RNA, 19 nt, Homo sapiens
  misc_RNA (1)...(19): siRNA sense strand
cuacagugguucgauguga

SEQ ID NO: 1713066 - RNA, 19 nt, Homo sapiens
  misc_RNA (1)...(19): siRNA sense strand
uagcaggcuuugaaguaaa

SEQ ID NO: 1713067 - RNA, 19 nt, Homo sapiens
  misc_RNA (1)...(19): siRNA sense strand
uaggauagcaggcuuugaa

SEQ ID NO: 1713068 - RNA, 19 nt, Homo sapiens
  misc_RNA (1)...(19): siRNA sense strand
uagcugggauuuggguuaa

SEQ ID NO: 1713069 - RNA, 19 nt, Homo sapiens
  misc_RNA (1)...(19): siRNA sense strand
uauaaaggugcacauguaa

SEQ ID NO: 1713070 - RNA, 19 nt, Homo sapiens
  misc_RNA (1)...(19): siRNA sense strand
ggcauggguuacuuugaaa

SEQ ID NO: 1713071 - RNA, 19 nt, Homo sapiens
  misc_RNA (1)...(19): siRNA sense strand
ggaaaguggcagacaaagu

SEQ ID NO: 1713072 - RNA, 19 nt, Homo sapiens
  misc_RNA (1)...(19): siRNA sense strand
gaagaugcuuauguuggau

SEQ ID NO: 1713073 - RNA, 19 nt, Homo sapiens
  misc_RNA (1)...(19): siRNA sense strand
cagcgugucccacaaagaa

SEQ ID NO: 1713074 - RNA, 19 nt, Homo sapiens
  misc_RNA (1)...(19): siRNA sense strand
agaggacaauucauagaga

SEQ ID NO: 1713075 - RNA, 19 nt, Homo sapiens
  misc_RNA (1)...(19): siRNA sense strand
gcagacuggaggaauauau

SEQ ID NO: 1713076 - RNA, 19 nt, Homo sapiens
  misc_RNA (1)...(19): siRNA sense strand
ggauauaugacaauaaggu

SEQ ID NO: 1713077 - RNA, 19 nt, Homo sapiens
  misc_RNA (1)...(19): siRNA sense strand
gcucugaagaugcuuaugu

SEQ ID NO: 1713078 - RNA, 19 nt, Homo sapiens
  misc_RNA (1)...(19): siRNA sense strand
gcuagaagacaaugauauc

SEQ ID NO: 1713079 - RNA, 19 nt, Homo sapiens
  misc_RNA (1)...(19): siRNA sense strand
ggugauggacgaggccuua

SEQ ID NO: 1713080 - RNA, 19 nt, Homo sapiens
  misc_RNA (1)...(19): siRNA sense strand
caacuuugcagguguaugg

SEQ ID NO: 1713081 - RNA, 19 nt, Homo sapiens
  misc_RNA (1)...(19): siRNA sense strand
cagggaauauaugaggaua

SEQ ID NO: 1713082 - RNA, 19 nt, Homo sapiens
  misc_RNA (1)...(19): siRNA sense strand
uacaguugguucugcagua

SEQ ID NO: 1713083 - RNA, 19 nt, Homo sapiens
  misc_RNA (1)...(19): siRNA sense strand
agaagaaaccggauacaca

SEQ ID NO: 1713084 - RNA, 19 nt, Homo sapiens
  misc_RNA (1)...(19): siRNA sense strand
gaaaagggacaaggaguaa

SEQ ID NO: 1713085 - RNA, 19 nt, Homo sapiens
  misc_RNA (1)...(19): siRNA sense strand
auagcaggcuuugaaguaa

SEQ ID NO: 1713086 - RNA, 19 nt, Homo sapiens
  misc_RNA (1)...(19): siRNA sense strand
gcaauauacacagaaauag

SEQ ID NO: 1713087 - RNA, 19 nt, Homo sapiens
  misc_RNA (1)...(19): siRNA sense strand
guugcaauauacacagaaa

SEQ ID NO: 1713088 - RNA, 19 nt, Homo sapiens
  misc_RNA (1)...(19): siRNA sense strand
ggaauauauguccaugaaa

SEQ ID NO: 1713089 - RNA, 19 nt, Homo sapiens
  misc_RNA (1)...(19): siRNA sense strand
gcauuagcaggaauucaaa

SEQ ID NO: 1713090 - RNA, 19 nt, Homo sapiens
  misc_RNA (1)...(19): siRNA sense strand
aaaggaagaggacaauuca

SEQ ID NO: 1713091 - RNA, 19 nt, Homo sapiens
  misc_RNA (1)...(19): siRNA sense strand
ggacuuaucuuuguucauu

SEQ ID NO: 1713092 - RNA, 19 nt, Homo sapiens
  misc_RNA (1)...(19): siRNA sense strand
guauaaaggugcacaugua

SEQ ID NO: 1713093 - RNA, 19 nt, Homo sapiens
  misc_RNA (1)...(19): siRNA sense strand
gcaagcagguugguguuua

SEQ ID NO: 1713094 - RNA, 19 nt, Homo sapiens
  misc_RNA (1)...(19): siRNA sense strand
ucagugaacuugcuaauga

SEQ ID NO: 1713095 - RNA, 19 nt, Homo sapiens
  misc_RNA (1)...(19): siRNA sense strand
gaaaguggcagacaaaguu

SEQ ID NO: 1713096 - RNA, 19 nt, Homo sapiens
  misc_RNA (1)...(19): siRNA sense strand
cauggaaacccaauuauua

SEQ ID NO: 1713097 - RNA, 19 nt, Homo sapiens
  misc_RNA (1)...(19): siRNA sense strand
gcacaccacugcuuagaga

SEQ ID NO: 1713098 - RNA, 19 nt, Homo sapiens
  misc_RNA (1)...(19): siRNA sense strand
ccaaaucccuggaaagaga

SEQ ID NO: 1713099 - RNA, 19 nt, Homo sapiens
  misc_RNA (1)...(19): siRNA sense strand
ggaaaauucuaccagauua

SEQ ID NO: 1713100 - RNA, 19 nt, Homo sapiens
  misc_RNA (1)...(19): siRNA sense strand
gauagcaggcuuugaagua

SEQ ID NO: 1713101 - RNA, 19 nt, Homo sapiens
  misc_RNA (1)...(19): siRNA sense strand
gaauauacucgcccuauga

SEQ ID NO: 1713102 - RNA, 19 nt, Homo sapiens
  misc_RNA (1)...(19): siRNA sense strand
ggaacaggaucuuuguaga

SEQ ID NO: 1713103 - RNA, 19 nt, Homo sapiens
  misc_RNA (1)...(19): siRNA sense strand
guaaauuguagcccuauua

SEQ ID NO: 1713104 - RNA, 19 nt, Homo sapiens
  misc_RNA (1)...(19): siRNA sense strand
gcagacaaaguuauaauug

SEQ ID NO: 1713105 - RNA, 19 nt, Homo sapiens
  misc_RNA (1)...(19): siRNA sense strand
uagagcagcuuguguaugu

SEQ ID NO: 1713106 - RNA, 19 nt, Homo sapiens
  misc_RNA (1)...(19): siRNA sense strand
gaacagcgugucccacaaa

SEQ ID NO: 1713107 - RNA, 19 nt, Homo sapiens
  misc_RNA (1)...(19): siRNA sense strand
caaauuaggacaaacaguu

SEQ ID NO: 1713108 - RNA, 19 nt, Homo sapiens
  misc_RNA (1)...(19): siRNA sense strand
cagaugaagugguucuaaa

SEQ ID NO: 1713109 - RNA, 19 nt, Homo sapiens
  misc_RNA (1)...(19): siRNA sense strand
gcugaacauuucuacagua

SEQ ID NO: 1713110 - RNA, 19 nt, Homo sapiens
  misc_RNA (1)...(19): siRNA sense strand
gggaauauaugaggauaau

SEQ ID NO: 1713111 - RNA, 19 nt, Homo sapiens
  misc_RNA (1)...(19): siRNA sense strand
aaacaacuuugcaggugua

SEQ ID NO: 1713112 - RNA, 19 nt, Homo sapiens
  misc_RNA (1)...(19): siRNA sense strand
caauggacauggagugcua

SEQ ID NO: 1713113 - RNA, 19 nt, Homo sapiens
  misc_RNA (1)...(19): siRNA sense strand
gaggacaauucauagagaa

SEQ ID NO: 1713114 - RNA, 19 nt, Homo sapiens
  misc_RNA (1)...(19): siRNA sense strand
ggacgaggccuuauugaag

SEQ ID NO: 1713115 - RNA, 19 nt, Homo sapiens
  misc_RNA (1)...(19): siRNA sense strand
gaagaggacaauucauaga

SEQ ID NO: 1713116 - RNA, 19 nt, Homo sapiens
  misc_RNA (1)...(19): siRNA sense strand
uggauuaccucaaauagug

SEQ ID NO: 1713117 - RNA, 19 nt, Homo sapiens
  misc_RNA (1)...(19): siRNA sense strand
acaguaacccugcaagaua

SEQ ID NO: 1713118 - RNA, 19 nt, Homo sapiens
  misc_RNA (1)...(19): siRNA sense strand
ugacaaaucugcacaacac

SEQ ID NO: 1713119 - RNA, 19 nt, Homo sapiens
  misc_RNA (1)...(19): siRNA sense strand
ugaagaugcuuauguugga

SEQ ID NO: 1713120 - RNA, 19 nt, Homo sapiens
  misc_RNA (1)...(19): siRNA sense strand
gaacauuucuacaguaacc

SEQ ID NO: 1713121 - RNA, 19 nt, Homo sapiens
  misc_RNA (1)...(19): siRNA sense strand
gacaaggaguaauagaaga

SEQ ID NO: 1713122 - RNA, 19 nt, Homo sapiens
  misc_RNA (1)...(19): siRNA sense strand
guuuaacccugaugacaaa

SEQ ID NO: 1713123 - RNA, 19 nt, Homo sapiens
  misc_RNA (1)...(19): siRNA sense strand
caccacugcuuagagauua

SEQ ID NO: 1713124 - RNA, 19 nt, Homo sapiens
  misc_RNA (1)...(19): siRNA sense strand
aggagaaacugccagauga

SEQ ID NO: 1713125 - RNA, 19 nt, Homo sapiens
  misc_RNA (1)...(19): siRNA sense strand
ggacaaggaguaauagaag

SEQ ID NO: 1713126 - RNA, 19 nt, Homo sapiens
  misc_RNA (1)...(19): siRNA sense strand
aaagggacaaggaguaaua

SEQ ID NO: 1713127 - RNA, 19 nt, Homo sapiens
  misc_RNA (1)...(19): siRNA sense strand
aggaggaguuuacaucuuu

SEQ ID NO: 1713128 - RNA, 19 nt, Homo sapiens
  misc_RNA (1)...(19): siRNA sense strand
ggaaaucaaggaggaguuu

SEQ ID NO: 1713129 - RNA, 19 nt, Homo sapiens
  misc_RNA (1)...(19): siRNA sense strand
aauagugacccaacaauaa

SEQ ID NO: 1713130 - RNA, 19 nt, Homo sapiens
  misc_RNA (1)...(19): siRNA sense strand
guguauggauuaccucaaa

SEQ ID NO: 1713131 - RNA, 19 nt, Homo sapiens
  misc_RNA (1)...(19): siRNA sense strand
uggaaacgauuauauaugg

SEQ ID NO: 1713132 - RNA, 19 nt, Homo sapiens
  misc_RNA (1)...(19): siRNA sense strand
ggaaacgauuauauaugga

SEQ ID NO: 1713133 - RNA, 19 nt, Homo sapiens
  misc_RNA (1)...(19): siRNA sense strand
ggaaggcucugaagaugcu

SEQ ID NO: 1713134 - RNA, 19 nt, Homo sapiens
  misc_RNA (1)...(19): siRNA sense strand
caguaacccugcaagauau

SEQ ID NO: 1713135 - RNA, 19 nt, Homo sapiens
  misc_RNA (1)...(19): siRNA sense strand
gaaacugccagaugaagug

SEQ ID NO: 1713136 - RNA, 19 nt, Homo sapiens
  misc_RNA (1)...(19): siRNA sense strand
gacauggagugcuagaaga

SEQ ID NO: 1713137 - RNA, 19 nt, Homo sapiens
  misc_RNA (1)...(19): siRNA sense strand
aggaauauauguccaugaa

SEQ ID NO: 1713138 - RNA, 19 nt, Homo sapiens
  misc_RNA (1)...(19): siRNA sense strand
gaacaggaucuuuguagag

SEQ ID NO: 1713139 - RNA, 19 nt, Homo sapiens
  misc_RNA (1)...(19): siRNA sense strand
gugcaagagugucuggaaa

SEQ ID NO: 1713140 - RNA, 19 nt, Homo sapiens
  misc_RNA (1)...(19): siRNA sense strand
caagcagguugguguuuau

SEQ ID NO: 1713141 - RNA, 19 nt, Homo sapiens
  misc_RNA (1)...(19): siRNA sense strand
gaaaucaaggaggaguuua

SEQ ID NO: 1713142 - RNA, 19 nt, Homo sapiens
  misc_RNA (1)...(19): siRNA sense strand
ggaagaggacaauucauag

SEQ ID NO: 1713143 - RNA, 19 nt, Homo sapiens
  misc_RNA (1)...(19): siRNA sense strand
uggcauggguuacuuugaa

SEQ ID NO: 1713144 - RNA, 19 nt, Homo sapiens
  misc_RNA (1)...(19): siRNA sense strand
aaucauggaaacccaauua

SEQ ID NO: 1713145 - RNA, 19 nt, Homo sapiens
  misc_RNA (1)...(19): siRNA sense strand
gagcaugucccaccaucaa

SEQ ID NO: 1713146 - RNA, 19 nt, Homo sapiens
  misc_RNA (1)...(19): siRNA sense strand
aacaguaucuucaggagaa

SEQ ID NO: 1713147 - RNA, 19 nt, Homo sapiens
  misc_RNA (1)...(19): siRNA sense strand
gagcagcuuguguauguaa

SEQ ID NO: 1713148 - RNA, 19 nt, Homo sapiens
  misc_RNA (1)...(19): siRNA sense strand
gaaaguugcaauauacaca

SEQ ID NO: 1713149 - RNA, 19 nt, Homo sapiens
  misc_RNA (1)...(19): siRNA sense strand
cugaacauuucuacaguaa

SEQ ID NO: 1713150 - RNA, 19 nt, Homo sapiens
  misc_RNA (1)...(19): siRNA sense strand
ggauuuaugugcaugaaaa

SEQ ID NO: 1713151 - RNA, 19 nt, Homo sapiens
  misc_RNA (1)...(19): siRNA sense strand
aauuguagcccuauuauug

SEQ ID NO: 1713152 - RNA, 19 nt, Homo sapiens
  misc_RNA (1)...(19): siRNA sense strand
ggacauggagugcuagaag

SEQ ID NO: 1713153 - RNA, 19 nt, Homo sapiens
  misc_RNA (1)...(19): siRNA sense strand
gcagguugguguuuauuuu

SEQ ID NO: 1713154 - RNA, 19 nt, Homo sapiens
  misc_RNA (1)...(19): siRNA sense strand
aggaagaggacaauucaua

SEQ ID NO: 1713155 - RNA, 19 nt, Homo sapiens
  misc_RNA (1)...(19): siRNA sense strand
ggaggaguuuacaucuuug

SEQ ID NO: 1713156 - RNA, 19 nt, Homo sapiens
  misc_RNA (1)...(19): siRNA sense strand
guauggauuaccucaaaua

SEQ ID NO: 1713157 - RNA, 19 nt, Homo sapiens
  misc_RNA (1)...(19): siRNA sense strand
cauaccaacuucguagaaa

SEQ ID NO: 1713158 - RNA, 19 nt, Homo sapiens
  misc_RNA (1)...(19): siRNA sense strand
ggagaaacugccagaugaa

SEQ ID NO: 1713159 - RNA, 19 nt, Homo sapiens
  misc_RNA (1)...(19): siRNA sense strand
gcaaugcauuagcaggaau

SEQ ID NO: 1713160 - RNA, 19 nt, Homo sapiens
  misc_RNA (1)...(19): siRNA sense strand
gauggacgaggccuuauug

SEQ ID NO: 1713161 - RNA, 19 nt, Homo sapiens
  misc_RNA (1)...(19): siRNA sense strand
aaauagugacccaacaaua

SEQ ID NO: 1713162 - RNA, 19 nt, Homo sapiens
  misc_RNA (1)...(19): siRNA sense strand
caaugcacaccacugcuua

SEQ ID NO: 1713163 - RNA, 19 nt, Homo sapiens
  misc_RNA (1)...(19): siRNA sense strand
ugaauauacucgcccuaug

SEQ ID NO: 1713164 - RNA, 19 nt, Homo sapiens
  misc_RNA (1)...(19): siRNA sense strand
gggacaaggaguaauagaa

SEQ ID NO: 1713165 - RNA, 19 nt, Homo sapiens
  misc_RNA (1)...(19): siRNA sense strand
cuacagugguucgauguga

SEQ ID NO: 1713166 - RNA, 19 nt, Homo sapiens
  misc_RNA (1)...(19): siRNA sense strand
uagcaggcuuugaaguaaa

SEQ ID NO: 1713167 - RNA, 19 nt, Homo sapiens
  misc_RNA (1)...(19): siRNA sense strand
uaggauagcaggcuuugaa

SEQ ID NO: 1713168 - RNA, 19 nt, Homo sapiens
  misc_RNA (1)...(19): siRNA sense strand
uagcugggauuuggguuaa

SEQ ID NO: 1713169 - RNA, 19 nt, Homo sapiens
  misc_RNA (1)...(19): siRNA sense strand
uauaaaggugcacauguaa

SEQ ID NO: 1713170 - RNA, 19 nt, Homo sapiens
  misc_RNA (1)...(19): siRNA sense strand
ggcauggguuacuuugaaa

SEQ ID NO: 1713171 - RNA, 19 nt, Homo sapiens
  misc_RNA (1)...(19): siRNA sense strand
ggaaaguggcagacaaagu

SEQ ID NO: 1713172 - RNA, 19 nt, Homo sapiens
  misc_RNA (1)...(19): siRNA sense strand
gaagaugcuuauguuggau

SEQ ID NO: 1713173 - RNA, 19 nt, Homo sapiens
  misc_RNA (1)...(19): siRNA sense strand
cagcgugucccacaaagaa

SEQ ID NO: 1713174 - RNA, 19 nt, Homo sapiens
  misc_RNA (1)...(19): siRNA sense strand
agaggacaauucauagaga

SEQ ID NO: 1713175 - RNA, 19 nt, Homo sapiens
  misc_RNA (1)...(19): siRNA sense strand
gcagacuggaggaauauau

SEQ ID NO: 1713176 - RNA, 19 nt, Homo sapiens
  misc_RNA (1)...(19): siRNA sense strand
ggauauaugacaauaaggu

SEQ ID NO: 1713177 - RNA, 19 nt, Homo sapiens
  misc_RNA (1)...(19): siRNA sense strand
gcucugaagaugcuuaugu

SEQ ID NO: 1713178 - RNA, 19 nt, Homo sapiens
  misc_RNA (1)...(19): siRNA sense strand
gcuagaagacaaugauauc

SEQ ID NO: 1713179 - RNA, 19 nt, Homo sapiens
  misc_RNA (1)...(19): siRNA sense strand
ggugauggacgaggccuua

SEQ ID NO: 1713180 - RNA, 19 nt, Homo sapiens
  misc_RNA (1)...(19): siRNA sense strand
caacuuugcagguguaugg

SEQ ID NO: 1713181 - RNA, 19 nt, Homo sapiens
  misc_RNA (1)...(19): siRNA sense strand
cagggaauauaugaggaua

SEQ ID NO: 1713182 - RNA, 19 nt, Homo sapiens
  misc_RNA (1)...(19): siRNA sense strand
uacaguugguucugcagua

SEQ ID NO: 1713183 - RNA, 19 nt, Homo sapiens
  misc_RNA (1)...(19): siRNA sense strand
agaagaaaccggauacaca

SEQ ID NO: 1713184 - RNA, 19 nt, Homo sapiens
  misc_RNA (1)...(19): siRNA sense strand
gaaaagggacaaggaguaa

SEQ ID NO: 1713185 - RNA, 19 nt, Homo sapiens
  misc_RNA (1)...(19): siRNA sense strand
auagcaggcuuugaaguaa

SEQ ID NO: 1713186 - RNA, 19 nt, Homo sapiens
  misc_RNA (1)...(19): siRNA sense strand
gcaauauacacagaaauag

SEQ ID NO: 1713187 - RNA, 19 nt, Homo sapiens
  misc_RNA (1)...(19): siRNA sense strand
guugcaauauacacagaaa

SEQ ID NO: 1713188 - RNA, 19 nt, Homo sapiens
  misc_RNA (1)...(19): siRNA sense strand
ggaauauauguccaugaaa

SEQ ID NO: 1713189 - RNA, 19 nt, Homo sapiens
  misc_RNA (1)...(19): siRNA sense strand
gcauuagcaggaauucaaa

SEQ ID NO: 1713190 - RNA, 19 nt, Homo sapiens
  misc_RNA (1)...(19): siRNA sense strand
aaaggaagaggacaauuca

SEQ ID NO: 1713191 - RNA, 19 nt, Homo sapiens
  misc_RNA (1)...(19): siRNA sense strand
ggacuuaucuuuguucauu

SEQ ID NO: 1713192 - RNA, 19 nt, Homo sapiens
  misc_RNA (1)...(19): siRNA sense strand
guauaaaggugcacaugua

SEQ ID NO: 1713193 - RNA, 19 nt, Homo sapiens
  misc_RNA (1)...(19): siRNA sense strand
gcaagcagguugguguuua

SEQ ID NO: 1713194 - RNA, 19 nt, Homo sapiens
  misc_RNA (1)...(19): siRNA sense strand
ucagugaacuugcuaauga

SEQ ID NO: 1713195 - RNA, 19 nt, Homo sapiens
  misc_RNA (1)...(19): siRNA sense strand
gaaaguggcagacaaaguu

SEQ ID NO: 1713196 - RNA, 19 nt, Homo sapiens
  misc_RNA (1)...(19): siRNA sense strand
cauggaaacccaauuauua

SEQ ID NO: 1713197 - RNA, 19 nt, Homo sapiens
  misc_RNA (1)...(19): siRNA sense strand
gcacaccacugcuuagaga

SEQ ID NO: 1713198 - RNA, 19 nt, Homo sapiens
  misc_RNA (1)...(19): siRNA sense strand
ccaaaucccuggaaagaga

SEQ ID NO: 1713199 - RNA, 19 nt, Homo sapiens
  misc_RNA (1)...(19): siRNA sense strand
ggaaaauucuaccagauua

SEQ ID NO: 1713200 - RNA, 19 nt, Homo sapiens
  misc_RNA (1)...(19): siRNA sense strand
gauagcaggcuuugaagua

SEQ ID NO: 1713201 - RNA, 19 nt, Homo sapiens
  misc_RNA (1)...(19): siRNA sense strand
gaauauacucgcccuauga

SEQ ID NO: 1713202 - RNA, 19 nt, Homo sapiens
  misc_RNA (1)...(19): siRNA sense strand
ggaacaggaucuuuguaga

SEQ ID NO: 1713203 - RNA, 19 nt, Homo sapiens
  misc_RNA (1)...(19): siRNA sense strand
guaaauuguagcccuauua

SEQ ID NO: 1713204 - RNA, 19 nt, Homo sapiens
  misc_RNA (1)...(19): siRNA sense strand
gcagacaaaguuauaauug

SEQ ID NO: 1713205 - RNA, 19 nt, Homo sapiens
  misc_RNA (1)...(19): siRNA sense strand
uagagcagcuuguguaugu

SEQ ID NO: 1713206 - RNA, 19 nt, Homo sapiens
  misc_RNA (1)...(19): siRNA sense strand
gaacagcgugucccacaaa

SEQ ID NO: 1713207 - RNA, 19 nt, Homo sapiens
  misc_RNA (1)...(19): siRNA sense strand
caaauuaggacaaacaguu

SEQ ID NO: 1713208 - RNA, 19 nt, Homo sapiens
  misc_RNA (1)...(19): siRNA sense strand
cagaugaagugguucuaaa

SEQ ID NO: 1713209 - RNA, 19 nt, Homo sapiens
  misc_RNA (1)...(19): siRNA sense strand
gcugaacauuucuacagua

SEQ ID NO: 1713210 - RNA, 19 nt, Homo sapiens
  misc_RNA (1)...(19): siRNA sense strand
gggaauauaugaggauaau

SEQ ID NO: 1713211 - RNA, 19 nt, Homo sapiens
  misc_RNA (1)...(19): siRNA sense strand
aaacaacuuugcaggugua

SEQ ID NO: 1713212 - RNA, 19 nt, Homo sapiens
  misc_RNA (1)...(19): siRNA sense strand
caauggacauggagugcua

SEQ ID NO: 1713213 - RNA, 19 nt, Homo sapiens
  misc_RNA (1)...(19): siRNA sense strand
gaggacaauucauagagaa

SEQ ID NO: 1713214 - RNA, 19 nt, Homo sapiens
  misc_RNA (1)...(19): siRNA sense strand
ggacgaggccuuauugaag

SEQ ID NO: 1713215 - RNA, 19 nt, Homo sapiens
  misc_RNA (1)...(19): siRNA sense strand
gaagaggacaauucauaga

SEQ ID NO: 1713216 - RNA, 19 nt, Homo sapiens
  misc_RNA (1)...(19): siRNA sense strand
uggauuaccucaaauagug

SEQ ID NO: 1713217 - RNA, 19 nt, Homo sapiens
  misc_RNA (1)...(19): siRNA sense strand
acaguaacccugcaagaua

SEQ ID NO: 1713218 - RNA, 19 nt, Homo sapiens
  misc_RNA (1)...(19): siRNA sense strand
ugacaaaucugcacaacac

SEQ ID NO: 1713219 - RNA, 19 nt, Homo sapiens
  misc_RNA (1)...(19): siRNA sense strand
ugaagaugcuuauguugga

SEQ ID NO: 1713220 - RNA, 19 nt, Homo sapiens
  misc_RNA (1)...(19): siRNA sense strand
gaacauuucuacaguaacc

SEQ ID NO: 1713221 - RNA, 19 nt, Homo sapiens
  misc_RNA (1)...(19): siRNA sense strand
gacaaggaguaauagaaga

SEQ ID NO: 1713222 - RNA, 19 nt, Homo sapiens
  misc_RNA (1)...(19): siRNA sense strand
guuuaacccugaugacaaa

SEQ ID NO: 1713223 - RNA, 19 nt, Homo sapiens
  misc_RNA (1)...(19): siRNA sense strand
caccacugcuuagagauua

SEQ ID NO: 1713224 - RNA, 19 nt, Homo sapiens
  misc_RNA (1)...(19): siRNA sense strand
aggagaaacugccagauga

SEQ ID NO: 1713225 - RNA, 19 nt, Homo sapiens
  misc_RNA (1)...(19): siRNA sense strand
ggacaaggaguaauagaag

SEQ ID NO: 1713226 - RNA, 19 nt, Homo sapiens
  misc_RNA (1)...(19): siRNA sense strand
aaagggacaaggaguaaua

SEQ ID NO: 1713227 - RNA, 19 nt, Homo sapiens
  misc_RNA (1)...(19): siRNA sense strand
aggaggaguuuacaucuuu

SEQ ID NO: 1713228 - RNA, 19 nt, Homo sapiens
  misc_RNA (1)...(19): siRNA sense strand
ggaaaucaaggaggaguuu

SEQ ID NO: 1713229 - RNA, 19 nt, Homo sapiens
  misc_RNA (1)...(19): siRNA sense strand
aauagugacccaacaauaa

SEQ ID NO: 1713230 - RNA, 19 nt, Homo sapiens
  misc_RNA (1)...(19): siRNA sense strand
guguauggauuaccucaaa

SEQ ID NO: 1713231 - RNA, 19 nt, Homo sapiens
  misc_RNA (1)...(19): siRNA sense strand
uggaaacgauuauauaugg

SEQ ID NO: 1713232 - RNA, 19 nt, Homo sapiens
  misc_RNA (1)...(19): siRNA sense strand
ggaaacgauuauauaugga

SEQ ID NO: 1713233 - RNA, 19 nt, Homo sapiens
  misc_RNA (1)...(19): siRNA sense strand
ggaaggcucugaagaugcu

SEQ ID NO: 1713234 - RNA, 19 nt, Homo sapiens
  misc_RNA (1)...(19): siRNA sense strand
caguaacccugcaagauau

SEQ ID NO: 1713235 - RNA, 19 nt, Homo sapiens
  misc_RNA (1)...(19): siRNA sense strand
gaaacugccagaugaagug

SEQ ID NO: 1713236 - RNA, 19 nt, Homo sapiens
  misc_RNA (1)...(19): siRNA sense strand
gacauggagugcuagaaga

SEQ ID NO: 1713237 - RNA, 19 nt, Homo sapiens
  misc_RNA (1)...(19): siRNA sense strand
aggaauauauguccaugaa

SEQ ID NO: 1713238 - RNA, 19 nt, Homo sapiens
  misc_RNA (1)...(19): siRNA sense strand
gaacaggaucuuuguagag

SEQ ID NO: 1713239 - RNA, 19 nt, Homo sapiens
  misc_RNA (1)...(19): siRNA sense strand
gugcaagagugucuggaaa

SEQ ID NO: 1713240 - RNA, 19 nt, Homo sapiens
  misc_RNA (1)...(19): siRNA sense strand
caagcagguugguguuuau

SEQ ID NO: 1713241 - RNA, 19 nt, Homo sapiens
  misc_RNA (1)...(19): siRNA sense strand
gaaaucaaggaggaguuua

SEQ ID NO: 1713242 - RNA, 19 nt, Homo sapiens
  misc_RNA (1)...(19): siRNA sense strand
ggaagaggacaauucauag

SEQ ID NO: 1713243 - RNA, 19 nt, Homo sapiens
  misc_RNA (1)...(19): siRNA sense strand
uggcauggguuacuuugaa

SEQ ID NO: 1713244 - RNA, 19 nt, Homo sapiens
  misc_RNA (1)...(19): siRNA sense strand
aaucauggaaacccaauua

SEQ ID NO: 1713245 - RNA, 19 nt, Homo sapiens
  misc_RNA (1)...(19): siRNA sense strand
gagcaugucccaccaucaa

SEQ ID NO: 1713246 - RNA, 19 nt, Homo sapiens
  misc_RNA (1)...(19): siRNA sense strand
aacaguaucuucaggagaa

SEQ ID NO: 1713247 - RNA, 19 nt, Homo sapiens
  misc_RNA (1)...(19): siRNA sense strand
gagcagcuuguguauguaa

SEQ ID NO: 1713248 - RNA, 19 nt, Homo sapiens
  misc_RNA (1)...(19): siRNA sense strand
gaaaguugcaauauacaca

SEQ ID NO: 1713249 - RNA, 19 nt, Homo sapiens
  misc_RNA (1)...(19): siRNA sense strand
cugaacauuucuacaguaa

SEQ ID NO: 1713250 - RNA, 19 nt, Homo sapiens
  misc_RNA (1)...(19): siRNA sense strand
ggauuuaugugcaugaaaa

SEQ ID NO: 1713251 - RNA, 19 nt, Homo sapiens
  misc_RNA (1)...(19): siRNA sense strand
aauuguagcccuauuauug

SEQ ID NO: 1713252 - RNA, 19 nt, Homo sapiens
  misc_RNA (1)...(19): siRNA sense strand
ggacauggagugcuagaag

SEQ ID NO: 1713253 - RNA, 19 nt, Homo sapiens
  misc_RNA (1)...(19): siRNA sense strand
gcagguugguguuuauuuu

SEQ ID NO: 1713254 - RNA, 19 nt, Homo sapiens
  misc_RNA (1)...(19): siRNA sense strand
aggaagaggacaauucaua

SEQ ID NO: 1713255 - RNA, 19 nt, Homo sapiens
  misc_RNA (1)...(19): siRNA sense strand
ggaggaguuuacaucuuug

SEQ ID NO: 1713256 - RNA, 19 nt, Homo sapiens
  misc_RNA (1)...(19): siRNA sense strand
guauggauuaccucaaaua

SEQ ID NO: 1713257 - RNA, 19 nt, Homo sapiens
  misc_RNA (1)...(19): siRNA sense strand
cauaccaacuucguagaaa

SEQ ID NO: 1713258 - RNA, 19 nt, Homo sapiens
  misc_RNA (1)...(19): siRNA sense strand
ggagaaacugccagaugaa

SEQ ID NO: 1713259 - RNA, 19 nt, Homo sapiens
  misc_RNA (1)...(19): siRNA sense strand
gcaaugcauuagcaggaau

SEQ ID NO: 1713260 - RNA, 19 nt, Homo sapiens
  misc_RNA (1)...(19): siRNA sense strand
gauggacgaggccuuauug

SEQ ID NO: 1713261 - RNA, 19 nt, Homo sapiens
  misc_RNA (1)...(19): siRNA sense strand
aaauagugacccaacaaua

SEQ ID NO: 1713262 - RNA, 19 nt, Homo sapiens
  misc_RNA (1)...(19): siRNA sense strand
caaugcacaccacugcuua

SEQ ID NO: 1713263 - RNA, 19 nt, Homo sapiens
  misc_RNA (1)...(19): siRNA sense strand
ugaauauacucgcccuaug

SEQ ID NO: 1713264 - RNA, 19 nt, Homo sapiens
  misc_RNA (1)...(19): siRNA sense strand
gggacaaggaguaauagaa

SEQ ID NO: 1713265 - RNA, 19 nt, Homo sapiens
  misc_RNA (1)...(19): siRNA sense strand
cuacagugguucgauguga

SEQ ID NO: 1713266 - RNA, 19 nt, Homo sapiens
  misc_RNA (1)...(19): siRNA sense strand
uagcaggcuuugaaguaaa

SEQ ID NO: 1713267 - RNA, 19 nt, Homo sapiens
  misc_RNA (1)...(19): siRNA sense strand
uaggauagcaggcuuugaa

SEQ ID NO: 1713268 - RNA, 19 nt, Homo sapiens
  misc_RNA (1)...(19): siRNA sense strand
uagcugggauuuggguuaa

SEQ ID NO: 1713269 - RNA, 19 nt, Homo sapiens
  misc_RNA (1)...(19): siRNA sense strand
uauaaaggugcacauguaa

SEQ ID NO: 1713270 - RNA, 19 nt, Homo sapiens
  misc_RNA (1)...(19): siRNA sense strand
ggcauggguuacuuugaaa

SEQ ID NO: 1713271 - RNA, 19 nt, Homo sapiens
  misc_RNA (1)...(19): siRNA sense strand
ggaaaguggcagacaaagu

SEQ ID NO: 1713272 - RNA, 19 nt, Homo sapiens
  misc_RNA (1)...(19): siRNA sense strand
gaagaugcuuauguuggau

SEQ ID NO: 1713273 - RNA, 19 nt, Homo sapiens
  misc_RNA (1)...(19): siRNA sense strand
cagcgugucccacaaagaa

SEQ ID NO: 1713274 - RNA, 19 nt, Homo sapiens
  misc_RNA (1)...(19): siRNA sense strand
agaggacaauucauagaga

SEQ ID NO: 1713275 - RNA, 19 nt, Homo sapiens
  misc_RNA (1)...(19): siRNA sense strand
gcagacuggaggaauauau

SEQ ID NO: 1713276 - RNA, 19 nt, Homo sapiens
  misc_RNA (1)...(19): siRNA sense strand
ggauauaugacaauaaggu

SEQ ID NO: 1713277 - RNA, 19 nt, Homo sapiens
  misc_RNA (1)...(19): siRNA sense strand
gcucugaagaugcuuaugu

SEQ ID NO: 1713278 - RNA, 19 nt, Homo sapiens
  misc_RNA (1)...(19): siRNA sense strand
gcuagaagacaaugauauc

SEQ ID NO: 1713279 - RNA, 19 nt, Homo sapiens
  misc_RNA (1)...(19): siRNA sense strand
ggugauggacgaggccuua

SEQ ID NO: 1713280 - RNA, 19 nt, Homo sapiens
  misc_RNA (1)...(19): siRNA sense strand
caacuuugcagguguaugg

SEQ ID NO: 1713281 - RNA, 19 nt, Homo sapiens
  misc_RNA (1)...(19): siRNA sense strand
cagggaauauaugaggaua

SEQ ID NO: 1713282 - RNA, 19 nt, Homo sapiens
  misc_RNA (1)...(19): siRNA sense strand
uacaguugguucugcagua

SEQ ID NO: 1713283 - RNA, 19 nt, Homo sapiens
  misc_RNA (1)...(19): siRNA sense strand
agaagaaaccggauacaca

SEQ ID NO: 1713284 - RNA, 19 nt, Homo sapiens
  misc_RNA (1)...(19): siRNA sense strand
gaaaagggacaaggaguaa

SEQ ID NO: 1713285 - RNA, 19 nt, Homo sapiens
  misc_RNA (1)...(19): siRNA sense strand
auagcaggcuuugaaguaa

SEQ ID NO: 1713286 - RNA, 19 nt, Homo sapiens
  misc_RNA (1)...(19): siRNA sense strand
gcaauauacacagaaauag

SEQ ID NO: 1713287 - RNA, 19 nt, Homo sapiens
  misc_RNA (1)...(19): siRNA sense strand
guugcaauauacacagaaa

SEQ ID NO: 1713288 - RNA, 19 nt, Homo sapiens
  misc_RNA (1)...(19): siRNA sense strand
ggaauauauguccaugaaa

SEQ ID NO: 1713289 - RNA, 19 nt, Homo sapiens
  misc_RNA (1)...(19): siRNA sense strand
gcauuagcaggaauucaaa

SEQ ID NO: 1713290 - RNA, 19 nt, Homo sapiens
  misc_RNA (1)...(19): siRNA sense strand
aaaggaagaggacaauuca

SEQ ID NO: 1713291 - RNA, 19 nt, Homo sapiens
  misc_RNA (1)...(19): siRNA sense strand
gaaagaagaugcugagaaa

SEQ ID NO: 1713292 - RNA, 19 nt, Homo sapiens
  misc_RNA (1)...(19): siRNA sense strand
gaagaagacugcccaaauc

SEQ ID NO: 1713293 - RNA, 19 nt, Homo sapiens
  misc_RNA (1)...(19): siRNA sense strand
gcgagaagcugaaaggaaa

SEQ ID NO: 1713294 - RNA, 19 nt, Homo sapiens
  misc_RNA (1)...(19): siRNA sense strand
gcucaaauguguucgagaa

SEQ ID NO: 1713295 - RNA, 19 nt, Homo sapiens
  misc_RNA (1)...(19): siRNA sense strand
gcaagaucauucauacuga

SEQ ID NO: 1713296 - RNA, 19 nt, Homo sapiens
  misc_RNA (1)...(19): siRNA sense strand
ugaagaugcugcacaguuu

SEQ ID NO: 1713297 - RNA, 19 nt, Homo sapiens
  misc_RNA (1)...(19): siRNA sense strand
gaagaggcaggcugaguua

SEQ ID NO: 1713298 - RNA, 19 nt, Homo sapiens
  misc_RNA (1)...(19): siRNA sense strand
gaucauucauacugacaua

SEQ ID NO: 1713299 - RNA, 19 nt, Homo sapiens
  misc_RNA (1)...(19): siRNA sense strand
gcccagaggugaaacuaaa

SEQ ID NO: 1713300 - RNA, 19 nt, Homo sapiens
  misc_RNA (1)...(19): siRNA sense strand
gaaaagauuuguugcaaug

SEQ ID NO: 1713301 - RNA, 19 nt, Homo sapiens
  misc_RNA (1)...(19): siRNA sense strand
guuguucucuggauccuua

SEQ ID NO: 1713302 - RNA, 19 nt, Homo sapiens
  misc_RNA (1)...(19): siRNA sense strand
gcagaaaccuauaggaaaa

SEQ ID NO: 1713303 - RNA, 19 nt, Homo sapiens
  misc_RNA (1)...(19): siRNA sense strand
ucugagggaucaccacuua

SEQ ID NO: 1713304 - RNA, 19 nt, Homo sapiens
  misc_RNA (1)...(19): siRNA sense strand
ucaaguggaucaucaaauc

SEQ ID NO: 1713305 - RNA, 19 nt, Homo sapiens
  misc_RNA (1)...(19): siRNA sense strand
gaagaugcugcacaguuua

SEQ ID NO: 1713306 - RNA, 19 nt, Homo sapiens
  misc_RNA (1)...(19): siRNA sense strand
cgaugaagaugaugaugaa

SEQ ID NO: 1713307 - RNA, 19 nt, Homo sapiens
  misc_RNA (1)...(19): siRNA sense strand
ugaagaugaugaugaagaa

SEQ ID NO: 1713308 - RNA, 19 nt, Homo sapiens
  misc_RNA (1)...(19): siRNA sense strand
gacagaagcagaacgguuu

SEQ ID NO: 1713309 - RNA, 19 nt, Homo sapiens
  misc_RNA (1)...(19): siRNA sense strand
gaggcaggcugaguuauug

SEQ ID NO: 1713310 - RNA, 19 nt, Homo sapiens
  misc_RNA (1)...(19): siRNA sense strand
aacgggagauuauuuguuu

SEQ ID NO: 1713311 - RNA, 19 nt, Homo sapiens
  misc_RNA (1)...(19): siRNA sense strand
ggagacagccuuggaugaa

SEQ ID NO: 1713312 - RNA, 19 nt, Homo sapiens
  misc_RNA (1)...(19): siRNA sense strand
gagacagccuuggaugaaa

SEQ ID NO: 1713313 - RNA, 19 nt, Homo sapiens
  misc_RNA (1)...(19): siRNA sense strand
caaauguguucgagaaagu

SEQ ID NO: 1713314 - RNA, 19 nt, Homo sapiens
  misc_RNA (1)...(19): siRNA sense strand
cugcacaguuuacagauuu

SEQ ID NO: 1713315 - RNA, 19 nt, Homo sapiens
  misc_RNA (1)...(19): siRNA sense strand
gaucaucaaauccaacuau

SEQ ID NO: 1713316 - RNA, 19 nt, Homo sapiens
  misc_RNA (1)...(19): siRNA sense strand
cagaaagugauuacacaua

SEQ ID NO: 1713317 - RNA, 19 nt, Homo sapiens
  misc_RNA (1)...(19): siRNA sense strand
ggaauauaaucuugaugag

SEQ ID NO: 1713318 - RNA, 19 nt, Homo sapiens
  misc_RNA (1)...(19): siRNA sense strand
agaagaugcugagaaagaa

SEQ ID NO: 1713319 - RNA, 19 nt, Homo sapiens
  misc_RNA (1)...(19): siRNA sense strand
gagaaagugaucccaguga

SEQ ID NO: 1713320 - RNA, 19 nt, Homo sapiens
  misc_RNA (1)...(19): siRNA sense strand
agaugaagaugauguagau

SEQ ID NO: 1713321 - RNA, 19 nt, Homo sapiens
  misc_RNA (1)...(19): siRNA sense strand
cagcugcaccuuccaauga

SEQ ID NO: 1713322 - RNA, 19 nt, Homo sapiens
  misc_RNA (1)...(19): siRNA sense strand
cagcagaaaccuauaggaa

SEQ ID NO: 1713323 - RNA, 19 nt, Homo sapiens
  misc_RNA (1)...(19): siRNA sense strand
caucaaauccaacuaucaa

SEQ ID NO: 1713324 - RNA, 19 nt, Homo sapiens
  misc_RNA (1)...(19): siRNA sense strand
ggagaacugcgacacauca

SEQ ID NO: 1713325 - RNA, 19 nt, Homo sapiens
  misc_RNA (1)...(19): siRNA sense strand
gaggagaacugcgacacau

SEQ ID NO: 1713326 - RNA, 19 nt, Homo sapiens
  misc_RNA (1)...(19): siRNA sense strand
ccgggcagcugacuuguug

SEQ ID NO: 1713327 - RNA, 19 nt, Homo sapiens
  misc_RNA (1)...(19): siRNA sense strand
ugaagaagacugcccaaau

SEQ ID NO: 1713328 - RNA, 19 nt, Homo sapiens
  misc_RNA (1)...(19): siRNA sense strand
ucaggaacuugcgaacaua

SEQ ID NO: 1713329 - RNA, 19 nt, Homo sapiens
  misc_RNA (1)...(19): siRNA sense strand
cacaguaagugcaagauca

SEQ ID NO: 1713330 - RNA, 19 nt, Homo sapiens
  misc_RNA (1)...(19): siRNA sense strand
ccagugacccaaacaaaga

SEQ ID NO: 1713331 - RNA, 19 nt, Homo sapiens
  misc_RNA (1)...(19): siRNA sense strand
gcaacuggacgaugaagau

SEQ ID NO: 1713332 - RNA, 19 nt, Homo sapiens
  misc_RNA (1)...(19): siRNA sense strand
gacccuacguggauagaau

SEQ ID NO: 1713333 - RNA, 19 nt, Homo sapiens
  misc_RNA (1)...(19): siRNA sense strand
gccggagccucaacagaaa

SEQ ID NO: 1713334 - RNA, 19 nt, Homo sapiens
  misc_RNA (1)...(19): siRNA sense strand
gaagaugcugagaaagaaa

SEQ ID NO: 1713335 - RNA, 19 nt, Homo sapiens
  misc_RNA (1)...(19): siRNA sense strand
ucaaggguuagauuacuua

SEQ ID NO: 1713336 - RNA, 19 nt, Homo sapiens
  misc_RNA (1)...(19): siRNA sense strand
cagcuccuaugaacaauuc

SEQ ID NO: 1713337 - RNA, 19 nt, Homo sapiens
  misc_RNA (1)...(19): siRNA sense strand
caaaugcagaaagugauua

SEQ ID NO: 1713338 - RNA, 19 nt, Homo sapiens
  misc_RNA (1)...(19): siRNA sense strand
aagaagaugcugagaaaga

SEQ ID NO: 1713339 - RNA, 19 nt, Homo sapiens
  misc_RNA (1)...(19): siRNA sense strand
gaugaugcauaugugagaa

SEQ ID NO: 1713340 - RNA, 19 nt, Homo sapiens
  misc_RNA (1)...(19): siRNA sense strand
gcugcacaguuuacagauu

SEQ ID NO: 1713341 - RNA, 19 nt, Homo sapiens
  misc_RNA (1)...(19): siRNA sense strand
gagccucuuugauguacuu

SEQ ID NO: 1713342 - RNA, 19 nt, Homo sapiens
  misc_RNA (1)...(19): siRNA sense strand
cauagacccuacguggaua

SEQ ID NO: 1713343 - RNA, 19 nt, Homo sapiens
  misc_RNA (1)...(19): siRNA sense strand
ccaaauggacgacauaaaa

SEQ ID NO: 1713344 - RNA, 19 nt, Homo sapiens
  misc_RNA (1)...(19): siRNA sense strand
cggcauccuugguugaauu

SEQ ID NO: 1713345 - RNA, 19 nt, Homo sapiens
  misc_RNA (1)...(19): siRNA sense strand
ugcaggagauagaagaauu

SEQ ID NO: 1713346 - RNA, 19 nt, Homo sapiens
  misc_RNA (1)...(19): siRNA sense strand
ggagauuauuuguuugaac

SEQ ID NO: 1713347 - RNA, 19 nt, Homo sapiens
  misc_RNA (1)...(19): siRNA sense strand
cggcguguauggcauuuga

SEQ ID NO: 1713348 - RNA, 19 nt, Homo sapiens
  misc_RNA (1)...(19): siRNA sense strand
uagcagcuccuaugaacaa

SEQ ID NO: 1713349 - RNA, 19 nt, Homo sapiens
  misc_RNA (1)...(19): siRNA sense strand
gcaggagauagaagaauug

SEQ ID NO: 1713350 - RNA, 19 nt, Homo sapiens
  misc_RNA (1)...(19): siRNA sense strand
agacagccuuggaugaaau

SEQ ID NO: 1713351 - RNA, 19 nt, Homo sapiens
  misc_RNA (1)...(19): siRNA sense strand
caacgggagauuauuuguu

SEQ ID NO: 1713352 - RNA, 19 nt, Homo sapiens
  misc_RNA (1)...(19): siRNA sense strand
cagcugacuuguuggugaa

SEQ ID NO: 1713353 - RNA, 19 nt, Homo sapiens
  misc_RNA (1)...(19): siRNA sense strand
ccugaggaauauaaucuug

SEQ ID NO: 1713354 - RNA, 19 nt, Homo sapiens
  misc_RNA (1)...(19): siRNA sense strand
ugaccaggauggcgaauac

SEQ ID NO: 1713355 - RNA, 19 nt, Homo sapiens
  misc_RNA (1)...(19): siRNA sense strand
aauggccgguaucauguua

SEQ ID NO: 1713356 - RNA, 19 nt, Homo sapiens
  misc_RNA (1)...(19): siRNA sense strand
agaaagaagaugcugagaa

SEQ ID NO: 1713357 - RNA, 19 nt, Homo sapiens
  misc_RNA (1)...(19): siRNA sense strand
guuuacagauuuccugauc

SEQ ID NO: 1713358 - RNA, 19 nt, Homo sapiens
  misc_RNA (1)...(19): siRNA sense strand
ucaaauguguucgagaaag

SEQ ID NO: 1713359 - RNA, 19 nt, Homo sapiens
  misc_RNA (1)...(19): siRNA sense strand
cugcaaagguggauaucau

SEQ ID NO: 1713360 - RNA, 19 nt, Homo sapiens
  misc_RNA (1)...(19): siRNA sense strand
ccaaaugcagaaagugauu

SEQ ID NO: 1713361 - RNA, 19 nt, Homo sapiens
  misc_RNA (1)...(19): siRNA sense strand
uaaaaccaauggccauauu

SEQ ID NO: 1713362 - RNA, 19 nt, Homo sapiens
  misc_RNA (1)...(19): siRNA sense strand
guggauagaaucaccuaaa

SEQ ID NO: 1713363 - RNA, 19 nt, Homo sapiens
  misc_RNA (1)...(19): siRNA sense strand
ggaaaagauuuguugcaau

SEQ ID NO: 1713364 - RNA, 19 nt, Homo sapiens
  misc_RNA (1)...(19): siRNA sense strand
guguguggaugaugcauau

SEQ ID NO: 1713365 - RNA, 19 nt, Homo sapiens
  misc_RNA (1)...(19): siRNA sense strand
gccaccaucuccucaagug

SEQ ID NO: 1713366 - RNA, 19 nt, Homo sapiens
  misc_RNA (1)...(19): siRNA sense strand
uuggagaccucuucaaugg

SEQ ID NO: 1713367 - RNA, 19 nt, Homo sapiens
  misc_RNA (1)...(19): siRNA sense strand
cgaaguacuuggccaccau

SEQ ID NO: 1713368 - RNA, 19 nt, Homo sapiens
  misc_RNA (1)...(19): siRNA sense strand
auccuugguugaauucuua

SEQ ID NO: 1713369 - RNA, 19 nt, Homo sapiens
  misc_RNA (1)...(19): siRNA sense strand
uuagaaaugguuccagaaa

SEQ ID NO: 1713370 - RNA, 19 nt, Homo sapiens
  misc_RNA (1)...(19): siRNA sense strand
gcggcucugugcuuucuga

SEQ ID NO: 1713371 - RNA, 19 nt, Homo sapiens
  misc_RNA (1)...(19): siRNA sense strand
aauggugaauugccaaaug

SEQ ID NO: 1713372 - RNA, 19 nt, Homo sapiens
  misc_RNA (1)...(19): siRNA sense strand
guacggcuccacagcagaa

SEQ ID NO: 1713373 - RNA, 19 nt, Homo sapiens
  misc_RNA (1)...(19): siRNA sense strand
ggaugaugcauaugugaga

SEQ ID NO: 1713374 - RNA, 19 nt, Homo sapiens
  misc_RNA (1)...(19): siRNA sense strand
guaagugcaagaucauuca

SEQ ID NO: 1713375 - RNA, 19 nt, Homo sapiens
  misc_RNA (1)...(19): siRNA sense strand
gggagauuauuuguuugaa

SEQ ID NO: 1713376 - RNA, 19 nt, Homo sapiens
  misc_RNA (1)...(19): siRNA sense strand
gggaaaagauuuguugcaa

SEQ ID NO: 1713377 - RNA, 19 nt, Homo sapiens
  misc_RNA (1)...(19): siRNA sense strand
uaucaaggccucccaguac

SEQ ID NO: 1713378 - RNA, 19 nt, Homo sapiens
  misc_RNA (1)...(19): siRNA sense strand
ccuggagccucuuugaugu

SEQ ID NO: 1713379 - RNA, 19 nt, Homo sapiens
  misc_RNA (1)...(19): siRNA sense strand
ggaccaggaagagaaagaa

SEQ ID NO: 1713380 - RNA, 19 nt, Homo sapiens
  misc_RNA (1)...(19): siRNA sense strand
gggcacuucucuacugucu

SEQ ID NO: 1713381 - RNA, 19 nt, Homo sapiens
  misc_RNA (1)...(19): siRNA sense strand
guacguugugugaagagua

SEQ ID NO: 1713382 - RNA, 19 nt, Homo sapiens
  misc_RNA (1)...(19): siRNA sense strand
ccaguacguugugugaaga

SEQ ID NO: 1713383 - RNA, 19 nt, Homo sapiens
  misc_RNA (1)...(19): siRNA sense strand
cugcauggucuucgaagua

SEQ ID NO: 1713384 - RNA, 19 nt, Homo sapiens
  misc_RNA (1)...(19): siRNA sense strand
uggcaacgggagauuauuu

SEQ ID NO: 1713385 - RNA, 19 nt, Homo sapiens
  misc_RNA (1)...(19): siRNA sense strand
agucacaguucccagaguu

SEQ ID NO: 1713386 - RNA, 19 nt, Homo sapiens
  misc_RNA (1)...(19): siRNA sense strand
gcagaaagugauuacacau

SEQ ID NO: 1713387 - RNA, 19 nt, Homo sapiens
  misc_RNA (1)...(19): siRNA sense strand
aagaggacccugcggacua

SEQ ID NO: 1713388 - RNA, 19 nt, Homo sapiens
  misc_RNA (1)...(19): siRNA sense strand
gcauaugugagaagaaugg

SEQ ID NO: 1713389 - RNA, 19 nt, Homo sapiens
  misc_RNA (1)...(19): siRNA sense strand
ccucuucaauggccgguau

SEQ ID NO: 1713390 - RNA, 19 nt, Homo sapiens
  misc_RNA (1)...(19): siRNA sense strand
gcaacgggagauuauuugu

SEQ ID NO: 1713391 - RNA, 19 nt, Homo sapiens
  misc_RNA (1)...(19): siRNA sense strand
gaaagaagaugcugagaaa

SEQ ID NO: 1713392 - RNA, 19 nt, Homo sapiens
  misc_RNA (1)...(19): siRNA sense strand
gaagaagacugcccaaauc

SEQ ID NO: 1713393 - RNA, 19 nt, Homo sapiens
  misc_RNA (1)...(19): siRNA sense strand
gcgagaagcugaaaggaaa

SEQ ID NO: 1713394 - RNA, 19 nt, Homo sapiens
  misc_RNA (1)...(19): siRNA sense strand
gcucaaauguguucgagaa

SEQ ID NO: 1713395 - RNA, 19 nt, Homo sapiens
  misc_RNA (1)...(19): siRNA sense strand
gcaagaucauucauacuga

SEQ ID NO: 1713396 - RNA, 19 nt, Homo sapiens
  misc_RNA (1)...(19): siRNA sense strand
ugaagaugcugcacaguuu

SEQ ID NO: 1713397 - RNA, 19 nt, Homo sapiens
  misc_RNA (1)...(19): siRNA sense strand
gaagaggcaggcugaguua

SEQ ID NO: 1713398 - RNA, 19 nt, Homo sapiens
  misc_RNA (1)...(19): siRNA sense strand
gaucauucauacugacaua

SEQ ID NO: 1713399 - RNA, 19 nt, Homo sapiens
  misc_RNA (1)...(19): siRNA sense strand
gcccagaggugaaacuaaa

SEQ ID NO: 1713400 - RNA, 19 nt, Homo sapiens
  misc_RNA (1)...(19): siRNA sense strand
gaaaagauuuguugcaaug

SEQ ID NO: 1713401 - RNA, 19 nt, Homo sapiens
  misc_RNA (1)...(19): siRNA sense strand
guuguucucuggauccuua

SEQ ID NO: 1713402 - RNA, 19 nt, Homo sapiens
  misc_RNA (1)...(19): siRNA sense strand
gcagaaaccuauaggaaaa

SEQ ID NO: 1713403 - RNA, 19 nt, Homo sapiens
  misc_RNA (1)...(19): siRNA sense strand
ucugagggaucaccacuua

SEQ ID NO: 1713404 - RNA, 19 nt, Homo sapiens
  misc_RNA (1)...(19): siRNA sense strand
ucaaguggaucaucaaauc

SEQ ID NO: 1713405 - RNA, 19 nt, Homo sapiens
  misc_RNA (1)...(19): siRNA sense strand
gaagaugcugcacaguuua

SEQ ID NO: 1713406 - RNA, 19 nt, Homo sapiens
  misc_RNA (1)...(19): siRNA sense strand
cgaugaagaugaugaugaa

SEQ ID NO: 1713407 - RNA, 19 nt, Homo sapiens
  misc_RNA (1)...(19): siRNA sense strand
ugaagaugaugaugaagaa

SEQ ID NO: 1713408 - RNA, 19 nt, Homo sapiens
  misc_RNA (1)...(19): siRNA sense strand
gacagaagcagaacgguuu

SEQ ID NO: 1713409 - RNA, 19 nt, Homo sapiens
  misc_RNA (1)...(19): siRNA sense strand
gaggcaggcugaguuauug

SEQ ID NO: 1713410 - RNA, 19 nt, Homo sapiens
  misc_RNA (1)...(19): siRNA sense strand
aacgggagauuauuuguuu

SEQ ID NO: 1713411 - RNA, 19 nt, Homo sapiens
  misc_RNA (1)...(19): siRNA sense strand
ggagacagccuuggaugaa

SEQ ID NO: 1713412 - RNA, 19 nt, Homo sapiens
  misc_RNA (1)...(19): siRNA sense strand
gagacagccuuggaugaaa

SEQ ID NO: 1713413 - RNA, 19 nt, Homo sapiens
  misc_RNA (1)...(19): siRNA sense strand
caaauguguucgagaaagu

SEQ ID NO: 1713414 - RNA, 19 nt, Homo sapiens
  misc_RNA (1)...(19): siRNA sense strand
cugcacaguuuacagauuu

SEQ ID NO: 1713415 - RNA, 19 nt, Homo sapiens
  misc_RNA (1)...(19): siRNA sense strand
gaucaucaaauccaacuau

SEQ ID NO: 1713416 - RNA, 19 nt, Homo sapiens
  misc_RNA (1)...(19): siRNA sense strand
cagaaagugauuacacaua

SEQ ID NO: 1713417 - RNA, 19 nt, Homo sapiens
  misc_RNA (1)...(19): siRNA sense strand
ggaauauaaucuugaugag

SEQ ID NO: 1713418 - RNA, 19 nt, Homo sapiens
  misc_RNA (1)...(19): siRNA sense strand
agaagaugcugagaaagaa

SEQ ID NO: 1713419 - RNA, 19 nt, Homo sapiens
  misc_RNA (1)...(19): siRNA sense strand
gagaaagugaucccaguga

SEQ ID NO: 1713420 - RNA, 19 nt, Homo sapiens
  misc_RNA (1)...(19): siRNA sense strand
agaugaagaugauguagau

SEQ ID NO: 1713421 - RNA, 19 nt, Homo sapiens
  misc_RNA (1)...(19): siRNA sense strand
cagcugcaccuuccaauga

SEQ ID NO: 1713422 - RNA, 19 nt, Homo sapiens
  misc_RNA (1)...(19): siRNA sense strand
cagcagaaaccuauaggaa

SEQ ID NO: 1713423 - RNA, 19 nt, Homo sapiens
  misc_RNA (1)...(19): siRNA sense strand
caucaaauccaacuaucaa

SEQ ID NO: 1713424 - RNA, 19 nt, Homo sapiens
  misc_RNA (1)...(19): siRNA sense strand
ggagaacugcgacacauca

SEQ ID NO: 1713425 - RNA, 19 nt, Homo sapiens
  misc_RNA (1)...(19): siRNA sense strand
gaggagaacugcgacacau

SEQ ID NO: 1713426 - RNA, 19 nt, Homo sapiens
  misc_RNA (1)...(19): siRNA sense strand
ccgggcagcugacuuguug

SEQ ID NO: 1713427 - RNA, 19 nt, Homo sapiens
  misc_RNA (1)...(19): siRNA sense strand
ugaagaagacugcccaaau

SEQ ID NO: 1713428 - RNA, 19 nt, Homo sapiens
  misc_RNA (1)...(19): siRNA sense strand
ucaggaacuugcgaacaua

SEQ ID NO: 1713429 - RNA, 19 nt, Homo sapiens
  misc_RNA (1)...(19): siRNA sense strand
cacaguaagugcaagauca

SEQ ID NO: 1713430 - RNA, 19 nt, Homo sapiens
  misc_RNA (1)...(19): siRNA sense strand
ccagugacccaaacaaaga

SEQ ID NO: 1713431 - RNA, 19 nt, Homo sapiens
  misc_RNA (1)...(19): siRNA sense strand
gcaacuggacgaugaagau

SEQ ID NO: 1713432 - RNA, 19 nt, Homo sapiens
  misc_RNA (1)...(19): siRNA sense strand
gacccuacguggauagaau

SEQ ID NO: 1713433 - RNA, 19 nt, Homo sapiens
  misc_RNA (1)...(19): siRNA sense strand
gccggagccucaacagaaa

SEQ ID NO: 1713434 - RNA, 19 nt, Homo sapiens
  misc_RNA (1)...(19): siRNA sense strand
gaagaugcugagaaagaaa

SEQ ID NO: 1713435 - RNA, 19 nt, Homo sapiens
  misc_RNA (1)...(19): siRNA sense strand
ucaaggguuagauuacuua

SEQ ID NO: 1713436 - RNA, 19 nt, Homo sapiens
  misc_RNA (1)...(19): siRNA sense strand
cagcuccuaugaacaauuc

SEQ ID NO: 1713437 - RNA, 19 nt, Homo sapiens
  misc_RNA (1)...(19): siRNA sense strand
caaaugcagaaagugauua

SEQ ID NO: 1713438 - RNA, 19 nt, Homo sapiens
  misc_RNA (1)...(19): siRNA sense strand
aagaagaugcugagaaaga

SEQ ID NO: 1713439 - RNA, 19 nt, Homo sapiens
  misc_RNA (1)...(19): siRNA sense strand
gaugaugcauaugugagaa

SEQ ID NO: 1713440 - RNA, 19 nt, Homo sapiens
  misc_RNA (1)...(19): siRNA sense strand
gcugcacaguuuacagauu

SEQ ID NO: 1713441 - RNA, 19 nt, Homo sapiens
  misc_RNA (1)...(19): siRNA sense strand
gagccucuuugauguacuu

SEQ ID NO: 1713442 - RNA, 19 nt, Homo sapiens
  misc_RNA (1)...(19): siRNA sense strand
cauagacccuacguggaua

SEQ ID NO: 1713443 - RNA, 19 nt, Homo sapiens
  misc_RNA (1)...(19): siRNA sense strand
ccaaauggacgacauaaaa

SEQ ID NO: 1713444 - RNA, 19 nt, Homo sapiens
  misc_RNA (1)...(19): siRNA sense strand
cggcauccuugguugaauu

SEQ ID NO: 1713445 - RNA, 19 nt, Homo sapiens
  misc_RNA (1)...(19): siRNA sense strand
ugcaggagauagaagaauu

SEQ ID NO: 1713446 - RNA, 19 nt, Homo sapiens
  misc_RNA (1)...(19): siRNA sense strand
ggagauuauuuguuugaac

SEQ ID NO: 1713447 - RNA, 19 nt, Homo sapiens
  misc_RNA (1)...(19): siRNA sense strand
cggcguguauggcauuuga

SEQ ID NO: 1713448 - RNA, 19 nt, Homo sapiens
  misc_RNA (1)...(19): siRNA sense strand
uagcagcuccuaugaacaa

SEQ ID NO: 1713449 - RNA, 19 nt, Homo sapiens
  misc_RNA (1)...(19): siRNA sense strand
gcaggagauagaagaauug

SEQ ID NO: 1713450 - RNA, 19 nt, Homo sapiens
  misc_RNA (1)...(19): siRNA sense strand
agacagccuuggaugaaau

SEQ ID NO: 1713451 - RNA, 19 nt, Homo sapiens
  misc_RNA (1)...(19): siRNA sense strand
caacgggagauuauuuguu

SEQ ID NO: 1713452 - RNA, 19 nt, Homo sapiens
  misc_RNA (1)...(19): siRNA sense strand
cagcugacuuguuggugaa

SEQ ID NO: 1713453 - RNA, 19 nt, Homo sapiens
  misc_RNA (1)...(19): siRNA sense strand
ccugaggaauauaaucuug

SEQ ID NO: 1713454 - RNA, 19 nt, Homo sapiens
  misc_RNA (1)...(19): siRNA sense strand
ugaccaggauggcgaauac

SEQ ID NO: 1713455 - RNA, 19 nt, Homo sapiens
  misc_RNA (1)...(19): siRNA sense strand
aauggccgguaucauguua

SEQ ID NO: 1713456 - RNA, 19 nt, Homo sapiens
  misc_RNA (1)...(19): siRNA sense strand
agaaagaagaugcugagaa

SEQ ID NO: 1713457 - RNA, 19 nt, Homo sapiens
  misc_RNA (1)...(19): siRNA sense strand
guuuacagauuuccugauc

SEQ ID NO: 1713458 - RNA, 19 nt, Homo sapiens
  misc_RNA (1)...(19): siRNA sense strand
ucaaauguguucgagaaag

SEQ ID NO: 1713459 - RNA, 19 nt, Homo sapiens
  misc_RNA (1)...(19): siRNA sense strand
cugcaaagguggauaucau

SEQ ID NO: 1713460 - RNA, 19 nt, Homo sapiens
  misc_RNA (1)...(19): siRNA sense strand
ccaaaugcagaaagugauu

SEQ ID NO: 1713461 - RNA, 19 nt, Homo sapiens
  misc_RNA (1)...(19): siRNA sense strand
uaaaaccaauggccauauu

SEQ ID NO: 1713462 - RNA, 19 nt, Homo sapiens
  misc_RNA (1)...(19): siRNA sense strand
guggauagaaucaccuaaa

SEQ ID NO: 1713463 - RNA, 19 nt, Homo sapiens
  misc_RNA (1)...(19): siRNA sense strand
ggaaaagauuuguugcaau

SEQ ID NO: 1713464 - RNA, 19 nt, Homo sapiens
  misc_RNA (1)...(19): siRNA sense strand
guguguggaugaugcauau

SEQ ID NO: 1713465 - RNA, 19 nt, Homo sapiens
  misc_RNA (1)...(19): siRNA sense strand
gccaccaucuccucaagug

SEQ ID NO: 1713466 - RNA, 19 nt, Homo sapiens
  misc_RNA (1)...(19): siRNA sense strand
uuggagaccucuucaaugg

SEQ ID NO: 1713467 - RNA, 19 nt, Homo sapiens
  misc_RNA (1)...(19): siRNA sense strand
cgaaguacuuggccaccau

SEQ ID NO: 1713468 - RNA, 19 nt, Homo sapiens
  misc_RNA (1)...(19): siRNA sense strand
auccuugguugaauucuua

SEQ ID NO: 1713469 - RNA, 19 nt, Homo sapiens
  misc_RNA (1)...(19): siRNA sense strand
uuagaaaugguuccagaaa

SEQ ID NO: 1713470 - RNA, 19 nt, Homo sapiens
  misc_RNA (1)...(19): siRNA sense strand
gcggcucugugcuuucuga

SEQ ID NO: 1713471 - RNA, 19 nt, Homo sapiens
  misc_RNA (1)...(19): siRNA sense strand
aauggugaauugccaaaug

SEQ ID NO: 1713472 - RNA, 19 nt, Homo sapiens
  misc_RNA (1)...(19): siRNA sense strand
guacggcuccacagcagaa

SEQ ID NO: 1713473 - RNA, 19 nt, Homo sapiens
  misc_RNA (1)...(19): siRNA sense strand
ggaugaugcauaugugaga

SEQ ID NO: 1713474 - RNA, 19 nt, Homo sapiens
  misc_RNA (1)...(19): siRNA sense strand
guaagugcaagaucauuca

SEQ ID NO: 1713475 - RNA, 19 nt, Homo sapiens
  misc_RNA (1)...(19): siRNA sense strand
gggagauuauuuguuugaa

SEQ ID NO: 1713476 - RNA, 19 nt, Homo sapiens
  misc_RNA (1)...(19): siRNA sense strand
gggaaaagauuuguugcaa

SEQ ID NO: 1713477 - RNA, 19 nt, Homo sapiens
  misc_RNA (1)...(19): siRNA sense strand
uaucaaggccucccaguac

SEQ ID NO: 1713478 - RNA, 19 nt, Homo sapiens
  misc_RNA (1)...(19): siRNA sense strand
ccuggagccucuuugaugu

SEQ ID NO: 1713479 - RNA, 19 nt, Homo sapiens
  misc_RNA (1)...(19): siRNA sense strand
ggaccaggaagagaaagaa

SEQ ID NO: 1713480 - RNA, 19 nt, Homo sapiens
  misc_RNA (1)...(19): siRNA sense strand
gggcacuucucuacugucu

SEQ ID NO: 1713481 - RNA, 19 nt, Homo sapiens
  misc_RNA (1)...(19): siRNA sense strand
guacguugugugaagagua

SEQ ID NO: 1713482 - RNA, 19 nt, Homo sapiens
  misc_RNA (1)...(19): siRNA sense strand
ccaguacguugugugaaga

SEQ ID NO: 1713483 - RNA, 19 nt, Homo sapiens
  misc_RNA (1)...(19): siRNA sense strand
cugcauggucuucgaagua

SEQ ID NO: 1713484 - RNA, 19 nt, Homo sapiens
  misc_RNA (1)...(19): siRNA sense strand
uggcaacgggagauuauuu

SEQ ID NO: 1713485 - RNA, 19 nt, Homo sapiens
  misc_RNA (1)...(19): siRNA sense strand
agucacaguucccagaguu

SEQ ID NO: 1713486 - RNA, 19 nt, Homo sapiens
  misc_RNA (1)...(19): siRNA sense strand
gcagaaagugauuacacau

SEQ ID NO: 1713487 - RNA, 19 nt, Homo sapiens
  misc_RNA (1)...(19): siRNA sense strand
aagaggacccugcggacua

SEQ ID NO: 1713488 - RNA, 19 nt, Homo sapiens
  misc_RNA (1)...(19): siRNA sense strand
gcauaugugagaagaaugg

SEQ ID NO: 1713489 - RNA, 19 nt, Homo sapiens
  misc_RNA (1)...(19): siRNA sense strand
ccucuucaauggccgguau

SEQ ID NO: 1713490 - RNA, 19 nt, Homo sapiens
  misc_RNA (1)...(19): siRNA sense strand
gcaacgggagauuauuugu

SEQ ID NO: 1713491 - RNA, 19 nt, Homo sapiens
  misc_RNA (1)...(19): siRNA sense strand
gaaagaagaugcugagaaa

SEQ ID NO: 1713492 - RNA, 19 nt, Homo sapiens
  misc_RNA (1)...(19): siRNA sense strand
gaagaagacugcccaaauc

SEQ ID NO: 1713493 - RNA, 19 nt, Homo sapiens
  misc_RNA (1)...(19): siRNA sense strand
gcgagaagcugaaaggaaa

SEQ ID NO: 1713494 - RNA, 19 nt, Homo sapiens
  misc_RNA (1)...(19): siRNA sense strand
gcucaaauguguucgagaa

SEQ ID NO: 1713495 - RNA, 19 nt, Homo sapiens
  misc_RNA (1)...(19): siRNA sense strand
gcaagaucauucauacuga

SEQ ID NO: 1713496 - RNA, 19 nt, Homo sapiens
  misc_RNA (1)...(19): siRNA sense strand
ugaagaugcugcacaguuu

SEQ ID NO: 1713497 - RNA, 19 nt, Homo sapiens
  misc_RNA (1)...(19): siRNA sense strand
gaagaggcaggcugaguua

SEQ ID NO: 1713498 - RNA, 19 nt, Homo sapiens
  misc_RNA (1)...(19): siRNA sense strand
gaucauucauacugacaua

SEQ ID NO: 1713499 - RNA, 19 nt, Homo sapiens
  misc_RNA (1)...(19): siRNA sense strand
gcccagaggugaaacuaaa

SEQ ID NO: 1713500 - RNA, 19 nt, Homo sapiens
  misc_RNA (1)...(19): siRNA sense strand
gaaaagauuuguugcaaug

SEQ ID NO: 1713501 - RNA, 19 nt, Homo sapiens
  misc_RNA (1)...(19): siRNA sense strand
guuguucucuggauccuua

SEQ ID NO: 1713502 - RNA, 19 nt, Homo sapiens
  misc_RNA (1)...(19): siRNA sense strand
gcagaaaccuauaggaaaa

SEQ ID NO: 1713503 - RNA, 19 nt, Homo sapiens
  misc_RNA (1)...(19): siRNA sense strand
ucugagggaucaccacuua

SEQ ID NO: 1713504 - RNA, 19 nt, Homo sapiens
  misc_RNA (1)...(19): siRNA sense strand
ucaaguggaucaucaaauc

SEQ ID NO: 1713505 - RNA, 19 nt, Homo sapiens
  misc_RNA (1)...(19): siRNA sense strand
gaagaugcugcacaguuua

SEQ ID NO: 1713506 - RNA, 19 nt, Homo sapiens
  misc_RNA (1)...(19): siRNA sense strand
cgaugaagaugaugaugaa

SEQ ID NO: 1713507 - RNA, 19 nt, Homo sapiens
  misc_RNA (1)...(19): siRNA sense strand
ugaagaugaugaugaagaa

SEQ ID NO: 1713508 - RNA, 19 nt, Homo sapiens
  misc_RNA (1)...(19): siRNA sense strand
gacagaagcagaacgguuu

SEQ ID NO: 1713509 - RNA, 19 nt, Homo sapiens
  misc_RNA (1)...(19): siRNA sense strand
gaggcaggcugaguuauug

SEQ ID NO: 1713510 - RNA, 19 nt, Homo sapiens
  misc_RNA (1)...(19): siRNA sense strand
aacgggagauuauuuguuu

SEQ ID NO: 1713511 - RNA, 19 nt, Homo sapiens
  misc_RNA (1)...(19): siRNA sense strand
ggagacagccuuggaugaa

SEQ ID NO: 1713512 - RNA, 19 nt, Homo sapiens
  misc_RNA (1)...(19): siRNA sense strand
gagacagccuuggaugaaa

SEQ ID NO: 1713513 - RNA, 19 nt, Homo sapiens
  misc_RNA (1)...(19): siRNA sense strand
caaauguguucgagaaagu

SEQ ID NO: 1713514 - RNA, 19 nt, Homo sapiens
  misc_RNA (1)...(19): siRNA sense strand
cugcacaguuuacagauuu

SEQ ID NO: 1713515 - RNA, 19 nt, Homo sapiens
  misc_RNA (1)...(19): siRNA sense strand
gaucaucaaauccaacuau

SEQ ID NO: 1713516 - RNA, 19 nt, Homo sapiens
  misc_RNA (1)...(19): siRNA sense strand
cagaaagugauuacacaua

SEQ ID NO: 1713517 - RNA, 19 nt, Homo sapiens
  misc_RNA (1)...(19): siRNA sense strand
ggaauauaaucuugaugag

SEQ ID NO: 1713518 - RNA, 19 nt, Homo sapiens
  misc_RNA (1)...(19): siRNA sense strand
agaagaugcugagaaagaa

SEQ ID NO: 1713519 - RNA, 19 nt, Homo sapiens
  misc_RNA (1)...(19): siRNA sense strand
gagaaagugaucccaguga

SEQ ID NO: 1713520 - RNA, 19 nt, Homo sapiens
  misc_RNA (1)...(19): siRNA sense strand
agaugaagaugauguagau

SEQ ID NO: 1713521 - RNA, 19 nt, Homo sapiens
  misc_RNA (1)...(19): siRNA sense strand
cagcugcaccuuccaauga

SEQ ID NO: 1713522 - RNA, 19 nt, Homo sapiens
  misc_RNA (1)...(19): siRNA sense strand
cagcagaaaccuauaggaa

SEQ ID NO: 1713523 - RNA, 19 nt, Homo sapiens
  misc_RNA (1)...(19): siRNA sense strand
caucaaauccaacuaucaa

SEQ ID NO: 1713524 - RNA, 19 nt, Homo sapiens
  misc_RNA (1)...(19): siRNA sense strand
ggagaacugcgacacauca

SEQ ID NO: 1713525 - RNA, 19 nt, Homo sapiens
  misc_RNA (1)...(19): siRNA sense strand
gaggagaacugcgacacau

SEQ ID NO: 1713526 - RNA, 19 nt, Homo sapiens
  misc_RNA (1)...(19): siRNA sense strand
ccgggcagcugacuuguug

SEQ ID NO: 1713527 - RNA, 19 nt, Homo sapiens
  misc_RNA (1)...(19): siRNA sense strand
ugaagaagacugcccaaau

SEQ ID NO: 1713528 - RNA, 19 nt, Homo sapiens
  misc_RNA (1)...(19): siRNA sense strand
ucaggaacuugcgaacaua

SEQ ID NO: 1713529 - RNA, 19 nt, Homo sapiens
  misc_RNA (1)...(19): siRNA sense strand
cacaguaagugcaagauca

SEQ ID NO: 1713530 - RNA, 19 nt, Homo sapiens
  misc_RNA (1)...(19): siRNA sense strand
ccagugacccaaacaaaga

SEQ ID NO: 1713531 - RNA, 19 nt, Homo sapiens
  misc_RNA (1)...(19): siRNA sense strand
gcaacuggacgaugaagau

SEQ ID NO: 1713532 - RNA, 19 nt, Homo sapiens
  misc_RNA (1)...(19): siRNA sense strand
gacccuacguggauagaau

SEQ ID NO: 1713533 - RNA, 19 nt, Homo sapiens
  misc_RNA (1)...(19): siRNA sense strand
gccggagccucaacagaaa

SEQ ID NO: 1713534 - RNA, 19 nt, Homo sapiens
  misc_RNA (1)...(19): siRNA sense strand
gaagaugcugagaaagaaa

SEQ ID NO: 1713535 - RNA, 19 nt, Homo sapiens
  misc_RNA (1)...(19): siRNA sense strand
ucaaggguuagauuacuua

SEQ ID NO: 1713536 - RNA, 19 nt, Homo sapiens
  misc_RNA (1)...(19): siRNA sense strand
cagcuccuaugaacaauuc

SEQ ID NO: 1713537 - RNA, 19 nt, Homo sapiens
  misc_RNA (1)...(19): siRNA sense strand
caaaugcagaaagugauua

SEQ ID NO: 1713538 - RNA, 19 nt, Homo sapiens
  misc_RNA (1)...(19): siRNA sense strand
aagaagaugcugagaaaga

SEQ ID NO: 1713539 - RNA, 19 nt, Homo sapiens
  misc_RNA (1)...(19): siRNA sense strand
gaugaugcauaugugagaa

SEQ ID NO: 1713540 - RNA, 19 nt, Homo sapiens
  misc_RNA (1)...(19): siRNA sense strand
gcugcacaguuuacagauu

SEQ ID NO: 1713541 - RNA, 19 nt, Homo sapiens
  misc_RNA (1)...(19): siRNA sense strand
gagccucuuugauguacuu

SEQ ID NO: 1713542 - RNA, 19 nt, Homo sapiens
  misc_RNA (1)...(19): siRNA sense strand
cauagacccuacguggaua

SEQ ID NO: 1713543 - RNA, 19 nt, Homo sapiens
  misc_RNA (1)...(19): siRNA sense strand
ccaaauggacgacauaaaa

SEQ ID NO: 1713544 - RNA, 19 nt, Homo sapiens
  misc_RNA (1)...(19): siRNA sense strand
cggcauccuugguugaauu

SEQ ID NO: 1713545 - RNA, 19 nt, Homo sapiens
  misc_RNA (1)...(19): siRNA sense strand
ugcaggagauagaagaauu

SEQ ID NO: 1713546 - RNA, 19 nt, Homo sapiens
  misc_RNA (1)...(19): siRNA sense strand
ggagauuauuuguuugaac

SEQ ID NO: 1713547 - RNA, 19 nt, Homo sapiens
  misc_RNA (1)...(19): siRNA sense strand
cggcguguauggcauuuga

SEQ ID NO: 1713548 - RNA, 19 nt, Homo sapiens
  misc_RNA (1)...(19): siRNA sense strand
uagcagcuccuaugaacaa

SEQ ID NO: 1713549 - RNA, 19 nt, Homo sapiens
  misc_RNA (1)...(19): siRNA sense strand
gcaggagauagaagaauug

SEQ ID NO: 1713550 - RNA, 19 nt, Homo sapiens
  misc_RNA (1)...(19): siRNA sense strand
agacagccuuggaugaaau

SEQ ID NO: 1713551 - RNA, 19 nt, Homo sapiens
  misc_RNA (1)...(19): siRNA sense strand
caacgggagauuauuuguu

SEQ ID NO: 1713552 - RNA, 19 nt, Homo sapiens
  misc_RNA (1)...(19): siRNA sense strand
cagcugacuuguuggugaa

SEQ ID NO: 1713553 - RNA, 19 nt, Homo sapiens
  misc_RNA (1)...(19): siRNA sense strand
ccugaggaauauaaucuug

SEQ ID NO: 1713554 - RNA, 19 nt, Homo sapiens
  misc_RNA (1)...(19): siRNA sense strand
ugaccaggauggcgaauac

SEQ ID NO: 1713555 - RNA, 19 nt, Homo sapiens
  misc_RNA (1)...(19): siRNA sense strand
aauggccgguaucauguua

SEQ ID NO: 1713556 - RNA, 19 nt, Homo sapiens
  misc_RNA (1)...(19): siRNA sense strand
agaaagaagaugcugagaa

SEQ ID NO: 1713557 - RNA, 19 nt, Homo sapiens
  misc_RNA (1)...(19): siRNA sense strand
guuuacagauuuccugauc

SEQ ID NO: 1713558 - RNA, 19 nt, Homo sapiens
  misc_RNA (1)...(19): siRNA sense strand
ucaaauguguucgagaaag

SEQ ID NO: 1713559 - RNA, 19 nt, Homo sapiens
  misc_RNA (1)...(19): siRNA sense strand
cugcaaagguggauaucau

SEQ ID NO: 1713560 - RNA, 19 nt, Homo sapiens
  misc_RNA (1)...(19): siRNA sense strand
ccaaaugcagaaagugauu

SEQ ID NO: 1713561 - RNA, 19 nt, Homo sapiens
  misc_RNA (1)...(19): siRNA sense strand
uaaaaccaauggccauauu

SEQ ID NO: 1713562 - RNA, 19 nt, Homo sapiens
  misc_RNA (1)...(19): siRNA sense strand
guggauagaaucaccuaaa

SEQ ID NO: 1713563 - RNA, 19 nt, Homo sapiens
  misc_RNA (1)...(19): siRNA sense strand
ggaaaagauuuguugcaau

SEQ ID NO: 1713564 - RNA, 19 nt, Homo sapiens
  misc_RNA (1)...(19): siRNA sense strand
guguguggaugaugcauau

SEQ ID NO: 1713565 - RNA, 19 nt, Homo sapiens
  misc_RNA (1)...(19): siRNA sense strand
gccaccaucuccucaagug

SEQ ID NO: 1713566 - RNA, 19 nt, Homo sapiens
  misc_RNA (1)...(19): siRNA sense strand
uuggagaccucuucaaugg

SEQ ID NO: 1713567 - RNA, 19 nt, Homo sapiens
  misc_RNA (1)...(19): siRNA sense strand
cgaaguacuuggccaccau

SEQ ID NO: 1713568 - RNA, 19 nt, Homo sapiens
  misc_RNA (1)...(19): siRNA sense strand
auccuugguugaauucuua

SEQ ID NO: 1713569 - RNA, 19 nt, Homo sapiens
  misc_RNA (1)...(19): siRNA sense strand
uuagaaaugguuccagaaa

SEQ ID NO: 1713570 - RNA, 19 nt, Homo sapiens
  misc_RNA (1)...(19): siRNA sense strand
gcggcucugugcuuucuga

SEQ ID NO: 1713571 - RNA, 19 nt, Homo sapiens
  misc_RNA (1)...(19): siRNA sense strand
aauggugaauugccaaaug

SEQ ID NO: 1713572 - RNA, 19 nt, Homo sapiens
  misc_RNA (1)...(19): siRNA sense strand
guacggcuccacagcagaa

SEQ ID NO: 1713573 - RNA, 19 nt, Homo sapiens
  misc_RNA (1)...(19): siRNA sense strand
ggaugaugcauaugugaga

SEQ ID NO: 1713574 - RNA, 19 nt, Homo sapiens
  misc_RNA (1)...(19): siRNA sense strand
guaagugcaagaucauuca

SEQ ID NO: 1713575 - RNA, 19 nt, Homo sapiens
  misc_RNA (1)...(19): siRNA sense strand
gggagauuauuuguuugaa

SEQ ID NO: 1713576 - RNA, 19 nt, Homo sapiens
  misc_RNA (1)...(19): siRNA sense strand
gggaaaagauuuguugcaa

SEQ ID NO: 1713577 - RNA, 19 nt, Homo sapiens
  misc_RNA (1)...(19): siRNA sense strand
uaucaaggccucccaguac

SEQ ID NO: 1713578 - RNA, 19 nt, Homo sapiens
  misc_RNA (1)...(19): siRNA sense strand
ccuggagccucuuugaugu

SEQ ID NO: 1713579 - RNA, 19 nt, Homo sapiens
  misc_RNA (1)...(19): siRNA sense strand
ggaccaggaagagaaagaa

SEQ ID NO: 1713580 - RNA, 19 nt, Homo sapiens
  misc_RNA (1)...(19): siRNA sense strand
gggcacuucucuacugucu

SEQ ID NO: 1713581 - RNA, 19 nt, Homo sapiens
  misc_RNA (1)...(19): siRNA sense strand
guacguugugugaagagua

SEQ ID NO: 1713582 - RNA, 19 nt, Homo sapiens
  misc_RNA (1)...(19): siRNA sense strand
ccaguacguugugugaaga

SEQ ID NO: 1713583 - RNA, 19 nt, Homo sapiens
  misc_RNA (1)...(19): siRNA sense strand
cugcauggucuucgaagua

SEQ ID NO: 1713584 - RNA, 19 nt, Homo sapiens
  misc_RNA (1)...(19): siRNA sense strand
uggcaacgggagauuauuu

SEQ ID NO: 1713585 - RNA, 19 nt, Homo sapiens
  misc_RNA (1)...(19): siRNA sense strand
agucacaguucccagaguu

SEQ ID NO: 1713586 - RNA, 19 nt, Homo sapiens
  misc_RNA (1)...(19): siRNA sense strand
gcagaaagugauuacacau

SEQ ID NO: 1713587 - RNA, 19 nt, Homo sapiens
  misc_RNA (1)...(19): siRNA sense strand
aagaggacccugcggacua

SEQ ID NO: 1713588 - RNA, 19 nt, Homo sapiens
  misc_RNA (1)...(19): siRNA sense strand
gcauaugugagaagaaugg

SEQ ID NO: 1713589 - RNA, 19 nt, Homo sapiens
  misc_RNA (1)...(19): siRNA sense strand
ccucuucaauggccgguau

SEQ ID NO: 1713590 - RNA, 19 nt, Homo sapiens
  misc_RNA (1)...(19): siRNA sense strand
gcaacgggagauuauuugu

SEQ ID NO: 1713591 - RNA, 19 nt, Homo sapiens
  misc_RNA (1)...(19): siRNA sense strand
gaaagaagaugcugagaaa

SEQ ID NO: 1713592 - RNA, 19 nt, Homo sapiens
  misc_RNA (1)...(19): siRNA sense strand
gaagaagacugcccaaauc

SEQ ID NO: 1713593 - RNA, 19 nt, Homo sapiens
  misc_RNA (1)...(19): siRNA sense strand
gcgagaagcugaaaggaaa

SEQ ID NO: 1713594 - RNA, 19 nt, Homo sapiens
  misc_RNA (1)...(19): siRNA sense strand
gcucaaauguguucgagaa

SEQ ID NO: 1713595 - RNA, 19 nt, Homo sapiens
  misc_RNA (1)...(19): siRNA sense strand
gcaagaucauucauacuga

SEQ ID NO: 1713596 - RNA, 19 nt, Homo sapiens
  misc_RNA (1)...(19): siRNA sense strand
ugaagaugcugcacaguuu

SEQ ID NO: 1713597 - RNA, 19 nt, Homo sapiens
  misc_RNA (1)...(19): siRNA sense strand
gaagaggcaggcugaguua

SEQ ID NO: 1713598 - RNA, 19 nt, Homo sapiens
  misc_RNA (1)...(19): siRNA sense strand
gaucauucauacugacaua

SEQ ID NO: 1713599 - RNA, 19 nt, Homo sapiens
  misc_RNA (1)...(19): siRNA sense strand
gcccagaggugaaacuaaa

SEQ ID NO: 1713600 - RNA, 19 nt, Homo sapiens
  misc_RNA (1)...(19): siRNA sense strand
gaaaagauuuguugcaaug

SEQ ID NO: 1713601 - RNA, 19 nt, Homo sapiens
  misc_RNA (1)...(19): siRNA sense strand
guuguucucuggauccuua

SEQ ID NO: 1713602 - RNA, 19 nt, Homo sapiens
  misc_RNA (1)...(19): siRNA sense strand
gcagaaaccuauaggaaaa

SEQ ID NO: 1713603 - RNA, 19 nt, Homo sapiens
  misc_RNA (1)...(19): siRNA sense strand
ucugagggaucaccacuua

SEQ ID NO: 1713604 - RNA, 19 nt, Homo sapiens
  misc_RNA (1)...(19): siRNA sense strand
ucaaguggaucaucaaauc

SEQ ID NO: 1713605 - RNA, 19 nt, Homo sapiens
  misc_RNA (1)...(19): siRNA sense strand
gaagaugcugcacaguuua

SEQ ID NO: 1713606 - RNA, 19 nt, Homo sapiens
  misc_RNA (1)...(19): siRNA sense strand
cgaugaagaugaugaugaa

SEQ ID NO: 1713607 - RNA, 19 nt, Homo sapiens
  misc_RNA (1)...(19): siRNA sense strand
ugaagaugaugaugaagaa

SEQ ID NO: 1713608 - RNA, 19 nt, Homo sapiens
  misc_RNA (1)...(19): siRNA sense strand
gacagaagcagaacgguuu

SEQ ID NO: 1713609 - RNA, 19 nt, Homo sapiens
  misc_RNA (1)...(19): siRNA sense strand
gaggcaggcugaguuauug

SEQ ID NO: 1713610 - RNA, 19 nt, Homo sapiens
  misc_RNA (1)...(19): siRNA sense strand
aacgggagauuauuuguuu

SEQ ID NO: 1713611 - RNA, 19 nt, Homo sapiens
  misc_RNA (1)...(19): siRNA sense strand
gagacagccuuggaugaaa

SEQ ID NO: 1713612 - RNA, 19 nt, Homo sapiens
  misc_RNA (1)...(19): siRNA sense strand
ggagacagccuuggaugaa

SEQ ID NO: 1713613 - RNA, 19 nt, Homo sapiens
  misc_RNA (1)...(19): siRNA sense strand
caaauguguucgagaaagu

SEQ ID NO: 1713614 - RNA, 19 nt, Homo sapiens
  misc_RNA (1)...(19): siRNA sense strand
cugcacaguuuacagauuu

SEQ ID NO: 1713615 - RNA, 19 nt, Homo sapiens
  misc_RNA (1)...(19): siRNA sense strand
gaucaucaaauccaacuau

SEQ ID NO: 1713616 - RNA, 19 nt, Homo sapiens
  misc_RNA (1)...(19): siRNA sense strand
cagaaagugauuacacaua

SEQ ID NO: 1713617 - RNA, 19 nt, Homo sapiens
  misc_RNA (1)...(19): siRNA sense strand
ggaauauaaucuugaugag

SEQ ID NO: 1713618 - RNA, 19 nt, Homo sapiens
  misc_RNA (1)...(19): siRNA sense strand
agaagaugcugagaaagaa

SEQ ID NO: 1713619 - RNA, 19 nt, Homo sapiens
  misc_RNA (1)...(19): siRNA sense strand
gagaaagugaucccaguga

SEQ ID NO: 1713620 - RNA, 19 nt, Homo sapiens
  misc_RNA (1)...(19): siRNA sense strand
agaugaagaugauguagau

SEQ ID NO: 1713621 - RNA, 19 nt, Homo sapiens
  misc_RNA (1)...(19): siRNA sense strand
cagcugcaccuuccaauga

SEQ ID NO: 1713622 - RNA, 19 nt, Homo sapiens
  misc_RNA (1)...(19): siRNA sense strand
cagcagaaaccuauaggaa

SEQ ID NO: 1713623 - RNA, 19 nt, Homo sapiens
  misc_RNA (1)...(19): siRNA sense strand
caucaaauccaacuaucaa

SEQ ID NO: 1713624 - RNA, 19 nt, Homo sapiens
  misc_RNA (1)...(19): siRNA sense strand
ggagaacugcgacacauca

SEQ ID NO: 1713625 - RNA, 19 nt, Homo sapiens
  misc_RNA (1)...(19): siRNA sense strand
gaggagaacugcgacacau

SEQ ID NO: 1713626 - RNA, 19 nt, Homo sapiens
  misc_RNA (1)...(19): siRNA sense strand
ccgggcagcugacuuguug

SEQ ID NO: 1713627 - RNA, 19 nt, Homo sapiens
  misc_RNA (1)...(19): siRNA sense strand
ugaagaagacugcccaaau

SEQ ID NO: 1713628 - RNA, 19 nt, Homo sapiens
  misc_RNA (1)...(19): siRNA sense strand
ucaggaacuugcgaacaua

SEQ ID NO: 1713629 - RNA, 19 nt, Homo sapiens
  misc_RNA (1)...(19): siRNA sense strand
cacaguaagugcaagauca

SEQ ID NO: 1713630 - RNA, 19 nt, Homo sapiens
  misc_RNA (1)...(19): siRNA sense strand
ccagugacccaaacaaaga

SEQ ID NO: 1713631 - RNA, 19 nt, Homo sapiens
  misc_RNA (1)...(19): siRNA sense strand
gcaacuggacgaugaagau

SEQ ID NO: 1713632 - RNA, 19 nt, Homo sapiens
  misc_RNA (1)...(19): siRNA sense strand
gacccuacguggauagaau

SEQ ID NO: 1713633 - RNA, 19 nt, Homo sapiens
  misc_RNA (1)...(19): siRNA sense strand
gaagaugcugagaaagaaa

SEQ ID NO: 1713634 - RNA, 19 nt, Homo sapiens
  misc_RNA (1)...(19): siRNA sense strand
ucaaggguuagauuacuua

SEQ ID NO: 1713635 - RNA, 19 nt, Homo sapiens
  misc_RNA (1)...(19): siRNA sense strand
cagcuccuaugaacaauuc

SEQ ID NO: 1713636 - RNA, 19 nt, Homo sapiens
  misc_RNA (1)...(19): siRNA sense strand
caaaugcagaaagugauua

SEQ ID NO: 1713637 - RNA, 19 nt, Homo sapiens
  misc_RNA (1)...(19): siRNA sense strand
aagaagaugcugagaaaga

SEQ ID NO: 1713638 - RNA, 19 nt, Homo sapiens
  misc_RNA (1)...(19): siRNA sense strand
gaugaugcauaugugagaa

SEQ ID NO: 1713639 - RNA, 19 nt, Homo sapiens
  misc_RNA (1)...(19): siRNA sense strand
gcugcacaguuuacagauu

SEQ ID NO: 1713640 - RNA, 19 nt, Homo sapiens
  misc_RNA (1)...(19): siRNA sense strand
gagccucuuugauguacuu

SEQ ID NO: 1713641 - RNA, 19 nt, Homo sapiens
  misc_RNA (1)...(19): siRNA sense strand
cauagacccuacguggaua

SEQ ID NO: 1713642 - RNA, 19 nt, Homo sapiens
  misc_RNA (1)...(19): siRNA sense strand
ccaaauggacgacauaaaa

SEQ ID NO: 1713643 - RNA, 19 nt, Homo sapiens
  misc_RNA (1)...(19): siRNA sense strand
cggcauccuugguugaauu

SEQ ID NO: 1713644 - RNA, 19 nt, Homo sapiens
  misc_RNA (1)...(19): siRNA sense strand
ugcaggagauagaagaauu

SEQ ID NO: 1713645 - RNA, 19 nt, Homo sapiens
  misc_RNA (1)...(19): siRNA sense strand
ggagauuauuuguuugaac

SEQ ID NO: 1713646 - RNA, 19 nt, Homo sapiens
  misc_RNA (1)...(19): siRNA sense strand
cggcguguauggcauuuga

SEQ ID NO: 1713647 - RNA, 19 nt, Homo sapiens
  misc_RNA (1)...(19): siRNA sense strand
uagcagcuccuaugaacaa

SEQ ID NO: 1713648 - RNA, 19 nt, Homo sapiens
  misc_RNA (1)...(19): siRNA sense strand
gcaggagauagaagaauug

SEQ ID NO: 1713649 - RNA, 19 nt, Homo sapiens
  misc_RNA (1)...(19): siRNA sense strand
ugaccaggauggcgaauac

SEQ ID NO: 1713650 - RNA, 19 nt, Homo sapiens
  misc_RNA (1)...(19): siRNA sense strand
agacagccuuggaugaaau

SEQ ID NO: 1713651 - RNA, 19 nt, Homo sapiens
  misc_RNA (1)...(19): siRNA sense strand
caacgggagauuauuuguu

SEQ ID NO: 1713652 - RNA, 19 nt, Homo sapiens
  misc_RNA (1)...(19): siRNA sense strand
cagcugacuuguuggugaa

SEQ ID NO: 1713653 - RNA, 19 nt, Homo sapiens
  misc_RNA (1)...(19): siRNA sense strand
ccugaggaauauaaucuug

SEQ ID NO: 1713654 - RNA, 19 nt, Homo sapiens
  misc_RNA (1)...(19): siRNA sense strand
agaaagaagaugcugagaa

SEQ ID NO: 1713655 - RNA, 19 nt, Homo sapiens
  misc_RNA (1)...(19): siRNA sense strand
guuuacagauuuccugauc

SEQ ID NO: 1713656 - RNA, 19 nt, Homo sapiens
  misc_RNA (1)...(19): siRNA sense strand
ucaaauguguucgagaaag

SEQ ID NO: 1713657 - RNA, 19 nt, Homo sapiens
  misc_RNA (1)...(19): siRNA sense strand
ggaaaagauuuguugcaau

SEQ ID NO: 1713658 - RNA, 19 nt, Homo sapiens
  misc_RNA (1)...(19): siRNA sense strand
ccaaaugcagaaagugauu

SEQ ID NO: 1713659 - RNA, 19 nt, Homo sapiens
  misc_RNA (1)...(19): siRNA sense strand
uaaaaccaauggccauauu

SEQ ID NO: 1713660 - RNA, 19 nt, Homo sapiens
  misc_RNA (1)...(19): siRNA sense strand
guggauagaaucaccuaaa

SEQ ID NO: 1713661 - RNA, 19 nt, Homo sapiens
  misc_RNA (1)...(19): siRNA sense strand
guguguggaugaugcauau

SEQ ID NO: 1713662 - RNA, 19 nt, Homo sapiens
  misc_RNA (1)...(19): siRNA sense strand
gccaccaucuccucaagug

SEQ ID NO: 1713663 - RNA, 19 nt, Homo sapiens
  misc_RNA (1)...(19): siRNA sense strand
ggaugaugcauaugugaga

SEQ ID NO: 1713664 - RNA, 19 nt, Homo sapiens
  misc_RNA (1)...(19): siRNA sense strand
auccuugguugaauucuua

SEQ ID NO: 1713665 - RNA, 19 nt, Homo sapiens
  misc_RNA (1)...(19): siRNA sense strand
uuagaaaugguuccagaaa

SEQ ID NO: 1713666 - RNA, 19 nt, Homo sapiens
  misc_RNA (1)...(19): siRNA sense strand
gcggcucugugcuuucuga

SEQ ID NO: 1713667 - RNA, 19 nt, Homo sapiens
  misc_RNA (1)...(19): siRNA sense strand
cgaaguacuuggccaccau

SEQ ID NO: 1713668 - RNA, 19 nt, Homo sapiens
  misc_RNA (1)...(19): siRNA sense strand
aauggugaauugccaaaug

SEQ ID NO: 1713669 - RNA, 19 nt, Homo sapiens
  misc_RNA (1)...(19): siRNA sense strand
guacggcuccacagcagaa

SEQ ID NO: 1713670 - RNA, 19 nt, Homo sapiens
  misc_RNA (1)...(19): siRNA sense strand
guaagugcaagaucauuca

SEQ ID NO: 1713671 - RNA, 19 nt, Homo sapiens
  misc_RNA (1)...(19): siRNA sense strand
gggagauuauuuguuugaa

SEQ ID NO: 1713672 - RNA, 19 nt, Homo sapiens
  misc_RNA (1)...(19): siRNA sense strand
gggaaaagauuuguugcaa

SEQ ID NO: 1713673 - RNA, 19 nt, Homo sapiens
  misc_RNA (1)...(19): siRNA sense strand
uaucaaggccucccaguac

SEQ ID NO: 1713674 - RNA, 19 nt, Homo sapiens
  misc_RNA (1)...(19): siRNA sense strand
ccuggagccucuuugaugu

SEQ ID NO: 1713675 - RNA, 19 nt, Homo sapiens
  misc_RNA (1)...(19): siRNA sense strand
ggaccaggaagagaaagaa

SEQ ID NO: 1713676 - RNA, 19 nt, Homo sapiens
  misc_RNA (1)...(19): siRNA sense strand
guacguugugugaagagua

SEQ ID NO: 1713677 - RNA, 19 nt, Homo sapiens
  misc_RNA (1)...(19): siRNA sense strand
ccaguacguugugugaaga

SEQ ID NO: 1713678 - RNA, 19 nt, Homo sapiens
  misc_RNA (1)...(19): siRNA sense strand
cugcauggucuucgaagua

SEQ ID NO: 1713679 - RNA, 19 nt, Homo sapiens
  misc_RNA (1)...(19): siRNA sense strand
uggcaacgggagauuauuu

SEQ ID NO: 1713680 - RNA, 19 nt, Homo sapiens
  misc_RNA (1)...(19): siRNA sense strand
agucacaguucccagaguu

SEQ ID NO: 1713681 - RNA, 19 nt, Homo sapiens
  misc_RNA (1)...(19): siRNA sense strand
gcagaaagugauuacacau

SEQ ID NO: 1713682 - RNA, 19 nt, Homo sapiens
  misc_RNA (1)...(19): siRNA sense strand
gcauaugugagaagaaugg

SEQ ID NO: 1713683 - RNA, 19 nt, Homo sapiens
  misc_RNA (1)...(19): siRNA sense strand
acauaaagccggaaaauau

SEQ ID NO: 1713684 - RNA, 19 nt, Homo sapiens
  misc_RNA (1)...(19): siRNA sense strand
gcaacgggagauuauuugu

SEQ ID NO: 1713685 - RNA, 19 nt, Homo sapiens
  misc_RNA (1)...(19): siRNA sense strand
ggacgaugaagaugaugau

SEQ ID NO: 1713686 - RNA, 19 nt, Homo sapiens
  misc_RNA (1)...(19): siRNA sense strand
gaagcugaaaggaaaauaa

SEQ ID NO: 1713687 - RNA, 19 nt, Homo sapiens
  misc_RNA (1)...(19): siRNA sense strand
agaagaggcaggcugaguu

SEQ ID NO: 1713688 - RNA, 19 nt, Homo sapiens
  misc_RNA (1)...(19): siRNA sense strand
ccucuuugauguacuugug

SEQ ID NO: 1713689 - RNA, 19 nt, Homo sapiens
  misc_RNA (1)...(19): siRNA sense strand
cauccuugguugaauucuu

SEQ ID NO: 1713690 - RNA, 19 nt, Homo sapiens
  misc_RNA (1)...(19): siRNA sense strand
gacagccuuggaugaaaua

SEQ ID NO: 1713691 - RNA, 19 nt, Homo sapiens
  misc_RNA (1)...(19): siRNA sense strand
ggaccuaccugauaaauac

SEQ ID NO: 1713692 - RNA, 19 nt, Homo sapiens
  misc_RNA (1)...(19): siRNA sense strand
aagaguacauccagaaaua

SEQ ID NO: 1713693 - RNA, 19 nt, Homo sapiens
  misc_RNA (1)...(19): siRNA sense strand
gggaggacuuaaugaauuu

SEQ ID NO: 1713694 - RNA, 19 nt, Homo sapiens
  misc_RNA (1)...(19): siRNA sense strand
gaguggaccuaccugauaa

SEQ ID NO: 1713695 - RNA, 19 nt, Homo sapiens
  misc_RNA (1)...(19): siRNA sense strand
gaagaugaggcccaggaua

SEQ ID NO: 1713696 - RNA, 19 nt, Homo sapiens
  misc_RNA (1)...(19): siRNA sense strand
ggcggaguauggaaaguua

SEQ ID NO: 1713697 - RNA, 19 nt, Homo sapiens
  misc_RNA (1)...(19): siRNA sense strand
ugggaggacuuaaugaauu

SEQ ID NO: 1713698 - RNA, 19 nt, Homo sapiens
  misc_RNA (1)...(19): siRNA sense strand
gagaguaaacaugagguua

SEQ ID NO: 1713699 - RNA, 19 nt, Homo sapiens
  misc_RNA (1)...(19): siRNA sense strand
cccaggauauggaguugua

SEQ ID NO: 1713700 - RNA, 19 nt, Homo sapiens
  misc_RNA (1)...(19): siRNA sense strand
ucaagcucaucgagaguaa

SEQ ID NO: 1713701 - RNA, 19 nt, Homo sapiens
  misc_RNA (1)...(19): siRNA sense strand
uaaagaguacauccagaaa

SEQ ID NO: 1713702 - RNA, 19 nt, Homo sapiens
  misc_RNA (1)...(19): siRNA sense strand
agaguggaccuaccugaua

SEQ ID NO: 1713703 - RNA, 19 nt, Homo sapiens
  misc_RNA (1)...(19): siRNA sense strand
ccacaaggaacaccauaug

SEQ ID NO: 1713704 - RNA, 19 nt, Homo sapiens
  misc_RNA (1)...(19): siRNA sense strand
ggaggaggcgcugaaagaa

SEQ ID NO: 1713705 - RNA, 19 nt, Homo sapiens
  misc_RNA (1)...(19): siRNA sense strand
acaaggaacaccauaugaa

SEQ ID NO: 1713706 - RNA, 19 nt, Homo sapiens
  misc_RNA (1)...(19): siRNA sense strand
ccugauaaauacccuuuca

SEQ ID NO: 1713707 - RNA, 19 nt, Homo sapiens
  misc_RNA (1)...(19): siRNA sense strand
ggacuuaaugaauuuguag

SEQ ID NO: 1713708 - RNA, 19 nt, Homo sapiens
  misc_RNA (1)...(19): siRNA sense strand
caaggaacaccauaugaag

SEQ ID NO: 1713709 - RNA, 19 nt, Homo sapiens
  misc_RNA (1)...(19): siRNA sense strand
uuaaagaguacauccagaa

SEQ ID NO: 1713710 - RNA, 19 nt, Homo sapiens
  misc_RNA (1)...(19): siRNA sense strand
ccaauauauuugaguccuu

SEQ ID NO: 1713711 - RNA, 19 nt, Homo sapiens
  misc_RNA (1)...(19): siRNA sense strand
cggaggaggcgcugaaaga

SEQ ID NO: 1713712 - RNA, 19 nt, Homo sapiens
  misc_RNA (1)...(19): siRNA sense strand
aagaugaggcccaggauau

SEQ ID NO: 1713713 - RNA, 19 nt, Homo sapiens
  misc_RNA (1)...(19): siRNA sense strand
cagaagaauacaagcagaa

SEQ ID NO: 1713714 - RNA, 19 nt, Homo sapiens
  misc_RNA (1)...(19): siRNA sense strand
aggaggcgcugaaagaaca

SEQ ID NO: 1713715 - RNA, 19 nt, Homo sapiens
  misc_RNA (1)...(19): siRNA sense strand
gaccacaaggaacaccaua

SEQ ID NO: 1713716 - RNA, 19 nt, Homo sapiens
  misc_RNA (1)...(19): siRNA sense strand
cacaaggaacaccauauga

SEQ ID NO: 1713717 - RNA, 19 nt, Homo sapiens
  misc_RNA (1)...(19): siRNA sense strand
ccaccgaccagaagaauac

SEQ ID NO: 1713718 - RNA, 19 nt, Homo sapiens
  misc_RNA (1)...(19): siRNA sense strand
gaaaguuagaguggaccua

SEQ ID NO: 1713719 - RNA, 19 nt, Homo sapiens
  misc_RNA (1)...(19): siRNA sense strand
ugaaggcggaguauggaaa

SEQ ID NO: 1713720 - RNA, 19 nt, Homo sapiens
  misc_RNA (1)...(19): siRNA sense strand
gcagaaaauuaaagaguac

SEQ ID NO: 1713721 - RNA, 19 nt, Homo sapiens
  misc_RNA (1)...(19): siRNA sense strand
cauagauccucucaauggu

SEQ ID NO: 1713722 - RNA, 19 nt, Homo sapiens
  misc_RNA (1)...(19): siRNA sense strand
gaaggcggaguauggaaag

SEQ ID NO: 1713723 - RNA, 19 nt, Homo sapiens
  misc_RNA (1)...(19): siRNA sense strand
ccuuucaaaucuccaucua

SEQ ID NO: 1713724 - RNA, 19 nt, Homo sapiens
  misc_RNA (1)...(19): siRNA sense strand
gaaguuuuauggaccacaa

SEQ ID NO: 1713725 - RNA, 19 nt, Homo sapiens
  misc_RNA (1)...(19): siRNA sense strand
aaagaguacauccagaaau

SEQ ID NO: 1713726 - RNA, 19 nt, Homo sapiens
  misc_RNA (1)...(19): siRNA sense strand
guaccuccaccgaccagaa

SEQ ID NO: 1713727 - RNA, 19 nt, Homo sapiens
  misc_RNA (1)...(19): siRNA sense strand
gaagaauacaagcagaaaa

SEQ ID NO: 1713728 - RNA, 19 nt, Homo sapiens
  misc_RNA (1)...(19): siRNA sense strand
agaagaauacaagcagaaa

SEQ ID NO: 1713729 - RNA, 19 nt, Homo sapiens
  misc_RNA (1)...(19): siRNA sense strand
gaccagaagaauacaagca

SEQ ID NO: 1713730 - RNA, 19 nt, Homo sapiens
  misc_RNA (1)...(19): siRNA sense strand
gcucaucgagaguaaacau

SEQ ID NO: 1713731 - RNA, 19 nt, Homo sapiens
  misc_RNA (1)...(19): siRNA sense strand
caucgagaguaaacaugag

SEQ ID NO: 1713732 - RNA, 19 nt, Homo sapiens
  misc_RNA (1)...(19): siRNA sense strand
ccccauagauccucucaau

SEQ ID NO: 1713733 - RNA, 19 nt, Homo sapiens
  misc_RNA (1)...(19): siRNA sense strand
agagcucuaugucugacuu

SEQ ID NO: 1713734 - RNA, 19 nt, Homo sapiens
  misc_RNA (1)...(19): siRNA sense strand
caucggagagcucuauguc

SEQ ID NO: 1713735 - RNA, 19 nt, Homo sapiens
  misc_RNA (1)...(19): siRNA sense strand
ccugggaggacuuaaugaa

SEQ ID NO: 1713736 - RNA, 19 nt, Homo sapiens
  misc_RNA (1)...(19): siRNA sense strand
gucaagcucaucgagagua

SEQ ID NO: 1713737 - RNA, 19 nt, Homo sapiens
  misc_RNA (1)...(19): siRNA sense strand
gaugaggcccaggauaugg

SEQ ID NO: 1713738 - RNA, 19 nt, Homo sapiens
  misc_RNA (1)...(19): siRNA sense strand
gcugaaagaacaggaagag

SEQ ID NO: 1713739 - RNA, 19 nt, Homo sapiens
  misc_RNA (1)...(19): siRNA sense strand
uggaccuaccugauaaaua

SEQ ID NO: 1713740 - RNA, 19 nt, Homo sapiens
  misc_RNA (1)...(19): siRNA sense strand
ggaccuaccugauaaauac

SEQ ID NO: 1713741 - RNA, 19 nt, Homo sapiens
  misc_RNA (1)...(19): siRNA sense strand
aagaguacauccagaaaua

SEQ ID NO: 1713742 - RNA, 19 nt, Homo sapiens
  misc_RNA (1)...(19): siRNA sense strand
gggaggacuuaaugaauuu

SEQ ID NO: 1713743 - RNA, 19 nt, Homo sapiens
  misc_RNA (1)...(19): siRNA sense strand
gaguggaccuaccugauaa

SEQ ID NO: 1713744 - RNA, 19 nt, Homo sapiens
  misc_RNA (1)...(19): siRNA sense strand
gaagaugaggcccaggaua

SEQ ID NO: 1713745 - RNA, 19 nt, Homo sapiens
  misc_RNA (1)...(19): siRNA sense strand
ggcggaguauggaaaguua

SEQ ID NO: 1713746 - RNA, 19 nt, Homo sapiens
  misc_RNA (1)...(19): siRNA sense strand
ugggaggacuuaaugaauu

SEQ ID NO: 1713747 - RNA, 19 nt, Homo sapiens
  misc_RNA (1)...(19): siRNA sense strand
gagaguaaacaugagguua

SEQ ID NO: 1713748 - RNA, 19 nt, Homo sapiens
  misc_RNA (1)...(19): siRNA sense strand
cccaggauauggaguugua

SEQ ID NO: 1713749 - RNA, 19 nt, Homo sapiens
  misc_RNA (1)...(19): siRNA sense strand
ucaagcucaucgagaguaa

SEQ ID NO: 1713750 - RNA, 19 nt, Homo sapiens
  misc_RNA (1)...(19): siRNA sense strand
uaaagaguacauccagaaa

SEQ ID NO: 1713751 - RNA, 19 nt, Homo sapiens
  misc_RNA (1)...(19): siRNA sense strand
agaguggaccuaccugaua

SEQ ID NO: 1713752 - RNA, 19 nt, Homo sapiens
  misc_RNA (1)...(19): siRNA sense strand
ccacaaggaacaccauaug

SEQ ID NO: 1713753 - RNA, 19 nt, Homo sapiens
  misc_RNA (1)...(19): siRNA sense strand
ggaggaggcgcugaaagaa

SEQ ID NO: 1713754 - RNA, 19 nt, Homo sapiens
  misc_RNA (1)...(19): siRNA sense strand
acaaggaacaccauaugaa

SEQ ID NO: 1713755 - RNA, 19 nt, Homo sapiens
  misc_RNA (1)...(19): siRNA sense strand
ccugauaaauacccuuuca

SEQ ID NO: 1713756 - RNA, 19 nt, Homo sapiens
  misc_RNA (1)...(19): siRNA sense strand
ggacuuaaugaauuuguag

SEQ ID NO: 1713757 - RNA, 19 nt, Homo sapiens
  misc_RNA (1)...(19): siRNA sense strand
caaggaacaccauaugaag

SEQ ID NO: 1713758 - RNA, 19 nt, Homo sapiens
  misc_RNA (1)...(19): siRNA sense strand
uuaaagaguacauccagaa

SEQ ID NO: 1713759 - RNA, 19 nt, Homo sapiens
  misc_RNA (1)...(19): siRNA sense strand
ccaauauauuugaguccuu

SEQ ID NO: 1713760 - RNA, 19 nt, Homo sapiens
  misc_RNA (1)...(19): siRNA sense strand
cggaggaggcgcugaaaga

SEQ ID NO: 1713761 - RNA, 19 nt, Homo sapiens
  misc_RNA (1)...(19): siRNA sense strand
aagaugaggcccaggauau

SEQ ID NO: 1713762 - RNA, 19 nt, Homo sapiens
  misc_RNA (1)...(19): siRNA sense strand
cagaagaauacaagcagaa

SEQ ID NO: 1713763 - RNA, 19 nt, Homo sapiens
  misc_RNA (1)...(19): siRNA sense strand
aggaggcgcugaaagaaca

SEQ ID NO: 1713764 - RNA, 19 nt, Homo sapiens
  misc_RNA (1)...(19): siRNA sense strand
gaccacaaggaacaccaua

SEQ ID NO: 1713765 - RNA, 19 nt, Homo sapiens
  misc_RNA (1)...(19): siRNA sense strand
cacaaggaacaccauauga

SEQ ID NO: 1713766 - RNA, 19 nt, Homo sapiens
  misc_RNA (1)...(19): siRNA sense strand
ccaccgaccagaagaauac

SEQ ID NO: 1713767 - RNA, 19 nt, Homo sapiens
  misc_RNA (1)...(19): siRNA sense strand
gaaaguuagaguggaccua

SEQ ID NO: 1713768 - RNA, 19 nt, Homo sapiens
  misc_RNA (1)...(19): siRNA sense strand
ugaaggcggaguauggaaa

SEQ ID NO: 1713769 - RNA, 19 nt, Homo sapiens
  misc_RNA (1)...(19): siRNA sense strand
gcagaaaauuaaagaguac

SEQ ID NO: 1713770 - RNA, 19 nt, Homo sapiens
  misc_RNA (1)...(19): siRNA sense strand
cauagauccucucaauggu

SEQ ID NO: 1713771 - RNA, 19 nt, Homo sapiens
  misc_RNA (1)...(19): siRNA sense strand
gaaggcggaguauggaaag

SEQ ID NO: 1713772 - RNA, 19 nt, Homo sapiens
  misc_RNA (1)...(19): siRNA sense strand
ccuuucaaaucuccaucua

SEQ ID NO: 1713773 - RNA, 19 nt, Homo sapiens
  misc_RNA (1)...(19): siRNA sense strand
gaaguuuuauggaccacaa

SEQ ID NO: 1713774 - RNA, 19 nt, Homo sapiens
  misc_RNA (1)...(19): siRNA sense strand
cuuccugccucaguuauug

SEQ ID NO: 1713775 - RNA, 19 nt, Homo sapiens
  misc_RNA (1)...(19): siRNA sense strand
aaagaguacauccagaaau

SEQ ID NO: 1713776 - RNA, 19 nt, Homo sapiens
  misc_RNA (1)...(19): siRNA sense strand
guaccuccaccgaccagaa

SEQ ID NO: 1713777 - RNA, 19 nt, Homo sapiens
  misc_RNA (1)...(19): siRNA sense strand
gaagaauacaagcagaaaa

SEQ ID NO: 1713778 - RNA, 19 nt, Homo sapiens
  misc_RNA (1)...(19): siRNA sense strand
agaagaauacaagcagaaa

SEQ ID NO: 1713779 - RNA, 19 nt, Homo sapiens
  misc_RNA (1)...(19): siRNA sense strand
gaccagaagaauacaagca

SEQ ID NO: 1713780 - RNA, 19 nt, Homo sapiens
  misc_RNA (1)...(19): siRNA sense strand
gcucaucgagaguaaacau

SEQ ID NO: 1713781 - RNA, 19 nt, Homo sapiens
  misc_RNA (1)...(19): siRNA sense strand
caucgagaguaaacaugag

SEQ ID NO: 1713782 - RNA, 19 nt, Homo sapiens
  misc_RNA (1)...(19): siRNA sense strand
ccccauagauccucucaau

SEQ ID NO: 1713783 - RNA, 19 nt, Homo sapiens
  misc_RNA (1)...(19): siRNA sense strand
agagcucuaugucugacuu

SEQ ID NO: 1713784 - RNA, 19 nt, Homo sapiens
  misc_RNA (1)...(19): siRNA sense strand
caucggagagcucuauguc

SEQ ID NO: 1713785 - RNA, 19 nt, Homo sapiens
  misc_RNA (1)...(19): siRNA sense strand
ccugggaggacuuaaugaa

SEQ ID NO: 1713786 - RNA, 19 nt, Homo sapiens
  misc_RNA (1)...(19): siRNA sense strand
uggaccuaccugauaaaua

SEQ ID NO: 1713787 - RNA, 19 nt, Homo sapiens
  misc_RNA (1)...(19): siRNA sense strand
gaugaggcccaggauaugg

SEQ ID NO: 1713788 - RNA, 19 nt, Homo sapiens
  misc_RNA (1)...(19): siRNA sense strand
gcugaaagaacaggaagag

SEQ ID NO: 1713789 - RNA, 19 nt, Homo sapiens
  misc_RNA (1)...(19): siRNA sense strand
gucaagcucaucgagagua

SEQ ID NO: 1713790 - RNA, 19 nt, Homo sapiens
  misc_RNA (1)...(19): siRNA sense strand
gaacaaaccuagugggaua

SEQ ID NO: 1713791 - RNA, 19 nt, Homo sapiens
  misc_RNA (1)...(19): siRNA sense strand
gagagaagcuggaagaaau

SEQ ID NO: 1713792 - RNA, 19 nt, Homo sapiens
  misc_RNA (1)...(19): siRNA sense strand
ccacagaaaugaacaagaa

SEQ ID NO: 1713793 - RNA, 19 nt, Homo sapiens
  misc_RNA (1)...(19): siRNA sense strand
gagaagaacaugcuaaauu

SEQ ID NO: 1713794 - RNA, 19 nt, Homo sapiens
  misc_RNA (1)...(19): siRNA sense strand
gcacgcagacugugaauuu

SEQ ID NO: 1713795 - RNA, 19 nt, Homo sapiens
  misc_RNA (1)...(19): siRNA sense strand
ugaguaaucugguuguuaa

SEQ ID NO: 1713796 - RNA, 19 nt, Homo sapiens
  misc_RNA (1)...(19): siRNA sense strand
ggacuuaacagaugaagaa

SEQ ID NO: 1713797 - RNA, 19 nt, Homo sapiens
  misc_RNA (1)...(19): siRNA sense strand
gagaacaacuugccuaucu

SEQ ID NO: 1713798 - RNA, 19 nt, Homo sapiens
  misc_RNA (1)...(19): siRNA sense strand
gaacggcugugccaagaug

SEQ ID NO: 1713799 - RNA, 19 nt, Homo sapiens
  misc_RNA (1)...(19): siRNA sense strand
caaacagcauuaagaagaa

SEQ ID NO: 1713800 - RNA, 19 nt, Homo sapiens
  misc_RNA (1)...(19): siRNA sense strand
cagaaggucuuaauuaugg

SEQ ID NO: 1713801 - RNA, 19 nt, Homo sapiens
  misc_RNA (1)...(19): siRNA sense strand
gaacgggacggaaugcuaa

SEQ ID NO: 1713802 - RNA, 19 nt, Homo sapiens
  misc_RNA (1)...(19): siRNA sense strand
gaggagguguguuuaucua

SEQ ID NO: 1713803 - RNA, 19 nt, Homo sapiens
  misc_RNA (1)...(19): siRNA sense strand
gaggagaguucagagaauu

SEQ ID NO: 1713804 - RNA, 19 nt, Homo sapiens
  misc_RNA (1)...(19): siRNA sense strand
ccucagaaggucuuaauua

SEQ ID NO: 1713805 - RNA, 19 nt, Homo sapiens
  misc_RNA (1)...(19): siRNA sense strand
ccaaacagcauuaagaaga

SEQ ID NO: 1713806 - RNA, 19 nt, Homo sapiens
  misc_RNA (1)...(19): siRNA sense strand
ucagugagcagcaugaaua

SEQ ID NO: 1713807 - RNA, 19 nt, Homo sapiens
  misc_RNA (1)...(19): siRNA sense strand
gaggacgaauuccaaagaa

SEQ ID NO: 1713808 - RNA, 19 nt, Homo sapiens
  misc_RNA (1)...(19): siRNA sense strand
aaagacugguccaaagaua

SEQ ID NO: 1713809 - RNA, 19 nt, Homo sapiens
  misc_RNA (1)...(19): siRNA sense strand
gcacaaacuugaucaucca

SEQ ID NO: 1713810 - RNA, 19 nt, Homo sapiens
  misc_RNA (1)...(19): siRNA sense strand
cuuaacagaugaagaagaa

SEQ ID NO: 1713811 - RNA, 19 nt, Homo sapiens
  misc_RNA (1)...(19): siRNA sense strand
acaagaagcucagcgcaaa

SEQ ID NO: 1713812 - RNA, 19 nt, Homo sapiens
  misc_RNA (1)...(19): siRNA sense strand
gaaaacgaaugaagaguug

SEQ ID NO: 1713813 - RNA, 19 nt, Homo sapiens
  misc_RNA (1)...(19): siRNA sense strand
caacuugccuaucuggaau

SEQ ID NO: 1713814 - RNA, 19 nt, Homo sapiens
  misc_RNA (1)...(19): siRNA sense strand
ggauuguaauucagaagaa

SEQ ID NO: 1713815 - RNA, 19 nt, Homo sapiens
  misc_RNA (1)...(19): siRNA sense strand
gaacaugcuaaauuucuga

SEQ ID NO: 1713816 - RNA, 19 nt, Homo sapiens
  misc_RNA (1)...(19): siRNA sense strand
agaagaggcugaugaugga

SEQ ID NO: 1713817 - RNA, 19 nt, Homo sapiens
  misc_RNA (1)...(19): siRNA sense strand
gcaaaugaaggccuuacaa

SEQ ID NO: 1713818 - RNA, 19 nt, Homo sapiens
  misc_RNA (1)...(19): siRNA sense strand
ucuggaaucugaggaauuu

SEQ ID NO: 1713819 - RNA, 19 nt, Homo sapiens
  misc_RNA (1)...(19): siRNA sense strand
agaaggaaaucagaagaaa

SEQ ID NO: 1713820 - RNA, 19 nt, Homo sapiens
  misc_RNA (1)...(19): siRNA sense strand
gagaggagaguucagagaa

SEQ ID NO: 1713821 - RNA, 19 nt, Homo sapiens
  misc_RNA (1)...(19): siRNA sense strand
gagaaggaaaucagaagaa

SEQ ID NO: 1713822 - RNA, 19 nt, Homo sapiens
  misc_RNA (1)...(19): siRNA sense strand
guucagaggagguguguuu

SEQ ID NO: 1713823 - RNA, 19 nt, Homo sapiens
  misc_RNA (1)...(19): siRNA sense strand
agaaauagauugggugaca

SEQ ID NO: 1713824 - RNA, 19 nt, Homo sapiens
  misc_RNA (1)...(19): siRNA sense strand
cgaguauccuccacagaaa

SEQ ID NO: 1713825 - RNA, 19 nt, Homo sapiens
  misc_RNA (1)...(19): siRNA sense strand
guaaagccaagaagaagaa

SEQ ID NO: 1713826 - RNA, 19 nt, Homo sapiens
  misc_RNA (1)...(19): siRNA sense strand
agaagaaguucccgcauca

SEQ ID NO: 1713827 - RNA, 19 nt, Homo sapiens
  misc_RNA (1)...(19): siRNA sense strand
cugcagagcucaagugaag

SEQ ID NO: 1713828 - RNA, 19 nt, Homo sapiens
  misc_RNA (1)...(19): siRNA sense strand
gaaaucagaagaaauacag

SEQ ID NO: 1713829 - RNA, 19 nt, Homo sapiens
  misc_RNA (1)...(19): siRNA sense strand
ggagguguguuuaucuauc

SEQ ID NO: 1713830 - RNA, 19 nt, Homo sapiens
  misc_RNA (1)...(19): siRNA sense strand
gcauauggaaacugaauga

SEQ ID NO: 1713831 - RNA, 19 nt, Homo sapiens
  misc_RNA (1)...(19): siRNA sense strand
gaaacugaaugaucuucgu

SEQ ID NO: 1713832 - RNA, 19 nt, Homo sapiens
  misc_RNA (1)...(19): siRNA sense strand
gaagaacaugcuaaauuuc

SEQ ID NO: 1713833 - RNA, 19 nt, Homo sapiens
  misc_RNA (1)...(19): siRNA sense strand
gagaugaggagaaggaaau

SEQ ID NO: 1713834 - RNA, 19 nt, Homo sapiens
  misc_RNA (1)...(19): siRNA sense strand
ggaggacgaauuccaaaga

SEQ ID NO: 1713835 - RNA, 19 nt, Homo sapiens
  misc_RNA (1)...(19): siRNA sense strand
gcagagcucaagugaaguu

SEQ ID NO: 1713836 - RNA, 19 nt, Homo sapiens
  misc_RNA (1)...(19): siRNA sense strand
ggagaaacucuguuaccaa

SEQ ID NO: 1713837 - RNA, 19 nt, Homo sapiens
  misc_RNA (1)...(19): siRNA sense strand
ggaaaagacugguccaaag

SEQ ID NO: 1713838 - RNA, 19 nt, Homo sapiens
  misc_RNA (1)...(19): siRNA sense strand
uauggaaacugaaugaucu

SEQ ID NO: 1713839 - RNA, 19 nt, Homo sapiens
  misc_RNA (1)...(19): siRNA sense strand
ggaacgggacggaaugcua

SEQ ID NO: 1713840 - RNA, 19 nt, Homo sapiens
  misc_RNA (1)...(19): siRNA sense strand
cggugaaucuuauacagaa

SEQ ID NO: 1713841 - RNA, 19 nt, Homo sapiens
  misc_RNA (1)...(19): siRNA sense strand
cgaacaagcacugcaguaa

SEQ ID NO: 1713842 - RNA, 19 nt, Homo sapiens
  misc_RNA (1)...(19): siRNA sense strand
gaaggaaaucagaagaaau

SEQ ID NO: 1713843 - RNA, 19 nt, Homo sapiens
  misc_RNA (1)...(19): siRNA sense strand
gcaagaggaauuaaggaau

SEQ ID NO: 1713844 - RNA, 19 nt, Homo sapiens
  misc_RNA (1)...(19): siRNA sense strand
cucagaaggucuuaauuau

SEQ ID NO: 1713845 - RNA, 19 nt, Homo sapiens
  misc_RNA (1)...(19): siRNA sense strand
gcugcuaucaccaaauuaa

SEQ ID NO: 1713846 - RNA, 19 nt, Homo sapiens
  misc_RNA (1)...(19): siRNA sense strand
cagcggauguuggagauga

SEQ ID NO: 1713847 - RNA, 19 nt, Homo sapiens
  misc_RNA (1)...(19): siRNA sense strand
caacagaagcagcggaugu

SEQ ID NO: 1713848 - RNA, 19 nt, Homo sapiens
  misc_RNA (1)...(19): siRNA sense strand
gacgauuucucggaacaaa

SEQ ID NO: 1713849 - RNA, 19 nt, Homo sapiens
  misc_RNA (1)...(19): siRNA sense strand
ggacggaaugcuaaaggaa

SEQ ID NO: 1713850 - RNA, 19 nt, Homo sapiens
  misc_RNA (1)...(19): siRNA sense strand
gaccaaaacugagugcuuu

SEQ ID NO: 1713851 - RNA, 19 nt, Homo sapiens
  misc_RNA (1)...(19): siRNA sense strand
ggagaaggaaaucagaaga

SEQ ID NO: 1713852 - RNA, 19 nt, Homo sapiens
  misc_RNA (1)...(19): siRNA sense strand
ccucagcacucuugaagca

SEQ ID NO: 1713853 - RNA, 19 nt, Homo sapiens
  misc_RNA (1)...(19): siRNA sense strand
guuaagggcacaaacuuga

SEQ ID NO: 1713854 - RNA, 19 nt, Homo sapiens
  misc_RNA (1)...(19): siRNA sense strand
ggacgaauuccaaagaagu

SEQ ID NO: 1713855 - RNA, 19 nt, Homo sapiens
  misc_RNA (1)...(19): siRNA sense strand
gaauucaggagucaacaug

SEQ ID NO: 1713856 - RNA, 19 nt, Homo sapiens
  misc_RNA (1)...(19): siRNA sense strand
uaacuguggccucuacaaa

SEQ ID NO: 1713857 - RNA, 19 nt, Homo sapiens
  misc_RNA (1)...(19): siRNA sense strand
ugaccgcacugcuggaaga

SEQ ID NO: 1713858 - RNA, 19 nt, Homo sapiens
  misc_RNA (1)...(19): siRNA sense strand
gaaauagauugggugacau

SEQ ID NO: 1713859 - RNA, 19 nt, Homo sapiens
  misc_RNA (1)...(19): siRNA sense strand
gaagcuggaagaaauagau

SEQ ID NO: 1713860 - RNA, 19 nt, Homo sapiens
  misc_RNA (1)...(19): siRNA sense strand
gaggagaagaacaugcuaa

SEQ ID NO: 1713861 - RNA, 19 nt, Homo sapiens
  misc_RNA (1)...(19): siRNA sense strand
gaacaagcacugcaguaac

SEQ ID NO: 1713862 - RNA, 19 nt, Homo sapiens
  misc_RNA (1)...(19): siRNA sense strand
cagaggagguguguuuauc

SEQ ID NO: 1713863 - RNA, 19 nt, Homo sapiens
  misc_RNA (1)...(19): siRNA sense strand
ccaaagauaggaggagaaa

SEQ ID NO: 1713864 - RNA, 19 nt, Homo sapiens
  misc_RNA (1)...(19): siRNA sense strand
gagagaacaacuugccuau

SEQ ID NO: 1713865 - RNA, 19 nt, Homo sapiens
  misc_RNA (1)...(19): siRNA sense strand
gauguucucuuuuaugaug

SEQ ID NO: 1713866 - RNA, 19 nt, Homo sapiens
  misc_RNA (1)...(19): siRNA sense strand
gaaguucccgcaucacagu

SEQ ID NO: 1713867 - RNA, 19 nt, Homo sapiens
  misc_RNA (1)...(19): siRNA sense strand
uugccuaucuggaaucuga

SEQ ID NO: 1713868 - RNA, 19 nt, Homo sapiens
  misc_RNA (1)...(19): siRNA sense strand
gcccagcugugccaucuuc

SEQ ID NO: 1713869 - RNA, 19 nt, Homo sapiens
  misc_RNA (1)...(19): siRNA sense strand
gcucugaggaguucaagga

SEQ ID NO: 1713870 - RNA, 19 nt, Homo sapiens
  misc_RNA (1)...(19): siRNA sense strand
cgacucaacccaucugugu

SEQ ID NO: 1713871 - RNA, 19 nt, Homo sapiens
  misc_RNA (1)...(19): siRNA sense strand
cgaaugaagaguugcaaga

SEQ ID NO: 1713872 - RNA, 19 nt, Homo sapiens
  misc_RNA (1)...(19): siRNA sense strand
agucagccuuggauuguaa

SEQ ID NO: 1713873 - RNA, 19 nt, Homo sapiens
  misc_RNA (1)...(19): siRNA sense strand
ucugaacagccuuaaauaa

SEQ ID NO: 1713874 - RNA, 19 nt, Homo sapiens
  misc_RNA (1)...(19): siRNA sense strand
gaaaagacugguccaaaga

SEQ ID NO: 1713875 - RNA, 19 nt, Homo sapiens
  misc_RNA (1)...(19): siRNA sense strand
gggacggaaugcuaaagga

SEQ ID NO: 1713876 - RNA, 19 nt, Homo sapiens
  misc_RNA (1)...(19): siRNA sense strand
ugagaaacaucagagaagu

SEQ ID NO: 1713877 - RNA, 19 nt, Homo sapiens
  misc_RNA (1)...(19): siRNA sense strand
ggugaaggaacguguagaa

SEQ ID NO: 1713878 - RNA, 19 nt, Homo sapiens
  misc_RNA (1)...(19): siRNA sense strand
ggaaaucagaagaaauaca

SEQ ID NO: 1713879 - RNA, 19 nt, Homo sapiens
  misc_RNA (1)...(19): siRNA sense strand
ugaauuugcgugacuguga

SEQ ID NO: 1713880 - RNA, 19 nt, Homo sapiens
  misc_RNA (1)...(19): siRNA sense strand
gaaccuguaaagccaagaa

SEQ ID NO: 1713881 - RNA, 19 nt, Homo sapiens
  misc_RNA (1)...(19): siRNA sense strand
uagauugggugacauuugg

SEQ ID NO: 1713882 - RNA, 19 nt, Homo sapiens
  misc_RNA (1)...(19): siRNA sense strand
gaaaagauggccagagaga

SEQ ID NO: 1713883 - RNA, 19 nt, Homo sapiens
  misc_RNA (1)...(19): siRNA sense strand
ggagaggagaguucagaga

SEQ ID NO: 1713884 - RNA, 19 nt, Homo sapiens
  misc_RNA (1)...(19): siRNA sense strand
caaaugaaggccuuacaag

SEQ ID NO: 1713885 - RNA, 19 nt, Homo sapiens
  misc_RNA (1)...(19): siRNA sense strand
aaacaaacccaaacagcau

SEQ ID NO: 1713886 - RNA, 19 nt, Homo sapiens
  misc_RNA (1)...(19): siRNA sense strand
cggcgacggugaaucuuau

SEQ ID NO: 1713887 - RNA, 19 nt, Homo sapiens
  misc_RNA (1)...(19): siRNA sense strand
agccacagcuucagggauu

SEQ ID NO: 1713888 - RNA, 19 nt, Homo sapiens
  misc_RNA (1)...(19): siRNA sense strand
gauaacuagaggucaaauu

SEQ ID NO: 1713889 - RNA, 19 nt, Homo sapiens
  misc_RNA (1)...(19): siRNA sense strand
aaaugaaggccuuacaaga

SEQ ID NO: 1713890 - RNA, 19 nt, Homo sapiens
  misc_RNA (1)...(19): siRNA sense strand
gaacaaaccuagugggaua

SEQ ID NO: 1713891 - RNA, 19 nt, Homo sapiens
  misc_RNA (1)...(19): siRNA sense strand
gagagaagcuggaagaaau

SEQ ID NO: 1713892 - RNA, 19 nt, Homo sapiens
  misc_RNA (1)...(19): siRNA sense strand
ccacagaaaugaacaagaa

SEQ ID NO: 1713893 - RNA, 19 nt, Homo sapiens
  misc_RNA (1)...(19): siRNA sense strand
gagaagaacaugcuaaauu

SEQ ID NO: 1713894 - RNA, 19 nt, Homo sapiens
  misc_RNA (1)...(19): siRNA sense strand
gcacgcagacugugaauuu

SEQ ID NO: 1713895 - RNA, 19 nt, Homo sapiens
  misc_RNA (1)...(19): siRNA sense strand
ugaguaaucugguuguuaa

SEQ ID NO: 1713896 - RNA, 19 nt, Homo sapiens
  misc_RNA (1)...(19): siRNA sense strand
ggacuuaacagaugaagaa

SEQ ID NO: 1713897 - RNA, 19 nt, Homo sapiens
  misc_RNA (1)...(19): siRNA sense strand
gagaacaacuugccuaucu

SEQ ID NO: 1713898 - RNA, 19 nt, Homo sapiens
  misc_RNA (1)...(19): siRNA sense strand
gaacggcugugccaagaug

SEQ ID NO: 1713899 - RNA, 19 nt, Homo sapiens
  misc_RNA (1)...(19): siRNA sense strand
caaacagcauuaagaagaa

SEQ ID NO: 1713900 - RNA, 19 nt, Homo sapiens
  misc_RNA (1)...(19): siRNA sense strand
cagaaggucuuaauuaugg

SEQ ID NO: 1713901 - RNA, 19 nt, Homo sapiens
  misc_RNA (1)...(19): siRNA sense strand
gaacgggacggaaugcuaa

SEQ ID NO: 1713902 - RNA, 19 nt, Homo sapiens
  misc_RNA (1)...(19): siRNA sense strand
gaggagguguguuuaucua

SEQ ID NO: 1713903 - RNA, 19 nt, Homo sapiens
  misc_RNA (1)...(19): siRNA sense strand
gaggagaguucagagaauu

SEQ ID NO: 1713904 - RNA, 19 nt, Homo sapiens
  misc_RNA (1)...(19): siRNA sense strand
ccucagaaggucuuaauua

SEQ ID NO: 1713905 - RNA, 19 nt, Homo sapiens
  misc_RNA (1)...(19): siRNA sense strand
ccaaacagcauuaagaaga

SEQ ID NO: 1713906 - RNA, 19 nt, Homo sapiens
  misc_RNA (1)...(19): siRNA sense strand
ucagugagcagcaugaaua

SEQ ID NO: 1713907 - RNA, 19 nt, Homo sapiens
  misc_RNA (1)...(19): siRNA sense strand
gaggacgaauuccaaagaa

SEQ ID NO: 1713908 - RNA, 19 nt, Homo sapiens
  misc_RNA (1)...(19): siRNA sense strand
aaagacugguccaaagaua

SEQ ID NO: 1713909 - RNA, 19 nt, Homo sapiens
  misc_RNA (1)...(19): siRNA sense strand
gcacaaacuugaucaucca

SEQ ID NO: 1713910 - RNA, 19 nt, Homo sapiens
  misc_RNA (1)...(19): siRNA sense strand
cuuaacagaugaagaagaa

SEQ ID NO: 1713911 - RNA, 19 nt, Homo sapiens
  misc_RNA (1)...(19): siRNA sense strand
acaagaagcucagcgcaaa

SEQ ID NO: 1713912 - RNA, 19 nt, Homo sapiens
  misc_RNA (1)...(19): siRNA sense strand
gaaaacgaaugaagaguug

SEQ ID NO: 1713913 - RNA, 19 nt, Homo sapiens
  misc_RNA (1)...(19): siRNA sense strand
caacuugccuaucuggaau

SEQ ID NO: 1713914 - RNA, 19 nt, Homo sapiens
  misc_RNA (1)...(19): siRNA sense strand
ggauuguaauucagaagaa

SEQ ID NO: 1713915 - RNA, 19 nt, Homo sapiens
  misc_RNA (1)...(19): siRNA sense strand
gaacaugcuaaauuucuga

SEQ ID NO: 1713916 - RNA, 19 nt, Homo sapiens
  misc_RNA (1)...(19): siRNA sense strand
agaagaggcugaugaugga

SEQ ID NO: 1713917 - RNA, 19 nt, Homo sapiens
  misc_RNA (1)...(19): siRNA sense strand
gcaaaugaaggccuuacaa

SEQ ID NO: 1713918 - RNA, 19 nt, Homo sapiens
  misc_RNA (1)...(19): siRNA sense strand
ucuggaaucugaggaauuu

SEQ ID NO: 1713919 - RNA, 19 nt, Homo sapiens
  misc_RNA (1)...(19): siRNA sense strand
agaaggaaaucagaagaaa

SEQ ID NO: 1713920 - RNA, 19 nt, Homo sapiens
  misc_RNA (1)...(19): siRNA sense strand
gagaggagaguucagagaa

SEQ ID NO: 1713921 - RNA, 19 nt, Homo sapiens
  misc_RNA (1)...(19): siRNA sense strand
gagaaggaaaucagaagaa

SEQ ID NO: 1713922 - RNA, 19 nt, Homo sapiens
  misc_RNA (1)...(19): siRNA sense strand
guucagaggagguguguuu

SEQ ID NO: 1713923 - RNA, 19 nt, Homo sapiens
  misc_RNA (1)...(19): siRNA sense strand
agaaauagauugggugaca

SEQ ID NO: 1713924 - RNA, 19 nt, Homo sapiens
  misc_RNA (1)...(19): siRNA sense strand
cgaguauccuccacagaaa

SEQ ID NO: 1713925 - RNA, 19 nt, Homo sapiens
  misc_RNA (1)...(19): siRNA sense strand
guaaagccaagaagaagaa

SEQ ID NO: 1713926 - RNA, 19 nt, Homo sapiens
  misc_RNA (1)...(19): siRNA sense strand
agaagaaguucccgcauca

SEQ ID NO: 1713927 - RNA, 19 nt, Homo sapiens
  misc_RNA (1)...(19): siRNA sense strand
cugcagagcucaagugaag

SEQ ID NO: 1713928 - RNA, 19 nt, Homo sapiens
  misc_RNA (1)...(19): siRNA sense strand
gaaaucagaagaaauacag

SEQ ID NO: 1713929 - RNA, 19 nt, Homo sapiens
  misc_RNA (1)...(19): siRNA sense strand
ggagguguguuuaucuauc

SEQ ID NO: 1713930 - RNA, 19 nt, Homo sapiens
  misc_RNA (1)...(19): siRNA sense strand
gcauauggaaacugaauga

SEQ ID NO: 1713931 - RNA, 19 nt, Homo sapiens
  misc_RNA (1)...(19): siRNA sense strand
gaaacugaaugaucuucgu

SEQ ID NO: 1713932 - RNA, 19 nt, Homo sapiens
  misc_RNA (1)...(19): siRNA sense strand
gaagaacaugcuaaauuuc

SEQ ID NO: 1713933 - RNA, 19 nt, Homo sapiens
  misc_RNA (1)...(19): siRNA sense strand
gagaugaggagaaggaaau

SEQ ID NO: 1713934 - RNA, 19 nt, Homo sapiens
  misc_RNA (1)...(19): siRNA sense strand
ggaggacgaauuccaaaga

SEQ ID NO: 1713935 - RNA, 19 nt, Homo sapiens
  misc_RNA (1)...(19): siRNA sense strand
gcagagcucaagugaaguu

SEQ ID NO: 1713936 - RNA, 19 nt, Homo sapiens
  misc_RNA (1)...(19): siRNA sense strand
ggagaaacucuguuaccaa

SEQ ID NO: 1713937 - RNA, 19 nt, Homo sapiens
  misc_RNA (1)...(19): siRNA sense strand
ggaaaagacugguccaaag

SEQ ID NO: 1713938 - RNA, 19 nt, Homo sapiens
  misc_RNA (1)...(19): siRNA sense strand
uauggaaacugaaugaucu

SEQ ID NO: 1713939 - RNA, 19 nt, Homo sapiens
  misc_RNA (1)...(19): siRNA sense strand
ggaacgggacggaaugcua

SEQ ID NO: 1713940 - RNA, 19 nt, Homo sapiens
  misc_RNA (1)...(19): siRNA sense strand
cggugaaucuuauacagaa

SEQ ID NO: 1713941 - RNA, 19 nt, Homo sapiens
  misc_RNA (1)...(19): siRNA sense strand
cgaacaagcacugcaguaa

SEQ ID NO: 1713942 - RNA, 19 nt, Homo sapiens
  misc_RNA (1)...(19): siRNA sense strand
gaaggaaaucagaagaaau

SEQ ID NO: 1713943 - RNA, 19 nt, Homo sapiens
  misc_RNA (1)...(19): siRNA sense strand
gcaagaggaauuaaggaau

SEQ ID NO: 1713944 - RNA, 19 nt, Homo sapiens
  misc_RNA (1)...(19): siRNA sense strand
cucagaaggucuuaauuau

SEQ ID NO: 1713945 - RNA, 19 nt, Homo sapiens
  misc_RNA (1)...(19): siRNA sense strand
gcugcuaucaccaaauuaa

SEQ ID NO: 1713946 - RNA, 19 nt, Homo sapiens
  misc_RNA (1)...(19): siRNA sense strand
cagcggauguuggagauga

SEQ ID NO: 1713947 - RNA, 19 nt, Homo sapiens
  misc_RNA (1)...(19): siRNA sense strand
caacagaagcagcggaugu

SEQ ID NO: 1713948 - RNA, 19 nt, Homo sapiens
  misc_RNA (1)...(19): siRNA sense strand
gacgauuucucggaacaaa

SEQ ID NO: 1713949 - RNA, 19 nt, Homo sapiens
  misc_RNA (1)...(19): siRNA sense strand
ggacggaaugcuaaaggaa

SEQ ID NO: 1713950 - RNA, 19 nt, Homo sapiens
  misc_RNA (1)...(19): siRNA sense strand
gaccaaaacugagugcuuu

SEQ ID NO: 1713951 - RNA, 19 nt, Homo sapiens
  misc_RNA (1)...(19): siRNA sense strand
ggagaaggaaaucagaaga

SEQ ID NO: 1713952 - RNA, 19 nt, Homo sapiens
  misc_RNA (1)...(19): siRNA sense strand
ccucagcacucuugaagca

SEQ ID NO: 1713953 - RNA, 19 nt, Homo sapiens
  misc_RNA (1)...(19): siRNA sense strand
guuaagggcacaaacuuga

SEQ ID NO: 1713954 - RNA, 19 nt, Homo sapiens
  misc_RNA (1)...(19): siRNA sense strand
ggacgaauuccaaagaagu

SEQ ID NO: 1713955 - RNA, 19 nt, Homo sapiens
  misc_RNA (1)...(19): siRNA sense strand
gaauucaggagucaacaug

SEQ ID NO: 1713956 - RNA, 19 nt, Homo sapiens
  misc_RNA (1)...(19): siRNA sense strand
uaacuguggccucuacaaa

SEQ ID NO: 1713957 - RNA, 19 nt, Homo sapiens
  misc_RNA (1)...(19): siRNA sense strand
ugaccgcacugcuggaaga

SEQ ID NO: 1713958 - RNA, 19 nt, Homo sapiens
  misc_RNA (1)...(19): siRNA sense strand
gaaauagauugggugacau

SEQ ID NO: 1713959 - RNA, 19 nt, Homo sapiens
  misc_RNA (1)...(19): siRNA sense strand
gaagcuggaagaaauagau

SEQ ID NO: 1713960 - RNA, 19 nt, Homo sapiens
  misc_RNA (1)...(19): siRNA sense strand
gaggagaagaacaugcuaa

SEQ ID NO: 1713961 - RNA, 19 nt, Homo sapiens
  misc_RNA (1)...(19): siRNA sense strand
gaacaagcacugcaguaac

SEQ ID NO: 1713962 - RNA, 19 nt, Homo sapiens
  misc_RNA (1)...(19): siRNA sense strand
cagaggagguguguuuauc

SEQ ID NO: 1713963 - RNA, 19 nt, Homo sapiens
  misc_RNA (1)...(19): siRNA sense strand
ccaaagauaggaggagaaa

SEQ ID NO: 1713964 - RNA, 19 nt, Homo sapiens
  misc_RNA (1)...(19): siRNA sense strand
gagagaacaacuugccuau

SEQ ID NO: 1713965 - RNA, 19 nt, Homo sapiens
  misc_RNA (1)...(19): siRNA sense strand
gauguucucuuuuaugaug

SEQ ID NO: 1713966 - RNA, 19 nt, Homo sapiens
  misc_RNA (1)...(19): siRNA sense strand
gaaguucccgcaucacagu

SEQ ID NO: 1713967 - RNA, 19 nt, Homo sapiens
  misc_RNA (1)...(19): siRNA sense strand
uugccuaucuggaaucuga

SEQ ID NO: 1713968 - RNA, 19 nt, Homo sapiens
  misc_RNA (1)...(19): siRNA sense strand
gcccagcugugccaucuuc

SEQ ID NO: 1713969 - RNA, 19 nt, Homo sapiens
  misc_RNA (1)...(19): siRNA sense strand
gcucugaggaguucaagga

SEQ ID NO: 1713970 - RNA, 19 nt, Homo sapiens
  misc_RNA (1)...(19): siRNA sense strand
cgacucaacccaucugugu

SEQ ID NO: 1713971 - RNA, 19 nt, Homo sapiens
  misc_RNA (1)...(19): siRNA sense strand
cgaaugaagaguugcaaga

SEQ ID NO: 1713972 - RNA, 19 nt, Homo sapiens
  misc_RNA (1)...(19): siRNA sense strand
agucagccuuggauuguaa

SEQ ID NO: 1713973 - RNA, 19 nt, Homo sapiens
  misc_RNA (1)...(19): siRNA sense strand
ucugaacagccuuaaauaa

SEQ ID NO: 1713974 - RNA, 19 nt, Homo sapiens
  misc_RNA (1)...(19): siRNA sense strand
gaaaagacugguccaaaga

SEQ ID NO: 1713975 - RNA, 19 nt, Homo sapiens
  misc_RNA (1)...(19): siRNA sense strand
gggacggaaugcuaaagga

SEQ ID NO: 1713976 - RNA, 19 nt, Homo sapiens
  misc_RNA (1)...(19): siRNA sense strand
ugagaaacaucagagaagu

SEQ ID NO: 1713977 - RNA, 19 nt, Homo sapiens
  misc_RNA (1)...(19): siRNA sense strand
ggugaaggaacguguagaa

SEQ ID NO: 1713978 - RNA, 19 nt, Homo sapiens
  misc_RNA (1)...(19): siRNA sense strand
ggaaaucagaagaaauaca

SEQ ID NO: 1713979 - RNA, 19 nt, Homo sapiens
  misc_RNA (1)...(19): siRNA sense strand
ugaauuugcgugacuguga

SEQ ID NO: 1713980 - RNA, 19 nt, Homo sapiens
  misc_RNA (1)...(19): siRNA sense strand
gaaccuguaaagccaagaa

SEQ ID NO: 1713981 - RNA, 19 nt, Homo sapiens
  misc_RNA (1)...(19): siRNA sense strand
uagauugggugacauuugg

SEQ ID NO: 1713982 - RNA, 19 nt, Homo sapiens
  misc_RNA (1)...(19): siRNA sense strand
gaaaagauggccagagaga

SEQ ID NO: 1713983 - RNA, 19 nt, Homo sapiens
  misc_RNA (1)...(19): siRNA sense strand
ggagaggagaguucagaga

SEQ ID NO: 1713984 - RNA, 19 nt, Homo sapiens
  misc_RNA (1)...(19): siRNA sense strand
caaaugaaggccuuacaag

SEQ ID NO: 1713985 - RNA, 19 nt, Homo sapiens
  misc_RNA (1)...(19): siRNA sense strand
aaacaaacccaaacagcau

SEQ ID NO: 1713986 - RNA, 19 nt, Homo sapiens
  misc_RNA (1)...(19): siRNA sense strand
cggcgacggugaaucuuau

SEQ ID NO: 1713987 - RNA, 19 nt, Homo sapiens
  misc_RNA (1)...(19): siRNA sense strand
agccacagcuucagggauu

SEQ ID NO: 1713988 - RNA, 19 nt, Homo sapiens
  misc_RNA (1)...(19): siRNA sense strand
gauaacuagaggucaaauu

SEQ ID NO: 1713989 - RNA, 19 nt, Homo sapiens
  misc_RNA (1)...(19): siRNA sense strand
aaaugaaggccuuacaaga

SEQ ID NO: 1713990 - RNA, 19 nt, Homo sapiens
  misc_RNA (1)...(19): siRNA sense strand
ggacagcucugauggaaua

SEQ ID NO: 1713991 - RNA, 19 nt, Homo sapiens
  misc_RNA (1)...(19): siRNA sense strand
gcuaugaacucuccaaagu

SEQ ID NO: 1713992 - RNA, 19 nt, Homo sapiens
  misc_RNA (1)...(19): siRNA sense strand
caacaaacgucuggaugaa

SEQ ID NO: 1713993 - RNA, 19 nt, Homo sapiens
  misc_RNA (1)...(19): siRNA sense strand
auaagacacuguacuauga

SEQ ID NO: 1713994 - RNA, 19 nt, Homo sapiens
  misc_RNA (1)...(19): siRNA sense strand
gaaaucaccagcaucaaga

SEQ ID NO: 1713995 - RNA, 19 nt, Homo sapiens
  misc_RNA (1)...(19): siRNA sense strand
gcaagcugcugaucgaguu

SEQ ID NO: 1713996 - RNA, 19 nt, Homo sapiens
  misc_RNA (1)...(19): siRNA sense strand
gacguaagaacaagaguua

SEQ ID NO: 1713997 - RNA, 19 nt, Homo sapiens
  misc_RNA (1)...(19): siRNA sense strand
cacaggaacucaccacauu

SEQ ID NO: 1713998 - RNA, 19 nt, Homo sapiens
  misc_RNA (1)...(19): siRNA sense strand
gaagaacauugagugcauu

SEQ ID NO: 1713999 - RNA, 19 nt, Homo sapiens
  misc_RNA (1)...(19): siRNA sense strand
ccacagaucaccaucaaug

SEQ ID NO: 1714000 - RNA, 19 nt, Homo sapiens
  misc_RNA (1)...(19): siRNA sense strand
acaaacgucuggaugaaug

SEQ ID NO: 1714001 - RNA, 19 nt, Homo sapiens
  misc_RNA (1)...(19): siRNA sense strand
caacggaagacuacaaugu

SEQ ID NO: 1714002 - RNA, 19 nt, Homo sapiens
  misc_RNA (1)...(19): siRNA sense strand
caggacagcucugauggaa

SEQ ID NO: 1714003 - RNA, 19 nt, Homo sapiens
  misc_RNA (1)...(19): siRNA sense strand
ggccacagaucaccaucaa

SEQ ID NO: 1714004 - RNA, 19 nt, Homo sapiens
  misc_RNA (1)...(19): siRNA sense strand
gaccaagugugaccuacga

SEQ ID NO: 1714005 - RNA, 19 nt, Homo sapiens
  misc_RNA (1)...(19): siRNA sense strand
ugaagaacauugagugcau

SEQ ID NO: 1714006 - RNA, 19 nt, Homo sapiens
  misc_RNA (1)...(19): siRNA sense strand
caauguggccugcauccua

SEQ ID NO: 1714007 - RNA, 19 nt, Homo sapiens
  misc_RNA (1)...(19): siRNA sense strand
ccacauugccuguccucua

SEQ ID NO: 1714008 - RNA, 19 nt, Homo sapiens
  misc_RNA (1)...(19): siRNA sense strand
ggacguaagaacaagaguu

SEQ ID NO: 1714009 - RNA, 19 nt, Homo sapiens
  misc_RNA (1)...(19): siRNA sense strand
ucaaucucaucaacuacua

SEQ ID NO: 1714010 - RNA, 19 nt, Homo sapiens
  misc_RNA (1)...(19): siRNA sense strand
gaaccaggacaacgaagau

SEQ ID NO: 1714011 - RNA, 19 nt, Homo sapiens
  misc_RNA (1)...(19): siRNA sense strand
ucaacaaacgucuggauga

SEQ ID NO: 1714012 - RNA, 19 nt, Homo sapiens
  misc_RNA (1)...(19): siRNA sense strand
aauguggccugcauccuaa

SEQ ID NO: 1714013 - RNA, 19 nt, Homo sapiens
  misc_RNA (1)...(19): siRNA sense strand
cacagacccuuuccucuuc

SEQ ID NO: 1714014 - RNA, 19 nt, Homo sapiens
  misc_RNA (1)...(19): siRNA sense strand
ucccagaaccugugucuuu

SEQ ID NO: 1714015 - RNA, 19 nt, Homo sapiens
  misc_RNA (1)...(19): siRNA sense strand
gaacauugagugcauugag

SEQ ID NO: 1714016 - RNA, 19 nt, Homo sapiens
  misc_RNA (1)...(19): siRNA sense strand
guaagaacaagaguuauuc

SEQ ID NO: 1714017 - RNA, 19 nt, Homo sapiens
  misc_RNA (1)...(19): siRNA sense strand
cguaagaacaagaguuauu

SEQ ID NO: 1714018 - RNA, 19 nt, Homo sapiens
  misc_RNA (1)...(19): siRNA sense strand
cccaaggacuggagcaaga

SEQ ID NO: 1714019 - RNA, 19 nt, Homo sapiens
  misc_RNA (1)...(19): siRNA sense strand
cgaauuguuugggcacuga

SEQ ID NO: 1714020 - RNA, 19 nt, Homo sapiens
  misc_RNA (1)...(19): siRNA sense strand
ggcaccaucuccuucuuug

SEQ ID NO: 1714021 - RNA, 19 nt, Homo sapiens
  misc_RNA (1)...(19): siRNA sense strand
ggaaccaggacaacgaaga

SEQ ID NO: 1714022 - RNA, 19 nt, Homo sapiens
  misc_RNA (1)...(19): siRNA sense strand
ucaccagcaucaagaagga

SEQ ID NO: 1714023 - RNA, 19 nt, Homo sapiens
  misc_RNA (1)...(19): siRNA sense strand
augaaugggugacgcauga

SEQ ID NO: 1714024 - RNA, 19 nt, Homo sapiens
  misc_RNA (1)...(19): siRNA sense strand
acacagacccuuuccucuu

SEQ ID NO: 1714025 - RNA, 19 nt, Homo sapiens
  misc_RNA (1)...(19): siRNA sense strand
caagaguuauucccagaac

SEQ ID NO: 1714026 - RNA, 19 nt, Homo sapiens
  misc_RNA (1)...(19): siRNA sense strand
aguguuuccuugaccauaa

SEQ ID NO: 1714027 - RNA, 19 nt, Homo sapiens
  misc_RNA (1)...(19): siRNA sense strand
guaccucaaucucaucaac

SEQ ID NO: 1714028 - RNA, 19 nt, Homo sapiens
  misc_RNA (1)...(19): siRNA sense strand
gagauugauggacguaaga

SEQ ID NO: 1714029 - RNA, 19 nt, Homo sapiens
  misc_RNA (1)...(19): siRNA sense strand
gaagguggaggugguuuca

SEQ ID NO: 1714030 - RNA, 19 nt, Homo sapiens
  misc_RNA (1)...(19): siRNA sense strand
ugaucgaguucagcuauga

SEQ ID NO: 1714031 - RNA, 19 nt, Homo sapiens
  misc_RNA (1)...(19): siRNA sense strand
gaaagaaucaacggaagac

SEQ ID NO: 1714032 - RNA, 19 nt, Homo sapiens
  misc_RNA (1)...(19): siRNA sense strand
cacauugccuguccucuac

SEQ ID NO: 1714033 - RNA, 19 nt, Homo sapiens
  misc_RNA (1)...(19): siRNA sense strand
gggcaccaucuccuucuuu

SEQ ID NO: 1714034 - RNA, 19 nt, Homo sapiens
  misc_RNA (1)...(19): siRNA sense strand
gaucaccaucaaugagauu

SEQ ID NO: 1714035 - RNA, 19 nt, Homo sapiens
  misc_RNA (1)...(19): siRNA sense strand
cagaucaccaucaaugaga

SEQ ID NO: 1714036 - RNA, 19 nt, Homo sapiens
  misc_RNA (1)...(19): siRNA sense strand
ggcuggaccuaaagaagau

SEQ ID NO: 1714037 - RNA, 19 nt, Homo sapiens
  misc_RNA (1)...(19): siRNA sense strand
ugaaaucaccagcaucaag

SEQ ID NO: 1714038 - RNA, 19 nt, Homo sapiens
  misc_RNA (1)...(19): siRNA sense strand
aagaaucaacggaagacua

SEQ ID NO: 1714039 - RNA, 19 nt, Homo sapiens
  misc_RNA (1)...(19): siRNA sense strand
ugagauugauggacguaag

SEQ ID NO: 1714040 - RNA, 19 nt, Homo sapiens
  misc_RNA (1)...(19): siRNA sense strand
gccguagucucaagugucu

SEQ ID NO: 1714041 - RNA, 19 nt, Homo sapiens
  misc_RNA (1)...(19): siRNA sense strand
gccaguacauccucacacu

SEQ ID NO: 1714042 - RNA, 19 nt, Homo sapiens
  misc_RNA (1)...(19): siRNA sense strand
ggccuccuauccuaucgaa

SEQ ID NO: 1714043 - RNA, 19 nt, Homo sapiens
  misc_RNA (1)...(19): siRNA sense strand
agaaagaaucaacggaaga

SEQ ID NO: 1714044 - RNA, 19 nt, Homo sapiens
  misc_RNA (1)...(19): siRNA sense strand
guacauccucacacuguca

SEQ ID NO: 1714045 - RNA, 19 nt, Homo sapiens
  misc_RNA (1)...(19): siRNA sense strand
cggcuggaccuaaagaaga

SEQ ID NO: 1714046 - RNA, 19 nt, Homo sapiens
  misc_RNA (1)...(19): siRNA sense strand
gcaccaucuccuucuuuga

SEQ ID NO: 1714047 - RNA, 19 nt, Homo sapiens
  misc_RNA (1)...(19): siRNA sense strand
ggaagguggaggugguuuc

SEQ ID NO: 1714048 - RNA, 19 nt, Homo sapiens
  misc_RNA (1)...(19): siRNA sense strand
ucacccggaugaagaacau

SEQ ID NO: 1714049 - RNA, 19 nt, Homo sapiens
  misc_RNA (1)...(19): siRNA sense strand
ccacaggaacucaccacau

SEQ ID NO: 1714050 - RNA, 19 nt, Homo sapiens
  misc_RNA (1)...(19): siRNA sense strand
caccaucaaugagauuagu

SEQ ID NO: 1714051 - RNA, 19 nt, Homo sapiens
  misc_RNA (1)...(19): siRNA sense strand
gagcggcuggaccuaaaga

SEQ ID NO: 1714052 - RNA, 19 nt, Homo sapiens
  misc_RNA (1)...(19): siRNA sense strand
ccauaagacacuguacuau

SEQ ID NO: 1714053 - RNA, 19 nt, Homo sapiens
  misc_RNA (1)...(19): siRNA sense strand
accucaaucucaucaacua

SEQ ID NO: 1714054 - RNA, 19 nt, Homo sapiens
  misc_RNA (1)...(19): siRNA sense strand
caugagcggcuggaccuaa

SEQ ID NO: 1714055 - RNA, 19 nt, Homo sapiens
  misc_RNA (1)...(19): siRNA sense strand
ccaucaaugagauuaguga

SEQ ID NO: 1714056 - RNA, 19 nt, Homo sapiens
  misc_RNA (1)...(19): siRNA sense strand
cuacguccauuacauugac

SEQ ID NO: 1714057 - RNA, 19 nt, Homo sapiens
  misc_RNA (1)...(19): siRNA sense strand
guaagggcuuccacaucgu

SEQ ID NO: 1714058 - RNA, 19 nt, Homo sapiens
  misc_RNA (1)...(19): siRNA sense strand
cuccaggcaaugagauuua

SEQ ID NO: 1714059 - RNA, 19 nt, Homo sapiens
  misc_RNA (1)...(19): siRNA sense strand
ccaaggagaaagaaucaac

SEQ ID NO: 1714060 - RNA, 19 nt, Homo sapiens
  misc_RNA (1)...(19): siRNA sense strand
ucuacgucaugacagagua

SEQ ID NO: 1714061 - RNA, 19 nt, Homo sapiens
  misc_RNA (1)...(19): siRNA sense strand
ugucuucagcgucauuuga

SEQ ID NO: 1714062 - RNA, 19 nt, Homo sapiens
  misc_RNA (1)...(19): siRNA sense strand
cacagaucaccaucaauga

SEQ ID NO: 1714063 - RNA, 19 nt, Homo sapiens
  misc_RNA (1)...(19): siRNA sense strand
aagcgaaaaucgaauuguu

SEQ ID NO: 1714064 - RNA, 19 nt, Homo sapiens
  misc_RNA (1)...(19): siRNA sense strand
ugcaguaccucaaucucau

SEQ ID NO: 1714065 - RNA, 19 nt, Homo sapiens
  misc_RNA (1)...(19): siRNA sense strand
gcggaaccaggacaacgaa

SEQ ID NO: 1714066 - RNA, 19 nt, Homo sapiens
  misc_RNA (1)...(19): siRNA sense strand
augagcggcuggaccuaaa

SEQ ID NO: 1714067 - RNA, 19 nt, Homo sapiens
  misc_RNA (1)...(19): siRNA sense strand
accauaagacacuguacua

SEQ ID NO: 1714068 - RNA, 19 nt, Homo sapiens
  misc_RNA (1)...(19): siRNA sense strand
gagcgugaaggacaucagu

SEQ ID NO: 1714069 - RNA, 19 nt, Homo sapiens
  misc_RNA (1)...(19): siRNA sense strand
gcgaaaaucgaauuguuug

SEQ ID NO: 1714070 - RNA, 19 nt, Homo sapiens
  misc_RNA (1)...(19): siRNA sense strand
gacauccuccaggcaauga

SEQ ID NO: 1714071 - RNA, 19 nt, Homo sapiens
  misc_RNA (1)...(19): siRNA sense strand
caucuccacucugcaguac

SEQ ID NO: 1714072 - RNA, 19 nt, Homo sapiens
  misc_RNA (1)...(19): siRNA sense strand
agaaucaacggaagacuac

SEQ ID NO: 1714073 - RNA, 19 nt, Homo sapiens
  misc_RNA (1)...(19): siRNA sense strand
cagacccuuuccucuucua

SEQ ID NO: 1714074 - RNA, 19 nt, Homo sapiens
  misc_RNA (1)...(19): siRNA sense strand
ggacagcucugauggaaua

SEQ ID NO: 1714075 - RNA, 19 nt, Homo sapiens
  misc_RNA (1)...(19): siRNA sense strand
gcuaugaacucuccaaagu

SEQ ID NO: 1714076 - RNA, 19 nt, Homo sapiens
  misc_RNA (1)...(19): siRNA sense strand
caacaaacgucuggaugaa

SEQ ID NO: 1714077 - RNA, 19 nt, Homo sapiens
  misc_RNA (1)...(19): siRNA sense strand
auaagacacuguacuauga

SEQ ID NO: 1714078 - RNA, 19 nt, Homo sapiens
  misc_RNA (1)...(19): siRNA sense strand
gaaaucaccagcaucaaga

SEQ ID NO: 1714079 - RNA, 19 nt, Homo sapiens
  misc_RNA (1)...(19): siRNA sense strand
gcaagcugcugaucgaguu

SEQ ID NO: 1714080 - RNA, 19 nt, Homo sapiens
  misc_RNA (1)...(19): siRNA sense strand
gacguaagaacaagaguua

SEQ ID NO: 1714081 - RNA, 19 nt, Homo sapiens
  misc_RNA (1)...(19): siRNA sense strand
cacaggaacucaccacauu

SEQ ID NO: 1714082 - RNA, 19 nt, Homo sapiens
  misc_RNA (1)...(19): siRNA sense strand
gaagaacauugagugcauu

SEQ ID NO: 1714083 - RNA, 19 nt, Homo sapiens
  misc_RNA (1)...(19): siRNA sense strand
ccacagaucaccaucaaug

SEQ ID NO: 1714084 - RNA, 19 nt, Homo sapiens
  misc_RNA (1)...(19): siRNA sense strand
acaaacgucuggaugaaug

SEQ ID NO: 1714085 - RNA, 19 nt, Homo sapiens
  misc_RNA (1)...(19): siRNA sense strand
caacggaagacuacaaugu

SEQ ID NO: 1714086 - RNA, 19 nt, Homo sapiens
  misc_RNA (1)...(19): siRNA sense strand
caggacagcucugauggaa

SEQ ID NO: 1714087 - RNA, 19 nt, Homo sapiens
  misc_RNA (1)...(19): siRNA sense strand
ggccacagaucaccaucaa

SEQ ID NO: 1714088 - RNA, 19 nt, Homo sapiens
  misc_RNA (1)...(19): siRNA sense strand
gaccaagugugaccuacga

SEQ ID NO: 1714089 - RNA, 19 nt, Homo sapiens
  misc_RNA (1)...(19): siRNA sense strand
ugaagaacauugagugcau

SEQ ID NO: 1714090 - RNA, 19 nt, Homo sapiens
  misc_RNA (1)...(19): siRNA sense strand
caauguggccugcauccua

SEQ ID NO: 1714091 - RNA, 19 nt, Homo sapiens
  misc_RNA (1)...(19): siRNA sense strand
ccacauugccuguccucua

SEQ ID NO: 1714092 - RNA, 19 nt, Homo sapiens
  misc_RNA (1)...(19): siRNA sense strand
ggacguaagaacaagaguu

SEQ ID NO: 1714093 - RNA, 19 nt, Homo sapiens
  misc_RNA (1)...(19): siRNA sense strand
ucaaucucaucaacuacua

SEQ ID NO: 1714094 - RNA, 19 nt, Homo sapiens
  misc_RNA (1)...(19): siRNA sense strand
gaaccaggacaacgaagau

SEQ ID NO: 1714095 - RNA, 19 nt, Homo sapiens
  misc_RNA (1)...(19): siRNA sense strand
ucaacaaacgucuggauga

SEQ ID NO: 1714096 - RNA, 19 nt, Homo sapiens
  misc_RNA (1)...(19): siRNA sense strand
aauguggccugcauccuaa

SEQ ID NO: 1714097 - RNA, 19 nt, Homo sapiens
  misc_RNA (1)...(19): siRNA sense strand
cacagacccuuuccucuuc

SEQ ID NO: 1714098 - RNA, 19 nt, Homo sapiens
  misc_RNA (1)...(19): siRNA sense strand
ucccagaaccugugucuuu

SEQ ID NO: 1714099 - RNA, 19 nt, Homo sapiens
  misc_RNA (1)...(19): siRNA sense strand
gaacauugagugcauugag

SEQ ID NO: 1714100 - RNA, 19 nt, Homo sapiens
  misc_RNA (1)...(19): siRNA sense strand
guaagaacaagaguuauuc

SEQ ID NO: 1714101 - RNA, 19 nt, Homo sapiens
  misc_RNA (1)...(19): siRNA sense strand
cguaagaacaagaguuauu

SEQ ID NO: 1714102 - RNA, 19 nt, Homo sapiens
  misc_RNA (1)...(19): siRNA sense strand
cccaaggacuggagcaaga

SEQ ID NO: 1714103 - RNA, 19 nt, Homo sapiens
  misc_RNA (1)...(19): siRNA sense strand
cgaauuguuugggcacuga

SEQ ID NO: 1714104 - RNA, 19 nt, Homo sapiens
  misc_RNA (1)...(19): siRNA sense strand
ggcaccaucuccuucuuug

SEQ ID NO: 1714105 - RNA, 19 nt, Homo sapiens
  misc_RNA (1)...(19): siRNA sense strand
ggaaccaggacaacgaaga

SEQ ID NO: 1714106 - RNA, 19 nt, Homo sapiens
  misc_RNA (1)...(19): siRNA sense strand
ucaccagcaucaagaagga

SEQ ID NO: 1714107 - RNA, 19 nt, Homo sapiens
  misc_RNA (1)...(19): siRNA sense strand
augaaugggugacgcauga

SEQ ID NO: 1714108 - RNA, 19 nt, Homo sapiens
  misc_RNA (1)...(19): siRNA sense strand
acacagacccuuuccucuu

SEQ ID NO: 1714109 - RNA, 19 nt, Homo sapiens
  misc_RNA (1)...(19): siRNA sense strand
caagaguuauucccagaac

SEQ ID NO: 1714110 - RNA, 19 nt, Homo sapiens
  misc_RNA (1)...(19): siRNA sense strand
aguguuuccuugaccauaa

SEQ ID NO: 1714111 - RNA, 19 nt, Homo sapiens
  misc_RNA (1)...(19): siRNA sense strand
guaccucaaucucaucaac

SEQ ID NO: 1714112 - RNA, 19 nt, Homo sapiens
  misc_RNA (1)...(19): siRNA sense strand
gagauugauggacguaaga

SEQ ID NO: 1714113 - RNA, 19 nt, Homo sapiens
  misc_RNA (1)...(19): siRNA sense strand
gaagguggaggugguuuca

SEQ ID NO: 1714114 - RNA, 19 nt, Homo sapiens
  misc_RNA (1)...(19): siRNA sense strand
ugaucgaguucagcuauga

SEQ ID NO: 1714115 - RNA, 19 nt, Homo sapiens
  misc_RNA (1)...(19): siRNA sense strand
gaaagaaucaacggaagac

SEQ ID NO: 1714116 - RNA, 19 nt, Homo sapiens
  misc_RNA (1)...(19): siRNA sense strand
cacauugccuguccucuac

SEQ ID NO: 1714117 - RNA, 19 nt, Homo sapiens
  misc_RNA (1)...(19): siRNA sense strand
gggcaccaucuccuucuuu

SEQ ID NO: 1714118 - RNA, 19 nt, Homo sapiens
  misc_RNA (1)...(19): siRNA sense strand
gaucaccaucaaugagauu

SEQ ID NO: 1714119 - RNA, 19 nt, Homo sapiens
  misc_RNA (1)...(19): siRNA sense strand
cagaucaccaucaaugaga

SEQ ID NO: 1714120 - RNA, 19 nt, Homo sapiens
  misc_RNA (1)...(19): siRNA sense strand
ggcuggaccuaaagaagau

SEQ ID NO: 1714121 - RNA, 19 nt, Homo sapiens
  misc_RNA (1)...(19): siRNA sense strand
ugaaaucaccagcaucaag

SEQ ID NO: 1714122 - RNA, 19 nt, Homo sapiens
  misc_RNA (1)...(19): siRNA sense strand
aagaaucaacggaagacua

SEQ ID NO: 1714123 - RNA, 19 nt, Homo sapiens
  misc_RNA (1)...(19): siRNA sense strand
ugagauugauggacguaag

SEQ ID NO: 1714124 - RNA, 19 nt, Homo sapiens
  misc_RNA (1)...(19): siRNA sense strand
gccguagucucaagugucu

SEQ ID NO: 1714125 - RNA, 19 nt, Homo sapiens
  misc_RNA (1)...(19): siRNA sense strand
gccaguacauccucacacu

SEQ ID NO: 1714126 - RNA, 19 nt, Homo sapiens
  misc_RNA (1)...(19): siRNA sense strand
ggccuccuauccuaucgaa

SEQ ID NO: 1714127 - RNA, 19 nt, Homo sapiens
  misc_RNA (1)...(19): siRNA sense strand
agaaagaaucaacggaaga

SEQ ID NO: 1714128 - RNA, 19 nt, Homo sapiens
  misc_RNA (1)...(19): siRNA sense strand
guacauccucacacuguca

SEQ ID NO: 1714129 - RNA, 19 nt, Homo sapiens
  misc_RNA (1)...(19): siRNA sense strand
cggcuggaccuaaagaaga

SEQ ID NO: 1714130 - RNA, 19 nt, Homo sapiens
  misc_RNA (1)...(19): siRNA sense strand
gcaccaucuccuucuuuga

SEQ ID NO: 1714131 - RNA, 19 nt, Homo sapiens
  misc_RNA (1)...(19): siRNA sense strand
ggaagguggaggugguuuc

SEQ ID NO: 1714132 - RNA, 19 nt, Homo sapiens
  misc_RNA (1)...(19): siRNA sense strand
ucacccggaugaagaacau

SEQ ID NO: 1714133 - RNA, 19 nt, Homo sapiens
  misc_RNA (1)...(19): siRNA sense strand
ccacaggaacucaccacau

SEQ ID NO: 1714134 - RNA, 19 nt, Homo sapiens
  misc_RNA (1)...(19): siRNA sense strand
caccaucaaugagauuagu

SEQ ID NO: 1714135 - RNA, 19 nt, Homo sapiens
  misc_RNA (1)...(19): siRNA sense strand
gagcggcuggaccuaaaga

SEQ ID NO: 1714136 - RNA, 19 nt, Homo sapiens
  misc_RNA (1)...(19): siRNA sense strand
ccauaagacacuguacuau

SEQ ID NO: 1714137 - RNA, 19 nt, Homo sapiens
  misc_RNA (1)...(19): siRNA sense strand
accucaaucucaucaacua

SEQ ID NO: 1714138 - RNA, 19 nt, Homo sapiens
  misc_RNA (1)...(19): siRNA sense strand
caugagcggcuggaccuaa

SEQ ID NO: 1714139 - RNA, 19 nt, Homo sapiens
  misc_RNA (1)...(19): siRNA sense strand
ccaucaaugagauuaguga

SEQ ID NO: 1714140 - RNA, 19 nt, Homo sapiens
  misc_RNA (1)...(19): siRNA sense strand
cuacguccauuacauugac

SEQ ID NO: 1714141 - RNA, 19 nt, Homo sapiens
  misc_RNA (1)...(19): siRNA sense strand
guaagggcuuccacaucgu

SEQ ID NO: 1714142 - RNA, 19 nt, Homo sapiens
  misc_RNA (1)...(19): siRNA sense strand
cuccaggcaaugagauuua

SEQ ID NO: 1714143 - RNA, 19 nt, Homo sapiens
  misc_RNA (1)...(19): siRNA sense strand
ccaaggagaaagaaucaac

SEQ ID NO: 1714144 - RNA, 19 nt, Homo sapiens
  misc_RNA (1)...(19): siRNA sense strand
ucuacgucaugacagagua

SEQ ID NO: 1714145 - RNA, 19 nt, Homo sapiens
  misc_RNA (1)...(19): siRNA sense strand
ugucuucagcgucauuuga

SEQ ID NO: 1714146 - RNA, 19 nt, Homo sapiens
  misc_RNA (1)...(19): siRNA sense strand
cacagaucaccaucaauga

SEQ ID NO: 1714147 - RNA, 19 nt, Homo sapiens
  misc_RNA (1)...(19): siRNA sense strand
aagcgaaaaucgaauuguu

SEQ ID NO: 1714148 - RNA, 19 nt, Homo sapiens
  misc_RNA (1)...(19): siRNA sense strand
ugcaguaccucaaucucau

SEQ ID NO: 1714149 - RNA, 19 nt, Homo sapiens
  misc_RNA (1)...(19): siRNA sense strand
gcggaaccaggacaacgaa

SEQ ID NO: 1714150 - RNA, 19 nt, Homo sapiens
  misc_RNA (1)...(19): siRNA sense strand
augagcggcuggaccuaaa

SEQ ID NO: 1714151 - RNA, 19 nt, Homo sapiens
  misc_RNA (1)...(19): siRNA sense strand
accauaagacacuguacua

SEQ ID NO: 1714152 - RNA, 19 nt, Homo sapiens
  misc_RNA (1)...(19): siRNA sense strand
gagcgugaaggacaucagu

SEQ ID NO: 1714153 - RNA, 19 nt, Homo sapiens
  misc_RNA (1)...(19): siRNA sense strand
gcgaaaaucgaauuguuug

SEQ ID NO: 1714154 - RNA, 19 nt, Homo sapiens
  misc_RNA (1)...(19): siRNA sense strand
gacauccuccaggcaauga

SEQ ID NO: 1714155 - RNA, 19 nt, Homo sapiens
  misc_RNA (1)...(19): siRNA sense strand
caucuccacucugcaguac

SEQ ID NO: 1714156 - RNA, 19 nt, Homo sapiens
  misc_RNA (1)...(19): siRNA sense strand
agaaucaacggaagacuac

SEQ ID NO: 1714157 - RNA, 19 nt, Homo sapiens
  misc_RNA (1)...(19): siRNA sense strand
cagacccuuuccucuucua

SEQ ID NO: 1714158 - RNA, 19 nt, Homo sapiens
  misc_RNA (1)...(19): siRNA sense strand
ggacagcucugauggaaua

SEQ ID NO: 1714159 - RNA, 19 nt, Homo sapiens
  misc_RNA (1)...(19): siRNA sense strand
gcuaugaacucuccaaagu

SEQ ID NO: 1714160 - RNA, 19 nt, Homo sapiens
  misc_RNA (1)...(19): siRNA sense strand
caacaaacgucuggaugaa

SEQ ID NO: 1714161 - RNA, 19 nt, Homo sapiens
  misc_RNA (1)...(19): siRNA sense strand
auaagacacuguacuauga

SEQ ID NO: 1714162 - RNA, 19 nt, Homo sapiens
  misc_RNA (1)...(19): siRNA sense strand
gaaaucaccagcaucaaga

SEQ ID NO: 1714163 - RNA, 19 nt, Homo sapiens
  misc_RNA (1)...(19): siRNA sense strand
gcaagcugcugaucgaguu

SEQ ID NO: 1714164 - RNA, 19 nt, Homo sapiens
  misc_RNA (1)...(19): siRNA sense strand
gacguaagaacaagaguua

SEQ ID NO: 1714165 - RNA, 19 nt, Homo sapiens
  misc_RNA (1)...(19): siRNA sense strand
cacaggaacucaccacauu

SEQ ID NO: 1714166 - RNA, 19 nt, Homo sapiens
  misc_RNA (1)...(19): siRNA sense strand
gaagaacauugagugcauu

SEQ ID NO: 1714167 - RNA, 19 nt, Homo sapiens
  misc_RNA (1)...(19): siRNA sense strand
ccacagaucaccaucaaug

SEQ ID NO: 1714168 - RNA, 19 nt, Homo sapiens
  misc_RNA (1)...(19): siRNA sense strand
acaaacgucuggaugaaug

SEQ ID NO: 1714169 - RNA, 19 nt, Homo sapiens
  misc_RNA (1)...(19): siRNA sense strand
caacggaagacuacaaugu

SEQ ID NO: 1714170 - RNA, 19 nt, Homo sapiens
  misc_RNA (1)...(19): siRNA sense strand
caggacagcucugauggaa

SEQ ID NO: 1714171 - RNA, 19 nt, Homo sapiens
  misc_RNA (1)...(19): siRNA sense strand
ggccacagaucaccaucaa

SEQ ID NO: 1714172 - RNA, 19 nt, Homo sapiens
  misc_RNA (1)...(19): siRNA sense strand
gaccaagugugaccuacga

SEQ ID NO: 1714173 - RNA, 19 nt, Homo sapiens
  misc_RNA (1)...(19): siRNA sense strand
ugaagaacauugagugcau

SEQ ID NO: 1714174 - RNA, 19 nt, Homo sapiens
  misc_RNA (1)...(19): siRNA sense strand
caauguggccugcauccua

SEQ ID NO: 1714175 - RNA, 19 nt, Homo sapiens
  misc_RNA (1)...(19): siRNA sense strand
ccacauugccuguccucua

SEQ ID NO: 1714176 - RNA, 19 nt, Homo sapiens
  misc_RNA (1)...(19): siRNA sense strand
ggacguaagaacaagaguu

SEQ ID NO: 1714177 - RNA, 19 nt, Homo sapiens
  misc_RNA (1)...(19): siRNA sense strand
ucaaucucaucaacuacua

SEQ ID NO: 1714178 - RNA, 19 nt, Homo sapiens
  misc_RNA (1)...(19): siRNA sense strand
gaaccaggacaacgaagau

SEQ ID NO: 1714179 - RNA, 19 nt, Homo sapiens
  misc_RNA (1)...(19): siRNA sense strand
ucaacaaacgucuggauga

SEQ ID NO: 1714180 - RNA, 19 nt, Homo sapiens
  misc_RNA (1)...(19): siRNA sense strand
aauguggccugcauccuaa

SEQ ID NO: 1714181 - RNA, 19 nt, Homo sapiens
  misc_RNA (1)...(19): siRNA sense strand
cacagacccuuuccucuuc

SEQ ID NO: 1714182 - RNA, 19 nt, Homo sapiens
  misc_RNA (1)...(19): siRNA sense strand
ucccagaaccugugucuuu

SEQ ID NO: 1714183 - RNA, 19 nt, Homo sapiens
  misc_RNA (1)...(19): siRNA sense strand
gaacauugagugcauugag

SEQ ID NO: 1714184 - RNA, 19 nt, Homo sapiens
  misc_RNA (1)...(19): siRNA sense strand
guaagaacaagaguuauuc

SEQ ID NO: 1714185 - RNA, 19 nt, Homo sapiens
  misc_RNA (1)...(19): siRNA sense strand
cguaagaacaagaguuauu

SEQ ID NO: 1714186 - RNA, 19 nt, Homo sapiens
  misc_RNA (1)...(19): siRNA sense strand
cccaaggacuggagcaaga

SEQ ID NO: 1714187 - RNA, 19 nt, Homo sapiens
  misc_RNA (1)...(19): siRNA sense strand
cgaauuguuugggcacuga

SEQ ID NO: 1714188 - RNA, 19 nt, Homo sapiens
  misc_RNA (1)...(19): siRNA sense strand
ggcaccaucuccuucuuug

SEQ ID NO: 1714189 - RNA, 19 nt, Homo sapiens
  misc_RNA (1)...(19): siRNA sense strand
ggaaccaggacaacgaaga

SEQ ID NO: 1714190 - RNA, 19 nt, Homo sapiens
  misc_RNA (1)...(19): siRNA sense strand
ucaccagcaucaagaagga

SEQ ID NO: 1714191 - RNA, 19 nt, Homo sapiens
  misc_RNA (1)...(19): siRNA sense strand
augaaugggugacgcauga

SEQ ID NO: 1714192 - RNA, 19 nt, Homo sapiens
  misc_RNA (1)...(19): siRNA sense strand
acacagacccuuuccucuu

SEQ ID NO: 1714193 - RNA, 19 nt, Homo sapiens
  misc_RNA (1)...(19): siRNA sense strand
caagaguuauucccagaac

SEQ ID NO: 1714194 - RNA, 19 nt, Homo sapiens
  misc_RNA (1)...(19): siRNA sense strand
aguguuuccuugaccauaa

SEQ ID NO: 1714195 - RNA, 19 nt, Homo sapiens
  misc_RNA (1)...(19): siRNA sense strand
guaccucaaucucaucaac

SEQ ID NO: 1714196 - RNA, 19 nt, Homo sapiens
  misc_RNA (1)...(19): siRNA sense strand
gagauugauggacguaaga

SEQ ID NO: 1714197 - RNA, 19 nt, Homo sapiens
  misc_RNA (1)...(19): siRNA sense strand
gaagguggaggugguuuca

SEQ ID NO: 1714198 - RNA, 19 nt, Homo sapiens
  misc_RNA (1)...(19): siRNA sense strand
ugaucgaguucagcuauga

SEQ ID NO: 1714199 - RNA, 19 nt, Homo sapiens
  misc_RNA (1)...(19): siRNA sense strand
gaaagaaucaacggaagac

SEQ ID NO: 1714200 - RNA, 19 nt, Homo sapiens
  misc_RNA (1)...(19): siRNA sense strand
cacauugccuguccucuac

SEQ ID NO: 1714201 - RNA, 19 nt, Homo sapiens
  misc_RNA (1)...(19): siRNA sense strand
gggcaccaucuccuucuuu

SEQ ID NO: 1714202 - RNA, 19 nt, Homo sapiens
  misc_RNA (1)...(19): siRNA sense strand
gaucaccaucaaugagauu

SEQ ID NO: 1714203 - RNA, 19 nt, Homo sapiens
  misc_RNA (1)...(19): siRNA sense strand
cagaucaccaucaaugaga

SEQ ID NO: 1714204 - RNA, 19 nt, Homo sapiens
  misc_RNA (1)...(19): siRNA sense strand
ggcuggaccuaaagaagau

SEQ ID NO: 1714205 - RNA, 19 nt, Homo sapiens
  misc_RNA (1)...(19): siRNA sense strand
ugaaaucaccagcaucaag

SEQ ID NO: 1714206 - RNA, 19 nt, Homo sapiens
  misc_RNA (1)...(19): siRNA sense strand
aagaaucaacggaagacua

SEQ ID NO: 1714207 - RNA, 19 nt, Homo sapiens
  misc_RNA (1)...(19): siRNA sense strand
ugagauugauggacguaag

SEQ ID NO: 1714208 - RNA, 19 nt, Homo sapiens
  misc_RNA (1)...(19): siRNA sense strand
gccguagucucaagugucu

SEQ ID NO: 1714209 - RNA, 19 nt, Homo sapiens
  misc_RNA (1)...(19): siRNA sense strand
gccaguacauccucacacu

SEQ ID NO: 1714210 - RNA, 19 nt, Homo sapiens
  misc_RNA (1)...(19): siRNA sense strand
ggccuccuauccuaucgaa

SEQ ID NO: 1714211 - RNA, 19 nt, Homo sapiens
  misc_RNA (1)...(19): siRNA sense strand
agaaagaaucaacggaaga

SEQ ID NO: 1714212 - RNA, 19 nt, Homo sapiens
  misc_RNA (1)...(19): siRNA sense strand
guacauccucacacuguca

SEQ ID NO: 1714213 - RNA, 19 nt, Homo sapiens
  misc_RNA (1)...(19): siRNA sense strand
cggcuggaccuaaagaaga

SEQ ID NO: 1714214 - RNA, 19 nt, Homo sapiens
  misc_RNA (1)...(19): siRNA sense strand
gcaccaucuccuucuuuga

SEQ ID NO: 1714215 - RNA, 19 nt, Homo sapiens
  misc_RNA (1)...(19): siRNA sense strand
ggaagguggaggugguuuc

SEQ ID NO: 1714216 - RNA, 19 nt, Homo sapiens
  misc_RNA (1)...(19): siRNA sense strand
ucacccggaugaagaacau

SEQ ID NO: 1714217 - RNA, 19 nt, Homo sapiens
  misc_RNA (1)...(19): siRNA sense strand
ccacaggaacucaccacau

SEQ ID NO: 1714218 - RNA, 19 nt, Homo sapiens
  misc_RNA (1)...(19): siRNA sense strand
caccaucaaugagauuagu

SEQ ID NO: 1714219 - RNA, 19 nt, Homo sapiens
  misc_RNA (1)...(19): siRNA sense strand
gagcggcuggaccuaaaga

SEQ ID NO: 1714220 - RNA, 19 nt, Homo sapiens
  misc_RNA (1)...(19): siRNA sense strand
ccauaagacacuguacuau

SEQ ID NO: 1714221 - RNA, 19 nt, Homo sapiens
  misc_RNA (1)...(19): siRNA sense strand
accucaaucucaucaacua

SEQ ID NO: 1714222 - RNA, 19 nt, Homo sapiens
  misc_RNA (1)...(19): siRNA sense strand
caugagcggcuggaccuaa

SEQ ID NO: 1714223 - RNA, 19 nt, Homo sapiens
  misc_RNA (1)...(19): siRNA sense strand
ccaucaaugagauuaguga

SEQ ID NO: 1714224 - RNA, 19 nt, Homo sapiens
  misc_RNA (1)...(19): siRNA sense strand
cuacguccauuacauugac

SEQ ID NO: 1714225 - RNA, 19 nt, Homo sapiens
  misc_RNA (1)...(19): siRNA sense strand
guaagggcuuccacaucgu

SEQ ID NO: 1714226 - RNA, 19 nt, Homo sapiens
  misc_RNA (1)...(19): siRNA sense strand
cuccaggcaaugagauuua

SEQ ID NO: 1714227 - RNA, 19 nt, Homo sapiens
  misc_RNA (1)...(19): siRNA sense strand
ccaaggagaaagaaucaac

SEQ ID NO: 1714228 - RNA, 19 nt, Homo sapiens
  misc_RNA (1)...(19): siRNA sense strand
ucuacgucaugacagagua

SEQ ID NO: 1714229 - RNA, 19 nt, Homo sapiens
  misc_RNA (1)...(19): siRNA sense strand
ugucuucagcgucauuuga

SEQ ID NO: 1714230 - RNA, 19 nt, Homo sapiens
  misc_RNA (1)...(19): siRNA sense strand
cacagaucaccaucaauga

SEQ ID NO: 1714231 - RNA, 19 nt, Homo sapiens
  misc_RNA (1)...(19): siRNA sense strand
aagcgaaaaucgaauuguu

SEQ ID NO: 1714232 - RNA, 19 nt, Homo sapiens
  misc_RNA (1)...(19): siRNA sense strand
ugcaguaccucaaucucau

SEQ ID NO: 1714233 - RNA, 19 nt, Homo sapiens
  misc_RNA (1)...(19): siRNA sense strand
gcggaaccaggacaacgaa

SEQ ID NO: 1714234 - RNA, 19 nt, Homo sapiens
  misc_RNA (1)...(19): siRNA sense strand
augagcggcuggaccuaaa

SEQ ID NO: 1714235 - RNA, 19 nt, Homo sapiens
  misc_RNA (1)...(19): siRNA sense strand
accauaagacacuguacua

SEQ ID NO: 1714236 - RNA, 19 nt, Homo sapiens
  misc_RNA (1)...(19): siRNA sense strand
gagcgugaaggacaucagu

SEQ ID NO: 1714237 - RNA, 19 nt, Homo sapiens
  misc_RNA (1)...(19): siRNA sense strand
gcgaaaaucgaauuguuug

SEQ ID NO: 1714238 - RNA, 19 nt, Homo sapiens
  misc_RNA (1)...(19): siRNA sense strand
gacauccuccaggcaauga

SEQ ID NO: 1714239 - RNA, 19 nt, Homo sapiens
  misc_RNA (1)...(19): siRNA sense strand
caucuccacucugcaguac

SEQ ID NO: 1714240 - RNA, 19 nt, Homo sapiens
  misc_RNA (1)...(19): siRNA sense strand
agaaucaacggaagacuac

SEQ ID NO: 1714241 - RNA, 19 nt, Homo sapiens
  misc_RNA (1)...(19): siRNA sense strand
cagacccuuuccucuucua

SEQ ID NO: 1714242 - RNA, 19 nt, Homo sapiens
  misc_RNA (1)...(19): siRNA sense strand
ggacagcucugauggaaua

SEQ ID NO: 1714243 - RNA, 19 nt, Homo sapiens
  misc_RNA (1)...(19): siRNA sense strand
gcuaugaacucuccaaagu

SEQ ID NO: 1714244 - RNA, 19 nt, Homo sapiens
  misc_RNA (1)...(19): siRNA sense strand
caacaaacgucuggaugaa

SEQ ID NO: 1714245 - RNA, 19 nt, Homo sapiens
  misc_RNA (1)...(19): siRNA sense strand
auaagacacuguacuauga

SEQ ID NO: 1714246 - RNA, 19 nt, Homo sapiens
  misc_RNA (1)...(19): siRNA sense strand
gaaaucaccagcaucaaga

SEQ ID NO: 1714247 - RNA, 19 nt, Homo sapiens
  misc_RNA (1)...(19): siRNA sense strand
gcaagcugcugaucgaguu

SEQ ID NO: 1714248 - RNA, 19 nt, Homo sapiens
  misc_RNA (1)...(19): siRNA sense strand
gacguaagaacaagaguua

SEQ ID NO: 1714249 - RNA, 19 nt, Homo sapiens
  misc_RNA (1)...(19): siRNA sense strand
cacaggaacucaccacauu

SEQ ID NO: 1714250 - RNA, 19 nt, Homo sapiens
  misc_RNA (1)...(19): siRNA sense strand
gaagaacauugagugcauu

SEQ ID NO: 1714251 - RNA, 19 nt, Homo sapiens
  misc_RNA (1)...(19): siRNA sense strand
ccacagaucaccaucaaug

SEQ ID NO: 1714252 - RNA, 19 nt, Homo sapiens
  misc_RNA (1)...(19): siRNA sense strand
acaaacgucuggaugaaug

SEQ ID NO: 1714253 - RNA, 19 nt, Homo sapiens
  misc_RNA (1)...(19): siRNA sense strand
caacggaagacuacaaugu

SEQ ID NO: 1714254 - RNA, 19 nt, Homo sapiens
  misc_RNA (1)...(19): siRNA sense strand
caggacagcucugauggaa

SEQ ID NO: 1714255 - RNA, 19 nt, Homo sapiens
  misc_RNA (1)...(19): siRNA sense strand
ggccacagaucaccaucaa

SEQ ID NO: 1714256 - RNA, 19 nt, Homo sapiens
  misc_RNA (1)...(19): siRNA sense strand
gaccaagugugaccuacga

SEQ ID NO: 1714257 - RNA, 19 nt, Homo sapiens
  misc_RNA (1)...(19): siRNA sense strand
ugaagaacauugagugcau

SEQ ID NO: 1714258 - RNA, 19 nt, Homo sapiens
  misc_RNA (1)...(19): siRNA sense strand
caauguggccugcauccua

SEQ ID NO: 1714259 - RNA, 19 nt, Homo sapiens
  misc_RNA (1)...(19): siRNA sense strand
ccacauugccuguccucua

SEQ ID NO: 1714260 - RNA, 19 nt, Homo sapiens
  misc_RNA (1)...(19): siRNA sense strand
ggacguaagaacaagaguu

SEQ ID NO: 1714261 - RNA, 19 nt, Homo sapiens
  misc_RNA (1)...(19): siRNA sense strand
ucaaucucaucaacuacua

SEQ ID NO: 1714262 - RNA, 19 nt, Homo sapiens
  misc_RNA (1)...(19): siRNA sense strand
gaaccaggacaacgaagau

SEQ ID NO: 1714263 - RNA, 19 nt, Homo sapiens
  misc_RNA (1)...(19): siRNA sense strand
ucaacaaacgucuggauga

SEQ ID NO: 1714264 - RNA, 19 nt, Homo sapiens
  misc_RNA (1)...(19): siRNA sense strand
aauguggccugcauccuaa

SEQ ID NO: 1714265 - RNA, 19 nt, Homo sapiens
  misc_RNA (1)...(19): siRNA sense strand
cacagacccuuuccucuuc

SEQ ID NO: 1714266 - RNA, 19 nt, Homo sapiens
  misc_RNA (1)...(19): siRNA sense strand
ucccagaaccugugucuuu

SEQ ID NO: 1714267 - RNA, 19 nt, Homo sapiens
  misc_RNA (1)...(19): siRNA sense strand
gaacauugagugcauugag

SEQ ID NO: 1714268 - RNA, 19 nt, Homo sapiens
  misc_RNA (1)...(19): siRNA sense strand
guaagaacaagaguuauuc

SEQ ID NO: 1714269 - RNA, 19 nt, Homo sapiens
  misc_RNA (1)...(19): siRNA sense strand
cguaagaacaagaguuauu

SEQ ID NO: 1714270 - RNA, 19 nt, Homo sapiens
  misc_RNA (1)...(19): siRNA sense strand
cccaaggacuggagcaaga

SEQ ID NO: 1714271 - RNA, 19 nt, Homo sapiens
  misc_RNA (1)...(19): siRNA sense strand
cgaauuguuugggcacuga

SEQ ID NO: 1714272 - RNA, 19 nt, Homo sapiens
  misc_RNA (1)...(19): siRNA sense strand
ggcaccaucuccuucuuug

SEQ ID NO: 1714273 - RNA, 19 nt, Homo sapiens
  misc_RNA (1)...(19): siRNA sense strand
ggaaccaggacaacgaaga

SEQ ID NO: 1714274 - RNA, 19 nt, Homo sapiens
  misc_RNA (1)...(19): siRNA sense strand
ucaccagcaucaagaagga

SEQ ID NO: 1714275 - RNA, 19 nt, Homo sapiens
  misc_RNA (1)...(19): siRNA sense strand
augaaugggugacgcauga

SEQ ID NO: 1714276 - RNA, 19 nt, Homo sapiens
  misc_RNA (1)...(19): siRNA sense strand
acacagacccuuuccucuu

SEQ ID NO: 1714277 - RNA, 19 nt, Homo sapiens
  misc_RNA (1)...(19): siRNA sense strand
caagaguuauucccagaac

SEQ ID NO: 1714278 - RNA, 19 nt, Homo sapiens
  misc_RNA (1)...(19): siRNA sense strand
aguguuuccuugaccauaa

SEQ ID NO: 1714279 - RNA, 19 nt, Homo sapiens
  misc_RNA (1)...(19): siRNA sense strand
guaccucaaucucaucaac

SEQ ID NO: 1714280 - RNA, 19 nt, Homo sapiens
  misc_RNA (1)...(19): siRNA sense strand
gagauugauggacguaaga

SEQ ID NO: 1714281 - RNA, 19 nt, Homo sapiens
  misc_RNA (1)...(19): siRNA sense strand
gaagguggaggugguuuca

SEQ ID NO: 1714282 - RNA, 19 nt, Homo sapiens
  misc_RNA (1)...(19): siRNA sense strand
ugaucgaguucagcuauga

SEQ ID NO: 1714283 - RNA, 19 nt, Homo sapiens
  misc_RNA (1)...(19): siRNA sense strand
gaaagaaucaacggaagac

SEQ ID NO: 1714284 - RNA, 19 nt, Homo sapiens
  misc_RNA (1)...(19): siRNA sense strand
cacauugccuguccucuac

SEQ ID NO: 1714285 - RNA, 19 nt, Homo sapiens
  misc_RNA (1)...(19): siRNA sense strand
gggcaccaucuccuucuuu

SEQ ID NO: 1714286 - RNA, 19 nt, Homo sapiens
  misc_RNA (1)...(19): siRNA sense strand
gaucaccaucaaugagauu

SEQ ID NO: 1714287 - RNA, 19 nt, Homo sapiens
  misc_RNA (1)...(19): siRNA sense strand
cagaucaccaucaaugaga

SEQ ID NO: 1714288 - RNA, 19 nt, Homo sapiens
  misc_RNA (1)...(19): siRNA sense strand
ggcuggaccuaaagaagau

SEQ ID NO: 1714289 - RNA, 19 nt, Homo sapiens
  misc_RNA (1)...(19): siRNA sense strand
ugaaaucaccagcaucaag

SEQ ID NO: 1714290 - RNA, 19 nt, Homo sapiens
  misc_RNA (1)...(19): siRNA sense strand
aagaaucaacggaagacua

SEQ ID NO: 1714291 - RNA, 19 nt, Homo sapiens
  misc_RNA (1)...(19): siRNA sense strand
ugagauugauggacguaag

SEQ ID NO: 1714292 - RNA, 19 nt, Homo sapiens
  misc_RNA (1)...(19): siRNA sense strand
gccguagucucaagugucu

SEQ ID NO: 1714293 - RNA, 19 nt, Homo sapiens
  misc_RNA (1)...(19): siRNA sense strand
gccaguacauccucacacu

SEQ ID NO: 1714294 - RNA, 19 nt, Homo sapiens
  misc_RNA (1)...(19): siRNA sense strand
ggccuccuauccuaucgaa

SEQ ID NO: 1714295 - RNA, 19 nt, Homo sapiens
  misc_RNA (1)...(19): siRNA sense strand
agaaagaaucaacggaaga

SEQ ID NO: 1714296 - RNA, 19 nt, Homo sapiens
  misc_RNA (1)...(19): siRNA sense strand
guacauccucacacuguca

SEQ ID NO: 1714297 - RNA, 19 nt, Homo sapiens
  misc_RNA (1)...(19): siRNA sense strand
cggcuggaccuaaagaaga

SEQ ID NO: 1714298 - RNA, 19 nt, Homo sapiens
  misc_RNA (1)...(19): siRNA sense strand
gcaccaucuccuucuuuga

SEQ ID NO: 1714299 - RNA, 19 nt, Homo sapiens
  misc_RNA (1)...(19): siRNA sense strand
ggaagguggaggugguuuc

SEQ ID NO: 1714300 - RNA, 19 nt, Homo sapiens
  misc_RNA (1)...(19): siRNA sense strand
ucacccggaugaagaacau

SEQ ID NO: 1714301 - RNA, 19 nt, Homo sapiens
  misc_RNA (1)...(19): siRNA sense strand
ccacaggaacucaccacau

SEQ ID NO: 1714302 - RNA, 19 nt, Homo sapiens
  misc_RNA (1)...(19): siRNA sense strand
caccaucaaugagauuagu

SEQ ID NO: 1714303 - RNA, 19 nt, Homo sapiens
  misc_RNA (1)...(19): siRNA sense strand
gagcggcuggaccuaaaga

SEQ ID NO: 1714304 - RNA, 19 nt, Homo sapiens
  misc_RNA (1)...(19): siRNA sense strand
ccauaagacacuguacuau

SEQ ID NO: 1714305 - RNA, 19 nt, Homo sapiens
  misc_RNA (1)...(19): siRNA sense strand
accucaaucucaucaacua

SEQ ID NO: 1714306 - RNA, 19 nt, Homo sapiens
  misc_RNA (1)...(19): siRNA sense strand
caugagcggcuggaccuaa

SEQ ID NO: 1714307 - RNA, 19 nt, Homo sapiens
  misc_RNA (1)...(19): siRNA sense strand
ccaucaaugagauuaguga

SEQ ID NO: 1714308 - RNA, 19 nt, Homo sapiens
  misc_RNA (1)...(19): siRNA sense strand
cuacguccauuacauugac

SEQ ID NO: 1714309 - RNA, 19 nt, Homo sapiens
  misc_RNA (1)...(19): siRNA sense strand
guaagggcuuccacaucgu

SEQ ID NO: 1714310 - RNA, 19 nt, Homo sapiens
  misc_RNA (1)...(19): siRNA sense strand
cuccaggcaaugagauuua

SEQ ID NO: 1714311 - RNA, 19 nt, Homo sapiens
  misc_RNA (1)...(19): siRNA sense strand
ccaaggagaaagaaucaac

SEQ ID NO: 1714312 - RNA, 19 nt, Homo sapiens
  misc_RNA (1)...(19): siRNA sense strand
ucuacgucaugacagagua

SEQ ID NO: 1714313 - RNA, 19 nt, Homo sapiens
  misc_RNA (1)...(19): siRNA sense strand
ugucuucagcgucauuuga

SEQ ID NO: 1714314 - RNA, 19 nt, Homo sapiens
  misc_RNA (1)...(19): siRNA sense strand
cacagaucaccaucaauga

SEQ ID NO: 1714315 - RNA, 19 nt, Homo sapiens
  misc_RNA (1)...(19): siRNA sense strand
aagcgaaaaucgaauuguu

SEQ ID NO: 1714316 - RNA, 19 nt, Homo sapiens
  misc_RNA (1)...(19): siRNA sense strand
ugcaguaccucaaucucau

SEQ ID NO: 1714317 - RNA, 19 nt, Homo sapiens
  misc_RNA (1)...(19): siRNA sense strand
gcggaaccaggacaacgaa

SEQ ID NO: 1714318 - RNA, 19 nt, Homo sapiens
  misc_RNA (1)...(19): siRNA sense strand
augagcggcuggaccuaaa

SEQ ID NO: 1714319 - RNA, 19 nt, Homo sapiens
  misc_RNA (1)...(19): siRNA sense strand
accauaagacacuguacua

SEQ ID NO: 1714320 - RNA, 19 nt, Homo sapiens
  misc_RNA (1)...(19): siRNA sense strand
gagcgugaaggacaucagu

SEQ ID NO: 1714321 - RNA, 19 nt, Homo sapiens
  misc_RNA (1)...(19): siRNA sense strand
gcgaaaaucgaauuguuug

SEQ ID NO: 1714322 - RNA, 19 nt, Homo sapiens
  misc_RNA (1)...(19): siRNA sense strand
gacauccuccaggcaauga

SEQ ID NO: 1714323 - RNA, 19 nt, Homo sapiens
  misc_RNA (1)...(19): siRNA sense strand
caucuccacucugcaguac

SEQ ID NO: 1714324 - RNA, 19 nt, Homo sapiens
  misc_RNA (1)...(19): siRNA sense strand
agaaucaacggaagacuac

SEQ ID NO: 1714325 - RNA, 19 nt, Homo sapiens
  misc_RNA (1)...(19): siRNA sense strand
cagacccuuuccucuucua

SEQ ID NO: 1714326 - RNA, 19 nt, Homo sapiens
  misc_RNA (1)...(19): siRNA sense strand
ggacagcucugauggaaua

SEQ ID NO: 1714327 - RNA, 19 nt, Homo sapiens
  misc_RNA (1)...(19): siRNA sense strand
gcuaugaacucuccaaagu

SEQ ID NO: 1714328 - RNA, 19 nt, Homo sapiens
  misc_RNA (1)...(19): siRNA sense strand
caacaaacgucuggaugaa

SEQ ID NO: 1714329 - RNA, 19 nt, Homo sapiens
  misc_RNA (1)...(19): siRNA sense strand
auaagacacuguacuauga

SEQ ID NO: 1714330 - RNA, 19 nt, Homo sapiens
  misc_RNA (1)...(19): siRNA sense strand
gaaaucaccagcaucaaga

SEQ ID NO: 1714331 - RNA, 19 nt, Homo sapiens
  misc_RNA (1)...(19): siRNA sense strand
gcaagcugcugaucgaguu

SEQ ID NO: 1714332 - RNA, 19 nt, Homo sapiens
  misc_RNA (1)...(19): siRNA sense strand
gacguaagaacaagaguua

SEQ ID NO: 1714333 - RNA, 19 nt, Homo sapiens
  misc_RNA (1)...(19): siRNA sense strand
cacaggaacucaccacauu

SEQ ID NO: 1714334 - RNA, 19 nt, Homo sapiens
  misc_RNA (1)...(19): siRNA sense strand
gaagaacauugagugcauu

SEQ ID NO: 1714335 - RNA, 19 nt, Homo sapiens
  misc_RNA (1)...(19): siRNA sense strand
ccacagaucaccaucaaug

SEQ ID NO: 1714336 - RNA, 19 nt, Homo sapiens
  misc_RNA (1)...(19): siRNA sense strand
acaaacgucuggaugaaug

SEQ ID NO: 1714337 - RNA, 19 nt, Homo sapiens
  misc_RNA (1)...(19): siRNA sense strand
caacggaagacuacaaugu

SEQ ID NO: 1714338 - RNA, 19 nt, Homo sapiens
  misc_RNA (1)...(19): siRNA sense strand
caggacagcucugauggaa

SEQ ID NO: 1714339 - RNA, 19 nt, Homo sapiens
  misc_RNA (1)...(19): siRNA sense strand
ggccacagaucaccaucaa

SEQ ID NO: 1714340 - RNA, 19 nt, Homo sapiens
  misc_RNA (1)...(19): siRNA sense strand
gaccaagugugaccuacga

SEQ ID NO: 1714341 - RNA, 19 nt, Homo sapiens
  misc_RNA (1)...(19): siRNA sense strand
ugaagaacauugagugcau

SEQ ID NO: 1714342 - RNA, 19 nt, Homo sapiens
  misc_RNA (1)...(19): siRNA sense strand
caauguggccugcauccua

SEQ ID NO: 1714343 - RNA, 19 nt, Homo sapiens
  misc_RNA (1)...(19): siRNA sense strand
ccacauugccuguccucua

SEQ ID NO: 1714344 - RNA, 19 nt, Homo sapiens
  misc_RNA (1)...(19): siRNA sense strand
ggacguaagaacaagaguu

SEQ ID NO: 1714345 - RNA, 19 nt, Homo sapiens
  misc_RNA (1)...(19): siRNA sense strand
ucaaucucaucaacuacua

SEQ ID NO: 1714346 - RNA, 19 nt, Homo sapiens
  misc_RNA (1)...(19): siRNA sense strand
gaaccaggacaacgaagau

SEQ ID NO: 1714347 - RNA, 19 nt, Homo sapiens
  misc_RNA (1)...(19): siRNA sense strand
ucaacaaacgucuggauga

SEQ ID NO: 1714348 - RNA, 19 nt, Homo sapiens
  misc_RNA (1)...(19): siRNA sense strand
aauguggccugcauccuaa

SEQ ID NO: 1714349 - RNA, 19 nt, Homo sapiens
  misc_RNA (1)...(19): siRNA sense strand
cacagacccuuuccucuuc

SEQ ID NO: 1714350 - RNA, 19 nt, Homo sapiens
  misc_RNA (1)...(19): siRNA sense strand
ucccagaaccugugucuuu

SEQ ID NO: 1714351 - RNA, 19 nt, Homo sapiens
  misc_RNA (1)...(19): siRNA sense strand
gaacauugagugcauugag

SEQ ID NO: 1714352 - RNA, 19 nt, Homo sapiens
  misc_RNA (1)...(19): siRNA sense strand
guaagaacaagaguuauuc

SEQ ID NO: 1714353 - RNA, 19 nt, Homo sapiens
  misc_RNA (1)...(19): siRNA sense strand
cguaagaacaagaguuauu

SEQ ID NO: 1714354 - RNA, 19 nt, Homo sapiens
  misc_RNA (1)...(19): siRNA sense strand
cccaaggacuggagcaaga

SEQ ID NO: 1714355 - RNA, 19 nt, Homo sapiens
  misc_RNA (1)...(19): siRNA sense strand
cgaauuguuugggcacuga

SEQ ID NO: 1714356 - RNA, 19 nt, Homo sapiens
  misc_RNA (1)...(19): siRNA sense strand
ggcaccaucuccuucuuug

SEQ ID NO: 1714357 - RNA, 19 nt, Homo sapiens
  misc_RNA (1)...(19): siRNA sense strand
ggaaccaggacaacgaaga

SEQ ID NO: 1714358 - RNA, 19 nt, Homo sapiens
  misc_RNA (1)...(19): siRNA sense strand
ucaccagcaucaagaagga

SEQ ID NO: 1714359 - RNA, 19 nt, Homo sapiens
  misc_RNA (1)...(19): siRNA sense strand
augaaugggugacgcauga

SEQ ID NO: 1714360 - RNA, 19 nt, Homo sapiens
  misc_RNA (1)...(19): siRNA sense strand
acacagacccuuuccucuu

SEQ ID NO: 1714361 - RNA, 19 nt, Homo sapiens
  misc_RNA (1)...(19): siRNA sense strand
caagaguuauucccagaac

SEQ ID NO: 1714362 - RNA, 19 nt, Homo sapiens
  misc_RNA (1)...(19): siRNA sense strand
aguguuuccuugaccauaa

SEQ ID NO: 1714363 - RNA, 19 nt, Homo sapiens
  misc_RNA (1)...(19): siRNA sense strand
guaccucaaucucaucaac

SEQ ID NO: 1714364 - RNA, 19 nt, Homo sapiens
  misc_RNA (1)...(19): siRNA sense strand
gagauugauggacguaaga

SEQ ID NO: 1714365 - RNA, 19 nt, Homo sapiens
  misc_RNA (1)...(19): siRNA sense strand
gaagguggaggugguuuca

SEQ ID NO: 1714366 - RNA, 19 nt, Homo sapiens
  misc_RNA (1)...(19): siRNA sense strand
ugaucgaguucagcuauga

SEQ ID NO: 1714367 - RNA, 19 nt, Homo sapiens
  misc_RNA (1)...(19): siRNA sense strand
gaaagaaucaacggaagac

SEQ ID NO: 1714368 - RNA, 19 nt, Homo sapiens
  misc_RNA (1)...(19): siRNA sense strand
cacauugccuguccucuac

SEQ ID NO: 1714369 - RNA, 19 nt, Homo sapiens
  misc_RNA (1)...(19): siRNA sense strand
gggcaccaucuccuucuuu

SEQ ID NO: 1714370 - RNA, 19 nt, Homo sapiens
  misc_RNA (1)...(19): siRNA sense strand
gaucaccaucaaugagauu

SEQ ID NO: 1714371 - RNA, 19 nt, Homo sapiens
  misc_RNA (1)...(19): siRNA sense strand
cagaucaccaucaaugaga

SEQ ID NO: 1714372 - RNA, 19 nt, Homo sapiens
  misc_RNA (1)...(19): siRNA sense strand
ggcuggaccuaaagaagau

SEQ ID NO: 1714373 - RNA, 19 nt, Homo sapiens
  misc_RNA (1)...(19): siRNA sense strand
ugaaaucaccagcaucaag

SEQ ID NO: 1714374 - RNA, 19 nt, Homo sapiens
  misc_RNA (1)...(19): siRNA sense strand
aagaaucaacggaagacua

SEQ ID NO: 1714375 - RNA, 19 nt, Homo sapiens
  misc_RNA (1)...(19): siRNA sense strand
ugagauugauggacguaag

SEQ ID NO: 1714376 - RNA, 19 nt, Homo sapiens
  misc_RNA (1)...(19): siRNA sense strand
gccguagucucaagugucu

SEQ ID NO: 1714377 - RNA, 19 nt, Homo sapiens
  misc_RNA (1)...(19): siRNA sense strand
gccaguacauccucacacu

SEQ ID NO: 1714378 - RNA, 19 nt, Homo sapiens
  misc_RNA (1)...(19): siRNA sense strand
ggccuccuauccuaucgaa

SEQ ID NO: 1714379 - RNA, 19 nt, Homo sapiens
  misc_RNA (1)...(19): siRNA sense strand
agaaagaaucaacggaaga

SEQ ID NO: 1714380 - RNA, 19 nt, Homo sapiens
  misc_RNA (1)...(19): siRNA sense strand
guacauccucacacuguca

SEQ ID NO: 1714381 - RNA, 19 nt, Homo sapiens
  misc_RNA (1)...(19): siRNA sense strand
cggcuggaccuaaagaaga

SEQ ID NO: 1714382 - RNA, 19 nt, Homo sapiens
  misc_RNA (1)...(19): siRNA sense strand
gcaccaucuccuucuuuga

SEQ ID NO: 1714383 - RNA, 19 nt, Homo sapiens
  misc_RNA (1)...(19): siRNA sense strand
ggaagguggaggugguuuc

SEQ ID NO: 1714384 - RNA, 19 nt, Homo sapiens
  misc_RNA (1)...(19): siRNA sense strand
ucacccggaugaagaacau

SEQ ID NO: 1714385 - RNA, 19 nt, Homo sapiens
  misc_RNA (1)...(19): siRNA sense strand
ccacaggaacucaccacau

SEQ ID NO: 1714386 - RNA, 19 nt, Homo sapiens
  misc_RNA (1)...(19): siRNA sense strand
caccaucaaugagauuagu

SEQ ID NO: 1714387 - RNA, 19 nt, Homo sapiens
  misc_RNA (1)...(19): siRNA sense strand
gagcggcuggaccuaaaga

SEQ ID NO: 1714388 - RNA, 19 nt, Homo sapiens
  misc_RNA (1)...(19): siRNA sense strand
ccauaagacacuguacuau

SEQ ID NO: 1714389 - RNA, 19 nt, Homo sapiens
  misc_RNA (1)...(19): siRNA sense strand
accucaaucucaucaacua

SEQ ID NO: 1714390 - RNA, 19 nt, Homo sapiens
  misc_RNA (1)...(19): siRNA sense strand
caugagcggcuggaccuaa

SEQ ID NO: 1714391 - RNA, 19 nt, Homo sapiens
  misc_RNA (1)...(19): siRNA sense strand
ccaucaaugagauuaguga

SEQ ID NO: 1714392 - RNA, 19 nt, Homo sapiens
  misc_RNA (1)...(19): siRNA sense strand
cuacguccauuacauugac

SEQ ID NO: 1714393 - RNA, 19 nt, Homo sapiens
  misc_RNA (1)...(19): siRNA sense strand
guaagggcuuccacaucgu

SEQ ID NO: 1714394 - RNA, 19 nt, Homo sapiens
  misc_RNA (1)...(19): siRNA sense strand
cuccaggcaaugagauuua

SEQ ID NO: 1714395 - RNA, 19 nt, Homo sapiens
  misc_RNA (1)...(19): siRNA sense strand
ccaaggagaaagaaucaac

SEQ ID NO: 1714396 - RNA, 19 nt, Homo sapiens
  misc_RNA (1)...(19): siRNA sense strand
ucuacgucaugacagagua

SEQ ID NO: 1714397 - RNA, 19 nt, Homo sapiens
  misc_RNA (1)...(19): siRNA sense strand
ugucuucagcgucauuuga

SEQ ID NO: 1714398 - RNA, 19 nt, Homo sapiens
  misc_RNA (1)...(19): siRNA sense strand
cacagaucaccaucaauga

SEQ ID NO: 1714399 - RNA, 19 nt, Homo sapiens
  misc_RNA (1)...(19): siRNA sense strand
aagcgaaaaucgaauuguu

SEQ ID NO: 1714400 - RNA, 19 nt, Homo sapiens
  misc_RNA (1)...(19): siRNA sense strand
ugcaguaccucaaucucau

SEQ ID NO: 1714401 - RNA, 19 nt, Homo sapiens
  misc_RNA (1)...(19): siRNA sense strand
gcggaaccaggacaacgaa

SEQ ID NO: 1714402 - RNA, 19 nt, Homo sapiens
  misc_RNA (1)...(19): siRNA sense strand
augagcggcuggaccuaaa

SEQ ID NO: 1714403 - RNA, 19 nt, Homo sapiens
  misc_RNA (1)...(19): siRNA sense strand
accauaagacacuguacua

SEQ ID NO: 1714404 - RNA, 19 nt, Homo sapiens
  misc_RNA (1)...(19): siRNA sense strand
gagcgugaaggacaucagu

SEQ ID NO: 1714405 - RNA, 19 nt, Homo sapiens
  misc_RNA (1)...(19): siRNA sense strand
gcgaaaaucgaauuguuug

SEQ ID NO: 1714406 - RNA, 19 nt, Homo sapiens
  misc_RNA (1)...(19): siRNA sense strand
gacauccuccaggcaauga

SEQ ID NO: 1714407 - RNA, 19 nt, Homo sapiens
  misc_RNA (1)...(19): siRNA sense strand
caucuccacucugcaguac

SEQ ID NO: 1714408 - RNA, 19 nt, Homo sapiens
  misc_RNA (1)...(19): siRNA sense strand
agaaucaacggaagacuac

SEQ ID NO: 1714409 - RNA, 19 nt, Homo sapiens
  misc_RNA (1)...(19): siRNA sense strand
cagacccuuuccucuucua

SEQ ID NO: 1714410 - RNA, 19 nt, Homo sapiens
  misc_RNA (1)...(19): siRNA sense strand
ggacagcucugauggaaua

SEQ ID NO: 1714411 - RNA, 19 nt, Homo sapiens
  misc_RNA (1)...(19): siRNA sense strand
gcuaugaacucuccaaagu

SEQ ID NO: 1714412 - RNA, 19 nt, Homo sapiens
  misc_RNA (1)...(19): siRNA sense strand
caacaaacgucuggaugaa

SEQ ID NO: 1714413 - RNA, 19 nt, Homo sapiens
  misc_RNA (1)...(19): siRNA sense strand
auaagacacuguacuauga

SEQ ID NO: 1714414 - RNA, 19 nt, Homo sapiens
  misc_RNA (1)...(19): siRNA sense strand
gaaaucaccagcaucaaga

SEQ ID NO: 1714415 - RNA, 19 nt, Homo sapiens
  misc_RNA (1)...(19): siRNA sense strand
gcaagcugcugaucgaguu

SEQ ID NO: 1714416 - RNA, 19 nt, Homo sapiens
  misc_RNA (1)...(19): siRNA sense strand
gacguaagaacaagaguua

SEQ ID NO: 1714417 - RNA, 19 nt, Homo sapiens
  misc_RNA (1)...(19): siRNA sense strand
cacaggaacucaccacauu

SEQ ID NO: 1714418 - RNA, 19 nt, Homo sapiens
  misc_RNA (1)...(19): siRNA sense strand
gaagaacauugagugcauu

SEQ ID NO: 1714419 - RNA, 19 nt, Homo sapiens
  misc_RNA (1)...(19): siRNA sense strand
ccacagaucaccaucaaug

SEQ ID NO: 1714420 - RNA, 19 nt, Homo sapiens
  misc_RNA (1)...(19): siRNA sense strand
acaaacgucuggaugaaug

SEQ ID NO: 1714421 - RNA, 19 nt, Homo sapiens
  misc_RNA (1)...(19): siRNA sense strand
caacggaagacuacaaugu

SEQ ID NO: 1714422 - RNA, 19 nt, Homo sapiens
  misc_RNA (1)...(19): siRNA sense strand
caggacagcucugauggaa

SEQ ID NO: 1714423 - RNA, 19 nt, Homo sapiens
  misc_RNA (1)...(19): siRNA sense strand
ggccacagaucaccaucaa

SEQ ID NO: 1714424 - RNA, 19 nt, Homo sapiens
  misc_RNA (1)...(19): siRNA sense strand
gaccaagugugaccuacga

SEQ ID NO: 1714425 - RNA, 19 nt, Homo sapiens
  misc_RNA (1)...(19): siRNA sense strand
ugaagaacauugagugcau

SEQ ID NO: 1714426 - RNA, 19 nt, Homo sapiens
  misc_RNA (1)...(19): siRNA sense strand
caauguggccugcauccua

SEQ ID NO: 1714427 - RNA, 19 nt, Homo sapiens
  misc_RNA (1)...(19): siRNA sense strand
ccacauugccuguccucua

SEQ ID NO: 1714428 - RNA, 19 nt, Homo sapiens
  misc_RNA (1)...(19): siRNA sense strand
ggacguaagaacaagaguu

SEQ ID NO: 1714429 - RNA, 19 nt, Homo sapiens
  misc_RNA (1)...(19): siRNA sense strand
ucaaucucaucaacuacua

SEQ ID NO: 1714430 - RNA, 19 nt, Homo sapiens
  misc_RNA (1)...(19): siRNA sense strand
gaaccaggacaacgaagau

SEQ ID NO: 1714431 - RNA, 19 nt, Homo sapiens
  misc_RNA (1)...(19): siRNA sense strand
ucaacaaacgucuggauga

SEQ ID NO: 1714432 - RNA, 19 nt, Homo sapiens
  misc_RNA (1)...(19): siRNA sense strand
aauguggccugcauccuaa

SEQ ID NO: 1714433 - RNA, 19 nt, Homo sapiens
  misc_RNA (1)...(19): siRNA sense strand
cacagacccuuuccucuuc

SEQ ID NO: 1714434 - RNA, 19 nt, Homo sapiens
  misc_RNA (1)...(19): siRNA sense strand
ucccagaaccugugucuuu

SEQ ID NO: 1714435 - RNA, 19 nt, Homo sapiens
  misc_RNA (1)...(19): siRNA sense strand
gaacauugagugcauugag

SEQ ID NO: 1714436 - RNA, 19 nt, Homo sapiens
  misc_RNA (1)...(19): siRNA sense strand
guaagaacaagaguuauuc

SEQ ID NO: 1714437 - RNA, 19 nt, Homo sapiens
  misc_RNA (1)...(19): siRNA sense strand
cguaagaacaagaguuauu

SEQ ID NO: 1714438 - RNA, 19 nt, Homo sapiens
  misc_RNA (1)...(19): siRNA sense strand
cccaaggacuggagcaaga

SEQ ID NO: 1714439 - RNA, 19 nt, Homo sapiens
  misc_RNA (1)...(19): siRNA sense strand
cgaauuguuugggcacuga

SEQ ID NO: 1714440 - RNA, 19 nt, Homo sapiens
  misc_RNA (1)...(19): siRNA sense strand
ggcaccaucuccuucuuug

SEQ ID NO: 1714441 - RNA, 19 nt, Homo sapiens
  misc_RNA (1)...(19): siRNA sense strand
ggaaccaggacaacgaaga

SEQ ID NO: 1714442 - RNA, 19 nt, Homo sapiens
  misc_RNA (1)...(19): siRNA sense strand
ucaccagcaucaagaagga

SEQ ID NO: 1714443 - RNA, 19 nt, Homo sapiens
  misc_RNA (1)...(19): siRNA sense strand
augaaugggugacgcauga

SEQ ID NO: 1714444 - RNA, 19 nt, Homo sapiens
  misc_RNA (1)...(19): siRNA sense strand
acacagacccuuuccucuu

SEQ ID NO: 1714445 - RNA, 19 nt, Homo sapiens
  misc_RNA (1)...(19): siRNA sense strand
caagaguuauucccagaac

SEQ ID NO: 1714446 - RNA, 19 nt, Homo sapiens
  misc_RNA (1)...(19): siRNA sense strand
aguguuuccuugaccauaa

SEQ ID NO: 1714447 - RNA, 19 nt, Homo sapiens
  misc_RNA (1)...(19): siRNA sense strand
guaccucaaucucaucaac

SEQ ID NO: 1714448 - RNA, 19 nt, Homo sapiens
  misc_RNA (1)...(19): siRNA sense strand
gagauugauggacguaaga

SEQ ID NO: 1714449 - RNA, 19 nt, Homo sapiens
  misc_RNA (1)...(19): siRNA sense strand
gaagguggaggugguuuca

SEQ ID NO: 1714450 - RNA, 19 nt, Homo sapiens
  misc_RNA (1)...(19): siRNA sense strand
ugaucgaguucagcuauga

SEQ ID NO: 1714451 - RNA, 19 nt, Homo sapiens
  misc_RNA (1)...(19): siRNA sense strand
gaaagaaucaacggaagac

SEQ ID NO: 1714452 - RNA, 19 nt, Homo sapiens
  misc_RNA (1)...(19): siRNA sense strand
cacauugccuguccucuac

SEQ ID NO: 1714453 - RNA, 19 nt, Homo sapiens
  misc_RNA (1)...(19): siRNA sense strand
gggcaccaucuccuucuuu

SEQ ID NO: 1714454 - RNA, 19 nt, Homo sapiens
  misc_RNA (1)...(19): siRNA sense strand
gaucaccaucaaugagauu

SEQ ID NO: 1714455 - RNA, 19 nt, Homo sapiens
  misc_RNA (1)...(19): siRNA sense strand
cagaucaccaucaaugaga

SEQ ID NO: 1714456 - RNA, 19 nt, Homo sapiens
  misc_RNA (1)...(19): siRNA sense strand
ggcuggaccuaaagaagau

SEQ ID NO: 1714457 - RNA, 19 nt, Homo sapiens
  misc_RNA (1)...(19): siRNA sense strand
ugaaaucaccagcaucaag

SEQ ID NO: 1714458 - RNA, 19 nt, Homo sapiens
  misc_RNA (1)...(19): siRNA sense strand
aagaaucaacggaagacua

SEQ ID NO: 1714459 - RNA, 19 nt, Homo sapiens
  misc_RNA (1)...(19): siRNA sense strand
ugagauugauggacguaag

SEQ ID NO: 1714460 - RNA, 19 nt, Homo sapiens
  misc_RNA (1)...(19): siRNA sense strand
gccguagucucaagugucu

SEQ ID NO: 1714461 - RNA, 19 nt, Homo sapiens
  misc_RNA (1)...(19): siRNA sense strand
gccaguacauccucacacu

SEQ ID NO: 1714462 - RNA, 19 nt, Homo sapiens
  misc_RNA (1)...(19): siRNA sense strand
ggccuccuauccuaucgaa

SEQ ID NO: 1714463 - RNA, 19 nt, Homo sapiens
  misc_RNA (1)...(19): siRNA sense strand
agaaagaaucaacggaaga

SEQ ID NO: 1714464 - RNA, 19 nt, Homo sapiens
  misc_RNA (1)...(19): siRNA sense strand
guacauccucacacuguca

SEQ ID NO: 1714465 - RNA, 19 nt, Homo sapiens
  misc_RNA (1)...(19): siRNA sense strand
cggcuggaccuaaagaaga

SEQ ID NO: 1714466 - RNA, 19 nt, Homo sapiens
  misc_RNA (1)...(19): siRNA sense strand
gcaccaucuccuucuuuga

SEQ ID NO: 1714467 - RNA, 19 nt, Homo sapiens
  misc_RNA (1)...(19): siRNA sense strand
ggaagguggaggugguuuc

SEQ ID NO: 1714468 - RNA, 19 nt, Homo sapiens
  misc_RNA (1)...(19): siRNA sense strand
ucacccggaugaagaacau

SEQ ID NO: 1714469 - RNA, 19 nt, Homo sapiens
  misc_RNA (1)...(19): siRNA sense strand
ccacaggaacucaccacau

SEQ ID NO: 1714470 - RNA, 19 nt, Homo sapiens
  misc_RNA (1)...(19): siRNA sense strand
caccaucaaugagauuagu

SEQ ID NO: 1714471 - RNA, 19 nt, Homo sapiens
  misc_RNA (1)...(19): siRNA sense strand
gagcggcuggaccuaaaga

SEQ ID NO: 1714472 - RNA, 19 nt, Homo sapiens
  misc_RNA (1)...(19): siRNA sense strand
ccauaagacacuguacuau

SEQ ID NO: 1714473 - RNA, 19 nt, Homo sapiens
  misc_RNA (1)...(19): siRNA sense strand
accucaaucucaucaacua

SEQ ID NO: 1714474 - RNA, 19 nt, Homo sapiens
  misc_RNA (1)...(19): siRNA sense strand
caugagcggcuggaccuaa

SEQ ID NO: 1714475 - RNA, 19 nt, Homo sapiens
  misc_RNA (1)...(19): siRNA sense strand
ccaucaaugagauuaguga

SEQ ID NO: 1714476 - RNA, 19 nt, Homo sapiens
  misc_RNA (1)...(19): siRNA sense strand
cuacguccauuacauugac

SEQ ID NO: 1714477 - RNA, 19 nt, Homo sapiens
  misc_RNA (1)...(19): siRNA sense strand
guaagggcuuccacaucgu

SEQ ID NO: 1714478 - RNA, 19 nt, Homo sapiens
  misc_RNA (1)...(19): siRNA sense strand
cuccaggcaaugagauuua

SEQ ID NO: 1714479 - RNA, 19 nt, Homo sapiens
  misc_RNA (1)...(19): siRNA sense strand
ccaaggagaaagaaucaac

SEQ ID NO: 1714480 - RNA, 19 nt, Homo sapiens
  misc_RNA (1)...(19): siRNA sense strand
ucuacgucaugacagagua

SEQ ID NO: 1714481 - RNA, 19 nt, Homo sapiens
  misc_RNA (1)...(19): siRNA sense strand
ugucuucagcgucauuuga

SEQ ID NO: 1714482 - RNA, 19 nt, Homo sapiens
  misc_RNA (1)...(19): siRNA sense strand
cacagaucaccaucaauga

SEQ ID NO: 1714483 - RNA, 19 nt, Homo sapiens
  misc_RNA (1)...(19): siRNA sense strand
aagcgaaaaucgaauuguu

SEQ ID NO: 1714484 - RNA, 19 nt, Homo sapiens
  misc_RNA (1)...(19): siRNA sense strand
ugcaguaccucaaucucau

SEQ ID NO: 1714485 - RNA, 19 nt, Homo sapiens
  misc_RNA (1)...(19): siRNA sense strand
gcggaaccaggacaacgaa

SEQ ID NO: 1714486 - RNA, 19 nt, Homo sapiens
  misc_RNA (1)...(19): siRNA sense strand
augagcggcuggaccuaaa

SEQ ID NO: 1714487 - RNA, 19 nt, Homo sapiens
  misc_RNA (1)...(19): siRNA sense strand
accauaagacacuguacua

SEQ ID NO: 1714488 - RNA, 19 nt, Homo sapiens
  misc_RNA (1)...(19): siRNA sense strand
gagcgugaaggacaucagu

SEQ ID NO: 1714489 - RNA, 19 nt, Homo sapiens
  misc_RNA (1)...(19): siRNA sense strand
gcgaaaaucgaauuguuug

SEQ ID NO: 1714490 - RNA, 19 nt, Homo sapiens
  misc_RNA (1)...(19): siRNA sense strand
gacauccuccaggcaauga

SEQ ID NO: 1714491 - RNA, 19 nt, Homo sapiens
  misc_RNA (1)...(19): siRNA sense strand
caucuccacucugcaguac

SEQ ID NO: 1714492 - RNA, 19 nt, Homo sapiens
  misc_RNA (1)...(19): siRNA sense strand
agaaucaacggaagacuac

SEQ ID NO: 1714493 - RNA, 19 nt, Homo sapiens
  misc_RNA (1)...(19): siRNA sense strand
cagacccuuuccucuucua

SEQ ID NO: 1714494 - RNA, 19 nt, Homo sapiens
  misc_RNA (1)...(19): siRNA sense strand
gaacagcauucacccagaa

SEQ ID NO: 1714495 - RNA, 19 nt, Homo sapiens
  misc_RNA (1)...(19): siRNA sense strand
ggaauuacauccaccugaa

SEQ ID NO: 1714496 - RNA, 19 nt, Homo sapiens
  misc_RNA (1)...(19): siRNA sense strand
cagcaaagcaggaaacaua

SEQ ID NO: 1714497 - RNA, 19 nt, Homo sapiens
  misc_RNA (1)...(19): siRNA sense strand
ucagagacguucccagauu

SEQ ID NO: 1714498 - RNA, 19 nt, Homo sapiens
  misc_RNA (1)...(19): siRNA sense strand
gcaacgaccagucucagua

SEQ ID NO: 1714499 - RNA, 19 nt, Homo sapiens
  misc_RNA (1)...(19): siRNA sense strand
cagagacguucccagauuu

SEQ ID NO: 1714500 - RNA, 19 nt, Homo sapiens
  misc_RNA (1)...(19): siRNA sense strand
ggaaauacaggaggaagaa

SEQ ID NO: 1714501 - RNA, 19 nt, Homo sapiens
  misc_RNA (1)...(19): siRNA sense strand
ccaaaagucuucagcaauu

SEQ ID NO: 1714502 - RNA, 19 nt, Homo sapiens
  misc_RNA (1)...(19): siRNA sense strand
ccaaauaccagauacuguu

SEQ ID NO: 1714503 - RNA, 19 nt, Homo sapiens
  misc_RNA (1)...(19): siRNA sense strand
gcaacaggaagcauaauuc

SEQ ID NO: 1714504 - RNA, 19 nt, Homo sapiens
  misc_RNA (1)...(19): siRNA sense strand
gaauuuugcugcagaaguu

SEQ ID NO: 1714505 - RNA, 19 nt, Homo sapiens
  misc_RNA (1)...(19): siRNA sense strand
acaagaggcuggccaaguc

SEQ ID NO: 1714506 - RNA, 19 nt, Homo sapiens
  misc_RNA (1)...(19): siRNA sense strand
caaauaccagauacuguuu

SEQ ID NO: 1714507 - RNA, 19 nt, Homo sapiens
  misc_RNA (1)...(19): siRNA sense strand
ucucagugcuggucaagga

SEQ ID NO: 1714508 - RNA, 19 nt, Homo sapiens
  misc_RNA (1)...(19): siRNA sense strand
gcccaguccuuccugcaaa

SEQ ID NO: 1714509 - RNA, 19 nt, Homo sapiens
  misc_RNA (1)...(19): siRNA sense strand
caucauggccaacuucuuc

SEQ ID NO: 1714510 - RNA, 19 nt, Homo sapiens
  misc_RNA (1)...(19): siRNA sense strand
agagcaagaucacguuuua

SEQ ID NO: 1714511 - RNA, 19 nt, Homo sapiens
  misc_RNA (1)...(19): siRNA sense strand
caugguguuugccguguuu

SEQ ID NO: 1714512 - RNA, 19 nt, Homo sapiens
  misc_RNA (1)...(19): siRNA sense strand
cagcaucuccuccaaauac

SEQ ID NO: 1714513 - RNA, 19 nt, Homo sapiens
  misc_RNA (1)...(19): siRNA sense strand
gaaauacaggaggaagaaa

SEQ ID NO: 1714514 - RNA, 19 nt, Homo sapiens
  misc_RNA (1)...(19): siRNA sense strand
uacagugucucucugaugu

SEQ ID NO: 1714515 - RNA, 19 nt, Homo sapiens
  misc_RNA (1)...(19): siRNA sense strand
gcaggaaacauaagcaaaa

SEQ ID NO: 1714516 - RNA, 19 nt, Homo sapiens
  misc_RNA (1)...(19): siRNA sense strand
ucucugaugucucuugcaa

SEQ ID NO: 1714517 - RNA, 19 nt, Homo sapiens
  misc_RNA (1)...(19): siRNA sense strand
aauaccagauacuguuuga

SEQ ID NO: 1714518 - RNA, 19 nt, Homo sapiens
  misc_RNA (1)...(19): siRNA sense strand
ccagaaugccgauuucauc

SEQ ID NO: 1714519 - RNA, 19 nt, Homo sapiens
  misc_RNA (1)...(19): siRNA sense strand
caacaggaagcauaauucu

SEQ ID NO: 1714520 - RNA, 19 nt, Homo sapiens
  misc_RNA (1)...(19): siRNA sense strand
ucugaugucucuugcaaca

SEQ ID NO: 1714521 - RNA, 19 nt, Homo sapiens
  misc_RNA (1)...(19): siRNA sense strand
gacaccgguugcugggaua

SEQ ID NO: 1714522 - RNA, 19 nt, Homo sapiens
  misc_RNA (1)...(19): siRNA sense strand
ggucauacgaauaccgauu

SEQ ID NO: 1714523 - RNA, 19 nt, Homo sapiens
  misc_RNA (1)...(19): siRNA sense strand
caaaagucuucagcaauuu

SEQ ID NO: 1714524 - RNA, 19 nt, Homo sapiens
  misc_RNA (1)...(19): siRNA sense strand
agugcgagcugaagcgaaa

SEQ ID NO: 1714525 - RNA, 19 nt, Homo sapiens
  misc_RNA (1)...(19): siRNA sense strand
uaauuuccaucaucgucaa

SEQ ID NO: 1714526 - RNA, 19 nt, Homo sapiens
  misc_RNA (1)...(19): siRNA sense strand
gcauaauucugugccucuu

SEQ ID NO: 1714527 - RNA, 19 nt, Homo sapiens
  misc_RNA (1)...(19): siRNA sense strand
gcaaagcaggaaacauaag

SEQ ID NO: 1714528 - RNA, 19 nt, Homo sapiens
  misc_RNA (1)...(19): siRNA sense strand
gcaguggcgucugggacaa

SEQ ID NO: 1714529 - RNA, 19 nt, Homo sapiens
  misc_RNA (1)...(19): siRNA sense strand
ucacccagaaugccgauuu

SEQ ID NO: 1714530 - RNA, 19 nt, Homo sapiens
  misc_RNA (1)...(19): siRNA sense strand
caaggacgacguucucuac

SEQ ID NO: 1714531 - RNA, 19 nt, Homo sapiens
  misc_RNA (1)...(19): siRNA sense strand
gaggaugagagcaagauca

SEQ ID NO: 1714532 - RNA, 19 nt, Homo sapiens
  misc_RNA (1)...(19): siRNA sense strand
gucauacgaauaccgauuu

SEQ ID NO: 1714533 - RNA, 19 nt, Homo sapiens
  misc_RNA (1)...(19): siRNA sense strand
ggauacaaacgaccacagu

SEQ ID NO: 1714534 - RNA, 19 nt, Homo sapiens
  misc_RNA (1)...(19): siRNA sense strand
guucccagauuucgucgau

SEQ ID NO: 1714535 - RNA, 19 nt, Homo sapiens
  misc_RNA (1)...(19): siRNA sense strand
auaauucugugccucuuca

SEQ ID NO: 1714536 - RNA, 19 nt, Homo sapiens
  misc_RNA (1)...(19): siRNA sense strand
uggccguccucuacuguuu

SEQ ID NO: 1714537 - RNA, 19 nt, Homo sapiens
  misc_RNA (1)...(19): siRNA sense strand
cgaccagucucaguacaag

SEQ ID NO: 1714538 - RNA, 19 nt, Homo sapiens
  misc_RNA (1)...(19): siRNA sense strand
gcaagaucacguuuuauau

SEQ ID NO: 1714539 - RNA, 19 nt, Homo sapiens
  misc_RNA (1)...(19): siRNA sense strand
aguccacgcuccugcuuau

SEQ ID NO: 1714540 - RNA, 19 nt, Homo sapiens
  misc_RNA (1)...(19): siRNA sense strand
ucaaggacgacguucucua

SEQ ID NO: 1714541 - RNA, 19 nt, Homo sapiens
  misc_RNA (1)...(19): siRNA sense strand
gaaguuaacauccccagau

SEQ ID NO: 1714542 - RNA, 19 nt, Homo sapiens
  misc_RNA (1)...(19): siRNA sense strand
caucagcaucuccuccaaa

SEQ ID NO: 1714543 - RNA, 19 nt, Homo sapiens
  misc_RNA (1)...(19): siRNA sense strand
acagcgacccggaggauga

SEQ ID NO: 1714544 - RNA, 19 nt, Homo sapiens
  misc_RNA (1)...(19): siRNA sense strand
uuuccaucaucgucaauuu

SEQ ID NO: 1714545 - RNA, 19 nt, Homo sapiens
  misc_RNA (1)...(19): siRNA sense strand
ccuggugggucauacgaau

SEQ ID NO: 1714546 - RNA, 19 nt, Homo sapiens
  misc_RNA (1)...(19): siRNA sense strand
gcuacagugucucucugau

SEQ ID NO: 1714547 - RNA, 19 nt, Homo sapiens
  misc_RNA (1)...(19): siRNA sense strand
gcccaaaagucuucagcaa

SEQ ID NO: 1714548 - RNA, 19 nt, Homo sapiens
  misc_RNA (1)...(19): siRNA sense strand
gcacugcaccaggaauuac

SEQ ID NO: 1714549 - RNA, 19 nt, Homo sapiens
  misc_RNA (1)...(19): siRNA sense strand
ggucaaggacgacguucuc

SEQ ID NO: 1714550 - RNA, 19 nt, Homo sapiens
  misc_RNA (1)...(19): siRNA sense strand
caacgaccagucucaguac

SEQ ID NO: 1714551 - RNA, 19 nt, Homo sapiens
  misc_RNA (1)...(19): siRNA sense strand
ggaggaagaaacaaaaugu

SEQ ID NO: 1714552 - RNA, 19 nt, Homo sapiens
  misc_RNA (1)...(19): siRNA sense strand
uacaggaggaagaaacaaa

SEQ ID NO: 1714553 - RNA, 19 nt, Homo sapiens
  misc_RNA (1)...(19): siRNA sense strand
ugagagcaagaucacguuu

SEQ ID NO: 1714554 - RNA, 19 nt, Homo sapiens
  misc_RNA (1)...(19): siRNA sense strand
auacaaacgaccacagugu

SEQ ID NO: 1714555 - RNA, 19 nt, Homo sapiens
  misc_RNA (1)...(19): siRNA sense strand
cuacagugucucucugaug

SEQ ID NO: 1714556 - RNA, 19 nt, Homo sapiens
  misc_RNA (1)...(19): siRNA sense strand
cacccagaaugccgauuuc

SEQ ID NO: 1714557 - RNA, 19 nt, Homo sapiens
  misc_RNA (1)...(19): siRNA sense strand
caaagcaggaaacauaagc

SEQ ID NO: 1714558 - RNA, 19 nt, Homo sapiens
  misc_RNA (1)...(19): siRNA sense strand
ccucuacuguuuccugaac

SEQ ID NO: 1714559 - RNA, 19 nt, Homo sapiens
  misc_RNA (1)...(19): siRNA sense strand
cuggugaaggccauuuaua

SEQ ID NO: 1714560 - RNA, 19 nt, Homo sapiens
  misc_RNA (1)...(19): siRNA sense strand
gcaccaggaauuacaucca

SEQ ID NO: 1714561 - RNA, 19 nt, Homo sapiens
  misc_RNA (1)...(19): siRNA sense strand
gaaagcagcuggugauuua

SEQ ID NO: 1714562 - RNA, 19 nt, Homo sapiens
  misc_RNA (1)...(19): siRNA sense strand
gaacggagacgacaccuuu

SEQ ID NO: 1714563 - RNA, 19 nt, Homo sapiens
  misc_RNA (1)...(19): siRNA sense strand
uaagagaucuggacccaaa

SEQ ID NO: 1714564 - RNA, 19 nt, Homo sapiens
  misc_RNA (1)...(19): siRNA sense strand
ugaggaagaugacgaguaa

SEQ ID NO: 1714565 - RNA, 19 nt, Homo sapiens
  misc_RNA (1)...(19): siRNA sense strand
gaagcaaggccuuugauga

SEQ ID NO: 1714566 - RNA, 19 nt, Homo sapiens
  misc_RNA (1)...(19): siRNA sense strand
gcaaggccuuugaugauau

SEQ ID NO: 1714567 - RNA, 19 nt, Homo sapiens
  misc_RNA (1)...(19): siRNA sense strand
gaccauaaccgcaggauuc

SEQ ID NO: 1714568 - RNA, 19 nt, Homo sapiens
  misc_RNA (1)...(19): siRNA sense strand
guaauaaacaggccacaga

SEQ ID NO: 1714569 - RNA, 19 nt, Homo sapiens
  misc_RNA (1)...(19): siRNA sense strand
uugaugauauugccacaua

SEQ ID NO: 1714570 - RNA, 19 nt, Homo sapiens
  misc_RNA (1)...(19): siRNA sense strand
gaagagaagcaaggccuuu

SEQ ID NO: 1714571 - RNA, 19 nt, Homo sapiens
  misc_RNA (1)...(19): siRNA sense strand
gcuaaagcaucagagaaga

SEQ ID NO: 1714572 - RNA, 19 nt, Homo sapiens
  misc_RNA (1)...(19): siRNA sense strand
cgaagaucaugcccaagaa

SEQ ID NO: 1714573 - RNA, 19 nt, Homo sapiens
  misc_RNA (1)...(19): siRNA sense strand
gaugaaauacucggagaaa

SEQ ID NO: 1714574 - RNA, 19 nt, Homo sapiens
  misc_RNA (1)...(19): siRNA sense strand
gaaaaucagcuauguguau

SEQ ID NO: 1714575 - RNA, 19 nt, Homo sapiens
  misc_RNA (1)...(19): siRNA sense strand
ucagcuauguguauaugaa

SEQ ID NO: 1714576 - RNA, 19 nt, Homo sapiens
  misc_RNA (1)...(19): siRNA sense strand
caaggccuuugaugauauu

SEQ ID NO: 1714577 - RNA, 19 nt, Homo sapiens
  misc_RNA (1)...(19): siRNA sense strand
caaagagacccagggauga

SEQ ID NO: 1714578 - RNA, 19 nt, Homo sapiens
  misc_RNA (1)...(19): siRNA sense strand
ccaccuuucauguguaaua

SEQ ID NO: 1714579 - RNA, 19 nt, Homo sapiens
  misc_RNA (1)...(19): siRNA sense strand
acuauaaggccaugacuaa

SEQ ID NO: 1714580 - RNA, 19 nt, Homo sapiens
  misc_RNA (1)...(19): siRNA sense strand
cugagaagauuaauaagag

SEQ ID NO: 1714581 - RNA, 19 nt, Homo sapiens
  misc_RNA (1)...(19): siRNA sense strand
agaagcaucuggcccacaa

SEQ ID NO: 1714582 - RNA, 19 nt, Homo sapiens
  misc_RNA (1)...(19): siRNA sense strand
gagacgacaccuuugcaaa

SEQ ID NO: 1714583 - RNA, 19 nt, Homo sapiens
  misc_RNA (1)...(19): siRNA sense strand
gaagggagugucagaagca

SEQ ID NO: 1714584 - RNA, 19 nt, Homo sapiens
  misc_RNA (1)...(19): siRNA sense strand
gccacauacuucucuaaga

SEQ ID NO: 1714585 - RNA, 19 nt, Homo sapiens
  misc_RNA (1)...(19): siRNA sense strand
ggccaugacuaaacuaggu

SEQ ID NO: 1714586 - RNA, 19 nt, Homo sapiens
  misc_RNA (1)...(19): siRNA sense strand
agcaaggccuuugaugaua

SEQ ID NO: 1714587 - RNA, 19 nt, Homo sapiens
  misc_RNA (1)...(19): siRNA sense strand
ggugauuuaugaagagauc

SEQ ID NO: 1714588 - RNA, 19 nt, Homo sapiens
  misc_RNA (1)...(19): siRNA sense strand
caccuuucauguguaauaa

SEQ ID NO: 1714589 - RNA, 19 nt, Homo sapiens
  misc_RNA (1)...(19): siRNA sense strand
uaaacaggccacagacuuc

SEQ ID NO: 1714590 - RNA, 19 nt, Homo sapiens
  misc_RNA (1)...(19): siRNA sense strand
agaaucaucccgaagauca

SEQ ID NO: 1714591 - RNA, 19 nt, Homo sapiens
  misc_RNA (1)...(19): siRNA sense strand
ccgaagaucaugcccaaga

SEQ ID NO: 1714592 - RNA, 19 nt, Homo sapiens
  misc_RNA (1)...(19): siRNA sense strand
gagaaaaucagcuaugugu

SEQ ID NO: 1714593 - RNA, 19 nt, Homo sapiens
  misc_RNA (1)...(19): siRNA sense strand
ggagacgacaccuuugcaa

SEQ ID NO: 1714594 - RNA, 19 nt, Homo sapiens
  misc_RNA (1)...(19): siRNA sense strand
aaucagcuauguguauaug

SEQ ID NO: 1714595 - RNA, 19 nt, Homo sapiens
  misc_RNA (1)...(19): siRNA sense strand
aagcaaggccuuugaugau

SEQ ID NO: 1714596 - RNA, 19 nt, Homo sapiens
  misc_RNA (1)...(19): siRNA sense strand
agaaagcagcuggugauuu

SEQ ID NO: 1714597 - RNA, 19 nt, Homo sapiens
  misc_RNA (1)...(19): siRNA sense strand
gagaaagcagcuggugauu

SEQ ID NO: 1714598 - RNA, 19 nt, Homo sapiens
  misc_RNA (1)...(19): siRNA sense strand
gaagccagcagaggacgaa

SEQ ID NO: 1714599 - RNA, 19 nt, Homo sapiens
  misc_RNA (1)...(19): siRNA sense strand
ccucccaccuuucaugugu

SEQ ID NO: 1714600 - RNA, 19 nt, Homo sapiens
  misc_RNA (1)...(19): siRNA sense strand
ccacagacugcgugagaga

SEQ ID NO: 1714601 - RNA, 19 nt, Homo sapiens
  misc_RNA (1)...(19): siRNA sense strand
gaagaucaugcccaagaag

SEQ ID NO: 1714602 - RNA, 19 nt, Homo sapiens
  misc_RNA (1)...(19): siRNA sense strand
uaaagcaucagagaagaga

SEQ ID NO: 1714603 - RNA, 19 nt, Homo sapiens
  misc_RNA (1)...(19): siRNA sense strand
acccagggaugaugcuaaa

SEQ ID NO: 1714604 - RNA, 19 nt, Homo sapiens
  misc_RNA (1)...(19): siRNA sense strand
gauauugccacauacuucu

SEQ ID NO: 1714605 - RNA, 19 nt, Homo sapiens
  misc_RNA (1)...(19): siRNA sense strand
gagaagcaaggccuuugau

SEQ ID NO: 1714606 - RNA, 19 nt, Homo sapiens
  misc_RNA (1)...(19): siRNA sense strand
gaaacuauaaggccaugac

SEQ ID NO: 1714607 - RNA, 19 nt, Homo sapiens
  misc_RNA (1)...(19): siRNA sense strand
acagaaucaucccgaagau

SEQ ID NO: 1714608 - RNA, 19 nt, Homo sapiens
  misc_RNA (1)...(19): siRNA sense strand
cacagaaucaucccgaaga

SEQ ID NO: 1714609 - RNA, 19 nt, Homo sapiens
  misc_RNA (1)...(19): siRNA sense strand
cagcagaggacgaaaauga

SEQ ID NO: 1714610 - RNA, 19 nt, Homo sapiens
  misc_RNA (1)...(19): siRNA sense strand
gcuggugauuuaugaagag

SEQ ID NO: 1714611 - RNA, 19 nt, Homo sapiens
  misc_RNA (1)...(19): siRNA sense strand
ccaggaaaagcaaauauuu

SEQ ID NO: 1714612 - RNA, 19 nt, Homo sapiens
  misc_RNA (1)...(19): siRNA sense strand
caucagagaagagaagcaa

SEQ ID NO: 1714613 - RNA, 19 nt, Homo sapiens
  misc_RNA (1)...(19): siRNA sense strand
agagaaagcagcuggugau

SEQ ID NO: 1714614 - RNA, 19 nt, Homo sapiens
  misc_RNA (1)...(19): siRNA sense strand
ucccaccuuucauguguaa

SEQ ID NO: 1714615 - RNA, 19 nt, Homo sapiens
  misc_RNA (1)...(19): siRNA sense strand
gacccagggaugaugcuaa

SEQ ID NO: 1714616 - RNA, 19 nt, Homo sapiens
  misc_RNA (1)...(19): siRNA sense strand
auaaacaggccacagacuu

SEQ ID NO: 1714617 - RNA, 19 nt, Homo sapiens
  misc_RNA (1)...(19): siRNA sense strand
uauaaggccaugacuaaac

SEQ ID NO: 1714618 - RNA, 19 nt, Homo sapiens
  misc_RNA (1)...(19): siRNA sense strand
aaagucacccucccaccuu

SEQ ID NO: 1714619 - RNA, 19 nt, Homo sapiens
  misc_RNA (1)...(19): siRNA sense strand
auaaggccaugacuaaacu

SEQ ID NO: 1714620 - RNA, 19 nt, Homo sapiens
  misc_RNA (1)...(19): siRNA sense strand
ggggaaugauuuugauaau

SEQ ID NO: 1714621 - RNA, 19 nt, Homo sapiens
  misc_RNA (1)...(19): siRNA sense strand
gaaauacucggagaaaauc

SEQ ID NO: 1714622 - RNA, 19 nt, Homo sapiens
  misc_RNA (1)...(19): siRNA sense strand
gcagaggacgaaaaugauu

SEQ ID NO: 1714623 - RNA, 19 nt, Homo sapiens
  misc_RNA (1)...(19): siRNA sense strand
ugauauugccacauacuuc

SEQ ID NO: 1714624 - RNA, 19 nt, Homo sapiens
  misc_RNA (1)...(19): siRNA sense strand
ggcaggcuccacagaauca

SEQ ID NO: 1714625 - RNA, 19 nt, Homo sapiens
  misc_RNA (1)...(19): siRNA sense strand
gggaaugauuuugauaaug

SEQ ID NO: 1714626 - RNA, 19 nt, Homo sapiens
  misc_RNA (1)...(19): siRNA sense strand
ucggcaggcuccacagaau

SEQ ID NO: 1714627 - RNA, 19 nt, Homo sapiens
  misc_RNA (1)...(19): siRNA sense strand
agagaagcaaggccuuuga

SEQ ID NO: 1714628 - RNA, 19 nt, Homo sapiens
  misc_RNA (1)...(19): siRNA sense strand
acaaaacgaugggaaacaa

SEQ ID NO: 1714629 - RNA, 19 nt, Homo sapiens
  misc_RNA (1)...(19): siRNA sense strand
gaugauauugccacauacu

SEQ ID NO: 1714630 - RNA, 19 nt, Homo sapiens
  misc_RNA (1)...(19): siRNA sense strand
acagacugcgugagagaaa

SEQ ID NO: 1714631 - RNA, 19 nt, Homo sapiens
  misc_RNA (1)...(19): siRNA sense strand
gggagugucagaagcaucu

SEQ ID NO: 1714632 - RNA, 19 nt, Homo sapiens
  misc_RNA (1)...(19): siRNA sense strand
aagucacccucccaccuuu

SEQ ID NO: 1714633 - RNA, 19 nt, Homo sapiens
  misc_RNA (1)...(19): siRNA sense strand
cugaggaagaugacgagua

SEQ ID NO: 1714634 - RNA, 19 nt, Homo sapiens
  misc_RNA (1)...(19): siRNA sense strand
ugaaauacucggagaaaau

SEQ ID NO: 1714635 - RNA, 19 nt, Homo sapiens
  misc_RNA (1)...(19): siRNA sense strand
ggacuuaaauuuggcuuga

SEQ ID NO: 1714636 - RNA, 19 nt, Homo sapiens
  misc_RNA (1)...(19): siRNA sense strand
ggacauagacaaugacuuc

SEQ ID NO: 1714637 - RNA, 19 nt, Homo sapiens
  misc_RNA (1)...(19): siRNA sense strand
caucggacauagacaauga

SEQ ID NO: 1714638 - RNA, 19 nt, Homo sapiens
  misc_RNA (1)...(19): siRNA sense strand
ggaaagccauggcggaucu

SEQ ID NO: 1714639 - RNA, 19 nt, Homo sapiens
  misc_RNA (1)...(19): siRNA sense strand
ccucaaagguggucucuca

SEQ ID NO: 1714640 - RNA, 19 nt, Homo sapiens
  misc_RNA (1)...(19): siRNA sense strand
cuacugggauucuaacaga

SEQ ID NO: 1714641 - RNA, 19 nt, Homo sapiens
  misc_RNA (1)...(19): siRNA sense strand
gaauuaaggcaauccagaa

SEQ ID NO: 1714642 - RNA, 19 nt, Homo sapiens
  misc_RNA (1)...(19): siRNA sense strand
ugaugcagcuugauaaaca

SEQ ID NO: 1714643 - RNA, 19 nt, Homo sapiens
  misc_RNA (1)...(19): siRNA sense strand
gauccgugguucugaaaug

SEQ ID NO: 1714644 - RNA, 19 nt, Homo sapiens
  misc_RNA (1)...(19): siRNA sense strand
ugaaauguuugcugagaug

SEQ ID NO: 1714645 - RNA, 19 nt, Homo sapiens
  misc_RNA (1)...(19): siRNA sense strand
ggacuaauugcccucauug

SEQ ID NO: 1714646 - RNA, 19 nt, Homo sapiens
  misc_RNA (1)...(19): siRNA sense strand
gccaucaucuccagggaaa

SEQ ID NO: 1714647 - RNA, 19 nt, Homo sapiens
  misc_RNA (1)...(19): siRNA sense strand
gggacuaauugcccucauu

SEQ ID NO: 1714648 - RNA, 19 nt, Homo sapiens
  misc_RNA (1)...(19): siRNA sense strand
gcggaucuguccugcaaga

SEQ ID NO: 1714649 - RNA, 19 nt, Homo sapiens
  misc_RNA (1)...(19): siRNA sense strand
gagcuaaguucuauaaaag

SEQ ID NO: 1714650 - RNA, 19 nt, Homo sapiens
  misc_RNA (1)...(19): siRNA sense strand
gaagucgggcagagacauu

SEQ ID NO: 1714651 - RNA, 19 nt, Homo sapiens
  misc_RNA (1)...(19): siRNA sense strand
aagguggucucucagcuuu

SEQ ID NO: 1714652 - RNA, 19 nt, Homo sapiens
  misc_RNA (1)...(19): siRNA sense strand
caaugaagccucaccuaca

SEQ ID NO: 1714653 - RNA, 19 nt, Homo sapiens
  misc_RNA (1)...(19): siRNA sense strand
cagagagaauuaaggcaau

SEQ ID NO: 1714654 - RNA, 19 nt, Homo sapiens
  misc_RNA (1)...(19): siRNA sense strand
uaucauugcucgagcuaag

SEQ ID NO: 1714655 - RNA, 19 nt, Homo sapiens
  misc_RNA (1)...(19): siRNA sense strand
uggcggaucuguccugcaa

SEQ ID NO: 1714656 - RNA, 19 nt, Homo sapiens
  misc_RNA (1)...(19): siRNA sense strand
cgagcuaaguucuauaaaa

SEQ ID NO: 1714657 - RNA, 19 nt, Homo sapiens
  misc_RNA (1)...(19): siRNA sense strand
gaugcagcuugauaaacaa

SEQ ID NO: 1714658 - RNA, 19 nt, Homo sapiens
  misc_RNA (1)...(19): siRNA sense strand
caaagaagucgggcagaga

SEQ ID NO: 1714659 - RNA, 19 nt, Homo sapiens
  misc_RNA (1)...(19): siRNA sense strand
ccacaggggacuuaaauuu

SEQ ID NO: 1714660 - RNA, 19 nt, Homo sapiens
  misc_RNA (1)...(19): siRNA sense strand
aaugaagccucaccuacau

SEQ ID NO: 1714661 - RNA, 19 nt, Homo sapiens
  misc_RNA (1)...(19): siRNA sense strand
gucaggaauugaagcgauu

SEQ ID NO: 1714662 - RNA, 19 nt, Homo sapiens
  misc_RNA (1)...(19): siRNA sense strand
gcaaacagugugaugaacu

SEQ ID NO: 1714663 - RNA, 19 nt, Homo sapiens
  misc_RNA (1)...(19): siRNA sense strand
ccgugguucugaaauguuu

SEQ ID NO: 1714664 - RNA, 19 nt, Homo sapiens
  misc_RNA (1)...(19): siRNA sense strand
gguggucucucagcuuuua

SEQ ID NO: 1714665 - RNA, 19 nt, Homo sapiens
  misc_RNA (1)...(19): siRNA sense strand
ucugaaauguuugcugaga

SEQ ID NO: 1714666 - RNA, 19 nt, Homo sapiens
  misc_RNA (1)...(19): siRNA sense strand
gaugcaaacagugugauga

SEQ ID NO: 1714667 - RNA, 19 nt, Homo sapiens
  misc_RNA (1)...(19): siRNA sense strand
cauaaaaccuuaccagacu

SEQ ID NO: 1714668 - RNA, 19 nt, Homo sapiens
  misc_RNA (1)...(19): siRNA sense strand
gauaucauugcucgagcua

SEQ ID NO: 1714669 - RNA, 19 nt, Homo sapiens
  misc_RNA (1)...(19): siRNA sense strand
gcuugaugcagcuugauaa

SEQ ID NO: 1714670 - RNA, 19 nt, Homo sapiens
  misc_RNA (1)...(19): siRNA sense strand
gcucauaccccuucaguca

SEQ ID NO: 1714671 - RNA, 19 nt, Homo sapiens
  misc_RNA (1)...(19): siRNA sense strand
cgggauccgugguucugaa

SEQ ID NO: 1714672 - RNA, 19 nt, Homo sapiens
  misc_RNA (1)...(19): siRNA sense strand
ucucucagcuuuuaaguca

SEQ ID NO: 1714673 - RNA, 19 nt, Homo sapiens
  misc_RNA (1)...(19): siRNA sense strand
agacucugaucaaagaagu

SEQ ID NO: 1714674 - RNA, 19 nt, Homo sapiens
  misc_RNA (1)...(19): siRNA sense strand
uugcugagauggauuugag

SEQ ID NO: 1714675 - RNA, 19 nt, Homo sapiens
  misc_RNA (1)...(19): siRNA sense strand
acuuaaauuuggcuugaug

SEQ ID NO: 1714676 - RNA, 19 nt, Homo sapiens
  misc_RNA (1)...(19): siRNA sense strand
cguggacccugcugucauc

SEQ ID NO: 1714677 - RNA, 19 nt, Homo sapiens
  misc_RNA (1)...(19): siRNA sense strand
gcagcuugauaaacaaacg

SEQ ID NO: 1714678 - RNA, 19 nt, Homo sapiens
  misc_RNA (1)...(19): siRNA sense strand
guuauccuccgugguguuu

SEQ ID NO: 1714679 - RNA, 19 nt, Homo sapiens
  misc_RNA (1)...(19): siRNA sense strand
ggcuugaugcagcuugaua

SEQ ID NO: 1714680 - RNA, 19 nt, Homo sapiens
  misc_RNA (1)...(19): siRNA sense strand
ugagggccauaaaaccuua

SEQ ID NO: 1714681 - RNA, 19 nt, Homo sapiens
  misc_RNA (1)...(19): siRNA sense strand
ugucaucgcagccaucauc

SEQ ID NO: 1714682 - RNA, 19 nt, Homo sapiens
  misc_RNA (1)...(19): siRNA sense strand
aauuaaggcaauccagaaa

SEQ ID NO: 1714683 - RNA, 19 nt, Homo sapiens
  misc_RNA (1)...(19): siRNA sense strand
gggauccgugguucugaaa

SEQ ID NO: 1714684 - RNA, 19 nt, Homo sapiens
  misc_RNA (1)...(19): siRNA sense strand
gcuuuuaagucaggaauug

SEQ ID NO: 1714685 - RNA, 19 nt, Homo sapiens
  misc_RNA (1)...(19): siRNA sense strand
gaaggaaucucggcuuuau

SEQ ID NO: 1714686 - RNA, 19 nt, Homo sapiens
  misc_RNA (1)...(19): siRNA sense strand
ccaacaaacuacaaaggua

SEQ ID NO: 1714687 - RNA, 19 nt, Homo sapiens
  misc_RNA (1)...(19): siRNA sense strand
ggucaaaggucaacauucu

SEQ ID NO: 1714688 - RNA, 19 nt, Homo sapiens
  misc_RNA (1)...(19): siRNA sense strand
gcucucauguuccuuguuu

SEQ ID NO: 1714689 - RNA, 19 nt, Homo sapiens
  misc_RNA (1)...(19): siRNA sense strand
ggagaucauuaaagaagaa

SEQ ID NO: 1714690 - RNA, 19 nt, Homo sapiens
  misc_RNA (1)...(19): siRNA sense strand
gcugccaccuucacaguua

SEQ ID NO: 1714691 - RNA, 19 nt, Homo sapiens
  misc_RNA (1)...(19): siRNA sense strand
ggaauauucucuaucuucu

SEQ ID NO: 1714692 - RNA, 19 nt, Homo sapiens
  misc_RNA (1)...(19): siRNA sense strand
ggauacagcuagacuucga

SEQ ID NO: 1714693 - RNA, 19 nt, Homo sapiens
  misc_RNA (1)...(19): siRNA sense strand
caaaggccuugaagccaaa

SEQ ID NO: 1714694 - RNA, 19 nt, Homo sapiens
  misc_RNA (1)...(19): siRNA sense strand
guucaucauuggugcagua

SEQ ID NO: 1714695 - RNA, 19 nt, Homo sapiens
  misc_RNA (1)...(19): siRNA sense strand
ugacagcaaugacaguguu

SEQ ID NO: 1714696 - RNA, 19 nt, Homo sapiens
  misc_RNA (1)...(19): siRNA sense strand
caacaaacuacaaagguau

SEQ ID NO: 1714697 - RNA, 19 nt, Homo sapiens
  misc_RNA (1)...(19): siRNA sense strand
gagcaaaauuuaggaauga

SEQ ID NO: 1714698 - RNA, 19 nt, Homo sapiens
  misc_RNA (1)...(19): siRNA sense strand
cgagggugguuuccaguga

SEQ ID NO: 1714699 - RNA, 19 nt, Homo sapiens
  misc_RNA (1)...(19): siRNA sense strand
gacuucagguugaugagaa

SEQ ID NO: 1714700 - RNA, 19 nt, Homo sapiens
  misc_RNA (1)...(19): siRNA sense strand
gaaucucggcuuuauggaa

SEQ ID NO: 1714701 - RNA, 19 nt, Homo sapiens
  misc_RNA (1)...(19): siRNA sense strand
guaagacguuuuggaauaa

SEQ ID NO: 1714702 - RNA, 19 nt, Homo sapiens
  misc_RNA (1)...(19): siRNA sense strand
uaaugggacucuacaaagg

SEQ ID NO: 1714703 - RNA, 19 nt, Homo sapiens
  misc_RNA (1)...(19): siRNA sense strand
gcuccaauuuugucuauuu

SEQ ID NO: 1714704 - RNA, 19 nt, Homo sapiens
  misc_RNA (1)...(19): siRNA sense strand
ggaauaaugggacucuaca

SEQ ID NO: 1714705 - RNA, 19 nt, Homo sapiens
  misc_RNA (1)...(19): siRNA sense strand
ucaaagcacucugggucaa

SEQ ID NO: 1714706 - RNA, 19 nt, Homo sapiens
  misc_RNA (1)...(19): siRNA sense strand
gcugaagcgugcacaccaa

SEQ ID NO: 1714707 - RNA, 19 nt, Homo sapiens
  misc_RNA (1)...(19): siRNA sense strand
ccucauugcuguuggucuu

SEQ ID NO: 1714708 - RNA, 19 nt, Homo sapiens
  misc_RNA (1)...(19): siRNA sense strand
gaucauuaaagaagaagga

SEQ ID NO: 1714709 - RNA, 19 nt, Homo sapiens
  misc_RNA (1)...(19): siRNA sense strand
aguaagacguuuuggaaua

SEQ ID NO: 1714710 - RNA, 19 nt, Homo sapiens
  misc_RNA (1)...(19): siRNA sense strand
aaucucggcuuuauggaau

SEQ ID NO: 1714711 - RNA, 19 nt, Homo sapiens
  misc_RNA (1)...(19): siRNA sense strand
ggagcaaaauuuaggaaug

SEQ ID NO: 1714712 - RNA, 19 nt, Homo sapiens
  misc_RNA (1)...(19): siRNA sense strand
caggagugguuaauguguu

SEQ ID NO: 1714713 - RNA, 19 nt, Homo sapiens
  misc_RNA (1)...(19): siRNA sense strand
ugaagacauuguaccaaca

SEQ ID NO: 1714714 - RNA, 19 nt, Homo sapiens
  misc_RNA (1)...(19): siRNA sense strand
ccucacugcugcucucaug

SEQ ID NO: 1714715 - RNA, 19 nt, Homo sapiens
  misc_RNA (1)...(19): siRNA sense strand
aauaaugggacucuacaaa

SEQ ID NO: 1714716 - RNA, 19 nt, Homo sapiens
  misc_RNA (1)...(19): siRNA sense strand
uaaagaaacggaugaagcu

SEQ ID NO: 1714717 - RNA, 19 nt, Homo sapiens
  misc_RNA (1)...(19): siRNA sense strand
ccagugauuuccagucucu

SEQ ID NO: 1714718 - RNA, 19 nt, Homo sapiens
  misc_RNA (1)...(19): siRNA sense strand
uggcacauuucccucauug

SEQ ID NO: 1714719 - RNA, 19 nt, Homo sapiens
  misc_RNA (1)...(19): siRNA sense strand
ugaaggaaucucggcuuua

SEQ ID NO: 1714720 - RNA, 19 nt, Homo sapiens
  misc_RNA (1)...(19): siRNA sense strand
guuccuuguuuaugagaaa

SEQ ID NO: 1714721 - RNA, 19 nt, Homo sapiens
  misc_RNA (1)...(19): siRNA sense strand
uccuggagaucauuaaaga

SEQ ID NO: 1714722 - RNA, 19 nt, Homo sapiens
  misc_RNA (1)...(19): siRNA sense strand
gacuucgacuucagguuga

SEQ ID NO: 1714723 - RNA, 19 nt, Homo sapiens
  misc_RNA (1)...(19): siRNA sense strand
gaauaaugggacucuacaa

SEQ ID NO: 1714724 - RNA, 19 nt, Homo sapiens
  misc_RNA (1)...(19): siRNA sense strand
uacagucaauucugagguu

SEQ ID NO: 1714725 - RNA, 19 nt, Homo sapiens
  misc_RNA (1)...(19): siRNA sense strand
aagaaacggaugaagcuuu

SEQ ID NO: 1714726 - RNA, 19 nt, Homo sapiens
  misc_RNA (1)...(19): siRNA sense strand
cagcuagacuucgacuuca

SEQ ID NO: 1714727 - RNA, 19 nt, Homo sapiens
  misc_RNA (1)...(19): siRNA sense strand
uugcaggagugguuaaugu

SEQ ID NO: 1714728 - RNA, 19 nt, Homo sapiens
  misc_RNA (1)...(19): siRNA sense strand
cggaauauucucuaucuuc

SEQ ID NO: 1714729 - RNA, 19 nt, Homo sapiens
  misc_RNA (1)...(19): siRNA sense strand
aaacagaacauugggaagu

SEQ ID NO: 1714730 - RNA, 19 nt, Homo sapiens
  misc_RNA (1)...(19): siRNA sense strand
gagggugguuuccagugau

SEQ ID NO: 1714731 - RNA, 19 nt, Homo sapiens
  misc_RNA (1)...(19): siRNA sense strand
gcacauuucccucauugcu

SEQ ID NO: 1714732 - RNA, 19 nt, Homo sapiens
  misc_RNA (1)...(19): siRNA sense strand
gguaaacaccagacugaag

SEQ ID NO: 1714733 - RNA, 19 nt, Homo sapiens
  misc_RNA (1)...(19): siRNA sense strand
gcaggagugguuaaugugu

SEQ ID NO: 1714734 - RNA, 19 nt, Homo sapiens
  misc_RNA (1)...(19): siRNA sense strand
augaaggaaucucggcuuu

SEQ ID NO: 1714735 - RNA, 19 nt, Homo sapiens
  misc_RNA (1)...(19): siRNA sense strand
ggaagcgugacagcaauga

SEQ ID NO: 1714736 - RNA, 19 nt, Homo sapiens
  misc_RNA (1)...(19): siRNA sense strand
uggagaucauuaaagaaga

SEQ ID NO: 1714737 - RNA, 19 nt, Homo sapiens
  misc_RNA (1)...(19): siRNA sense strand
ucacugcugcucucauguu

SEQ ID NO: 1714738 - RNA, 19 nt, Homo sapiens
  misc_RNA (1)...(19): siRNA sense strand
caaagcacucugggucaaa

SEQ ID NO: 1714739 - RNA, 19 nt, Homo sapiens
  misc_RNA (1)...(19): siRNA sense strand
agucucugcugcuccaauu

SEQ ID NO: 1714740 - RNA, 19 nt, Homo sapiens
  misc_RNA (1)...(19): siRNA sense strand
acgguacagucaauucuga

SEQ ID NO: 1714741 - RNA, 19 nt, Homo sapiens
  misc_RNA (1)...(19): siRNA sense strand
guuugggcgucauagacua

SEQ ID NO: 1714742 - RNA, 19 nt, Homo sapiens
  misc_RNA (1)...(19): siRNA sense strand
caacauucuaccacuggaa

SEQ ID NO: 1714743 - RNA, 19 nt, Homo sapiens
  misc_RNA (1)...(19): siRNA sense strand
ccauccaguucauguuuua

SEQ ID NO: 1714744 - RNA, 19 nt, Homo sapiens
  misc_RNA (1)...(19): siRNA sense strand
ucaaaggucaacauucuac

SEQ ID NO: 1714745 - RNA, 19 nt, Homo sapiens
  misc_RNA (1)...(19): siRNA sense strand
cuucuucaccaacgaguaa

SEQ ID NO: 1714746 - RNA, 19 nt, Homo sapiens
  misc_RNA (1)...(19): siRNA sense strand
gcaguagccaaagcgauug

SEQ ID NO: 1714747 - RNA, 19 nt, Homo sapiens
  misc_RNA (1)...(19): siRNA sense strand
uggaaaagaucugguaguu

SEQ ID NO: 1714748 - RNA, 19 nt, Homo sapiens
  misc_RNA (1)...(19): siRNA sense strand
aggagugguuaauguguug

SEQ ID NO: 1714749 - RNA, 19 nt, Homo sapiens
  misc_RNA (1)...(19): siRNA sense strand
gugggaagcgugacagcaa

SEQ ID NO: 1714750 - RNA, 19 nt, Homo sapiens
  misc_RNA (1)...(19): siRNA sense strand
acagucaauucugagguuu

SEQ ID NO: 1714751 - RNA, 19 nt, Homo sapiens
  misc_RNA (1)...(19): siRNA sense strand
gcagacgguacagucaauu

SEQ ID NO: 1714752 - RNA, 19 nt, Homo sapiens
  misc_RNA (1)...(19): siRNA sense strand
acagcuagacuucgacuuc

SEQ ID NO: 1714753 - RNA, 19 nt, Homo sapiens
  misc_RNA (1)...(19): siRNA sense strand
gugguuaauguguugcuaa

SEQ ID NO: 1714754 - RNA, 19 nt, Homo sapiens
  misc_RNA (1)...(19): siRNA sense strand
ucucauguuccuuguuuau

SEQ ID NO: 1714755 - RNA, 19 nt, Homo sapiens
  misc_RNA (1)...(19): siRNA sense strand
cgaguaagacguuuuggaa

SEQ ID NO: 1714756 - RNA, 19 nt, Homo sapiens
  misc_RNA (1)...(19): siRNA sense strand
ugcaguagccaaagcgauu

SEQ ID NO: 1714757 - RNA, 19 nt, Homo sapiens
  misc_RNA (1)...(19): siRNA sense strand
ucugguaguuggguuuguu

SEQ ID NO: 1714758 - RNA, 19 nt, Homo sapiens
  misc_RNA (1)...(19): siRNA sense strand
gacagcaaugacaguguuu

SEQ ID NO: 1714759 - RNA, 19 nt, Homo sapiens
  misc_RNA (1)...(19): siRNA sense strand
cauagacuaaacccagaaa

SEQ ID NO: 1714760 - RNA, 19 nt, Homo sapiens
  misc_RNA (1)...(19): siRNA sense strand
aaacggaugaagcuuucuu

SEQ ID NO: 1714761 - RNA, 19 nt, Homo sapiens
  misc_RNA (1)...(19): siRNA sense strand
aaagcacucugggucaaag

SEQ ID NO: 1714762 - RNA, 19 nt, Homo sapiens
  misc_RNA (1)...(19): siRNA sense strand
gagguuugggcgucauaga

SEQ ID NO: 1714763 - RNA, 19 nt, Homo sapiens
  misc_RNA (1)...(19): siRNA sense strand
ucaauccugccauccaguu

SEQ ID NO: 1714764 - RNA, 19 nt, Homo sapiens
  misc_RNA (1)...(19): siRNA sense strand
gaaaauccaaaacuacaca

SEQ ID NO: 1714765 - RNA, 19 nt, Homo sapiens
  misc_RNA (1)...(19): siRNA sense strand
gaucugguaguuggguuug

SEQ ID NO: 1714766 - RNA, 19 nt, Homo sapiens
  misc_RNA (1)...(19): siRNA sense strand
ggacuccuggcaccauauc

SEQ ID NO: 1714767 - RNA, 19 nt, Homo sapiens
  misc_RNA (1)...(19): siRNA sense strand
gucaaaggucaacauucua

SEQ ID NO: 1714768 - RNA, 19 nt, Homo sapiens
  misc_RNA (1)...(19): siRNA sense strand
gagaaggacuugguggaua

SEQ ID NO: 1714769 - RNA, 19 nt, Homo sapiens
  misc_RNA (1)...(19): siRNA sense strand
gaagaucuuugccagcauu

SEQ ID NO: 1714770 - RNA, 19 nt, Homo sapiens
  misc_RNA (1)...(19): siRNA sense strand
ggauaaggcucgucagauc

SEQ ID NO: 1714771 - RNA, 19 nt, Homo sapiens
  misc_RNA (1)...(19): siRNA sense strand
caacagagcaucuccaucu

SEQ ID NO: 1714772 - RNA, 19 nt, Homo sapiens
  misc_RNA (1)...(19): siRNA sense strand
agaaggacuugguggauaa

SEQ ID NO: 1714773 - RNA, 19 nt, Homo sapiens
  misc_RNA (1)...(19): siRNA sense strand
gccgugggcuccuguauga

SEQ ID NO: 1714774 - RNA, 19 nt, Homo sapiens
  misc_RNA (1)...(19): siRNA sense strand
cagagcaggugacauauca

SEQ ID NO: 1714775 - RNA, 19 nt, Homo sapiens
  misc_RNA (1)...(19): siRNA sense strand
gaaccuggaggaucucaaa

SEQ ID NO: 1714776 - RNA, 19 nt, Homo sapiens
  misc_RNA (1)...(19): siRNA sense strand
caagguacguggugauauc

SEQ ID NO: 1714777 - RNA, 19 nt, Homo sapiens
  misc_RNA (1)...(19): siRNA sense strand
ucacuagccucuccaagga

SEQ ID NO: 1714778 - RNA, 19 nt, Homo sapiens
  misc_RNA (1)...(19): siRNA sense strand
gaggagaccaucuaucaga

SEQ ID NO: 1714779 - RNA, 19 nt, Homo sapiens
  misc_RNA (1)...(19): siRNA sense strand
acagugagcucuucaggau

SEQ ID NO: 1714780 - RNA, 19 nt, Homo sapiens
  misc_RNA (1)...(19): siRNA sense strand
uggcagagcaggugacaua

SEQ ID NO: 1714781 - RNA, 19 nt, Homo sapiens
  misc_RNA (1)...(19): siRNA sense strand
gggacuaugugaucgaaga

SEQ ID NO: 1714782 - RNA, 19 nt, Homo sapiens
  misc_RNA (1)...(19): siRNA sense strand
ugaggcagcugcaucugaa

SEQ ID NO: 1714783 - RNA, 19 nt, Homo sapiens
  misc_RNA (1)...(19): siRNA sense strand
cgaggagugugucucauug

SEQ ID NO: 1714784 - RNA, 19 nt, Homo sapiens
  misc_RNA (1)...(19): siRNA sense strand
gcaucuaucacaacaacua

SEQ ID NO: 1714785 - RNA, 19 nt, Homo sapiens
  misc_RNA (1)...(19): siRNA sense strand
uaugauggcucccucaaca

SEQ ID NO: 1714786 - RNA, 19 nt, Homo sapiens
  misc_RNA (1)...(19): siRNA sense strand
ggacagaaccagcauccau

SEQ ID NO: 1714787 - RNA, 19 nt, Homo sapiens
  misc_RNA (1)...(19): siRNA sense strand
gccgugaccuuccaccauu

SEQ ID NO: 1714788 - RNA, 19 nt, Homo sapiens
  misc_RNA (1)...(19): siRNA sense strand
gacuggcucuggaugauga

SEQ ID NO: 1714789 - RNA, 19 nt, Homo sapiens
  misc_RNA (1)...(19): siRNA sense strand
ccacaaccucucugcauuu

SEQ ID NO: 1714790 - RNA, 19 nt, Homo sapiens
  misc_RNA (1)...(19): siRNA sense strand
cuggagagcuucauagaca

SEQ ID NO: 1714791 - RNA, 19 nt, Homo sapiens
  misc_RNA (1)...(19): siRNA sense strand
acagugaccugaggaaaga

SEQ ID NO: 1714792 - RNA, 19 nt, Homo sapiens
  misc_RNA (1)...(19): siRNA sense strand
gaacugaccgaugaagaug

SEQ ID NO: 1714793 - RNA, 19 nt, Homo sapiens
  misc_RNA (1)...(19): siRNA sense strand
ggaacugaccgaugaagau

SEQ ID NO: 1714794 - RNA, 19 nt, Homo sapiens
  misc_RNA (1)...(19): siRNA sense strand
cauuggagauggcauggaa

SEQ ID NO: 1714795 - RNA, 19 nt, Homo sapiens
  misc_RNA (1)...(19): siRNA sense strand
uggccaagauguacaguga

SEQ ID NO: 1714796 - RNA, 19 nt, Homo sapiens
  misc_RNA (1)...(19): siRNA sense strand
gcauugcuccuuccaucua

SEQ ID NO: 1714797 - RNA, 19 nt, Homo sapiens
  misc_RNA (1)...(19): siRNA sense strand
ccaaccacguggccaagaa

SEQ ID NO: 1714798 - RNA, 19 nt, Homo sapiens
  misc_RNA (1)...(19): siRNA sense strand
cuauugaggucccugagaa

SEQ ID NO: 1714799 - RNA, 19 nt, Homo sapiens
  misc_RNA (1)...(19): siRNA sense strand
caagaaggacaacaagguu

SEQ ID NO: 1714800 - RNA, 19 nt, Homo sapiens
  misc_RNA (1)...(19): siRNA sense strand
ggugaacuaugaggacuug

SEQ ID NO: 1714801 - RNA, 19 nt, Homo sapiens
  misc_RNA (1)...(19): siRNA sense strand
ggacaagguggccaagaug

SEQ ID NO: 1714802 - RNA, 19 nt, Homo sapiens
  misc_RNA (1)...(19): siRNA sense strand
gaagaaguacaucaucuac

SEQ ID NO: 1714803 - RNA, 19 nt, Homo sapiens
  misc_RNA (1)...(19): siRNA sense strand
gaagaugugaagaugauca

SEQ ID NO: 1714804 - RNA, 19 nt, Homo sapiens
  misc_RNA (1)...(19): siRNA sense strand
cgaugaagaugugaagaug

SEQ ID NO: 1714805 - RNA, 19 nt, Homo sapiens
  misc_RNA (1)...(19): siRNA sense strand
ugacuggcaucuaucacaa

SEQ ID NO: 1714806 - RNA, 19 nt, Homo sapiens
  misc_RNA (1)...(19): siRNA sense strand
agucgcaguuucucaagua

SEQ ID NO: 1714807 - RNA, 19 nt, Homo sapiens
  misc_RNA (1)...(19): siRNA sense strand
ucacagagcccaucaucuc

SEQ ID NO: 1714808 - RNA, 19 nt, Homo sapiens
  misc_RNA (1)...(19): siRNA sense strand
agugagcucuucaggauga

SEQ ID NO: 1714809 - RNA, 19 nt, Homo sapiens
  misc_RNA (1)...(19): siRNA sense strand
gcagcaugcgcaagacuuu

SEQ ID NO: 1714810 - RNA, 19 nt, Homo sapiens
  misc_RNA (1)...(19): siRNA sense strand
ccaggagaguccaggcaaa

SEQ ID NO: 1714811 - RNA, 19 nt, Homo sapiens
  misc_RNA (1)...(19): siRNA sense strand
caaccucucugcauuuuau

SEQ ID NO: 1714812 - RNA, 19 nt, Homo sapiens
  misc_RNA (1)...(19): siRNA sense strand
ugaagaaguacaucaucua

SEQ ID NO: 1714813 - RNA, 19 nt, Homo sapiens
  misc_RNA (1)...(19): siRNA sense strand
gaauuugacaagaugaaug

SEQ ID NO: 1714814 - RNA, 19 nt, Homo sapiens
  misc_RNA (1)...(19): siRNA sense strand
cgcaguuucucaaguauau

SEQ ID NO: 1714815 - RNA, 19 nt, Homo sapiens
  misc_RNA (1)...(19): siRNA sense strand
gcuuugacauccugugugu

SEQ ID NO: 1714816 - RNA, 19 nt, Homo sapiens
  misc_RNA (1)...(19): siRNA sense strand
gccacaacgucuucaagga

SEQ ID NO: 1714817 - RNA, 19 nt, Homo sapiens
  misc_RNA (1)...(19): siRNA sense strand
ugaugaauuugacaagaug

SEQ ID NO: 1714818 - RNA, 19 nt, Homo sapiens
  misc_RNA (1)...(19): siRNA sense strand
caagccaggagacgagaua

SEQ ID NO: 1714819 - RNA, 19 nt, Homo sapiens
  misc_RNA (1)...(19): siRNA sense strand
gugagagccugguggugaa

SEQ ID NO: 1714820 - RNA, 19 nt, Homo sapiens
  misc_RNA (1)...(19): siRNA sense strand
gauaaggcucgucagauca

SEQ ID NO: 1714821 - RNA, 19 nt, Homo sapiens
  misc_RNA (1)...(19): siRNA sense strand
agagcugacuggcaucuau

SEQ ID NO: 1714822 - RNA, 19 nt, Homo sapiens
  misc_RNA (1)...(19): siRNA sense strand
gaugaagaugugaagauga

SEQ ID NO: 1714823 - RNA, 19 nt, Homo sapiens
  misc_RNA (1)...(19): siRNA sense strand
gaccaucuaucagaacuac

SEQ ID NO: 1714824 - RNA, 19 nt, Homo sapiens
  misc_RNA (1)...(19): siRNA sense strand
gcauccaucugcgggacua

SEQ ID NO: 1714825 - RNA, 19 nt, Homo sapiens
  misc_RNA (1)...(19): siRNA sense strand
gauaucaacgugcucuugu

SEQ ID NO: 1714826 - RNA, 19 nt, Homo sapiens
  misc_RNA (1)...(19): siRNA sense strand
ucgagaaccuggaggaucu

SEQ ID NO: 1714827 - RNA, 19 nt, Homo sapiens
  misc_RNA (1)...(19): siRNA sense strand
ccaagaaggacaacaaggu

SEQ ID NO: 1714828 - RNA, 19 nt, Homo sapiens
  misc_RNA (1)...(19): siRNA sense strand
uggaggagaccaucuauca

SEQ ID NO: 1714829 - RNA, 19 nt, Homo sapiens
  misc_RNA (1)...(19): siRNA sense strand
cccaucaucucacgcuuug

SEQ ID NO: 1714830 - RNA, 19 nt, Homo sapiens
  misc_RNA (1)...(19): siRNA sense strand
ggagaguccaggcaaagug

SEQ ID NO: 1714831 - RNA, 19 nt, Homo sapiens
  misc_RNA (1)...(19): siRNA sense strand
gagaccaucuaucagaacu

SEQ ID NO: 1714832 - RNA, 19 nt, Homo sapiens
  misc_RNA (1)...(19): siRNA sense strand
cgaagucgcaguuucucaa

SEQ ID NO: 1714833 - RNA, 19 nt, Homo sapiens
  misc_RNA (1)...(19): siRNA sense strand
ucagcgacaugugcaaaga

SEQ ID NO: 1714834 - RNA, 19 nt, Homo sapiens
  misc_RNA (1)...(19): siRNA sense strand
gccugguggugaacuauga

SEQ ID NO: 1714835 - RNA, 19 nt, Homo sapiens
  misc_RNA (1)...(19): siRNA sense strand
gcagagcaggugacauauc

SEQ ID NO: 1714836 - RNA, 19 nt, Homo sapiens
  misc_RNA (1)...(19): siRNA sense strand
guacagugaccugaggaaa

SEQ ID NO: 1714837 - RNA, 19 nt, Homo sapiens
  misc_RNA (1)...(19): siRNA sense strand
caccaccgcuucaagaacu

SEQ ID NO: 1714838 - RNA, 19 nt, Homo sapiens
  misc_RNA (1)...(19): siRNA sense strand
uccacaaccucucugcauu

SEQ ID NO: 1714839 - RNA, 19 nt, Homo sapiens
  misc_RNA (1)...(19): siRNA sense strand
ucauagacacacagaaguu

SEQ ID NO: 1714840 - RNA, 19 nt, Homo sapiens
  misc_RNA (1)...(19): siRNA sense strand
gaugcuggagagcuucaua

SEQ ID NO: 1714841 - RNA, 19 nt, Homo sapiens
  misc_RNA (1)...(19): siRNA sense strand
acccgaagcucaaccagau

SEQ ID NO: 1714842 - RNA, 19 nt, Homo sapiens
  misc_RNA (1)...(19): siRNA sense strand
ggagugugucucauugaug

SEQ ID NO: 1714843 - RNA, 19 nt, Homo sapiens
  misc_RNA (1)...(19): siRNA sense strand
gggacuggcucuggaugau

SEQ ID NO: 1714844 - RNA, 19 nt, Homo sapiens
  misc_RNA (1)...(19): siRNA sense strand
cagcagaucggagagaaga

SEQ ID NO: 1714845 - RNA, 19 nt, Homo sapiens
  misc_RNA (1)...(19): siRNA sense strand
ucagcauggucaaguacaa

SEQ ID NO: 1714846 - RNA, 19 nt, Homo sapiens
  misc_RNA (1)...(19): siRNA sense strand
caacauccacaaccucucu

SEQ ID NO: 1714847 - RNA, 19 nt, Homo sapiens
  misc_RNA (1)...(19): siRNA sense strand
cuguugcucuucauacuga

SEQ ID NO: 1714848 - RNA, 19 nt, Homo sapiens
  misc_RNA (1)...(19): siRNA sense strand
acaagguggccaagaugua

SEQ ID NO: 1714849 - RNA, 19 nt, Homo sapiens
  misc_RNA (1)...(19): siRNA sense strand
gcagggaguggaccuugga

SEQ ID NO: 1714850 - RNA, 19 nt, Homo sapiens
  misc_RNA (1)...(19): siRNA sense strand
gcacaagguacguggugau

SEQ ID NO: 1714851 - RNA, 19 nt, Homo sapiens
  misc_RNA (1)...(19): siRNA sense strand
caauggcuucccugucuuu

SEQ ID NO: 1714852 - RNA, 19 nt, Homo sapiens
  misc_RNA (1)...(19): siRNA sense strand
caaguacaacugcaacaag

SEQ ID NO: 1714853 - RNA, 19 nt, Homo sapiens
  misc_RNA (1)...(19): siRNA sense strand
gcgugaugcuggagagcuu

SEQ ID NO: 1714854 - RNA, 19 nt, Homo sapiens
  misc_RNA (1)...(19): siRNA sense strand
caaguauauugagaaagug

SEQ ID NO: 1714855 - RNA, 19 nt, Homo sapiens
  misc_RNA (1)...(19): siRNA sense strand
augaagaugugaagaugau

SEQ ID NO: 1714856 - RNA, 19 nt, Homo sapiens
  misc_RNA (1)...(19): siRNA sense strand
ccaauggcuucccugucuu

SEQ ID NO: 1714857 - RNA, 19 nt, Homo sapiens
  misc_RNA (1)...(19): siRNA sense strand
aaguacaacugcaacaagu

SEQ ID NO: 1714858 - RNA, 19 nt, Homo sapiens
  misc_RNA (1)...(19): siRNA sense strand
aggagaccaucuaucagaa

SEQ ID NO: 1714859 - RNA, 19 nt, Homo sapiens
  misc_RNA (1)...(19): siRNA sense strand
gggcccagcaggacacuau

SEQ ID NO: 1714860 - RNA, 19 nt, Homo sapiens
  misc_RNA (1)...(19): siRNA sense strand
gcgggacuaugugaucgaa

SEQ ID NO: 1714861 - RNA, 19 nt, Homo sapiens
  misc_RNA (1)...(19): siRNA sense strand
cugaagaaguacaucaucu

SEQ ID NO: 1714862 - RNA, 19 nt, Homo sapiens
  misc_RNA (1)...(19): siRNA sense strand
gaggagugugucucauuga

SEQ ID NO: 1714863 - RNA, 19 nt, Homo sapiens
  misc_RNA (1)...(19): siRNA sense strand
caucuauggucaugaagac

SEQ ID NO: 1714864 - RNA, 19 nt, Homo sapiens
  misc_RNA (1)...(19): siRNA sense strand
ggucaugaagacaucaaga

SEQ ID NO: 1714865 - RNA, 19 nt, Homo sapiens
  misc_RNA (1)...(19): siRNA sense strand
cacaagguacguggugaua

SEQ ID NO: 1714866 - RNA, 19 nt, Homo sapiens
  misc_RNA (1)...(19): siRNA sense strand
ucaugaagacaucaagaga

SEQ ID NO: 1714867 - RNA, 19 nt, Homo sapiens
  misc_RNA (1)...(19): siRNA sense strand
gaggagcucauuggagaug

SEQ ID NO: 1714868 - RNA, 19 nt, Homo sapiens
  misc_RNA (1)...(19): siRNA sense strand
ugacagagcucauauugua

SEQ ID NO: 1714869 - RNA, 19 nt, Homo sapiens
  misc_RNA (1)...(19): siRNA sense strand
gaaauggugugguaauuca

SEQ ID NO: 1714870 - RNA, 19 nt, Homo sapiens
  misc_RNA (1)...(19): siRNA sense strand
caaguuagauggugaaauc

SEQ ID NO: 1714871 - RNA, 19 nt, Homo sapiens
  misc_RNA (1)...(19): siRNA sense strand
gagcucauauuguauuuga

SEQ ID NO: 1714872 - RNA, 19 nt, Homo sapiens
  misc_RNA (1)...(19): siRNA sense strand
ggugagagauggaguuuau

SEQ ID NO: 1714873 - RNA, 19 nt, Homo sapiens
  misc_RNA (1)...(19): siRNA sense strand
gaacacagacauaucaaau

SEQ ID NO: 1714874 - RNA, 19 nt, Homo sapiens
  misc_RNA (1)...(19): siRNA sense strand
uggaguugcuuacaaguua

SEQ ID NO: 1714875 - RNA, 19 nt, Homo sapiens
  misc_RNA (1)...(19): siRNA sense strand
ggugaaaucauaccucaua

SEQ ID NO: 1714876 - RNA, 19 nt, Homo sapiens
  misc_RNA (1)...(19): siRNA sense strand
ggaaauagacauugaaggu

SEQ ID NO: 1714877 - RNA, 19 nt, Homo sapiens
  misc_RNA (1)...(19): siRNA sense strand
guuagauggugaaaucaua

SEQ ID NO: 1714878 - RNA, 19 nt, Homo sapiens
  misc_RNA (1)...(19): siRNA sense strand
gagcuucaaauuccaguua

SEQ ID NO: 1714879 - RNA, 19 nt, Homo sapiens
  misc_RNA (1)...(19): siRNA sense strand
gguuuaaaguucuagcuaa

SEQ ID NO: 1714880 - RNA, 19 nt, Homo sapiens
  misc_RNA (1)...(19): siRNA sense strand
cuacagagcaagacaauga

SEQ ID NO: 1714881 - RNA, 19 nt, Homo sapiens
  misc_RNA (1)...(19): siRNA sense strand
ucaucuaccuggauuguuu

SEQ ID NO: 1714882 - RNA, 19 nt, Homo sapiens
  misc_RNA (1)...(19): siRNA sense strand
agacauugaaggugaauua

SEQ ID NO: 1714883 - RNA, 19 nt, Homo sapiens
  misc_RNA (1)...(19): siRNA sense strand
gcagcacuauuagauauug

SEQ ID NO: 1714884 - RNA, 19 nt, Homo sapiens
  misc_RNA (1)...(19): siRNA sense strand
ggaaaucaaaguuggaguu

SEQ ID NO: 1714885 - RNA, 19 nt, Homo sapiens
  misc_RNA (1)...(19): siRNA sense strand
ucugagagguuuaaaguuc

SEQ ID NO: 1714886 - RNA, 19 nt, Homo sapiens
  misc_RNA (1)...(19): siRNA sense strand
gguagagaguuugguguaa

SEQ ID NO: 1714887 - RNA, 19 nt, Homo sapiens
  misc_RNA (1)...(19): siRNA sense strand
cauugaaggugaauuacaa

SEQ ID NO: 1714888 - RNA, 19 nt, Homo sapiens
  misc_RNA (1)...(19): siRNA sense strand
ucaagcagcugaugguauc

SEQ ID NO: 1714889 - RNA, 19 nt, Homo sapiens
  misc_RNA (1)...(19): siRNA sense strand
ggagguguuuguacugguu

SEQ ID NO: 1714890 - RNA, 19 nt, Homo sapiens
  misc_RNA (1)...(19): siRNA sense strand
gcaagggcguuuaaagaac

SEQ ID NO: 1714891 - RNA, 19 nt, Homo sapiens
  misc_RNA (1)...(19): siRNA sense strand
ggagaaguguauggaguug

SEQ ID NO: 1714892 - RNA, 19 nt, Homo sapiens
  misc_RNA (1)...(19): siRNA sense strand
gcuaaccaauacaaaucua

SEQ ID NO: 1714893 - RNA, 19 nt, Homo sapiens
  misc_RNA (1)...(19): siRNA sense strand
caaaugcaagggcguuuaa

SEQ ID NO: 1714894 - RNA, 19 nt, Homo sapiens
  misc_RNA (1)...(19): siRNA sense strand
ggaaauaaugcuggccaua

SEQ ID NO: 1714895 - RNA, 19 nt, Homo sapiens
  misc_RNA (1)...(19): siRNA sense strand
gcaaaugcagcacuauuag

SEQ ID NO: 1714896 - RNA, 19 nt, Homo sapiens
  misc_RNA (1)...(19): siRNA sense strand
gaaaucaaaguuggaguug

SEQ ID NO: 1714897 - RNA, 19 nt, Homo sapiens
  misc_RNA (1)...(19): siRNA sense strand
ugugaaagcuuauacaacu

SEQ ID NO: 1714898 - RNA, 19 nt, Homo sapiens
  misc_RNA (1)...(19): siRNA sense strand
cgaccuuguuucugacuuu

SEQ ID NO: 1714899 - RNA, 19 nt, Homo sapiens
  misc_RNA (1)...(19): siRNA sense strand
gaaagcuuauacaacuaga

SEQ ID NO: 1714900 - RNA, 19 nt, Homo sapiens
  misc_RNA (1)...(19): siRNA sense strand
gugaaagcuuauacaacua

SEQ ID NO: 1714901 - RNA, 19 nt, Homo sapiens
  misc_RNA (1)...(19): siRNA sense strand
cuacauggaccaccaaaga

SEQ ID NO: 1714902 - RNA, 19 nt, Homo sapiens
  misc_RNA (1)...(19): siRNA sense strand
ugagagauggaguuuauuu

SEQ ID NO: 1714903 - RNA, 19 nt, Homo sapiens
  misc_RNA (1)...(19): siRNA sense strand
uaauucaucuaccuggauu

SEQ ID NO: 1714904 - RNA, 19 nt, Homo sapiens
  misc_RNA (1)...(19): siRNA sense strand
acucaaggguuauauggaa

SEQ ID NO: 1714905 - RNA, 19 nt, Homo sapiens
  misc_RNA (1)...(19): siRNA sense strand
gaaauaaugcuggccauac

SEQ ID NO: 1714906 - RNA, 19 nt, Homo sapiens
  misc_RNA (1)...(19): siRNA sense strand
ggacauguuuacggaaauc

SEQ ID NO: 1714907 - RNA, 19 nt, Homo sapiens
  misc_RNA (1)...(19): siRNA sense strand
ucacugcauucauuggaaa

SEQ ID NO: 1714908 - RNA, 19 nt, Homo sapiens
  misc_RNA (1)...(19): siRNA sense strand
acacagacauaucaaaugc

SEQ ID NO: 1714909 - RNA, 19 nt, Homo sapiens
  misc_RNA (1)...(19): siRNA sense strand
gaaaucauaccucauaucc

SEQ ID NO: 1714910 - RNA, 19 nt, Homo sapiens
  misc_RNA (1)...(19): siRNA sense strand
ggaaauggugugguaauuc

SEQ ID NO: 1714911 - RNA, 19 nt, Homo sapiens
  misc_RNA (1)...(19): siRNA sense strand
aaauaaugcuggccauaca

SEQ ID NO: 1714912 - RNA, 19 nt, Homo sapiens
  misc_RNA (1)...(19): siRNA sense strand
guugguaaauccagagaau

SEQ ID NO: 1714913 - RNA, 19 nt, Homo sapiens
  misc_RNA (1)...(19): siRNA sense strand
acagacauaucaaaugcaa

SEQ ID NO: 1714914 - RNA, 19 nt, Homo sapiens
  misc_RNA (1)...(19): siRNA sense strand
ggaacacagacauaucaaa

SEQ ID NO: 1714915 - RNA, 19 nt, Homo sapiens
  misc_RNA (1)...(19): siRNA sense strand
gacaagaacaagcaggaaa

SEQ ID NO: 1714916 - RNA, 19 nt, Homo sapiens
  misc_RNA (1)...(19): siRNA sense strand
gaacaacagagacaagaac

SEQ ID NO: 1714917 - RNA, 19 nt, Homo sapiens
  misc_RNA (1)...(19): siRNA sense strand
agaacuaccuguuaaugca

SEQ ID NO: 1714918 - RNA, 19 nt, Homo sapiens
  misc_RNA (1)...(19): siRNA sense strand
uguaaccucuucaaauugu

SEQ ID NO: 1714919 - RNA, 19 nt, Homo sapiens
  misc_RNA (1)...(19): siRNA sense strand
ggaacaacagagacaagaa

SEQ ID NO: 1714920 - RNA, 19 nt, Homo sapiens
  misc_RNA (1)...(19): siRNA sense strand
ucucuuacccaguggaaua

SEQ ID NO: 1714921 - RNA, 19 nt, Homo sapiens
  misc_RNA (1)...(19): siRNA sense strand
guaaauccagagaaucuau

SEQ ID NO: 1714922 - RNA, 19 nt, Homo sapiens
  misc_RNA (1)...(19): siRNA sense strand
aagaugagcuucaaauucc

SEQ ID NO: 1714923 - RNA, 19 nt, Homo sapiens
  misc_RNA (1)...(19): siRNA sense strand
ggacuagaaggcugggaaa

SEQ ID NO: 1714924 - RNA, 19 nt, Homo sapiens
  misc_RNA (1)...(19): siRNA sense strand
guggauugguguugguaaa

SEQ ID NO: 1714925 - RNA, 19 nt, Homo sapiens
  misc_RNA (1)...(19): siRNA sense strand
gcacaaaacuauguucgau

SEQ ID NO: 1714926 - RNA, 19 nt, Homo sapiens
  misc_RNA (1)...(19): siRNA sense strand
ugagagguuuaaaguucua

SEQ ID NO: 1714927 - RNA, 19 nt, Homo sapiens
  misc_RNA (1)...(19): siRNA sense strand
ugugcgaccuuguuucuga

SEQ ID NO: 1714928 - RNA, 19 nt, Homo sapiens
  misc_RNA (1)...(19): siRNA sense strand
cagagcucauauuguauuu

SEQ ID NO: 1714929 - RNA, 19 nt, Homo sapiens
  misc_RNA (1)...(19): siRNA sense strand
caacagagacaagaacaag

SEQ ID NO: 1714930 - RNA, 19 nt, Homo sapiens
  misc_RNA (1)...(19): siRNA sense strand
caaaugcagcacuauuaga

SEQ ID NO: 1714931 - RNA, 19 nt, Homo sapiens
  misc_RNA (1)...(19): siRNA sense strand
gcauuggcccaguuuauuc

SEQ ID NO: 1714932 - RNA, 19 nt, Homo sapiens
  misc_RNA (1)...(19): siRNA sense strand
uggaaauggugugguaauu

SEQ ID NO: 1714933 - RNA, 19 nt, Homo sapiens
  misc_RNA (1)...(19): siRNA sense strand
caagggcguuuaaagaacu

SEQ ID NO: 1714934 - RNA, 19 nt, Homo sapiens
  misc_RNA (1)...(19): siRNA sense strand
gugaaaucauaccucauau

SEQ ID NO: 1714935 - RNA, 19 nt, Homo sapiens
  misc_RNA (1)...(19): siRNA sense strand
uuacccaguggaauaauua

SEQ ID NO: 1714936 - RNA, 19 nt, Homo sapiens
  misc_RNA (1)...(19): siRNA sense strand
ggaaaagauuaaaccaaug

SEQ ID NO: 1714937 - RNA, 19 nt, Homo sapiens
  misc_RNA (1)...(19): siRNA sense strand
gcucauaugaucaauggau

SEQ ID NO: 1714938 - RNA, 19 nt, Homo sapiens
  misc_RNA (1)...(19): siRNA sense strand
ggguagagaguuuggugua

SEQ ID NO: 1714939 - RNA, 19 nt, Homo sapiens
  misc_RNA (1)...(19): siRNA sense strand
agaaguguauggaguugug

SEQ ID NO: 1714940 - RNA, 19 nt, Homo sapiens
  misc_RNA (1)...(19): siRNA sense strand
ccauacaguuguuguggau

SEQ ID NO: 1714941 - RNA, 19 nt, Homo sapiens
  misc_RNA (1)...(19): siRNA sense strand
guaaccucuucaaauugua

SEQ ID NO: 1714942 - RNA, 19 nt, Homo sapiens
  misc_RNA (1)...(19): siRNA sense strand
ggauggaacacagacauau

SEQ ID NO: 1714943 - RNA, 19 nt, Homo sapiens
  misc_RNA (1)...(19): siRNA sense strand
ugacuuugauggcuucucu

SEQ ID NO: 1714944 - RNA, 19 nt, Homo sapiens
  misc_RNA (1)...(19): siRNA sense strand
ggaguugcuuacaaguuag

SEQ ID NO: 1714945 - RNA, 19 nt, Homo sapiens
  misc_RNA (1)...(19): siRNA sense strand
cuaccuggauuguuugaag

SEQ ID NO: 1714946 - RNA, 19 nt, Homo sapiens
  misc_RNA (1)...(19): siRNA sense strand
agagcaagacaaugaaauu

SEQ ID NO: 1714947 - RNA, 19 nt, Homo sapiens
  misc_RNA (1)...(19): siRNA sense strand
ggcauuggcccaguuuauu

SEQ ID NO: 1714948 - RNA, 19 nt, Homo sapiens
  misc_RNA (1)...(19): siRNA sense strand
ucaaaugcaagggcguuua

SEQ ID NO: 1714949 - RNA, 19 nt, Homo sapiens
  misc_RNA (1)...(19): siRNA sense strand
uguaacuacuggaaggaaa

SEQ ID NO: 1714950 - RNA, 19 nt, Homo sapiens
  misc_RNA (1)...(19): siRNA sense strand
guagagaguuugguguaac

SEQ ID NO: 1714951 - RNA, 19 nt, Homo sapiens
  misc_RNA (1)...(19): siRNA sense strand
augcagcacuauuagauau

SEQ ID NO: 1714952 - RNA, 19 nt, Homo sapiens
  misc_RNA (1)...(19): siRNA sense strand
acagagcucauauuguauu

SEQ ID NO: 1714953 - RNA, 19 nt, Homo sapiens
  misc_RNA (1)...(19): siRNA sense strand
auacaguuguuguggauuc

SEQ ID NO: 1714954 - RNA, 19 nt, Homo sapiens
  misc_RNA (1)...(19): siRNA sense strand
ggaguugugaaagcuuaua

SEQ ID NO: 1714955 - RNA, 19 nt, Homo sapiens
  misc_RNA (1)...(19): siRNA sense strand
aaagaacuaccuguuaaug

SEQ ID NO: 1714956 - RNA, 19 nt, Homo sapiens
  misc_RNA (1)...(19): siRNA sense strand
uaccucauaucccagcaaa

SEQ ID NO: 1714957 - RNA, 19 nt, Homo sapiens
  misc_RNA (1)...(19): siRNA sense strand
ucaaaguuggaguugcuua

SEQ ID NO: 1714958 - RNA, 19 nt, Homo sapiens
  misc_RNA (1)...(19): siRNA sense strand
ugcaagggcguuuaaagaa

SEQ ID NO: 1714959 - RNA, 19 nt, Homo sapiens
  misc_RNA (1)...(19): siRNA sense strand
gaccuuguuucugacuuug

SEQ ID NO: 1714960 - RNA, 19 nt, Homo sapiens
  misc_RNA (1)...(19): siRNA sense strand
aaucaaaguuggaguugcu

SEQ ID NO: 1714961 - RNA, 19 nt, Homo sapiens
  misc_RNA (1)...(19): siRNA sense strand
gaugugcgaccuuguuucu

SEQ ID NO: 1714962 - RNA, 19 nt, Homo sapiens
  misc_RNA (1)...(19): siRNA sense strand
gguauuggugccuuuccua

SEQ ID NO: 1714963 - RNA, 19 nt, Homo sapiens
  misc_RNA (1)...(19): siRNA sense strand
aaaugcagcacuauuagau

SEQ ID NO: 1714964 - RNA, 19 nt, Homo sapiens
  misc_RNA (1)...(19): siRNA sense strand
uagcuaaccaauacaaauc

SEQ ID NO: 1714965 - RNA, 19 nt, Homo sapiens
  misc_RNA (1)...(19): siRNA sense strand
cagcacuauuagauauuga

SEQ ID NO: 1714966 - RNA, 19 nt, Homo sapiens
  misc_RNA (1)...(19): siRNA sense strand
gauggaacacagacauauc

SEQ ID NO: 1714967 - RNA, 19 nt, Homo sapiens
  misc_RNA (1)...(19): siRNA sense strand
gaagauguggcugguugga

SEQ ID NO: 1714968 - RNA, 19 nt, Homo sapiens
  misc_RNA (1)...(19): siRNA sense strand
ggaaagauauggaugaagu

SEQ ID NO: 1714969 - RNA, 19 nt, Homo sapiens
  misc_RNA (1)...(19): siRNA sense strand
ggaugaaguugaagagaaa

SEQ ID NO: 1714970 - RNA, 19 nt, Homo sapiens
  misc_RNA (1)...(19): siRNA sense strand
gaagcaagcauaaucauug

SEQ ID NO: 1714971 - RNA, 19 nt, Homo sapiens
  misc_RNA (1)...(19): siRNA sense strand
ggaaauauacgaagaguca

SEQ ID NO: 1714972 - RNA, 19 nt, Homo sapiens
  misc_RNA (1)...(19): siRNA sense strand
gcuaugccauugauacuuu

SEQ ID NO: 1714973 - RNA, 19 nt, Homo sapiens
  misc_RNA (1)...(19): siRNA sense strand
ucagaaagauuuguaguga

SEQ ID NO: 1714974 - RNA, 19 nt, Homo sapiens
  misc_RNA (1)...(19): siRNA sense strand
gaagagucaucaacuugga

SEQ ID NO: 1714975 - RNA, 19 nt, Homo sapiens
  misc_RNA (1)...(19): siRNA sense strand
aaacuuuacugccgagaaa

SEQ ID NO: 1714976 - RNA, 19 nt, Homo sapiens
  misc_RNA (1)...(19): siRNA sense strand
gaagucagaaagauuugua

SEQ ID NO: 1714977 - RNA, 19 nt, Homo sapiens
  misc_RNA (1)...(19): siRNA sense strand
gcagaaauggccagucaaa

SEQ ID NO: 1714978 - RNA, 19 nt, Homo sapiens
  misc_RNA (1)...(19): siRNA sense strand
gagacgaaauugccguuau

SEQ ID NO: 1714979 - RNA, 19 nt, Homo sapiens
  misc_RNA (1)...(19): siRNA sense strand
gucauuagcuuagaauaug

SEQ ID NO: 1714980 - RNA, 19 nt, Homo sapiens
  misc_RNA (1)...(19): siRNA sense strand
uagaugaagucucacaguu

SEQ ID NO: 1714981 - RNA, 19 nt, Homo sapiens
  misc_RNA (1)...(19): siRNA sense strand
gcugugagcuaugccauug

SEQ ID NO: 1714982 - RNA, 19 nt, Homo sapiens
  misc_RNA (1)...(19): siRNA sense strand
agaaagauuuguagugaca

SEQ ID NO: 1714983 - RNA, 19 nt, Homo sapiens
  misc_RNA (1)...(19): siRNA sense strand
guagugacauuaggcagaa

SEQ ID NO: 1714984 - RNA, 19 nt, Homo sapiens
  misc_RNA (1)...(19): siRNA sense strand
agauauggaugaaguugaa

SEQ ID NO: 1714985 - RNA, 19 nt, Homo sapiens
  misc_RNA (1)...(19): siRNA sense strand
uggaugaaguugaagagaa

SEQ ID NO: 1714986 - RNA, 19 nt, Homo sapiens
  misc_RNA (1)...(19): siRNA sense strand
ccauagacuuggcuugguu

SEQ ID NO: 1714987 - RNA, 19 nt, Homo sapiens
  misc_RNA (1)...(19): siRNA sense strand
gaaagauauggaugaaguu

SEQ ID NO: 1714988 - RNA, 19 nt, Homo sapiens
  misc_RNA (1)...(19): siRNA sense strand
gaaaaugaagucagaaaga

SEQ ID NO: 1714989 - RNA, 19 nt, Homo sapiens
  misc_RNA (1)...(19): siRNA sense strand
gaaguugaagagaaaucua

SEQ ID NO: 1714990 - RNA, 19 nt, Homo sapiens
  misc_RNA (1)...(19): siRNA sense strand
uaggaaagauauggaugaa

SEQ ID NO: 1714991 - RNA, 19 nt, Homo sapiens
  misc_RNA (1)...(19): siRNA sense strand
ccaaggugcccauauggaa

SEQ ID NO: 1714992 - RNA, 19 nt, Homo sapiens
  misc_RNA (1)...(19): siRNA sense strand
agaaauggccagucaaaca

SEQ ID NO: 1714993 - RNA, 19 nt, Homo sapiens
  misc_RNA (1)...(19): siRNA sense strand
ggacuacaagaaauaacuu

SEQ ID NO: 1714994 - RNA, 19 nt, Homo sapiens
  misc_RNA (1)...(19): siRNA sense strand
gcaguguuccauagacuug

SEQ ID NO: 1714995 - RNA, 19 nt, Homo sapiens
  misc_RNA (1)...(19): siRNA sense strand
agacgaaauugccguuauc

SEQ ID NO: 1714996 - RNA, 19 nt, Homo sapiens
  misc_RNA (1)...(19): siRNA sense strand
caaggugcccauauggaaa

SEQ ID NO: 1714997 - RNA, 19 nt, Homo sapiens
  misc_RNA (1)...(19): siRNA sense strand
aggcagaaauggccaguca

SEQ ID NO: 1714998 - RNA, 19 nt, Homo sapiens
  misc_RNA (1)...(19): siRNA sense strand
gaaauggccagucaaacac

SEQ ID NO: 1714999 - RNA, 19 nt, Homo sapiens
  misc_RNA (1)...(19): siRNA sense strand
aagccaaggugcccauaug

SEQ ID NO: 1715000 - RNA, 19 nt, Homo sapiens
  misc_RNA (1)...(19): siRNA sense strand
ggagacgaaauugccguua

SEQ ID NO: 1715001 - RNA, 19 nt, Homo sapiens
  misc_RNA (1)...(19): siRNA sense strand
cuaugccauugauacuuua

SEQ ID NO: 1715002 - RNA, 19 nt, Homo sapiens
  misc_RNA (1)...(19): siRNA sense strand
uacgaagagucaucaacuu

SEQ ID NO: 1715003 - RNA, 19 nt, Homo sapiens
  misc_RNA (1)...(19): siRNA sense strand
acauagcaguguuccauag

SEQ ID NO: 1715004 - RNA, 19 nt, Homo sapiens
  misc_RNA (1)...(19): siRNA sense strand
gucaucaacuuggaaagga

SEQ ID NO: 1715005 - RNA, 19 nt, Homo sapiens
  misc_RNA (1)...(19): siRNA sense strand
cuaggaaagauauggauga

SEQ ID NO: 1715006 - RNA, 19 nt, Homo sapiens
  misc_RNA (1)...(19): siRNA sense strand
ggugauuucuccgcucugu

SEQ ID NO: 1715007 - RNA, 19 nt, Homo sapiens
  misc_RNA (1)...(19): siRNA sense strand
ucagaagcaagcauaauca

SEQ ID NO: 1715008 - RNA, 19 nt, Homo sapiens
  misc_RNA (1)...(19): siRNA sense strand
gcuucagccuggagacgaa

SEQ ID NO: 1715009 - RNA, 19 nt, Homo sapiens
  misc_RNA (1)...(19): siRNA sense strand
agaagcaagcauaaucauu

SEQ ID NO: 1715010 - RNA, 19 nt, Homo sapiens
  misc_RNA (1)...(19): siRNA sense strand
ucaucaacuuggaaaggaa

SEQ ID NO: 1715011 - RNA, 19 nt, Homo sapiens
  misc_RNA (1)...(19): siRNA sense strand
gcucuguggugcaauaucc

SEQ ID NO: 1715012 - RNA, 19 nt, Homo sapiens
  misc_RNA (1)...(19): siRNA sense strand
uggcuugguuccaguguca

SEQ ID NO: 1715013 - RNA, 19 nt, Homo sapiens
  misc_RNA (1)...(19): siRNA sense strand
caacuuggaaaggaaacaa

SEQ ID NO: 1715014 - RNA, 19 nt, Homo sapiens
  misc_RNA (1)...(19): siRNA sense strand
guagaugaagucucacagu

SEQ ID NO: 1715015 - RNA, 19 nt, Homo sapiens
  misc_RNA (1)...(19): siRNA sense strand
aaagauauggaugaaguug

SEQ ID NO: 1715016 - RNA, 19 nt, Homo sapiens
  misc_RNA (1)...(19): siRNA sense strand
gucagaagcaagcauaauc

SEQ ID NO: 1715017 - RNA, 19 nt, Homo sapiens
  misc_RNA (1)...(19): siRNA sense strand
agaugaagucucacaguug

SEQ ID NO: 1715018 - RNA, 19 nt, Homo sapiens
  misc_RNA (1)...(19): siRNA sense strand
caucaacuuggaaaggaaa

SEQ ID NO: 1715019 - RNA, 19 nt, Homo sapiens
  misc_RNA (1)...(19): siRNA sense strand
acgaagagucaucaacuug

SEQ ID NO: 1715020 - RNA, 19 nt, Homo sapiens
  misc_RNA (1)...(19): siRNA sense strand
cacauagcaguguuccaua

SEQ ID NO: 1715021 - RNA, 19 nt, Homo sapiens
  misc_RNA (1)...(19): siRNA sense strand
gagcuaugccauugauacu

SEQ ID NO: 1715022 - RNA, 19 nt, Homo sapiens
  misc_RNA (1)...(19): siRNA sense strand
ugugagcuaugccauugau

SEQ ID NO: 1715023 - RNA, 19 nt, Homo sapiens
  misc_RNA (1)...(19): siRNA sense strand
cauagcaguguuccauaga

SEQ ID NO: 1715024 - RNA, 19 nt, Homo sapiens
  misc_RNA (1)...(19): siRNA sense strand
gucagaaagauuuguagug

SEQ ID NO: 1715025 - RNA, 19 nt, Homo sapiens
  misc_RNA (1)...(19): siRNA sense strand
gccaaggugcccauaugga

SEQ ID NO: 1715026 - RNA, 19 nt, Homo sapiens
  misc_RNA (1)...(19): siRNA sense strand
gauuuguagugacauuagg

SEQ ID NO: 1715027 - RNA, 19 nt, Homo sapiens
  misc_RNA (1)...(19): siRNA sense strand
gagacgaaauugccguuau

SEQ ID NO: 1715028 - RNA, 19 nt, Homo sapiens
  misc_RNA (1)...(19): siRNA sense strand
ucaagaauaugucgagcuu

SEQ ID NO: 1715029 - RNA, 19 nt, Homo sapiens
  misc_RNA (1)...(19): siRNA sense strand
uaacaggaguucguucaga

SEQ ID NO: 1715030 - RNA, 19 nt, Homo sapiens
  misc_RNA (1)...(19): siRNA sense strand
gauaauauuugcuguucgu

SEQ ID NO: 1715031 - RNA, 19 nt, Homo sapiens
  misc_RNA (1)...(19): siRNA sense strand
gaaauaacaggaguucguu

SEQ ID NO: 1715032 - RNA, 19 nt, Homo sapiens
  misc_RNA (1)...(19): siRNA sense strand
uggauuggcugauguuaga

SEQ ID NO: 1715033 - RNA, 19 nt, Homo sapiens
  misc_RNA (1)...(19): siRNA sense strand
gauagaaacucgacauccu

SEQ ID NO: 1715034 - RNA, 19 nt, Homo sapiens
  misc_RNA (1)...(19): siRNA sense strand
cagauaauauuugcuguuc

SEQ ID NO: 1715035 - RNA, 19 nt, Homo sapiens
  misc_RNA (1)...(19): siRNA sense strand
ccauuucugugccucaaga

SEQ ID NO: 1715036 - RNA, 19 nt, Homo sapiens
  misc_RNA (1)...(19): siRNA sense strand
agacgaaauugccguuauc

SEQ ID NO: 1715037 - RNA, 19 nt, Homo sapiens
  misc_RNA (1)...(19): siRNA sense strand
ggagauagaaacucgacau

SEQ ID NO: 1715038 - RNA, 19 nt, Homo sapiens
  misc_RNA (1)...(19): siRNA sense strand
aauauuugcuguucgucaa

SEQ ID NO: 1715039 - RNA, 19 nt, Homo sapiens
  misc_RNA (1)...(19): siRNA sense strand
ggagacgaaauugccguua

SEQ ID NO: 1715040 - RNA, 19 nt, Homo sapiens
  misc_RNA (1)...(19): siRNA sense strand
ugaaauaacaggaguucgu

SEQ ID NO: 1715041 - RNA, 19 nt, Homo sapiens
  misc_RNA (1)...(19): siRNA sense strand
gaccauuucugugccucaa

SEQ ID NO: 1715042 - RNA, 19 nt, Homo sapiens
  misc_RNA (1)...(19): siRNA sense strand
gcuucagccuggagacgaa

SEQ ID NO: 1715043 - RNA, 19 nt, Homo sapiens
  misc_RNA (1)...(19): siRNA sense strand
gagauagaaacucgacauc

SEQ ID NO: 1715044 - RNA, 19 nt, Homo sapiens
  misc_RNA (1)...(19): siRNA sense strand
gauuggcugauguuagaaa

SEQ ID NO: 1715045 - RNA, 19 nt, Homo sapiens
  misc_RNA (1)...(19): siRNA sense strand
gcugaaauaacaggaguuc

SEQ ID NO: 1715046 - RNA, 19 nt, Homo sapiens
  misc_RNA (1)...(19): siRNA sense strand
cguugcagcuguggaagga

SEQ ID NO: 1715047 - RNA, 19 nt, Homo sapiens
  misc_RNA (1)...(19): siRNA sense strand
aauaacaggaguucguuca

SEQ ID NO: 1715048 - RNA, 19 nt, Homo sapiens
  misc_RNA (1)...(19): siRNA sense strand
ggaaagauauggaugaagu

SEQ ID NO: 1715049 - RNA, 19 nt, Homo sapiens
  misc_RNA (1)...(19): siRNA sense strand
ggaugaaguugaagagaaa

SEQ ID NO: 1715050 - RNA, 19 nt, Homo sapiens
  misc_RNA (1)...(19): siRNA sense strand
gaagcaagcauaaucauug

SEQ ID NO: 1715051 - RNA, 19 nt, Homo sapiens
  misc_RNA (1)...(19): siRNA sense strand
ggaaauauacgaagaguca

SEQ ID NO: 1715052 - RNA, 19 nt, Homo sapiens
  misc_RNA (1)...(19): siRNA sense strand
gcuaugccauugauacuuu

SEQ ID NO: 1715053 - RNA, 19 nt, Homo sapiens
  misc_RNA (1)...(19): siRNA sense strand
ucagaaagauuuguaguga

SEQ ID NO: 1715054 - RNA, 19 nt, Homo sapiens
  misc_RNA (1)...(19): siRNA sense strand
gaagagucaucaacuugga

SEQ ID NO: 1715055 - RNA, 19 nt, Homo sapiens
  misc_RNA (1)...(19): siRNA sense strand
aaacuuuacugccgagaaa

SEQ ID NO: 1715056 - RNA, 19 nt, Homo sapiens
  misc_RNA (1)...(19): siRNA sense strand
gaagucagaaagauuugua

SEQ ID NO: 1715057 - RNA, 19 nt, Homo sapiens
  misc_RNA (1)...(19): siRNA sense strand
gcagaaauggccagucaaa

SEQ ID NO: 1715058 - RNA, 19 nt, Homo sapiens
  misc_RNA (1)...(19): siRNA sense strand
gagacgaaauugccguuau

SEQ ID NO: 1715059 - RNA, 19 nt, Homo sapiens
  misc_RNA (1)...(19): siRNA sense strand
gucauuagcuuagaauaug

SEQ ID NO: 1715060 - RNA, 19 nt, Homo sapiens
  misc_RNA (1)...(19): siRNA sense strand
uagaugaagucucacaguu

SEQ ID NO: 1715061 - RNA, 19 nt, Homo sapiens
  misc_RNA (1)...(19): siRNA sense strand
gcugugagcuaugccauug

SEQ ID NO: 1715062 - RNA, 19 nt, Homo sapiens
  misc_RNA (1)...(19): siRNA sense strand
agaaagauuuguagugaca

SEQ ID NO: 1715063 - RNA, 19 nt, Homo sapiens
  misc_RNA (1)...(19): siRNA sense strand
guagugacauuaggcagaa

SEQ ID NO: 1715064 - RNA, 19 nt, Homo sapiens
  misc_RNA (1)...(19): siRNA sense strand
agauauggaugaaguugaa

SEQ ID NO: 1715065 - RNA, 19 nt, Homo sapiens
  misc_RNA (1)...(19): siRNA sense strand
uggaugaaguugaagagaa

SEQ ID NO: 1715066 - RNA, 19 nt, Homo sapiens
  misc_RNA (1)...(19): siRNA sense strand
ccauagacuuggcuugguu

SEQ ID NO: 1715067 - RNA, 19 nt, Homo sapiens
  misc_RNA (1)...(19): siRNA sense strand
gaaagauauggaugaaguu

SEQ ID NO: 1715068 - RNA, 19 nt, Homo sapiens
  misc_RNA (1)...(19): siRNA sense strand
gaaaaugaagucagaaaga

SEQ ID NO: 1715069 - RNA, 19 nt, Homo sapiens
  misc_RNA (1)...(19): siRNA sense strand
gaaguugaagagaaaucua

SEQ ID NO: 1715070 - RNA, 19 nt, Homo sapiens
  misc_RNA (1)...(19): siRNA sense strand
uaggaaagauauggaugaa

SEQ ID NO: 1715071 - RNA, 19 nt, Homo sapiens
  misc_RNA (1)...(19): siRNA sense strand
ccaaggugcccauauggaa

SEQ ID NO: 1715072 - RNA, 19 nt, Homo sapiens
  misc_RNA (1)...(19): siRNA sense strand
agaaauggccagucaaaca

SEQ ID NO: 1715073 - RNA, 19 nt, Homo sapiens
  misc_RNA (1)...(19): siRNA sense strand
ggacuacaagaaauaacuu

SEQ ID NO: 1715074 - RNA, 19 nt, Homo sapiens
  misc_RNA (1)...(19): siRNA sense strand
gcaguguuccauagacuug

SEQ ID NO: 1715075 - RNA, 19 nt, Homo sapiens
  misc_RNA (1)...(19): siRNA sense strand
agacgaaauugccguuauc

SEQ ID NO: 1715076 - RNA, 19 nt, Homo sapiens
  misc_RNA (1)...(19): siRNA sense strand
caaggugcccauauggaaa

SEQ ID NO: 1715077 - RNA, 19 nt, Homo sapiens
  misc_RNA (1)...(19): siRNA sense strand
aggcagaaauggccaguca

SEQ ID NO: 1715078 - RNA, 19 nt, Homo sapiens
  misc_RNA (1)...(19): siRNA sense strand
gaaauggccagucaaacac

SEQ ID NO: 1715079 - RNA, 19 nt, Homo sapiens
  misc_RNA (1)...(19): siRNA sense strand
aagccaaggugcccauaug

SEQ ID NO: 1715080 - RNA, 19 nt, Homo sapiens
  misc_RNA (1)...(19): siRNA sense strand
ggagacgaaauugccguua

SEQ ID NO: 1715081 - RNA, 19 nt, Homo sapiens
  misc_RNA (1)...(19): siRNA sense strand
cuaugccauugauacuuua

SEQ ID NO: 1715082 - RNA, 19 nt, Homo sapiens
  misc_RNA (1)...(19): siRNA sense strand
uacgaagagucaucaacuu

SEQ ID NO: 1715083 - RNA, 19 nt, Homo sapiens
  misc_RNA (1)...(19): siRNA sense strand
acauagcaguguuccauag

SEQ ID NO: 1715084 - RNA, 19 nt, Homo sapiens
  misc_RNA (1)...(19): siRNA sense strand
gucaucaacuuggaaagga

SEQ ID NO: 1715085 - RNA, 19 nt, Homo sapiens
  misc_RNA (1)...(19): siRNA sense strand
cuaggaaagauauggauga

SEQ ID NO: 1715086 - RNA, 19 nt, Homo sapiens
  misc_RNA (1)...(19): siRNA sense strand
ggugauuucuccgcucugu

SEQ ID NO: 1715087 - RNA, 19 nt, Homo sapiens
  misc_RNA (1)...(19): siRNA sense strand
ucagaagcaagcauaauca

SEQ ID NO: 1715088 - RNA, 19 nt, Homo sapiens
  misc_RNA (1)...(19): siRNA sense strand
gcuucagccuggagacgaa

SEQ ID NO: 1715089 - RNA, 19 nt, Homo sapiens
  misc_RNA (1)...(19): siRNA sense strand
agaagcaagcauaaucauu

SEQ ID NO: 1715090 - RNA, 19 nt, Homo sapiens
  misc_RNA (1)...(19): siRNA sense strand
ucaucaacuuggaaaggaa

SEQ ID NO: 1715091 - RNA, 19 nt, Homo sapiens
  misc_RNA (1)...(19): siRNA sense strand
gcucuguggugcaauaucc

SEQ ID NO: 1715092 - RNA, 19 nt, Homo sapiens
  misc_RNA (1)...(19): siRNA sense strand
uggcuugguuccaguguca

SEQ ID NO: 1715093 - RNA, 19 nt, Homo sapiens
  misc_RNA (1)...(19): siRNA sense strand
caacuuggaaaggaaacaa

SEQ ID NO: 1715094 - RNA, 19 nt, Homo sapiens
  misc_RNA (1)...(19): siRNA sense strand
guagaugaagucucacagu

SEQ ID NO: 1715095 - RNA, 19 nt, Homo sapiens
  misc_RNA (1)...(19): siRNA sense strand
aaagauauggaugaaguug

SEQ ID NO: 1715096 - RNA, 19 nt, Homo sapiens
  misc_RNA (1)...(19): siRNA sense strand
gucagaagcaagcauaauc

SEQ ID NO: 1715097 - RNA, 19 nt, Homo sapiens
  misc_RNA (1)...(19): siRNA sense strand
agaugaagucucacaguug

SEQ ID NO: 1715098 - RNA, 19 nt, Homo sapiens
  misc_RNA (1)...(19): siRNA sense strand
caucaacuuggaaaggaaa

SEQ ID NO: 1715099 - RNA, 19 nt, Homo sapiens
  misc_RNA (1)...(19): siRNA sense strand
acgaagagucaucaacuug

SEQ ID NO: 1715100 - RNA, 19 nt, Homo sapiens
  misc_RNA (1)...(19): siRNA sense strand
cacauagcaguguuccaua

SEQ ID NO: 1715101 - RNA, 19 nt, Homo sapiens
  misc_RNA (1)...(19): siRNA sense strand
gagcuaugccauugauacu

SEQ ID NO: 1715102 - RNA, 19 nt, Homo sapiens
  misc_RNA (1)...(19): siRNA sense strand
ugugagcuaugccauugau

SEQ ID NO: 1715103 - RNA, 19 nt, Homo sapiens
  misc_RNA (1)...(19): siRNA sense strand
cauagcaguguuccauaga

SEQ ID NO: 1715104 - RNA, 19 nt, Homo sapiens
  misc_RNA (1)...(19): siRNA sense strand
gucagaaagauuuguagug

SEQ ID NO: 1715105 - RNA, 19 nt, Homo sapiens
  misc_RNA (1)...(19): siRNA sense strand
gccaaggugcccauaugga

SEQ ID NO: 1715106 - RNA, 19 nt, Homo sapiens
  misc_RNA (1)...(19): siRNA sense strand
gauuuguagugacauuagg

SEQ ID NO: 1715107 - RNA, 19 nt, Homo sapiens
  misc_RNA (1)...(19): siRNA sense strand
ggaaagauauggaugaagu

SEQ ID NO: 1715108 - RNA, 19 nt, Homo sapiens
  misc_RNA (1)...(19): siRNA sense strand
ggaugaaguugaagagaaa

SEQ ID NO: 1715109 - RNA, 19 nt, Homo sapiens
  misc_RNA (1)...(19): siRNA sense strand
gaagcaagcauaaucauug

SEQ ID NO: 1715110 - RNA, 19 nt, Homo sapiens
  misc_RNA (1)...(19): siRNA sense strand
ggaaauauacgaagaguca

SEQ ID NO: 1715111 - RNA, 19 nt, Homo sapiens
  misc_RNA (1)...(19): siRNA sense strand
gcuaugccauugauacuuu

SEQ ID NO: 1715112 - RNA, 19 nt, Homo sapiens
  misc_RNA (1)...(19): siRNA sense strand
ucagaaagauuuguaguga

SEQ ID NO: 1715113 - RNA, 19 nt, Homo sapiens
  misc_RNA (1)...(19): siRNA sense strand
gaagagucaucaacuugga

SEQ ID NO: 1715114 - RNA, 19 nt, Homo sapiens
  misc_RNA (1)...(19): siRNA sense strand
aaacuuuacugccgagaaa

SEQ ID NO: 1715115 - RNA, 19 nt, Homo sapiens
  misc_RNA (1)...(19): siRNA sense strand
gaagucagaaagauuugua

SEQ ID NO: 1715116 - RNA, 19 nt, Homo sapiens
  misc_RNA (1)...(19): siRNA sense strand
gcagaaauggccagucaaa

SEQ ID NO: 1715117 - RNA, 19 nt, Homo sapiens
  misc_RNA (1)...(19): siRNA sense strand
gagacgaaauugccguuau

SEQ ID NO: 1715118 - RNA, 19 nt, Homo sapiens
  misc_RNA (1)...(19): siRNA sense strand
gucauuagcuuagaauaug

SEQ ID NO: 1715119 - RNA, 19 nt, Homo sapiens
  misc_RNA (1)...(19): siRNA sense strand
uagaugaagucucacaguu

SEQ ID NO: 1715120 - RNA, 19 nt, Homo sapiens
  misc_RNA (1)...(19): siRNA sense strand
gcugugagcuaugccauug

SEQ ID NO: 1715121 - RNA, 19 nt, Homo sapiens
  misc_RNA (1)...(19): siRNA sense strand
agaaagauuuguagugaca

SEQ ID NO: 1715122 - RNA, 19 nt, Homo sapiens
  misc_RNA (1)...(19): siRNA sense strand
guagugacauuaggcagaa

SEQ ID NO: 1715123 - RNA, 19 nt, Homo sapiens
  misc_RNA (1)...(19): siRNA sense strand
agauauggaugaaguugaa

SEQ ID NO: 1715124 - RNA, 19 nt, Homo sapiens
  misc_RNA (1)...(19): siRNA sense strand
uggaugaaguugaagagaa

SEQ ID NO: 1715125 - RNA, 19 nt, Homo sapiens
  misc_RNA (1)...(19): siRNA sense strand
ccauagacuuggcuugguu

SEQ ID NO: 1715126 - RNA, 19 nt, Homo sapiens
  misc_RNA (1)...(19): siRNA sense strand
gaaagauauggaugaaguu

SEQ ID NO: 1715127 - RNA, 19 nt, Homo sapiens
  misc_RNA (1)...(19): siRNA sense strand
gaaaaugaagucagaaaga

SEQ ID NO: 1715128 - RNA, 19 nt, Homo sapiens
  misc_RNA (1)...(19): siRNA sense strand
gaaguugaagagaaaucua

SEQ ID NO: 1715129 - RNA, 19 nt, Homo sapiens
  misc_RNA (1)...(19): siRNA sense strand
uaggaaagauauggaugaa

SEQ ID NO: 1715130 - RNA, 19 nt, Homo sapiens
  misc_RNA (1)...(19): siRNA sense strand
ccaaggugcccauauggaa

SEQ ID NO: 1715131 - RNA, 19 nt, Homo sapiens
  misc_RNA (1)...(19): siRNA sense strand
agaaauggccagucaaaca

SEQ ID NO: 1715132 - RNA, 19 nt, Homo sapiens
  misc_RNA (1)...(19): siRNA sense strand
ggacuacaagaaauaacuu

SEQ ID NO: 1715133 - RNA, 19 nt, Homo sapiens
  misc_RNA (1)...(19): siRNA sense strand
gcaguguuccauagacuug

SEQ ID NO: 1715134 - RNA, 19 nt, Homo sapiens
  misc_RNA (1)...(19): siRNA sense strand
agacgaaauugccguuauc

SEQ ID NO: 1715135 - RNA, 19 nt, Homo sapiens
  misc_RNA (1)...(19): siRNA sense strand
caaggugcccauauggaaa

SEQ ID NO: 1715136 - RNA, 19 nt, Homo sapiens
  misc_RNA (1)...(19): siRNA sense strand
aggcagaaauggccaguca

SEQ ID NO: 1715137 - RNA, 19 nt, Homo sapiens
  misc_RNA (1)...(19): siRNA sense strand
gaaauggccagucaaacac

SEQ ID NO: 1715138 - RNA, 19 nt, Homo sapiens
  misc_RNA (1)...(19): siRNA sense strand
aagccaaggugcccauaug

SEQ ID NO: 1715139 - RNA, 19 nt, Homo sapiens
  misc_RNA (1)...(19): siRNA sense strand
ggagacgaaauugccguua

SEQ ID NO: 1715140 - RNA, 19 nt, Homo sapiens
  misc_RNA (1)...(19): siRNA sense strand
cuaugccauugauacuuua

SEQ ID NO: 1715141 - RNA, 19 nt, Homo sapiens
  misc_RNA (1)...(19): siRNA sense strand
uacgaagagucaucaacuu

SEQ ID NO: 1715142 - RNA, 19 nt, Homo sapiens
  misc_RNA (1)...(19): siRNA sense strand
acauagcaguguuccauag

SEQ ID NO: 1715143 - RNA, 19 nt, Homo sapiens
  misc_RNA (1)...(19): siRNA sense strand
gucaucaacuuggaaagga

SEQ ID NO: 1715144 - RNA, 19 nt, Homo sapiens
  misc_RNA (1)...(19): siRNA sense strand
cuaggaaagauauggauga

SEQ ID NO: 1715145 - RNA, 19 nt, Homo sapiens
  misc_RNA (1)...(19): siRNA sense strand
ggugauuucuccgcucugu

SEQ ID NO: 1715146 - RNA, 19 nt, Homo sapiens
  misc_RNA (1)...(19): siRNA sense strand
ucagaagcaagcauaauca

SEQ ID NO: 1715147 - RNA, 19 nt, Homo sapiens
  misc_RNA (1)...(19): siRNA sense strand
gcuucagccuggagacgaa

SEQ ID NO: 1715148 - RNA, 19 nt, Homo sapiens
  misc_RNA (1)...(19): siRNA sense strand
agaagcaagcauaaucauu

SEQ ID NO: 1715149 - RNA, 19 nt, Homo sapiens
  misc_RNA (1)...(19): siRNA sense strand
ucaucaacuuggaaaggaa

SEQ ID NO: 1715150 - RNA, 19 nt, Homo sapiens
  misc_RNA (1)...(19): siRNA sense strand
gcucuguggugcaauaucc

SEQ ID NO: 1715151 - RNA, 19 nt, Homo sapiens
  misc_RNA (1)...(19): siRNA sense strand
uggcuugguuccaguguca

SEQ ID NO: 1715152 - RNA, 19 nt, Homo sapiens
  misc_RNA (1)...(19): siRNA sense strand
caacuuggaaaggaaacaa

SEQ ID NO: 1715153 - RNA, 19 nt, Homo sapiens
  misc_RNA (1)...(19): siRNA sense strand
guagaugaagucucacagu

SEQ ID NO: 1715154 - RNA, 19 nt, Homo sapiens
  misc_RNA (1)...(19): siRNA sense strand
aaagauauggaugaaguug

SEQ ID NO: 1715155 - RNA, 19 nt, Homo sapiens
  misc_RNA (1)...(19): siRNA sense strand
gucagaagcaagcauaauc

SEQ ID NO: 1715156 - RNA, 19 nt, Homo sapiens
  misc_RNA (1)...(19): siRNA sense strand
agaugaagucucacaguug

SEQ ID NO: 1715157 - RNA, 19 nt, Homo sapiens
  misc_RNA (1)...(19): siRNA sense strand
caucaacuuggaaaggaaa

SEQ ID NO: 1715158 - RNA, 19 nt, Homo sapiens
  misc_RNA (1)...(19): siRNA sense strand
acgaagagucaucaacuug

SEQ ID NO: 1715159 - RNA, 19 nt, Homo sapiens
  misc_RNA (1)...(19): siRNA sense strand
cacauagcaguguuccaua

SEQ ID NO: 1715160 - RNA, 19 nt, Homo sapiens
  misc_RNA (1)...(19): siRNA sense strand
gagcuaugccauugauacu

SEQ ID NO: 1715161 - RNA, 19 nt, Homo sapiens
  misc_RNA (1)...(19): siRNA sense strand
ugugagcuaugccauugau

SEQ ID NO: 1715162 - RNA, 19 nt, Homo sapiens
  misc_RNA (1)...(19): siRNA sense strand
cauagcaguguuccauaga

SEQ ID NO: 1715163 - RNA, 19 nt, Homo sapiens
  misc_RNA (1)...(19): siRNA sense strand
gucagaaagauuuguagug

SEQ ID NO: 1715164 - RNA, 19 nt, Homo sapiens
  misc_RNA (1)...(19): siRNA sense strand
gccaaggugcccauaugga

SEQ ID NO: 1715165 - RNA, 19 nt, Homo sapiens
  misc_RNA (1)...(19): siRNA sense strand
gauuuguagugacauuagg

SEQ ID NO: 1715166 - RNA, 19 nt, Homo sapiens
  misc_RNA (1)...(19): siRNA sense strand
gagacgaaauugccguuau

SEQ ID NO: 1715167 - RNA, 19 nt, Homo sapiens
  misc_RNA (1)...(19): siRNA sense strand
ucaagaauaugucgagcuu

SEQ ID NO: 1715168 - RNA, 19 nt, Homo sapiens
  misc_RNA (1)...(19): siRNA sense strand
uaacaggaguucguucaga

SEQ ID NO: 1715169 - RNA, 19 nt, Homo sapiens
  misc_RNA (1)...(19): siRNA sense strand
gauaauauuugcuguucgu

SEQ ID NO: 1715170 - RNA, 19 nt, Homo sapiens
  misc_RNA (1)...(19): siRNA sense strand
gaaauaacaggaguucguu

SEQ ID NO: 1715171 - RNA, 19 nt, Homo sapiens
  misc_RNA (1)...(19): siRNA sense strand
uggauuggcugauguuaga

SEQ ID NO: 1715172 - RNA, 19 nt, Homo sapiens
  misc_RNA (1)...(19): siRNA sense strand
gauagaaacucgacauccu

SEQ ID NO: 1715173 - RNA, 19 nt, Homo sapiens
  misc_RNA (1)...(19): siRNA sense strand
cagauaauauuugcuguuc

SEQ ID NO: 1715174 - RNA, 19 nt, Homo sapiens
  misc_RNA (1)...(19): siRNA sense strand
ccauuucugugccucaaga

SEQ ID NO: 1715175 - RNA, 19 nt, Homo sapiens
  misc_RNA (1)...(19): siRNA sense strand
agacgaaauugccguuauc

SEQ ID NO: 1715176 - RNA, 19 nt, Homo sapiens
  misc_RNA (1)...(19): siRNA sense strand
ggagauagaaacucgacau

SEQ ID NO: 1715177 - RNA, 19 nt, Homo sapiens
  misc_RNA (1)...(19): siRNA sense strand
aauauuugcuguucgucaa

SEQ ID NO: 1715178 - RNA, 19 nt, Homo sapiens
  misc_RNA (1)...(19): siRNA sense strand
ggagacgaaauugccguua

SEQ ID NO: 1715179 - RNA, 19 nt, Homo sapiens
  misc_RNA (1)...(19): siRNA sense strand
ugaaauaacaggaguucgu

SEQ ID NO: 1715180 - RNA, 19 nt, Homo sapiens
  misc_RNA (1)...(19): siRNA sense strand
gaccauuucugugccucaa

SEQ ID NO: 1715181 - RNA, 19 nt, Homo sapiens
  misc_RNA (1)...(19): siRNA sense strand
gcuucagccuggagacgaa

SEQ ID NO: 1715182 - RNA, 19 nt, Homo sapiens
  misc_RNA (1)...(19): siRNA sense strand
gagauagaaacucgacauc

SEQ ID NO: 1715183 - RNA, 19 nt, Homo sapiens
  misc_RNA (1)...(19): siRNA sense strand
gauuggcugauguuagaaa

SEQ ID NO: 1715184 - RNA, 19 nt, Homo sapiens
  misc_RNA (1)...(19): siRNA sense strand
gcugaaauaacaggaguuc

SEQ ID NO: 1715185 - RNA, 19 nt, Homo sapiens
  misc_RNA (1)...(19): siRNA sense strand
cguugcagcuguggaagga

SEQ ID NO: 1715186 - RNA, 19 nt, Homo sapiens
  misc_RNA (1)...(19): siRNA sense strand
aauaacaggaguucguuca

SEQ ID NO: 1715187 - RNA, 19 nt, Homo sapiens
  misc_RNA (1)...(19): siRNA sense strand
ggaaagauauggaugaagu

SEQ ID NO: 1715188 - RNA, 19 nt, Homo sapiens
  misc_RNA (1)...(19): siRNA sense strand
ggaugaaguugaagagaaa

SEQ ID NO: 1715189 - RNA, 19 nt, Homo sapiens
  misc_RNA (1)...(19): siRNA sense strand
gaagcaagcauaaucauug

SEQ ID NO: 1715190 - RNA, 19 nt, Homo sapiens
  misc_RNA (1)...(19): siRNA sense strand
ggaaauauacgaagaguca

SEQ ID NO: 1715191 - RNA, 19 nt, Homo sapiens
  misc_RNA (1)...(19): siRNA sense strand
gcuaugccauugauacuuu

SEQ ID NO: 1715192 - RNA, 19 nt, Homo sapiens
  misc_RNA (1)...(19): siRNA sense strand
ucagaaagauuuguaguga

SEQ ID NO: 1715193 - RNA, 19 nt, Homo sapiens
  misc_RNA (1)...(19): siRNA sense strand
gaagagucaucaacuugga

SEQ ID NO: 1715194 - RNA, 19 nt, Homo sapiens
  misc_RNA (1)...(19): siRNA sense strand
aaacuuuacugccgagaaa

SEQ ID NO: 1715195 - RNA, 19 nt, Homo sapiens
  misc_RNA (1)...(19): siRNA sense strand
gaagucagaaagauuugua

SEQ ID NO: 1715196 - RNA, 19 nt, Homo sapiens
  misc_RNA (1)...(19): siRNA sense strand
gcagaaauggccagucaaa

SEQ ID NO: 1715197 - RNA, 19 nt, Homo sapiens
  misc_RNA (1)...(19): siRNA sense strand
gagacgaaauugccguuau

SEQ ID NO: 1715198 - RNA, 19 nt, Homo sapiens
  misc_RNA (1)...(19): siRNA sense strand
gucauuagcuuagaauaug

SEQ ID NO: 1715199 - RNA, 19 nt, Homo sapiens
  misc_RNA (1)...(19): siRNA sense strand
uagaugaagucucacaguu

SEQ ID NO: 1715200 - RNA, 19 nt, Homo sapiens
  misc_RNA (1)...(19): siRNA sense strand
gcugugagcuaugccauug

SEQ ID NO: 1715201 - RNA, 19 nt, Homo sapiens
  misc_RNA (1)...(19): siRNA sense strand
agaaagauuuguagugaca

SEQ ID NO: 1715202 - RNA, 19 nt, Homo sapiens
  misc_RNA (1)...(19): siRNA sense strand
guagugacauuaggcagaa

SEQ ID NO: 1715203 - RNA, 19 nt, Homo sapiens
  misc_RNA (1)...(19): siRNA sense strand
agauauggaugaaguugaa

SEQ ID NO: 1715204 - RNA, 19 nt, Homo sapiens
  misc_RNA (1)...(19): siRNA sense strand
uggaugaaguugaagagaa

SEQ ID NO: 1715205 - RNA, 19 nt, Homo sapiens
  misc_RNA (1)...(19): siRNA sense strand
ccauagacuuggcuugguu

SEQ ID NO: 1715206 - RNA, 19 nt, Homo sapiens
  misc_RNA (1)...(19): siRNA sense strand
gaaagauauggaugaaguu

SEQ ID NO: 1715207 - RNA, 19 nt, Homo sapiens
  misc_RNA (1)...(19): siRNA sense strand
gaaaaugaagucagaaaga

SEQ ID NO: 1715208 - RNA, 19 nt, Homo sapiens
  misc_RNA (1)...(19): siRNA sense strand
gaaguugaagagaaaucua

SEQ ID NO: 1715209 - RNA, 19 nt, Homo sapiens
  misc_RNA (1)...(19): siRNA sense strand
uaggaaagauauggaugaa

SEQ ID NO: 1715210 - RNA, 19 nt, Homo sapiens
  misc_RNA (1)...(19): siRNA sense strand
ccaaggugcccauauggaa

SEQ ID NO: 1715211 - RNA, 19 nt, Homo sapiens
  misc_RNA (1)...(19): siRNA sense strand
agaaauggccagucaaaca

SEQ ID NO: 1715212 - RNA, 19 nt, Homo sapiens
  misc_RNA (1)...(19): siRNA sense strand
ggacuacaagaaauaacuu

SEQ ID NO: 1715213 - RNA, 19 nt, Homo sapiens
  misc_RNA (1)...(19): siRNA sense strand
gcaguguuccauagacuug

SEQ ID NO: 1715214 - RNA, 19 nt, Homo sapiens
  misc_RNA (1)...(19): siRNA sense strand
agacgaaauugccguuauc

SEQ ID NO: 1715215 - RNA, 19 nt, Homo sapiens
  misc_RNA (1)...(19): siRNA sense strand
caaggugcccauauggaaa

SEQ ID NO: 1715216 - RNA, 19 nt, Homo sapiens
  misc_RNA (1)...(19): siRNA sense strand
aggcagaaauggccaguca

SEQ ID NO: 1715217 - RNA, 19 nt, Homo sapiens
  misc_RNA (1)...(19): siRNA sense strand
gaaauggccagucaaacac

SEQ ID NO: 1715218 - RNA, 19 nt, Homo sapiens
  misc_RNA (1)...(19): siRNA sense strand
aagccaaggugcccauaug

SEQ ID NO: 1715219 - RNA, 19 nt, Homo sapiens
  misc_RNA (1)...(19): siRNA sense strand
ggagacgaaauugccguua

SEQ ID NO: 1715220 - RNA, 19 nt, Homo sapiens
  misc_RNA (1)...(19): siRNA sense strand
cuaugccauugauacuuua

SEQ ID NO: 1715221 - RNA, 19 nt, Homo sapiens
  misc_RNA (1)...(19): siRNA sense strand
uacgaagagucaucaacuu

SEQ ID NO: 1715222 - RNA, 19 nt, Homo sapiens
  misc_RNA (1)...(19): siRNA sense strand
acauagcaguguuccauag

SEQ ID NO: 1715223 - RNA, 19 nt, Homo sapiens
  misc_RNA (1)...(19): siRNA sense strand
gucaucaacuuggaaagga

SEQ ID NO: 1715224 - RNA, 19 nt, Homo sapiens
  misc_RNA (1)...(19): siRNA sense strand
cuaggaaagauauggauga

SEQ ID NO: 1715225 - RNA, 19 nt, Homo sapiens
  misc_RNA (1)...(19): siRNA sense strand
ggugauuucuccgcucugu

SEQ ID NO: 1715226 - RNA, 19 nt, Homo sapiens
  misc_RNA (1)...(19): siRNA sense strand
ucagaagcaagcauaauca

SEQ ID NO: 1715227 - RNA, 19 nt, Homo sapiens
  misc_RNA (1)...(19): siRNA sense strand
gcuucagccuggagacgaa

SEQ ID NO: 1715228 - RNA, 19 nt, Homo sapiens
  misc_RNA (1)...(19): siRNA sense strand
agaagcaagcauaaucauu

SEQ ID NO: 1715229 - RNA, 19 nt, Homo sapiens
  misc_RNA (1)...(19): siRNA sense strand
ucaucaacuuggaaaggaa

SEQ ID NO: 1715230 - RNA, 19 nt, Homo sapiens
  misc_RNA (1)...(19): siRNA sense strand
gcucuguggugcaauaucc

SEQ ID NO: 1715231 - RNA, 19 nt, Homo sapiens
  misc_RNA (1)...(19): siRNA sense strand
uggcuugguuccaguguca

SEQ ID NO: 1715232 - RNA, 19 nt, Homo sapiens
  misc_RNA (1)...(19): siRNA sense strand
caacuuggaaaggaaacaa

SEQ ID NO: 1715233 - RNA, 19 nt, Homo sapiens
  misc_RNA (1)...(19): siRNA sense strand
guagaugaagucucacagu

SEQ ID NO: 1715234 - RNA, 19 nt, Homo sapiens
  misc_RNA (1)...(19): siRNA sense strand
aaagauauggaugaaguug

SEQ ID NO: 1715235 - RNA, 19 nt, Homo sapiens
  misc_RNA (1)...(19): siRNA sense strand
gucagaagcaagcauaauc

SEQ ID NO: 1715236 - RNA, 19 nt, Homo sapiens
  misc_RNA (1)...(19): siRNA sense strand
agaugaagucucacaguug

SEQ ID NO: 1715237 - RNA, 19 nt, Homo sapiens
  misc_RNA (1)...(19): siRNA sense strand
caucaacuuggaaaggaaa

SEQ ID NO: 1715238 - RNA, 19 nt, Homo sapiens
  misc_RNA (1)...(19): siRNA sense strand
acgaagagucaucaacuug

SEQ ID NO: 1715239 - RNA, 19 nt, Homo sapiens
  misc_RNA (1)...(19): siRNA sense strand
cacauagcaguguuccaua

SEQ ID NO: 1715240 - RNA, 19 nt, Homo sapiens
  misc_RNA (1)...(19): siRNA sense strand
gagcuaugccauugauacu

SEQ ID NO: 1715241 - RNA, 19 nt, Homo sapiens
  misc_RNA (1)...(19): siRNA sense strand
ugugagcuaugccauugau

SEQ ID NO: 1715242 - RNA, 19 nt, Homo sapiens
  misc_RNA (1)...(19): siRNA sense strand
cauagcaguguuccauaga

SEQ ID NO: 1715243 - RNA, 19 nt, Homo sapiens
  misc_RNA (1)...(19): siRNA sense strand
gucagaaagauuuguagug

SEQ ID NO: 1715244 - RNA, 19 nt, Homo sapiens
  misc_RNA (1)...(19): siRNA sense strand
gccaaggugcccauaugga

SEQ ID NO: 1715245 - RNA, 19 nt, Homo sapiens
  misc_RNA (1)...(19): siRNA sense strand
gauuuguagugacauuagg

SEQ ID NO: 1715246 - RNA, 19 nt, Homo sapiens
  misc_RNA (1)...(19): siRNA sense strand
ggaagaagcuuugucagua

SEQ ID NO: 1715247 - RNA, 19 nt, Homo sapiens
  misc_RNA (1)...(19): siRNA sense strand
gaaaugacacaaauacuca

SEQ ID NO: 1715248 - RNA, 19 nt, Homo sapiens
  misc_RNA (1)...(19): siRNA sense strand
caagugcaauucaagauau

SEQ ID NO: 1715249 - RNA, 19 nt, Homo sapiens
  misc_RNA (1)...(19): siRNA sense strand
ccaguuaacuucauugagu

SEQ ID NO: 1715250 - RNA, 19 nt, Homo sapiens
  misc_RNA (1)...(19): siRNA sense strand
aaucaaagaucuucugcaa

SEQ ID NO: 1715251 - RNA, 19 nt, Homo sapiens
  misc_RNA (1)...(19): siRNA sense strand
gaagaagcuuugucaguac

SEQ ID NO: 1715252 - RNA, 19 nt, Homo sapiens
  misc_RNA (1)...(19): siRNA sense strand
ccacaauccucgcuuaauc

SEQ ID NO: 1715253 - RNA, 19 nt, Homo sapiens
  misc_RNA (1)...(19): siRNA sense strand
caagauauccgaagguuca

SEQ ID NO: 1715254 - RNA, 19 nt, Homo sapiens
  misc_RNA (1)...(19): siRNA sense strand
ccaccacaauccucgcuua

SEQ ID NO: 1715255 - RNA, 19 nt, Homo sapiens
  misc_RNA (1)...(19): siRNA sense strand
ugggaaacaucaauauuug

SEQ ID NO: 1715256 - RNA, 19 nt, Homo sapiens
  misc_RNA (1)...(19): siRNA sense strand
cauauugaauggaaguuga

SEQ ID NO: 1715257 - RNA, 19 nt, Homo sapiens
  misc_RNA (1)...(19): siRNA sense strand
ucaauuauguggucaaacu

SEQ ID NO: 1715258 - RNA, 19 nt, Homo sapiens
  misc_RNA (1)...(19): siRNA sense strand
gcacugcagcauucucuuu

SEQ ID NO: 1715259 - RNA, 19 nt, Homo sapiens
  misc_RNA (1)...(19): siRNA sense strand
gacauuugauccuuucaga

SEQ ID NO: 1715260 - RNA, 19 nt, Homo sapiens
  misc_RNA (1)...(19): siRNA sense strand
ggaaacaucaauauuugga

SEQ ID NO: 1715261 - RNA, 19 nt, Homo sapiens
  misc_RNA (1)...(19): siRNA sense strand
gugggaaacaucaauauuu

SEQ ID NO: 1715262 - RNA, 19 nt, Homo sapiens
  misc_RNA (1)...(19): siRNA sense strand
guacuuugcacuucagaaa

SEQ ID NO: 1715263 - RNA, 19 nt, Homo sapiens
  misc_RNA (1)...(19): siRNA sense strand
gucaaacuguugcagcuaa

SEQ ID NO: 1715264 - RNA, 19 nt, Homo sapiens
  misc_RNA (1)...(19): siRNA sense strand
ucaucgaccucuucaaguu

SEQ ID NO: 1715265 - RNA, 19 nt, Homo sapiens
  misc_RNA (1)...(19): siRNA sense strand
gaauggaaguugauguacu

SEQ ID NO: 1715266 - RNA, 19 nt, Homo sapiens
  misc_RNA (1)...(19): siRNA sense strand
guagacauuugauccuuuc

SEQ ID NO: 1715267 - RNA, 19 nt, Homo sapiens
  misc_RNA (1)...(19): siRNA sense strand
ucuacccucugcauucuua

SEQ ID NO: 1715268 - RNA, 19 nt, Homo sapiens
  misc_RNA (1)...(19): siRNA sense strand
gcguggcacagaagaauua

SEQ ID NO: 1715269 - RNA, 19 nt, Homo sapiens
  misc_RNA (1)...(19): siRNA sense strand
gagacacacugcauuucug

SEQ ID NO: 1715270 - RNA, 19 nt, Homo sapiens
  misc_RNA (1)...(19): siRNA sense strand
ucaagugcaauucaagaua

SEQ ID NO: 1715271 - RNA, 19 nt, Homo sapiens
  misc_RNA (1)...(19): siRNA sense strand
ugacuaagcaagugaacaa

SEQ ID NO: 1715272 - RNA, 19 nt, Homo sapiens
  misc_RNA (1)...(19): siRNA sense strand
guagggaagucuguauuag

SEQ ID NO: 1715273 - RNA, 19 nt, Homo sapiens
  misc_RNA (1)...(19): siRNA sense strand
uauuuggauuugccgauua

SEQ ID NO: 1715274 - RNA, 19 nt, Homo sapiens
  misc_RNA (1)...(19): siRNA sense strand
cuaagcaagugaacaaugg

SEQ ID NO: 1715275 - RNA, 19 nt, Homo sapiens
  misc_RNA (1)...(19): siRNA sense strand
gauauccgaagguucaauu

SEQ ID NO: 1715276 - RNA, 19 nt, Homo sapiens
  misc_RNA (1)...(19): siRNA sense strand
cguuguauaugcuuaguga

SEQ ID NO: 1715277 - RNA, 19 nt, Homo sapiens
  misc_RNA (1)...(19): siRNA sense strand
guucaauuauguggucaaa

SEQ ID NO: 1715278 - RNA, 19 nt, Homo sapiens
  misc_RNA (1)...(19): siRNA sense strand
gcacuucaucgaccucuuc

SEQ ID NO: 1715279 - RNA, 19 nt, Homo sapiens
  misc_RNA (1)...(19): siRNA sense strand
aauccucgcuuaaucaaag

SEQ ID NO: 1715280 - RNA, 19 nt, Homo sapiens
  misc_RNA (1)...(19): siRNA sense strand
ggagacacacugcauuucu

SEQ ID NO: 1715281 - RNA, 19 nt, Homo sapiens
  misc_RNA (1)...(19): siRNA sense strand
ucagaugacuaagcaagug

SEQ ID NO: 1715282 - RNA, 19 nt, Homo sapiens
  misc_RNA (1)...(19): siRNA sense strand
agggaagucuguauuagug

SEQ ID NO: 1715283 - RNA, 19 nt, Homo sapiens
  misc_RNA (1)...(19): siRNA sense strand
agaagccuuuaaucgguua

SEQ ID NO: 1715284 - RNA, 19 nt, Homo sapiens
  misc_RNA (1)...(19): siRNA sense strand
uguagacauuugauccuuu

SEQ ID NO: 1715285 - RNA, 19 nt, Homo sapiens
  misc_RNA (1)...(19): siRNA sense strand
ucaauaaugaagagcauga

SEQ ID NO: 1715286 - RNA, 19 nt, Homo sapiens
  misc_RNA (1)...(19): siRNA sense strand
ggaguagggaagucuguau

SEQ ID NO: 1715287 - RNA, 19 nt, Homo sapiens
  misc_RNA (1)...(19): siRNA sense strand
ugaguggcguggcacagaa

SEQ ID NO: 1715288 - RNA, 19 nt, Homo sapiens
  misc_RNA (1)...(19): siRNA sense strand
ugucggcacugcagcauuc

SEQ ID NO: 1715289 - RNA, 19 nt, Homo sapiens
  misc_RNA (1)...(19): siRNA sense strand
ccucugcauucuuauuaga

SEQ ID NO: 1715290 - RNA, 19 nt, Homo sapiens
  misc_RNA (1)...(19): siRNA sense strand
aaggucauauugaauggaa

SEQ ID NO: 1715291 - RNA, 19 nt, Homo sapiens
  misc_RNA (1)...(19): siRNA sense strand
uguauaugcuuagugaaga

SEQ ID NO: 1715292 - RNA, 19 nt, Homo sapiens
  misc_RNA (1)...(19): siRNA sense strand
gcucuacccucugcauucu

SEQ ID NO: 1715293 - RNA, 19 nt, Homo sapiens
  misc_RNA (1)...(19): siRNA sense strand
caucgaccucuucaaguuu

SEQ ID NO: 1715294 - RNA, 19 nt, Homo sapiens
  misc_RNA (1)...(19): siRNA sense strand
gcaacaacagcuacaggau

SEQ ID NO: 1715295 - RNA, 19 nt, Homo sapiens
  misc_RNA (1)...(19): siRNA sense strand
aguagggaagucuguauua

SEQ ID NO: 1715296 - RNA, 19 nt, Homo sapiens
  misc_RNA (1)...(19): siRNA sense strand
gaguagggaagucuguauu

SEQ ID NO: 1715297 - RNA, 19 nt, Homo sapiens
  misc_RNA (1)...(19): siRNA sense strand
uggauuugccgauuagaaa

SEQ ID NO: 1715298 - RNA, 19 nt, Homo sapiens
  misc_RNA (1)...(19): siRNA sense strand
gauaaaaucguucaaaagg

SEQ ID NO: 1715299 - RNA, 19 nt, Homo sapiens
  misc_RNA (1)...(19): siRNA sense strand
aacaacagcuacaggaucu

SEQ ID NO: 1715300 - RNA, 19 nt, Homo sapiens
  misc_RNA (1)...(19): siRNA sense strand
caaaaucccaguuaacuuc

SEQ ID NO: 1715301 - RNA, 19 nt, Homo sapiens
  misc_RNA (1)...(19): siRNA sense strand
ucaaacuguugcagcuaau

SEQ ID NO: 1715302 - RNA, 19 nt, Homo sapiens
  misc_RNA (1)...(19): siRNA sense strand
guacggagacacacugcau

SEQ ID NO: 1715303 - RNA, 19 nt, Homo sapiens
  misc_RNA (1)...(19): siRNA sense strand
ugauguacuuugcacuuca

SEQ ID NO: 1715304 - RNA, 19 nt, Homo sapiens
  misc_RNA (1)...(19): siRNA sense strand
uccgaagguucaauuaugu

SEQ ID NO: 1715305 - RNA, 19 nt, Homo sapiens
  misc_RNA (1)...(19): siRNA sense strand
caacagcuacaggaucuuc

SEQ ID NO: 1715306 - RNA, 19 nt, Homo sapiens
  misc_RNA (1)...(19): siRNA sense strand
agaaaugacacaaauacuc

SEQ ID NO: 1715307 - RNA, 19 nt, Homo sapiens
  misc_RNA (1)...(19): siRNA sense strand
aaacuguugcagcuaauug

SEQ ID NO: 1715308 - RNA, 19 nt, Homo sapiens
  misc_RNA (1)...(19): siRNA sense strand
aaucccaguuaacuucauu

SEQ ID NO: 1715309 - RNA, 19 nt, Homo sapiens
  misc_RNA (1)...(19): siRNA sense strand
uugaauggaaguugaugua

SEQ ID NO: 1715310 - RNA, 19 nt, Homo sapiens
  misc_RNA (1)...(19): siRNA sense strand
auccgaagguucaauuaug

SEQ ID NO: 1715311 - RNA, 19 nt, Homo sapiens
  misc_RNA (1)...(19): siRNA sense strand
uuagugggaaacaucaaua

SEQ ID NO: 1715312 - RNA, 19 nt, Homo sapiens
  misc_RNA (1)...(19): siRNA sense strand
cuucucaagugcaauucaa

SEQ ID NO: 1715313 - RNA, 19 nt, Homo sapiens
  misc_RNA (1)...(19): siRNA sense strand
gcagcauucucuuuuggaa

SEQ ID NO: 1715314 - RNA, 19 nt, Homo sapiens
  misc_RNA (1)...(19): siRNA sense strand
gcacaugcugaacaacauc

SEQ ID NO: 1715315 - RNA, 19 nt, Homo sapiens
  misc_RNA (1)...(19): siRNA sense strand
uggcacagaagaauuacuu

SEQ ID NO: 1715316 - RNA, 19 nt, Homo sapiens
  misc_RNA (1)...(19): siRNA sense strand
ggucaaacuguugcagcua

SEQ ID NO: 1715317 - RNA, 19 nt, Homo sapiens
  misc_RNA (1)...(19): siRNA sense strand
cacaauccucgcuuaauca

SEQ ID NO: 1715318 - RNA, 19 nt, Homo sapiens
  misc_RNA (1)...(19): siRNA sense strand
gcaaaaucccaguuaacuu

SEQ ID NO: 1715319 - RNA, 19 nt, Homo sapiens
  misc_RNA (1)...(19): siRNA sense strand
cugcaagaccuaagcucua

SEQ ID NO: 1715320 - RNA, 19 nt, Homo sapiens
  misc_RNA (1)...(19): siRNA sense strand
caccacaauccucgcuuaa

SEQ ID NO: 1715321 - RNA, 19 nt, Homo sapiens
  misc_RNA (1)...(19): siRNA sense strand
gauguacuuugcacuucag

SEQ ID NO: 1715322 - RNA, 19 nt, Homo sapiens
  misc_RNA (1)...(19): siRNA sense strand
gcaguuuuguagacauuug

SEQ ID NO: 1715323 - RNA, 19 nt, Homo sapiens
  misc_RNA (1)...(19): siRNA sense strand
uggaagaagcuuugucagu

SEQ ID NO: 1715324 - RNA, 19 nt, Homo sapiens
  misc_RNA (1)...(19): siRNA sense strand
gcugaacaacauccuauac

SEQ ID NO: 1715325 - RNA, 19 nt, Homo sapiens
  misc_RNA (1)...(19): siRNA sense strand
uauccgaagguucaauuau

SEQ ID NO: 1715326 - RNA, 19 nt, Homo sapiens
  misc_RNA (1)...(19): siRNA sense strand
caaacuguugcagcuaauu

SEQ ID NO: 1715327 - RNA, 19 nt, Homo sapiens
  misc_RNA (1)...(19): siRNA sense strand
uugcacuucagaaacauua

SEQ ID NO: 1715328 - RNA, 19 nt, Homo sapiens
  misc_RNA (1)...(19): siRNA sense strand
acuuugcacuucagaaaca

SEQ ID NO: 1715329 - RNA, 19 nt, Homo sapiens
  misc_RNA (1)...(19): siRNA sense strand
guugauguacuuugcacuu

SEQ ID NO: 1715330 - RNA, 19 nt, Homo sapiens
  misc_RNA (1)...(19): siRNA sense strand
acccucugcauucuuauua

SEQ ID NO: 1715331 - RNA, 19 nt, Homo sapiens
  misc_RNA (1)...(19): siRNA sense strand
caccuugggagaagccuuu

SEQ ID NO: 1715332 - RNA, 19 nt, Homo sapiens
  misc_RNA (1)...(19): siRNA sense strand
ggucauauugaauggaagu

SEQ ID NO: 1715333 - RNA, 19 nt, Homo sapiens
  misc_RNA (1)...(19): siRNA sense strand
gaagcuuugucaguaccau

SEQ ID NO: 1715334 - RNA, 19 nt, Homo sapiens
  misc_RNA (1)...(19): siRNA sense strand
ugaccuuccucugcacaug

SEQ ID NO: 1715335 - RNA, 19 nt, Homo sapiens
  misc_RNA (1)...(19): siRNA sense strand
uucaagauauccgaagguu

SEQ ID NO: 1715336 - RNA, 19 nt, Homo sapiens
  misc_RNA (1)...(19): siRNA sense strand
ggagcaguacggagacaca

SEQ ID NO: 1715337 - RNA, 19 nt, Homo sapiens
  misc_RNA (1)...(19): siRNA sense strand
guauaugcuuagugaagac

SEQ ID NO: 1715338 - RNA, 19 nt, Homo sapiens
  misc_RNA (1)...(19): siRNA sense strand
cagaugacuaagcaaguga

SEQ ID NO: 1715339 - RNA, 19 nt, Homo sapiens
  misc_RNA (1)...(19): siRNA sense strand
guauuagugggaaacauca

SEQ ID NO: 1715340 - RNA, 19 nt, Homo sapiens
  misc_RNA (1)...(19): siRNA sense strand
ggaagaagcuuugucagua

SEQ ID NO: 1715341 - RNA, 19 nt, Homo sapiens
  misc_RNA (1)...(19): siRNA sense strand
gaagauggcuggaagagau

SEQ ID NO: 1715342 - RNA, 19 nt, Homo sapiens
  misc_RNA (1)...(19): siRNA sense strand
ggaguuggauuaagacaga

SEQ ID NO: 1715343 - RNA, 19 nt, Homo sapiens
  misc_RNA (1)...(19): siRNA sense strand
gagaauaaccguuguaaca

SEQ ID NO: 1715344 - RNA, 19 nt, Homo sapiens
  misc_RNA (1)...(19): siRNA sense strand
ggauggaguuggauuaaga

SEQ ID NO: 1715345 - RNA, 19 nt, Homo sapiens
  misc_RNA (1)...(19): siRNA sense strand
uagugaagauggagaaaua

SEQ ID NO: 1715346 - RNA, 19 nt, Homo sapiens
  misc_RNA (1)...(19): siRNA sense strand
uaacaucagucacagcauu

SEQ ID NO: 1715347 - RNA, 19 nt, Homo sapiens
  misc_RNA (1)...(19): siRNA sense strand
gaauaaccguuguaacauc

SEQ ID NO: 1715348 - RNA, 19 nt, Homo sapiens
  misc_RNA (1)...(19): siRNA sense strand
caagugcaauucaagauau

SEQ ID NO: 1715349 - RNA, 19 nt, Homo sapiens
  misc_RNA (1)...(19): siRNA sense strand
gaaaugacacaaauacuca

SEQ ID NO: 1715350 - RNA, 19 nt, Homo sapiens
  misc_RNA (1)...(19): siRNA sense strand
ccaguuaacuucauugagu

SEQ ID NO: 1715351 - RNA, 19 nt, Homo sapiens
  misc_RNA (1)...(19): siRNA sense strand
aaucaaagaucuucugcaa

SEQ ID NO: 1715352 - RNA, 19 nt, Homo sapiens
  misc_RNA (1)...(19): siRNA sense strand
gaagaagcuuugucaguac

SEQ ID NO: 1715353 - RNA, 19 nt, Homo sapiens
  misc_RNA (1)...(19): siRNA sense strand
ccacaauccucgcuuaauc

SEQ ID NO: 1715354 - RNA, 19 nt, Homo sapiens
  misc_RNA (1)...(19): siRNA sense strand
caagauauccgaagguuca

SEQ ID NO: 1715355 - RNA, 19 nt, Homo sapiens
  misc_RNA (1)...(19): siRNA sense strand
ccaccacaauccucgcuua

SEQ ID NO: 1715356 - RNA, 19 nt, Homo sapiens
  misc_RNA (1)...(19): siRNA sense strand
gucagaaacuugaaagaga

SEQ ID NO: 1715357 - RNA, 19 nt, Homo sapiens
  misc_RNA (1)...(19): siRNA sense strand
gaagauggagaaauauuca

SEQ ID NO: 1715358 - RNA, 19 nt, Homo sapiens
  misc_RNA (1)...(19): siRNA sense strand
ugggaaacaucaauauuug

SEQ ID NO: 1715359 - RNA, 19 nt, Homo sapiens
  misc_RNA (1)...(19): siRNA sense strand
cauauugaauggaaguuga

SEQ ID NO: 1715360 - RNA, 19 nt, Homo sapiens
  misc_RNA (1)...(19): siRNA sense strand
ucaauuauguggucaaacu

SEQ ID NO: 1715361 - RNA, 19 nt, Homo sapiens
  misc_RNA (1)...(19): siRNA sense strand
gcacugcagcauucucuuu

SEQ ID NO: 1715362 - RNA, 19 nt, Homo sapiens
  misc_RNA (1)...(19): siRNA sense strand
gacauuugauccuuucaga

SEQ ID NO: 1715363 - RNA, 19 nt, Homo sapiens
  misc_RNA (1)...(19): siRNA sense strand
ggaaacaucaauauuugga

SEQ ID NO: 1715364 - RNA, 19 nt, Homo sapiens
  misc_RNA (1)...(19): siRNA sense strand
gugggaaacaucaauauuu

SEQ ID NO: 1715365 - RNA, 19 nt, Homo sapiens
  misc_RNA (1)...(19): siRNA sense strand
guacuuugcacuucagaaa

SEQ ID NO: 1715366 - RNA, 19 nt, Homo sapiens
  misc_RNA (1)...(19): siRNA sense strand
gucaaacuguugcagcuaa

SEQ ID NO: 1715367 - RNA, 19 nt, Homo sapiens
  misc_RNA (1)...(19): siRNA sense strand
ucaucgaccucuucaaguu

SEQ ID NO: 1715368 - RNA, 19 nt, Homo sapiens
  misc_RNA (1)...(19): siRNA sense strand
gaauggaaguugauguacu

SEQ ID NO: 1715369 - RNA, 19 nt, Homo sapiens
  misc_RNA (1)...(19): siRNA sense strand
guagacauuugauccuuuc

SEQ ID NO: 1715370 - RNA, 19 nt, Homo sapiens
  misc_RNA (1)...(19): siRNA sense strand
gagagaauaaccguuguaa

SEQ ID NO: 1715371 - RNA, 19 nt, Homo sapiens
  misc_RNA (1)...(19): siRNA sense strand
ucuacccucugcauucuua

SEQ ID NO: 1715372 - RNA, 19 nt, Homo sapiens
  misc_RNA (1)...(19): siRNA sense strand
gcguggcacagaagaauua

SEQ ID NO: 1715373 - RNA, 19 nt, Homo sapiens
  misc_RNA (1)...(19): siRNA sense strand
gagacacacugcauuucug

SEQ ID NO: 1715374 - RNA, 19 nt, Homo sapiens
  misc_RNA (1)...(19): siRNA sense strand
ucaagugcaauucaagaua

SEQ ID NO: 1715375 - RNA, 19 nt, Homo sapiens
  misc_RNA (1)...(19): siRNA sense strand
ugacuaagcaagugaacaa

SEQ ID NO: 1715376 - RNA, 19 nt, Homo sapiens
  misc_RNA (1)...(19): siRNA sense strand
guagggaagucuguauuag

SEQ ID NO: 1715377 - RNA, 19 nt, Homo sapiens
  misc_RNA (1)...(19): siRNA sense strand
ggucaggacuggagaucuc

SEQ ID NO: 1715378 - RNA, 19 nt, Homo sapiens
  misc_RNA (1)...(19): siRNA sense strand
cuaagcaagugaacaaugg

SEQ ID NO: 1715379 - RNA, 19 nt, Homo sapiens
  misc_RNA (1)...(19): siRNA sense strand
uauuuggauuugccgauua

SEQ ID NO: 1715380 - RNA, 19 nt, Homo sapiens
  misc_RNA (1)...(19): siRNA sense strand
gauauccgaagguucaauu

SEQ ID NO: 1715381 - RNA, 19 nt, Homo sapiens
  misc_RNA (1)...(19): siRNA sense strand
cguuguauaugcuuaguga

SEQ ID NO: 1715382 - RNA, 19 nt, Homo sapiens
  misc_RNA (1)...(19): siRNA sense strand
agucacagcauuaucuuaa

SEQ ID NO: 1715383 - RNA, 19 nt, Homo sapiens
  misc_RNA (1)...(19): siRNA sense strand
guucaauuauguggucaaa

SEQ ID NO: 1715384 - RNA, 19 nt, Homo sapiens
  misc_RNA (1)...(19): siRNA sense strand
gcacuucaucgaccucuuc

SEQ ID NO: 1715385 - RNA, 19 nt, Homo sapiens
  misc_RNA (1)...(19): siRNA sense strand
aauaaccguuguaacauca

SEQ ID NO: 1715386 - RNA, 19 nt, Homo sapiens
  misc_RNA (1)...(19): siRNA sense strand
ggagacacacugcauuucu

SEQ ID NO: 1715387 - RNA, 19 nt, Homo sapiens
  misc_RNA (1)...(19): siRNA sense strand
ucagaugacuaagcaagug

SEQ ID NO: 1715388 - RNA, 19 nt, Homo sapiens
  misc_RNA (1)...(19): siRNA sense strand
agggaagucuguauuagug

SEQ ID NO: 1715389 - RNA, 19 nt, Homo sapiens
  misc_RNA (1)...(19): siRNA sense strand
aauccucgcuuaaucaaag

SEQ ID NO: 1715390 - RNA, 19 nt, Homo sapiens
  misc_RNA (1)...(19): siRNA sense strand
ucaauaaugaagagcauga

SEQ ID NO: 1715391 - RNA, 19 nt, Homo sapiens
  misc_RNA (1)...(19): siRNA sense strand
uguagacauuugauccuuu

SEQ ID NO: 1715392 - RNA, 19 nt, Homo sapiens
  misc_RNA (1)...(19): siRNA sense strand
agaagccuuuaaucgguua

SEQ ID NO: 1715393 - RNA, 19 nt, Homo sapiens
  misc_RNA (1)...(19): siRNA sense strand
gucacagcauuaucuuaaa

SEQ ID NO: 1715394 - RNA, 19 nt, Homo sapiens
  misc_RNA (1)...(19): siRNA sense strand
ggaguagggaagucuguau

SEQ ID NO: 1715395 - RNA, 19 nt, Homo sapiens
  misc_RNA (1)...(19): siRNA sense strand
gugaagauggagaaauauu

SEQ ID NO: 1715396 - RNA, 19 nt, Homo sapiens
  misc_RNA (1)...(19): siRNA sense strand
ugaguggcguggcacagaa

SEQ ID NO: 1715397 - RNA, 19 nt, Homo sapiens
  misc_RNA (1)...(19): siRNA sense strand
ugucggcacugcagcauuc

SEQ ID NO: 1715398 - RNA, 19 nt, Homo sapiens
  misc_RNA (1)...(19): siRNA sense strand
ccucugcauucuuauuaga

SEQ ID NO: 1715399 - RNA, 19 nt, Homo sapiens
  misc_RNA (1)...(19): siRNA sense strand
aaggucauauugaauggaa

SEQ ID NO: 1715400 - RNA, 19 nt, Homo sapiens
  misc_RNA (1)...(19): siRNA sense strand
uguauaugcuuagugaaga

SEQ ID NO: 1715401 - RNA, 19 nt, Homo sapiens
  misc_RNA (1)...(19): siRNA sense strand
gcucuacccucugcauucu

SEQ ID NO: 1715402 - RNA, 19 nt, Homo sapiens
  misc_RNA (1)...(19): siRNA sense strand
caucgaccucuucaaguuu

SEQ ID NO: 1715403 - RNA, 19 nt, Homo sapiens
  misc_RNA (1)...(19): siRNA sense strand
gcaacaacagcuacaggau

SEQ ID NO: 1715404 - RNA, 19 nt, Homo sapiens
  misc_RNA (1)...(19): siRNA sense strand
aguagggaagucuguauua

SEQ ID NO: 1715405 - RNA, 19 nt, Homo sapiens
  misc_RNA (1)...(19): siRNA sense strand
gaguagggaagucuguauu

SEQ ID NO: 1715406 - RNA, 19 nt, Homo sapiens
  misc_RNA (1)...(19): siRNA sense strand
ugaagauggagaaauauuc

SEQ ID NO: 1715407 - RNA, 19 nt, Homo sapiens
  misc_RNA (1)...(19): siRNA sense strand
ugaaucuuguagucagaaa

SEQ ID NO: 1715408 - RNA, 19 nt, Homo sapiens
  misc_RNA (1)...(19): siRNA sense strand
gaaacuugaaagagagaau

SEQ ID NO: 1715409 - RNA, 19 nt, Homo sapiens
  misc_RNA (1)...(19): siRNA sense strand
uggauuugccgauuagaaa

SEQ ID NO: 1715410 - RNA, 19 nt, Homo sapiens
  misc_RNA (1)...(19): siRNA sense strand
gauaaaaucguucaaaagg

SEQ ID NO: 1715411 - RNA, 19 nt, Homo sapiens
  misc_RNA (1)...(19): siRNA sense strand
aacaacagcuacaggaucu

SEQ ID NO: 1715412 - RNA, 19 nt, Homo sapiens
  misc_RNA (1)...(19): siRNA sense strand
caaaaucccaguuaacuuc

SEQ ID NO: 1715413 - RNA, 19 nt, Homo sapiens
  misc_RNA (1)...(19): siRNA sense strand
uccgaagguucaauuaugu

SEQ ID NO: 1715414 - RNA, 19 nt, Homo sapiens
  misc_RNA (1)...(19): siRNA sense strand
guacggagacacacugcau

SEQ ID NO: 1715415 - RNA, 19 nt, Homo sapiens
  misc_RNA (1)...(19): siRNA sense strand
ugauguacuuugcacuuca

SEQ ID NO: 1715416 - RNA, 19 nt, Homo sapiens
  misc_RNA (1)...(19): siRNA sense strand
ucaaacuguugcagcuaau

SEQ ID NO: 1715417 - RNA, 19 nt, Homo sapiens
  misc_RNA (1)...(19): siRNA sense strand
agaaaugacacaaauacuc

SEQ ID NO: 1715418 - RNA, 19 nt, Homo sapiens
  misc_RNA (1)...(19): siRNA sense strand
caacagcuacaggaucuuc

SEQ ID NO: 1715419 - RNA, 19 nt, Homo sapiens
  misc_RNA (1)...(19): siRNA sense strand
aaacuguugcagcuaauug

SEQ ID NO: 1715420 - RNA, 19 nt, Homo sapiens
  misc_RNA (1)...(19): siRNA sense strand
auccgaagguucaauuaug

SEQ ID NO: 1715421 - RNA, 19 nt, Homo sapiens
  misc_RNA (1)...(19): siRNA sense strand
uugaauggaaguugaugua

SEQ ID NO: 1715422 - RNA, 19 nt, Homo sapiens
  misc_RNA (1)...(19): siRNA sense strand
aaucccaguuaacuucauu

SEQ ID NO: 1715423 - RNA, 19 nt, Homo sapiens
  misc_RNA (1)...(19): siRNA sense strand
uuagugggaaacaucaaua

SEQ ID NO: 1715424 - RNA, 19 nt, Homo sapiens
  misc_RNA (1)...(19): siRNA sense strand
cuucucaagugcaauucaa

SEQ ID NO: 1715425 - RNA, 19 nt, Homo sapiens
  misc_RNA (1)...(19): siRNA sense strand
gcagcauucucuuuuggaa

SEQ ID NO: 1715426 - RNA, 19 nt, Homo sapiens
  misc_RNA (1)...(19): siRNA sense strand
gaugugaaucuuguaguca

SEQ ID NO: 1715427 - RNA, 19 nt, Homo sapiens
  misc_RNA (1)...(19): siRNA sense strand
gcacaugcugaacaacauc

SEQ ID NO: 1715428 - RNA, 19 nt, Homo sapiens
  misc_RNA (1)...(19): siRNA sense strand
cuuaaauagugaagaugga

SEQ ID NO: 1715429 - RNA, 19 nt, Homo sapiens
  misc_RNA (1)...(19): siRNA sense strand
ggucaaacuguugcagcua

SEQ ID NO: 1715430 - RNA, 19 nt, Homo sapiens
  misc_RNA (1)...(19): siRNA sense strand
uggcacagaagaauuacuu

SEQ ID NO: 1715431 - RNA, 19 nt, Homo sapiens
  misc_RNA (1)...(19): siRNA sense strand
gcaaaaucccaguuaacuu

SEQ ID NO: 1715432 - RNA, 19 nt, Homo sapiens
  misc_RNA (1)...(19): siRNA sense strand
aacaucagucacagcauua

SEQ ID NO: 1715433 - RNA, 19 nt, Homo sapiens
  misc_RNA (1)...(19): siRNA sense strand
cugcaagaccuaagcucua

SEQ ID NO: 1715434 - RNA, 19 nt, Homo sapiens
  misc_RNA (1)...(19): siRNA sense strand
cacaauccucgcuuaauca

SEQ ID NO: 1715435 - RNA, 19 nt, Homo sapiens
  misc_RNA (1)...(19): siRNA sense strand
caccacaauccucgcuuaa

SEQ ID NO: 1715436 - RNA, 19 nt, Homo sapiens
  misc_RNA (1)...(19): siRNA sense strand
gauguacuuugcacuucag

SEQ ID NO: 1715437 - RNA, 19 nt, Homo sapiens
  misc_RNA (1)...(19): siRNA sense strand
gcaguuuuguagacauuug

SEQ ID NO: 1715438 - RNA, 19 nt, Homo sapiens
  misc_RNA (1)...(19): siRNA sense strand
uggaagaagcuuugucagu

SEQ ID NO: 1715439 - RNA, 19 nt, Homo sapiens
  misc_RNA (1)...(19): siRNA sense strand
gcugaacaacauccuauac

SEQ ID NO: 1715440 - RNA, 19 nt, Homo sapiens
  misc_RNA (1)...(19): siRNA sense strand
ggaagaagcuuugucagua

SEQ ID NO: 1715441 - RNA, 19 nt, Homo sapiens
  misc_RNA (1)...(19): siRNA sense strand
gaagauggcuggaagagau

SEQ ID NO: 1715442 - RNA, 19 nt, Homo sapiens
  misc_RNA (1)...(19): siRNA sense strand
ggaguuggauuaagacaga

SEQ ID NO: 1715443 - RNA, 19 nt, Homo sapiens
  misc_RNA (1)...(19): siRNA sense strand
gagaauaaccguuguaaca

SEQ ID NO: 1715444 - RNA, 19 nt, Homo sapiens
  misc_RNA (1)...(19): siRNA sense strand
ggauggaguuggauuaaga

SEQ ID NO: 1715445 - RNA, 19 nt, Homo sapiens
  misc_RNA (1)...(19): siRNA sense strand
uagugaagauggagaaaua

SEQ ID NO: 1715446 - RNA, 19 nt, Homo sapiens
  misc_RNA (1)...(19): siRNA sense strand
uaacaucagucacagcauu

SEQ ID NO: 1715447 - RNA, 19 nt, Homo sapiens
  misc_RNA (1)...(19): siRNA sense strand
gaauaaccguuguaacauc

SEQ ID NO: 1715448 - RNA, 19 nt, Homo sapiens
  misc_RNA (1)...(19): siRNA sense strand
caagugcaauucaagauau

SEQ ID NO: 1715449 - RNA, 19 nt, Homo sapiens
  misc_RNA (1)...(19): siRNA sense strand
gaaaugacacaaauacuca

SEQ ID NO: 1715450 - RNA, 19 nt, Homo sapiens
  misc_RNA (1)...(19): siRNA sense strand
ccaguuaacuucauugagu

SEQ ID NO: 1715451 - RNA, 19 nt, Homo sapiens
  misc_RNA (1)...(19): siRNA sense strand
aaucaaagaucuucugcaa

SEQ ID NO: 1715452 - RNA, 19 nt, Homo sapiens
  misc_RNA (1)...(19): siRNA sense strand
gaagaagcuuugucaguac

SEQ ID NO: 1715453 - RNA, 19 nt, Homo sapiens
  misc_RNA (1)...(19): siRNA sense strand
ccacaauccucgcuuaauc

SEQ ID NO: 1715454 - RNA, 19 nt, Homo sapiens
  misc_RNA (1)...(19): siRNA sense strand
caagauauccgaagguuca

SEQ ID NO: 1715455 - RNA, 19 nt, Homo sapiens
  misc_RNA (1)...(19): siRNA sense strand
ccaccacaauccucgcuua

SEQ ID NO: 1715456 - RNA, 19 nt, Homo sapiens
  misc_RNA (1)...(19): siRNA sense strand
gucagaaacuugaaagaga

SEQ ID NO: 1715457 - RNA, 19 nt, Homo sapiens
  misc_RNA (1)...(19): siRNA sense strand
gaagauggagaaauauuca

SEQ ID NO: 1715458 - RNA, 19 nt, Homo sapiens
  misc_RNA (1)...(19): siRNA sense strand
ugggaaacaucaauauuug

SEQ ID NO: 1715459 - RNA, 19 nt, Homo sapiens
  misc_RNA (1)...(19): siRNA sense strand
cauauugaauggaaguuga

SEQ ID NO: 1715460 - RNA, 19 nt, Homo sapiens
  misc_RNA (1)...(19): siRNA sense strand
ucaauuauguggucaaacu

SEQ ID NO: 1715461 - RNA, 19 nt, Homo sapiens
  misc_RNA (1)...(19): siRNA sense strand
gcacugcagcauucucuuu

SEQ ID NO: 1715462 - RNA, 19 nt, Homo sapiens
  misc_RNA (1)...(19): siRNA sense strand
gacauuugauccuuucaga

SEQ ID NO: 1715463 - RNA, 19 nt, Homo sapiens
  misc_RNA (1)...(19): siRNA sense strand
ggaaacaucaauauuugga

SEQ ID NO: 1715464 - RNA, 19 nt, Homo sapiens
  misc_RNA (1)...(19): siRNA sense strand
gugggaaacaucaauauuu

SEQ ID NO: 1715465 - RNA, 19 nt, Homo sapiens
  misc_RNA (1)...(19): siRNA sense strand
guacuuugcacuucagaaa

SEQ ID NO: 1715466 - RNA, 19 nt, Homo sapiens
  misc_RNA (1)...(19): siRNA sense strand
gucaaacuguugcagcuaa

SEQ ID NO: 1715467 - RNA, 19 nt, Homo sapiens
  misc_RNA (1)...(19): siRNA sense strand
ucaucgaccucuucaaguu

SEQ ID NO: 1715468 - RNA, 19 nt, Homo sapiens
  misc_RNA (1)...(19): siRNA sense strand
gaauggaaguugauguacu

SEQ ID NO: 1715469 - RNA, 19 nt, Homo sapiens
  misc_RNA (1)...(19): siRNA sense strand
guagacauuugauccuuuc

SEQ ID NO: 1715470 - RNA, 19 nt, Homo sapiens
  misc_RNA (1)...(19): siRNA sense strand
gagagaauaaccguuguaa

SEQ ID NO: 1715471 - RNA, 19 nt, Homo sapiens
  misc_RNA (1)...(19): siRNA sense strand
ucuacccucugcauucuua

SEQ ID NO: 1715472 - RNA, 19 nt, Homo sapiens
  misc_RNA (1)...(19): siRNA sense strand
gcguggcacagaagaauua

SEQ ID NO: 1715473 - RNA, 19 nt, Homo sapiens
  misc_RNA (1)...(19): siRNA sense strand
gagacacacugcauuucug

SEQ ID NO: 1715474 - RNA, 19 nt, Homo sapiens
  misc_RNA (1)...(19): siRNA sense strand
ucaagugcaauucaagaua

SEQ ID NO: 1715475 - RNA, 19 nt, Homo sapiens
  misc_RNA (1)...(19): siRNA sense strand
ugacuaagcaagugaacaa

SEQ ID NO: 1715476 - RNA, 19 nt, Homo sapiens
  misc_RNA (1)...(19): siRNA sense strand
guagggaagucuguauuag

SEQ ID NO: 1715477 - RNA, 19 nt, Homo sapiens
  misc_RNA (1)...(19): siRNA sense strand
ggucaggacuggagaucuc

SEQ ID NO: 1715478 - RNA, 19 nt, Homo sapiens
  misc_RNA (1)...(19): siRNA sense strand
cuaagcaagugaacaaugg

SEQ ID NO: 1715479 - RNA, 19 nt, Homo sapiens
  misc_RNA (1)...(19): siRNA sense strand
uauuuggauuugccgauua

SEQ ID NO: 1715480 - RNA, 19 nt, Homo sapiens
  misc_RNA (1)...(19): siRNA sense strand
gauauccgaagguucaauu

SEQ ID NO: 1715481 - RNA, 19 nt, Homo sapiens
  misc_RNA (1)...(19): siRNA sense strand
cguuguauaugcuuaguga

SEQ ID NO: 1715482 - RNA, 19 nt, Homo sapiens
  misc_RNA (1)...(19): siRNA sense strand
agucacagcauuaucuuaa

SEQ ID NO: 1715483 - RNA, 19 nt, Homo sapiens
  misc_RNA (1)...(19): siRNA sense strand
guucaauuauguggucaaa

SEQ ID NO: 1715484 - RNA, 19 nt, Homo sapiens
  misc_RNA (1)...(19): siRNA sense strand
gcacuucaucgaccucuuc

SEQ ID NO: 1715485 - RNA, 19 nt, Homo sapiens
  misc_RNA (1)...(19): siRNA sense strand
aauaaccguuguaacauca

SEQ ID NO: 1715486 - RNA, 19 nt, Homo sapiens
  misc_RNA (1)...(19): siRNA sense strand
ggagacacacugcauuucu

SEQ ID NO: 1715487 - RNA, 19 nt, Homo sapiens
  misc_RNA (1)...(19): siRNA sense strand
ucagaugacuaagcaagug

SEQ ID NO: 1715488 - RNA, 19 nt, Homo sapiens
  misc_RNA (1)...(19): siRNA sense strand
agggaagucuguauuagug

SEQ ID NO: 1715489 - RNA, 19 nt, Homo sapiens
  misc_RNA (1)...(19): siRNA sense strand
aauccucgcuuaaucaaag

SEQ ID NO: 1715490 - RNA, 19 nt, Homo sapiens
  misc_RNA (1)...(19): siRNA sense strand
ucaauaaugaagagcauga

SEQ ID NO: 1715491 - RNA, 19 nt, Homo sapiens
  misc_RNA (1)...(19): siRNA sense strand
uguagacauuugauccuuu

SEQ ID NO: 1715492 - RNA, 19 nt, Homo sapiens
  misc_RNA (1)...(19): siRNA sense strand
agaagccuuuaaucgguua

SEQ ID NO: 1715493 - RNA, 19 nt, Homo sapiens
  misc_RNA (1)...(19): siRNA sense strand
gucacagcauuaucuuaaa

SEQ ID NO: 1715494 - RNA, 19 nt, Homo sapiens
  misc_RNA (1)...(19): siRNA sense strand
ggaguagggaagucuguau

SEQ ID NO: 1715495 - RNA, 19 nt, Homo sapiens
  misc_RNA (1)...(19): siRNA sense strand
gugaagauggagaaauauu

SEQ ID NO: 1715496 - RNA, 19 nt, Homo sapiens
  misc_RNA (1)...(19): siRNA sense strand
ugaguggcguggcacagaa

SEQ ID NO: 1715497 - RNA, 19 nt, Homo sapiens
  misc_RNA (1)...(19): siRNA sense strand
ugucggcacugcagcauuc

SEQ ID NO: 1715498 - RNA, 19 nt, Homo sapiens
  misc_RNA (1)...(19): siRNA sense strand
ccucugcauucuuauuaga

SEQ ID NO: 1715499 - RNA, 19 nt, Homo sapiens
  misc_RNA (1)...(19): siRNA sense strand
aaggucauauugaauggaa

SEQ ID NO: 1715500 - RNA, 19 nt, Homo sapiens
  misc_RNA (1)...(19): siRNA sense strand
uguauaugcuuagugaaga

SEQ ID NO: 1715501 - RNA, 19 nt, Homo sapiens
  misc_RNA (1)...(19): siRNA sense strand
gcucuacccucugcauucu

SEQ ID NO: 1715502 - RNA, 19 nt, Homo sapiens
  misc_RNA (1)...(19): siRNA sense strand
caucgaccucuucaaguuu

SEQ ID NO: 1715503 - RNA, 19 nt, Homo sapiens
  misc_RNA (1)...(19): siRNA sense strand
gcaacaacagcuacaggau

SEQ ID NO: 1715504 - RNA, 19 nt, Homo sapiens
  misc_RNA (1)...(19): siRNA sense strand
aguagggaagucuguauua

SEQ ID NO: 1715505 - RNA, 19 nt, Homo sapiens
  misc_RNA (1)...(19): siRNA sense strand
gaguagggaagucuguauu

SEQ ID NO: 1715506 - RNA, 19 nt, Homo sapiens
  misc_RNA (1)...(19): siRNA sense strand
ugaagauggagaaauauuc

SEQ ID NO: 1715507 - RNA, 19 nt, Homo sapiens
  misc_RNA (1)...(19): siRNA sense strand
ugaaucuuguagucagaaa

SEQ ID NO: 1715508 - RNA, 19 nt, Homo sapiens
  misc_RNA (1)...(19): siRNA sense strand
gaaacuugaaagagagaau

SEQ ID NO: 1715509 - RNA, 19 nt, Homo sapiens
  misc_RNA (1)...(19): siRNA sense strand
uggauuugccgauuagaaa

SEQ ID NO: 1715510 - RNA, 19 nt, Homo sapiens
  misc_RNA (1)...(19): siRNA sense strand
gauaaaaucguucaaaagg

SEQ ID NO: 1715511 - RNA, 19 nt, Homo sapiens
  misc_RNA (1)...(19): siRNA sense strand
aacaacagcuacaggaucu

SEQ ID NO: 1715512 - RNA, 19 nt, Homo sapiens
  misc_RNA (1)...(19): siRNA sense strand
caaaaucccaguuaacuuc

SEQ ID NO: 1715513 - RNA, 19 nt, Homo sapiens
  misc_RNA (1)...(19): siRNA sense strand
uccgaagguucaauuaugu

SEQ ID NO: 1715514 - RNA, 19 nt, Homo sapiens
  misc_RNA (1)...(19): siRNA sense strand
guacggagacacacugcau

SEQ ID NO: 1715515 - RNA, 19 nt, Homo sapiens
  misc_RNA (1)...(19): siRNA sense strand
ugauguacuuugcacuuca

SEQ ID NO: 1715516 - RNA, 19 nt, Homo sapiens
  misc_RNA (1)...(19): siRNA sense strand
ucaaacuguugcagcuaau

SEQ ID NO: 1715517 - RNA, 19 nt, Homo sapiens
  misc_RNA (1)...(19): siRNA sense strand
agaaaugacacaaauacuc

SEQ ID NO: 1715518 - RNA, 19 nt, Homo sapiens
  misc_RNA (1)...(19): siRNA sense strand
caacagcuacaggaucuuc

SEQ ID NO: 1715519 - RNA, 19 nt, Homo sapiens
  misc_RNA (1)...(19): siRNA sense strand
aaacuguugcagcuaauug

SEQ ID NO: 1715520 - RNA, 19 nt, Homo sapiens
  misc_RNA (1)...(19): siRNA sense strand
auccgaagguucaauuaug

SEQ ID NO: 1715521 - RNA, 19 nt, Homo sapiens
  misc_RNA (1)...(19): siRNA sense strand
uugaauggaaguugaugua

SEQ ID NO: 1715522 - RNA, 19 nt, Homo sapiens
  misc_RNA (1)...(19): siRNA sense strand
aaucccaguuaacuucauu

SEQ ID NO: 1715523 - RNA, 19 nt, Homo sapiens
  misc_RNA (1)...(19): siRNA sense strand
uuagugggaaacaucaaua

SEQ ID NO: 1715524 - RNA, 19 nt, Homo sapiens
  misc_RNA (1)...(19): siRNA sense strand
cuucucaagugcaauucaa

SEQ ID NO: 1715525 - RNA, 19 nt, Homo sapiens
  misc_RNA (1)...(19): siRNA sense strand
gcagcauucucuuuuggaa

SEQ ID NO: 1715526 - RNA, 19 nt, Homo sapiens
  misc_RNA (1)...(19): siRNA sense strand
gaugugaaucuuguaguca

SEQ ID NO: 1715527 - RNA, 19 nt, Homo sapiens
  misc_RNA (1)...(19): siRNA sense strand
gcacaugcugaacaacauc

SEQ ID NO: 1715528 - RNA, 19 nt, Homo sapiens
  misc_RNA (1)...(19): siRNA sense strand
cuuaaauagugaagaugga

SEQ ID NO: 1715529 - RNA, 19 nt, Homo sapiens
  misc_RNA (1)...(19): siRNA sense strand
ggucaaacuguugcagcua

SEQ ID NO: 1715530 - RNA, 19 nt, Homo sapiens
  misc_RNA (1)...(19): siRNA sense strand
uggcacagaagaauuacuu

SEQ ID NO: 1715531 - RNA, 19 nt, Homo sapiens
  misc_RNA (1)...(19): siRNA sense strand
gcaaaaucccaguuaacuu

SEQ ID NO: 1715532 - RNA, 19 nt, Homo sapiens
  misc_RNA (1)...(19): siRNA sense strand
aacaucagucacagcauua

SEQ ID NO: 1715533 - RNA, 19 nt, Homo sapiens
  misc_RNA (1)...(19): siRNA sense strand
cugcaagaccuaagcucua

SEQ ID NO: 1715534 - RNA, 19 nt, Homo sapiens
  misc_RNA (1)...(19): siRNA sense strand
cacaauccucgcuuaauca

SEQ ID NO: 1715535 - RNA, 19 nt, Homo sapiens
  misc_RNA (1)...(19): siRNA sense strand
caccacaauccucgcuuaa

SEQ ID NO: 1715536 - RNA, 19 nt, Homo sapiens
  misc_RNA (1)...(19): siRNA sense strand
gauguacuuugcacuucag

SEQ ID NO: 1715537 - RNA, 19 nt, Homo sapiens
  misc_RNA (1)...(19): siRNA sense strand
gcaguuuuguagacauuug

SEQ ID NO: 1715538 - RNA, 19 nt, Homo sapiens
  misc_RNA (1)...(19): siRNA sense strand
uggaagaagcuuugucagu

SEQ ID NO: 1715539 - RNA, 19 nt, Homo sapiens
  misc_RNA (1)...(19): siRNA sense strand
gcugaacaacauccuauac

SEQ ID NO: 1715540 - RNA, 19 nt, Homo sapiens
  misc_RNA (1)...(19): siRNA sense strand
ggacauggaugcacaguug

SEQ ID NO: 1715541 - RNA, 19 nt, Homo sapiens
  misc_RNA (1)...(19): siRNA sense strand
aaagacagauuuccugaua

SEQ ID NO: 1715542 - RNA, 19 nt, Homo sapiens
  misc_RNA (1)...(19): siRNA sense strand
gcccagagcuuacguuuga

SEQ ID NO: 1715543 - RNA, 19 nt, Homo sapiens
  misc_RNA (1)...(19): siRNA sense strand
gcaaguagauauugaguca

SEQ ID NO: 1715544 - RNA, 19 nt, Homo sapiens
  misc_RNA (1)...(19): siRNA sense strand
uaacacagcuguagacaca

SEQ ID NO: 1715545 - RNA, 19 nt, Homo sapiens
  misc_RNA (1)...(19): siRNA sense strand
ccacaucaguguagcauuu

SEQ ID NO: 1715546 - RNA, 19 nt, Homo sapiens
  misc_RNA (1)...(19): siRNA sense strand
gagcuugccuucagucaaa

SEQ ID NO: 1715547 - RNA, 19 nt, Homo sapiens
  misc_RNA (1)...(19): siRNA sense strand
gaugaugucuugauggaaa

SEQ ID NO: 1715548 - RNA, 19 nt, Homo sapiens
  misc_RNA (1)...(19): siRNA sense strand
agacagauuuccugauaua

SEQ ID NO: 1715549 - RNA, 19 nt, Homo sapiens
  misc_RNA (1)...(19): siRNA sense strand
gcaaggauguuucaaagca

SEQ ID NO: 1715550 - RNA, 19 nt, Homo sapiens
  misc_RNA (1)...(19): siRNA sense strand
gcaaauggguucagaucga

SEQ ID NO: 1715551 - RNA, 19 nt, Homo sapiens
  misc_RNA (1)...(19): siRNA sense strand
ccacauggaucgaauagga

SEQ ID NO: 1715552 - RNA, 19 nt, Homo sapiens
  misc_RNA (1)...(19): siRNA sense strand
gaugggagcugcaaucaca

SEQ ID NO: 1715553 - RNA, 19 nt, Homo sapiens
  misc_RNA (1)...(19): siRNA sense strand
gguguaacguugucuguaa

SEQ ID NO: 1715554 - RNA, 19 nt, Homo sapiens
  misc_RNA (1)...(19): siRNA sense strand
ggauugaauuugaugauga

SEQ ID NO: 1715555 - RNA, 19 nt, Homo sapiens
  misc_RNA (1)...(19): siRNA sense strand
acaaauaccucuucugaca

SEQ ID NO: 1715556 - RNA, 19 nt, Homo sapiens
  misc_RNA (1)...(19): siRNA sense strand
aaagaacgguacagucuaa

SEQ ID NO: 1715557 - RNA, 19 nt, Homo sapiens
  misc_RNA (1)...(19): siRNA sense strand
gacccugucucaauucuaa

SEQ ID NO: 1715558 - RNA, 19 nt, Homo sapiens
  misc_RNA (1)...(19): siRNA sense strand
gaguuaggauugaauuuga

SEQ ID NO: 1715559 - RNA, 19 nt, Homo sapiens
  misc_RNA (1)...(19): siRNA sense strand
ucugaaauguguacugaua

SEQ ID NO: 1715560 - RNA, 19 nt, Homo sapiens
  misc_RNA (1)...(19): siRNA sense strand
ggauagaaaucucugaaag

SEQ ID NO: 1715561 - RNA, 19 nt, Homo sapiens
  misc_RNA (1)...(19): siRNA sense strand
gauauuaagugaugauguc

SEQ ID NO: 1715562 - RNA, 19 nt, Homo sapiens
  misc_RNA (1)...(19): siRNA sense strand
guucagaaguuucacaguu

SEQ ID NO: 1715563 - RNA, 19 nt, Homo sapiens
  misc_RNA (1)...(19): siRNA sense strand
acaagcagauguacagaaa

SEQ ID NO: 1715564 - RNA, 19 nt, Homo sapiens
  misc_RNA (1)...(19): siRNA sense strand
gcaaacaaauuggagacuu

SEQ ID NO: 1715565 - RNA, 19 nt, Homo sapiens
  misc_RNA (1)...(19): siRNA sense strand
ugaagaacaugguaacaau

SEQ ID NO: 1715566 - RNA, 19 nt, Homo sapiens
  misc_RNA (1)...(19): siRNA sense strand
caacaaagcacgaacucaa

SEQ ID NO: 1715567 - RNA, 19 nt, Homo sapiens
  misc_RNA (1)...(19): siRNA sense strand
gaagugccaugguaaacug

SEQ ID NO: 1715568 - RNA, 19 nt, Homo sapiens
  misc_RNA (1)...(19): siRNA sense strand
aaucgugucuccaguagua

SEQ ID NO: 1715569 - RNA, 19 nt, Homo sapiens
  misc_RNA (1)...(19): siRNA sense strand
ucaauaggcucccuguuuc

SEQ ID NO: 1715570 - RNA, 19 nt, Homo sapiens
  misc_RNA (1)...(19): siRNA sense strand
gaaagaacgguacagucua

SEQ ID NO: 1715571 - RNA, 19 nt, Homo sapiens
  misc_RNA (1)...(19): siRNA sense strand
caaacaaauuggagacuuc

SEQ ID NO: 1715572 - RNA, 19 nt, Homo sapiens
  misc_RNA (1)...(19): siRNA sense strand
uaacauucuuccugaggua

SEQ ID NO: 1715573 - RNA, 19 nt, Homo sapiens
  misc_RNA (1)...(19): siRNA sense strand
ucaaagccauccaaauuca

SEQ ID NO: 1715574 - RNA, 19 nt, Homo sapiens
  misc_RNA (1)...(19): siRNA sense strand
cagauuuccugauauaaug

SEQ ID NO: 1715575 - RNA, 19 nt, Homo sapiens
  misc_RNA (1)...(19): siRNA sense strand
ggacaaagaaggcaacagu

SEQ ID NO: 1715576 - RNA, 19 nt, Homo sapiens
  misc_RNA (1)...(19): siRNA sense strand
ggauggaauugcaaguauu

SEQ ID NO: 1715577 - RNA, 19 nt, Homo sapiens
  misc_RNA (1)...(19): siRNA sense strand
ugaaucauauugcugaaga

SEQ ID NO: 1715578 - RNA, 19 nt, Homo sapiens
  misc_RNA (1)...(19): siRNA sense strand
ggaauugcaaguauugaaa

SEQ ID NO: 1715579 - RNA, 19 nt, Homo sapiens
  misc_RNA (1)...(19): siRNA sense strand
cuacaaauaccucuucuga

SEQ ID NO: 1715580 - RNA, 19 nt, Homo sapiens
  misc_RNA (1)...(19): siRNA sense strand
gaucuuguguggauugcuu

SEQ ID NO: 1715581 - RNA, 19 nt, Homo sapiens
  misc_RNA (1)...(19): siRNA sense strand
gaacuaacacagcuguaga

SEQ ID NO: 1715582 - RNA, 19 nt, Homo sapiens
  misc_RNA (1)...(19): siRNA sense strand
gaaaaggaguuaggauuga

SEQ ID NO: 1715583 - RNA, 19 nt, Homo sapiens
  misc_RNA (1)...(19): siRNA sense strand
gaacaugguaacaauggaa

SEQ ID NO: 1715584 - RNA, 19 nt, Homo sapiens
  misc_RNA (1)...(19): siRNA sense strand
gauucucacucuagucauu

SEQ ID NO: 1715585 - RNA, 19 nt, Homo sapiens
  misc_RNA (1)...(19): siRNA sense strand
gaagggcuguguguaaaca

SEQ ID NO: 1715586 - RNA, 19 nt, Homo sapiens
  misc_RNA (1)...(19): siRNA sense strand
guauggaggugcaaguaga

SEQ ID NO: 1715587 - RNA, 19 nt, Homo sapiens
  misc_RNA (1)...(19): siRNA sense strand
cgagacaaccugagugaaa

SEQ ID NO: 1715588 - RNA, 19 nt, Homo sapiens
  misc_RNA (1)...(19): siRNA sense strand
acgaugugcugcuuauaua

SEQ ID NO: 1715589 - RNA, 19 nt, Homo sapiens
  misc_RNA (1)...(19): siRNA sense strand
agagagagcccagagcuua

SEQ ID NO: 1715590 - RNA, 19 nt, Homo sapiens
  misc_RNA (1)...(19): siRNA sense strand
agaauguacugaacgguuu

SEQ ID NO: 1715591 - RNA, 19 nt, Homo sapiens
  misc_RNA (1)...(19): siRNA sense strand
aagcagauguacagaaaga

SEQ ID NO: 1715592 - RNA, 19 nt, Homo sapiens
  misc_RNA (1)...(19): siRNA sense strand
ccaaacugcuuccuguuca

SEQ ID NO: 1715593 - RNA, 19 nt, Homo sapiens
  misc_RNA (1)...(19): siRNA sense strand
gaucuucaguccucugcuu

SEQ ID NO: 1715594 - RNA, 19 nt, Homo sapiens
  misc_RNA (1)...(19): siRNA sense strand
gagcugcaaucacaugaca

SEQ ID NO: 1715595 - RNA, 19 nt, Homo sapiens
  misc_RNA (1)...(19): siRNA sense strand
gaaaaugaccgucuggaaa

SEQ ID NO: 1715596 - RNA, 19 nt, Homo sapiens
  misc_RNA (1)...(19): siRNA sense strand
ggaguuaggauugaauuug

SEQ ID NO: 1715597 - RNA, 19 nt, Homo sapiens
  misc_RNA (1)...(19): siRNA sense strand
agucaaagccauccaaauu

SEQ ID NO: 1715598 - RNA, 19 nt, Homo sapiens
  misc_RNA (1)...(19): siRNA sense strand
gggaacaguuagugauaau

SEQ ID NO: 1715599 - RNA, 19 nt, Homo sapiens
  misc_RNA (1)...(19): siRNA sense strand
ggccauagcagguggugua

SEQ ID NO: 1715600 - RNA, 19 nt, Homo sapiens
  misc_RNA (1)...(19): siRNA sense strand
gaagccacauggaucgaau

SEQ ID NO: 1715601 - RNA, 19 nt, Homo sapiens
  misc_RNA (1)...(19): siRNA sense strand
cggaaucgcuuuaauagcu

SEQ ID NO: 1715602 - RNA, 19 nt, Homo sapiens
  misc_RNA (1)...(19): siRNA sense strand
caaagaaggcaacaguaug

SEQ ID NO: 1715603 - RNA, 19 nt, Homo sapiens
  misc_RNA (1)...(19): siRNA sense strand
gaacgguacagucuaagug

SEQ ID NO: 1715604 - RNA, 19 nt, Homo sapiens
  misc_RNA (1)...(19): siRNA sense strand
gucaggaagugccauggua

SEQ ID NO: 1715605 - RNA, 19 nt, Homo sapiens
  misc_RNA (1)...(19): siRNA sense strand
cgacaauauuuaaggauag

SEQ ID NO: 1715606 - RNA, 19 nt, Homo sapiens
  misc_RNA (1)...(19): siRNA sense strand
gaagaacaugguaacaaug

SEQ ID NO: 1715607 - RNA, 19 nt, Homo sapiens
  misc_RNA (1)...(19): siRNA sense strand
gcaagaacaagaaauaggu

SEQ ID NO: 1715608 - RNA, 19 nt, Homo sapiens
  misc_RNA (1)...(19): siRNA sense strand
gguaucgguguuccuauua

SEQ ID NO: 1715609 - RNA, 19 nt, Homo sapiens
  misc_RNA (1)...(19): siRNA sense strand
gugaugaugucuugaugga

SEQ ID NO: 1715610 - RNA, 19 nt, Homo sapiens
  misc_RNA (1)...(19): siRNA sense strand
aauauuaguugcccagaau

SEQ ID NO: 1715611 - RNA, 19 nt, Homo sapiens
  misc_RNA (1)...(19): siRNA sense strand
ggaauaaaaccuaauguug

SEQ ID NO: 1715612 - RNA, 19 nt, Homo sapiens
  misc_RNA (1)...(19): siRNA sense strand
gaguuuacaucggcaaaug

SEQ ID NO: 1715613 - RNA, 19 nt, Homo sapiens
  misc_RNA (1)...(19): siRNA sense strand
gaauguacugaacgguuua

SEQ ID NO: 1715614 - RNA, 19 nt, Homo sapiens
  misc_RNA (1)...(19): siRNA sense strand
aaauaccucuucugacaau

SEQ ID NO: 1715615 - RNA, 19 nt, Homo sapiens
  misc_RNA (1)...(19): siRNA sense strand
guaaaucaagggagcuaaa

SEQ ID NO: 1715616 - RNA, 19 nt, Homo sapiens
  misc_RNA (1)...(19): siRNA sense strand
ucagaaguuucacaguuga

SEQ ID NO: 1715617 - RNA, 19 nt, Homo sapiens
  misc_RNA (1)...(19): siRNA sense strand
guaaucgugucuccaguag

SEQ ID NO: 1715618 - RNA, 19 nt, Homo sapiens
  misc_RNA (1)...(19): siRNA sense strand
gcuauuccugcaaugauua

SEQ ID NO: 1715619 - RNA, 19 nt, Homo sapiens
  misc_RNA (1)...(19): siRNA sense strand
guucuucauccauuaguua

SEQ ID NO: 1715620 - RNA, 19 nt, Homo sapiens
  misc_RNA (1)...(19): siRNA sense strand
gcagaguuaauauuaguug

SEQ ID NO: 1715621 - RNA, 19 nt, Homo sapiens
  misc_RNA (1)...(19): siRNA sense strand
uaacuuccaucagcaaaca

SEQ ID NO: 1715622 - RNA, 19 nt, Homo sapiens
  misc_RNA (1)...(19): siRNA sense strand
acaaauuggagacuucaua

SEQ ID NO: 1715623 - RNA, 19 nt, Homo sapiens
  misc_RNA (1)...(19): siRNA sense strand
gaaucauauugcugaagaa

SEQ ID NO: 1715624 - RNA, 19 nt, Homo sapiens
  misc_RNA (1)...(19): siRNA sense strand
gacaaagaaggcaacagua

SEQ ID NO: 1715625 - RNA, 19 nt, Homo sapiens
  misc_RNA (1)...(19): siRNA sense strand
guaguuccaauuucucuuu

SEQ ID NO: 1715626 - RNA, 19 nt, Homo sapiens
  misc_RNA (1)...(19): siRNA sense strand
gauggaauugcaaguauug

SEQ ID NO: 1715627 - RNA, 19 nt, Homo sapiens
  misc_RNA (1)...(19): siRNA sense strand
uaauauuaguugcccagaa

SEQ ID NO: 1715628 - RNA, 19 nt, Homo sapiens
  misc_RNA (1)...(19): siRNA sense strand
ucauauugcugaagaacau

SEQ ID NO: 1715629 - RNA, 19 nt, Homo sapiens
  misc_RNA (1)...(19): siRNA sense strand
ugaaauguguacugauaag

SEQ ID NO: 1715630 - RNA, 19 nt, Homo sapiens
  misc_RNA (1)...(19): siRNA sense strand
auacguucuucauccauua

SEQ ID NO: 1715631 - RNA, 19 nt, Homo sapiens
  misc_RNA (1)...(19): siRNA sense strand
caucagacaauggaauuaa

SEQ ID NO: 1715632 - RNA, 19 nt, Homo sapiens
  misc_RNA (1)...(19): siRNA sense strand
caaauaacaaccacucaca

SEQ ID NO: 1715633 - RNA, 19 nt, Homo sapiens
  misc_RNA (1)...(19): siRNA sense strand
gaacaguuagugauaaugc

SEQ ID NO: 1715634 - RNA, 19 nt, Homo sapiens
  misc_RNA (1)...(19): siRNA sense strand
acaaagaaggcaacaguau

SEQ ID NO: 1715635 - RNA, 19 nt, Homo sapiens
  misc_RNA (1)...(19): siRNA sense strand
uaucacacccgcuuugcua

SEQ ID NO: 1715636 - RNA, 19 nt, Homo sapiens
  misc_RNA (1)...(19): siRNA sense strand
gaacaacaaagcacgaacu

SEQ ID NO: 1715637 - RNA, 19 nt, Homo sapiens
  misc_RNA (1)...(19): siRNA sense strand
ggaggugcaaguagauauu

SEQ ID NO: 1715638 - RNA, 19 nt, Homo sapiens
  misc_RNA (1)...(19): siRNA sense strand
agucaugguuccagugauu

SEQ ID NO: 1715639 - RNA, 19 nt, Homo sapiens
  misc_RNA (1)...(19): siRNA sense strand
ccacucacaucagacaaug

SEQ ID NO: 1715640 - RNA, 19 nt, Homo sapiens
  misc_RNA (1)...(19): siRNA sense strand
ggacauggaugcacaguug

SEQ ID NO: 1715641 - RNA, 19 nt, Homo sapiens
  misc_RNA (1)...(19): siRNA sense strand
aaagacagauuuccugaua

SEQ ID NO: 1715642 - RNA, 19 nt, Homo sapiens
  misc_RNA (1)...(19): siRNA sense strand
gcccagagcuuacguuuga

SEQ ID NO: 1715643 - RNA, 19 nt, Homo sapiens
  misc_RNA (1)...(19): siRNA sense strand
gcaaguagauauugaguca

SEQ ID NO: 1715644 - RNA, 19 nt, Homo sapiens
  misc_RNA (1)...(19): siRNA sense strand
uaacacagcuguagacaca

SEQ ID NO: 1715645 - RNA, 19 nt, Homo sapiens
  misc_RNA (1)...(19): siRNA sense strand
ccacaucaguguagcauuu

SEQ ID NO: 1715646 - RNA, 19 nt, Homo sapiens
  misc_RNA (1)...(19): siRNA sense strand
gagcuugccuucagucaaa

SEQ ID NO: 1715647 - RNA, 19 nt, Homo sapiens
  misc_RNA (1)...(19): siRNA sense strand
gaugaugucuugauggaaa

SEQ ID NO: 1715648 - RNA, 19 nt, Homo sapiens
  misc_RNA (1)...(19): siRNA sense strand
agacagauuuccugauaua

SEQ ID NO: 1715649 - RNA, 19 nt, Homo sapiens
  misc_RNA (1)...(19): siRNA sense strand
gcaaggauguuucaaagca

SEQ ID NO: 1715650 - RNA, 19 nt, Homo sapiens
  misc_RNA (1)...(19): siRNA sense strand
gcaaauggguucagaucga

SEQ ID NO: 1715651 - RNA, 19 nt, Homo sapiens
  misc_RNA (1)...(19): siRNA sense strand
ccacauggaucgaauagga

SEQ ID NO: 1715652 - RNA, 19 nt, Homo sapiens
  misc_RNA (1)...(19): siRNA sense strand
gaugggagcugcaaucaca

SEQ ID NO: 1715653 - RNA, 19 nt, Homo sapiens
  misc_RNA (1)...(19): siRNA sense strand
gguguaacguugucuguaa

SEQ ID NO: 1715654 - RNA, 19 nt, Homo sapiens
  misc_RNA (1)...(19): siRNA sense strand
ggauugaauuugaugauga

SEQ ID NO: 1715655 - RNA, 19 nt, Homo sapiens
  misc_RNA (1)...(19): siRNA sense strand
acaaauaccucuucugaca

SEQ ID NO: 1715656 - RNA, 19 nt, Homo sapiens
  misc_RNA (1)...(19): siRNA sense strand
aaagaacgguacagucuaa

SEQ ID NO: 1715657 - RNA, 19 nt, Homo sapiens
  misc_RNA (1)...(19): siRNA sense strand
gacccugucucaauucuaa

SEQ ID NO: 1715658 - RNA, 19 nt, Homo sapiens
  misc_RNA (1)...(19): siRNA sense strand
gaguuaggauugaauuuga

SEQ ID NO: 1715659 - RNA, 19 nt, Homo sapiens
  misc_RNA (1)...(19): siRNA sense strand
ucugaaauguguacugaua

SEQ ID NO: 1715660 - RNA, 19 nt, Homo sapiens
  misc_RNA (1)...(19): siRNA sense strand
ggauagaaaucucugaaag

SEQ ID NO: 1715661 - RNA, 19 nt, Homo sapiens
  misc_RNA (1)...(19): siRNA sense strand
gauauuaagugaugauguc

SEQ ID NO: 1715662 - RNA, 19 nt, Homo sapiens
  misc_RNA (1)...(19): siRNA sense strand
guucagaaguuucacaguu

SEQ ID NO: 1715663 - RNA, 19 nt, Homo sapiens
  misc_RNA (1)...(19): siRNA sense strand
acaagcagauguacagaaa

SEQ ID NO: 1715664 - RNA, 19 nt, Homo sapiens
  misc_RNA (1)...(19): siRNA sense strand
gcaaacaaauuggagacuu

SEQ ID NO: 1715665 - RNA, 19 nt, Homo sapiens
  misc_RNA (1)...(19): siRNA sense strand
ugaagaacaugguaacaau

SEQ ID NO: 1715666 - RNA, 19 nt, Homo sapiens
  misc_RNA (1)...(19): siRNA sense strand
caacaaagcacgaacucaa

SEQ ID NO: 1715667 - RNA, 19 nt, Homo sapiens
  misc_RNA (1)...(19): siRNA sense strand
gaagugccaugguaaacug

SEQ ID NO: 1715668 - RNA, 19 nt, Homo sapiens
  misc_RNA (1)...(19): siRNA sense strand
aaucgugucuccaguagua

SEQ ID NO: 1715669 - RNA, 19 nt, Homo sapiens
  misc_RNA (1)...(19): siRNA sense strand
ucaauaggcucccuguuuc

SEQ ID NO: 1715670 - RNA, 19 nt, Homo sapiens
  misc_RNA (1)...(19): siRNA sense strand
gaaagaacgguacagucua

SEQ ID NO: 1715671 - RNA, 19 nt, Homo sapiens
  misc_RNA (1)...(19): siRNA sense strand
caaacaaauuggagacuuc

SEQ ID NO: 1715672 - RNA, 19 nt, Homo sapiens
  misc_RNA (1)...(19): siRNA sense strand
uaacauucuuccugaggua

SEQ ID NO: 1715673 - RNA, 19 nt, Homo sapiens
  misc_RNA (1)...(19): siRNA sense strand
ucaaagccauccaaauuca

SEQ ID NO: 1715674 - RNA, 19 nt, Homo sapiens
  misc_RNA (1)...(19): siRNA sense strand
cagauuuccugauauaaug

SEQ ID NO: 1715675 - RNA, 19 nt, Homo sapiens
  misc_RNA (1)...(19): siRNA sense strand
ggacaaagaaggcaacagu

SEQ ID NO: 1715676 - RNA, 19 nt, Homo sapiens
  misc_RNA (1)...(19): siRNA sense strand
ggauggaauugcaaguauu

SEQ ID NO: 1715677 - RNA, 19 nt, Homo sapiens
  misc_RNA (1)...(19): siRNA sense strand
ugaaucauauugcugaaga

SEQ ID NO: 1715678 - RNA, 19 nt, Homo sapiens
  misc_RNA (1)...(19): siRNA sense strand
ggaauugcaaguauugaaa

SEQ ID NO: 1715679 - RNA, 19 nt, Homo sapiens
  misc_RNA (1)...(19): siRNA sense strand
cuacaaauaccucuucuga

SEQ ID NO: 1715680 - RNA, 19 nt, Homo sapiens
  misc_RNA (1)...(19): siRNA sense strand
gaucuuguguggauugcuu

SEQ ID NO: 1715681 - RNA, 19 nt, Homo sapiens
  misc_RNA (1)...(19): siRNA sense strand
gaacuaacacagcuguaga

SEQ ID NO: 1715682 - RNA, 19 nt, Homo sapiens
  misc_RNA (1)...(19): siRNA sense strand
gaaaaggaguuaggauuga

SEQ ID NO: 1715683 - RNA, 19 nt, Homo sapiens
  misc_RNA (1)...(19): siRNA sense strand
gaacaugguaacaauggaa

SEQ ID NO: 1715684 - RNA, 19 nt, Homo sapiens
  misc_RNA (1)...(19): siRNA sense strand
gauucucacucuagucauu

SEQ ID NO: 1715685 - RNA, 19 nt, Homo sapiens
  misc_RNA (1)...(19): siRNA sense strand
gaagggcuguguguaaaca

SEQ ID NO: 1715686 - RNA, 19 nt, Homo sapiens
  misc_RNA (1)...(19): siRNA sense strand
guauggaggugcaaguaga

SEQ ID NO: 1715687 - RNA, 19 nt, Homo sapiens
  misc_RNA (1)...(19): siRNA sense strand
cgagacaaccugagugaaa

SEQ ID NO: 1715688 - RNA, 19 nt, Homo sapiens
  misc_RNA (1)...(19): siRNA sense strand
acgaugugcugcuuauaua

SEQ ID NO: 1715689 - RNA, 19 nt, Homo sapiens
  misc_RNA (1)...(19): siRNA sense strand
agagagagcccagagcuua

SEQ ID NO: 1715690 - RNA, 19 nt, Homo sapiens
  misc_RNA (1)...(19): siRNA sense strand
agaauguacugaacgguuu

SEQ ID NO: 1715691 - RNA, 19 nt, Homo sapiens
  misc_RNA (1)...(19): siRNA sense strand
aagcagauguacagaaaga

SEQ ID NO: 1715692 - RNA, 19 nt, Homo sapiens
  misc_RNA (1)...(19): siRNA sense strand
ccaaacugcuuccuguuca

SEQ ID NO: 1715693 - RNA, 19 nt, Homo sapiens
  misc_RNA (1)...(19): siRNA sense strand
gaucuucaguccucugcuu

SEQ ID NO: 1715694 - RNA, 19 nt, Homo sapiens
  misc_RNA (1)...(19): siRNA sense strand
gagcugcaaucacaugaca

SEQ ID NO: 1715695 - RNA, 19 nt, Homo sapiens
  misc_RNA (1)...(19): siRNA sense strand
gaaaaugaccgucuggaaa

SEQ ID NO: 1715696 - RNA, 19 nt, Homo sapiens
  misc_RNA (1)...(19): siRNA sense strand
ggaguuaggauugaauuug

SEQ ID NO: 1715697 - RNA, 19 nt, Homo sapiens
  misc_RNA (1)...(19): siRNA sense strand
agucaaagccauccaaauu

SEQ ID NO: 1715698 - RNA, 19 nt, Homo sapiens
  misc_RNA (1)...(19): siRNA sense strand
gggaacaguuagugauaau

SEQ ID NO: 1715699 - RNA, 19 nt, Homo sapiens
  misc_RNA (1)...(19): siRNA sense strand
ggccauagcagguggugua

SEQ ID NO: 1715700 - RNA, 19 nt, Homo sapiens
  misc_RNA (1)...(19): siRNA sense strand
gaagccacauggaucgaau

SEQ ID NO: 1715701 - RNA, 19 nt, Homo sapiens
  misc_RNA (1)...(19): siRNA sense strand
cggaaucgcuuuaauagcu

SEQ ID NO: 1715702 - RNA, 19 nt, Homo sapiens
  misc_RNA (1)...(19): siRNA sense strand
caaagaaggcaacaguaug

SEQ ID NO: 1715703 - RNA, 19 nt, Homo sapiens
  misc_RNA (1)...(19): siRNA sense strand
gaacgguacagucuaagug

SEQ ID NO: 1715704 - RNA, 19 nt, Homo sapiens
  misc_RNA (1)...(19): siRNA sense strand
gucaggaagugccauggua

SEQ ID NO: 1715705 - RNA, 19 nt, Homo sapiens
  misc_RNA (1)...(19): siRNA sense strand
cgacaauauuuaaggauag

SEQ ID NO: 1715706 - RNA, 19 nt, Homo sapiens
  misc_RNA (1)...(19): siRNA sense strand
gaagaacaugguaacaaug

SEQ ID NO: 1715707 - RNA, 19 nt, Homo sapiens
  misc_RNA (1)...(19): siRNA sense strand
gcaagaacaagaaauaggu

SEQ ID NO: 1715708 - RNA, 19 nt, Homo sapiens
  misc_RNA (1)...(19): siRNA sense strand
gguaucgguguuccuauua

SEQ ID NO: 1715709 - RNA, 19 nt, Homo sapiens
  misc_RNA (1)...(19): siRNA sense strand
gugaugaugucuugaugga

SEQ ID NO: 1715710 - RNA, 19 nt, Homo sapiens
  misc_RNA (1)...(19): siRNA sense strand
aauauuaguugcccagaau

SEQ ID NO: 1715711 - RNA, 19 nt, Homo sapiens
  misc_RNA (1)...(19): siRNA sense strand
ggaauaaaaccuaauguug

SEQ ID NO: 1715712 - RNA, 19 nt, Homo sapiens
  misc_RNA (1)...(19): siRNA sense strand
gaguuuacaucggcaaaug

SEQ ID NO: 1715713 - RNA, 19 nt, Homo sapiens
  misc_RNA (1)...(19): siRNA sense strand
gaauguacugaacgguuua

SEQ ID NO: 1715714 - RNA, 19 nt, Homo sapiens
  misc_RNA (1)...(19): siRNA sense strand
aaauaccucuucugacaau

SEQ ID NO: 1715715 - RNA, 19 nt, Homo sapiens
  misc_RNA (1)...(19): siRNA sense strand
guaaaucaagggagcuaaa

SEQ ID NO: 1715716 - RNA, 19 nt, Homo sapiens
  misc_RNA (1)...(19): siRNA sense strand
ucagaaguuucacaguuga

SEQ ID NO: 1715717 - RNA, 19 nt, Homo sapiens
  misc_RNA (1)...(19): siRNA sense strand
guaaucgugucuccaguag

SEQ ID NO: 1715718 - RNA, 19 nt, Homo sapiens
  misc_RNA (1)...(19): siRNA sense strand
gcuauuccugcaaugauua

SEQ ID NO: 1715719 - RNA, 19 nt, Homo sapiens
  misc_RNA (1)...(19): siRNA sense strand
guucuucauccauuaguua

SEQ ID NO: 1715720 - RNA, 19 nt, Homo sapiens
  misc_RNA (1)...(19): siRNA sense strand
gcagaguuaauauuaguug

SEQ ID NO: 1715721 - RNA, 19 nt, Homo sapiens
  misc_RNA (1)...(19): siRNA sense strand
uaacuuccaucagcaaaca

SEQ ID NO: 1715722 - RNA, 19 nt, Homo sapiens
  misc_RNA (1)...(19): siRNA sense strand
acaaauuggagacuucaua

SEQ ID NO: 1715723 - RNA, 19 nt, Homo sapiens
  misc_RNA (1)...(19): siRNA sense strand
gaaucauauugcugaagaa

SEQ ID NO: 1715724 - RNA, 19 nt, Homo sapiens
  misc_RNA (1)...(19): siRNA sense strand
gacaaagaaggcaacagua

SEQ ID NO: 1715725 - RNA, 19 nt, Homo sapiens
  misc_RNA (1)...(19): siRNA sense strand
guaguuccaauuucucuuu

SEQ ID NO: 1715726 - RNA, 19 nt, Homo sapiens
  misc_RNA (1)...(19): siRNA sense strand
gauggaauugcaaguauug

SEQ ID NO: 1715727 - RNA, 19 nt, Homo sapiens
  misc_RNA (1)...(19): siRNA sense strand
uaauauuaguugcccagaa

SEQ ID NO: 1715728 - RNA, 19 nt, Homo sapiens
  misc_RNA (1)...(19): siRNA sense strand
ucauauugcugaagaacau

SEQ ID NO: 1715729 - RNA, 19 nt, Homo sapiens
  misc_RNA (1)...(19): siRNA sense strand
ugaaauguguacugauaag

SEQ ID NO: 1715730 - RNA, 19 nt, Homo sapiens
  misc_RNA (1)...(19): siRNA sense strand
auacguucuucauccauua

SEQ ID NO: 1715731 - RNA, 19 nt, Homo sapiens
  misc_RNA (1)...(19): siRNA sense strand
caucagacaauggaauuaa

SEQ ID NO: 1715732 - RNA, 19 nt, Homo sapiens
  misc_RNA (1)...(19): siRNA sense strand
caaauaacaaccacucaca

SEQ ID NO: 1715733 - RNA, 19 nt, Homo sapiens
  misc_RNA (1)...(19): siRNA sense strand
gaacaguuagugauaaugc

SEQ ID NO: 1715734 - RNA, 19 nt, Homo sapiens
  misc_RNA (1)...(19): siRNA sense strand
acaaagaaggcaacaguau

SEQ ID NO: 1715735 - RNA, 19 nt, Homo sapiens
  misc_RNA (1)...(19): siRNA sense strand
uaucacacccgcuuugcua

SEQ ID NO: 1715736 - RNA, 19 nt, Homo sapiens
  misc_RNA (1)...(19): siRNA sense strand
gaacaacaaagcacgaacu

SEQ ID NO: 1715737 - RNA, 19 nt, Homo sapiens
  misc_RNA (1)...(19): siRNA sense strand
ggaggugcaaguagauauu

SEQ ID NO: 1715738 - RNA, 19 nt, Homo sapiens
  misc_RNA (1)...(19): siRNA sense strand
agucaugguuccagugauu

SEQ ID NO: 1715739 - RNA, 19 nt, Homo sapiens
  misc_RNA (1)...(19): siRNA sense strand
ccacucacaucagacaaug

SEQ ID NO: 1715740 - RNA, 19 nt, Homo sapiens
  misc_RNA (1)...(19): siRNA sense strand
ggacauggaugcacaguug

SEQ ID NO: 1715741 - RNA, 19 nt, Homo sapiens
  misc_RNA (1)...(19): siRNA sense strand
aaagacagauuuccugaua

SEQ ID NO: 1715742 - RNA, 19 nt, Homo sapiens
  misc_RNA (1)...(19): siRNA sense strand
gcccagagcuuacguuuga

SEQ ID NO: 1715743 - RNA, 19 nt, Homo sapiens
  misc_RNA (1)...(19): siRNA sense strand
gcaaguagauauugaguca

SEQ ID NO: 1715744 - RNA, 19 nt, Homo sapiens
  misc_RNA (1)...(19): siRNA sense strand
uaacacagcuguagacaca

SEQ ID NO: 1715745 - RNA, 19 nt, Homo sapiens
  misc_RNA (1)...(19): siRNA sense strand
ccacaucaguguagcauuu

SEQ ID NO: 1715746 - RNA, 19 nt, Homo sapiens
  misc_RNA (1)...(19): siRNA sense strand
gagcuugccuucagucaaa

SEQ ID NO: 1715747 - RNA, 19 nt, Homo sapiens
  misc_RNA (1)...(19): siRNA sense strand
gaugaugucuugauggaaa

SEQ ID NO: 1715748 - RNA, 19 nt, Homo sapiens
  misc_RNA (1)...(19): siRNA sense strand
agacagauuuccugauaua

SEQ ID NO: 1715749 - RNA, 19 nt, Homo sapiens
  misc_RNA (1)...(19): siRNA sense strand
gcaaggauguuucaaagca

SEQ ID NO: 1715750 - RNA, 19 nt, Homo sapiens
  misc_RNA (1)...(19): siRNA sense strand
gcaaauggguucagaucga

SEQ ID NO: 1715751 - RNA, 19 nt, Homo sapiens
  misc_RNA (1)...(19): siRNA sense strand
ccacauggaucgaauagga

SEQ ID NO: 1715752 - RNA, 19 nt, Homo sapiens
  misc_RNA (1)...(19): siRNA sense strand
gaugggagcugcaaucaca

SEQ ID NO: 1715753 - RNA, 19 nt, Homo sapiens
  misc_RNA (1)...(19): siRNA sense strand
gguguaacguugucuguaa

SEQ ID NO: 1715754 - RNA, 19 nt, Homo sapiens
  misc_RNA (1)...(19): siRNA sense strand
ggauugaauuugaugauga

SEQ ID NO: 1715755 - RNA, 19 nt, Homo sapiens
  misc_RNA (1)...(19): siRNA sense strand
acaaauaccucuucugaca

SEQ ID NO: 1715756 - RNA, 19 nt, Homo sapiens
  misc_RNA (1)...(19): siRNA sense strand
aaagaacgguacagucuaa

SEQ ID NO: 1715757 - RNA, 19 nt, Homo sapiens
  misc_RNA (1)...(19): siRNA sense strand
gacccugucucaauucuaa

SEQ ID NO: 1715758 - RNA, 19 nt, Homo sapiens
  misc_RNA (1)...(19): siRNA sense strand
gaguuaggauugaauuuga

SEQ ID NO: 1715759 - RNA, 19 nt, Homo sapiens
  misc_RNA (1)...(19): siRNA sense strand
ucugaaauguguacugaua

SEQ ID NO: 1715760 - RNA, 19 nt, Homo sapiens
  misc_RNA (1)...(19): siRNA sense strand
ggauagaaaucucugaaag

SEQ ID NO: 1715761 - RNA, 19 nt, Homo sapiens
  misc_RNA (1)...(19): siRNA sense strand
gauauuaagugaugauguc

SEQ ID NO: 1715762 - RNA, 19 nt, Homo sapiens
  misc_RNA (1)...(19): siRNA sense strand
guucagaaguuucacaguu

SEQ ID NO: 1715763 - RNA, 19 nt, Homo sapiens
  misc_RNA (1)...(19): siRNA sense strand
acaagcagauguacagaaa

SEQ ID NO: 1715764 - RNA, 19 nt, Homo sapiens
  misc_RNA (1)...(19): siRNA sense strand
gcaaacaaauuggagacuu

SEQ ID NO: 1715765 - RNA, 19 nt, Homo sapiens
  misc_RNA (1)...(19): siRNA sense strand
ugaagaacaugguaacaau

SEQ ID NO: 1715766 - RNA, 19 nt, Homo sapiens
  misc_RNA (1)...(19): siRNA sense strand
caacaaagcacgaacucaa

SEQ ID NO: 1715767 - RNA, 19 nt, Homo sapiens
  misc_RNA (1)...(19): siRNA sense strand
gaagugccaugguaaacug

SEQ ID NO: 1715768 - RNA, 19 nt, Homo sapiens
  misc_RNA (1)...(19): siRNA sense strand
aaucgugucuccaguagua

SEQ ID NO: 1715769 - RNA, 19 nt, Homo sapiens
  misc_RNA (1)...(19): siRNA sense strand
ucaauaggcucccuguuuc

SEQ ID NO: 1715770 - RNA, 19 nt, Homo sapiens
  misc_RNA (1)...(19): siRNA sense strand
gaaagaacgguacagucua

SEQ ID NO: 1715771 - RNA, 19 nt, Homo sapiens
  misc_RNA (1)...(19): siRNA sense strand
caaacaaauuggagacuuc

SEQ ID NO: 1715772 - RNA, 19 nt, Homo sapiens
  misc_RNA (1)...(19): siRNA sense strand
uaacauucuuccugaggua

SEQ ID NO: 1715773 - RNA, 19 nt, Homo sapiens
  misc_RNA (1)...(19): siRNA sense strand
ucaaagccauccaaauuca

SEQ ID NO: 1715774 - RNA, 19 nt, Homo sapiens
  misc_RNA (1)...(19): siRNA sense strand
cagauuuccugauauaaug

SEQ ID NO: 1715775 - RNA, 19 nt, Homo sapiens
  misc_RNA (1)...(19): siRNA sense strand
ggacaaagaaggcaacagu

SEQ ID NO: 1715776 - RNA, 19 nt, Homo sapiens
  misc_RNA (1)...(19): siRNA sense strand
ggauggaauugcaaguauu

SEQ ID NO: 1715777 - RNA, 19 nt, Homo sapiens
  misc_RNA (1)...(19): siRNA sense strand
ugaaucauauugcugaaga

SEQ ID NO: 1715778 - RNA, 19 nt, Homo sapiens
  misc_RNA (1)...(19): siRNA sense strand
ggaauugcaaguauugaaa

SEQ ID NO: 1715779 - RNA, 19 nt, Homo sapiens
  misc_RNA (1)...(19): siRNA sense strand
cuacaaauaccucuucuga

SEQ ID NO: 1715780 - RNA, 19 nt, Homo sapiens
  misc_RNA (1)...(19): siRNA sense strand
gaucuuguguggauugcuu

SEQ ID NO: 1715781 - RNA, 19 nt, Homo sapiens
  misc_RNA (1)...(19): siRNA sense strand
gaacuaacacagcuguaga

SEQ ID NO: 1715782 - RNA, 19 nt, Homo sapiens
  misc_RNA (1)...(19): siRNA sense strand
gaaaaggaguuaggauuga

SEQ ID NO: 1715783 - RNA, 19 nt, Homo sapiens
  misc_RNA (1)...(19): siRNA sense strand
gaacaugguaacaauggaa

SEQ ID NO: 1715784 - RNA, 19 nt, Homo sapiens
  misc_RNA (1)...(19): siRNA sense strand
gauucucacucuagucauu

SEQ ID NO: 1715785 - RNA, 19 nt, Homo sapiens
  misc_RNA (1)...(19): siRNA sense strand
gaagggcuguguguaaaca

SEQ ID NO: 1715786 - RNA, 19 nt, Homo sapiens
  misc_RNA (1)...(19): siRNA sense strand
guauggaggugcaaguaga

SEQ ID NO: 1715787 - RNA, 19 nt, Homo sapiens
  misc_RNA (1)...(19): siRNA sense strand
cgagacaaccugagugaaa

SEQ ID NO: 1715788 - RNA, 19 nt, Homo sapiens
  misc_RNA (1)...(19): siRNA sense strand
acgaugugcugcuuauaua

SEQ ID NO: 1715789 - RNA, 19 nt, Homo sapiens
  misc_RNA (1)...(19): siRNA sense strand
agagagagcccagagcuua

SEQ ID NO: 1715790 - RNA, 19 nt, Homo sapiens
  misc_RNA (1)...(19): siRNA sense strand
agaauguacugaacgguuu

SEQ ID NO: 1715791 - RNA, 19 nt, Homo sapiens
  misc_RNA (1)...(19): siRNA sense strand
aagcagauguacagaaaga

SEQ ID NO: 1715792 - RNA, 19 nt, Homo sapiens
  misc_RNA (1)...(19): siRNA sense strand
ccaaacugcuuccuguuca

SEQ ID NO: 1715793 - RNA, 19 nt, Homo sapiens
  misc_RNA (1)...(19): siRNA sense strand
gaucuucaguccucugcuu

SEQ ID NO: 1715794 - RNA, 19 nt, Homo sapiens
  misc_RNA (1)...(19): siRNA sense strand
gagcugcaaucacaugaca

SEQ ID NO: 1715795 - RNA, 19 nt, Homo sapiens
  misc_RNA (1)...(19): siRNA sense strand
gaaaaugaccgucuggaaa

SEQ ID NO: 1715796 - RNA, 19 nt, Homo sapiens
  misc_RNA (1)...(19): siRNA sense strand
ggaguuaggauugaauuug

SEQ ID NO: 1715797 - RNA, 19 nt, Homo sapiens
  misc_RNA (1)...(19): siRNA sense strand
agucaaagccauccaaauu

SEQ ID NO: 1715798 - RNA, 19 nt, Homo sapiens
  misc_RNA (1)...(19): siRNA sense strand
gggaacaguuagugauaau

SEQ ID NO: 1715799 - RNA, 19 nt, Homo sapiens
  misc_RNA (1)...(19): siRNA sense strand
ggccauagcagguggugua

SEQ ID NO: 1715800 - RNA, 19 nt, Homo sapiens
  misc_RNA (1)...(19): siRNA sense strand
gaagccacauggaucgaau

SEQ ID NO: 1715801 - RNA, 19 nt, Homo sapiens
  misc_RNA (1)...(19): siRNA sense strand
cggaaucgcuuuaauagcu

SEQ ID NO: 1715802 - RNA, 19 nt, Homo sapiens
  misc_RNA (1)...(19): siRNA sense strand
caaagaaggcaacaguaug

SEQ ID NO: 1715803 - RNA, 19 nt, Homo sapiens
  misc_RNA (1)...(19): siRNA sense strand
gaacgguacagucuaagug

SEQ ID NO: 1715804 - RNA, 19 nt, Homo sapiens
  misc_RNA (1)...(19): siRNA sense strand
gucaggaagugccauggua

SEQ ID NO: 1715805 - RNA, 19 nt, Homo sapiens
  misc_RNA (1)...(19): siRNA sense strand
cgacaauauuuaaggauag

SEQ ID NO: 1715806 - RNA, 19 nt, Homo sapiens
  misc_RNA (1)...(19): siRNA sense strand
gaagaacaugguaacaaug

SEQ ID NO: 1715807 - RNA, 19 nt, Homo sapiens
  misc_RNA (1)...(19): siRNA sense strand
gcaagaacaagaaauaggu

SEQ ID NO: 1715808 - RNA, 19 nt, Homo sapiens
  misc_RNA (1)...(19): siRNA sense strand
gguaucgguguuccuauua

SEQ ID NO: 1715809 - RNA, 19 nt, Homo sapiens
  misc_RNA (1)...(19): siRNA sense strand
gugaugaugucuugaugga

SEQ ID NO: 1715810 - RNA, 19 nt, Homo sapiens
  misc_RNA (1)...(19): siRNA sense strand
aauauuaguugcccagaau

SEQ ID NO: 1715811 - RNA, 19 nt, Homo sapiens
  misc_RNA (1)...(19): siRNA sense strand
ggaauaaaaccuaauguug

SEQ ID NO: 1715812 - RNA, 19 nt, Homo sapiens
  misc_RNA (1)...(19): siRNA sense strand
gaguuuacaucggcaaaug

SEQ ID NO: 1715813 - RNA, 19 nt, Homo sapiens
  misc_RNA (1)...(19): siRNA sense strand
gaauguacugaacgguuua

SEQ ID NO: 1715814 - RNA, 19 nt, Homo sapiens
  misc_RNA (1)...(19): siRNA sense strand
aaauaccucuucugacaau

SEQ ID NO: 1715815 - RNA, 19 nt, Homo sapiens
  misc_RNA (1)...(19): siRNA sense strand
guaaaucaagggagcuaaa

SEQ ID NO: 1715816 - RNA, 19 nt, Homo sapiens
  misc_RNA (1)...(19): siRNA sense strand
ucagaaguuucacaguuga

SEQ ID NO: 1715817 - RNA, 19 nt, Homo sapiens
  misc_RNA (1)...(19): siRNA sense strand
guaaucgugucuccaguag

SEQ ID NO: 1715818 - RNA, 19 nt, Homo sapiens
  misc_RNA (1)...(19): siRNA sense strand
gcuauuccugcaaugauua

SEQ ID NO: 1715819 - RNA, 19 nt, Homo sapiens
  misc_RNA (1)...(19): siRNA sense strand
guucuucauccauuaguua

SEQ ID NO: 1715820 - RNA, 19 nt, Homo sapiens
  misc_RNA (1)...(19): siRNA sense strand
gcagaguuaauauuaguug

SEQ ID NO: 1715821 - RNA, 19 nt, Homo sapiens
  misc_RNA (1)...(19): siRNA sense strand
uaacuuccaucagcaaaca

SEQ ID NO: 1715822 - RNA, 19 nt, Homo sapiens
  misc_RNA (1)...(19): siRNA sense strand
acaaauuggagacuucaua

SEQ ID NO: 1715823 - RNA, 19 nt, Homo sapiens
  misc_RNA (1)...(19): siRNA sense strand
gaaucauauugcugaagaa

SEQ ID NO: 1715824 - RNA, 19 nt, Homo sapiens
  misc_RNA (1)...(19): siRNA sense strand
gacaaagaaggcaacagua

SEQ ID NO: 1715825 - RNA, 19 nt, Homo sapiens
  misc_RNA (1)...(19): siRNA sense strand
guaguuccaauuucucuuu

SEQ ID NO: 1715826 - RNA, 19 nt, Homo sapiens
  misc_RNA (1)...(19): siRNA sense strand
gauggaauugcaaguauug

SEQ ID NO: 1715827 - RNA, 19 nt, Homo sapiens
  misc_RNA (1)...(19): siRNA sense strand
uaauauuaguugcccagaa

SEQ ID NO: 1715828 - RNA, 19 nt, Homo sapiens
  misc_RNA (1)...(19): siRNA sense strand
ucauauugcugaagaacau

SEQ ID NO: 1715829 - RNA, 19 nt, Homo sapiens
  misc_RNA (1)...(19): siRNA sense strand
ugaaauguguacugauaag

SEQ ID NO: 1715830 - RNA, 19 nt, Homo sapiens
  misc_RNA (1)...(19): siRNA sense strand
auacguucuucauccauua

SEQ ID NO: 1715831 - RNA, 19 nt, Homo sapiens
  misc_RNA (1)...(19): siRNA sense strand
caucagacaauggaauuaa

SEQ ID NO: 1715832 - RNA, 19 nt, Homo sapiens
  misc_RNA (1)...(19): siRNA sense strand
caaauaacaaccacucaca

SEQ ID NO: 1715833 - RNA, 19 nt, Homo sapiens
  misc_RNA (1)...(19): siRNA sense strand
gaacaguuagugauaaugc

SEQ ID NO: 1715834 - RNA, 19 nt, Homo sapiens
  misc_RNA (1)...(19): siRNA sense strand
acaaagaaggcaacaguau

SEQ ID NO: 1715835 - RNA, 19 nt, Homo sapiens
  misc_RNA (1)...(19): siRNA sense strand
uaucacacccgcuuugcua

SEQ ID NO: 1715836 - RNA, 19 nt, Homo sapiens
  misc_RNA (1)...(19): siRNA sense strand
gaacaacaaagcacgaacu

SEQ ID NO: 1715837 - RNA, 19 nt, Homo sapiens
  misc_RNA (1)...(19): siRNA sense strand
ggaggugcaaguagauauu

SEQ ID NO: 1715838 - RNA, 19 nt, Homo sapiens
  misc_RNA (1)...(19): siRNA sense strand
agucaugguuccagugauu

SEQ ID NO: 1715839 - RNA, 19 nt, Homo sapiens
  misc_RNA (1)...(19): siRNA sense strand
ccacucacaucagacaaug

SEQ ID NO: 1715840 - RNA, 19 nt, Homo sapiens
  misc_RNA (1)...(19): siRNA sense strand
ggacauggaugcacaguug

SEQ ID NO: 1715841 - RNA, 19 nt, Homo sapiens
  misc_RNA (1)...(19): siRNA sense strand
aaagacagauuuccugaua

SEQ ID NO: 1715842 - RNA, 19 nt, Homo sapiens
  misc_RNA (1)...(19): siRNA sense strand
gcccagagcuuacguuuga

SEQ ID NO: 1715843 - RNA, 19 nt, Homo sapiens
  misc_RNA (1)...(19): siRNA sense strand
gcaaguagauauugaguca

SEQ ID NO: 1715844 - RNA, 19 nt, Homo sapiens
  misc_RNA (1)...(19): siRNA sense strand
uaacacagcuguagacaca

SEQ ID NO: 1715845 - RNA, 19 nt, Homo sapiens
  misc_RNA (1)...(19): siRNA sense strand
ccacaucaguguagcauuu

SEQ ID NO: 1715846 - RNA, 19 nt, Homo sapiens
  misc_RNA (1)...(19): siRNA sense strand
gagcuugccuucagucaaa

SEQ ID NO: 1715847 - RNA, 19 nt, Homo sapiens
  misc_RNA (1)...(19): siRNA sense strand
gaugaugucuugauggaaa

SEQ ID NO: 1715848 - RNA, 19 nt, Homo sapiens
  misc_RNA (1)...(19): siRNA sense strand
agacagauuuccugauaua

SEQ ID NO: 1715849 - RNA, 19 nt, Homo sapiens
  misc_RNA (1)...(19): siRNA sense strand
gcaaggauguuucaaagca

SEQ ID NO: 1715850 - RNA, 19 nt, Homo sapiens
  misc_RNA (1)...(19): siRNA sense strand
gcaaauggguucagaucga

SEQ ID NO: 1715851 - RNA, 19 nt, Homo sapiens
  misc_RNA (1)...(19): siRNA sense strand
ccacauggaucgaauagga

SEQ ID NO: 1715852 - RNA, 19 nt, Homo sapiens
  misc_RNA (1)...(19): siRNA sense strand
gaugggagcugcaaucaca

SEQ ID NO: 1715853 - RNA, 19 nt, Homo sapiens
  misc_RNA (1)...(19): siRNA sense strand
gguguaacguugucuguaa

SEQ ID NO: 1715854 - RNA, 19 nt, Homo sapiens
  misc_RNA (1)...(19): siRNA sense strand
ggauugaauuugaugauga

SEQ ID NO: 1715855 - RNA, 19 nt, Homo sapiens
  misc_RNA (1)...(19): siRNA sense strand
acaaauaccucuucugaca

SEQ ID NO: 1715856 - RNA, 19 nt, Homo sapiens
  misc_RNA (1)...(19): siRNA sense strand
aaagaacgguacagucuaa

SEQ ID NO: 1715857 - RNA, 19 nt, Homo sapiens
  misc_RNA (1)...(19): siRNA sense strand
gacccugucucaauucuaa

SEQ ID NO: 1715858 - RNA, 19 nt, Homo sapiens
  misc_RNA (1)...(19): siRNA sense strand
gaguuaggauugaauuuga

SEQ ID NO: 1715859 - RNA, 19 nt, Homo sapiens
  misc_RNA (1)...(19): siRNA sense strand
ucugaaauguguacugaua

SEQ ID NO: 1715860 - RNA, 19 nt, Homo sapiens
  misc_RNA (1)...(19): siRNA sense strand
ggauagaaaucucugaaag

SEQ ID NO: 1715861 - RNA, 19 nt, Homo sapiens
  misc_RNA (1)...(19): siRNA sense strand
gauauuaagugaugauguc

SEQ ID NO: 1715862 - RNA, 19 nt, Homo sapiens
  misc_RNA (1)...(19): siRNA sense strand
guucagaaguuucacaguu

SEQ ID NO: 1715863 - RNA, 19 nt, Homo sapiens
  misc_RNA (1)...(19): siRNA sense strand
acaagcagauguacagaaa

SEQ ID NO: 1715864 - RNA, 19 nt, Homo sapiens
  misc_RNA (1)...(19): siRNA sense strand
gcaaacaaauuggagacuu

SEQ ID NO: 1715865 - RNA, 19 nt, Homo sapiens
  misc_RNA (1)...(19): siRNA sense strand
ugaagaacaugguaacaau

SEQ ID NO: 1715866 - RNA, 19 nt, Homo sapiens
  misc_RNA (1)...(19): siRNA sense strand
caacaaagcacgaacucaa

SEQ ID NO: 1715867 - RNA, 19 nt, Homo sapiens
  misc_RNA (1)...(19): siRNA sense strand
gaagugccaugguaaacug

SEQ ID NO: 1715868 - RNA, 19 nt, Homo sapiens
  misc_RNA (1)...(19): siRNA sense strand
aaucgugucuccaguagua

SEQ ID NO: 1715869 - RNA, 19 nt, Homo sapiens
  misc_RNA (1)...(19): siRNA sense strand
ucaauaggcucccuguuuc

SEQ ID NO: 1715870 - RNA, 19 nt, Homo sapiens
  misc_RNA (1)...(19): siRNA sense strand
gaaagaacgguacagucua

SEQ ID NO: 1715871 - RNA, 19 nt, Homo sapiens
  misc_RNA (1)...(19): siRNA sense strand
caaacaaauuggagacuuc

SEQ ID NO: 1715872 - RNA, 19 nt, Homo sapiens
  misc_RNA (1)...(19): siRNA sense strand
uaacauucuuccugaggua

SEQ ID NO: 1715873 - RNA, 19 nt, Homo sapiens
  misc_RNA (1)...(19): siRNA sense strand
ucaaagccauccaaauuca

SEQ ID NO: 1715874 - RNA, 19 nt, Homo sapiens
  misc_RNA (1)...(19): siRNA sense strand
cagauuuccugauauaaug

SEQ ID NO: 1715875 - RNA, 19 nt, Homo sapiens
  misc_RNA (1)...(19): siRNA sense strand
ggacaaagaaggcaacagu

SEQ ID NO: 1715876 - RNA, 19 nt, Homo sapiens
  misc_RNA (1)...(19): siRNA sense strand
ggauggaauugcaaguauu

SEQ ID NO: 1715877 - RNA, 19 nt, Homo sapiens
  misc_RNA (1)...(19): siRNA sense strand
ugaaucauauugcugaaga

SEQ ID NO: 1715878 - RNA, 19 nt, Homo sapiens
  misc_RNA (1)...(19): siRNA sense strand
ggaauugcaaguauugaaa

SEQ ID NO: 1715879 - RNA, 19 nt, Homo sapiens
  misc_RNA (1)...(19): siRNA sense strand
cuacaaauaccucuucuga

SEQ ID NO: 1715880 - RNA, 19 nt, Homo sapiens
  misc_RNA (1)...(19): siRNA sense strand
gaucuuguguggauugcuu

SEQ ID NO: 1715881 - RNA, 19 nt, Homo sapiens
  misc_RNA (1)...(19): siRNA sense strand
gaacuaacacagcuguaga

SEQ ID NO: 1715882 - RNA, 19 nt, Homo sapiens
  misc_RNA (1)...(19): siRNA sense strand
gaaaaggaguuaggauuga

SEQ ID NO: 1715883 - RNA, 19 nt, Homo sapiens
  misc_RNA (1)...(19): siRNA sense strand
gaacaugguaacaauggaa

SEQ ID NO: 1715884 - RNA, 19 nt, Homo sapiens
  misc_RNA (1)...(19): siRNA sense strand
gauucucacucuagucauu

SEQ ID NO: 1715885 - RNA, 19 nt, Homo sapiens
  misc_RNA (1)...(19): siRNA sense strand
gaagggcuguguguaaaca

SEQ ID NO: 1715886 - RNA, 19 nt, Homo sapiens
  misc_RNA (1)...(19): siRNA sense strand
guauggaggugcaaguaga

SEQ ID NO: 1715887 - RNA, 19 nt, Homo sapiens
  misc_RNA (1)...(19): siRNA sense strand
cgagacaaccugagugaaa

SEQ ID NO: 1715888 - RNA, 19 nt, Homo sapiens
  misc_RNA (1)...(19): siRNA sense strand
acgaugugcugcuuauaua

SEQ ID NO: 1715889 - RNA, 19 nt, Homo sapiens
  misc_RNA (1)...(19): siRNA sense strand
agagagagcccagagcuua

SEQ ID NO: 1715890 - RNA, 19 nt, Homo sapiens
  misc_RNA (1)...(19): siRNA sense strand
agaauguacugaacgguuu

SEQ ID NO: 1715891 - RNA, 19 nt, Homo sapiens
  misc_RNA (1)...(19): siRNA sense strand
aagcagauguacagaaaga

SEQ ID NO: 1715892 - RNA, 19 nt, Homo sapiens
  misc_RNA (1)...(19): siRNA sense strand
ccaaacugcuuccuguuca

SEQ ID NO: 1715893 - RNA, 19 nt, Homo sapiens
  misc_RNA (1)...(19): siRNA sense strand
gaucuucaguccucugcuu

SEQ ID NO: 1715894 - RNA, 19 nt, Homo sapiens
  misc_RNA (1)...(19): siRNA sense strand
gagcugcaaucacaugaca

SEQ ID NO: 1715895 - RNA, 19 nt, Homo sapiens
  misc_RNA (1)...(19): siRNA sense strand
gaaaaugaccgucuggaaa

SEQ ID NO: 1715896 - RNA, 19 nt, Homo sapiens
  misc_RNA (1)...(19): siRNA sense strand
ggaguuaggauugaauuug

SEQ ID NO: 1715897 - RNA, 19 nt, Homo sapiens
  misc_RNA (1)...(19): siRNA sense strand
agucaaagccauccaaauu

SEQ ID NO: 1715898 - RNA, 19 nt, Homo sapiens
  misc_RNA (1)...(19): siRNA sense strand
gggaacaguuagugauaau

SEQ ID NO: 1715899 - RNA, 19 nt, Homo sapiens
  misc_RNA (1)...(19): siRNA sense strand
ggccauagcagguggugua

SEQ ID NO: 1715900 - RNA, 19 nt, Homo sapiens
  misc_RNA (1)...(19): siRNA sense strand
gaagccacauggaucgaau

SEQ ID NO: 1715901 - RNA, 19 nt, Homo sapiens
  misc_RNA (1)...(19): siRNA sense strand
cggaaucgcuuuaauagcu

SEQ ID NO: 1715902 - RNA, 19 nt, Homo sapiens
  misc_RNA (1)...(19): siRNA sense strand
caaagaaggcaacaguaug

SEQ ID NO: 1715903 - RNA, 19 nt, Homo sapiens
  misc_RNA (1)...(19): siRNA sense strand
gaacgguacagucuaagug

SEQ ID NO: 1715904 - RNA, 19 nt, Homo sapiens
  misc_RNA (1)...(19): siRNA sense strand
gucaggaagugccauggua

SEQ ID NO: 1715905 - RNA, 19 nt, Homo sapiens
  misc_RNA (1)...(19): siRNA sense strand
cgacaauauuuaaggauag

SEQ ID NO: 1715906 - RNA, 19 nt, Homo sapiens
  misc_RNA (1)...(19): siRNA sense strand
gaagaacaugguaacaaug

SEQ ID NO: 1715907 - RNA, 19 nt, Homo sapiens
  misc_RNA (1)...(19): siRNA sense strand
gcaagaacaagaaauaggu

SEQ ID NO: 1715908 - RNA, 19 nt, Homo sapiens
  misc_RNA (1)...(19): siRNA sense strand
gguaucgguguuccuauua

SEQ ID NO: 1715909 - RNA, 19 nt, Homo sapiens
  misc_RNA (1)...(19): siRNA sense strand
gugaugaugucuugaugga

SEQ ID NO: 1715910 - RNA, 19 nt, Homo sapiens
  misc_RNA (1)...(19): siRNA sense strand
aauauuaguugcccagaau

SEQ ID NO: 1715911 - RNA, 19 nt, Homo sapiens
  misc_RNA (1)...(19): siRNA sense strand
ggaauaaaaccuaauguug

SEQ ID NO: 1715912 - RNA, 19 nt, Homo sapiens
  misc_RNA (1)...(19): siRNA sense strand
gaguuuacaucggcaaaug

SEQ ID NO: 1715913 - RNA, 19 nt, Homo sapiens
  misc_RNA (1)...(19): siRNA sense strand
gaauguacugaacgguuua

SEQ ID NO: 1715914 - RNA, 19 nt, Homo sapiens
  misc_RNA (1)...(19): siRNA sense strand
aaauaccucuucugacaau

SEQ ID NO: 1715915 - RNA, 19 nt, Homo sapiens
  misc_RNA (1)...(19): siRNA sense strand
guaaaucaagggagcuaaa

SEQ ID NO: 1715916 - RNA, 19 nt, Homo sapiens
  misc_RNA (1)...(19): siRNA sense strand
ucagaaguuucacaguuga

SEQ ID NO: 1715917 - RNA, 19 nt, Homo sapiens
  misc_RNA (1)...(19): siRNA sense strand
guaaucgugucuccaguag

SEQ ID NO: 1715918 - RNA, 19 nt, Homo sapiens
  misc_RNA (1)...(19): siRNA sense strand
gcuauuccugcaaugauua

SEQ ID NO: 1715919 - RNA, 19 nt, Homo sapiens
  misc_RNA (1)...(19): siRNA sense strand
guucuucauccauuaguua

SEQ ID NO: 1715920 - RNA, 19 nt, Homo sapiens
  misc_RNA (1)...(19): siRNA sense strand
gcagaguuaauauuaguug

SEQ ID NO: 1715921 - RNA, 19 nt, Homo sapiens
  misc_RNA (1)...(19): siRNA sense strand
uaacuuccaucagcaaaca

SEQ ID NO: 1715922 - RNA, 19 nt, Homo sapiens
  misc_RNA (1)...(19): siRNA sense strand
acaaauuggagacuucaua

SEQ ID NO: 1715923 - RNA, 19 nt, Homo sapiens
  misc_RNA (1)...(19): siRNA sense strand
gaaucauauugcugaagaa

SEQ ID NO: 1715924 - RNA, 19 nt, Homo sapiens
  misc_RNA (1)...(19): siRNA sense strand
gacaaagaaggcaacagua

SEQ ID NO: 1715925 - RNA, 19 nt, Homo sapiens
  misc_RNA (1)...(19): siRNA sense strand
guaguuccaauuucucuuu

SEQ ID NO: 1715926 - RNA, 19 nt, Homo sapiens
  misc_RNA (1)...(19): siRNA sense strand
gauggaauugcaaguauug

SEQ ID NO: 1715927 - RNA, 19 nt, Homo sapiens
  misc_RNA (1)...(19): siRNA sense strand
uaauauuaguugcccagaa

SEQ ID NO: 1715928 - RNA, 19 nt, Homo sapiens
  misc_RNA (1)...(19): siRNA sense strand
ucauauugcugaagaacau

SEQ ID NO: 1715929 - RNA, 19 nt, Homo sapiens
  misc_RNA (1)...(19): siRNA sense strand
ugaaauguguacugauaag

SEQ ID NO: 1715930 - RNA, 19 nt, Homo sapiens
  misc_RNA (1)...(19): siRNA sense strand
auacguucuucauccauua

SEQ ID NO: 1715931 - RNA, 19 nt, Homo sapiens
  misc_RNA (1)...(19): siRNA sense strand
caucagacaauggaauuaa

SEQ ID NO: 1715932 - RNA, 19 nt, Homo sapiens
  misc_RNA (1)...(19): siRNA sense strand
caaauaacaaccacucaca

SEQ ID NO: 1715933 - RNA, 19 nt, Homo sapiens
  misc_RNA (1)...(19): siRNA sense strand
gaacaguuagugauaaugc

SEQ ID NO: 1715934 - RNA, 19 nt, Homo sapiens
  misc_RNA (1)...(19): siRNA sense strand
acaaagaaggcaacaguau

SEQ ID NO: 1715935 - RNA, 19 nt, Homo sapiens
  misc_RNA (1)...(19): siRNA sense strand
uaucacacccgcuuugcua

SEQ ID NO: 1715936 - RNA, 19 nt, Homo sapiens
  misc_RNA (1)...(19): siRNA sense strand
gaacaacaaagcacgaacu

SEQ ID NO: 1715937 - RNA, 19 nt, Homo sapiens
  misc_RNA (1)...(19): siRNA sense strand
ggaggugcaaguagauauu

SEQ ID NO: 1715938 - RNA, 19 nt, Homo sapiens
  misc_RNA (1)...(19): siRNA sense strand
agucaugguuccagugauu

SEQ ID NO: 1715939 - RNA, 19 nt, Homo sapiens
  misc_RNA (1)...(19): siRNA sense strand
ccacucacaucagacaaug

SEQ ID NO: 1715940 - RNA, 19 nt, Homo sapiens
  misc_RNA (1)...(19): siRNA sense strand
cagagaaacugguagcuuu

SEQ ID NO: 1715941 - RNA, 19 nt, Homo sapiens
  misc_RNA (1)...(19): siRNA sense strand
acugguagcuuucuuguuu

SEQ ID NO: 1715942 - RNA, 19 nt, Homo sapiens
  misc_RNA (1)...(19): siRNA sense strand
gaugucagcuggcauaguc

SEQ ID NO: 1715943 - RNA, 19 nt, Homo sapiens
  misc_RNA (1)...(19): siRNA sense strand
ggacacagagaaacuggua

SEQ ID NO: 1715944 - RNA, 19 nt, Homo sapiens
  misc_RNA (1)...(19): siRNA sense strand
gcagaugucagcuggcaua

SEQ ID NO: 1715945 - RNA, 19 nt, Homo sapiens
  misc_RNA (1)...(19): siRNA sense strand
ggagaaggacacagagaaa

SEQ ID NO: 1715946 - RNA, 19 nt, Homo sapiens
  misc_RNA (1)...(19): siRNA sense strand
guagcuuucuuguuuggaa

SEQ ID NO: 1715947 - RNA, 19 nt, Homo sapiens
  misc_RNA (1)...(19): siRNA sense strand
caugggagcuauugauuuu

SEQ ID NO: 1715948 - RNA, 19 nt, Homo sapiens
  misc_RNA (1)...(19): siRNA sense strand
uggaauuacuucucacaug

SEQ ID NO: 1715949 - RNA, 19 nt, Homo sapiens
  misc_RNA (1)...(19): siRNA sense strand
gggagaaggacacagagaa

SEQ ID NO: 1715950 - RNA, 19 nt, Homo sapiens
  misc_RNA (1)...(19): siRNA sense strand
ucacuggacuccguuucuu

SEQ ID NO: 1715951 - RNA, 19 nt, Homo sapiens
  misc_RNA (1)...(19): siRNA sense strand
gcuuucuuguuuggaauua

SEQ ID NO: 1715952 - RNA, 19 nt, Homo sapiens
  misc_RNA (1)...(19): siRNA sense strand
ggcauagucugggccuuga

SEQ ID NO: 1715953 - RNA, 19 nt, Homo sapiens
  misc_RNA (1)...(19): siRNA sense strand
ccaugggagcuauugauuu

SEQ ID NO: 1715954 - RNA, 19 nt, Homo sapiens
  misc_RNA (1)...(19): siRNA sense strand
gaaggacacagagaaacug

SEQ ID NO: 1715955 - RNA, 19 nt, Homo sapiens
  misc_RNA (1)...(19): siRNA sense strand
gaccaugggagcuauugau

SEQ ID NO: 1715956 - RNA, 19 nt, Homo sapiens
  misc_RNA (1)...(19): siRNA sense strand
agagagcuguuacuagaac

SEQ ID NO: 1715957 - RNA, 19 nt, Homo sapiens
  misc_RNA (1)...(19): siRNA sense strand
ucauucggcuggugauuuu

SEQ ID NO: 1715958 - RNA, 19 nt, Homo sapiens
  misc_RNA (1)...(19): siRNA sense strand
ggaccaugggagcuauuga

SEQ ID NO: 1715959 - RNA, 19 nt, Homo sapiens
  misc_RNA (1)...(19): siRNA sense strand
cacuggacuccguuucuua

SEQ ID NO: 1715960 - RNA, 19 nt, Homo sapiens
  misc_RNA (1)...(19): siRNA sense strand
gagaaggacacagagaaac

SEQ ID NO: 1715961 - RNA, 19 nt, Homo sapiens
  misc_RNA (1)...(19): siRNA sense strand
uguuuggaauuacuucuca

SEQ ID NO: 1715962 - RNA, 19 nt, Homo sapiens
  misc_RNA (1)...(19): siRNA sense strand
aaacugguagcuuucuugu

SEQ ID NO: 1715963 - RNA, 19 nt, Homo sapiens
  misc_RNA (1)...(19): siRNA sense strand
cagagagcuguuacuagaa

SEQ ID NO: 1715964 - RNA, 19 nt, Homo sapiens
  misc_RNA (1)...(19): siRNA sense strand
cagagaaacugguagcuuu

SEQ ID NO: 1715965 - RNA, 19 nt, Homo sapiens
  misc_RNA (1)...(19): siRNA sense strand
acugguagcuuucuuguuu

SEQ ID NO: 1715966 - RNA, 19 nt, Homo sapiens
  misc_RNA (1)...(19): siRNA sense strand
gaugucagcuggcauaguc

SEQ ID NO: 1715967 - RNA, 19 nt, Homo sapiens
  misc_RNA (1)...(19): siRNA sense strand
ggacacagagaaacuggua

SEQ ID NO: 1715968 - RNA, 19 nt, Homo sapiens
  misc_RNA (1)...(19): siRNA sense strand
gcagaugucagcuggcaua

SEQ ID NO: 1715969 - RNA, 19 nt, Homo sapiens
  misc_RNA (1)...(19): siRNA sense strand
ggagaaggacacagagaaa

SEQ ID NO: 1715970 - RNA, 19 nt, Homo sapiens
  misc_RNA (1)...(19): siRNA sense strand
guagcuuucuuguuuggaa

SEQ ID NO: 1715971 - RNA, 19 nt, Homo sapiens
  misc_RNA (1)...(19): siRNA sense strand
caugggagcuauugauuuu

SEQ ID NO: 1715972 - RNA, 19 nt, Homo sapiens
  misc_RNA (1)...(19): siRNA sense strand
uggaauuacuucucacaug

SEQ ID NO: 1715973 - RNA, 19 nt, Homo sapiens
  misc_RNA (1)...(19): siRNA sense strand
gggagaaggacacagagaa

SEQ ID NO: 1715974 - RNA, 19 nt, Homo sapiens
  misc_RNA (1)...(19): siRNA sense strand
ucacuggacuccguuucuu

SEQ ID NO: 1715975 - RNA, 19 nt, Homo sapiens
  misc_RNA (1)...(19): siRNA sense strand
gcuuucuuguuuggaauua

SEQ ID NO: 1715976 - RNA, 19 nt, Homo sapiens
  misc_RNA (1)...(19): siRNA sense strand
ggcauagucugggccuuga

SEQ ID NO: 1715977 - RNA, 19 nt, Homo sapiens
  misc_RNA (1)...(19): siRNA sense strand
ccaugggagcuauugauuu

SEQ ID NO: 1715978 - RNA, 19 nt, Homo sapiens
  misc_RNA (1)...(19): siRNA sense strand
gaaggacacagagaaacug

SEQ ID NO: 1715979 - RNA, 19 nt, Homo sapiens
  misc_RNA (1)...(19): siRNA sense strand
gaccaugggagcuauugau

SEQ ID NO: 1715980 - RNA, 19 nt, Homo sapiens
  misc_RNA (1)...(19): siRNA sense strand
agagagcuguuacuagaac

SEQ ID NO: 1715981 - RNA, 19 nt, Homo sapiens
  misc_RNA (1)...(19): siRNA sense strand
ucauucggcuggugauuuu

SEQ ID NO: 1715982 - RNA, 19 nt, Homo sapiens
  misc_RNA (1)...(19): siRNA sense strand
ggaccaugggagcuauuga

SEQ ID NO: 1715983 - RNA, 19 nt, Homo sapiens
  misc_RNA (1)...(19): siRNA sense strand
cacuggacuccguuucuua

SEQ ID NO: 1715984 - RNA, 19 nt, Homo sapiens
  misc_RNA (1)...(19): siRNA sense strand
gagaaggacacagagaaac

SEQ ID NO: 1715985 - RNA, 19 nt, Homo sapiens
  misc_RNA (1)...(19): siRNA sense strand
uguuuggaauuacuucuca

SEQ ID NO: 1715986 - RNA, 19 nt, Homo sapiens
  misc_RNA (1)...(19): siRNA sense strand
aaacugguagcuuucuugu

SEQ ID NO: 1715987 - RNA, 19 nt, Homo sapiens
  misc_RNA (1)...(19): siRNA sense strand
cagagagcuguuacuagaa

SEQ ID NO: 1715988 - RNA, 19 nt, Homo sapiens
  misc_RNA (1)...(19): siRNA sense strand
ggaaacaucuugaccaucu

SEQ ID NO: 1715989 - RNA, 19 nt, Homo sapiens
  misc_RNA (1)...(19): siRNA sense strand
gaacuccacuuugacaauu

SEQ ID NO: 1715990 - RNA, 19 nt, Homo sapiens
  misc_RNA (1)...(19): siRNA sense strand
gcagucagcuccucuguca

SEQ ID NO: 1715991 - RNA, 19 nt, Homo sapiens
  misc_RNA (1)...(19): siRNA sense strand
gcuacuaacuucccacuga

SEQ ID NO: 1715992 - RNA, 19 nt, Homo sapiens
  misc_RNA (1)...(19): siRNA sense strand
gaggagaucuggaagaaag

SEQ ID NO: 1715993 - RNA, 19 nt, Homo sapiens
  misc_RNA (1)...(19): siRNA sense strand
gagaagcacuccacaaugc

SEQ ID NO: 1715994 - RNA, 19 nt, Homo sapiens
  misc_RNA (1)...(19): siRNA sense strand
gcaaugggccuuccucuuc

SEQ ID NO: 1715995 - RNA, 19 nt, Homo sapiens
  misc_RNA (1)...(19): siRNA sense strand
aagcgaccaugcacuauua

SEQ ID NO: 1715996 - RNA, 19 nt, Homo sapiens
  misc_RNA (1)...(19): siRNA sense strand
gcgcaagacuggccaaaca

SEQ ID NO: 1715997 - RNA, 19 nt, Homo sapiens
  misc_RNA (1)...(19): siRNA sense strand
gcagaagaguggaaacauc

SEQ ID NO: 1715998 - RNA, 19 nt, Homo sapiens
  misc_RNA (1)...(19): siRNA sense strand
gagaguugcuggaauugug

SEQ ID NO: 1715999 - RNA, 19 nt, Homo sapiens
  misc_RNA (1)...(19): siRNA sense strand
gaggcgaacuccagacaga

SEQ ID NO: 1716000 - RNA, 19 nt, Homo sapiens
  misc_RNA (1)...(19): siRNA sense strand
gaagcaccaucacaucugu

SEQ ID NO: 1716001 - RNA, 19 nt, Homo sapiens
  misc_RNA (1)...(19): siRNA sense strand
caacagagagggccaagau

SEQ ID NO: 1716002 - RNA, 19 nt, Homo sapiens
  misc_RNA (1)...(19): siRNA sense strand
gcggaaagcccacgacaug

SEQ ID NO: 1716003 - RNA, 19 nt, Homo sapiens
  misc_RNA (1)...(19): siRNA sense strand
cgacaacguuaacuaaugg

SEQ ID NO: 1716004 - RNA, 19 nt, Homo sapiens
  misc_RNA (1)...(19): siRNA sense strand
gaucacagacuaacagaca

SEQ ID NO: 1716005 - RNA, 19 nt, Homo sapiens
  misc_RNA (1)...(19): siRNA sense strand
cccaauggcuucagcaaug

SEQ ID NO: 1716006 - RNA, 19 nt, Homo sapiens
  misc_RNA (1)...(19): siRNA sense strand
ggacagaaacagaccuaug

SEQ ID NO: 1716007 - RNA, 19 nt, Homo sapiens
  misc_RNA (1)...(19): siRNA sense strand
gcacaaagacugggagaag

SEQ ID NO: 1716008 - RNA, 19 nt, Homo sapiens
  misc_RNA (1)...(19): siRNA sense strand
ccgauacuguggcucauuu

SEQ ID NO: 1716009 - RNA, 19 nt, Homo sapiens
  misc_RNA (1)...(19): siRNA sense strand
cgagauaggagaaagaguu

SEQ ID NO: 1716010 - RNA, 19 nt, Homo sapiens
  misc_RNA (1)...(19): siRNA sense strand
ugacauuucacccgagaua

SEQ ID NO: 1716011 - RNA, 19 nt, Homo sapiens
  misc_RNA (1)...(19): siRNA sense strand
gacaugaucacaacagaga

SEQ ID NO: 1716012 - RNA, 19 nt, Homo sapiens
  misc_RNA (1)...(19): siRNA sense strand
ggaaagcccacgacaugau

SEQ ID NO: 1716013 - RNA, 19 nt, Homo sapiens
  misc_RNA (1)...(19): siRNA sense strand
ccgacaacguuaacuaaug

SEQ ID NO: 1716014 - RNA, 19 nt, Homo sapiens
  misc_RNA (1)...(19): siRNA sense strand
guacuaaggcggugucaag

SEQ ID NO: 1716015 - RNA, 19 nt, Homo sapiens
  misc_RNA (1)...(19): siRNA sense strand
ccagacagaaccaaagaaa

SEQ ID NO: 1716016 - RNA, 19 nt, Homo sapiens
  misc_RNA (1)...(19): siRNA sense strand
uggcacacgucaagaagaa

SEQ ID NO: 1716017 - RNA, 19 nt, Homo sapiens
  misc_RNA (1)...(19): siRNA sense strand
gcaagacuggccaaacaga

SEQ ID NO: 1716018 - RNA, 19 nt, Homo sapiens
  misc_RNA (1)...(19): siRNA sense strand
ggagaagcaccaucacauc

SEQ ID NO: 1716019 - RNA, 19 nt, Homo sapiens
  misc_RNA (1)...(19): siRNA sense strand
ccuccucucuggcuaauca

SEQ ID NO: 1716020 - RNA, 19 nt, Homo sapiens
  misc_RNA (1)...(19): siRNA sense strand
gaugugaagacgcaaucua

SEQ ID NO: 1716021 - RNA, 19 nt, Homo sapiens
  misc_RNA (1)...(19): siRNA sense strand
aagcagaccgggaagaauu

SEQ ID NO: 1716022 - RNA, 19 nt, Homo sapiens
  misc_RNA (1)...(19): siRNA sense strand
cuaaggcggugucaagaag

SEQ ID NO: 1716023 - RNA, 19 nt, Homo sapiens
  misc_RNA (1)...(19): siRNA sense strand
caucuugaccaucuguuaa

SEQ ID NO: 1716024 - RNA, 19 nt, Homo sapiens
  misc_RNA (1)...(19): siRNA sense strand
gcacacgucaagaagaaau

SEQ ID NO: 1716025 - RNA, 19 nt, Homo sapiens
  misc_RNA (1)...(19): siRNA sense strand
gacagaaacagaccuaugg

SEQ ID NO: 1716026 - RNA, 19 nt, Homo sapiens
  misc_RNA (1)...(19): siRNA sense strand
gagagccuuugcacucaga

SEQ ID NO: 1716027 - RNA, 19 nt, Homo sapiens
  misc_RNA (1)...(19): siRNA sense strand
gaaagcccacgacaugauc

SEQ ID NO: 1716028 - RNA, 19 nt, Homo sapiens
  misc_RNA (1)...(19): siRNA sense strand
gcauggcacacgucaagaa

SEQ ID NO: 1716029 - RNA, 19 nt, Homo sapiens
  misc_RNA (1)...(19): siRNA sense strand
cagcgguacaguccaaaua

SEQ ID NO: 1716030 - RNA, 19 nt, Homo sapiens
  misc_RNA (1)...(19): siRNA sense strand
cagagagccuuugcacuca

SEQ ID NO: 1716031 - RNA, 19 nt, Homo sapiens
  misc_RNA (1)...(19): siRNA sense strand
gagaagcaccaucacaucu

SEQ ID NO: 1716032 - RNA, 19 nt, Homo sapiens
  misc_RNA (1)...(19): siRNA sense strand
gcugacuccuccaacaaug

SEQ ID NO: 1716033 - RNA, 19 nt, Homo sapiens
  misc_RNA (1)...(19): siRNA sense strand
caccuccaccucagcauua

SEQ ID NO: 1716034 - RNA, 19 nt, Homo sapiens
  misc_RNA (1)...(19): siRNA sense strand
acagaacccugcccaguac

SEQ ID NO: 1716035 - RNA, 19 nt, Homo sapiens
  misc_RNA (1)...(19): siRNA sense strand
caucgggaauuccuucaca

SEQ ID NO: 1716036 - RNA, 19 nt, Homo sapiens
  misc_RNA (1)...(19): siRNA sense strand
guggaaacaucuugaccau

SEQ ID NO: 1716037 - RNA, 19 nt, Homo sapiens
  misc_RNA (1)...(19): siRNA sense strand
caagaagaaaugauugauc

SEQ ID NO: 1716038 - RNA, 19 nt, Homo sapiens
  misc_RNA (1)...(19): siRNA sense strand
caagcgaccaugcacuauu

SEQ ID NO: 1716039 - RNA, 19 nt, Homo sapiens
  misc_RNA (1)...(19): siRNA sense strand
cagagcugcuucucgaugu

SEQ ID NO: 1716040 - RNA, 19 nt, Homo sapiens
  misc_RNA (1)...(19): siRNA sense strand
gaaacaucuugaccaucug

SEQ ID NO: 1716041 - RNA, 19 nt, Homo sapiens
  misc_RNA (1)...(19): siRNA sense strand
gagauaggagaaagaguuc

SEQ ID NO: 1716042 - RNA, 19 nt, Homo sapiens
  misc_RNA (1)...(19): siRNA sense strand
ggccagcgguacaguccaa

SEQ ID NO: 1716043 - RNA, 19 nt, Homo sapiens
  misc_RNA (1)...(19): siRNA sense strand
gggagaagcaccaucacau

SEQ ID NO: 1716044 - RNA, 19 nt, Homo sapiens
  misc_RNA (1)...(19): siRNA sense strand
cugaggaggccgucaauga

SEQ ID NO: 1716045 - RNA, 19 nt, Homo sapiens
  misc_RNA (1)...(19): siRNA sense strand
uaauggacaugguagaaaa

SEQ ID NO: 1716046 - RNA, 19 nt, Homo sapiens
  misc_RNA (1)...(19): siRNA sense strand
cauuaccguuuggaugaua

SEQ ID NO: 1716047 - RNA, 19 nt, Homo sapiens
  misc_RNA (1)...(19): siRNA sense strand
caccucagcauuaccguuu

SEQ ID NO: 1716048 - RNA, 19 nt, Homo sapiens
  misc_RNA (1)...(19): siRNA sense strand
caaugggccuuccucuucu

SEQ ID NO: 1716049 - RNA, 19 nt, Homo sapiens
  misc_RNA (1)...(19): siRNA sense strand
caccgacaacguuaacuaa

SEQ ID NO: 1716050 - RNA, 19 nt, Homo sapiens
  misc_RNA (1)...(19): siRNA sense strand
caagacuggccaaacagaa

SEQ ID NO: 1716051 - RNA, 19 nt, Homo sapiens
  misc_RNA (1)...(19): siRNA sense strand
cagugacgccgaggacuua

SEQ ID NO: 1716052 - RNA, 19 nt, Homo sapiens
  misc_RNA (1)...(19): siRNA sense strand
cauaauggacaugguagaa

SEQ ID NO: 1716053 - RNA, 19 nt, Homo sapiens
  misc_RNA (1)...(19): siRNA sense strand
cuguuaaacugcauaaugg

SEQ ID NO: 1716054 - RNA, 19 nt, Homo sapiens
  misc_RNA (1)...(19): siRNA sense strand
cagacuaacagacagagaa

SEQ ID NO: 1716055 - RNA, 19 nt, Homo sapiens
  misc_RNA (1)...(19): siRNA sense strand
aacagaacccugcccagua

SEQ ID NO: 1716056 - RNA, 19 nt, Homo sapiens
  misc_RNA (1)...(19): siRNA sense strand
ggcacgagccauucuccua

SEQ ID NO: 1716057 - RNA, 19 nt, Homo sapiens
  misc_RNA (1)...(19): siRNA sense strand
gaagcagaccgggaagaau

SEQ ID NO: 1716058 - RNA, 19 nt, Homo sapiens
  misc_RNA (1)...(19): siRNA sense strand
ccacuuugacaauugaaga

SEQ ID NO: 1716059 - RNA, 19 nt, Homo sapiens
  misc_RNA (1)...(19): siRNA sense strand
ggagacacaccugcaguca

SEQ ID NO: 1716060 - RNA, 19 nt, Homo sapiens
  misc_RNA (1)...(19): siRNA sense strand
agcgagaguugcuggaauu

SEQ ID NO: 1716061 - RNA, 19 nt, Homo sapiens
  misc_RNA (1)...(19): siRNA sense strand
gcauuaccguuuggaugau

SEQ ID NO: 1716062 - RNA, 19 nt, Homo sapiens
  misc_RNA (1)...(19): siRNA sense strand
guaccucgcccagcaugaa

SEQ ID NO: 1716063 - RNA, 19 nt, Homo sapiens
  misc_RNA (1)...(19): siRNA sense strand
agacucaccuguggaugug

SEQ ID NO: 1716064 - RNA, 19 nt, Homo sapiens
  misc_RNA (1)...(19): siRNA sense strand
ugagaagcacuccacaaug

SEQ ID NO: 1716065 - RNA, 19 nt, Homo sapiens
  misc_RNA (1)...(19): siRNA sense strand
ggccguaaagcgagugaaa

SEQ ID NO: 1716066 - RNA, 19 nt, Homo sapiens
  misc_RNA (1)...(19): siRNA sense strand
gcaagcgaccaugcacuau

SEQ ID NO: 1716067 - RNA, 19 nt, Homo sapiens
  misc_RNA (1)...(19): siRNA sense strand
uaaacugcauaauggacau

SEQ ID NO: 1716068 - RNA, 19 nt, Homo sapiens
  misc_RNA (1)...(19): siRNA sense strand
ucuguuaaacugcauaaug

SEQ ID NO: 1716069 - RNA, 19 nt, Homo sapiens
  misc_RNA (1)...(19): siRNA sense strand
agacagagaaugggcagaa

SEQ ID NO: 1716070 - RNA, 19 nt, Homo sapiens
  misc_RNA (1)...(19): siRNA sense strand
caguccaaauaacggcuua

SEQ ID NO: 1716071 - RNA, 19 nt, Homo sapiens
  misc_RNA (1)...(19): siRNA sense strand
acaccgacaacguuaacua

SEQ ID NO: 1716072 - RNA, 19 nt, Homo sapiens
  misc_RNA (1)...(19): siRNA sense strand
cagaagaguggaaacaucu

SEQ ID NO: 1716073 - RNA, 19 nt, Homo sapiens
  misc_RNA (1)...(19): siRNA sense strand
gcgguacaguccaaauaac

SEQ ID NO: 1716074 - RNA, 19 nt, Homo sapiens
  misc_RNA (1)...(19): siRNA sense strand
ccaauggcuucagcaaugg

SEQ ID NO: 1716075 - RNA, 19 nt, Homo sapiens
  misc_RNA (1)...(19): siRNA sense strand
gcagcagagucccgucaac

SEQ ID NO: 1716076 - RNA, 19 nt, Homo sapiens
  misc_RNA (1)...(19): siRNA sense strand
gcauaauggacaugguaga

SEQ ID NO: 1716077 - RNA, 19 nt, Homo sapiens
  misc_RNA (1)...(19): siRNA sense strand
cuacagggacuccuaucga

SEQ ID NO: 1716078 - RNA, 19 nt, Homo sapiens
  misc_RNA (1)...(19): siRNA sense strand
gaaaccugcaguggcugua

SEQ ID NO: 1716079 - RNA, 19 nt, Homo sapiens
  misc_RNA (1)...(19): siRNA sense strand
cugagaagcacuccacaau

SEQ ID NO: 1716080 - RNA, 19 nt, Homo sapiens
  misc_RNA (1)...(19): siRNA sense strand
ccacugagaccuuuuguca

SEQ ID NO: 1716081 - RNA, 19 nt, Homo sapiens
  misc_RNA (1)...(19): siRNA sense strand
ugcaagaagcuacuaacuu

SEQ ID NO: 1716082 - RNA, 19 nt, Homo sapiens
  misc_RNA (1)...(19): siRNA sense strand
uggaugauauggccauugc

SEQ ID NO: 1716083 - RNA, 19 nt, Homo sapiens
  misc_RNA (1)...(19): siRNA sense strand
cagagagggccaagaugga

SEQ ID NO: 1716084 - RNA, 19 nt, Homo sapiens
  misc_RNA (1)...(19): siRNA sense strand
gggcagaagaguggaaaca

SEQ ID NO: 1716085 - RNA, 19 nt, Homo sapiens
  misc_RNA (1)...(19): siRNA sense strand
gacagagaaugggcagaag

SEQ ID NO: 1716086 - RNA, 19 nt, Homo sapiens
  misc_RNA (1)...(19): siRNA sense strand
ucacagacuaacagacaga

SEQ ID NO: 1716087 - RNA, 19 nt, Homo sapiens
  misc_RNA (1)...(19): siRNA sense strand
ccucagggacagaaacaga

SEQ ID NO: 1716088 - RNA, 19 nt, Homo sapiens
  misc_RNA (1)...(19): siRNA sense strand
ggaaacaucuugaccaucu

SEQ ID NO: 1716089 - RNA, 19 nt, Homo sapiens
  misc_RNA (1)...(19): siRNA sense strand
gaacuccacuuugacaauu

SEQ ID NO: 1716090 - RNA, 19 nt, Homo sapiens
  misc_RNA (1)...(19): siRNA sense strand
gcagucagcuccucuguca

SEQ ID NO: 1716091 - RNA, 19 nt, Homo sapiens
  misc_RNA (1)...(19): siRNA sense strand
gcuacuaacuucccacuga

SEQ ID NO: 1716092 - RNA, 19 nt, Homo sapiens
  misc_RNA (1)...(19): siRNA sense strand
gaggagaucuggaagaaag

SEQ ID NO: 1716093 - RNA, 19 nt, Homo sapiens
  misc_RNA (1)...(19): siRNA sense strand
gagaagcacuccacaaugc

SEQ ID NO: 1716094 - RNA, 19 nt, Homo sapiens
  misc_RNA (1)...(19): siRNA sense strand
gcaaugggccuuccucuuc

SEQ ID NO: 1716095 - RNA, 19 nt, Homo sapiens
  misc_RNA (1)...(19): siRNA sense strand
aagcgaccaugcacuauua

SEQ ID NO: 1716096 - RNA, 19 nt, Homo sapiens
  misc_RNA (1)...(19): siRNA sense strand
gcgcaagacuggccaaaca

SEQ ID NO: 1716097 - RNA, 19 nt, Homo sapiens
  misc_RNA (1)...(19): siRNA sense strand
gcagaagaguggaaacauc

SEQ ID NO: 1716098 - RNA, 19 nt, Homo sapiens
  misc_RNA (1)...(19): siRNA sense strand
gagaguugcuggaauugug

SEQ ID NO: 1716099 - RNA, 19 nt, Homo sapiens
  misc_RNA (1)...(19): siRNA sense strand
gaggcgaacuccagacaga

SEQ ID NO: 1716100 - RNA, 19 nt, Homo sapiens
  misc_RNA (1)...(19): siRNA sense strand
gaagcaccaucacaucugu

SEQ ID NO: 1716101 - RNA, 19 nt, Homo sapiens
  misc_RNA (1)...(19): siRNA sense strand
caacagagagggccaagau

SEQ ID NO: 1716102 - RNA, 19 nt, Homo sapiens
  misc_RNA (1)...(19): siRNA sense strand
gcggaaagcccacgacaug

SEQ ID NO: 1716103 - RNA, 19 nt, Homo sapiens
  misc_RNA (1)...(19): siRNA sense strand
cgacaacguuaacuaaugg

SEQ ID NO: 1716104 - RNA, 19 nt, Homo sapiens
  misc_RNA (1)...(19): siRNA sense strand
gaucacagacuaacagaca

SEQ ID NO: 1716105 - RNA, 19 nt, Homo sapiens
  misc_RNA (1)...(19): siRNA sense strand
cccaauggcuucagcaaug

SEQ ID NO: 1716106 - RNA, 19 nt, Homo sapiens
  misc_RNA (1)...(19): siRNA sense strand
ggacagaaacagaccuaug

SEQ ID NO: 1716107 - RNA, 19 nt, Homo sapiens
  misc_RNA (1)...(19): siRNA sense strand
gcacaaagacugggagaag

SEQ ID NO: 1716108 - RNA, 19 nt, Homo sapiens
  misc_RNA (1)...(19): siRNA sense strand
ccgauacuguggcucauuu

SEQ ID NO: 1716109 - RNA, 19 nt, Homo sapiens
  misc_RNA (1)...(19): siRNA sense strand
cgagauaggagaaagaguu

SEQ ID NO: 1716110 - RNA, 19 nt, Homo sapiens
  misc_RNA (1)...(19): siRNA sense strand
ugacauuucacccgagaua

SEQ ID NO: 1716111 - RNA, 19 nt, Homo sapiens
  misc_RNA (1)...(19): siRNA sense strand
gacaugaucacaacagaga

SEQ ID NO: 1716112 - RNA, 19 nt, Homo sapiens
  misc_RNA (1)...(19): siRNA sense strand
ggaaagcccacgacaugau

SEQ ID NO: 1716113 - RNA, 19 nt, Homo sapiens
  misc_RNA (1)...(19): siRNA sense strand
ccgacaacguuaacuaaug

SEQ ID NO: 1716114 - RNA, 19 nt, Homo sapiens
  misc_RNA (1)...(19): siRNA sense strand
guacuaaggcggugucaag

SEQ ID NO: 1716115 - RNA, 19 nt, Homo sapiens
  misc_RNA (1)...(19): siRNA sense strand
ccagacagaaccaaagaaa

SEQ ID NO: 1716116 - RNA, 19 nt, Homo sapiens
  misc_RNA (1)...(19): siRNA sense strand
uggcacacgucaagaagaa

SEQ ID NO: 1716117 - RNA, 19 nt, Homo sapiens
  misc_RNA (1)...(19): siRNA sense strand
gcaagacuggccaaacaga

SEQ ID NO: 1716118 - RNA, 19 nt, Homo sapiens
  misc_RNA (1)...(19): siRNA sense strand
ggagaagcaccaucacauc

SEQ ID NO: 1716119 - RNA, 19 nt, Homo sapiens
  misc_RNA (1)...(19): siRNA sense strand
ccuccucucuggcuaauca

SEQ ID NO: 1716120 - RNA, 19 nt, Homo sapiens
  misc_RNA (1)...(19): siRNA sense strand
gaugugaagacgcaaucua

SEQ ID NO: 1716121 - RNA, 19 nt, Homo sapiens
  misc_RNA (1)...(19): siRNA sense strand
aagcagaccgggaagaauu

SEQ ID NO: 1716122 - RNA, 19 nt, Homo sapiens
  misc_RNA (1)...(19): siRNA sense strand
cuaaggcggugucaagaag

SEQ ID NO: 1716123 - RNA, 19 nt, Homo sapiens
  misc_RNA (1)...(19): siRNA sense strand
caucuugaccaucuguuaa

SEQ ID NO: 1716124 - RNA, 19 nt, Homo sapiens
  misc_RNA (1)...(19): siRNA sense strand
gcacacgucaagaagaaau

SEQ ID NO: 1716125 - RNA, 19 nt, Homo sapiens
  misc_RNA (1)...(19): siRNA sense strand
gacagaaacagaccuaugg

SEQ ID NO: 1716126 - RNA, 19 nt, Homo sapiens
  misc_RNA (1)...(19): siRNA sense strand
gagagccuuugcacucaga

SEQ ID NO: 1716127 - RNA, 19 nt, Homo sapiens
  misc_RNA (1)...(19): siRNA sense strand
gaaagcccacgacaugauc

SEQ ID NO: 1716128 - RNA, 19 nt, Homo sapiens
  misc_RNA (1)...(19): siRNA sense strand
gcauggcacacgucaagaa

SEQ ID NO: 1716129 - RNA, 19 nt, Homo sapiens
  misc_RNA (1)...(19): siRNA sense strand
cagcgguacaguccaaaua

SEQ ID NO: 1716130 - RNA, 19 nt, Homo sapiens
  misc_RNA (1)...(19): siRNA sense strand
cagagagccuuugcacuca

SEQ ID NO: 1716131 - RNA, 19 nt, Homo sapiens
  misc_RNA (1)...(19): siRNA sense strand
gagaagcaccaucacaucu

SEQ ID NO: 1716132 - RNA, 19 nt, Homo sapiens
  misc_RNA (1)...(19): siRNA sense strand
gcugacuccuccaacaaug

SEQ ID NO: 1716133 - RNA, 19 nt, Homo sapiens
  misc_RNA (1)...(19): siRNA sense strand
caccuccaccucagcauua

SEQ ID NO: 1716134 - RNA, 19 nt, Homo sapiens
  misc_RNA (1)...(19): siRNA sense strand
acagaacccugcccaguac

SEQ ID NO: 1716135 - RNA, 19 nt, Homo sapiens
  misc_RNA (1)...(19): siRNA sense strand
caucgggaauuccuucaca

SEQ ID NO: 1716136 - RNA, 19 nt, Homo sapiens
  misc_RNA (1)...(19): siRNA sense strand
guggaaacaucuugaccau

SEQ ID NO: 1716137 - RNA, 19 nt, Homo sapiens
  misc_RNA (1)...(19): siRNA sense strand
caagaagaaaugauugauc

SEQ ID NO: 1716138 - RNA, 19 nt, Homo sapiens
  misc_RNA (1)...(19): siRNA sense strand
caagcgaccaugcacuauu

SEQ ID NO: 1716139 - RNA, 19 nt, Homo sapiens
  misc_RNA (1)...(19): siRNA sense strand
cagagcugcuucucgaugu

SEQ ID NO: 1716140 - RNA, 19 nt, Homo sapiens
  misc_RNA (1)...(19): siRNA sense strand
gaaacaucuugaccaucug

SEQ ID NO: 1716141 - RNA, 19 nt, Homo sapiens
  misc_RNA (1)...(19): siRNA sense strand
gagauaggagaaagaguuc

SEQ ID NO: 1716142 - RNA, 19 nt, Homo sapiens
  misc_RNA (1)...(19): siRNA sense strand
ggccagcgguacaguccaa

SEQ ID NO: 1716143 - RNA, 19 nt, Homo sapiens
  misc_RNA (1)...(19): siRNA sense strand
gggagaagcaccaucacau

SEQ ID NO: 1716144 - RNA, 19 nt, Homo sapiens
  misc_RNA (1)...(19): siRNA sense strand
cugaggaggccgucaauga

SEQ ID NO: 1716145 - RNA, 19 nt, Homo sapiens
  misc_RNA (1)...(19): siRNA sense strand
uaauggacaugguagaaaa

SEQ ID NO: 1716146 - RNA, 19 nt, Homo sapiens
  misc_RNA (1)...(19): siRNA sense strand
cauuaccguuuggaugaua

SEQ ID NO: 1716147 - RNA, 19 nt, Homo sapiens
  misc_RNA (1)...(19): siRNA sense strand
caccucagcauuaccguuu

SEQ ID NO: 1716148 - RNA, 19 nt, Homo sapiens
  misc_RNA (1)...(19): siRNA sense strand
caaugggccuuccucuucu

SEQ ID NO: 1716149 - RNA, 19 nt, Homo sapiens
  misc_RNA (1)...(19): siRNA sense strand
caccgacaacguuaacuaa

SEQ ID NO: 1716150 - RNA, 19 nt, Homo sapiens
  misc_RNA (1)...(19): siRNA sense strand
caagacuggccaaacagaa

SEQ ID NO: 1716151 - RNA, 19 nt, Homo sapiens
  misc_RNA (1)...(19): siRNA sense strand
cagugacgccgaggacuua

SEQ ID NO: 1716152 - RNA, 19 nt, Homo sapiens
  misc_RNA (1)...(19): siRNA sense strand
cauaauggacaugguagaa

SEQ ID NO: 1716153 - RNA, 19 nt, Homo sapiens
  misc_RNA (1)...(19): siRNA sense strand
cuguuaaacugcauaaugg

SEQ ID NO: 1716154 - RNA, 19 nt, Homo sapiens
  misc_RNA (1)...(19): siRNA sense strand
cagacuaacagacagagaa

SEQ ID NO: 1716155 - RNA, 19 nt, Homo sapiens
  misc_RNA (1)...(19): siRNA sense strand
aacagaacccugcccagua

SEQ ID NO: 1716156 - RNA, 19 nt, Homo sapiens
  misc_RNA (1)...(19): siRNA sense strand
ggcacgagccauucuccua

SEQ ID NO: 1716157 - RNA, 19 nt, Homo sapiens
  misc_RNA (1)...(19): siRNA sense strand
gaagcagaccgggaagaau

SEQ ID NO: 1716158 - RNA, 19 nt, Homo sapiens
  misc_RNA (1)...(19): siRNA sense strand
ccacuuugacaauugaaga

SEQ ID NO: 1716159 - RNA, 19 nt, Homo sapiens
  misc_RNA (1)...(19): siRNA sense strand
ggagacacaccugcaguca

SEQ ID NO: 1716160 - RNA, 19 nt, Homo sapiens
  misc_RNA (1)...(19): siRNA sense strand
agcgagaguugcuggaauu

SEQ ID NO: 1716161 - RNA, 19 nt, Homo sapiens
  misc_RNA (1)...(19): siRNA sense strand
gcauuaccguuuggaugau

SEQ ID NO: 1716162 - RNA, 19 nt, Homo sapiens
  misc_RNA (1)...(19): siRNA sense strand
guaccucgcccagcaugaa

SEQ ID NO: 1716163 - RNA, 19 nt, Homo sapiens
  misc_RNA (1)...(19): siRNA sense strand
agacucaccuguggaugug

SEQ ID NO: 1716164 - RNA, 19 nt, Homo sapiens
  misc_RNA (1)...(19): siRNA sense strand
ugagaagcacuccacaaug

SEQ ID NO: 1716165 - RNA, 19 nt, Homo sapiens
  misc_RNA (1)...(19): siRNA sense strand
ggccguaaagcgagugaaa

SEQ ID NO: 1716166 - RNA, 19 nt, Homo sapiens
  misc_RNA (1)...(19): siRNA sense strand
gcaagcgaccaugcacuau

SEQ ID NO: 1716167 - RNA, 19 nt, Homo sapiens
  misc_RNA (1)...(19): siRNA sense strand
uaaacugcauaauggacau

SEQ ID NO: 1716168 - RNA, 19 nt, Homo sapiens
  misc_RNA (1)...(19): siRNA sense strand
ucuguuaaacugcauaaug

SEQ ID NO: 1716169 - RNA, 19 nt, Homo sapiens
  misc_RNA (1)...(19): siRNA sense strand
agacagagaaugggcagaa

SEQ ID NO: 1716170 - RNA, 19 nt, Homo sapiens
  misc_RNA (1)...(19): siRNA sense strand
caguccaaauaacggcuua

SEQ ID NO: 1716171 - RNA, 19 nt, Homo sapiens
  misc_RNA (1)...(19): siRNA sense strand
acaccgacaacguuaacua

SEQ ID NO: 1716172 - RNA, 19 nt, Homo sapiens
  misc_RNA (1)...(19): siRNA sense strand
cagaagaguggaaacaucu

SEQ ID NO: 1716173 - RNA, 19 nt, Homo sapiens
  misc_RNA (1)...(19): siRNA sense strand
gcgguacaguccaaauaac

SEQ ID NO: 1716174 - RNA, 19 nt, Homo sapiens
  misc_RNA (1)...(19): siRNA sense strand
ccaauggcuucagcaaugg

SEQ ID NO: 1716175 - RNA, 19 nt, Homo sapiens
  misc_RNA (1)...(19): siRNA sense strand
gcagcagagucccgucaac

SEQ ID NO: 1716176 - RNA, 19 nt, Homo sapiens
  misc_RNA (1)...(19): siRNA sense strand
gcauaauggacaugguaga

SEQ ID NO: 1716177 - RNA, 19 nt, Homo sapiens
  misc_RNA (1)...(19): siRNA sense strand
cuacagggacuccuaucga

SEQ ID NO: 1716178 - RNA, 19 nt, Homo sapiens
  misc_RNA (1)...(19): siRNA sense strand
gaaaccugcaguggcugua

SEQ ID NO: 1716179 - RNA, 19 nt, Homo sapiens
  misc_RNA (1)...(19): siRNA sense strand
cugagaagcacuccacaau

SEQ ID NO: 1716180 - RNA, 19 nt, Homo sapiens
  misc_RNA (1)...(19): siRNA sense strand
ccacugagaccuuuuguca

SEQ ID NO: 1716181 - RNA, 19 nt, Homo sapiens
  misc_RNA (1)...(19): siRNA sense strand
ugcaagaagcuacuaacuu

SEQ ID NO: 1716182 - RNA, 19 nt, Homo sapiens
  misc_RNA (1)...(19): siRNA sense strand
uggaugauauggccauugc

SEQ ID NO: 1716183 - RNA, 19 nt, Homo sapiens
  misc_RNA (1)...(19): siRNA sense strand
cagagagggccaagaugga

SEQ ID NO: 1716184 - RNA, 19 nt, Homo sapiens
  misc_RNA (1)...(19): siRNA sense strand
gggcagaagaguggaaaca

SEQ ID NO: 1716185 - RNA, 19 nt, Homo sapiens
  misc_RNA (1)...(19): siRNA sense strand
gacagagaaugggcagaag

SEQ ID NO: 1716186 - RNA, 19 nt, Homo sapiens
  misc_RNA (1)...(19): siRNA sense strand
ucacagacuaacagacaga

SEQ ID NO: 1716187 - RNA, 19 nt, Homo sapiens
  misc_RNA (1)...(19): siRNA sense strand
ccucagggacagaaacaga

SEQ ID NO: 1716188 - RNA, 19 nt, Homo sapiens
  misc_RNA (1)...(19): siRNA sense strand
ggaaacaucuugaccaucu

SEQ ID NO: 1716189 - RNA, 19 nt, Homo sapiens
  misc_RNA (1)...(19): siRNA sense strand
gaacuccacuuugacaauu

SEQ ID NO: 1716190 - RNA, 19 nt, Homo sapiens
  misc_RNA (1)...(19): siRNA sense strand
gcagucagcuccucuguca

SEQ ID NO: 1716191 - RNA, 19 nt, Homo sapiens
  misc_RNA (1)...(19): siRNA sense strand
gcuacuaacuucccacuga

SEQ ID NO: 1716192 - RNA, 19 nt, Homo sapiens
  misc_RNA (1)...(19): siRNA sense strand
gaggagaucuggaagaaag

SEQ ID NO: 1716193 - RNA, 19 nt, Homo sapiens
  misc_RNA (1)...(19): siRNA sense strand
gcaaugggccuuccucuuc

SEQ ID NO: 1716194 - RNA, 19 nt, Homo sapiens
  misc_RNA (1)...(19): siRNA sense strand
aagcgaccaugcacuauua

SEQ ID NO: 1716195 - RNA, 19 nt, Homo sapiens
  misc_RNA (1)...(19): siRNA sense strand
gcgcaagacuggccaaaca

SEQ ID NO: 1716196 - RNA, 19 nt, Homo sapiens
  misc_RNA (1)...(19): siRNA sense strand
gcagaagaguggaaacauc

SEQ ID NO: 1716197 - RNA, 19 nt, Homo sapiens
  misc_RNA (1)...(19): siRNA sense strand
gagaguugcuggaauugug

SEQ ID NO: 1716198 - RNA, 19 nt, Homo sapiens
  misc_RNA (1)...(19): siRNA sense strand
gaggcgaacuccagacaga

SEQ ID NO: 1716199 - RNA, 19 nt, Homo sapiens
  misc_RNA (1)...(19): siRNA sense strand
gaagcaccaucacaucugu

SEQ ID NO: 1716200 - RNA, 19 nt, Homo sapiens
  misc_RNA (1)...(19): siRNA sense strand
caacagagagggccaagau

SEQ ID NO: 1716201 - RNA, 19 nt, Homo sapiens
  misc_RNA (1)...(19): siRNA sense strand
gcggaaagcccacgacaug

SEQ ID NO: 1716202 - RNA, 19 nt, Homo sapiens
  misc_RNA (1)...(19): siRNA sense strand
cgacaacguuaacuaaugg

SEQ ID NO: 1716203 - RNA, 19 nt, Homo sapiens
  misc_RNA (1)...(19): siRNA sense strand
gaucacagacuaacagaca

SEQ ID NO: 1716204 - RNA, 19 nt, Homo sapiens
  misc_RNA (1)...(19): siRNA sense strand
cccaauggcuucagcaaug

SEQ ID NO: 1716205 - RNA, 19 nt, Homo sapiens
  misc_RNA (1)...(19): siRNA sense strand
ggacagaaacagaccuaug

SEQ ID NO: 1716206 - RNA, 19 nt, Homo sapiens
  misc_RNA (1)...(19): siRNA sense strand
gcacaaagacugggagaag

SEQ ID NO: 1716207 - RNA, 19 nt, Homo sapiens
  misc_RNA (1)...(19): siRNA sense strand
ccgauacuguggcucauuu

SEQ ID NO: 1716208 - RNA, 19 nt, Homo sapiens
  misc_RNA (1)...(19): siRNA sense strand
cgagauaggagaaagaguu

SEQ ID NO: 1716209 - RNA, 19 nt, Homo sapiens
  misc_RNA (1)...(19): siRNA sense strand
ugacauuucacccgagaua

SEQ ID NO: 1716210 - RNA, 19 nt, Homo sapiens
  misc_RNA (1)...(19): siRNA sense strand
gacaugaucacaacagaga

SEQ ID NO: 1716211 - RNA, 19 nt, Homo sapiens
  misc_RNA (1)...(19): siRNA sense strand
ggaaagcccacgacaugau

SEQ ID NO: 1716212 - RNA, 19 nt, Homo sapiens
  misc_RNA (1)...(19): siRNA sense strand
ccgacaacguuaacuaaug

SEQ ID NO: 1716213 - RNA, 19 nt, Homo sapiens
  misc_RNA (1)...(19): siRNA sense strand
guacuaaggcggugucaag

SEQ ID NO: 1716214 - RNA, 19 nt, Homo sapiens
  misc_RNA (1)...(19): siRNA sense strand
ccagacagaaccaaagaaa

SEQ ID NO: 1716215 - RNA, 19 nt, Homo sapiens
  misc_RNA (1)...(19): siRNA sense strand
uggcacacgucaagaagaa

SEQ ID NO: 1716216 - RNA, 19 nt, Homo sapiens
  misc_RNA (1)...(19): siRNA sense strand
gcaagacuggccaaacaga

SEQ ID NO: 1716217 - RNA, 19 nt, Homo sapiens
  misc_RNA (1)...(19): siRNA sense strand
ggagaagcaccaucacauc

SEQ ID NO: 1716218 - RNA, 19 nt, Homo sapiens
  misc_RNA (1)...(19): siRNA sense strand
ccuccucucuggcuaauca

SEQ ID NO: 1716219 - RNA, 19 nt, Homo sapiens
  misc_RNA (1)...(19): siRNA sense strand
aagcagaccgggaagaauu

SEQ ID NO: 1716220 - RNA, 19 nt, Homo sapiens
  misc_RNA (1)...(19): siRNA sense strand
cuaaggcggugucaagaag

SEQ ID NO: 1716221 - RNA, 19 nt, Homo sapiens
  misc_RNA (1)...(19): siRNA sense strand
caucuugaccaucuguuaa

SEQ ID NO: 1716222 - RNA, 19 nt, Homo sapiens
  misc_RNA (1)...(19): siRNA sense strand
gaugugaagacgcaaucua

SEQ ID NO: 1716223 - RNA, 19 nt, Homo sapiens
  misc_RNA (1)...(19): siRNA sense strand
gcacacgucaagaagaaau

SEQ ID NO: 1716224 - RNA, 19 nt, Homo sapiens
  misc_RNA (1)...(19): siRNA sense strand
gacagaaacagaccuaugg

SEQ ID NO: 1716225 - RNA, 19 nt, Homo sapiens
  misc_RNA (1)...(19): siRNA sense strand
gagagccuuugcacucaga

SEQ ID NO: 1716226 - RNA, 19 nt, Homo sapiens
  misc_RNA (1)...(19): siRNA sense strand
gaaagcccacgacaugauc

SEQ ID NO: 1716227 - RNA, 19 nt, Homo sapiens
  misc_RNA (1)...(19): siRNA sense strand
gcauggcacacgucaagaa

SEQ ID NO: 1716228 - RNA, 19 nt, Homo sapiens
  misc_RNA (1)...(19): siRNA sense strand
cagcgguacaguccaaaua

SEQ ID NO: 1716229 - RNA, 19 nt, Homo sapiens
  misc_RNA (1)...(19): siRNA sense strand
cagagagccuuugcacuca

SEQ ID NO: 1716230 - RNA, 19 nt, Homo sapiens
  misc_RNA (1)...(19): siRNA sense strand
gagaagcaccaucacaucu

SEQ ID NO: 1716231 - RNA, 19 nt, Homo sapiens
  misc_RNA (1)...(19): siRNA sense strand
gcugacuccuccaacaaug

SEQ ID NO: 1716232 - RNA, 19 nt, Homo sapiens
  misc_RNA (1)...(19): siRNA sense strand
caccuccaccucagcauua

SEQ ID NO: 1716233 - RNA, 19 nt, Homo sapiens
  misc_RNA (1)...(19): siRNA sense strand
acagaacccugcccaguac

SEQ ID NO: 1716234 - RNA, 19 nt, Homo sapiens
  misc_RNA (1)...(19): siRNA sense strand
caucgggaauuccuucaca

SEQ ID NO: 1716235 - RNA, 19 nt, Homo sapiens
  misc_RNA (1)...(19): siRNA sense strand
guggaaacaucuugaccau

SEQ ID NO: 1716236 - RNA, 19 nt, Homo sapiens
  misc_RNA (1)...(19): siRNA sense strand
caagaagaaaugauugauc

SEQ ID NO: 1716237 - RNA, 19 nt, Homo sapiens
  misc_RNA (1)...(19): siRNA sense strand
caagcgaccaugcacuauu

SEQ ID NO: 1716238 - RNA, 19 nt, Homo sapiens
  misc_RNA (1)...(19): siRNA sense strand
cagagcugcuucucgaugu

SEQ ID NO: 1716239 - RNA, 19 nt, Homo sapiens
  misc_RNA (1)...(19): siRNA sense strand
gaaacaucuugaccaucug

SEQ ID NO: 1716240 - RNA, 19 nt, Homo sapiens
  misc_RNA (1)...(19): siRNA sense strand
gagauaggagaaagaguuc

SEQ ID NO: 1716241 - RNA, 19 nt, Homo sapiens
  misc_RNA (1)...(19): siRNA sense strand
caaugggccuuccucuucu

SEQ ID NO: 1716242 - RNA, 19 nt, Homo sapiens
  misc_RNA (1)...(19): siRNA sense strand
gggagaagcaccaucacau

SEQ ID NO: 1716243 - RNA, 19 nt, Homo sapiens
  misc_RNA (1)...(19): siRNA sense strand
cugaggaggccgucaauga

SEQ ID NO: 1716244 - RNA, 19 nt, Homo sapiens
  misc_RNA (1)...(19): siRNA sense strand
uaauggacaugguagaaaa

SEQ ID NO: 1716245 - RNA, 19 nt, Homo sapiens
  misc_RNA (1)...(19): siRNA sense strand
cauuaccguuuggaugaua

SEQ ID NO: 1716246 - RNA, 19 nt, Homo sapiens
  misc_RNA (1)...(19): siRNA sense strand
caccucagcauuaccguuu

SEQ ID NO: 1716247 - RNA, 19 nt, Homo sapiens
  misc_RNA (1)...(19): siRNA sense strand
ggccagcgguacaguccaa

SEQ ID NO: 1716248 - RNA, 19 nt, Homo sapiens
  misc_RNA (1)...(19): siRNA sense strand
caccgacaacguuaacuaa

SEQ ID NO: 1716249 - RNA, 19 nt, Homo sapiens
  misc_RNA (1)...(19): siRNA sense strand
caagacuggccaaacagaa

SEQ ID NO: 1716250 - RNA, 19 nt, Homo sapiens
  misc_RNA (1)...(19): siRNA sense strand
cagugacgccgaggacuua

SEQ ID NO: 1716251 - RNA, 19 nt, Homo sapiens
  misc_RNA (1)...(19): siRNA sense strand
cauaauggacaugguagaa

SEQ ID NO: 1716252 - RNA, 19 nt, Homo sapiens
  misc_RNA (1)...(19): siRNA sense strand
cuguuaaacugcauaaugg

SEQ ID NO: 1716253 - RNA, 19 nt, Homo sapiens
  misc_RNA (1)...(19): siRNA sense strand
cagacuaacagacagagaa

SEQ ID NO: 1716254 - RNA, 19 nt, Homo sapiens
  misc_RNA (1)...(19): siRNA sense strand
aacagaacccugcccagua

SEQ ID NO: 1716255 - RNA, 19 nt, Homo sapiens
  misc_RNA (1)...(19): siRNA sense strand
ggcacgagccauucuccua

SEQ ID NO: 1716256 - RNA, 19 nt, Homo sapiens
  misc_RNA (1)...(19): siRNA sense strand
gaagcagaccgggaagaau

SEQ ID NO: 1716257 - RNA, 19 nt, Homo sapiens
  misc_RNA (1)...(19): siRNA sense strand
ccacuuugacaauugaaga

SEQ ID NO: 1716258 - RNA, 19 nt, Homo sapiens
  misc_RNA (1)...(19): siRNA sense strand
ggagacacaccugcaguca

SEQ ID NO: 1716259 - RNA, 19 nt, Homo sapiens
  misc_RNA (1)...(19): siRNA sense strand
agcgagaguugcuggaauu

SEQ ID NO: 1716260 - RNA, 19 nt, Homo sapiens
  misc_RNA (1)...(19): siRNA sense strand
gcauuaccguuuggaugau

SEQ ID NO: 1716261 - RNA, 19 nt, Homo sapiens
  misc_RNA (1)...(19): siRNA sense strand
guaccucgcccagcaugaa

SEQ ID NO: 1716262 - RNA, 19 nt, Homo sapiens
  misc_RNA (1)...(19): siRNA sense strand
ggccguaaagcgagugaaa

SEQ ID NO: 1716263 - RNA, 19 nt, Homo sapiens
  misc_RNA (1)...(19): siRNA sense strand
agacucaccuguggaugug

SEQ ID NO: 1716264 - RNA, 19 nt, Homo sapiens
  misc_RNA (1)...(19): siRNA sense strand
gcaagcgaccaugcacuau

SEQ ID NO: 1716265 - RNA, 19 nt, Homo sapiens
  misc_RNA (1)...(19): siRNA sense strand
uaaacugcauaauggacau

SEQ ID NO: 1716266 - RNA, 19 nt, Homo sapiens
  misc_RNA (1)...(19): siRNA sense strand
ucuguuaaacugcauaaug

SEQ ID NO: 1716267 - RNA, 19 nt, Homo sapiens
  misc_RNA (1)...(19): siRNA sense strand
agacagagaaugggcagaa

SEQ ID NO: 1716268 - RNA, 19 nt, Homo sapiens
  misc_RNA (1)...(19): siRNA sense strand
caguccaaauaacggcuua

SEQ ID NO: 1716269 - RNA, 19 nt, Homo sapiens
  misc_RNA (1)...(19): siRNA sense strand
cagaagaguggaaacaucu

SEQ ID NO: 1716270 - RNA, 19 nt, Homo sapiens
  misc_RNA (1)...(19): siRNA sense strand
acaccgacaacguuaacua

SEQ ID NO: 1716271 - RNA, 19 nt, Homo sapiens
  misc_RNA (1)...(19): siRNA sense strand
ccaauggcuucagcaaugg

SEQ ID NO: 1716272 - RNA, 19 nt, Homo sapiens
  misc_RNA (1)...(19): siRNA sense strand
gcagcagagucccgucaac

SEQ ID NO: 1716273 - RNA, 19 nt, Homo sapiens
  misc_RNA (1)...(19): siRNA sense strand
gcauaauggacaugguaga

SEQ ID NO: 1716274 - RNA, 19 nt, Homo sapiens
  misc_RNA (1)...(19): siRNA sense strand
cuacagggacuccuaucga

SEQ ID NO: 1716275 - RNA, 19 nt, Homo sapiens
  misc_RNA (1)...(19): siRNA sense strand
gcgguacaguccaaauaac

SEQ ID NO: 1716276 - RNA, 19 nt, Homo sapiens
  misc_RNA (1)...(19): siRNA sense strand
gaaaccugcaguggcugua

SEQ ID NO: 1716277 - RNA, 19 nt, Homo sapiens
  misc_RNA (1)...(19): siRNA sense strand
ugcaagaagcuacuaacuu

SEQ ID NO: 1716278 - RNA, 19 nt, Homo sapiens
  misc_RNA (1)...(19): siRNA sense strand
ccacugagaccuuuuguca

SEQ ID NO: 1716279 - RNA, 19 nt, Homo sapiens
  misc_RNA (1)...(19): siRNA sense strand
gagcugcuucucgauguga

SEQ ID NO: 1716280 - RNA, 19 nt, Homo sapiens
  misc_RNA (1)...(19): siRNA sense strand
cagagagggccaagaugga

SEQ ID NO: 1716281 - RNA, 19 nt, Homo sapiens
  misc_RNA (1)...(19): siRNA sense strand
gggcagaagaguggaaaca

SEQ ID NO: 1716282 - RNA, 19 nt, Homo sapiens
  misc_RNA (1)...(19): siRNA sense strand
gacagagaaugggcagaag

SEQ ID NO: 1716283 - RNA, 19 nt, Homo sapiens
  misc_RNA (1)...(19): siRNA sense strand
ucacagacuaacagacaga

SEQ ID NO: 1716284 - RNA, 19 nt, Homo sapiens
  misc_RNA (1)...(19): siRNA sense strand
ccucagggacagaaacaga

SEQ ID NO: 1716285 - RNA, 19 nt, Homo sapiens
  misc_RNA (1)...(19): siRNA sense strand
uggaugauauggccauugc

SEQ ID NO: 1716286 - RNA, 19 nt, Homo sapiens
  misc_RNA (1)...(19): siRNA sense strand
agacagaaccaaagaaaau

SEQ ID NO: 1716287 - RNA, 19 nt, Homo sapiens
  misc_RNA (1)...(19): siRNA sense strand
aagcgagaguugcuggaau

SEQ ID NO: 1716288 - RNA, 19 nt, Homo sapiens
  misc_RNA (1)...(19): siRNA sense strand
ggaaacaucuugaccaucu

SEQ ID NO: 1716289 - RNA, 19 nt, Homo sapiens
  misc_RNA (1)...(19): siRNA sense strand
gaacuccacuuugacaauu

SEQ ID NO: 1716290 - RNA, 19 nt, Homo sapiens
  misc_RNA (1)...(19): siRNA sense strand
gcagucagcuccucuguca

SEQ ID NO: 1716291 - RNA, 19 nt, Homo sapiens
  misc_RNA (1)...(19): siRNA sense strand
gcuacuaacuucccacuga

SEQ ID NO: 1716292 - RNA, 19 nt, Homo sapiens
  misc_RNA (1)...(19): siRNA sense strand
gaggagaucuggaagaaag

SEQ ID NO: 1716293 - RNA, 19 nt, Homo sapiens
  misc_RNA (1)...(19): siRNA sense strand
gcaaugggccuuccucuuc

SEQ ID NO: 1716294 - RNA, 19 nt, Homo sapiens
  misc_RNA (1)...(19): siRNA sense strand
aagcgaccaugcacuauua

SEQ ID NO: 1716295 - RNA, 19 nt, Homo sapiens
  misc_RNA (1)...(19): siRNA sense strand
gcgcaagacuggccaaaca

SEQ ID NO: 1716296 - RNA, 19 nt, Homo sapiens
  misc_RNA (1)...(19): siRNA sense strand
gcagaagaguggaaacauc

SEQ ID NO: 1716297 - RNA, 19 nt, Homo sapiens
  misc_RNA (1)...(19): siRNA sense strand
gagaguugcuggaauugug

SEQ ID NO: 1716298 - RNA, 19 nt, Homo sapiens
  misc_RNA (1)...(19): siRNA sense strand
gaggcgaacuccagacaga

SEQ ID NO: 1716299 - RNA, 19 nt, Homo sapiens
  misc_RNA (1)...(19): siRNA sense strand
gaagcaccaucacaucugu

SEQ ID NO: 1716300 - RNA, 19 nt, Homo sapiens
  misc_RNA (1)...(19): siRNA sense strand
caacagagagggccaagau

SEQ ID NO: 1716301 - RNA, 19 nt, Homo sapiens
  misc_RNA (1)...(19): siRNA sense strand
gcggaaagcccacgacaug

SEQ ID NO: 1716302 - RNA, 19 nt, Homo sapiens
  misc_RNA (1)...(19): siRNA sense strand
cgacaacguuaacuaaugg

SEQ ID NO: 1716303 - RNA, 19 nt, Homo sapiens
  misc_RNA (1)...(19): siRNA sense strand
gaucacagacuaacagaca

SEQ ID NO: 1716304 - RNA, 19 nt, Homo sapiens
  misc_RNA (1)...(19): siRNA sense strand
cccaauggcuucagcaaug

SEQ ID NO: 1716305 - RNA, 19 nt, Homo sapiens
  misc_RNA (1)...(19): siRNA sense strand
ggacagaaacagaccuaug

SEQ ID NO: 1716306 - RNA, 19 nt, Homo sapiens
  misc_RNA (1)...(19): siRNA sense strand
gcacaaagacugggagaag

SEQ ID NO: 1716307 - RNA, 19 nt, Homo sapiens
  misc_RNA (1)...(19): siRNA sense strand
ccgauacuguggcucauuu

SEQ ID NO: 1716308 - RNA, 19 nt, Homo sapiens
  misc_RNA (1)...(19): siRNA sense strand
cgagauaggagaaagaguu

SEQ ID NO: 1716309 - RNA, 19 nt, Homo sapiens
  misc_RNA (1)...(19): siRNA sense strand
ugacauuucacccgagaua

SEQ ID NO: 1716310 - RNA, 19 nt, Homo sapiens
  misc_RNA (1)...(19): siRNA sense strand
gacaugaucacaacagaga

SEQ ID NO: 1716311 - RNA, 19 nt, Homo sapiens
  misc_RNA (1)...(19): siRNA sense strand
ggaaagcccacgacaugau

SEQ ID NO: 1716312 - RNA, 19 nt, Homo sapiens
  misc_RNA (1)...(19): siRNA sense strand
ccgacaacguuaacuaaug

SEQ ID NO: 1716313 - RNA, 19 nt, Homo sapiens
  misc_RNA (1)...(19): siRNA sense strand
guacuaaggcggugucaag

SEQ ID NO: 1716314 - RNA, 19 nt, Homo sapiens
  misc_RNA (1)...(19): siRNA sense strand
ccagacagaaccaaagaaa

SEQ ID NO: 1716315 - RNA, 19 nt, Homo sapiens
  misc_RNA (1)...(19): siRNA sense strand
uggcacacgucaagaagaa

SEQ ID NO: 1716316 - RNA, 19 nt, Homo sapiens
  misc_RNA (1)...(19): siRNA sense strand
gcaagacuggccaaacaga

SEQ ID NO: 1716317 - RNA, 19 nt, Homo sapiens
  misc_RNA (1)...(19): siRNA sense strand
ggagaagcaccaucacauc

SEQ ID NO: 1716318 - RNA, 19 nt, Homo sapiens
  misc_RNA (1)...(19): siRNA sense strand
ccuccucucuggcuaauca

SEQ ID NO: 1716319 - RNA, 19 nt, Homo sapiens
  misc_RNA (1)...(19): siRNA sense strand
aagcagaccgggaagaauu

SEQ ID NO: 1716320 - RNA, 19 nt, Homo sapiens
  misc_RNA (1)...(19): siRNA sense strand
cuaaggcggugucaagaag

SEQ ID NO: 1716321 - RNA, 19 nt, Homo sapiens
  misc_RNA (1)...(19): siRNA sense strand
caucuugaccaucuguuaa

SEQ ID NO: 1716322 - RNA, 19 nt, Homo sapiens
  misc_RNA (1)...(19): siRNA sense strand
gaugugaagacgcaaucua

SEQ ID NO: 1716323 - RNA, 19 nt, Homo sapiens
  misc_RNA (1)...(19): siRNA sense strand
gcacacgucaagaagaaau

SEQ ID NO: 1716324 - RNA, 19 nt, Homo sapiens
  misc_RNA (1)...(19): siRNA sense strand
gacagaaacagaccuaugg

SEQ ID NO: 1716325 - RNA, 19 nt, Homo sapiens
  misc_RNA (1)...(19): siRNA sense strand
gagagccuuugcacucaga

SEQ ID NO: 1716326 - RNA, 19 nt, Homo sapiens
  misc_RNA (1)...(19): siRNA sense strand
gaaagcccacgacaugauc

SEQ ID NO: 1716327 - RNA, 19 nt, Homo sapiens
  misc_RNA (1)...(19): siRNA sense strand
gcauggcacacgucaagaa

SEQ ID NO: 1716328 - RNA, 19 nt, Homo sapiens
  misc_RNA (1)...(19): siRNA sense strand
cagcgguacaguccaaaua

SEQ ID NO: 1716329 - RNA, 19 nt, Homo sapiens
  misc_RNA (1)...(19): siRNA sense strand
cagagagccuuugcacuca

SEQ ID NO: 1716330 - RNA, 19 nt, Homo sapiens
  misc_RNA (1)...(19): siRNA sense strand
gagaagcaccaucacaucu

SEQ ID NO: 1716331 - RNA, 19 nt, Homo sapiens
  misc_RNA (1)...(19): siRNA sense strand
gcugacuccuccaacaaug

SEQ ID NO: 1716332 - RNA, 19 nt, Homo sapiens
  misc_RNA (1)...(19): siRNA sense strand
caccuccaccucagcauua

SEQ ID NO: 1716333 - RNA, 19 nt, Homo sapiens
  misc_RNA (1)...(19): siRNA sense strand
acagaacccugcccaguac

SEQ ID NO: 1716334 - RNA, 19 nt, Homo sapiens
  misc_RNA (1)...(19): siRNA sense strand
caucgggaauuccuucaca

SEQ ID NO: 1716335 - RNA, 19 nt, Homo sapiens
  misc_RNA (1)...(19): siRNA sense strand
guggaaacaucuugaccau

SEQ ID NO: 1716336 - RNA, 19 nt, Homo sapiens
  misc_RNA (1)...(19): siRNA sense strand
caagaagaaaugauugauc

SEQ ID NO: 1716337 - RNA, 19 nt, Homo sapiens
  misc_RNA (1)...(19): siRNA sense strand
caagcgaccaugcacuauu

SEQ ID NO: 1716338 - RNA, 19 nt, Homo sapiens
  misc_RNA (1)...(19): siRNA sense strand
cagagcugcuucucgaugu

SEQ ID NO: 1716339 - RNA, 19 nt, Homo sapiens
  misc_RNA (1)...(19): siRNA sense strand
gaaacaucuugaccaucug

SEQ ID NO: 1716340 - RNA, 19 nt, Homo sapiens
  misc_RNA (1)...(19): siRNA sense strand
gagauaggagaaagaguuc

SEQ ID NO: 1716341 - RNA, 19 nt, Homo sapiens
  misc_RNA (1)...(19): siRNA sense strand
caaugggccuuccucuucu

SEQ ID NO: 1716342 - RNA, 19 nt, Homo sapiens
  misc_RNA (1)...(19): siRNA sense strand
gggagaagcaccaucacau

SEQ ID NO: 1716343 - RNA, 19 nt, Homo sapiens
  misc_RNA (1)...(19): siRNA sense strand
cugaggaggccgucaauga

SEQ ID NO: 1716344 - RNA, 19 nt, Homo sapiens
  misc_RNA (1)...(19): siRNA sense strand
uaauggacaugguagaaaa

SEQ ID NO: 1716345 - RNA, 19 nt, Homo sapiens
  misc_RNA (1)...(19): siRNA sense strand
cauuaccguuuggaugaua

SEQ ID NO: 1716346 - RNA, 19 nt, Homo sapiens
  misc_RNA (1)...(19): siRNA sense strand
caccucagcauuaccguuu

SEQ ID NO: 1716347 - RNA, 19 nt, Homo sapiens
  misc_RNA (1)...(19): siRNA sense strand
ggccagcgguacaguccaa

SEQ ID NO: 1716348 - RNA, 19 nt, Homo sapiens
  misc_RNA (1)...(19): siRNA sense strand
caccgacaacguuaacuaa

SEQ ID NO: 1716349 - RNA, 19 nt, Homo sapiens
  misc_RNA (1)...(19): siRNA sense strand
caagacuggccaaacagaa

SEQ ID NO: 1716350 - RNA, 19 nt, Homo sapiens
  misc_RNA (1)...(19): siRNA sense strand
cagugacgccgaggacuua

SEQ ID NO: 1716351 - RNA, 19 nt, Homo sapiens
  misc_RNA (1)...(19): siRNA sense strand
cauaauggacaugguagaa

SEQ ID NO: 1716352 - RNA, 19 nt, Homo sapiens
  misc_RNA (1)...(19): siRNA sense strand
cuguuaaacugcauaaugg

SEQ ID NO: 1716353 - RNA, 19 nt, Homo sapiens
  misc_RNA (1)...(19): siRNA sense strand
cagacuaacagacagagaa

SEQ ID NO: 1716354 - RNA, 19 nt, Homo sapiens
  misc_RNA (1)...(19): siRNA sense strand
aacagaacccugcccagua

SEQ ID NO: 1716355 - RNA, 19 nt, Homo sapiens
  misc_RNA (1)...(19): siRNA sense strand
ggcacgagccauucuccua

SEQ ID NO: 1716356 - RNA, 19 nt, Homo sapiens
  misc_RNA (1)...(19): siRNA sense strand
gaagcagaccgggaagaau

SEQ ID NO: 1716357 - RNA, 19 nt, Homo sapiens
  misc_RNA (1)...(19): siRNA sense strand
ccacuuugacaauugaaga

SEQ ID NO: 1716358 - RNA, 19 nt, Homo sapiens
  misc_RNA (1)...(19): siRNA sense strand
ggagacacaccugcaguca

SEQ ID NO: 1716359 - RNA, 19 nt, Homo sapiens
  misc_RNA (1)...(19): siRNA sense strand
agcgagaguugcuggaauu

SEQ ID NO: 1716360 - RNA, 19 nt, Homo sapiens
  misc_RNA (1)...(19): siRNA sense strand
gcauuaccguuuggaugau

SEQ ID NO: 1716361 - RNA, 19 nt, Homo sapiens
  misc_RNA (1)...(19): siRNA sense strand
guaccucgcccagcaugaa

SEQ ID NO: 1716362 - RNA, 19 nt, Homo sapiens
  misc_RNA (1)...(19): siRNA sense strand
ggccguaaagcgagugaaa

SEQ ID NO: 1716363 - RNA, 19 nt, Homo sapiens
  misc_RNA (1)...(19): siRNA sense strand
agacucaccuguggaugug

SEQ ID NO: 1716364 - RNA, 19 nt, Homo sapiens
  misc_RNA (1)...(19): siRNA sense strand
gcaagcgaccaugcacuau

SEQ ID NO: 1716365 - RNA, 19 nt, Homo sapiens
  misc_RNA (1)...(19): siRNA sense strand
uaaacugcauaauggacau

SEQ ID NO: 1716366 - RNA, 19 nt, Homo sapiens
  misc_RNA (1)...(19): siRNA sense strand
ucuguuaaacugcauaaug

SEQ ID NO: 1716367 - RNA, 19 nt, Homo sapiens
  misc_RNA (1)...(19): siRNA sense strand
agacagagaaugggcagaa

SEQ ID NO: 1716368 - RNA, 19 nt, Homo sapiens
  misc_RNA (1)...(19): siRNA sense strand
caguccaaauaacggcuua

SEQ ID NO: 1716369 - RNA, 19 nt, Homo sapiens
  misc_RNA (1)...(19): siRNA sense strand
cagaagaguggaaacaucu

SEQ ID NO: 1716370 - RNA, 19 nt, Homo sapiens
  misc_RNA (1)...(19): siRNA sense strand
acaccgacaacguuaacua

SEQ ID NO: 1716371 - RNA, 19 nt, Homo sapiens
  misc_RNA (1)...(19): siRNA sense strand
ccaauggcuucagcaaugg

SEQ ID NO: 1716372 - RNA, 19 nt, Homo sapiens
  misc_RNA (1)...(19): siRNA sense strand
gcagcagagucccgucaac

SEQ ID NO: 1716373 - RNA, 19 nt, Homo sapiens
  misc_RNA (1)...(19): siRNA sense strand
gcauaauggacaugguaga

SEQ ID NO: 1716374 - RNA, 19 nt, Homo sapiens
  misc_RNA (1)...(19): siRNA sense strand
cuacagggacuccuaucga

SEQ ID NO: 1716375 - RNA, 19 nt, Homo sapiens
  misc_RNA (1)...(19): siRNA sense strand
gcgguacaguccaaauaac

SEQ ID NO: 1716376 - RNA, 19 nt, Homo sapiens
  misc_RNA (1)...(19): siRNA sense strand
gaaaccugcaguggcugua

SEQ ID NO: 1716377 - RNA, 19 nt, Homo sapiens
  misc_RNA (1)...(19): siRNA sense strand
ugcaagaagcuacuaacuu

SEQ ID NO: 1716378 - RNA, 19 nt, Homo sapiens
  misc_RNA (1)...(19): siRNA sense strand
ccacugagaccuuuuguca

SEQ ID NO: 1716379 - RNA, 19 nt, Homo sapiens
  misc_RNA (1)...(19): siRNA sense strand
gagcugcuucucgauguga

SEQ ID NO: 1716380 - RNA, 19 nt, Homo sapiens
  misc_RNA (1)...(19): siRNA sense strand
cagagagggccaagaugga

SEQ ID NO: 1716381 - RNA, 19 nt, Homo sapiens
  misc_RNA (1)...(19): siRNA sense strand
gggcagaagaguggaaaca

SEQ ID NO: 1716382 - RNA, 19 nt, Homo sapiens
  misc_RNA (1)...(19): siRNA sense strand
gacagagaaugggcagaag

SEQ ID NO: 1716383 - RNA, 19 nt, Homo sapiens
  misc_RNA (1)...(19): siRNA sense strand
ucacagacuaacagacaga

SEQ ID NO: 1716384 - RNA, 19 nt, Homo sapiens
  misc_RNA (1)...(19): siRNA sense strand
ccucagggacagaaacaga

SEQ ID NO: 1716385 - RNA, 19 nt, Homo sapiens
  misc_RNA (1)...(19): siRNA sense strand
uggaugauauggccauugc

SEQ ID NO: 1716386 - RNA, 19 nt, Homo sapiens
  misc_RNA (1)...(19): siRNA sense strand
agacagaaccaaagaaaau

SEQ ID NO: 1716387 - RNA, 19 nt, Homo sapiens
  misc_RNA (1)...(19): siRNA sense strand
aagcgagaguugcuggaau

SEQ ID NO: 1716388 - RNA, 19 nt, Homo sapiens
  misc_RNA (1)...(19): siRNA sense strand
gaacagaucaagcaaauua

SEQ ID NO: 1716389 - RNA, 19 nt, Homo sapiens
  misc_RNA (1)...(19): siRNA sense strand
ggagagaaauucaagcaaa

SEQ ID NO: 1716390 - RNA, 19 nt, Homo sapiens
  misc_RNA (1)...(19): siRNA sense strand
gaacggagacuacuugugu

SEQ ID NO: 1716391 - RNA, 19 nt, Homo sapiens
  misc_RNA (1)...(19): siRNA sense strand
gaagaaauacucuaagauc

SEQ ID NO: 1716392 - RNA, 19 nt, Homo sapiens
  misc_RNA (1)...(19): siRNA sense strand
ggaagcagauggaaucgau

SEQ ID NO: 1716393 - RNA, 19 nt, Homo sapiens
  misc_RNA (1)...(19): siRNA sense strand
gaacagaaggaucguuuga

SEQ ID NO: 1716394 - RNA, 19 nt, Homo sapiens
  misc_RNA (1)...(19): siRNA sense strand
ggauaucugugucuuucua

SEQ ID NO: 1716395 - RNA, 19 nt, Homo sapiens
  misc_RNA (1)...(19): siRNA sense strand
gcaccuaccuggcuaccuu

SEQ ID NO: 1716396 - RNA, 19 nt, Homo sapiens
  misc_RNA (1)...(19): siRNA sense strand
ggagacuacuuguguguga

SEQ ID NO: 1716397 - RNA, 19 nt, Homo sapiens
  misc_RNA (1)...(19): siRNA sense strand
gagagaaauucaagcaaau

SEQ ID NO: 1716398 - RNA, 19 nt, Homo sapiens
  misc_RNA (1)...(19): siRNA sense strand
gaagaacggagacuacuug

SEQ ID NO: 1716399 - RNA, 19 nt, Homo sapiens
  misc_RNA (1)...(19): siRNA sense strand
gaagaaagagcgagaugga

SEQ ID NO: 1716400 - RNA, 19 nt, Homo sapiens
  misc_RNA (1)...(19): siRNA sense strand
gaagaucucugggauaaaa

SEQ ID NO: 1716401 - RNA, 19 nt, Homo sapiens
  misc_RNA (1)...(19): siRNA sense strand
ucaagcaaauucagagauu

SEQ ID NO: 1716402 - RNA, 19 nt, Homo sapiens
  misc_RNA (1)...(19): siRNA sense strand
gagagaaggcgcaccauga

SEQ ID NO: 1716403 - RNA, 19 nt, Homo sapiens
  misc_RNA (1)...(19): siRNA sense strand
gcagagaucaguacagugu

SEQ ID NO: 1716404 - RNA, 19 nt, Homo sapiens
  misc_RNA (1)...(19): siRNA sense strand
ucuaagaucuuugaacaga

SEQ ID NO: 1716405 - RNA, 19 nt, Homo sapiens
  misc_RNA (1)...(19): siRNA sense strand
gggaagaggagaccauuga

SEQ ID NO: 1716406 - RNA, 19 nt, Homo sapiens
  misc_RNA (1)...(19): siRNA sense strand
ggaugacccucaggccaua

SEQ ID NO: 1716407 - RNA, 19 nt, Homo sapiens
  misc_RNA (1)...(19): siRNA sense strand
uugaagaucucugggauaa

SEQ ID NO: 1716408 - RNA, 19 nt, Homo sapiens
  misc_RNA (1)...(19): siRNA sense strand
gaagagggguuuucacugu

SEQ ID NO: 1716409 - RNA, 19 nt, Homo sapiens
  misc_RNA (1)...(19): siRNA sense strand
ggagaccgcacuuccauau

SEQ ID NO: 1716410 - RNA, 19 nt, Homo sapiens
  misc_RNA (1)...(19): siRNA sense strand
gcggauaucugugucuuuc

SEQ ID NO: 1716411 - RNA, 19 nt, Homo sapiens
  misc_RNA (1)...(19): siRNA sense strand
gaacaucgcagagcacuac

SEQ ID NO: 1716412 - RNA, 19 nt, Homo sapiens
  misc_RNA (1)...(19): siRNA sense strand
guccaaagccucaaaggaa

SEQ ID NO: 1716413 - RNA, 19 nt, Homo sapiens
  misc_RNA (1)...(19): siRNA sense strand
ggguucagcuuauugacuu

SEQ ID NO: 1716414 - RNA, 19 nt, Homo sapiens
  misc_RNA (1)...(19): siRNA sense strand
cugaagaaauacucuaaga

SEQ ID NO: 1716415 - RNA, 19 nt, Homo sapiens
  misc_RNA (1)...(19): siRNA sense strand
agaccgcacuuccauauuc

SEQ ID NO: 1716416 - RNA, 19 nt, Homo sapiens
  misc_RNA (1)...(19): siRNA sense strand
gaguaugaacggugccuua

SEQ ID NO: 1716417 - RNA, 19 nt, Homo sapiens
  misc_RNA (1)...(19): siRNA sense strand
cgugagcgaggaagaauua

SEQ ID NO: 1716418 - RNA, 19 nt, Homo sapiens
  misc_RNA (1)...(19): siRNA sense strand
caagaagaguuugaagauc

SEQ ID NO: 1716419 - RNA, 19 nt, Homo sapiens
  misc_RNA (1)...(19): siRNA sense strand
cccaggagcucuauaugga

SEQ ID NO: 1716420 - RNA, 19 nt, Homo sapiens
  misc_RNA (1)...(19): siRNA sense strand
gacaagaagaguuugaaga

SEQ ID NO: 1716421 - RNA, 19 nt, Homo sapiens
  misc_RNA (1)...(19): siRNA sense strand
ggagauguacucaaagauc

SEQ ID NO: 1716422 - RNA, 19 nt, Homo sapiens
  misc_RNA (1)...(19): siRNA sense strand
aagaagaguuugaagaucu

SEQ ID NO: 1716423 - RNA, 19 nt, Homo sapiens
  misc_RNA (1)...(19): siRNA sense strand
caagaucuuuuccaaguuu

SEQ ID NO: 1716424 - RNA, 19 nt, Homo sapiens
  misc_RNA (1)...(19): siRNA sense strand
uaagaucuuugaacagaag

SEQ ID NO: 1716425 - RNA, 19 nt, Homo sapiens
  misc_RNA (1)...(19): siRNA sense strand
ggaaccaaauggaaguaag

SEQ ID NO: 1716426 - RNA, 19 nt, Homo sapiens
  misc_RNA (1)...(19): siRNA sense strand
cuaugaaacuccuucuaug

SEQ ID NO: 1716427 - RNA, 19 nt, Homo sapiens
  misc_RNA (1)...(19): siRNA sense strand
acugggagauguacucaaa

SEQ ID NO: 1716428 - RNA, 19 nt, Homo sapiens
  misc_RNA (1)...(19): siRNA sense strand
gaaccaaauggaaguaagu

SEQ ID NO: 1716429 - RNA, 19 nt, Homo sapiens
  misc_RNA (1)...(19): siRNA sense strand
acagaaggaucguuugagu

SEQ ID NO: 1716430 - RNA, 19 nt, Homo sapiens
  misc_RNA (1)...(19): siRNA sense strand
acucuaagaucuuugaaca

SEQ ID NO: 1716431 - RNA, 19 nt, Homo sapiens
  misc_RNA (1)...(19): siRNA sense strand
ggacgccuccugcagaaga

SEQ ID NO: 1716432 - RNA, 19 nt, Homo sapiens
  misc_RNA (1)...(19): siRNA sense strand
gucaaccucuuuacggauu

SEQ ID NO: 1716433 - RNA, 19 nt, Homo sapiens
  misc_RNA (1)...(19): siRNA sense strand
aggaacagaucaagcaaau

SEQ ID NO: 1716434 - RNA, 19 nt, Homo sapiens
  misc_RNA (1)...(19): siRNA sense strand
cguacuggcuguggacuuu

SEQ ID NO: 1716435 - RNA, 19 nt, Homo sapiens
  misc_RNA (1)...(19): siRNA sense strand
cgagauggacagagacgua

SEQ ID NO: 1716436 - RNA, 19 nt, Homo sapiens
  misc_RNA (1)...(19): siRNA sense strand
agagaucaguacaguguga

SEQ ID NO: 1716437 - RNA, 19 nt, Homo sapiens
  misc_RNA (1)...(19): siRNA sense strand
uggauacgcuuagcaucua

SEQ ID NO: 1716438 - RNA, 19 nt, Homo sapiens
  misc_RNA (1)...(19): siRNA sense strand
gacccugucucaauugaag

SEQ ID NO: 1716439 - RNA, 19 nt, Homo sapiens
  misc_RNA (1)...(19): siRNA sense strand
gauauuccagccaggguaa

SEQ ID NO: 1716440 - RNA, 19 nt, Homo sapiens
  misc_RNA (1)...(19): siRNA sense strand
agagcgagauggacagaga

SEQ ID NO: 1716441 - RNA, 19 nt, Homo sapiens
  misc_RNA (1)...(19): siRNA sense strand
ugggagauguacucaaaga

SEQ ID NO: 1716442 - RNA, 19 nt, Homo sapiens
  misc_RNA (1)...(19): siRNA sense strand
gaagaggagaccauugagu

SEQ ID NO: 1716443 - RNA, 19 nt, Homo sapiens
  misc_RNA (1)...(19): siRNA sense strand
gaaaccaucauagccuuug

SEQ ID NO: 1716444 - RNA, 19 nt, Homo sapiens
  misc_RNA (1)...(19): siRNA sense strand
ccaggaagcagauggaauc

SEQ ID NO: 1716445 - RNA, 19 nt, Homo sapiens
  misc_RNA (1)...(19): siRNA sense strand
ucaaugugguggacugcaa

SEQ ID NO: 1716446 - RNA, 19 nt, Homo sapiens
  misc_RNA (1)...(19): siRNA sense strand
acaagaagaguuugaagau

SEQ ID NO: 1716447 - RNA, 19 nt, Homo sapiens
  misc_RNA (1)...(19): siRNA sense strand
acgcuuagcaucuaugaaa

SEQ ID NO: 1716448 - RNA, 19 nt, Homo sapiens
  misc_RNA (1)...(19): siRNA sense strand
cuggcuaccuuucaucaaa

SEQ ID NO: 1716449 - RNA, 19 nt, Homo sapiens
  misc_RNA (1)...(19): siRNA sense strand
caagcaaauucagagauuc

SEQ ID NO: 1716450 - RNA, 19 nt, Homo sapiens
  misc_RNA (1)...(19): siRNA sense strand
gaggagggguggacacuga

SEQ ID NO: 1716451 - RNA, 19 nt, Homo sapiens
  misc_RNA (1)...(19): siRNA sense strand
agaaggaucguuugaguca

SEQ ID NO: 1716452 - RNA, 19 nt, Homo sapiens
  misc_RNA (1)...(19): siRNA sense strand
gaucugaagaaauacucua

SEQ ID NO: 1716453 - RNA, 19 nt, Homo sapiens
  misc_RNA (1)...(19): siRNA sense strand
gcagaagaacggagacuac

SEQ ID NO: 1716454 - RNA, 19 nt, Homo sapiens
  misc_RNA (1)...(19): siRNA sense strand
ugucucaauugaagaaaga

SEQ ID NO: 1716455 - RNA, 19 nt, Homo sapiens
  misc_RNA (1)...(19): siRNA sense strand
ggagaccauugaguucuuc

SEQ ID NO: 1716456 - RNA, 19 nt, Homo sapiens
  misc_RNA (1)...(19): siRNA sense strand
ggauacgcuuagcaucuau

SEQ ID NO: 1716457 - RNA, 19 nt, Homo sapiens
  misc_RNA (1)...(19): siRNA sense strand
gaagaauuacugggagaug

SEQ ID NO: 1716458 - RNA, 19 nt, Homo sapiens
  misc_RNA (1)...(19): siRNA sense strand
gaagaggaugggaagacaa

SEQ ID NO: 1716459 - RNA, 19 nt, Homo sapiens
  misc_RNA (1)...(19): siRNA sense strand
cuuauugacuucucaccuu

SEQ ID NO: 1716460 - RNA, 19 nt, Homo sapiens
  misc_RNA (1)...(19): siRNA sense strand
ugaagaggaugggaagaca

SEQ ID NO: 1716461 - RNA, 19 nt, Homo sapiens
  misc_RNA (1)...(19): siRNA sense strand
aagaggagaccauugaguu

SEQ ID NO: 1716462 - RNA, 19 nt, Homo sapiens
  misc_RNA (1)...(19): siRNA sense strand
uuacggauuuugacaagua

SEQ ID NO: 1716463 - RNA, 19 nt, Homo sapiens
  misc_RNA (1)...(19): siRNA sense strand
ccaaagccucaaaggaauu

SEQ ID NO: 1716464 - RNA, 19 nt, Homo sapiens
  misc_RNA (1)...(19): siRNA sense strand
gagacuacuugugugugaa

SEQ ID NO: 1716465 - RNA, 19 nt, Homo sapiens
  misc_RNA (1)...(19): siRNA sense strand
ggacaagaagaguuugaag

SEQ ID NO: 1716466 - RNA, 19 nt, Homo sapiens
  misc_RNA (1)...(19): siRNA sense strand
ggacccgaccgacuugaga

SEQ ID NO: 1716467 - RNA, 19 nt, Homo sapiens
  misc_RNA (1)...(19): siRNA sense strand
gagcgaggaagaauuacug

SEQ ID NO: 1716468 - RNA, 19 nt, Homo sapiens
  misc_RNA (1)...(19): siRNA sense strand
uaugugcguuggucuccua

SEQ ID NO: 1716469 - RNA, 19 nt, Homo sapiens
  misc_RNA (1)...(19): siRNA sense strand
acaaguauaugacgaucag

SEQ ID NO: 1716470 - RNA, 19 nt, Homo sapiens
  misc_RNA (1)...(19): siRNA sense strand
ucuaugaaacuccuucuau

SEQ ID NO: 1716471 - RNA, 19 nt, Homo sapiens
  misc_RNA (1)...(19): siRNA sense strand
gagaaggcgcaccaugaug

SEQ ID NO: 1716472 - RNA, 19 nt, Homo sapiens
  misc_RNA (1)...(19): siRNA sense strand
cuaagaucuuugaacagaa

SEQ ID NO: 1716473 - RNA, 19 nt, Homo sapiens
  misc_RNA (1)...(19): siRNA sense strand
cugggugccugaagacaaa

SEQ ID NO: 1716474 - RNA, 19 nt, Homo sapiens
  misc_RNA (1)...(19): siRNA sense strand
ucaaagaccuggggaacuu

SEQ ID NO: 1716475 - RNA, 19 nt, Homo sapiens
  misc_RNA (1)...(19): siRNA sense strand
agaauuacugggagaugua

SEQ ID NO: 1716476 - RNA, 19 nt, Homo sapiens
  misc_RNA (1)...(19): siRNA sense strand
uccaaagccucaaaggaau

SEQ ID NO: 1716477 - RNA, 19 nt, Homo sapiens
  misc_RNA (1)...(19): siRNA sense strand
gaggcagaaugcagagauc

SEQ ID NO: 1716478 - RNA, 19 nt, Homo sapiens
  misc_RNA (1)...(19): siRNA sense strand
ucaagauguucgacaagca

SEQ ID NO: 1716479 - RNA, 19 nt, Homo sapiens
  misc_RNA (1)...(19): siRNA sense strand
ggacugcacggucaugaac

SEQ ID NO: 1716480 - RNA, 19 nt, Homo sapiens
  misc_RNA (1)...(19): siRNA sense strand
agugggauauuccagagaa

SEQ ID NO: 1716481 - RNA, 19 nt, Homo sapiens
  misc_RNA (1)...(19): siRNA sense strand
cacaagaucuuuuccaagu

SEQ ID NO: 1716482 - RNA, 19 nt, Homo sapiens
  misc_RNA (1)...(19): siRNA sense strand
ucagcccauuggccuauuu

SEQ ID NO: 1716483 - RNA, 19 nt, Homo sapiens
  misc_RNA (1)...(19): siRNA sense strand
cagaaugcagagaucagua

SEQ ID NO: 1716484 - RNA, 19 nt, Homo sapiens
  misc_RNA (1)...(19): siRNA sense strand
uuacguuacuggcuugaag

SEQ ID NO: 1716485 - RNA, 19 nt, Homo sapiens
  misc_RNA (1)...(19): siRNA sense strand
ugaaagaaaccaucauagc

SEQ ID NO: 1716486 - RNA, 19 nt, Homo sapiens
  misc_RNA (1)...(19): siRNA sense strand
ugacaagcagcacacauuc

SEQ ID NO: 1716487 - RNA, 19 nt, Homo sapiens
  misc_RNA (1)...(19): siRNA sense strand
caaagccucaaaggaauug

SEQ ID NO: 1716488 - RNA, 19 nt, Homo sapiens
  misc_RNA (1)...(19): siRNA sense strand
gaacagaucaagcaaauua

SEQ ID NO: 1716489 - RNA, 19 nt, Homo sapiens
  misc_RNA (1)...(19): siRNA sense strand
ggagagaaauucaagcaaa

SEQ ID NO: 1716490 - RNA, 19 nt, Homo sapiens
  misc_RNA (1)...(19): siRNA sense strand
gaacggagacuacuugugu

SEQ ID NO: 1716491 - RNA, 19 nt, Homo sapiens
  misc_RNA (1)...(19): siRNA sense strand
gaagaaauacucuaagauc

SEQ ID NO: 1716492 - RNA, 19 nt, Homo sapiens
  misc_RNA (1)...(19): siRNA sense strand
ggaagcagauggaaucgau

SEQ ID NO: 1716493 - RNA, 19 nt, Homo sapiens
  misc_RNA (1)...(19): siRNA sense strand
gaacagaaggaucguuuga

SEQ ID NO: 1716494 - RNA, 19 nt, Homo sapiens
  misc_RNA (1)...(19): siRNA sense strand
ggauaucugugucuuucua

SEQ ID NO: 1716495 - RNA, 19 nt, Homo sapiens
  misc_RNA (1)...(19): siRNA sense strand
gcaccuaccuggcuaccuu

SEQ ID NO: 1716496 - RNA, 19 nt, Homo sapiens
  misc_RNA (1)...(19): siRNA sense strand
ggagacuacuuguguguga

SEQ ID NO: 1716497 - RNA, 19 nt, Homo sapiens
  misc_RNA (1)...(19): siRNA sense strand
gagagaaauucaagcaaau

SEQ ID NO: 1716498 - RNA, 19 nt, Homo sapiens
  misc_RNA (1)...(19): siRNA sense strand
gaagaacggagacuacuug

SEQ ID NO: 1716499 - RNA, 19 nt, Homo sapiens
  misc_RNA (1)...(19): siRNA sense strand
gaagaaagagcgagaugga

SEQ ID NO: 1716500 - RNA, 19 nt, Homo sapiens
  misc_RNA (1)...(19): siRNA sense strand
gaagaucucugggauaaaa

SEQ ID NO: 1716501 - RNA, 19 nt, Homo sapiens
  misc_RNA (1)...(19): siRNA sense strand
ucaagcaaauucagagauu

SEQ ID NO: 1716502 - RNA, 19 nt, Homo sapiens
  misc_RNA (1)...(19): siRNA sense strand
gagagaaggcgcaccauga

SEQ ID NO: 1716503 - RNA, 19 nt, Homo sapiens
  misc_RNA (1)...(19): siRNA sense strand
gcagagaucaguacagugu

SEQ ID NO: 1716504 - RNA, 19 nt, Homo sapiens
  misc_RNA (1)...(19): siRNA sense strand
ucuaagaucuuugaacaga

SEQ ID NO: 1716505 - RNA, 19 nt, Homo sapiens
  misc_RNA (1)...(19): siRNA sense strand
gggaagaggagaccauuga

SEQ ID NO: 1716506 - RNA, 19 nt, Homo sapiens
  misc_RNA (1)...(19): siRNA sense strand
ggaugacccucaggccaua

SEQ ID NO: 1716507 - RNA, 19 nt, Homo sapiens
  misc_RNA (1)...(19): siRNA sense strand
uugaagaucucugggauaa

SEQ ID NO: 1716508 - RNA, 19 nt, Homo sapiens
  misc_RNA (1)...(19): siRNA sense strand
gaagagggguuuucacugu

SEQ ID NO: 1716509 - RNA, 19 nt, Homo sapiens
  misc_RNA (1)...(19): siRNA sense strand
ggagaccgcacuuccauau

SEQ ID NO: 1716510 - RNA, 19 nt, Homo sapiens
  misc_RNA (1)...(19): siRNA sense strand
gcggauaucugugucuuuc

SEQ ID NO: 1716511 - RNA, 19 nt, Homo sapiens
  misc_RNA (1)...(19): siRNA sense strand
gaacaucgcagagcacuac

SEQ ID NO: 1716512 - RNA, 19 nt, Homo sapiens
  misc_RNA (1)...(19): siRNA sense strand
guccaaagccucaaaggaa

SEQ ID NO: 1716513 - RNA, 19 nt, Homo sapiens
  misc_RNA (1)...(19): siRNA sense strand
ggguucagcuuauugacuu

SEQ ID NO: 1716514 - RNA, 19 nt, Homo sapiens
  misc_RNA (1)...(19): siRNA sense strand
cugaagaaauacucuaaga

SEQ ID NO: 1716515 - RNA, 19 nt, Homo sapiens
  misc_RNA (1)...(19): siRNA sense strand
agaccgcacuuccauauuc

SEQ ID NO: 1716516 - RNA, 19 nt, Homo sapiens
  misc_RNA (1)...(19): siRNA sense strand
gaguaugaacggugccuua

SEQ ID NO: 1716517 - RNA, 19 nt, Homo sapiens
  misc_RNA (1)...(19): siRNA sense strand
cgugagcgaggaagaauua

SEQ ID NO: 1716518 - RNA, 19 nt, Homo sapiens
  misc_RNA (1)...(19): siRNA sense strand
caagaagaguuugaagauc

SEQ ID NO: 1716519 - RNA, 19 nt, Homo sapiens
  misc_RNA (1)...(19): siRNA sense strand
cccaggagcucuauaugga

SEQ ID NO: 1716520 - RNA, 19 nt, Homo sapiens
  misc_RNA (1)...(19): siRNA sense strand
gacaagaagaguuugaaga

SEQ ID NO: 1716521 - RNA, 19 nt, Homo sapiens
  misc_RNA (1)...(19): siRNA sense strand
ggagauguacucaaagauc

SEQ ID NO: 1716522 - RNA, 19 nt, Homo sapiens
  misc_RNA (1)...(19): siRNA sense strand
aagaagaguuugaagaucu

SEQ ID NO: 1716523 - RNA, 19 nt, Homo sapiens
  misc_RNA (1)...(19): siRNA sense strand
caagaucuuuuccaaguuu

SEQ ID NO: 1716524 - RNA, 19 nt, Homo sapiens
  misc_RNA (1)...(19): siRNA sense strand
uaagaucuuugaacagaag

SEQ ID NO: 1716525 - RNA, 19 nt, Homo sapiens
  misc_RNA (1)...(19): siRNA sense strand
ggaaccaaauggaaguaag

SEQ ID NO: 1716526 - RNA, 19 nt, Homo sapiens
  misc_RNA (1)...(19): siRNA sense strand
cuaugaaacuccuucuaug

SEQ ID NO: 1716527 - RNA, 19 nt, Homo sapiens
  misc_RNA (1)...(19): siRNA sense strand
acugggagauguacucaaa

SEQ ID NO: 1716528 - RNA, 19 nt, Homo sapiens
  misc_RNA (1)...(19): siRNA sense strand
gaaccaaauggaaguaagu

SEQ ID NO: 1716529 - RNA, 19 nt, Homo sapiens
  misc_RNA (1)...(19): siRNA sense strand
acagaaggaucguuugagu

SEQ ID NO: 1716530 - RNA, 19 nt, Homo sapiens
  misc_RNA (1)...(19): siRNA sense strand
acucuaagaucuuugaaca

SEQ ID NO: 1716531 - RNA, 19 nt, Homo sapiens
  misc_RNA (1)...(19): siRNA sense strand
ggacgccuccugcagaaga

SEQ ID NO: 1716532 - RNA, 19 nt, Homo sapiens
  misc_RNA (1)...(19): siRNA sense strand
gucaaccucuuuacggauu

SEQ ID NO: 1716533 - RNA, 19 nt, Homo sapiens
  misc_RNA (1)...(19): siRNA sense strand
aggaacagaucaagcaaau

SEQ ID NO: 1716534 - RNA, 19 nt, Homo sapiens
  misc_RNA (1)...(19): siRNA sense strand
cguacuggcuguggacuuu

SEQ ID NO: 1716535 - RNA, 19 nt, Homo sapiens
  misc_RNA (1)...(19): siRNA sense strand
cgagauggacagagacgua

SEQ ID NO: 1716536 - RNA, 19 nt, Homo sapiens
  misc_RNA (1)...(19): siRNA sense strand
agagaucaguacaguguga

SEQ ID NO: 1716537 - RNA, 19 nt, Homo sapiens
  misc_RNA (1)...(19): siRNA sense strand
uggauacgcuuagcaucua

SEQ ID NO: 1716538 - RNA, 19 nt, Homo sapiens
  misc_RNA (1)...(19): siRNA sense strand
gacccugucucaauugaag

SEQ ID NO: 1716539 - RNA, 19 nt, Homo sapiens
  misc_RNA (1)...(19): siRNA sense strand
gauauuccagccaggguaa

SEQ ID NO: 1716540 - RNA, 19 nt, Homo sapiens
  misc_RNA (1)...(19): siRNA sense strand
agagcgagauggacagaga

SEQ ID NO: 1716541 - RNA, 19 nt, Homo sapiens
  misc_RNA (1)...(19): siRNA sense strand
ugggagauguacucaaaga

SEQ ID NO: 1716542 - RNA, 19 nt, Homo sapiens
  misc_RNA (1)...(19): siRNA sense strand
gaagaggagaccauugagu

SEQ ID NO: 1716543 - RNA, 19 nt, Homo sapiens
  misc_RNA (1)...(19): siRNA sense strand
gaaaccaucauagccuuug

SEQ ID NO: 1716544 - RNA, 19 nt, Homo sapiens
  misc_RNA (1)...(19): siRNA sense strand
ccaggaagcagauggaauc

SEQ ID NO: 1716545 - RNA, 19 nt, Homo sapiens
  misc_RNA (1)...(19): siRNA sense strand
ucaaugugguggacugcaa

SEQ ID NO: 1716546 - RNA, 19 nt, Homo sapiens
  misc_RNA (1)...(19): siRNA sense strand
acaagaagaguuugaagau

SEQ ID NO: 1716547 - RNA, 19 nt, Homo sapiens
  misc_RNA (1)...(19): siRNA sense strand
acgcuuagcaucuaugaaa

SEQ ID NO: 1716548 - RNA, 19 nt, Homo sapiens
  misc_RNA (1)...(19): siRNA sense strand
cuggcuaccuuucaucaaa

SEQ ID NO: 1716549 - RNA, 19 nt, Homo sapiens
  misc_RNA (1)...(19): siRNA sense strand
caagcaaauucagagauuc

SEQ ID NO: 1716550 - RNA, 19 nt, Homo sapiens
  misc_RNA (1)...(19): siRNA sense strand
gaggagggguggacacuga

SEQ ID NO: 1716551 - RNA, 19 nt, Homo sapiens
  misc_RNA (1)...(19): siRNA sense strand
agaaggaucguuugaguca

SEQ ID NO: 1716552 - RNA, 19 nt, Homo sapiens
  misc_RNA (1)...(19): siRNA sense strand
gaucugaagaaauacucua

SEQ ID NO: 1716553 - RNA, 19 nt, Homo sapiens
  misc_RNA (1)...(19): siRNA sense strand
gcagaagaacggagacuac

SEQ ID NO: 1716554 - RNA, 19 nt, Homo sapiens
  misc_RNA (1)...(19): siRNA sense strand
ugucucaauugaagaaaga

SEQ ID NO: 1716555 - RNA, 19 nt, Homo sapiens
  misc_RNA (1)...(19): siRNA sense strand
ggagaccauugaguucuuc

SEQ ID NO: 1716556 - RNA, 19 nt, Homo sapiens
  misc_RNA (1)...(19): siRNA sense strand
ggauacgcuuagcaucuau

SEQ ID NO: 1716557 - RNA, 19 nt, Homo sapiens
  misc_RNA (1)...(19): siRNA sense strand
gaagaauuacugggagaug

SEQ ID NO: 1716558 - RNA, 19 nt, Homo sapiens
  misc_RNA (1)...(19): siRNA sense strand
gaagaggaugggaagacaa

SEQ ID NO: 1716559 - RNA, 19 nt, Homo sapiens
  misc_RNA (1)...(19): siRNA sense strand
cuuauugacuucucaccuu

SEQ ID NO: 1716560 - RNA, 19 nt, Homo sapiens
  misc_RNA (1)...(19): siRNA sense strand
ugaagaggaugggaagaca

SEQ ID NO: 1716561 - RNA, 19 nt, Homo sapiens
  misc_RNA (1)...(19): siRNA sense strand
aagaggagaccauugaguu

SEQ ID NO: 1716562 - RNA, 19 nt, Homo sapiens
  misc_RNA (1)...(19): siRNA sense strand
uuacggauuuugacaagua

SEQ ID NO: 1716563 - RNA, 19 nt, Homo sapiens
  misc_RNA (1)...(19): siRNA sense strand
ccaaagccucaaaggaauu

SEQ ID NO: 1716564 - RNA, 19 nt, Homo sapiens
  misc_RNA (1)...(19): siRNA sense strand
gagacuacuugugugugaa

SEQ ID NO: 1716565 - RNA, 19 nt, Homo sapiens
  misc_RNA (1)...(19): siRNA sense strand
ggacaagaagaguuugaag

SEQ ID NO: 1716566 - RNA, 19 nt, Homo sapiens
  misc_RNA (1)...(19): siRNA sense strand
ggacccgaccgacuugaga

SEQ ID NO: 1716567 - RNA, 19 nt, Homo sapiens
  misc_RNA (1)...(19): siRNA sense strand
gagcgaggaagaauuacug

SEQ ID NO: 1716568 - RNA, 19 nt, Homo sapiens
  misc_RNA (1)...(19): siRNA sense strand
uaugugcguuggucuccua

SEQ ID NO: 1716569 - RNA, 19 nt, Homo sapiens
  misc_RNA (1)...(19): siRNA sense strand
acaaguauaugacgaucag

SEQ ID NO: 1716570 - RNA, 19 nt, Homo sapiens
  misc_RNA (1)...(19): siRNA sense strand
ucuaugaaacuccuucuau

SEQ ID NO: 1716571 - RNA, 19 nt, Homo sapiens
  misc_RNA (1)...(19): siRNA sense strand
gagaaggcgcaccaugaug

SEQ ID NO: 1716572 - RNA, 19 nt, Homo sapiens
  misc_RNA (1)...(19): siRNA sense strand
cuaagaucuuugaacagaa

SEQ ID NO: 1716573 - RNA, 19 nt, Homo sapiens
  misc_RNA (1)...(19): siRNA sense strand
cugggugccugaagacaaa

SEQ ID NO: 1716574 - RNA, 19 nt, Homo sapiens
  misc_RNA (1)...(19): siRNA sense strand
ucaaagaccuggggaacuu

SEQ ID NO: 1716575 - RNA, 19 nt, Homo sapiens
  misc_RNA (1)...(19): siRNA sense strand
agaauuacugggagaugua

SEQ ID NO: 1716576 - RNA, 19 nt, Homo sapiens
  misc_RNA (1)...(19): siRNA sense strand
uccaaagccucaaaggaau

SEQ ID NO: 1716577 - RNA, 19 nt, Homo sapiens
  misc_RNA (1)...(19): siRNA sense strand
gaggcagaaugcagagauc

SEQ ID NO: 1716578 - RNA, 19 nt, Homo sapiens
  misc_RNA (1)...(19): siRNA sense strand
ucaagauguucgacaagca

SEQ ID NO: 1716579 - RNA, 19 nt, Homo sapiens
  misc_RNA (1)...(19): siRNA sense strand
ggacugcacggucaugaac

SEQ ID NO: 1716580 - RNA, 19 nt, Homo sapiens
  misc_RNA (1)...(19): siRNA sense strand
agugggauauuccagagaa

SEQ ID NO: 1716581 - RNA, 19 nt, Homo sapiens
  misc_RNA (1)...(19): siRNA sense strand
cacaagaucuuuuccaagu

SEQ ID NO: 1716582 - RNA, 19 nt, Homo sapiens
  misc_RNA (1)...(19): siRNA sense strand
ucagcccauuggccuauuu

SEQ ID NO: 1716583 - RNA, 19 nt, Homo sapiens
  misc_RNA (1)...(19): siRNA sense strand
cagaaugcagagaucagua

SEQ ID NO: 1716584 - RNA, 19 nt, Homo sapiens
  misc_RNA (1)...(19): siRNA sense strand
uuacguuacuggcuugaag

SEQ ID NO: 1716585 - RNA, 19 nt, Homo sapiens
  misc_RNA (1)...(19): siRNA sense strand
ugaaagaaaccaucauagc

SEQ ID NO: 1716586 - RNA, 19 nt, Homo sapiens
  misc_RNA (1)...(19): siRNA sense strand
ugacaagcagcacacauuc

SEQ ID NO: 1716587 - RNA, 19 nt, Homo sapiens
  misc_RNA (1)...(19): siRNA sense strand
caaagccucaaaggaauug

SEQ ID NO: 1716588 - RNA, 19 nt, Homo sapiens
  misc_RNA (1)...(19): siRNA sense strand
gaacagaucaagcaaauua

SEQ ID NO: 1716589 - RNA, 19 nt, Homo sapiens
  misc_RNA (1)...(19): siRNA sense strand
ggagagaaauucaagcaaa

SEQ ID NO: 1716590 - RNA, 19 nt, Homo sapiens
  misc_RNA (1)...(19): siRNA sense strand
gaacggagacuacuugugu

SEQ ID NO: 1716591 - RNA, 19 nt, Homo sapiens
  misc_RNA (1)...(19): siRNA sense strand
gaagaaauacucuaagauc

SEQ ID NO: 1716592 - RNA, 19 nt, Homo sapiens
  misc_RNA (1)...(19): siRNA sense strand
ggaagcagauggaaucgau

SEQ ID NO: 1716593 - RNA, 19 nt, Homo sapiens
  misc_RNA (1)...(19): siRNA sense strand
gaacagaaggaucguuuga

SEQ ID NO: 1716594 - RNA, 19 nt, Homo sapiens
  misc_RNA (1)...(19): siRNA sense strand
ggauaucugugucuuucua

SEQ ID NO: 1716595 - RNA, 19 nt, Homo sapiens
  misc_RNA (1)...(19): siRNA sense strand
gcaccuaccuggcuaccuu

SEQ ID NO: 1716596 - RNA, 19 nt, Homo sapiens
  misc_RNA (1)...(19): siRNA sense strand
ggagacuacuuguguguga

SEQ ID NO: 1716597 - RNA, 19 nt, Homo sapiens
  misc_RNA (1)...(19): siRNA sense strand
gagagaaauucaagcaaau

SEQ ID NO: 1716598 - RNA, 19 nt, Homo sapiens
  misc_RNA (1)...(19): siRNA sense strand
gaagaacggagacuacuug

SEQ ID NO: 1716599 - RNA, 19 nt, Homo sapiens
  misc_RNA (1)...(19): siRNA sense strand
gaagaaagagcgagaugga

SEQ ID NO: 1716600 - RNA, 19 nt, Homo sapiens
  misc_RNA (1)...(19): siRNA sense strand
gaagaucucugggauaaaa

SEQ ID NO: 1716601 - RNA, 19 nt, Homo sapiens
  misc_RNA (1)...(19): siRNA sense strand
ucaagcaaauucagagauu

SEQ ID NO: 1716602 - RNA, 19 nt, Homo sapiens
  misc_RNA (1)...(19): siRNA sense strand
gagagaaggcgcaccauga

SEQ ID NO: 1716603 - RNA, 19 nt, Homo sapiens
  misc_RNA (1)...(19): siRNA sense strand
gcagagaucaguacagugu

SEQ ID NO: 1716604 - RNA, 19 nt, Homo sapiens
  misc_RNA (1)...(19): siRNA sense strand
ucuaagaucuuugaacaga

SEQ ID NO: 1716605 - RNA, 19 nt, Homo sapiens
  misc_RNA (1)...(19): siRNA sense strand
gggaagaggagaccauuga

SEQ ID NO: 1716606 - RNA, 19 nt, Homo sapiens
  misc_RNA (1)...(19): siRNA sense strand
ggaugacccucaggccaua

SEQ ID NO: 1716607 - RNA, 19 nt, Homo sapiens
  misc_RNA (1)...(19): siRNA sense strand
uugaagaucucugggauaa

SEQ ID NO: 1716608 - RNA, 19 nt, Homo sapiens
  misc_RNA (1)...(19): siRNA sense strand
gaagagggguuuucacugu

SEQ ID NO: 1716609 - RNA, 19 nt, Homo sapiens
  misc_RNA (1)...(19): siRNA sense strand
ggagaccgcacuuccauau

SEQ ID NO: 1716610 - RNA, 19 nt, Homo sapiens
  misc_RNA (1)...(19): siRNA sense strand
gcggauaucugugucuuuc

SEQ ID NO: 1716611 - RNA, 19 nt, Homo sapiens
  misc_RNA (1)...(19): siRNA sense strand
gaacaucgcagagcacuac

SEQ ID NO: 1716612 - RNA, 19 nt, Homo sapiens
  misc_RNA (1)...(19): siRNA sense strand
guccaaagccucaaaggaa

SEQ ID NO: 1716613 - RNA, 19 nt, Homo sapiens
  misc_RNA (1)...(19): siRNA sense strand
ggguucagcuuauugacuu

SEQ ID NO: 1716614 - RNA, 19 nt, Homo sapiens
  misc_RNA (1)...(19): siRNA sense strand
cugaagaaauacucuaaga

SEQ ID NO: 1716615 - RNA, 19 nt, Homo sapiens
  misc_RNA (1)...(19): siRNA sense strand
agaccgcacuuccauauuc

SEQ ID NO: 1716616 - RNA, 19 nt, Homo sapiens
  misc_RNA (1)...(19): siRNA sense strand
gaguaugaacggugccuua

SEQ ID NO: 1716617 - RNA, 19 nt, Homo sapiens
  misc_RNA (1)...(19): siRNA sense strand
cgugagcgaggaagaauua

SEQ ID NO: 1716618 - RNA, 19 nt, Homo sapiens
  misc_RNA (1)...(19): siRNA sense strand
caagaagaguuugaagauc

SEQ ID NO: 1716619 - RNA, 19 nt, Homo sapiens
  misc_RNA (1)...(19): siRNA sense strand
cccaggagcucuauaugga

SEQ ID NO: 1716620 - RNA, 19 nt, Homo sapiens
  misc_RNA (1)...(19): siRNA sense strand
gacaagaagaguuugaaga

SEQ ID NO: 1716621 - RNA, 19 nt, Homo sapiens
  misc_RNA (1)...(19): siRNA sense strand
ggagauguacucaaagauc

SEQ ID NO: 1716622 - RNA, 19 nt, Homo sapiens
  misc_RNA (1)...(19): siRNA sense strand
aagaagaguuugaagaucu

SEQ ID NO: 1716623 - RNA, 19 nt, Homo sapiens
  misc_RNA (1)...(19): siRNA sense strand
caagaucuuuuccaaguuu

SEQ ID NO: 1716624 - RNA, 19 nt, Homo sapiens
  misc_RNA (1)...(19): siRNA sense strand
uaagaucuuugaacagaag

SEQ ID NO: 1716625 - RNA, 19 nt, Homo sapiens
  misc_RNA (1)...(19): siRNA sense strand
ggaaccaaauggaaguaag

SEQ ID NO: 1716626 - RNA, 19 nt, Homo sapiens
  misc_RNA (1)...(19): siRNA sense strand
cuaugaaacuccuucuaug

SEQ ID NO: 1716627 - RNA, 19 nt, Homo sapiens
  misc_RNA (1)...(19): siRNA sense strand
acugggagauguacucaaa

SEQ ID NO: 1716628 - RNA, 19 nt, Homo sapiens
  misc_RNA (1)...(19): siRNA sense strand
gaaccaaauggaaguaagu

SEQ ID NO: 1716629 - RNA, 19 nt, Homo sapiens
  misc_RNA (1)...(19): siRNA sense strand
acagaaggaucguuugagu

SEQ ID NO: 1716630 - RNA, 19 nt, Homo sapiens
  misc_RNA (1)...(19): siRNA sense strand
acucuaagaucuuugaaca

SEQ ID NO: 1716631 - RNA, 19 nt, Homo sapiens
  misc_RNA (1)...(19): siRNA sense strand
ggacgccuccugcagaaga

SEQ ID NO: 1716632 - RNA, 19 nt, Homo sapiens
  misc_RNA (1)...(19): siRNA sense strand
gucaaccucuuuacggauu

SEQ ID NO: 1716633 - RNA, 19 nt, Homo sapiens
  misc_RNA (1)...(19): siRNA sense strand
aggaacagaucaagcaaau

SEQ ID NO: 1716634 - RNA, 19 nt, Homo sapiens
  misc_RNA (1)...(19): siRNA sense strand
cguacuggcuguggacuuu

SEQ ID NO: 1716635 - RNA, 19 nt, Homo sapiens
  misc_RNA (1)...(19): siRNA sense strand
cgagauggacagagacgua

SEQ ID NO: 1716636 - RNA, 19 nt, Homo sapiens
  misc_RNA (1)...(19): siRNA sense strand
agagaucaguacaguguga

SEQ ID NO: 1716637 - RNA, 19 nt, Homo sapiens
  misc_RNA (1)...(19): siRNA sense strand
uggauacgcuuagcaucua

SEQ ID NO: 1716638 - RNA, 19 nt, Homo sapiens
  misc_RNA (1)...(19): siRNA sense strand
gacccugucucaauugaag

SEQ ID NO: 1716639 - RNA, 19 nt, Homo sapiens
  misc_RNA (1)...(19): siRNA sense strand
gauauuccagccaggguaa

SEQ ID NO: 1716640 - RNA, 19 nt, Homo sapiens
  misc_RNA (1)...(19): siRNA sense strand
agagcgagauggacagaga

SEQ ID NO: 1716641 - RNA, 19 nt, Homo sapiens
  misc_RNA (1)...(19): siRNA sense strand
ugggagauguacucaaaga

SEQ ID NO: 1716642 - RNA, 19 nt, Homo sapiens
  misc_RNA (1)...(19): siRNA sense strand
gaagaggagaccauugagu

SEQ ID NO: 1716643 - RNA, 19 nt, Homo sapiens
  misc_RNA (1)...(19): siRNA sense strand
gaaaccaucauagccuuug

SEQ ID NO: 1716644 - RNA, 19 nt, Homo sapiens
  misc_RNA (1)...(19): siRNA sense strand
ccaggaagcagauggaauc

SEQ ID NO: 1716645 - RNA, 19 nt, Homo sapiens
  misc_RNA (1)...(19): siRNA sense strand
ucaaugugguggacugcaa

SEQ ID NO: 1716646 - RNA, 19 nt, Homo sapiens
  misc_RNA (1)...(19): siRNA sense strand
acaagaagaguuugaagau

SEQ ID NO: 1716647 - RNA, 19 nt, Homo sapiens
  misc_RNA (1)...(19): siRNA sense strand
acgcuuagcaucuaugaaa

SEQ ID NO: 1716648 - RNA, 19 nt, Homo sapiens
  misc_RNA (1)...(19): siRNA sense strand
cuggcuaccuuucaucaaa

SEQ ID NO: 1716649 - RNA, 19 nt, Homo sapiens
  misc_RNA (1)...(19): siRNA sense strand
caagcaaauucagagauuc

SEQ ID NO: 1716650 - RNA, 19 nt, Homo sapiens
  misc_RNA (1)...(19): siRNA sense strand
gaggagggguggacacuga

SEQ ID NO: 1716651 - RNA, 19 nt, Homo sapiens
  misc_RNA (1)...(19): siRNA sense strand
agaaggaucguuugaguca

SEQ ID NO: 1716652 - RNA, 19 nt, Homo sapiens
  misc_RNA (1)...(19): siRNA sense strand
gaucugaagaaauacucua

SEQ ID NO: 1716653 - RNA, 19 nt, Homo sapiens
  misc_RNA (1)...(19): siRNA sense strand
gcagaagaacggagacuac

SEQ ID NO: 1716654 - RNA, 19 nt, Homo sapiens
  misc_RNA (1)...(19): siRNA sense strand
ugucucaauugaagaaaga

SEQ ID NO: 1716655 - RNA, 19 nt, Homo sapiens
  misc_RNA (1)...(19): siRNA sense strand
ggagaccauugaguucuuc

SEQ ID NO: 1716656 - RNA, 19 nt, Homo sapiens
  misc_RNA (1)...(19): siRNA sense strand
ggauacgcuuagcaucuau

SEQ ID NO: 1716657 - RNA, 19 nt, Homo sapiens
  misc_RNA (1)...(19): siRNA sense strand
gaagaauuacugggagaug

SEQ ID NO: 1716658 - RNA, 19 nt, Homo sapiens
  misc_RNA (1)...(19): siRNA sense strand
gaagaggaugggaagacaa

SEQ ID NO: 1716659 - RNA, 19 nt, Homo sapiens
  misc_RNA (1)...(19): siRNA sense strand
cuuauugacuucucaccuu

SEQ ID NO: 1716660 - RNA, 19 nt, Homo sapiens
  misc_RNA (1)...(19): siRNA sense strand
ugaagaggaugggaagaca

SEQ ID NO: 1716661 - RNA, 19 nt, Homo sapiens
  misc_RNA (1)...(19): siRNA sense strand
aagaggagaccauugaguu

SEQ ID NO: 1716662 - RNA, 19 nt, Homo sapiens
  misc_RNA (1)...(19): siRNA sense strand
uuacggauuuugacaagua

SEQ ID NO: 1716663 - RNA, 19 nt, Homo sapiens
  misc_RNA (1)...(19): siRNA sense strand
ccaaagccucaaaggaauu

SEQ ID NO: 1716664 - RNA, 19 nt, Homo sapiens
  misc_RNA (1)...(19): siRNA sense strand
gagacuacuugugugugaa

SEQ ID NO: 1716665 - RNA, 19 nt, Homo sapiens
  misc_RNA (1)...(19): siRNA sense strand
ggacaagaagaguuugaag

SEQ ID NO: 1716666 - RNA, 19 nt, Homo sapiens
  misc_RNA (1)...(19): siRNA sense strand
ggacccgaccgacuugaga

SEQ ID NO: 1716667 - RNA, 19 nt, Homo sapiens
  misc_RNA (1)...(19): siRNA sense strand
gagcgaggaagaauuacug

SEQ ID NO: 1716668 - RNA, 19 nt, Homo sapiens
  misc_RNA (1)...(19): siRNA sense strand
uaugugcguuggucuccua

SEQ ID NO: 1716669 - RNA, 19 nt, Homo sapiens
  misc_RNA (1)...(19): siRNA sense strand
acaaguauaugacgaucag

SEQ ID NO: 1716670 - RNA, 19 nt, Homo sapiens
  misc_RNA (1)...(19): siRNA sense strand
ucuaugaaacuccuucuau

SEQ ID NO: 1716671 - RNA, 19 nt, Homo sapiens
  misc_RNA (1)...(19): siRNA sense strand
gagaaggcgcaccaugaug

SEQ ID NO: 1716672 - RNA, 19 nt, Homo sapiens
  misc_RNA (1)...(19): siRNA sense strand
cuaagaucuuugaacagaa

SEQ ID NO: 1716673 - RNA, 19 nt, Homo sapiens
  misc_RNA (1)...(19): siRNA sense strand
cugggugccugaagacaaa

SEQ ID NO: 1716674 - RNA, 19 nt, Homo sapiens
  misc_RNA (1)...(19): siRNA sense strand
ucaaagaccuggggaacuu

SEQ ID NO: 1716675 - RNA, 19 nt, Homo sapiens
  misc_RNA (1)...(19): siRNA sense strand
agaauuacugggagaugua

SEQ ID NO: 1716676 - RNA, 19 nt, Homo sapiens
  misc_RNA (1)...(19): siRNA sense strand
uccaaagccucaaaggaau

SEQ ID NO: 1716677 - RNA, 19 nt, Homo sapiens
  misc_RNA (1)...(19): siRNA sense strand
gaggcagaaugcagagauc

SEQ ID NO: 1716678 - RNA, 19 nt, Homo sapiens
  misc_RNA (1)...(19): siRNA sense strand
ucaagauguucgacaagca

SEQ ID NO: 1716679 - RNA, 19 nt, Homo sapiens
  misc_RNA (1)...(19): siRNA sense strand
ggacugcacggucaugaac

SEQ ID NO: 1716680 - RNA, 19 nt, Homo sapiens
  misc_RNA (1)...(19): siRNA sense strand
agugggauauuccagagaa

SEQ ID NO: 1716681 - RNA, 19 nt, Homo sapiens
  misc_RNA (1)...(19): siRNA sense strand
cacaagaucuuuuccaagu

SEQ ID NO: 1716682 - RNA, 19 nt, Homo sapiens
  misc_RNA (1)...(19): siRNA sense strand
ucagcccauuggccuauuu

SEQ ID NO: 1716683 - RNA, 19 nt, Homo sapiens
  misc_RNA (1)...(19): siRNA sense strand
cagaaugcagagaucagua

SEQ ID NO: 1716684 - RNA, 19 nt, Homo sapiens
  misc_RNA (1)...(19): siRNA sense strand
uuacguuacuggcuugaag

SEQ ID NO: 1716685 - RNA, 19 nt, Homo sapiens
  misc_RNA (1)...(19): siRNA sense strand
ugaaagaaaccaucauagc

SEQ ID NO: 1716686 - RNA, 19 nt, Homo sapiens
  misc_RNA (1)...(19): siRNA sense strand
ugacaagcagcacacauuc

SEQ ID NO: 1716687 - RNA, 19 nt, Homo sapiens
  misc_RNA (1)...(19): siRNA sense strand
caaagccucaaaggaauug

SEQ ID NO: 1716688 - RNA, 19 nt, Homo sapiens
  misc_RNA (1)...(19): siRNA sense strand
gaacagaucaagcaaauua

SEQ ID NO: 1716689 - RNA, 19 nt, Homo sapiens
  misc_RNA (1)...(19): siRNA sense strand
ggagagaaauucaagcaaa

SEQ ID NO: 1716690 - RNA, 19 nt, Homo sapiens
  misc_RNA (1)...(19): siRNA sense strand
gaacggagacuacuugugu

SEQ ID NO: 1716691 - RNA, 19 nt, Homo sapiens
  misc_RNA (1)...(19): siRNA sense strand
gaagaaauacucuaagauc

SEQ ID NO: 1716692 - RNA, 19 nt, Homo sapiens
  misc_RNA (1)...(19): siRNA sense strand
ggaagcagauggaaucgau

SEQ ID NO: 1716693 - RNA, 19 nt, Homo sapiens
  misc_RNA (1)...(19): siRNA sense strand
gaacagaaggaucguuuga

SEQ ID NO: 1716694 - RNA, 19 nt, Homo sapiens
  misc_RNA (1)...(19): siRNA sense strand
ggauaucugugucuuucua

SEQ ID NO: 1716695 - RNA, 19 nt, Homo sapiens
  misc_RNA (1)...(19): siRNA sense strand
gcaccuaccuggcuaccuu

SEQ ID NO: 1716696 - RNA, 19 nt, Homo sapiens
  misc_RNA (1)...(19): siRNA sense strand
ggagacuacuuguguguga

SEQ ID NO: 1716697 - RNA, 19 nt, Homo sapiens
  misc_RNA (1)...(19): siRNA sense strand
gagagaaauucaagcaaau

SEQ ID NO: 1716698 - RNA, 19 nt, Homo sapiens
  misc_RNA (1)...(19): siRNA sense strand
gaagaacggagacuacuug

SEQ ID NO: 1716699 - RNA, 19 nt, Homo sapiens
  misc_RNA (1)...(19): siRNA sense strand
gaagaaagagcgagaugga

SEQ ID NO: 1716700 - RNA, 19 nt, Homo sapiens
  misc_RNA (1)...(19): siRNA sense strand
gaagaucucugggauaaaa

SEQ ID NO: 1716701 - RNA, 19 nt, Homo sapiens
  misc_RNA (1)...(19): siRNA sense strand
ucaagcaaauucagagauu

SEQ ID NO: 1716702 - RNA, 19 nt, Homo sapiens
  misc_RNA (1)...(19): siRNA sense strand
gagagaaggcgcaccauga

SEQ ID NO: 1716703 - RNA, 19 nt, Homo sapiens
  misc_RNA (1)...(19): siRNA sense strand
gcagagaucaguacagugu

SEQ ID NO: 1716704 - RNA, 19 nt, Homo sapiens
  misc_RNA (1)...(19): siRNA sense strand
ucuaagaucuuugaacaga

SEQ ID NO: 1716705 - RNA, 19 nt, Homo sapiens
  misc_RNA (1)...(19): siRNA sense strand
gggaagaggagaccauuga

SEQ ID NO: 1716706 - RNA, 19 nt, Homo sapiens
  misc_RNA (1)...(19): siRNA sense strand
ggaugacccucaggccaua

SEQ ID NO: 1716707 - RNA, 19 nt, Homo sapiens
  misc_RNA (1)...(19): siRNA sense strand
uugaagaucucugggauaa

SEQ ID NO: 1716708 - RNA, 19 nt, Homo sapiens
  misc_RNA (1)...(19): siRNA sense strand
gaagagggguuuucacugu

SEQ ID NO: 1716709 - RNA, 19 nt, Homo sapiens
  misc_RNA (1)...(19): siRNA sense strand
ggagaccgcacuuccauau

SEQ ID NO: 1716710 - RNA, 19 nt, Homo sapiens
  misc_RNA (1)...(19): siRNA sense strand
gcggauaucugugucuuuc

SEQ ID NO: 1716711 - RNA, 19 nt, Homo sapiens
  misc_RNA (1)...(19): siRNA sense strand
gaacaucgcagagcacuac

SEQ ID NO: 1716712 - RNA, 19 nt, Homo sapiens
  misc_RNA (1)...(19): siRNA sense strand
guccaaagccucaaaggaa

SEQ ID NO: 1716713 - RNA, 19 nt, Homo sapiens
  misc_RNA (1)...(19): siRNA sense strand
ggguucagcuuauugacuu

SEQ ID NO: 1716714 - RNA, 19 nt, Homo sapiens
  misc_RNA (1)...(19): siRNA sense strand
cugaagaaauacucuaaga

SEQ ID NO: 1716715 - RNA, 19 nt, Homo sapiens
  misc_RNA (1)...(19): siRNA sense strand
agaccgcacuuccauauuc

SEQ ID NO: 1716716 - RNA, 19 nt, Homo sapiens
  misc_RNA (1)...(19): siRNA sense strand
gaguaugaacggugccuua

SEQ ID NO: 1716717 - RNA, 19 nt, Homo sapiens
  misc_RNA (1)...(19): siRNA sense strand
cgugagcgaggaagaauua

SEQ ID NO: 1716718 - RNA, 19 nt, Homo sapiens
  misc_RNA (1)...(19): siRNA sense strand
caagaagaguuugaagauc

SEQ ID NO: 1716719 - RNA, 19 nt, Homo sapiens
  misc_RNA (1)...(19): siRNA sense strand
cccaggagcucuauaugga

SEQ ID NO: 1716720 - RNA, 19 nt, Homo sapiens
  misc_RNA (1)...(19): siRNA sense strand
gacaagaagaguuugaaga

SEQ ID NO: 1716721 - RNA, 19 nt, Homo sapiens
  misc_RNA (1)...(19): siRNA sense strand
ggagauguacucaaagauc

SEQ ID NO: 1716722 - RNA, 19 nt, Homo sapiens
  misc_RNA (1)...(19): siRNA sense strand
aagaagaguuugaagaucu

SEQ ID NO: 1716723 - RNA, 19 nt, Homo sapiens
  misc_RNA (1)...(19): siRNA sense strand
caagaucuuuuccaaguuu

SEQ ID NO: 1716724 - RNA, 19 nt, Homo sapiens
  misc_RNA (1)...(19): siRNA sense strand
uaagaucuuugaacagaag

SEQ ID NO: 1716725 - RNA, 19 nt, Homo sapiens
  misc_RNA (1)...(19): siRNA sense strand
ggaaccaaauggaaguaag

SEQ ID NO: 1716726 - RNA, 19 nt, Homo sapiens
  misc_RNA (1)...(19): siRNA sense strand
cuaugaaacuccuucuaug

SEQ ID NO: 1716727 - RNA, 19 nt, Homo sapiens
  misc_RNA (1)...(19): siRNA sense strand
acugggagauguacucaaa

SEQ ID NO: 1716728 - RNA, 19 nt, Homo sapiens
  misc_RNA (1)...(19): siRNA sense strand
gaaccaaauggaaguaagu

SEQ ID NO: 1716729 - RNA, 19 nt, Homo sapiens
  misc_RNA (1)...(19): siRNA sense strand
acagaaggaucguuugagu

SEQ ID NO: 1716730 - RNA, 19 nt, Homo sapiens
  misc_RNA (1)...(19): siRNA sense strand
acucuaagaucuuugaaca

SEQ ID NO: 1716731 - RNA, 19 nt, Homo sapiens
  misc_RNA (1)...(19): siRNA sense strand
ggacgccuccugcagaaga

SEQ ID NO: 1716732 - RNA, 19 nt, Homo sapiens
  misc_RNA (1)...(19): siRNA sense strand
gucaaccucuuuacggauu

SEQ ID NO: 1716733 - RNA, 19 nt, Homo sapiens
  misc_RNA (1)...(19): siRNA sense strand
aggaacagaucaagcaaau

SEQ ID NO: 1716734 - RNA, 19 nt, Homo sapiens
  misc_RNA (1)...(19): siRNA sense strand
cguacuggcuguggacuuu

SEQ ID NO: 1716735 - RNA, 19 nt, Homo sapiens
  misc_RNA (1)...(19): siRNA sense strand
cgagauggacagagacgua

SEQ ID NO: 1716736 - RNA, 19 nt, Homo sapiens
  misc_RNA (1)...(19): siRNA sense strand
agagaucaguacaguguga

SEQ ID NO: 1716737 - RNA, 19 nt, Homo sapiens
  misc_RNA (1)...(19): siRNA sense strand
uggauacgcuuagcaucua

SEQ ID NO: 1716738 - RNA, 19 nt, Homo sapiens
  misc_RNA (1)...(19): siRNA sense strand
gacccugucucaauugaag

SEQ ID NO: 1716739 - RNA, 19 nt, Homo sapiens
  misc_RNA (1)...(19): siRNA sense strand
gauauuccagccaggguaa

SEQ ID NO: 1716740 - RNA, 19 nt, Homo sapiens
  misc_RNA (1)...(19): siRNA sense strand
agagcgagauggacagaga

SEQ ID NO: 1716741 - RNA, 19 nt, Homo sapiens
  misc_RNA (1)...(19): siRNA sense strand
ugggagauguacucaaaga

SEQ ID NO: 1716742 - RNA, 19 nt, Homo sapiens
  misc_RNA (1)...(19): siRNA sense strand
gaagaggagaccauugagu

SEQ ID NO: 1716743 - RNA, 19 nt, Homo sapiens
  misc_RNA (1)...(19): siRNA sense strand
gaaaccaucauagccuuug

SEQ ID NO: 1716744 - RNA, 19 nt, Homo sapiens
  misc_RNA (1)...(19): siRNA sense strand
ccaggaagcagauggaauc

SEQ ID NO: 1716745 - RNA, 19 nt, Homo sapiens
  misc_RNA (1)...(19): siRNA sense strand
ucaaugugguggacugcaa

SEQ ID NO: 1716746 - RNA, 19 nt, Homo sapiens
  misc_RNA (1)...(19): siRNA sense strand
acaagaagaguuugaagau

SEQ ID NO: 1716747 - RNA, 19 nt, Homo sapiens
  misc_RNA (1)...(19): siRNA sense strand
acgcuuagcaucuaugaaa

SEQ ID NO: 1716748 - RNA, 19 nt, Homo sapiens
  misc_RNA (1)...(19): siRNA sense strand
cuggcuaccuuucaucaaa

SEQ ID NO: 1716749 - RNA, 19 nt, Homo sapiens
  misc_RNA (1)...(19): siRNA sense strand
caagcaaauucagagauuc

SEQ ID NO: 1716750 - RNA, 19 nt, Homo sapiens
  misc_RNA (1)...(19): siRNA sense strand
gaggagggguggacacuga

SEQ ID NO: 1716751 - RNA, 19 nt, Homo sapiens
  misc_RNA (1)...(19): siRNA sense strand
agaaggaucguuugaguca

SEQ ID NO: 1716752 - RNA, 19 nt, Homo sapiens
  misc_RNA (1)...(19): siRNA sense strand
gaucugaagaaauacucua

SEQ ID NO: 1716753 - RNA, 19 nt, Homo sapiens
  misc_RNA (1)...(19): siRNA sense strand
gcagaagaacggagacuac

SEQ ID NO: 1716754 - RNA, 19 nt, Homo sapiens
  misc_RNA (1)...(19): siRNA sense strand
ugucucaauugaagaaaga

SEQ ID NO: 1716755 - RNA, 19 nt, Homo sapiens
  misc_RNA (1)...(19): siRNA sense strand
ggagaccauugaguucuuc

SEQ ID NO: 1716756 - RNA, 19 nt, Homo sapiens
  misc_RNA (1)...(19): siRNA sense strand
ggauacgcuuagcaucuau

SEQ ID NO: 1716757 - RNA, 19 nt, Homo sapiens
  misc_RNA (1)...(19): siRNA sense strand
gaagaauuacugggagaug

SEQ ID NO: 1716758 - RNA, 19 nt, Homo sapiens
  misc_RNA (1)...(19): siRNA sense strand
gaagaggaugggaagacaa

SEQ ID NO: 1716759 - RNA, 19 nt, Homo sapiens
  misc_RNA (1)...(19): siRNA sense strand
cuuauugacuucucaccuu

SEQ ID NO: 1716760 - RNA, 19 nt, Homo sapiens
  misc_RNA (1)...(19): siRNA sense strand
ugaagaggaugggaagaca

SEQ ID NO: 1716761 - RNA, 19 nt, Homo sapiens
  misc_RNA (1)...(19): siRNA sense strand
aagaggagaccauugaguu

SEQ ID NO: 1716762 - RNA, 19 nt, Homo sapiens
  misc_RNA (1)...(19): siRNA sense strand
uuacggauuuugacaagua

SEQ ID NO: 1716763 - RNA, 19 nt, Homo sapiens
  misc_RNA (1)...(19): siRNA sense strand
ccaaagccucaaaggaauu

SEQ ID NO: 1716764 - RNA, 19 nt, Homo sapiens
  misc_RNA (1)...(19): siRNA sense strand
gagacuacuugugugugaa

SEQ ID NO: 1716765 - RNA, 19 nt, Homo sapiens
  misc_RNA (1)...(19): siRNA sense strand
ggacaagaagaguuugaag

SEQ ID NO: 1716766 - RNA, 19 nt, Homo sapiens
  misc_RNA (1)...(19): siRNA sense strand
ggacccgaccgacuugaga

SEQ ID NO: 1716767 - RNA, 19 nt, Homo sapiens
  misc_RNA (1)...(19): siRNA sense strand
gagcgaggaagaauuacug

SEQ ID NO: 1716768 - RNA, 19 nt, Homo sapiens
  misc_RNA (1)...(19): siRNA sense strand
uaugugcguuggucuccua

SEQ ID NO: 1716769 - RNA, 19 nt, Homo sapiens
  misc_RNA (1)...(19): siRNA sense strand
acaaguauaugacgaucag

SEQ ID NO: 1716770 - RNA, 19 nt, Homo sapiens
  misc_RNA (1)...(19): siRNA sense strand
ucuaugaaacuccuucuau

SEQ ID NO: 1716771 - RNA, 19 nt, Homo sapiens
  misc_RNA (1)...(19): siRNA sense strand
gagaaggcgcaccaugaug

SEQ ID NO: 1716772 - RNA, 19 nt, Homo sapiens
  misc_RNA (1)...(19): siRNA sense strand
cuaagaucuuugaacagaa

SEQ ID NO: 1716773 - RNA, 19 nt, Homo sapiens
  misc_RNA (1)...(19): siRNA sense strand
cugggugccugaagacaaa

SEQ ID NO: 1716774 - RNA, 19 nt, Homo sapiens
  misc_RNA (1)...(19): siRNA sense strand
ucaaagaccuggggaacuu

SEQ ID NO: 1716775 - RNA, 19 nt, Homo sapiens
  misc_RNA (1)...(19): siRNA sense strand
agaauuacugggagaugua

SEQ ID NO: 1716776 - RNA, 19 nt, Homo sapiens
  misc_RNA (1)...(19): siRNA sense strand
uccaaagccucaaaggaau

SEQ ID NO: 1716777 - RNA, 19 nt, Homo sapiens
  misc_RNA (1)...(19): siRNA sense strand
gaggcagaaugcagagauc

SEQ ID NO: 1716778 - RNA, 19 nt, Homo sapiens
  misc_RNA (1)...(19): siRNA sense strand
ucaagauguucgacaagca

SEQ ID NO: 1716779 - RNA, 19 nt, Homo sapiens
  misc_RNA (1)...(19): siRNA sense strand
ggacugcacggucaugaac

SEQ ID NO: 1716780 - RNA, 19 nt, Homo sapiens
  misc_RNA (1)...(19): siRNA sense strand
agugggauauuccagagaa

SEQ ID NO: 1716781 - RNA, 19 nt, Homo sapiens
  misc_RNA (1)...(19): siRNA sense strand
cacaagaucuuuuccaagu

SEQ ID NO: 1716782 - RNA, 19 nt, Homo sapiens
  misc_RNA (1)...(19): siRNA sense strand
ucagcccauuggccuauuu

SEQ ID NO: 1716783 - RNA, 19 nt, Homo sapiens
  misc_RNA (1)...(19): siRNA sense strand
cagaaugcagagaucagua

SEQ ID NO: 1716784 - RNA, 19 nt, Homo sapiens
  misc_RNA (1)...(19): siRNA sense strand
uuacguuacuggcuugaag

SEQ ID NO: 1716785 - RNA, 19 nt, Homo sapiens
  misc_RNA (1)...(19): siRNA sense strand
ugaaagaaaccaucauagc

SEQ ID NO: 1716786 - RNA, 19 nt, Homo sapiens
  misc_RNA (1)...(19): siRNA sense strand
ugacaagcagcacacauuc

SEQ ID NO: 1716787 - RNA, 19 nt, Homo sapiens
  misc_RNA (1)...(19): siRNA sense strand
caaagccucaaaggaauug

SEQ ID NO: 1716788 - RNA, 19 nt, Homo sapiens
  misc_RNA (1)...(19): siRNA sense strand
ggaaacaucuugaccaucu

SEQ ID NO: 1716789 - RNA, 19 nt, Homo sapiens
  misc_RNA (1)...(19): siRNA sense strand
gaacuccacuuugacaauu

SEQ ID NO: 1716790 - RNA, 19 nt, Homo sapiens
  misc_RNA (1)...(19): siRNA sense strand
gcagucagcuccucuguca

SEQ ID NO: 1716791 - RNA, 19 nt, Homo sapiens
  misc_RNA (1)...(19): siRNA sense strand
gcuacuaacuucccacuga

SEQ ID NO: 1716792 - RNA, 19 nt, Homo sapiens
  misc_RNA (1)...(19): siRNA sense strand
gaggagaucuggaagaaag

SEQ ID NO: 1716793 - RNA, 19 nt, Homo sapiens
  misc_RNA (1)...(19): siRNA sense strand
gagaagcacuccacaaugc

SEQ ID NO: 1716794 - RNA, 19 nt, Homo sapiens
  misc_RNA (1)...(19): siRNA sense strand
gcaaugggccuuccucuuc

SEQ ID NO: 1716795 - RNA, 19 nt, Homo sapiens
  misc_RNA (1)...(19): siRNA sense strand
aagcgaccaugcacuauua

SEQ ID NO: 1716796 - RNA, 19 nt, Homo sapiens
  misc_RNA (1)...(19): siRNA sense strand
gcgcaagacuggccaaaca

SEQ ID NO: 1716797 - RNA, 19 nt, Homo sapiens
  misc_RNA (1)...(19): siRNA sense strand
gcagaagaguggaaacauc

SEQ ID NO: 1716798 - RNA, 19 nt, Homo sapiens
  misc_RNA (1)...(19): siRNA sense strand
gagaguugcuggaauugug

SEQ ID NO: 1716799 - RNA, 19 nt, Homo sapiens
  misc_RNA (1)...(19): siRNA sense strand
gaggcgaacuccagacaga

SEQ ID NO: 1716800 - RNA, 19 nt, Homo sapiens
  misc_RNA (1)...(19): siRNA sense strand
gaagcaccaucacaucugu

SEQ ID NO: 1716801 - RNA, 19 nt, Homo sapiens
  misc_RNA (1)...(19): siRNA sense strand
caacagagagggccaagau

SEQ ID NO: 1716802 - RNA, 19 nt, Homo sapiens
  misc_RNA (1)...(19): siRNA sense strand
gcggaaagcccacgacaug

SEQ ID NO: 1716803 - RNA, 19 nt, Homo sapiens
  misc_RNA (1)...(19): siRNA sense strand
cgacaacguuaacuaaugg

SEQ ID NO: 1716804 - RNA, 19 nt, Homo sapiens
  misc_RNA (1)...(19): siRNA sense strand
gaucacagacuaacagaca

SEQ ID NO: 1716805 - RNA, 19 nt, Homo sapiens
  misc_RNA (1)...(19): siRNA sense strand
cccaauggcuucagcaaug

SEQ ID NO: 1716806 - RNA, 19 nt, Homo sapiens
  misc_RNA (1)...(19): siRNA sense strand
ggacagaaacagaccuaug

SEQ ID NO: 1716807 - RNA, 19 nt, Homo sapiens
  misc_RNA (1)...(19): siRNA sense strand
gcacaaagacugggagaag

SEQ ID NO: 1716808 - RNA, 19 nt, Homo sapiens
  misc_RNA (1)...(19): siRNA sense strand
ccgauacuguggcucauuu

SEQ ID NO: 1716809 - RNA, 19 nt, Homo sapiens
  misc_RNA (1)...(19): siRNA sense strand
cgagauaggagaaagaguu

SEQ ID NO: 1716810 - RNA, 19 nt, Homo sapiens
  misc_RNA (1)...(19): siRNA sense strand
ugacauuucacccgagaua

SEQ ID NO: 1716811 - RNA, 19 nt, Homo sapiens
  misc_RNA (1)...(19): siRNA sense strand
gacaugaucacaacagaga

SEQ ID NO: 1716812 - RNA, 19 nt, Homo sapiens
  misc_RNA (1)...(19): siRNA sense strand
ggaaagcccacgacaugau

SEQ ID NO: 1716813 - RNA, 19 nt, Homo sapiens
  misc_RNA (1)...(19): siRNA sense strand
ccgacaacguuaacuaaug

SEQ ID NO: 1716814 - RNA, 19 nt, Homo sapiens
  misc_RNA (1)...(19): siRNA sense strand
guacuaaggcggugucaag

SEQ ID NO: 1716815 - RNA, 19 nt, Homo sapiens
  misc_RNA (1)...(19): siRNA sense strand
ccagacagaaccaaagaaa

SEQ ID NO: 1716816 - RNA, 19 nt, Homo sapiens
  misc_RNA (1)...(19): siRNA sense strand
uggcacacgucaagaagaa

SEQ ID NO: 1716817 - RNA, 19 nt, Homo sapiens
  misc_RNA (1)...(19): siRNA sense strand
gcaagacuggccaaacaga

SEQ ID NO: 1716818 - RNA, 19 nt, Homo sapiens
  misc_RNA (1)...(19): siRNA sense strand
ggagaagcaccaucacauc

SEQ ID NO: 1716819 - RNA, 19 nt, Homo sapiens
  misc_RNA (1)...(19): siRNA sense strand
ccuccucucuggcuaauca

SEQ ID NO: 1716820 - RNA, 19 nt, Homo sapiens
  misc_RNA (1)...(19): siRNA sense strand
gaugugaagacgcaaucua

SEQ ID NO: 1716821 - RNA, 19 nt, Homo sapiens
  misc_RNA (1)...(19): siRNA sense strand
aagcagaccgggaagaauu

SEQ ID NO: 1716822 - RNA, 19 nt, Homo sapiens
  misc_RNA (1)...(19): siRNA sense strand
cuaaggcggugucaagaag

SEQ ID NO: 1716823 - RNA, 19 nt, Homo sapiens
  misc_RNA (1)...(19): siRNA sense strand
caucuugaccaucuguuaa

SEQ ID NO: 1716824 - RNA, 19 nt, Homo sapiens
  misc_RNA (1)...(19): siRNA sense strand
gcacacgucaagaagaaau

SEQ ID NO: 1716825 - RNA, 19 nt, Homo sapiens
  misc_RNA (1)...(19): siRNA sense strand
gacagaaacagaccuaugg

SEQ ID NO: 1716826 - RNA, 19 nt, Homo sapiens
  misc_RNA (1)...(19): siRNA sense strand
gagagccuuugcacucaga

SEQ ID NO: 1716827 - RNA, 19 nt, Homo sapiens
  misc_RNA (1)...(19): siRNA sense strand
gaaagcccacgacaugauc

SEQ ID NO: 1716828 - RNA, 19 nt, Homo sapiens
  misc_RNA (1)...(19): siRNA sense strand
gcauggcacacgucaagaa

SEQ ID NO: 1716829 - RNA, 19 nt, Homo sapiens
  misc_RNA (1)...(19): siRNA sense strand
cagcgguacaguccaaaua

SEQ ID NO: 1716830 - RNA, 19 nt, Homo sapiens
  misc_RNA (1)...(19): siRNA sense strand
cagagagccuuugcacuca

SEQ ID NO: 1716831 - RNA, 19 nt, Homo sapiens
  misc_RNA (1)...(19): siRNA sense strand
gagaagcaccaucacaucu

SEQ ID NO: 1716832 - RNA, 19 nt, Homo sapiens
  misc_RNA (1)...(19): siRNA sense strand
gcugacuccuccaacaaug

SEQ ID NO: 1716833 - RNA, 19 nt, Homo sapiens
  misc_RNA (1)...(19): siRNA sense strand
caccuccaccucagcauua

SEQ ID NO: 1716834 - RNA, 19 nt, Homo sapiens
  misc_RNA (1)...(19): siRNA sense strand
acagaacccugcccaguac

SEQ ID NO: 1716835 - RNA, 19 nt, Homo sapiens
  misc_RNA (1)...(19): siRNA sense strand
caucgggaauuccuucaca

SEQ ID NO: 1716836 - RNA, 19 nt, Homo sapiens
  misc_RNA (1)...(19): siRNA sense strand
guggaaacaucuugaccau

SEQ ID NO: 1716837 - RNA, 19 nt, Homo sapiens
  misc_RNA (1)...(19): siRNA sense strand
caagaagaaaugauugauc

SEQ ID NO: 1716838 - RNA, 19 nt, Homo sapiens
  misc_RNA (1)...(19): siRNA sense strand
caagcgaccaugcacuauu

SEQ ID NO: 1716839 - RNA, 19 nt, Homo sapiens
  misc_RNA (1)...(19): siRNA sense strand
cagagcugcuucucgaugu

SEQ ID NO: 1716840 - RNA, 19 nt, Homo sapiens
  misc_RNA (1)...(19): siRNA sense strand
gaaacaucuugaccaucug

SEQ ID NO: 1716841 - RNA, 19 nt, Homo sapiens
  misc_RNA (1)...(19): siRNA sense strand
gagauaggagaaagaguuc

SEQ ID NO: 1716842 - RNA, 19 nt, Homo sapiens
  misc_RNA (1)...(19): siRNA sense strand
ggccagcgguacaguccaa

SEQ ID NO: 1716843 - RNA, 19 nt, Homo sapiens
  misc_RNA (1)...(19): siRNA sense strand
gggagaagcaccaucacau

SEQ ID NO: 1716844 - RNA, 19 nt, Homo sapiens
  misc_RNA (1)...(19): siRNA sense strand
cugaggaggccgucaauga

SEQ ID NO: 1716845 - RNA, 19 nt, Homo sapiens
  misc_RNA (1)...(19): siRNA sense strand
uaauggacaugguagaaaa

SEQ ID NO: 1716846 - RNA, 19 nt, Homo sapiens
  misc_RNA (1)...(19): siRNA sense strand
cauuaccguuuggaugaua

SEQ ID NO: 1716847 - RNA, 19 nt, Homo sapiens
  misc_RNA (1)...(19): siRNA sense strand
caccucagcauuaccguuu

SEQ ID NO: 1716848 - RNA, 19 nt, Homo sapiens
  misc_RNA (1)...(19): siRNA sense strand
caaugggccuuccucuucu

SEQ ID NO: 1716849 - RNA, 19 nt, Homo sapiens
  misc_RNA (1)...(19): siRNA sense strand
caccgacaacguuaacuaa

SEQ ID NO: 1716850 - RNA, 19 nt, Homo sapiens
  misc_RNA (1)...(19): siRNA sense strand
caagacuggccaaacagaa

SEQ ID NO: 1716851 - RNA, 19 nt, Homo sapiens
  misc_RNA (1)...(19): siRNA sense strand
cagugacgccgaggacuua

SEQ ID NO: 1716852 - RNA, 19 nt, Homo sapiens
  misc_RNA (1)...(19): siRNA sense strand
cauaauggacaugguagaa

SEQ ID NO: 1716853 - RNA, 19 nt, Homo sapiens
  misc_RNA (1)...(19): siRNA sense strand
cuguuaaacugcauaaugg

SEQ ID NO: 1716854 - RNA, 19 nt, Homo sapiens
  misc_RNA (1)...(19): siRNA sense strand
cagacuaacagacagagaa

SEQ ID NO: 1716855 - RNA, 19 nt, Homo sapiens
  misc_RNA (1)...(19): siRNA sense strand
aacagaacccugcccagua

SEQ ID NO: 1716856 - RNA, 19 nt, Homo sapiens
  misc_RNA (1)...(19): siRNA sense strand
ggcacgagccauucuccua

SEQ ID NO: 1716857 - RNA, 19 nt, Homo sapiens
  misc_RNA (1)...(19): siRNA sense strand
gaagcagaccgggaagaau

SEQ ID NO: 1716858 - RNA, 19 nt, Homo sapiens
  misc_RNA (1)...(19): siRNA sense strand
ccacuuugacaauugaaga

SEQ ID NO: 1716859 - RNA, 19 nt, Homo sapiens
  misc_RNA (1)...(19): siRNA sense strand
ggagacacaccugcaguca

SEQ ID NO: 1716860 - RNA, 19 nt, Homo sapiens
  misc_RNA (1)...(19): siRNA sense strand
agcgagaguugcuggaauu

SEQ ID NO: 1716861 - RNA, 19 nt, Homo sapiens
  misc_RNA (1)...(19): siRNA sense strand
gcauuaccguuuggaugau

SEQ ID NO: 1716862 - RNA, 19 nt, Homo sapiens
  misc_RNA (1)...(19): siRNA sense strand
guaccucgcccagcaugaa

SEQ ID NO: 1716863 - RNA, 19 nt, Homo sapiens
  misc_RNA (1)...(19): siRNA sense strand
agacucaccuguggaugug

SEQ ID NO: 1716864 - RNA, 19 nt, Homo sapiens
  misc_RNA (1)...(19): siRNA sense strand
ugagaagcacuccacaaug

SEQ ID NO: 1716865 - RNA, 19 nt, Homo sapiens
  misc_RNA (1)...(19): siRNA sense strand
ggccguaaagcgagugaaa

SEQ ID NO: 1716866 - RNA, 19 nt, Homo sapiens
  misc_RNA (1)...(19): siRNA sense strand
gcaagcgaccaugcacuau

SEQ ID NO: 1716867 - RNA, 19 nt, Homo sapiens
  misc_RNA (1)...(19): siRNA sense strand
uaaacugcauaauggacau

SEQ ID NO: 1716868 - RNA, 19 nt, Homo sapiens
  misc_RNA (1)...(19): siRNA sense strand
ucuguuaaacugcauaaug

SEQ ID NO: 1716869 - RNA, 19 nt, Homo sapiens
  misc_RNA (1)...(19): siRNA sense strand
agacagagaaugggcagaa

SEQ ID NO: 1716870 - RNA, 19 nt, Homo sapiens
  misc_RNA (1)...(19): siRNA sense strand
caguccaaauaacggcuua

SEQ ID NO: 1716871 - RNA, 19 nt, Homo sapiens
  misc_RNA (1)...(19): siRNA sense strand
acaccgacaacguuaacua

SEQ ID NO: 1716872 - RNA, 19 nt, Homo sapiens
  misc_RNA (1)...(19): siRNA sense strand
cagaagaguggaaacaucu

SEQ ID NO: 1716873 - RNA, 19 nt, Homo sapiens
  misc_RNA (1)...(19): siRNA sense strand
gcgguacaguccaaauaac

SEQ ID NO: 1716874 - RNA, 19 nt, Homo sapiens
  misc_RNA (1)...(19): siRNA sense strand
ccaauggcuucagcaaugg

SEQ ID NO: 1716875 - RNA, 19 nt, Homo sapiens
  misc_RNA (1)...(19): siRNA sense strand
gcagcagagucccgucaac

SEQ ID NO: 1716876 - RNA, 19 nt, Homo sapiens
  misc_RNA (1)...(19): siRNA sense strand
gcauaauggacaugguaga

SEQ ID NO: 1716877 - RNA, 19 nt, Homo sapiens
  misc_RNA (1)...(19): siRNA sense strand
cuacagggacuccuaucga

SEQ ID NO: 1716878 - RNA, 19 nt, Homo sapiens
  misc_RNA (1)...(19): siRNA sense strand
gaaaccugcaguggcugua

SEQ ID NO: 1716879 - RNA, 19 nt, Homo sapiens
  misc_RNA (1)...(19): siRNA sense strand
cugagaagcacuccacaau

SEQ ID NO: 1716880 - RNA, 19 nt, Homo sapiens
  misc_RNA (1)...(19): siRNA sense strand
ccacugagaccuuuuguca

SEQ ID NO: 1716881 - RNA, 19 nt, Homo sapiens
  misc_RNA (1)...(19): siRNA sense strand
ugcaagaagcuacuaacuu

SEQ ID NO: 1716882 - RNA, 19 nt, Homo sapiens
  misc_RNA (1)...(19): siRNA sense strand
uggaugauauggccauugc

SEQ ID NO: 1716883 - RNA, 19 nt, Homo sapiens
  misc_RNA (1)...(19): siRNA sense strand
cagagagggccaagaugga

SEQ ID NO: 1716884 - RNA, 19 nt, Homo sapiens
  misc_RNA (1)...(19): siRNA sense strand
gggcagaagaguggaaaca

SEQ ID NO: 1716885 - RNA, 19 nt, Homo sapiens
  misc_RNA (1)...(19): siRNA sense strand
gacagagaaugggcagaag

SEQ ID NO: 1716886 - RNA, 19 nt, Homo sapiens
  misc_RNA (1)...(19): siRNA sense strand
ucacagacuaacagacaga

SEQ ID NO: 1716887 - RNA, 19 nt, Homo sapiens
  misc_RNA (1)...(19): siRNA sense strand
ccucagggacagaaacaga

SEQ ID NO: 1716888 - RNA, 19 nt, Homo sapiens
  misc_RNA (1)...(19): siRNA sense strand
ggaaacaucuugaccaucu

SEQ ID NO: 1716889 - RNA, 19 nt, Homo sapiens
  misc_RNA (1)...(19): siRNA sense strand
gaacuccacuuugacaauu

SEQ ID NO: 1716890 - RNA, 19 nt, Homo sapiens
  misc_RNA (1)...(19): siRNA sense strand
gcagucagcuccucuguca

SEQ ID NO: 1716891 - RNA, 19 nt, Homo sapiens
  misc_RNA (1)...(19): siRNA sense strand
gcuacuaacuucccacuga

SEQ ID NO: 1716892 - RNA, 19 nt, Homo sapiens
  misc_RNA (1)...(19): siRNA sense strand
gaggagaucuggaagaaag

SEQ ID NO: 1716893 - RNA, 19 nt, Homo sapiens
  misc_RNA (1)...(19): siRNA sense strand
gagaagcacuccacaaugc

SEQ ID NO: 1716894 - RNA, 19 nt, Homo sapiens
  misc_RNA (1)...(19): siRNA sense strand
gcaaugggccuuccucuuc

SEQ ID NO: 1716895 - RNA, 19 nt, Homo sapiens
  misc_RNA (1)...(19): siRNA sense strand
aagcgaccaugcacuauua

SEQ ID NO: 1716896 - RNA, 19 nt, Homo sapiens
  misc_RNA (1)...(19): siRNA sense strand
gcgcaagacuggccaaaca

SEQ ID NO: 1716897 - RNA, 19 nt, Homo sapiens
  misc_RNA (1)...(19): siRNA sense strand
gcagaagaguggaaacauc

SEQ ID NO: 1716898 - RNA, 19 nt, Homo sapiens
  misc_RNA (1)...(19): siRNA sense strand
gagaguugcuggaauugug

SEQ ID NO: 1716899 - RNA, 19 nt, Homo sapiens
  misc_RNA (1)...(19): siRNA sense strand
gaggcgaacuccagacaga

SEQ ID NO: 1716900 - RNA, 19 nt, Homo sapiens
  misc_RNA (1)...(19): siRNA sense strand
gaagcaccaucacaucugu

SEQ ID NO: 1716901 - RNA, 19 nt, Homo sapiens
  misc_RNA (1)...(19): siRNA sense strand
caacagagagggccaagau

SEQ ID NO: 1716902 - RNA, 19 nt, Homo sapiens
  misc_RNA (1)...(19): siRNA sense strand
gcggaaagcccacgacaug

SEQ ID NO: 1716903 - RNA, 19 nt, Homo sapiens
  misc_RNA (1)...(19): siRNA sense strand
cgacaacguuaacuaaugg

SEQ ID NO: 1716904 - RNA, 19 nt, Homo sapiens
  misc_RNA (1)...(19): siRNA sense strand
gaucacagacuaacagaca

SEQ ID NO: 1716905 - RNA, 19 nt, Homo sapiens
  misc_RNA (1)...(19): siRNA sense strand
cccaauggcuucagcaaug

SEQ ID NO: 1716906 - RNA, 19 nt, Homo sapiens
  misc_RNA (1)...(19): siRNA sense strand
ggacagaaacagaccuaug

SEQ ID NO: 1716907 - RNA, 19 nt, Homo sapiens
  misc_RNA (1)...(19): siRNA sense strand
gcacaaagacugggagaag

SEQ ID NO: 1716908 - RNA, 19 nt, Homo sapiens
  misc_RNA (1)...(19): siRNA sense strand
ccgauacuguggcucauuu

SEQ ID NO: 1716909 - RNA, 19 nt, Homo sapiens
  misc_RNA (1)...(19): siRNA sense strand
cgagauaggagaaagaguu

SEQ ID NO: 1716910 - RNA, 19 nt, Homo sapiens
  misc_RNA (1)...(19): siRNA sense strand
ugacauuucacccgagaua

SEQ ID NO: 1716911 - RNA, 19 nt, Homo sapiens
  misc_RNA (1)...(19): siRNA sense strand
gacaugaucacaacagaga

SEQ ID NO: 1716912 - RNA, 19 nt, Homo sapiens
  misc_RNA (1)...(19): siRNA sense strand
ggaaagcccacgacaugau

SEQ ID NO: 1716913 - RNA, 19 nt, Homo sapiens
  misc_RNA (1)...(19): siRNA sense strand
ccgacaacguuaacuaaug

SEQ ID NO: 1716914 - RNA, 19 nt, Homo sapiens
  misc_RNA (1)...(19): siRNA sense strand
guacuaaggcggugucaag

SEQ ID NO: 1716915 - RNA, 19 nt, Homo sapiens
  misc_RNA (1)...(19): siRNA sense strand
ccagacagaaccaaagaaa

SEQ ID NO: 1716916 - RNA, 19 nt, Homo sapiens
  misc_RNA (1)...(19): siRNA sense strand
uggcacacgucaagaagaa

SEQ ID NO: 1716917 - RNA, 19 nt, Homo sapiens
  misc_RNA (1)...(19): siRNA sense strand
gcaagacuggccaaacaga

SEQ ID NO: 1716918 - RNA, 19 nt, Homo sapiens
  misc_RNA (1)...(19): siRNA sense strand
ggagaagcaccaucacauc

SEQ ID NO: 1716919 - RNA, 19 nt, Homo sapiens
  misc_RNA (1)...(19): siRNA sense strand
ccuccucucuggcuaauca

SEQ ID NO: 1716920 - RNA, 19 nt, Homo sapiens
  misc_RNA (1)...(19): siRNA sense strand
gaugugaagacgcaaucua

SEQ ID NO: 1716921 - RNA, 19 nt, Homo sapiens
  misc_RNA (1)...(19): siRNA sense strand
aagcagaccgggaagaauu

SEQ ID NO: 1716922 - RNA, 19 nt, Homo sapiens
  misc_RNA (1)...(19): siRNA sense strand
cuaaggcggugucaagaag

SEQ ID NO: 1716923 - RNA, 19 nt, Homo sapiens
  misc_RNA (1)...(19): siRNA sense strand
caucuugaccaucuguuaa

SEQ ID NO: 1716924 - RNA, 19 nt, Homo sapiens
  misc_RNA (1)...(19): siRNA sense strand
gcacacgucaagaagaaau

SEQ ID NO: 1716925 - RNA, 19 nt, Homo sapiens
  misc_RNA (1)...(19): siRNA sense strand
gacagaaacagaccuaugg

SEQ ID NO: 1716926 - RNA, 19 nt, Homo sapiens
  misc_RNA (1)...(19): siRNA sense strand
gagagccuuugcacucaga

SEQ ID NO: 1716927 - RNA, 19 nt, Homo sapiens
  misc_RNA (1)...(19): siRNA sense strand
gaaagcccacgacaugauc

SEQ ID NO: 1716928 - RNA, 19 nt, Homo sapiens
  misc_RNA (1)...(19): siRNA sense strand
gcauggcacacgucaagaa

SEQ ID NO: 1716929 - RNA, 19 nt, Homo sapiens
  misc_RNA (1)...(19): siRNA sense strand
cagcgguacaguccaaaua

SEQ ID NO: 1716930 - RNA, 19 nt, Homo sapiens
  misc_RNA (1)...(19): siRNA sense strand
cagagagccuuugcacuca

SEQ ID NO: 1716931 - RNA, 19 nt, Homo sapiens
  misc_RNA (1)...(19): siRNA sense strand
gagaagcaccaucacaucu

SEQ ID NO: 1716932 - RNA, 19 nt, Homo sapiens
  misc_RNA (1)...(19): siRNA sense strand
gcugacuccuccaacaaug

SEQ ID NO: 1716933 - RNA, 19 nt, Homo sapiens
  misc_RNA (1)...(19): siRNA sense strand
caccuccaccucagcauua

SEQ ID NO: 1716934 - RNA, 19 nt, Homo sapiens
  misc_RNA (1)...(19): siRNA sense strand
acagaacccugcccaguac

SEQ ID NO: 1716935 - RNA, 19 nt, Homo sapiens
  misc_RNA (1)...(19): siRNA sense strand
caucgggaauuccuucaca

SEQ ID NO: 1716936 - RNA, 19 nt, Homo sapiens
  misc_RNA (1)...(19): siRNA sense strand
guggaaacaucuugaccau

SEQ ID NO: 1716937 - RNA, 19 nt, Homo sapiens
  misc_RNA (1)...(19): siRNA sense strand
caagaagaaaugauugauc

SEQ ID NO: 1716938 - RNA, 19 nt, Homo sapiens
  misc_RNA (1)...(19): siRNA sense strand
caagcgaccaugcacuauu

SEQ ID NO: 1716939 - RNA, 19 nt, Homo sapiens
  misc_RNA (1)...(19): siRNA sense strand
cagagcugcuucucgaugu

SEQ ID NO: 1716940 - RNA, 19 nt, Homo sapiens
  misc_RNA (1)...(19): siRNA sense strand
gaaacaucuugaccaucug

SEQ ID NO: 1716941 - RNA, 19 nt, Homo sapiens
  misc_RNA (1)...(19): siRNA sense strand
gagauaggagaaagaguuc

SEQ ID NO: 1716942 - RNA, 19 nt, Homo sapiens
  misc_RNA (1)...(19): siRNA sense strand
ggccagcgguacaguccaa

SEQ ID NO: 1716943 - RNA, 19 nt, Homo sapiens
  misc_RNA (1)...(19): siRNA sense strand
gggagaagcaccaucacau

SEQ ID NO: 1716944 - RNA, 19 nt, Homo sapiens
  misc_RNA (1)...(19): siRNA sense strand
cugaggaggccgucaauga

SEQ ID NO: 1716945 - RNA, 19 nt, Homo sapiens
  misc_RNA (1)...(19): siRNA sense strand
uaauggacaugguagaaaa

SEQ ID NO: 1716946 - RNA, 19 nt, Homo sapiens
  misc_RNA (1)...(19): siRNA sense strand
cauuaccguuuggaugaua

SEQ ID NO: 1716947 - RNA, 19 nt, Homo sapiens
  misc_RNA (1)...(19): siRNA sense strand
caccucagcauuaccguuu

SEQ ID NO: 1716948 - RNA, 19 nt, Homo sapiens
  misc_RNA (1)...(19): siRNA sense strand
caaugggccuuccucuucu

SEQ ID NO: 1716949 - RNA, 19 nt, Homo sapiens
  misc_RNA (1)...(19): siRNA sense strand
caccgacaacguuaacuaa

SEQ ID NO: 1716950 - RNA, 19 nt, Homo sapiens
  misc_RNA (1)...(19): siRNA sense strand
caagacuggccaaacagaa

SEQ ID NO: 1716951 - RNA, 19 nt, Homo sapiens
  misc_RNA (1)...(19): siRNA sense strand
cagugacgccgaggacuua

SEQ ID NO: 1716952 - RNA, 19 nt, Homo sapiens
  misc_RNA (1)...(19): siRNA sense strand
cauaauggacaugguagaa

SEQ ID NO: 1716953 - RNA, 19 nt, Homo sapiens
  misc_RNA (1)...(19): siRNA sense strand
cuguuaaacugcauaaugg

SEQ ID NO: 1716954 - RNA, 19 nt, Homo sapiens
  misc_RNA (1)...(19): siRNA sense strand
cagacuaacagacagagaa

SEQ ID NO: 1716955 - RNA, 19 nt, Homo sapiens
  misc_RNA (1)...(19): siRNA sense strand
aacagaacccugcccagua

SEQ ID NO: 1716956 - RNA, 19 nt, Homo sapiens
  misc_RNA (1)...(19): siRNA sense strand
ggcacgagccauucuccua

SEQ ID NO: 1716957 - RNA, 19 nt, Homo sapiens
  misc_RNA (1)...(19): siRNA sense strand
gaagcagaccgggaagaau

SEQ ID NO: 1716958 - RNA, 19 nt, Homo sapiens
  misc_RNA (1)...(19): siRNA sense strand
ccacuuugacaauugaaga

SEQ ID NO: 1716959 - RNA, 19 nt, Homo sapiens
  misc_RNA (1)...(19): siRNA sense strand
ggagacacaccugcaguca

SEQ ID NO: 1716960 - RNA, 19 nt, Homo sapiens
  misc_RNA (1)...(19): siRNA sense strand
agcgagaguugcuggaauu

SEQ ID NO: 1716961 - RNA, 19 nt, Homo sapiens
  misc_RNA (1)...(19): siRNA sense strand
gcauuaccguuuggaugau

SEQ ID NO: 1716962 - RNA, 19 nt, Homo sapiens
  misc_RNA (1)...(19): siRNA sense strand
guaccucgcccagcaugaa

SEQ ID NO: 1716963 - RNA, 19 nt, Homo sapiens
  misc_RNA (1)...(19): siRNA sense strand
agacucaccuguggaugug

SEQ ID NO: 1716964 - RNA, 19 nt, Homo sapiens
  misc_RNA (1)...(19): siRNA sense strand
ugagaagcacuccacaaug

SEQ ID NO: 1716965 - RNA, 19 nt, Homo sapiens
  misc_RNA (1)...(19): siRNA sense strand
ggccguaaagcgagugaaa

SEQ ID NO: 1716966 - RNA, 19 nt, Homo sapiens
  misc_RNA (1)...(19): siRNA sense strand
gcaagcgaccaugcacuau

SEQ ID NO: 1716967 - RNA, 19 nt, Homo sapiens
  misc_RNA (1)...(19): siRNA sense strand
uaaacugcauaauggacau

SEQ ID NO: 1716968 - RNA, 19 nt, Homo sapiens
  misc_RNA (1)...(19): siRNA sense strand
ucuguuaaacugcauaaug

SEQ ID NO: 1716969 - RNA, 19 nt, Homo sapiens
  misc_RNA (1)...(19): siRNA sense strand
agacagagaaugggcagaa

SEQ ID NO: 1716970 - RNA, 19 nt, Homo sapiens
  misc_RNA (1)...(19): siRNA sense strand
caguccaaauaacggcuua

SEQ ID NO: 1716971 - RNA, 19 nt, Homo sapiens
  misc_RNA (1)...(19): siRNA sense strand
acaccgacaacguuaacua

SEQ ID NO: 1716972 - RNA, 19 nt, Homo sapiens
  misc_RNA (1)...(19): siRNA sense strand
cagaagaguggaaacaucu

SEQ ID NO: 1716973 - RNA, 19 nt, Homo sapiens
  misc_RNA (1)...(19): siRNA sense strand
gcgguacaguccaaauaac

SEQ ID NO: 1716974 - RNA, 19 nt, Homo sapiens
  misc_RNA (1)...(19): siRNA sense strand
ccaauggcuucagcaaugg

SEQ ID NO: 1716975 - RNA, 19 nt, Homo sapiens
  misc_RNA (1)...(19): siRNA sense strand
gcagcagagucccgucaac

SEQ ID NO: 1716976 - RNA, 19 nt, Homo sapiens
  misc_RNA (1)...(19): siRNA sense strand
gcauaauggacaugguaga

SEQ ID NO: 1716977 - RNA, 19 nt, Homo sapiens
  misc_RNA (1)...(19): siRNA sense strand
cuacagggacuccuaucga

SEQ ID NO: 1716978 - RNA, 19 nt, Homo sapiens
  misc_RNA (1)...(19): siRNA sense strand
gaaaccugcaguggcugua

SEQ ID NO: 1716979 - RNA, 19 nt, Homo sapiens
  misc_RNA (1)...(19): siRNA sense strand
cugagaagcacuccacaau

SEQ ID NO: 1716980 - RNA, 19 nt, Homo sapiens
  misc_RNA (1)...(19): siRNA sense strand
ccacugagaccuuuuguca

SEQ ID NO: 1716981 - RNA, 19 nt, Homo sapiens
  misc_RNA (1)...(19): siRNA sense strand
ugcaagaagcuacuaacuu

SEQ ID NO: 1716982 - RNA, 19 nt, Homo sapiens
  misc_RNA (1)...(19): siRNA sense strand
uggaugauauggccauugc

SEQ ID NO: 1716983 - RNA, 19 nt, Homo sapiens
  misc_RNA (1)...(19): siRNA sense strand
cagagagggccaagaugga

SEQ ID NO: 1716984 - RNA, 19 nt, Homo sapiens
  misc_RNA (1)...(19): siRNA sense strand
gggcagaagaguggaaaca

SEQ ID NO: 1716985 - RNA, 19 nt, Homo sapiens
  misc_RNA (1)...(19): siRNA sense strand
gacagagaaugggcagaag

SEQ ID NO: 1716986 - RNA, 19 nt, Homo sapiens
  misc_RNA (1)...(19): siRNA sense strand
ucacagacuaacagacaga

SEQ ID NO: 1716987 - RNA, 19 nt, Homo sapiens
  misc_RNA (1)...(19): siRNA sense strand
ccucagggacagaaacaga

SEQ ID NO: 1716988 - RNA, 19 nt, Homo sapiens
  misc_RNA (1)...(19): siRNA sense strand
ggaaacaucuugaccaucu

SEQ ID NO: 1716989 - RNA, 19 nt, Homo sapiens
  misc_RNA (1)...(19): siRNA sense strand
gaacuccacuuugacaauu

SEQ ID NO: 1716990 - RNA, 19 nt, Homo sapiens
  misc_RNA (1)...(19): siRNA sense strand
gcagucagcuccucuguca

SEQ ID NO: 1716991 - RNA, 19 nt, Homo sapiens
  misc_RNA (1)...(19): siRNA sense strand
gcuacuaacuucccacuga

SEQ ID NO: 1716992 - RNA, 19 nt, Homo sapiens
  misc_RNA (1)...(19): siRNA sense strand
gaggagaucuggaagaaag

SEQ ID NO: 1716993 - RNA, 19 nt, Homo sapiens
  misc_RNA (1)...(19): siRNA sense strand
gcaaugggccuuccucuuc

SEQ ID NO: 1716994 - RNA, 19 nt, Homo sapiens
  misc_RNA (1)...(19): siRNA sense strand
aagcgaccaugcacuauua

SEQ ID NO: 1716995 - RNA, 19 nt, Homo sapiens
  misc_RNA (1)...(19): siRNA sense strand
gcgcaagacuggccaaaca

SEQ ID NO: 1716996 - RNA, 19 nt, Homo sapiens
  misc_RNA (1)...(19): siRNA sense strand
gcagaagaguggaaacauc

SEQ ID NO: 1716997 - RNA, 19 nt, Homo sapiens
  misc_RNA (1)...(19): siRNA sense strand
gagaguugcuggaauugug

SEQ ID NO: 1716998 - RNA, 19 nt, Homo sapiens
  misc_RNA (1)...(19): siRNA sense strand
gaggcgaacuccagacaga

SEQ ID NO: 1716999 - RNA, 19 nt, Homo sapiens
  misc_RNA (1)...(19): siRNA sense strand
gaagcaccaucacaucugu

SEQ ID NO: 1717000 - RNA, 19 nt, Homo sapiens
  misc_RNA (1)...(19): siRNA sense strand
caacagagagggccaagau

SEQ ID NO: 1717001 - RNA, 19 nt, Homo sapiens
  misc_RNA (1)...(19): siRNA sense strand
gcggaaagcccacgacaug

SEQ ID NO: 1717002 - RNA, 19 nt, Homo sapiens
  misc_RNA (1)...(19): siRNA sense strand
cgacaacguuaacuaaugg

SEQ ID NO: 1717003 - RNA, 19 nt, Homo sapiens
  misc_RNA (1)...(19): siRNA sense strand
gaucacagacuaacagaca

SEQ ID NO: 1717004 - RNA, 19 nt, Homo sapiens
  misc_RNA (1)...(19): siRNA sense strand
cccaauggcuucagcaaug

SEQ ID NO: 1717005 - RNA, 19 nt, Homo sapiens
  misc_RNA (1)...(19): siRNA sense strand
ggacagaaacagaccuaug

SEQ ID NO: 1717006 - RNA, 19 nt, Homo sapiens
  misc_RNA (1)...(19): siRNA sense strand
gcacaaagacugggagaag

SEQ ID NO: 1717007 - RNA, 19 nt, Homo sapiens
  misc_RNA (1)...(19): siRNA sense strand
ccgauacuguggcucauuu

SEQ ID NO: 1717008 - RNA, 19 nt, Homo sapiens
  misc_RNA (1)...(19): siRNA sense strand
cgagauaggagaaagaguu

SEQ ID NO: 1717009 - RNA, 19 nt, Homo sapiens
  misc_RNA (1)...(19): siRNA sense strand
ugacauuucacccgagaua

SEQ ID NO: 1717010 - RNA, 19 nt, Homo sapiens
  misc_RNA (1)...(19): siRNA sense strand
gacaugaucacaacagaga

SEQ ID NO: 1717011 - RNA, 19 nt, Homo sapiens
  misc_RNA (1)...(19): siRNA sense strand
ggaaagcccacgacaugau

SEQ ID NO: 1717012 - RNA, 19 nt, Homo sapiens
  misc_RNA (1)...(19): siRNA sense strand
ccgacaacguuaacuaaug

SEQ ID NO: 1717013 - RNA, 19 nt, Homo sapiens
  misc_RNA (1)...(19): siRNA sense strand
guacuaaggcggugucaag

SEQ ID NO: 1717014 - RNA, 19 nt, Homo sapiens
  misc_RNA (1)...(19): siRNA sense strand
ccagacagaaccaaagaaa

SEQ ID NO: 1717015 - RNA, 19 nt, Homo sapiens
  misc_RNA (1)...(19): siRNA sense strand
uggcacacgucaagaagaa

SEQ ID NO: 1717016 - RNA, 19 nt, Homo sapiens
  misc_RNA (1)...(19): siRNA sense strand
gcaagacuggccaaacaga

SEQ ID NO: 1717017 - RNA, 19 nt, Homo sapiens
  misc_RNA (1)...(19): siRNA sense strand
ggagaagcaccaucacauc

SEQ ID NO: 1717018 - RNA, 19 nt, Homo sapiens
  misc_RNA (1)...(19): siRNA sense strand
ccuccucucuggcuaauca

SEQ ID NO: 1717019 - RNA, 19 nt, Homo sapiens
  misc_RNA (1)...(19): siRNA sense strand
aagcagaccgggaagaauu

SEQ ID NO: 1717020 - RNA, 19 nt, Homo sapiens
  misc_RNA (1)...(19): siRNA sense strand
cuaaggcggugucaagaag

SEQ ID NO: 1717021 - RNA, 19 nt, Homo sapiens
  misc_RNA (1)...(19): siRNA sense strand
caucuugaccaucuguuaa

SEQ ID NO: 1717022 - RNA, 19 nt, Homo sapiens
  misc_RNA (1)...(19): siRNA sense strand
gaugugaagacgcaaucua

SEQ ID NO: 1717023 - RNA, 19 nt, Homo sapiens
  misc_RNA (1)...(19): siRNA sense strand
gcacacgucaagaagaaau

SEQ ID NO: 1717024 - RNA, 19 nt, Homo sapiens
  misc_RNA (1)...(19): siRNA sense strand
gacagaaacagaccuaugg

SEQ ID NO: 1717025 - RNA, 19 nt, Homo sapiens
  misc_RNA (1)...(19): siRNA sense strand
gagagccuuugcacucaga

SEQ ID NO: 1717026 - RNA, 19 nt, Homo sapiens
  misc_RNA (1)...(19): siRNA sense strand
gaaagcccacgacaugauc

SEQ ID NO: 1717027 - RNA, 19 nt, Homo sapiens
  misc_RNA (1)...(19): siRNA sense strand
gcauggcacacgucaagaa

SEQ ID NO: 1717028 - RNA, 19 nt, Homo sapiens
  misc_RNA (1)...(19): siRNA sense strand
cagcgguacaguccaaaua

SEQ ID NO: 1717029 - RNA, 19 nt, Homo sapiens
  misc_RNA (1)...(19): siRNA sense strand
cagagagccuuugcacuca

SEQ ID NO: 1717030 - RNA, 19 nt, Homo sapiens
  misc_RNA (1)...(19): siRNA sense strand
gagaagcaccaucacaucu

SEQ ID NO: 1717031 - RNA, 19 nt, Homo sapiens
  misc_RNA (1)...(19): siRNA sense strand
gcugacuccuccaacaaug

SEQ ID NO: 1717032 - RNA, 19 nt, Homo sapiens
  misc_RNA (1)...(19): siRNA sense strand
caccuccaccucagcauua

SEQ ID NO: 1717033 - RNA, 19 nt, Homo sapiens
  misc_RNA (1)...(19): siRNA sense strand
acagaacccugcccaguac

SEQ ID NO: 1717034 - RNA, 19 nt, Homo sapiens
  misc_RNA (1)...(19): siRNA sense strand
caucgggaauuccuucaca

SEQ ID NO: 1717035 - RNA, 19 nt, Homo sapiens
  misc_RNA (1)...(19): siRNA sense strand
guggaaacaucuugaccau

SEQ ID NO: 1717036 - RNA, 19 nt, Homo sapiens
  misc_RNA (1)...(19): siRNA sense strand
caagaagaaaugauugauc

SEQ ID NO: 1717037 - RNA, 19 nt, Homo sapiens
  misc_RNA (1)...(19): siRNA sense strand
caagcgaccaugcacuauu

SEQ ID NO: 1717038 - RNA, 19 nt, Homo sapiens
  misc_RNA (1)...(19): siRNA sense strand
cagagcugcuucucgaugu

SEQ ID NO: 1717039 - RNA, 19 nt, Homo sapiens
  misc_RNA (1)...(19): siRNA sense strand
gaaacaucuugaccaucug

SEQ ID NO: 1717040 - RNA, 19 nt, Homo sapiens
  misc_RNA (1)...(19): siRNA sense strand
gagauaggagaaagaguuc

SEQ ID NO: 1717041 - RNA, 19 nt, Homo sapiens
  misc_RNA (1)...(19): siRNA sense strand
caaugggccuuccucuucu

SEQ ID NO: 1717042 - RNA, 19 nt, Homo sapiens
  misc_RNA (1)...(19): siRNA sense strand
gggagaagcaccaucacau

SEQ ID NO: 1717043 - RNA, 19 nt, Homo sapiens
  misc_RNA (1)...(19): siRNA sense strand
cugaggaggccgucaauga

SEQ ID NO: 1717044 - RNA, 19 nt, Homo sapiens
  misc_RNA (1)...(19): siRNA sense strand
uaauggacaugguagaaaa

SEQ ID NO: 1717045 - RNA, 19 nt, Homo sapiens
  misc_RNA (1)...(19): siRNA sense strand
cauuaccguuuggaugaua

SEQ ID NO: 1717046 - RNA, 19 nt, Homo sapiens
  misc_RNA (1)...(19): siRNA sense strand
caccucagcauuaccguuu

SEQ ID NO: 1717047 - RNA, 19 nt, Homo sapiens
  misc_RNA (1)...(19): siRNA sense strand
ggccagcgguacaguccaa

SEQ ID NO: 1717048 - RNA, 19 nt, Homo sapiens
  misc_RNA (1)...(19): siRNA sense strand
caccgacaacguuaacuaa

SEQ ID NO: 1717049 - RNA, 19 nt, Homo sapiens
  misc_RNA (1)...(19): siRNA sense strand
caagacuggccaaacagaa

SEQ ID NO: 1717050 - RNA, 19 nt, Homo sapiens
  misc_RNA (1)...(19): siRNA sense strand
cagugacgccgaggacuua

SEQ ID NO: 1717051 - RNA, 19 nt, Homo sapiens
  misc_RNA (1)...(19): siRNA sense strand
cauaauggacaugguagaa

SEQ ID NO: 1717052 - RNA, 19 nt, Homo sapiens
  misc_RNA (1)...(19): siRNA sense strand
cuguuaaacugcauaaugg

SEQ ID NO: 1717053 - RNA, 19 nt, Homo sapiens
  misc_RNA (1)...(19): siRNA sense strand
cagacuaacagacagagaa

SEQ ID NO: 1717054 - RNA, 19 nt, Homo sapiens
  misc_RNA (1)...(19): siRNA sense strand
aacagaacccugcccagua

SEQ ID NO: 1717055 - RNA, 19 nt, Homo sapiens
  misc_RNA (1)...(19): siRNA sense strand
ggcacgagccauucuccua

SEQ ID NO: 1717056 - RNA, 19 nt, Homo sapiens
  misc_RNA (1)...(19): siRNA sense strand
gaagcagaccgggaagaau

SEQ ID NO: 1717057 - RNA, 19 nt, Homo sapiens
  misc_RNA (1)...(19): siRNA sense strand
ccacuuugacaauugaaga

SEQ ID NO: 1717058 - RNA, 19 nt, Homo sapiens
  misc_RNA (1)...(19): siRNA sense strand
ggagacacaccugcaguca

SEQ ID NO: 1717059 - RNA, 19 nt, Homo sapiens
  misc_RNA (1)...(19): siRNA sense strand
agcgagaguugcuggaauu

SEQ ID NO: 1717060 - RNA, 19 nt, Homo sapiens
  misc_RNA (1)...(19): siRNA sense strand
gcauuaccguuuggaugau

SEQ ID NO: 1717061 - RNA, 19 nt, Homo sapiens
  misc_RNA (1)...(19): siRNA sense strand
guaccucgcccagcaugaa

SEQ ID NO: 1717062 - RNA, 19 nt, Homo sapiens
  misc_RNA (1)...(19): siRNA sense strand
ggccguaaagcgagugaaa

SEQ ID NO: 1717063 - RNA, 19 nt, Homo sapiens
  misc_RNA (1)...(19): siRNA sense strand
agacucaccuguggaugug

SEQ ID NO: 1717064 - RNA, 19 nt, Homo sapiens
  misc_RNA (1)...(19): siRNA sense strand
gcaagcgaccaugcacuau

SEQ ID NO: 1717065 - RNA, 19 nt, Homo sapiens
  misc_RNA (1)...(19): siRNA sense strand
uaaacugcauaauggacau

SEQ ID NO: 1717066 - RNA, 19 nt, Homo sapiens
  misc_RNA (1)...(19): siRNA sense strand
ucuguuaaacugcauaaug

SEQ ID NO: 1717067 - RNA, 19 nt, Homo sapiens
  misc_RNA (1)...(19): siRNA sense strand
agacagagaaugggcagaa

SEQ ID NO: 1717068 - RNA, 19 nt, Homo sapiens
  misc_RNA (1)...(19): siRNA sense strand
caguccaaauaacggcuua

SEQ ID NO: 1717069 - RNA, 19 nt, Homo sapiens
  misc_RNA (1)...(19): siRNA sense strand
cagaagaguggaaacaucu

SEQ ID NO: 1717070 - RNA, 19 nt, Homo sapiens
  misc_RNA (1)...(19): siRNA sense strand
acaccgacaacguuaacua

SEQ ID NO: 1717071 - RNA, 19 nt, Homo sapiens
  misc_RNA (1)...(19): siRNA sense strand
ccaauggcuucagcaaugg

SEQ ID NO: 1717072 - RNA, 19 nt, Homo sapiens
  misc_RNA (1)...(19): siRNA sense strand
gcagcagagucccgucaac

SEQ ID NO: 1717073 - RNA, 19 nt, Homo sapiens
  misc_RNA (1)...(19): siRNA sense strand
gcauaauggacaugguaga

SEQ ID NO: 1717074 - RNA, 19 nt, Homo sapiens
  misc_RNA (1)...(19): siRNA sense strand
cuacagggacuccuaucga

SEQ ID NO: 1717075 - RNA, 19 nt, Homo sapiens
  misc_RNA (1)...(19): siRNA sense strand
gcgguacaguccaaauaac

SEQ ID NO: 1717076 - RNA, 19 nt, Homo sapiens
  misc_RNA (1)...(19): siRNA sense strand
gaaaccugcaguggcugua

SEQ ID NO: 1717077 - RNA, 19 nt, Homo sapiens
  misc_RNA (1)...(19): siRNA sense strand
ugcaagaagcuacuaacuu

SEQ ID NO: 1717078 - RNA, 19 nt, Homo sapiens
  misc_RNA (1)...(19): siRNA sense strand
ccacugagaccuuuuguca

SEQ ID NO: 1717079 - RNA, 19 nt, Homo sapiens
  misc_RNA (1)...(19): siRNA sense strand
gagcugcuucucgauguga

SEQ ID NO: 1717080 - RNA, 19 nt, Homo sapiens
  misc_RNA (1)...(19): siRNA sense strand
cagagagggccaagaugga

SEQ ID NO: 1717081 - RNA, 19 nt, Homo sapiens
  misc_RNA (1)...(19): siRNA sense strand
gggcagaagaguggaaaca

SEQ ID NO: 1717082 - RNA, 19 nt, Homo sapiens
  misc_RNA (1)...(19): siRNA sense strand
gacagagaaugggcagaag

SEQ ID NO: 1717083 - RNA, 19 nt, Homo sapiens
  misc_RNA (1)...(19): siRNA sense strand
ucacagacuaacagacaga

SEQ ID NO: 1717084 - RNA, 19 nt, Homo sapiens
  misc_RNA (1)...(19): siRNA sense strand
ccucagggacagaaacaga

SEQ ID NO: 1717085 - RNA, 19 nt, Homo sapiens
  misc_RNA (1)...(19): siRNA sense strand
uggaugauauggccauugc

SEQ ID NO: 1717086 - RNA, 19 nt, Homo sapiens
  misc_RNA (1)...(19): siRNA sense strand
agacagaaccaaagaaaau

SEQ ID NO: 1717087 - RNA, 19 nt, Homo sapiens
  misc_RNA (1)...(19): siRNA sense strand
aagcgagaguugcuggaau

SEQ ID NO: 1717088 - RNA, 19 nt, Homo sapiens
  misc_RNA (1)...(19): siRNA sense strand
ggaaacaucuugaccaucu

SEQ ID NO: 1717089 - RNA, 19 nt, Homo sapiens
  misc_RNA (1)...(19): siRNA sense strand
gaacuccacuuugacaauu

SEQ ID NO: 1717090 - RNA, 19 nt, Homo sapiens
  misc_RNA (1)...(19): siRNA sense strand
gcagucagcuccucuguca

SEQ ID NO: 1717091 - RNA, 19 nt, Homo sapiens
  misc_RNA (1)...(19): siRNA sense strand
gcuacuaacuucccacuga

SEQ ID NO: 1717092 - RNA, 19 nt, Homo sapiens
  misc_RNA (1)...(19): siRNA sense strand
gaggagaucuggaagaaag

SEQ ID NO: 1717093 - RNA, 19 nt, Homo sapiens
  misc_RNA (1)...(19): siRNA sense strand
gcaaugggccuuccucuuc

SEQ ID NO: 1717094 - RNA, 19 nt, Homo sapiens
  misc_RNA (1)...(19): siRNA sense strand
aagcgaccaugcacuauua

SEQ ID NO: 1717095 - RNA, 19 nt, Homo sapiens
  misc_RNA (1)...(19): siRNA sense strand
gcgcaagacuggccaaaca

SEQ ID NO: 1717096 - RNA, 19 nt, Homo sapiens
  misc_RNA (1)...(19): siRNA sense strand
gcagaagaguggaaacauc

SEQ ID NO: 1717097 - RNA, 19 nt, Homo sapiens
  misc_RNA (1)...(19): siRNA sense strand
gagaguugcuggaauugug

SEQ ID NO: 1717098 - RNA, 19 nt, Homo sapiens
  misc_RNA (1)...(19): siRNA sense strand
gaggcgaacuccagacaga

SEQ ID NO: 1717099 - RNA, 19 nt, Homo sapiens
  misc_RNA (1)...(19): siRNA sense strand
gaagcaccaucacaucugu

SEQ ID NO: 1717100 - RNA, 19 nt, Homo sapiens
  misc_RNA (1)...(19): siRNA sense strand
caacagagagggccaagau

SEQ ID NO: 1717101 - RNA, 19 nt, Homo sapiens
  misc_RNA (1)...(19): siRNA sense strand
gcggaaagcccacgacaug

SEQ ID NO: 1717102 - RNA, 19 nt, Homo sapiens
  misc_RNA (1)...(19): siRNA sense strand
cgacaacguuaacuaaugg

SEQ ID NO: 1717103 - RNA, 19 nt, Homo sapiens
  misc_RNA (1)...(19): siRNA sense strand
gaucacagacuaacagaca

SEQ ID NO: 1717104 - RNA, 19 nt, Homo sapiens
  misc_RNA (1)...(19): siRNA sense strand
cccaauggcuucagcaaug

SEQ ID NO: 1717105 - RNA, 19 nt, Homo sapiens
  misc_RNA (1)...(19): siRNA sense strand
ggacagaaacagaccuaug

SEQ ID NO: 1717106 - RNA, 19 nt, Homo sapiens
  misc_RNA (1)...(19): siRNA sense strand
gcacaaagacugggagaag

SEQ ID NO: 1717107 - RNA, 19 nt, Homo sapiens
  misc_RNA (1)...(19): siRNA sense strand
ccgauacuguggcucauuu

SEQ ID NO: 1717108 - RNA, 19 nt, Homo sapiens
  misc_RNA (1)...(19): siRNA sense strand
cgagauaggagaaagaguu

SEQ ID NO: 1717109 - RNA, 19 nt, Homo sapiens
  misc_RNA (1)...(19): siRNA sense strand
ugacauuucacccgagaua

SEQ ID NO: 1717110 - RNA, 19 nt, Homo sapiens
  misc_RNA (1)...(19): siRNA sense strand
gacaugaucacaacagaga

SEQ ID NO: 1717111 - RNA, 19 nt, Homo sapiens
  misc_RNA (1)...(19): siRNA sense strand
ggaaagcccacgacaugau

SEQ ID NO: 1717112 - RNA, 19 nt, Homo sapiens
  misc_RNA (1)...(19): siRNA sense strand
ccgacaacguuaacuaaug

SEQ ID NO: 1717113 - RNA, 19 nt, Homo sapiens
  misc_RNA (1)...(19): siRNA sense strand
guacuaaggcggugucaag

SEQ ID NO: 1717114 - RNA, 19 nt, Homo sapiens
  misc_RNA (1)...(19): siRNA sense strand
ccagacagaaccaaagaaa

SEQ ID NO: 1717115 - RNA, 19 nt, Homo sapiens
  misc_RNA (1)...(19): siRNA sense strand
uggcacacgucaagaagaa

SEQ ID NO: 1717116 - RNA, 19 nt, Homo sapiens
  misc_RNA (1)...(19): siRNA sense strand
gcaagacuggccaaacaga

SEQ ID NO: 1717117 - RNA, 19 nt, Homo sapiens
  misc_RNA (1)...(19): siRNA sense strand
ggagaagcaccaucacauc

SEQ ID NO: 1717118 - RNA, 19 nt, Homo sapiens
  misc_RNA (1)...(19): siRNA sense strand
ccuccucucuggcuaauca

SEQ ID NO: 1717119 - RNA, 19 nt, Homo sapiens
  misc_RNA (1)...(19): siRNA sense strand
aagcagaccgggaagaauu

SEQ ID NO: 1717120 - RNA, 19 nt, Homo sapiens
  misc_RNA (1)...(19): siRNA sense strand
cuaaggcggugucaagaag

SEQ ID NO: 1717121 - RNA, 19 nt, Homo sapiens
  misc_RNA (1)...(19): siRNA sense strand
caucuugaccaucuguuaa

SEQ ID NO: 1717122 - RNA, 19 nt, Homo sapiens
  misc_RNA (1)...(19): siRNA sense strand
gaugugaagacgcaaucua

SEQ ID NO: 1717123 - RNA, 19 nt, Homo sapiens
  misc_RNA (1)...(19): siRNA sense strand
gcacacgucaagaagaaau

SEQ ID NO: 1717124 - RNA, 19 nt, Homo sapiens
  misc_RNA (1)...(19): siRNA sense strand
gacagaaacagaccuaugg

SEQ ID NO: 1717125 - RNA, 19 nt, Homo sapiens
  misc_RNA (1)...(19): siRNA sense strand
gagagccuuugcacucaga

SEQ ID NO: 1717126 - RNA, 19 nt, Homo sapiens
  misc_RNA (1)...(19): siRNA sense strand
gaaagcccacgacaugauc

SEQ ID NO: 1717127 - RNA, 19 nt, Homo sapiens
  misc_RNA (1)...(19): siRNA sense strand
gcauggcacacgucaagaa

SEQ ID NO: 1717128 - RNA, 19 nt, Homo sapiens
  misc_RNA (1)...(19): siRNA sense strand
cagcgguacaguccaaaua

SEQ ID NO: 1717129 - RNA, 19 nt, Homo sapiens
  misc_RNA (1)...(19): siRNA sense strand
cagagagccuuugcacuca

SEQ ID NO: 1717130 - RNA, 19 nt, Homo sapiens
  misc_RNA (1)...(19): siRNA sense strand
gagaagcaccaucacaucu

SEQ ID NO: 1717131 - RNA, 19 nt, Homo sapiens
  misc_RNA (1)...(19): siRNA sense strand
gcugacuccuccaacaaug

SEQ ID NO: 1717132 - RNA, 19 nt, Homo sapiens
  misc_RNA (1)...(19): siRNA sense strand
caccuccaccucagcauua

SEQ ID NO: 1717133 - RNA, 19 nt, Homo sapiens
  misc_RNA (1)...(19): siRNA sense strand
acagaacccugcccaguac

SEQ ID NO: 1717134 - RNA, 19 nt, Homo sapiens
  misc_RNA (1)...(19): siRNA sense strand
caucgggaauuccuucaca

SEQ ID NO: 1717135 - RNA, 19 nt, Homo sapiens
  misc_RNA (1)...(19): siRNA sense strand
guggaaacaucuugaccau

SEQ ID NO: 1717136 - RNA, 19 nt, Homo sapiens
  misc_RNA (1)...(19): siRNA sense strand
caagaagaaaugauugauc

SEQ ID NO: 1717137 - RNA, 19 nt, Homo sapiens
  misc_RNA (1)...(19): siRNA sense strand
caagcgaccaugcacuauu

SEQ ID NO: 1717138 - RNA, 19 nt, Homo sapiens
  misc_RNA (1)...(19): siRNA sense strand
cagagcugcuucucgaugu

SEQ ID NO: 1717139 - RNA, 19 nt, Homo sapiens
  misc_RNA (1)...(19): siRNA sense strand
gaaacaucuugaccaucug

SEQ ID NO: 1717140 - RNA, 19 nt, Homo sapiens
  misc_RNA (1)...(19): siRNA sense strand
gagauaggagaaagaguuc

SEQ ID NO: 1717141 - RNA, 19 nt, Homo sapiens
  misc_RNA (1)...(19): siRNA sense strand
caaugggccuuccucuucu

SEQ ID NO: 1717142 - RNA, 19 nt, Homo sapiens
  misc_RNA (1)...(19): siRNA sense strand
gggagaagcaccaucacau

SEQ ID NO: 1717143 - RNA, 19 nt, Homo sapiens
  misc_RNA (1)...(19): siRNA sense strand
cugaggaggccgucaauga

SEQ ID NO: 1717144 - RNA, 19 nt, Homo sapiens
  misc_RNA (1)...(19): siRNA sense strand
uaauggacaugguagaaaa

SEQ ID NO: 1717145 - RNA, 19 nt, Homo sapiens
  misc_RNA (1)...(19): siRNA sense strand
cauuaccguuuggaugaua

SEQ ID NO: 1717146 - RNA, 19 nt, Homo sapiens
  misc_RNA (1)...(19): siRNA sense strand
caccucagcauuaccguuu

SEQ ID NO: 1717147 - RNA, 19 nt, Homo sapiens
  misc_RNA (1)...(19): siRNA sense strand
ggccagcgguacaguccaa

SEQ ID NO: 1717148 - RNA, 19 nt, Homo sapiens
  misc_RNA (1)...(19): siRNA sense strand
caccgacaacguuaacuaa

SEQ ID NO: 1717149 - RNA, 19 nt, Homo sapiens
  misc_RNA (1)...(19): siRNA sense strand
caagacuggccaaacagaa

SEQ ID NO: 1717150 - RNA, 19 nt, Homo sapiens
  misc_RNA (1)...(19): siRNA sense strand
cagugacgccgaggacuua

SEQ ID NO: 1717151 - RNA, 19 nt, Homo sapiens
  misc_RNA (1)...(19): siRNA sense strand
cauaauggacaugguagaa

SEQ ID NO: 1717152 - RNA, 19 nt, Homo sapiens
  misc_RNA (1)...(19): siRNA sense strand
cuguuaaacugcauaaugg

SEQ ID NO: 1717153 - RNA, 19 nt, Homo sapiens
  misc_RNA (1)...(19): siRNA sense strand
cagacuaacagacagagaa

SEQ ID NO: 1717154 - RNA, 19 nt, Homo sapiens
  misc_RNA (1)...(19): siRNA sense strand
aacagaacccugcccagua

SEQ ID NO: 1717155 - RNA, 19 nt, Homo sapiens
  misc_RNA (1)...(19): siRNA sense strand
ggcacgagccauucuccua

SEQ ID NO: 1717156 - RNA, 19 nt, Homo sapiens
  misc_RNA (1)...(19): siRNA sense strand
gaagcagaccgggaagaau

SEQ ID NO: 1717157 - RNA, 19 nt, Homo sapiens
  misc_RNA (1)...(19): siRNA sense strand
ccacuuugacaauugaaga

SEQ ID NO: 1717158 - RNA, 19 nt, Homo sapiens
  misc_RNA (1)...(19): siRNA sense strand
ggagacacaccugcaguca

SEQ ID NO: 1717159 - RNA, 19 nt, Homo sapiens
  misc_RNA (1)...(19): siRNA sense strand
agcgagaguugcuggaauu

SEQ ID NO: 1717160 - RNA, 19 nt, Homo sapiens
  misc_RNA (1)...(19): siRNA sense strand
gcauuaccguuuggaugau

SEQ ID NO: 1717161 - RNA, 19 nt, Homo sapiens
  misc_RNA (1)...(19): siRNA sense strand
guaccucgcccagcaugaa

SEQ ID NO: 1717162 - RNA, 19 nt, Homo sapiens
  misc_RNA (1)...(19): siRNA sense strand
ggccguaaagcgagugaaa

SEQ ID NO: 1717163 - RNA, 19 nt, Homo sapiens
  misc_RNA (1)...(19): siRNA sense strand
agacucaccuguggaugug

SEQ ID NO: 1717164 - RNA, 19 nt, Homo sapiens
  misc_RNA (1)...(19): siRNA sense strand
gcaagcgaccaugcacuau

SEQ ID NO: 1717165 - RNA, 19 nt, Homo sapiens
  misc_RNA (1)...(19): siRNA sense strand
uaaacugcauaauggacau

SEQ ID NO: 1717166 - RNA, 19 nt, Homo sapiens
  misc_RNA (1)...(19): siRNA sense strand
ucuguuaaacugcauaaug

SEQ ID NO: 1717167 - RNA, 19 nt, Homo sapiens
  misc_RNA (1)...(19): siRNA sense strand
agacagagaaugggcagaa

SEQ ID NO: 1717168 - RNA, 19 nt, Homo sapiens
  misc_RNA (1)...(19): siRNA sense strand
caguccaaauaacggcuua

SEQ ID NO: 1717169 - RNA, 19 nt, Homo sapiens
  misc_RNA (1)...(19): siRNA sense strand
cagaagaguggaaacaucu

SEQ ID NO: 1717170 - RNA, 19 nt, Homo sapiens
  misc_RNA (1)...(19): siRNA sense strand
acaccgacaacguuaacua

SEQ ID NO: 1717171 - RNA, 19 nt, Homo sapiens
  misc_RNA (1)...(19): siRNA sense strand
ccaauggcuucagcaaugg

SEQ ID NO: 1717172 - RNA, 19 nt, Homo sapiens
  misc_RNA (1)...(19): siRNA sense strand
gcagcagagucccgucaac

SEQ ID NO: 1717173 - RNA, 19 nt, Homo sapiens
  misc_RNA (1)...(19): siRNA sense strand
gcauaauggacaugguaga

SEQ ID NO: 1717174 - RNA, 19 nt, Homo sapiens
  misc_RNA (1)...(19): siRNA sense strand
cuacagggacuccuaucga

SEQ ID NO: 1717175 - RNA, 19 nt, Homo sapiens
  misc_RNA (1)...(19): siRNA sense strand
gcgguacaguccaaauaac

SEQ ID NO: 1717176 - RNA, 19 nt, Homo sapiens
  misc_RNA (1)...(19): siRNA sense strand
gaaaccugcaguggcugua

SEQ ID NO: 1717177 - RNA, 19 nt, Homo sapiens
  misc_RNA (1)...(19): siRNA sense strand
ugcaagaagcuacuaacuu

SEQ ID NO: 1717178 - RNA, 19 nt, Homo sapiens
  misc_RNA (1)...(19): siRNA sense strand
ccacugagaccuuuuguca

SEQ ID NO: 1717179 - RNA, 19 nt, Homo sapiens
  misc_RNA (1)...(19): siRNA sense strand
gagcugcuucucgauguga

SEQ ID NO: 1717180 - RNA, 19 nt, Homo sapiens
  misc_RNA (1)...(19): siRNA sense strand
cagagagggccaagaugga

SEQ ID NO: 1717181 - RNA, 19 nt, Homo sapiens
  misc_RNA (1)...(19): siRNA sense strand
gggcagaagaguggaaaca

SEQ ID NO: 1717182 - RNA, 19 nt, Homo sapiens
  misc_RNA (1)...(19): siRNA sense strand
gacagagaaugggcagaag

SEQ ID NO: 1717183 - RNA, 19 nt, Homo sapiens
  misc_RNA (1)...(19): siRNA sense strand
ucacagacuaacagacaga

SEQ ID NO: 1717184 - RNA, 19 nt, Homo sapiens
  misc_RNA (1)...(19): siRNA sense strand
ccucagggacagaaacaga

SEQ ID NO: 1717185 - RNA, 19 nt, Homo sapiens
  misc_RNA (1)...(19): siRNA sense strand
uggaugauauggccauugc

SEQ ID NO: 1717186 - RNA, 19 nt, Homo sapiens
  misc_RNA (1)...(19): siRNA sense strand
agacagaaccaaagaaaau

SEQ ID NO: 1717187 - RNA, 19 nt, Homo sapiens
  misc_RNA (1)...(19): siRNA sense strand
aagcgagaguugcuggaau

SEQ ID NO: 1717188 - RNA, 19 nt, Homo sapiens
  misc_RNA (1)...(19): siRNA sense strand
ggaaacaucuugaccaucu

SEQ ID NO: 1717189 - RNA, 19 nt, Homo sapiens
  misc_RNA (1)...(19): siRNA sense strand
gaacuccacuuugacaauu

SEQ ID NO: 1717190 - RNA, 19 nt, Homo sapiens
  misc_RNA (1)...(19): siRNA sense strand
gcagucagcuccucuguca

SEQ ID NO: 1717191 - RNA, 19 nt, Homo sapiens
  misc_RNA (1)...(19): siRNA sense strand
gcuacuaacuucccacuga

SEQ ID NO: 1717192 - RNA, 19 nt, Homo sapiens
  misc_RNA (1)...(19): siRNA sense strand
gaggagaucuggaagaaag

SEQ ID NO: 1717193 - RNA, 19 nt, Homo sapiens
  misc_RNA (1)...(19): siRNA sense strand
gagaagcacuccacaaugc

SEQ ID NO: 1717194 - RNA, 19 nt, Homo sapiens
  misc_RNA (1)...(19): siRNA sense strand
gcaaugggccuuccucuuc

SEQ ID NO: 1717195 - RNA, 19 nt, Homo sapiens
  misc_RNA (1)...(19): siRNA sense strand
aagcgaccaugcacuauua

SEQ ID NO: 1717196 - RNA, 19 nt, Homo sapiens
  misc_RNA (1)...(19): siRNA sense strand
gcgcaagacuggccaaaca

SEQ ID NO: 1717197 - RNA, 19 nt, Homo sapiens
  misc_RNA (1)...(19): siRNA sense strand
gcagaagaguggaaacauc

SEQ ID NO: 1717198 - RNA, 19 nt, Homo sapiens
  misc_RNA (1)...(19): siRNA sense strand
gagaguugcuggaauugug

SEQ ID NO: 1717199 - RNA, 19 nt, Homo sapiens
  misc_RNA (1)...(19): siRNA sense strand
gaggcgaacuccagacaga

SEQ ID NO: 1717200 - RNA, 19 nt, Homo sapiens
  misc_RNA (1)...(19): siRNA sense strand
gaagcaccaucacaucugu

SEQ ID NO: 1717201 - RNA, 19 nt, Homo sapiens
  misc_RNA (1)...(19): siRNA sense strand
caacagagagggccaagau

SEQ ID NO: 1717202 - RNA, 19 nt, Homo sapiens
  misc_RNA (1)...(19): siRNA sense strand
gcggaaagcccacgacaug

SEQ ID NO: 1717203 - RNA, 19 nt, Homo sapiens
  misc_RNA (1)...(19): siRNA sense strand
cgacaacguuaacuaaugg

SEQ ID NO: 1717204 - RNA, 19 nt, Homo sapiens
  misc_RNA (1)...(19): siRNA sense strand
gaucacagacuaacagaca

SEQ ID NO: 1717205 - RNA, 19 nt, Homo sapiens
  misc_RNA (1)...(19): siRNA sense strand
cccaauggcuucagcaaug

SEQ ID NO: 1717206 - RNA, 19 nt, Homo sapiens
  misc_RNA (1)...(19): siRNA sense strand
ggacagaaacagaccuaug

SEQ ID NO: 1717207 - RNA, 19 nt, Homo sapiens
  misc_RNA (1)...(19): siRNA sense strand
gcacaaagacugggagaag

SEQ ID NO: 1717208 - RNA, 19 nt, Homo sapiens
  misc_RNA (1)...(19): siRNA sense strand
ccgauacuguggcucauuu

SEQ ID NO: 1717209 - RNA, 19 nt, Homo sapiens
  misc_RNA (1)...(19): siRNA sense strand
cgagauaggagaaagaguu

SEQ ID NO: 1717210 - RNA, 19 nt, Homo sapiens
  misc_RNA (1)...(19): siRNA sense strand
ugacauuucacccgagaua

SEQ ID NO: 1717211 - RNA, 19 nt, Homo sapiens
  misc_RNA (1)...(19): siRNA sense strand
gacaugaucacaacagaga

SEQ ID NO: 1717212 - RNA, 19 nt, Homo sapiens
  misc_RNA (1)...(19): siRNA sense strand
ggaaagcccacgacaugau

SEQ ID NO: 1717213 - RNA, 19 nt, Homo sapiens
  misc_RNA (1)...(19): siRNA sense strand
ccgacaacguuaacuaaug

SEQ ID NO: 1717214 - RNA, 19 nt, Homo sapiens
  misc_RNA (1)...(19): siRNA sense strand
guacuaaggcggugucaag

SEQ ID NO: 1717215 - RNA, 19 nt, Homo sapiens
  misc_RNA (1)...(19): siRNA sense strand
ccagacagaaccaaagaaa

SEQ ID NO: 1717216 - RNA, 19 nt, Homo sapiens
  misc_RNA (1)...(19): siRNA sense strand
uggcacacgucaagaagaa

SEQ ID NO: 1717217 - RNA, 19 nt, Homo sapiens
  misc_RNA (1)...(19): siRNA sense strand
gcaagacuggccaaacaga

SEQ ID NO: 1717218 - RNA, 19 nt, Homo sapiens
  misc_RNA (1)...(19): siRNA sense strand
ggagaagcaccaucacauc

SEQ ID NO: 1717219 - RNA, 19 nt, Homo sapiens
  misc_RNA (1)...(19): siRNA sense strand
ccuccucucuggcuaauca

SEQ ID NO: 1717220 - RNA, 19 nt, Homo sapiens
  misc_RNA (1)...(19): siRNA sense strand
gaugugaagacgcaaucua

SEQ ID NO: 1717221 - RNA, 19 nt, Homo sapiens
  misc_RNA (1)...(19): siRNA sense strand
aagcagaccgggaagaauu

SEQ ID NO: 1717222 - RNA, 19 nt, Homo sapiens
  misc_RNA (1)...(19): siRNA sense strand
cuaaggcggugucaagaag

SEQ ID NO: 1717223 - RNA, 19 nt, Homo sapiens
  misc_RNA (1)...(19): siRNA sense strand
caucuugaccaucuguuaa

SEQ ID NO: 1717224 - RNA, 19 nt, Homo sapiens
  misc_RNA (1)...(19): siRNA sense strand
gcacacgucaagaagaaau

SEQ ID NO: 1717225 - RNA, 19 nt, Homo sapiens
  misc_RNA (1)...(19): siRNA sense strand
gacagaaacagaccuaugg

SEQ ID NO: 1717226 - RNA, 19 nt, Homo sapiens
  misc_RNA (1)...(19): siRNA sense strand
gagagccuuugcacucaga

SEQ ID NO: 1717227 - RNA, 19 nt, Homo sapiens
  misc_RNA (1)...(19): siRNA sense strand
gaaagcccacgacaugauc

SEQ ID NO: 1717228 - RNA, 19 nt, Homo sapiens
  misc_RNA (1)...(19): siRNA sense strand
gcauggcacacgucaagaa

SEQ ID NO: 1717229 - RNA, 19 nt, Homo sapiens
  misc_RNA (1)...(19): siRNA sense strand
cagcgguacaguccaaaua

SEQ ID NO: 1717230 - RNA, 19 nt, Homo sapiens
  misc_RNA (1)...(19): siRNA sense strand
cagagagccuuugcacuca

SEQ ID NO: 1717231 - RNA, 19 nt, Homo sapiens
  misc_RNA (1)...(19): siRNA sense strand
gagaagcaccaucacaucu

SEQ ID NO: 1717232 - RNA, 19 nt, Homo sapiens
  misc_RNA (1)...(19): siRNA sense strand
gcugacuccuccaacaaug

SEQ ID NO: 1717233 - RNA, 19 nt, Homo sapiens
  misc_RNA (1)...(19): siRNA sense strand
caccuccaccucagcauua

SEQ ID NO: 1717234 - RNA, 19 nt, Homo sapiens
  misc_RNA (1)...(19): siRNA sense strand
acagaacccugcccaguac

SEQ ID NO: 1717235 - RNA, 19 nt, Homo sapiens
  misc_RNA (1)...(19): siRNA sense strand
caucgggaauuccuucaca

SEQ ID NO: 1717236 - RNA, 19 nt, Homo sapiens
  misc_RNA (1)...(19): siRNA sense strand
guggaaacaucuugaccau

SEQ ID NO: 1717237 - RNA, 19 nt, Homo sapiens
  misc_RNA (1)...(19): siRNA sense strand
caagaagaaaugauugauc

SEQ ID NO: 1717238 - RNA, 19 nt, Homo sapiens
  misc_RNA (1)...(19): siRNA sense strand
caagcgaccaugcacuauu

SEQ ID NO: 1717239 - RNA, 19 nt, Homo sapiens
  misc_RNA (1)...(19): siRNA sense strand
cagagcugcuucucgaugu

SEQ ID NO: 1717240 - RNA, 19 nt, Homo sapiens
  misc_RNA (1)...(19): siRNA sense strand
gaaacaucuugaccaucug

SEQ ID NO: 1717241 - RNA, 19 nt, Homo sapiens
  misc_RNA (1)...(19): siRNA sense strand
gagauaggagaaagaguuc

SEQ ID NO: 1717242 - RNA, 19 nt, Homo sapiens
  misc_RNA (1)...(19): siRNA sense strand
ggccagcgguacaguccaa

SEQ ID NO: 1717243 - RNA, 19 nt, Homo sapiens
  misc_RNA (1)...(19): siRNA sense strand
gggagaagcaccaucacau

SEQ ID NO: 1717244 - RNA, 19 nt, Homo sapiens
  misc_RNA (1)...(19): siRNA sense strand
cugaggaggccgucaauga

SEQ ID NO: 1717245 - RNA, 19 nt, Homo sapiens
  misc_RNA (1)...(19): siRNA sense strand
uaauggacaugguagaaaa

SEQ ID NO: 1717246 - RNA, 19 nt, Homo sapiens
  misc_RNA (1)...(19): siRNA sense strand
cauuaccguuuggaugaua

SEQ ID NO: 1717247 - RNA, 19 nt, Homo sapiens
  misc_RNA (1)...(19): siRNA sense strand
caccucagcauuaccguuu

SEQ ID NO: 1717248 - RNA, 19 nt, Homo sapiens
  misc_RNA (1)...(19): siRNA sense strand
caaugggccuuccucuucu

SEQ ID NO: 1717249 - RNA, 19 nt, Homo sapiens
  misc_RNA (1)...(19): siRNA sense strand
caccgacaacguuaacuaa

SEQ ID NO: 1717250 - RNA, 19 nt, Homo sapiens
  misc_RNA (1)...(19): siRNA sense strand
caagacuggccaaacagaa

SEQ ID NO: 1717251 - RNA, 19 nt, Homo sapiens
  misc_RNA (1)...(19): siRNA sense strand
cagugacgccgaggacuua

SEQ ID NO: 1717252 - RNA, 19 nt, Homo sapiens
  misc_RNA (1)...(19): siRNA sense strand
cauaauggacaugguagaa

SEQ ID NO: 1717253 - RNA, 19 nt, Homo sapiens
  misc_RNA (1)...(19): siRNA sense strand
cuguuaaacugcauaaugg

SEQ ID NO: 1717254 - RNA, 19 nt, Homo sapiens
  misc_RNA (1)...(19): siRNA sense strand
cagacuaacagacagagaa

SEQ ID NO: 1717255 - RNA, 19 nt, Homo sapiens
  misc_RNA (1)...(19): siRNA sense strand
aacagaacccugcccagua

SEQ ID NO: 1717256 - RNA, 19 nt, Homo sapiens
  misc_RNA (1)...(19): siRNA sense strand
ggcacgagccauucuccua

SEQ ID NO: 1717257 - RNA, 19 nt, Homo sapiens
  misc_RNA (1)...(19): siRNA sense strand
gaagcagaccgggaagaau

SEQ ID NO: 1717258 - RNA, 19 nt, Homo sapiens
  misc_RNA (1)...(19): siRNA sense strand
ccacuuugacaauugaaga

SEQ ID NO: 1717259 - RNA, 19 nt, Homo sapiens
  misc_RNA (1)...(19): siRNA sense strand
ggagacacaccugcaguca

SEQ ID NO: 1717260 - RNA, 19 nt, Homo sapiens
  misc_RNA (1)...(19): siRNA sense strand
agcgagaguugcuggaauu

SEQ ID NO: 1717261 - RNA, 19 nt, Homo sapiens
  misc_RNA (1)...(19): siRNA sense strand
gcauuaccguuuggaugau

SEQ ID NO: 1717262 - RNA, 19 nt, Homo sapiens
  misc_RNA (1)...(19): siRNA sense strand
guaccucgcccagcaugaa

SEQ ID NO: 1717263 - RNA, 19 nt, Homo sapiens
  misc_RNA (1)...(19): siRNA sense strand
agacucaccuguggaugug

SEQ ID NO: 1717264 - RNA, 19 nt, Homo sapiens
  misc_RNA (1)...(19): siRNA sense strand
ugagaagcacuccacaaug

SEQ ID NO: 1717265 - RNA, 19 nt, Homo sapiens
  misc_RNA (1)...(19): siRNA sense strand
ggccguaaagcgagugaaa

SEQ ID NO: 1717266 - RNA, 19 nt, Homo sapiens
  misc_RNA (1)...(19): siRNA sense strand
gcaagcgaccaugcacuau

SEQ ID NO: 1717267 - RNA, 19 nt, Homo sapiens
  misc_RNA (1)...(19): siRNA sense strand
uaaacugcauaauggacau

SEQ ID NO: 1717268 - RNA, 19 nt, Homo sapiens
  misc_RNA (1)...(19): siRNA sense strand
ucuguuaaacugcauaaug

SEQ ID NO: 1717269 - RNA, 19 nt, Homo sapiens
  misc_RNA (1)...(19): siRNA sense strand
agacagagaaugggcagaa

SEQ ID NO: 1717270 - RNA, 19 nt, Homo sapiens
  misc_RNA (1)...(19): siRNA sense strand
caguccaaauaacggcuua

SEQ ID NO: 1717271 - RNA, 19 nt, Homo sapiens
  misc_RNA (1)...(19): siRNA sense strand
acaccgacaacguuaacua

SEQ ID NO: 1717272 - RNA, 19 nt, Homo sapiens
  misc_RNA (1)...(19): siRNA sense strand
cagaagaguggaaacaucu

SEQ ID NO: 1717273 - RNA, 19 nt, Homo sapiens
  misc_RNA (1)...(19): siRNA sense strand
gcgguacaguccaaauaac

SEQ ID NO: 1717274 - RNA, 19 nt, Homo sapiens
  misc_RNA (1)...(19): siRNA sense strand
ccaauggcuucagcaaugg

SEQ ID NO: 1717275 - RNA, 19 nt, Homo sapiens
  misc_RNA (1)...(19): siRNA sense strand
gcagcagagucccgucaac

SEQ ID NO: 1717276 - RNA, 19 nt, Homo sapiens
  misc_RNA (1)...(19): siRNA sense strand
gcauaauggacaugguaga

SEQ ID NO: 1717277 - RNA, 19 nt, Homo sapiens
  misc_RNA (1)...(19): siRNA sense strand
cuacagggacuccuaucga

SEQ ID NO: 1717278 - RNA, 19 nt, Homo sapiens
  misc_RNA (1)...(19): siRNA sense strand
gaaaccugcaguggcugua

SEQ ID NO: 1717279 - RNA, 19 nt, Homo sapiens
  misc_RNA (1)...(19): siRNA sense strand
cugagaagcacuccacaau

SEQ ID NO: 1717280 - RNA, 19 nt, Homo sapiens
  misc_RNA (1)...(19): siRNA sense strand
ccacugagaccuuuuguca

SEQ ID NO: 1717281 - RNA, 19 nt, Homo sapiens
  misc_RNA (1)...(19): siRNA sense strand
ugcaagaagcuacuaacuu

SEQ ID NO: 1717282 - RNA, 19 nt, Homo sapiens
  misc_RNA (1)...(19): siRNA sense strand
uggaugauauggccauugc

SEQ ID NO: 1717283 - RNA, 19 nt, Homo sapiens
  misc_RNA (1)...(19): siRNA sense strand
cagagagggccaagaugga

SEQ ID NO: 1717284 - RNA, 19 nt, Homo sapiens
  misc_RNA (1)...(19): siRNA sense strand
gggcagaagaguggaaaca

SEQ ID NO: 1717285 - RNA, 19 nt, Homo sapiens
  misc_RNA (1)...(19): siRNA sense strand
gacagagaaugggcagaag

SEQ ID NO: 1717286 - RNA, 19 nt, Homo sapiens
  misc_RNA (1)...(19): siRNA sense strand
ucacagacuaacagacaga

SEQ ID NO: 1717287 - RNA, 19 nt, Homo sapiens
  misc_RNA (1)...(19): siRNA sense strand
ccucagggacagaaacaga

SEQ ID NO: 1717288 - RNA, 19 nt, Homo sapiens
  misc_RNA (1)...(19): siRNA sense strand
ggaaacaucuugaccaucu

SEQ ID NO: 1717289 - RNA, 19 nt, Homo sapiens
  misc_RNA (1)...(19): siRNA sense strand
gaacuccacuuugacaauu

SEQ ID NO: 1717290 - RNA, 19 nt, Homo sapiens
  misc_RNA (1)...(19): siRNA sense strand
gcagucagcuccucuguca

SEQ ID NO: 1717291 - RNA, 19 nt, Homo sapiens
  misc_RNA (1)...(19): siRNA sense strand
gcuacuaacuucccacuga

SEQ ID NO: 1717292 - RNA, 19 nt, Homo sapiens
  misc_RNA (1)...(19): siRNA sense strand
gaggagaucuggaagaaag

SEQ ID NO: 1717293 - RNA, 19 nt, Homo sapiens
  misc_RNA (1)...(19): siRNA sense strand
gagaagcacuccacaaugc

SEQ ID NO: 1717294 - RNA, 19 nt, Homo sapiens
  misc_RNA (1)...(19): siRNA sense strand
gcaaugggccuuccucuuc

SEQ ID NO: 1717295 - RNA, 19 nt, Homo sapiens
  misc_RNA (1)...(19): siRNA sense strand
aagcgaccaugcacuauua

SEQ ID NO: 1717296 - RNA, 19 nt, Homo sapiens
  misc_RNA (1)...(19): siRNA sense strand
gcgcaagacuggccaaaca

SEQ ID NO: 1717297 - RNA, 19 nt, Homo sapiens
  misc_RNA (1)...(19): siRNA sense strand
gcagaagaguggaaacauc

SEQ ID NO: 1717298 - RNA, 19 nt, Homo sapiens
  misc_RNA (1)...(19): siRNA sense strand
gagaguugcuggaauugug

SEQ ID NO: 1717299 - RNA, 19 nt, Homo sapiens
  misc_RNA (1)...(19): siRNA sense strand
gaggcgaacuccagacaga

SEQ ID NO: 1717300 - RNA, 19 nt, Homo sapiens
  misc_RNA (1)...(19): siRNA sense strand
gaagcaccaucacaucugu

SEQ ID NO: 1717301 - RNA, 19 nt, Homo sapiens
  misc_RNA (1)...(19): siRNA sense strand
caacagagagggccaagau

SEQ ID NO: 1717302 - RNA, 19 nt, Homo sapiens
  misc_RNA (1)...(19): siRNA sense strand
gcggaaagcccacgacaug

SEQ ID NO: 1717303 - RNA, 19 nt, Homo sapiens
  misc_RNA (1)...(19): siRNA sense strand
cgacaacguuaacuaaugg

SEQ ID NO: 1717304 - RNA, 19 nt, Homo sapiens
  misc_RNA (1)...(19): siRNA sense strand
gaucacagacuaacagaca

SEQ ID NO: 1717305 - RNA, 19 nt, Homo sapiens
  misc_RNA (1)...(19): siRNA sense strand
cccaauggcuucagcaaug

SEQ ID NO: 1717306 - RNA, 19 nt, Homo sapiens
  misc_RNA (1)...(19): siRNA sense strand
ggacagaaacagaccuaug

SEQ ID NO: 1717307 - RNA, 19 nt, Homo sapiens
  misc_RNA (1)...(19): siRNA sense strand
gcacaaagacugggagaag

SEQ ID NO: 1717308 - RNA, 19 nt, Homo sapiens
  misc_RNA (1)...(19): siRNA sense strand
ccgauacuguggcucauuu

SEQ ID NO: 1717309 - RNA, 19 nt, Homo sapiens
  misc_RNA (1)...(19): siRNA sense strand
cgagauaggagaaagaguu

SEQ ID NO: 1717310 - RNA, 19 nt, Homo sapiens
  misc_RNA (1)...(19): siRNA sense strand
ugacauuucacccgagaua

SEQ ID NO: 1717311 - RNA, 19 nt, Homo sapiens
  misc_RNA (1)...(19): siRNA sense strand
gacaugaucacaacagaga

SEQ ID NO: 1717312 - RNA, 19 nt, Homo sapiens
  misc_RNA (1)...(19): siRNA sense strand
ggaaagcccacgacaugau

SEQ ID NO: 1717313 - RNA, 19 nt, Homo sapiens
  misc_RNA (1)...(19): siRNA sense strand
ccgacaacguuaacuaaug

SEQ ID NO: 1717314 - RNA, 19 nt, Homo sapiens
  misc_RNA (1)...(19): siRNA sense strand
guacuaaggcggugucaag

SEQ ID NO: 1717315 - RNA, 19 nt, Homo sapiens
  misc_RNA (1)...(19): siRNA sense strand
ccagacagaaccaaagaaa

SEQ ID NO: 1717316 - RNA, 19 nt, Homo sapiens
  misc_RNA (1)...(19): siRNA sense strand
uggcacacgucaagaagaa

SEQ ID NO: 1717317 - RNA, 19 nt, Homo sapiens
  misc_RNA (1)...(19): siRNA sense strand
gcaagacuggccaaacaga

SEQ ID NO: 1717318 - RNA, 19 nt, Homo sapiens
  misc_RNA (1)...(19): siRNA sense strand
ggagaagcaccaucacauc

SEQ ID NO: 1717319 - RNA, 19 nt, Homo sapiens
  misc_RNA (1)...(19): siRNA sense strand
ccuccucucuggcuaauca

SEQ ID NO: 1717320 - RNA, 19 nt, Homo sapiens
  misc_RNA (1)...(19): siRNA sense strand
gaugugaagacgcaaucua

SEQ ID NO: 1717321 - RNA, 19 nt, Homo sapiens
  misc_RNA (1)...(19): siRNA sense strand
aagcagaccgggaagaauu

SEQ ID NO: 1717322 - RNA, 19 nt, Homo sapiens
  misc_RNA (1)...(19): siRNA sense strand
cuaaggcggugucaagaag

SEQ ID NO: 1717323 - RNA, 19 nt, Homo sapiens
  misc_RNA (1)...(19): siRNA sense strand
caucuugaccaucuguuaa

SEQ ID NO: 1717324 - RNA, 19 nt, Homo sapiens
  misc_RNA (1)...(19): siRNA sense strand
gcacacgucaagaagaaau

SEQ ID NO: 1717325 - RNA, 19 nt, Homo sapiens
  misc_RNA (1)...(19): siRNA sense strand
gacagaaacagaccuaugg

SEQ ID NO: 1717326 - RNA, 19 nt, Homo sapiens
  misc_RNA (1)...(19): siRNA sense strand
gagagccuuugcacucaga

SEQ ID NO: 1717327 - RNA, 19 nt, Homo sapiens
  misc_RNA (1)...(19): siRNA sense strand
gaaagcccacgacaugauc

SEQ ID NO: 1717328 - RNA, 19 nt, Homo sapiens
  misc_RNA (1)...(19): siRNA sense strand
gcauggcacacgucaagaa

SEQ ID NO: 1717329 - RNA, 19 nt, Homo sapiens
  misc_RNA (1)...(19): siRNA sense strand
cagcgguacaguccaaaua

SEQ ID NO: 1717330 - RNA, 19 nt, Homo sapiens
  misc_RNA (1)...(19): siRNA sense strand
cagagagccuuugcacuca

SEQ ID NO: 1717331 - RNA, 19 nt, Homo sapiens
  misc_RNA (1)...(19): siRNA sense strand
gagaagcaccaucacaucu

SEQ ID NO: 1717332 - RNA, 19 nt, Homo sapiens
  misc_RNA (1)...(19): siRNA sense strand
gcugacuccuccaacaaug

SEQ ID NO: 1717333 - RNA, 19 nt, Homo sapiens
  misc_RNA (1)...(19): siRNA sense strand
caccuccaccucagcauua

SEQ ID NO: 1717334 - RNA, 19 nt, Homo sapiens
  misc_RNA (1)...(19): siRNA sense strand
acagaacccugcccaguac

SEQ ID NO: 1717335 - RNA, 19 nt, Homo sapiens
  misc_RNA (1)...(19): siRNA sense strand
caucgggaauuccuucaca

SEQ ID NO: 1717336 - RNA, 19 nt, Homo sapiens
  misc_RNA (1)...(19): siRNA sense strand
guggaaacaucuugaccau

SEQ ID NO: 1717337 - RNA, 19 nt, Homo sapiens
  misc_RNA (1)...(19): siRNA sense strand
caagaagaaaugauugauc

SEQ ID NO: 1717338 - RNA, 19 nt, Homo sapiens
  misc_RNA (1)...(19): siRNA sense strand
caagcgaccaugcacuauu

SEQ ID NO: 1717339 - RNA, 19 nt, Homo sapiens
  misc_RNA (1)...(19): siRNA sense strand
cagagcugcuucucgaugu

SEQ ID NO: 1717340 - RNA, 19 nt, Homo sapiens
  misc_RNA (1)...(19): siRNA sense strand
gaaacaucuugaccaucug

SEQ ID NO: 1717341 - RNA, 19 nt, Homo sapiens
  misc_RNA (1)...(19): siRNA sense strand
gagauaggagaaagaguuc

SEQ ID NO: 1717342 - RNA, 19 nt, Homo sapiens
  misc_RNA (1)...(19): siRNA sense strand
ggccagcgguacaguccaa

SEQ ID NO: 1717343 - RNA, 19 nt, Homo sapiens
  misc_RNA (1)...(19): siRNA sense strand
gggagaagcaccaucacau

SEQ ID NO: 1717344 - RNA, 19 nt, Homo sapiens
  misc_RNA (1)...(19): siRNA sense strand
cugaggaggccgucaauga

SEQ ID NO: 1717345 - RNA, 19 nt, Homo sapiens
  misc_RNA (1)...(19): siRNA sense strand
uaauggacaugguagaaaa

SEQ ID NO: 1717346 - RNA, 19 nt, Homo sapiens
  misc_RNA (1)...(19): siRNA sense strand
cauuaccguuuggaugaua

SEQ ID NO: 1717347 - RNA, 19 nt, Homo sapiens
  misc_RNA (1)...(19): siRNA sense strand
caccucagcauuaccguuu

SEQ ID NO: 1717348 - RNA, 19 nt, Homo sapiens
  misc_RNA (1)...(19): siRNA sense strand
caaugggccuuccucuucu

SEQ ID NO: 1717349 - RNA, 19 nt, Homo sapiens
  misc_RNA (1)...(19): siRNA sense strand
caccgacaacguuaacuaa

SEQ ID NO: 1717350 - RNA, 19 nt, Homo sapiens
  misc_RNA (1)...(19): siRNA sense strand
caagacuggccaaacagaa

SEQ ID NO: 1717351 - RNA, 19 nt, Homo sapiens
  misc_RNA (1)...(19): siRNA sense strand
cagugacgccgaggacuua

SEQ ID NO: 1717352 - RNA, 19 nt, Homo sapiens
  misc_RNA (1)...(19): siRNA sense strand
cauaauggacaugguagaa

SEQ ID NO: 1717353 - RNA, 19 nt, Homo sapiens
  misc_RNA (1)...(19): siRNA sense strand
cuguuaaacugcauaaugg

SEQ ID NO: 1717354 - RNA, 19 nt, Homo sapiens
  misc_RNA (1)...(19): siRNA sense strand
cagacuaacagacagagaa

SEQ ID NO: 1717355 - RNA, 19 nt, Homo sapiens
  misc_RNA (1)...(19): siRNA sense strand
aacagaacccugcccagua

SEQ ID NO: 1717356 - RNA, 19 nt, Homo sapiens
  misc_RNA (1)...(19): siRNA sense strand
ggcacgagccauucuccua

SEQ ID NO: 1717357 - RNA, 19 nt, Homo sapiens
  misc_RNA (1)...(19): siRNA sense strand
gaagcagaccgggaagaau

SEQ ID NO: 1717358 - RNA, 19 nt, Homo sapiens
  misc_RNA (1)...(19): siRNA sense strand
ccacuuugacaauugaaga

SEQ ID NO: 1717359 - RNA, 19 nt, Homo sapiens
  misc_RNA (1)...(19): siRNA sense strand
ggagacacaccugcaguca

SEQ ID NO: 1717360 - RNA, 19 nt, Homo sapiens
  misc_RNA (1)...(19): siRNA sense strand
agcgagaguugcuggaauu

SEQ ID NO: 1717361 - RNA, 19 nt, Homo sapiens
  misc_RNA (1)...(19): siRNA sense strand
gcauuaccguuuggaugau

SEQ ID NO: 1717362 - RNA, 19 nt, Homo sapiens
  misc_RNA (1)...(19): siRNA sense strand
guaccucgcccagcaugaa

SEQ ID NO: 1717363 - RNA, 19 nt, Homo sapiens
  misc_RNA (1)...(19): siRNA sense strand
agacucaccuguggaugug

SEQ ID NO: 1717364 - RNA, 19 nt, Homo sapiens
  misc_RNA (1)...(19): siRNA sense strand
ugagaagcacuccacaaug

SEQ ID NO: 1717365 - RNA, 19 nt, Homo sapiens
  misc_RNA (1)...(19): siRNA sense strand
ggccguaaagcgagugaaa

SEQ ID NO: 1717366 - RNA, 19 nt, Homo sapiens
  misc_RNA (1)...(19): siRNA sense strand
gcaagcgaccaugcacuau

SEQ ID NO: 1717367 - RNA, 19 nt, Homo sapiens
  misc_RNA (1)...(19): siRNA sense strand
uaaacugcauaauggacau

SEQ ID NO: 1717368 - RNA, 19 nt, Homo sapiens
  misc_RNA (1)...(19): siRNA sense strand
ucuguuaaacugcauaaug

SEQ ID NO: 1717369 - RNA, 19 nt, Homo sapiens
  misc_RNA (1)...(19): siRNA sense strand
agacagagaaugggcagaa

SEQ ID NO: 1717370 - RNA, 19 nt, Homo sapiens
  misc_RNA (1)...(19): siRNA sense strand
caguccaaauaacggcuua

SEQ ID NO: 1717371 - RNA, 19 nt, Homo sapiens
  misc_RNA (1)...(19): siRNA sense strand
acaccgacaacguuaacua

SEQ ID NO: 1717372 - RNA, 19 nt, Homo sapiens
  misc_RNA (1)...(19): siRNA sense strand
cagaagaguggaaacaucu

SEQ ID NO: 1717373 - RNA, 19 nt, Homo sapiens
  misc_RNA (1)...(19): siRNA sense strand
gcgguacaguccaaauaac

SEQ ID NO: 1717374 - RNA, 19 nt, Homo sapiens
  misc_RNA (1)...(19): siRNA sense strand
ccaauggcuucagcaaugg

SEQ ID NO: 1717375 - RNA, 19 nt, Homo sapiens
  misc_RNA (1)...(19): siRNA sense strand
gcagcagagucccgucaac

SEQ ID NO: 1717376 - RNA, 19 nt, Homo sapiens
  misc_RNA (1)...(19): siRNA sense strand
gcauaauggacaugguaga

SEQ ID NO: 1717377 - RNA, 19 nt, Homo sapiens
  misc_RNA (1)...(19): siRNA sense strand
cuacagggacuccuaucga

SEQ ID NO: 1717378 - RNA, 19 nt, Homo sapiens
  misc_RNA (1)...(19): siRNA sense strand
gaaaccugcaguggcugua

SEQ ID NO: 1717379 - RNA, 19 nt, Homo sapiens
  misc_RNA (1)...(19): siRNA sense strand
cugagaagcacuccacaau

SEQ ID NO: 1717380 - RNA, 19 nt, Homo sapiens
  misc_RNA (1)...(19): siRNA sense strand
ccacugagaccuuuuguca

SEQ ID NO: 1717381 - RNA, 19 nt, Homo sapiens
  misc_RNA (1)...(19): siRNA sense strand
ugcaagaagcuacuaacuu

SEQ ID NO: 1717382 - RNA, 19 nt, Homo sapiens
  misc_RNA (1)...(19): siRNA sense strand
uggaugauauggccauugc

SEQ ID NO: 1717383 - RNA, 19 nt, Homo sapiens
  misc_RNA (1)...(19): siRNA sense strand
cagagagggccaagaugga

SEQ ID NO: 1717384 - RNA, 19 nt, Homo sapiens
  misc_RNA (1)...(19): siRNA sense strand
gggcagaagaguggaaaca

SEQ ID NO: 1717385 - RNA, 19 nt, Homo sapiens
  misc_RNA (1)...(19): siRNA sense strand
gacagagaaugggcagaag

SEQ ID NO: 1717386 - RNA, 19 nt, Homo sapiens
  misc_RNA (1)...(19): siRNA sense strand
ucacagacuaacagacaga

SEQ ID NO: 1717387 - RNA, 19 nt, Homo sapiens
  misc_RNA (1)...(19): siRNA sense strand
ccucagggacagaaacaga

SEQ ID NO: 1717388 - RNA, 19 nt, Homo sapiens
  misc_RNA (1)...(19): siRNA sense strand
ggaaacaucuugaccaucu

SEQ ID NO: 1717389 - RNA, 19 nt, Homo sapiens
  misc_RNA (1)...(19): siRNA sense strand
gaacuccacuuugacaauu

SEQ ID NO: 1717390 - RNA, 19 nt, Homo sapiens
  misc_RNA (1)...(19): siRNA sense strand
gcagucagcuccucuguca

SEQ ID NO: 1717391 - RNA, 19 nt, Homo sapiens
  misc_RNA (1)...(19): siRNA sense strand
gcuacuaacuucccacuga

SEQ ID NO: 1717392 - RNA, 19 nt, Homo sapiens
  misc_RNA (1)...(19): siRNA sense strand
gaggagaucuggaagaaag

SEQ ID NO: 1717393 - RNA, 19 nt, Homo sapiens
  misc_RNA (1)...(19): siRNA sense strand
gcaaugggccuuccucuuc

SEQ ID NO: 1717394 - RNA, 19 nt, Homo sapiens
  misc_RNA (1)...(19): siRNA sense strand
aagcgaccaugcacuauua

SEQ ID NO: 1717395 - RNA, 19 nt, Homo sapiens
  misc_RNA (1)...(19): siRNA sense strand
gcgcaagacuggccaaaca

SEQ ID NO: 1717396 - RNA, 19 nt, Homo sapiens
  misc_RNA (1)...(19): siRNA sense strand
gcagaagaguggaaacauc

SEQ ID NO: 1717397 - RNA, 19 nt, Homo sapiens
  misc_RNA (1)...(19): siRNA sense strand
gagaguugcuggaauugug

SEQ ID NO: 1717398 - RNA, 19 nt, Homo sapiens
  misc_RNA (1)...(19): siRNA sense strand
gaggcgaacuccagacaga

SEQ ID NO: 1717399 - RNA, 19 nt, Homo sapiens
  misc_RNA (1)...(19): siRNA sense strand
gaagcaccaucacaucugu

SEQ ID NO: 1717400 - RNA, 19 nt, Homo sapiens
  misc_RNA (1)...(19): siRNA sense strand
caacagagagggccaagau

SEQ ID NO: 1717401 - RNA, 19 nt, Homo sapiens
  misc_RNA (1)...(19): siRNA sense strand
gcggaaagcccacgacaug

SEQ ID NO: 1717402 - RNA, 19 nt, Homo sapiens
  misc_RNA (1)...(19): siRNA sense strand
cgacaacguuaacuaaugg

SEQ ID NO: 1717403 - RNA, 19 nt, Homo sapiens
  misc_RNA (1)...(19): siRNA sense strand
gaucacagacuaacagaca

SEQ ID NO: 1717404 - RNA, 19 nt, Homo sapiens
  misc_RNA (1)...(19): siRNA sense strand
cccaauggcuucagcaaug

SEQ ID NO: 1717405 - RNA, 19 nt, Homo sapiens
  misc_RNA (1)...(19): siRNA sense strand
ggacagaaacagaccuaug

SEQ ID NO: 1717406 - RNA, 19 nt, Homo sapiens
  misc_RNA (1)...(19): siRNA sense strand
gcacaaagacugggagaag

SEQ ID NO: 1717407 - RNA, 19 nt, Homo sapiens
  misc_RNA (1)...(19): siRNA sense strand
ccgauacuguggcucauuu

SEQ ID NO: 1717408 - RNA, 19 nt, Homo sapiens
  misc_RNA (1)...(19): siRNA sense strand
cgagauaggagaaagaguu

SEQ ID NO: 1717409 - RNA, 19 nt, Homo sapiens
  misc_RNA (1)...(19): siRNA sense strand
ugacauuucacccgagaua

SEQ ID NO: 1717410 - RNA, 19 nt, Homo sapiens
  misc_RNA (1)...(19): siRNA sense strand
gacaugaucacaacagaga

SEQ ID NO: 1717411 - RNA, 19 nt, Homo sapiens
  misc_RNA (1)...(19): siRNA sense strand
ggaaagcccacgacaugau

SEQ ID NO: 1717412 - RNA, 19 nt, Homo sapiens
  misc_RNA (1)...(19): siRNA sense strand
ccgacaacguuaacuaaug

SEQ ID NO: 1717413 - RNA, 19 nt, Homo sapiens
  misc_RNA (1)...(19): siRNA sense strand
guacuaaggcggugucaag

SEQ ID NO: 1717414 - RNA, 19 nt, Homo sapiens
  misc_RNA (1)...(19): siRNA sense strand
ccagacagaaccaaagaaa

SEQ ID NO: 1717415 - RNA, 19 nt, Homo sapiens
  misc_RNA (1)...(19): siRNA sense strand
uggcacacgucaagaagaa

SEQ ID NO: 1717416 - RNA, 19 nt, Homo sapiens
  misc_RNA (1)...(19): siRNA sense strand
gcaagacuggccaaacaga

SEQ ID NO: 1717417 - RNA, 19 nt, Homo sapiens
  misc_RNA (1)...(19): siRNA sense strand
ggagaagcaccaucacauc

SEQ ID NO: 1717418 - RNA, 19 nt, Homo sapiens
  misc_RNA (1)...(19): siRNA sense strand
ccuccucucuggcuaauca

SEQ ID NO: 1717419 - RNA, 19 nt, Homo sapiens
  misc_RNA (1)...(19): siRNA sense strand
aagcagaccgggaagaauu

SEQ ID NO: 1717420 - RNA, 19 nt, Homo sapiens
  misc_RNA (1)...(19): siRNA sense strand
cuaaggcggugucaagaag

SEQ ID NO: 1717421 - RNA, 19 nt, Homo sapiens
  misc_RNA (1)...(19): siRNA sense strand
caucuugaccaucuguuaa

SEQ ID NO: 1717422 - RNA, 19 nt, Homo sapiens
  misc_RNA (1)...(19): siRNA sense strand
gaugugaagacgcaaucua

SEQ ID NO: 1717423 - RNA, 19 nt, Homo sapiens
  misc_RNA (1)...(19): siRNA sense strand
gcacacgucaagaagaaau

SEQ ID NO: 1717424 - RNA, 19 nt, Homo sapiens
  misc_RNA (1)...(19): siRNA sense strand
gacagaaacagaccuaugg

SEQ ID NO: 1717425 - RNA, 19 nt, Homo sapiens
  misc_RNA (1)...(19): siRNA sense strand
gagagccuuugcacucaga

SEQ ID NO: 1717426 - RNA, 19 nt, Homo sapiens
  misc_RNA (1)...(19): siRNA sense strand
gaaagcccacgacaugauc

SEQ ID NO: 1717427 - RNA, 19 nt, Homo sapiens
  misc_RNA (1)...(19): siRNA sense strand
gcauggcacacgucaagaa

SEQ ID NO: 1717428 - RNA, 19 nt, Homo sapiens
  misc_RNA (1)...(19): siRNA sense strand
cagcgguacaguccaaaua

SEQ ID NO: 1717429 - RNA, 19 nt, Homo sapiens
  misc_RNA (1)...(19): siRNA sense strand
cagagagccuuugcacuca

SEQ ID NO: 1717430 - RNA, 19 nt, Homo sapiens
  misc_RNA (1)...(19): siRNA sense strand
gagaagcaccaucacaucu

SEQ ID NO: 1717431 - RNA, 19 nt, Homo sapiens
  misc_RNA (1)...(19): siRNA sense strand
gcugacuccuccaacaaug

SEQ ID NO: 1717432 - RNA, 19 nt, Homo sapiens
  misc_RNA (1)...(19): siRNA sense strand
caccuccaccucagcauua

SEQ ID NO: 1717433 - RNA, 19 nt, Homo sapiens
  misc_RNA (1)...(19): siRNA sense strand
acagaacccugcccaguac

SEQ ID NO: 1717434 - RNA, 19 nt, Homo sapiens
  misc_RNA (1)...(19): siRNA sense strand
caucgggaauuccuucaca

SEQ ID NO: 1717435 - RNA, 19 nt, Homo sapiens
  misc_RNA (1)...(19): siRNA sense strand
guggaaacaucuugaccau

SEQ ID NO: 1717436 - RNA, 19 nt, Homo sapiens
  misc_RNA (1)...(19): siRNA sense strand
caagaagaaaugauugauc

SEQ ID NO: 1717437 - RNA, 19 nt, Homo sapiens
  misc_RNA (1)...(19): siRNA sense strand
caagcgaccaugcacuauu

SEQ ID NO: 1717438 - RNA, 19 nt, Homo sapiens
  misc_RNA (1)...(19): siRNA sense strand
cagagcugcuucucgaugu

SEQ ID NO: 1717439 - RNA, 19 nt, Homo sapiens
  misc_RNA (1)...(19): siRNA sense strand
gaaacaucuugaccaucug

SEQ ID NO: 1717440 - RNA, 19 nt, Homo sapiens
  misc_RNA (1)...(19): siRNA sense strand
gagauaggagaaagaguuc

SEQ ID NO: 1717441 - RNA, 19 nt, Homo sapiens
  misc_RNA (1)...(19): siRNA sense strand
caaugggccuuccucuucu

SEQ ID NO: 1717442 - RNA, 19 nt, Homo sapiens
  misc_RNA (1)...(19): siRNA sense strand
gggagaagcaccaucacau

SEQ ID NO: 1717443 - RNA, 19 nt, Homo sapiens
  misc_RNA (1)...(19): siRNA sense strand
cugaggaggccgucaauga

SEQ ID NO: 1717444 - RNA, 19 nt, Homo sapiens
  misc_RNA (1)...(19): siRNA sense strand
uaauggacaugguagaaaa

SEQ ID NO: 1717445 - RNA, 19 nt, Homo sapiens
  misc_RNA (1)...(19): siRNA sense strand
cauuaccguuuggaugaua

SEQ ID NO: 1717446 - RNA, 19 nt, Homo sapiens
  misc_RNA (1)...(19): siRNA sense strand
caccucagcauuaccguuu

SEQ ID NO: 1717447 - RNA, 19 nt, Homo sapiens
  misc_RNA (1)...(19): siRNA sense strand
ggccagcgguacaguccaa

SEQ ID NO: 1717448 - RNA, 19 nt, Homo sapiens
  misc_RNA (1)...(19): siRNA sense strand
caccgacaacguuaacuaa

SEQ ID NO: 1717449 - RNA, 19 nt, Homo sapiens
  misc_RNA (1)...(19): siRNA sense strand
caagacuggccaaacagaa

SEQ ID NO: 1717450 - RNA, 19 nt, Homo sapiens
  misc_RNA (1)...(19): siRNA sense strand
cagugacgccgaggacuua

SEQ ID NO: 1717451 - RNA, 19 nt, Homo sapiens
  misc_RNA (1)...(19): siRNA sense strand
cauaauggacaugguagaa

SEQ ID NO: 1717452 - RNA, 19 nt, Homo sapiens
  misc_RNA (1)...(19): siRNA sense strand
cuguuaaacugcauaaugg

SEQ ID NO: 1717453 - RNA, 19 nt, Homo sapiens
  misc_RNA (1)...(19): siRNA sense strand
cagacuaacagacagagaa

SEQ ID NO: 1717454 - RNA, 19 nt, Homo sapiens
  misc_RNA (1)...(19): siRNA sense strand
aacagaacccugcccagua

SEQ ID NO: 1717455 - RNA, 19 nt, Homo sapiens
  misc_RNA (1)...(19): siRNA sense strand
ggcacgagccauucuccua

SEQ ID NO: 1717456 - RNA, 19 nt, Homo sapiens
  misc_RNA (1)...(19): siRNA sense strand
gaagcagaccgggaagaau

SEQ ID NO: 1717457 - RNA, 19 nt, Homo sapiens
  misc_RNA (1)...(19): siRNA sense strand
ccacuuugacaauugaaga

SEQ ID NO: 1717458 - RNA, 19 nt, Homo sapiens
  misc_RNA (1)...(19): siRNA sense strand
ggagacacaccugcaguca

SEQ ID NO: 1717459 - RNA, 19 nt, Homo sapiens
  misc_RNA (1)...(19): siRNA sense strand
agcgagaguugcuggaauu

SEQ ID NO: 1717460 - RNA, 19 nt, Homo sapiens
  misc_RNA (1)...(19): siRNA sense strand
gcauuaccguuuggaugau

SEQ ID NO: 1717461 - RNA, 19 nt, Homo sapiens
  misc_RNA (1)...(19): siRNA sense strand
guaccucgcccagcaugaa

SEQ ID NO: 1717462 - RNA, 19 nt, Homo sapiens
  misc_RNA (1)...(19): siRNA sense strand
ggccguaaagcgagugaaa

SEQ ID NO: 1717463 - RNA, 19 nt, Homo sapiens
  misc_RNA (1)...(19): siRNA sense strand
agacucaccuguggaugug

SEQ ID NO: 1717464 - RNA, 19 nt, Homo sapiens
  misc_RNA (1)...(19): siRNA sense strand
gcaagcgaccaugcacuau

SEQ ID NO: 1717465 - RNA, 19 nt, Homo sapiens
  misc_RNA (1)...(19): siRNA sense strand
uaaacugcauaauggacau

SEQ ID NO: 1717466 - RNA, 19 nt, Homo sapiens
  misc_RNA (1)...(19): siRNA sense strand
ucuguuaaacugcauaaug

SEQ ID NO: 1717467 - RNA, 19 nt, Homo sapiens
  misc_RNA (1)...(19): siRNA sense strand
agacagagaaugggcagaa

SEQ ID NO: 1717468 - RNA, 19 nt, Homo sapiens
  misc_RNA (1)...(19): siRNA sense strand
caguccaaauaacggcuua

SEQ ID NO: 1717469 - RNA, 19 nt, Homo sapiens
  misc_RNA (1)...(19): siRNA sense strand
cagaagaguggaaacaucu

SEQ ID NO: 1717470 - RNA, 19 nt, Homo sapiens
  misc_RNA (1)...(19): siRNA sense strand
acaccgacaacguuaacua

SEQ ID NO: 1717471 - RNA, 19 nt, Homo sapiens
  misc_RNA (1)...(19): siRNA sense strand
ccaauggcuucagcaaugg

SEQ ID NO: 1717472 - RNA, 19 nt, Homo sapiens
  misc_RNA (1)...(19): siRNA sense strand
gcagcagagucccgucaac

SEQ ID NO: 1717473 - RNA, 19 nt, Homo sapiens
  misc_RNA (1)...(19): siRNA sense strand
gcauaauggacaugguaga

SEQ ID NO: 1717474 - RNA, 19 nt, Homo sapiens
  misc_RNA (1)...(19): siRNA sense strand
cuacagggacuccuaucga

SEQ ID NO: 1717475 - RNA, 19 nt, Homo sapiens
  misc_RNA (1)...(19): siRNA sense strand
gcgguacaguccaaauaac

SEQ ID NO: 1717476 - RNA, 19 nt, Homo sapiens
  misc_RNA (1)...(19): siRNA sense strand
gaaaccugcaguggcugua

SEQ ID NO: 1717477 - RNA, 19 nt, Homo sapiens
  misc_RNA (1)...(19): siRNA sense strand
ugcaagaagcuacuaacuu

SEQ ID NO: 1717478 - RNA, 19 nt, Homo sapiens
  misc_RNA (1)...(19): siRNA sense strand
ccacugagaccuuuuguca

SEQ ID NO: 1717479 - RNA, 19 nt, Homo sapiens
  misc_RNA (1)...(19): siRNA sense strand
gagcugcuucucgauguga

SEQ ID NO: 1717480 - RNA, 19 nt, Homo sapiens
  misc_RNA (1)...(19): siRNA sense strand
cagagagggccaagaugga

SEQ ID NO: 1717481 - RNA, 19 nt, Homo sapiens
  misc_RNA (1)...(19): siRNA sense strand
gggcagaagaguggaaaca

SEQ ID NO: 1717482 - RNA, 19 nt, Homo sapiens
  misc_RNA (1)...(19): siRNA sense strand
gacagagaaugggcagaag

SEQ ID NO: 1717483 - RNA, 19 nt, Homo sapiens
  misc_RNA (1)...(19): siRNA sense strand
ucacagacuaacagacaga

SEQ ID NO: 1717484 - RNA, 19 nt, Homo sapiens
  misc_RNA (1)...(19): siRNA sense strand
ccucagggacagaaacaga

SEQ ID NO: 1717485 - RNA, 19 nt, Homo sapiens
  misc_RNA (1)...(19): siRNA sense strand
uggaugauauggccauugc

SEQ ID NO: 1717486 - RNA, 19 nt, Homo sapiens
  misc_RNA (1)...(19): siRNA sense strand
agacagaaccaaagaaaau

SEQ ID NO: 1717487 - RNA, 19 nt, Homo sapiens
  misc_RNA (1)...(19): siRNA sense strand
aagcgagaguugcuggaau

SEQ ID NO: 1717488 - RNA, 19 nt, Homo sapiens
  misc_RNA (1)...(19): siRNA sense strand
ggaaacaucuugaccaucu

SEQ ID NO: 1717489 - RNA, 19 nt, Homo sapiens
  misc_RNA (1)...(19): siRNA sense strand
gaacuccacuuugacaauu

SEQ ID NO: 1717490 - RNA, 19 nt, Homo sapiens
  misc_RNA (1)...(19): siRNA sense strand
gcagucagcuccucuguca

SEQ ID NO: 1717491 - RNA, 19 nt, Homo sapiens
  misc_RNA (1)...(19): siRNA sense strand
gcuacuaacuucccacuga

SEQ ID NO: 1717492 - RNA, 19 nt, Homo sapiens
  misc_RNA (1)...(19): siRNA sense strand
gaggagaucuggaagaaag

SEQ ID NO: 1717493 - RNA, 19 nt, Homo sapiens
  misc_RNA (1)...(19): siRNA sense strand
gcaaugggccuuccucuuc

SEQ ID NO: 1717494 - RNA, 19 nt, Homo sapiens
  misc_RNA (1)...(19): siRNA sense strand
aagcgaccaugcacuauua

SEQ ID NO: 1717495 - RNA, 19 nt, Homo sapiens
  misc_RNA (1)...(19): siRNA sense strand
gcgcaagacuggccaaaca

SEQ ID NO: 1717496 - RNA, 19 nt, Homo sapiens
  misc_RNA (1)...(19): siRNA sense strand
gcagaagaguggaaacauc

SEQ ID NO: 1717497 - RNA, 19 nt, Homo sapiens
  misc_RNA (1)...(19): siRNA sense strand
gagaguugcuggaauugug

SEQ ID NO: 1717498 - RNA, 19 nt, Homo sapiens
  misc_RNA (1)...(19): siRNA sense strand
gaggcgaacuccagacaga

SEQ ID NO: 1717499 - RNA, 19 nt, Homo sapiens
  misc_RNA (1)...(19): siRNA sense strand
gaagcaccaucacaucugu

SEQ ID NO: 1717500 - RNA, 19 nt, Homo sapiens
  misc_RNA (1)...(19): siRNA sense strand
caacagagagggccaagau

SEQ ID NO: 1717501 - RNA, 19 nt, Homo sapiens
  misc_RNA (1)...(19): siRNA sense strand
gcggaaagcccacgacaug

SEQ ID NO: 1717502 - RNA, 19 nt, Homo sapiens
  misc_RNA (1)...(19): siRNA sense strand
cgacaacguuaacuaaugg

SEQ ID NO: 1717503 - RNA, 19 nt, Homo sapiens
  misc_RNA (1)...(19): siRNA sense strand
gaucacagacuaacagaca

SEQ ID NO: 1717504 - RNA, 19 nt, Homo sapiens
  misc_RNA (1)...(19): siRNA sense strand
cccaauggcuucagcaaug

SEQ ID NO: 1717505 - RNA, 19 nt, Homo sapiens
  misc_RNA (1)...(19): siRNA sense strand
ggacagaaacagaccuaug

SEQ ID NO: 1717506 - RNA, 19 nt, Homo sapiens
  misc_RNA (1)...(19): siRNA sense strand
gcacaaagacugggagaag

SEQ ID NO: 1717507 - RNA, 19 nt, Homo sapiens
  misc_RNA (1)...(19): siRNA sense strand
ccgauacuguggcucauuu

SEQ ID NO: 1717508 - RNA, 19 nt, Homo sapiens
  misc_RNA (1)...(19): siRNA sense strand
cgagauaggagaaagaguu

SEQ ID NO: 1717509 - RNA, 19 nt, Homo sapiens
  misc_RNA (1)...(19): siRNA sense strand
ugacauuucacccgagaua

SEQ ID NO: 1717510 - RNA, 19 nt, Homo sapiens
  misc_RNA (1)...(19): siRNA sense strand
gacaugaucacaacagaga

SEQ ID NO: 1717511 - RNA, 19 nt, Homo sapiens
  misc_RNA (1)...(19): siRNA sense strand
ggaaagcccacgacaugau

SEQ ID NO: 1717512 - RNA, 19 nt, Homo sapiens
  misc_RNA (1)...(19): siRNA sense strand
ccgacaacguuaacuaaug

SEQ ID NO: 1717513 - RNA, 19 nt, Homo sapiens
  misc_RNA (1)...(19): siRNA sense strand
guacuaaggcggugucaag

SEQ ID NO: 1717514 - RNA, 19 nt, Homo sapiens
  misc_RNA (1)...(19): siRNA sense strand
ccagacagaaccaaagaaa

SEQ ID NO: 1717515 - RNA, 19 nt, Homo sapiens
  misc_RNA (1)...(19): siRNA sense strand
uggcacacgucaagaagaa

SEQ ID NO: 1717516 - RNA, 19 nt, Homo sapiens
  misc_RNA (1)...(19): siRNA sense strand
gcaagacuggccaaacaga

SEQ ID NO: 1717517 - RNA, 19 nt, Homo sapiens
  misc_RNA (1)...(19): siRNA sense strand
ggagaagcaccaucacauc

SEQ ID NO: 1717518 - RNA, 19 nt, Homo sapiens
  misc_RNA (1)...(19): siRNA sense strand
ccuccucucuggcuaauca

SEQ ID NO: 1717519 - RNA, 19 nt, Homo sapiens
  misc_RNA (1)...(19): siRNA sense strand
aagcagaccgggaagaauu

SEQ ID NO: 1717520 - RNA, 19 nt, Homo sapiens
  misc_RNA (1)...(19): siRNA sense strand
cuaaggcggugucaagaag

SEQ ID NO: 1717521 - RNA, 19 nt, Homo sapiens
  misc_RNA (1)...(19): siRNA sense strand
caucuugaccaucuguuaa

SEQ ID NO: 1717522 - RNA, 19 nt, Homo sapiens
  misc_RNA (1)...(19): siRNA sense strand
gaugugaagacgcaaucua

SEQ ID NO: 1717523 - RNA, 19 nt, Homo sapiens
  misc_RNA (1)...(19): siRNA sense strand
gcacacgucaagaagaaau

SEQ ID NO: 1717524 - RNA, 19 nt, Homo sapiens
  misc_RNA (1)...(19): siRNA sense strand
gacagaaacagaccuaugg

SEQ ID NO: 1717525 - RNA, 19 nt, Homo sapiens
  misc_RNA (1)...(19): siRNA sense strand
gagagccuuugcacucaga

SEQ ID NO: 1717526 - RNA, 19 nt, Homo sapiens
  misc_RNA (1)...(19): siRNA sense strand
gaaagcccacgacaugauc

SEQ ID NO: 1717527 - RNA, 19 nt, Homo sapiens
  misc_RNA (1)...(19): siRNA sense strand
gcauggcacacgucaagaa

SEQ ID NO: 1717528 - RNA, 19 nt, Homo sapiens
  misc_RNA (1)...(19): siRNA sense strand
cagcgguacaguccaaaua

SEQ ID NO: 1717529 - RNA, 19 nt, Homo sapiens
  misc_RNA (1)...(19): siRNA sense strand
cagagagccuuugcacuca

SEQ ID NO: 1717530 - RNA, 19 nt, Homo sapiens
  misc_RNA (1)...(19): siRNA sense strand
gagaagcaccaucacaucu

SEQ ID NO: 1717531 - RNA, 19 nt, Homo sapiens
  misc_RNA (1)...(19): siRNA sense strand
gcugacuccuccaacaaug

SEQ ID NO: 1717532 - RNA, 19 nt, Homo sapiens
  misc_RNA (1)...(19): siRNA sense strand
caccuccaccucagcauua

SEQ ID NO: 1717533 - RNA, 19 nt, Homo sapiens
  misc_RNA (1)...(19): siRNA sense strand
acagaacccugcccaguac

SEQ ID NO: 1717534 - RNA, 19 nt, Homo sapiens
  misc_RNA (1)...(19): siRNA sense strand
caucgggaauuccuucaca

SEQ ID NO: 1717535 - RNA, 19 nt, Homo sapiens
  misc_RNA (1)...(19): siRNA sense strand
guggaaacaucuugaccau

SEQ ID NO: 1717536 - RNA, 19 nt, Homo sapiens
  misc_RNA (1)...(19): siRNA sense strand
caagaagaaaugauugauc

SEQ ID NO: 1717537 - RNA, 19 nt, Homo sapiens
  misc_RNA (1)...(19): siRNA sense strand
caagcgaccaugcacuauu

SEQ ID NO: 1717538 - RNA, 19 nt, Homo sapiens
  misc_RNA (1)...(19): siRNA sense strand
cagagcugcuucucgaugu

SEQ ID NO: 1717539 - RNA, 19 nt, Homo sapiens
  misc_RNA (1)...(19): siRNA sense strand
gaaacaucuugaccaucug

SEQ ID NO: 1717540 - RNA, 19 nt, Homo sapiens
  misc_RNA (1)...(19): siRNA sense strand
gagauaggagaaagaguuc

SEQ ID NO: 1717541 - RNA, 19 nt, Homo sapiens
  misc_RNA (1)...(19): siRNA sense strand
caaugggccuuccucuucu

SEQ ID NO: 1717542 - RNA, 19 nt, Homo sapiens
  misc_RNA (1)...(19): siRNA sense strand
gggagaagcaccaucacau

SEQ ID NO: 1717543 - RNA, 19 nt, Homo sapiens
  misc_RNA (1)...(19): siRNA sense strand
cugaggaggccgucaauga

SEQ ID NO: 1717544 - RNA, 19 nt, Homo sapiens
  misc_RNA (1)...(19): siRNA sense strand
uaauggacaugguagaaaa

SEQ ID NO: 1717545 - RNA, 19 nt, Homo sapiens
  misc_RNA (1)...(19): siRNA sense strand
cauuaccguuuggaugaua

SEQ ID NO: 1717546 - RNA, 19 nt, Homo sapiens
  misc_RNA (1)...(19): siRNA sense strand
caccucagcauuaccguuu

SEQ ID NO: 1717547 - RNA, 19 nt, Homo sapiens
  misc_RNA (1)...(19): siRNA sense strand
ggccagcgguacaguccaa

SEQ ID NO: 1717548 - RNA, 19 nt, Homo sapiens
  misc_RNA (1)...(19): siRNA sense strand
caccgacaacguuaacuaa

SEQ ID NO: 1717549 - RNA, 19 nt, Homo sapiens
  misc_RNA (1)...(19): siRNA sense strand
caagacuggccaaacagaa

SEQ ID NO: 1717550 - RNA, 19 nt, Homo sapiens
  misc_RNA (1)...(19): siRNA sense strand
cagugacgccgaggacuua

SEQ ID NO: 1717551 - RNA, 19 nt, Homo sapiens
  misc_RNA (1)...(19): siRNA sense strand
cauaauggacaugguagaa

SEQ ID NO: 1717552 - RNA, 19 nt, Homo sapiens
  misc_RNA (1)...(19): siRNA sense strand
cuguuaaacugcauaaugg

SEQ ID NO: 1717553 - RNA, 19 nt, Homo sapiens
  misc_RNA (1)...(19): siRNA sense strand
cagacuaacagacagagaa

SEQ ID NO: 1717554 - RNA, 19 nt, Homo sapiens
  misc_RNA (1)...(19): siRNA sense strand
aacagaacccugcccagua

SEQ ID NO: 1717555 - RNA, 19 nt, Homo sapiens
  misc_RNA (1)...(19): siRNA sense strand
ggcacgagccauucuccua

SEQ ID NO: 1717556 - RNA, 19 nt, Homo sapiens
  misc_RNA (1)...(19): siRNA sense strand
gaagcagaccgggaagaau

SEQ ID NO: 1717557 - RNA, 19 nt, Homo sapiens
  misc_RNA (1)...(19): siRNA sense strand
ccacuuugacaauugaaga

SEQ ID NO: 1717558 - RNA, 19 nt, Homo sapiens
  misc_RNA (1)...(19): siRNA sense strand
ggagacacaccugcaguca

SEQ ID NO: 1717559 - RNA, 19 nt, Homo sapiens
  misc_RNA (1)...(19): siRNA sense strand
agcgagaguugcuggaauu

SEQ ID NO: 1717560 - RNA, 19 nt, Homo sapiens
  misc_RNA (1)...(19): siRNA sense strand
gcauuaccguuuggaugau

SEQ ID NO: 1717561 - RNA, 19 nt, Homo sapiens
  misc_RNA (1)...(19): siRNA sense strand
guaccucgcccagcaugaa

SEQ ID NO: 1717562 - RNA, 19 nt, Homo sapiens
  misc_RNA (1)...(19): siRNA sense strand
ggccguaaagcgagugaaa

SEQ ID NO: 1717563 - RNA, 19 nt, Homo sapiens
  misc_RNA (1)...(19): siRNA sense strand
agacucaccuguggaugug

SEQ ID NO: 1717564 - RNA, 19 nt, Homo sapiens
  misc_RNA (1)...(19): siRNA sense strand
gcaagcgaccaugcacuau

SEQ ID NO: 1717565 - RNA, 19 nt, Homo sapiens
  misc_RNA (1)...(19): siRNA sense strand
uaaacugcauaauggacau

SEQ ID NO: 1717566 - RNA, 19 nt, Homo sapiens
  misc_RNA (1)...(19): siRNA sense strand
ucuguuaaacugcauaaug

SEQ ID NO: 1717567 - RNA, 19 nt, Homo sapiens
  misc_RNA (1)...(19): siRNA sense strand
agacagagaaugggcagaa

SEQ ID NO: 1717568 - RNA, 19 nt, Homo sapiens
  misc_RNA (1)...(19): siRNA sense strand
caguccaaauaacggcuua

SEQ ID NO: 1717569 - RNA, 19 nt, Homo sapiens
  misc_RNA (1)...(19): siRNA sense strand
cagaagaguggaaacaucu

SEQ ID NO: 1717570 - RNA, 19 nt, Homo sapiens
  misc_RNA (1)...(19): siRNA sense strand
acaccgacaacguuaacua

SEQ ID NO: 1717571 - RNA, 19 nt, Homo sapiens
  misc_RNA (1)...(19): siRNA sense strand
ccaauggcuucagcaaugg

SEQ ID NO: 1717572 - RNA, 19 nt, Homo sapiens
  misc_RNA (1)...(19): siRNA sense strand
gcagcagagucccgucaac

SEQ ID NO: 1717573 - RNA, 19 nt, Homo sapiens
  misc_RNA (1)...(19): siRNA sense strand
gcauaauggacaugguaga

SEQ ID NO: 1717574 - RNA, 19 nt, Homo sapiens
  misc_RNA (1)...(19): siRNA sense strand
cuacagggacuccuaucga

SEQ ID NO: 1717575 - RNA, 19 nt, Homo sapiens
  misc_RNA (1)...(19): siRNA sense strand
gcgguacaguccaaauaac

SEQ ID NO: 1717576 - RNA, 19 nt, Homo sapiens
  misc_RNA (1)...(19): siRNA sense strand
gaaaccugcaguggcugua

SEQ ID NO: 1717577 - RNA, 19 nt, Homo sapiens
  misc_RNA (1)...(19): siRNA sense strand
ugcaagaagcuacuaacuu

SEQ ID NO: 1717578 - RNA, 19 nt, Homo sapiens
  misc_RNA (1)...(19): siRNA sense strand
ccacugagaccuuuuguca

SEQ ID NO: 1717579 - RNA, 19 nt, Homo sapiens
  misc_RNA (1)...(19): siRNA sense strand
gagcugcuucucgauguga

SEQ ID NO: 1717580 - RNA, 19 nt, Homo sapiens
  misc_RNA (1)...(19): siRNA sense strand
cagagagggccaagaugga

SEQ ID NO: 1717581 - RNA, 19 nt, Homo sapiens
  misc_RNA (1)...(19): siRNA sense strand
gggcagaagaguggaaaca

SEQ ID NO: 1717582 - RNA, 19 nt, Homo sapiens
  misc_RNA (1)...(19): siRNA sense strand
gacagagaaugggcagaag

SEQ ID NO: 1717583 - RNA, 19 nt, Homo sapiens
  misc_RNA (1)...(19): siRNA sense strand
ucacagacuaacagacaga

SEQ ID NO: 1717584 - RNA, 19 nt, Homo sapiens
  misc_RNA (1)...(19): siRNA sense strand
ccucagggacagaaacaga

SEQ ID NO: 1717585 - RNA, 19 nt, Homo sapiens
  misc_RNA (1)...(19): siRNA sense strand
uggaugauauggccauugc

SEQ ID NO: 1717586 - RNA, 19 nt, Homo sapiens
  misc_RNA (1)...(19): siRNA sense strand
agacagaaccaaagaaaau

SEQ ID NO: 1717587 - RNA, 19 nt, Homo sapiens
  misc_RNA (1)...(19): siRNA sense strand
aagcgagaguugcuggaau

SEQ ID NO: 1717588 - RNA, 19 nt, Homo sapiens
  misc_RNA (1)...(19): siRNA sense strand
gcgcuaagcugcaacgaaa

SEQ ID NO: 1717589 - RNA, 19 nt, Homo sapiens
  misc_RNA (1)...(19): siRNA sense strand
agucggagcucaccuguuu

SEQ ID NO: 1717590 - RNA, 19 nt, Homo sapiens
  misc_RNA (1)...(19): siRNA sense strand
ggucuucccuacuacaaug

SEQ ID NO: 1717591 - RNA, 19 nt, Homo sapiens
  misc_RNA (1)...(19): siRNA sense strand
agucuuacuuugccauuaa

SEQ ID NO: 1717592 - RNA, 19 nt, Homo sapiens
  misc_RNA (1)...(19): siRNA sense strand
ccaccacccugacagacuu

SEQ ID NO: 1717593 - RNA, 19 nt, Homo sapiens
  misc_RNA (1)...(19): siRNA sense strand
ugaagcagcucgcgcaaaa

SEQ ID NO: 1717594 - RNA, 19 nt, Homo sapiens
  misc_RNA (1)...(19): siRNA sense strand
guucaggcgcaaccucuua

SEQ ID NO: 1717595 - RNA, 19 nt, Homo sapiens
  misc_RNA (1)...(19): siRNA sense strand
gcacaugcgcugccucaag

SEQ ID NO: 1717596 - RNA, 19 nt, Homo sapiens
  misc_RNA (1)...(19): siRNA sense strand
cacaugcgcugccucaagu

SEQ ID NO: 1717597 - RNA, 19 nt, Homo sapiens
  misc_RNA (1)...(19): siRNA sense strand
gcaaggacgguagcaucua

SEQ ID NO: 1717598 - RNA, 19 nt, Homo sapiens
  misc_RNA (1)...(19): siRNA sense strand
gcucgggacuugguuuauc

SEQ ID NO: 1717599 - RNA, 19 nt, Homo sapiens
  misc_RNA (1)...(19): siRNA sense strand
aaacgacucuuaccaaccu

SEQ ID NO: 1717600 - RNA, 19 nt, Homo sapiens
  misc_RNA (1)...(19): siRNA sense strand
gcaaggaagacuacuacag

SEQ ID NO: 1717601 - RNA, 19 nt, Homo sapiens
  misc_RNA (1)...(19): siRNA sense strand
cuacaacgcugcgcuaagc

SEQ ID NO: 1717602 - RNA, 19 nt, Homo sapiens
  misc_RNA (1)...(19): siRNA sense strand
gcgcucgggacuugguuua

SEQ ID NO: 1717603 - RNA, 19 nt, Homo sapiens
  misc_RNA (1)...(19): siRNA sense strand
uagcaucuacugcaaggaa

SEQ ID NO: 1717604 - RNA, 19 nt, Homo sapiens
  misc_RNA (1)...(19): siRNA sense strand
ggacaagcaguggcacaug

SEQ ID NO: 1717605 - RNA, 19 nt, Homo sapiens
  misc_RNA (1)...(19): siRNA sense strand
cacaaacgacucuuaccaa

SEQ ID NO: 1717606 - RNA, 19 nt, Homo sapiens
  misc_RNA (1)...(19): siRNA sense strand
uuuaucaccucaacugcuu

SEQ ID NO: 1717607 - RNA, 19 nt, Homo sapiens
  misc_RNA (1)...(19): siRNA sense strand
gcaccacguguaacaagau

SEQ ID NO: 1717608 - RNA, 19 nt, Homo sapiens
  misc_RNA (1)...(19): siRNA sense strand
ggcgaccacuucggcauga

SEQ ID NO: 1717609 - RNA, 19 nt, Homo sapiens
  misc_RNA (1)...(19): siRNA sense strand
uucggaccaugaagucuua

SEQ ID NO: 1717610 - RNA, 19 nt, Homo sapiens
  misc_RNA (1)...(19): siRNA sense strand
ucacaaacgacucuuacca

SEQ ID NO: 1717611 - RNA, 19 nt, Homo sapiens
  misc_RNA (1)...(19): siRNA sense strand
ugaaggacagccuggucua

SEQ ID NO: 1717612 - RNA, 19 nt, Homo sapiens
  misc_RNA (1)...(19): siRNA sense strand
gaucucggaccgcuacuac

SEQ ID NO: 1717613 - RNA, 19 nt, Homo sapiens
  misc_RNA (1)...(19): siRNA sense strand
caccacguguaacaagaug

SEQ ID NO: 1717614 - RNA, 19 nt, Homo sapiens
  misc_RNA (1)...(19): siRNA sense strand
gaaggacagccuggucuac

SEQ ID NO: 1717615 - RNA, 19 nt, Homo sapiens
  misc_RNA (1)...(19): siRNA sense strand
acaauggcgugggcacugu

SEQ ID NO: 1717616 - RNA, 19 nt, Homo sapiens
  misc_RNA (1)...(19): siRNA sense strand
gaagaaagcaguacugugu

SEQ ID NO: 1717617 - RNA, 19 nt, Homo sapiens
  misc_RNA (1)...(19): siRNA sense strand
gaaagauuacguccucaua

SEQ ID NO: 1717618 - RNA, 19 nt, Homo sapiens
  misc_RNA (1)...(19): siRNA sense strand
agaaagcaguacuguguua

SEQ ID NO: 1717619 - RNA, 19 nt, Homo sapiens
  misc_RNA (1)...(19): siRNA sense strand
gggaggaaaugcuugguuu

SEQ ID NO: 1717620 - RNA, 19 nt, Homo sapiens
  misc_RNA (1)...(19): siRNA sense strand
ggaaaugcuugguuugugu

SEQ ID NO: 1717621 - RNA, 19 nt, Homo sapiens
  misc_RNA (1)...(19): siRNA sense strand
guggauugcuucuaucuuu

SEQ ID NO: 1717622 - RNA, 19 nt, Homo sapiens
  misc_RNA (1)...(19): siRNA sense strand
gaacuuccgccuuguaaga

SEQ ID NO: 1717623 - RNA, 19 nt, Homo sapiens
  misc_RNA (1)...(19): siRNA sense strand
cuacacaguccaucaaaua

SEQ ID NO: 1717624 - RNA, 19 nt, Homo sapiens
  misc_RNA (1)...(19): siRNA sense strand
gaauuguccuccugcaguu

SEQ ID NO: 1717625 - RNA, 19 nt, Homo sapiens
  misc_RNA (1)...(19): siRNA sense strand
gaaaugcuugguuugugua

SEQ ID NO: 1717626 - RNA, 19 nt, Homo sapiens
  misc_RNA (1)...(19): siRNA sense strand
gauagacuuuguuguuaca

SEQ ID NO: 1717627 - RNA, 19 nt, Homo sapiens
  misc_RNA (1)...(19): siRNA sense strand
gcuacuggucacaauauua

SEQ ID NO: 1717628 - RNA, 19 nt, Homo sapiens
  misc_RNA (1)...(19): siRNA sense strand
uaugggaucccuaaaugua

SEQ ID NO: 1717629 - RNA, 19 nt, Homo sapiens
  misc_RNA (1)...(19): siRNA sense strand
uugcugcccuucugcuuua

SEQ ID NO: 1717630 - RNA, 19 nt, Homo sapiens
  misc_RNA (1)...(19): siRNA sense strand
ucguaaacuuccuaugaua

SEQ ID NO: 1717631 - RNA, 19 nt, Homo sapiens
  misc_RNA (1)...(19): siRNA sense strand
gguuauccauucagguuga

SEQ ID NO: 1717632 - RNA, 19 nt, Homo sapiens
  misc_RNA (1)...(19): siRNA sense strand
ucgaguggauugcuucuau

SEQ ID NO: 1717633 - RNA, 19 nt, Homo sapiens
  misc_RNA (1)...(19): siRNA sense strand
ucugcacaauucuauguua

SEQ ID NO: 1717634 - RNA, 19 nt, Homo sapiens
  misc_RNA (1)...(19): siRNA sense strand
gguguaaacauaugugaug

SEQ ID NO: 1717635 - RNA, 19 nt, Homo sapiens
  misc_RNA (1)...(19): siRNA sense strand
ugugauauuuggcuuucua

SEQ ID NO: 1717636 - RNA, 19 nt, Homo sapiens
  misc_RNA (1)...(19): siRNA sense strand
caaacagaaauucaaguga

SEQ ID NO: 1717637 - RNA, 19 nt, Homo sapiens
  misc_RNA (1)...(19): siRNA sense strand
aguaugggaucccuaaaug

SEQ ID NO: 1717638 - RNA, 19 nt, Homo sapiens
  misc_RNA (1)...(19): siRNA sense strand
gaugaacuuccgccuugua

SEQ ID NO: 1717639 - RNA, 19 nt, Homo sapiens
  misc_RNA (1)...(19): siRNA sense strand
uuacacuuguugccacuuu

SEQ ID NO: 1717640 - RNA, 19 nt, Homo sapiens
  misc_RNA (1)...(19): siRNA sense strand
cauaugugauguaaauugg

SEQ ID NO: 1717641 - RNA, 19 nt, Homo sapiens
  misc_RNA (1)...(19): siRNA sense strand
ccaaacagaaauucaagug

SEQ ID NO: 1717642 - RNA, 19 nt, Homo sapiens
  misc_RNA (1)...(19): siRNA sense strand
gucguaaacuuccuaugau

SEQ ID NO: 1717643 - RNA, 19 nt, Homo sapiens
  misc_RNA (1)...(19): siRNA sense strand
cauaggcgauuacucuucu

SEQ ID NO: 1717644 - RNA, 19 nt, Homo sapiens
  misc_RNA (1)...(19): siRNA sense strand
cuacuggucacaauauuau

SEQ ID NO: 1717645 - RNA, 19 nt, Homo sapiens
  misc_RNA (1)...(19): siRNA sense strand
ggaggaaaugcuugguuug

SEQ ID NO: 1717646 - RNA, 19 nt, Homo sapiens
  misc_RNA (1)...(19): siRNA sense strand
gaggaaaugcuugguuugu

SEQ ID NO: 1717647 - RNA, 19 nt, Homo sapiens
  misc_RNA (1)...(19): siRNA sense strand
uugcuucuaucuuugcuuu

SEQ ID NO: 1717648 - RNA, 19 nt, Homo sapiens
  misc_RNA (1)...(19): siRNA sense strand
agucguaaacuuccuauga

SEQ ID NO: 1717649 - RNA, 19 nt, Homo sapiens
  misc_RNA (1)...(19): siRNA sense strand
ucaagguccucgaguggau

SEQ ID NO: 1717650 - RNA, 19 nt, Homo sapiens
  misc_RNA (1)...(19): siRNA sense strand
ccucauaggcgauuacucu

SEQ ID NO: 1717651 - RNA, 19 nt, Homo sapiens
  misc_RNA (1)...(19): siRNA sense strand
gcacaauucuauguuaccu

SEQ ID NO: 1717652 - RNA, 19 nt, Homo sapiens
  misc_RNA (1)...(19): siRNA sense strand
gauagucguaaacuuccua

SEQ ID NO: 1717653 - RNA, 19 nt, Homo sapiens
  misc_RNA (1)...(19): siRNA sense strand
agacuuuguuguuacacuu

SEQ ID NO: 1717654 - RNA, 19 nt, Homo sapiens
  misc_RNA (1)...(19): siRNA sense strand
gggccaaacagaaauucaa

SEQ ID NO: 1717655 - RNA, 19 nt, Homo sapiens
  misc_RNA (1)...(19): siRNA sense strand
ugauagacuuuguuguuac

SEQ ID NO: 1717656 - RNA, 19 nt, Homo sapiens
  misc_RNA (1)...(19): siRNA sense strand
uuuaagggccaaacagaaa

SEQ ID NO: 1717657 - RNA, 19 nt, Homo sapiens
  misc_RNA (1)...(19): siRNA sense strand
uauguuaccuuugcagucu

SEQ ID NO: 1717658 - RNA, 19 nt, Homo sapiens
  misc_RNA (1)...(19): siRNA sense strand
ggaaagauuacguccucau

SEQ ID NO: 1717659 - RNA, 19 nt, Homo sapiens
  misc_RNA (1)...(19): siRNA sense strand
cacaguccaucaaauacau

SEQ ID NO: 1717660 - RNA, 19 nt, Homo sapiens
  misc_RNA (1)...(19): siRNA sense strand
gcccuucugcuuuauguug

SEQ ID NO: 1717661 - RNA, 19 nt, Homo sapiens
  misc_RNA (1)...(19): siRNA sense strand
aagauuacguccucauagg

SEQ ID NO: 1717662 - RNA, 19 nt, Homo sapiens
  misc_RNA (1)...(19): siRNA sense strand
uaagggccaaacagaaauu

SEQ ID NO: 1717663 - RNA, 19 nt, Homo sapiens
  misc_RNA (1)...(19): siRNA sense strand
ggcgauuacucuucuucug

SEQ ID NO: 1717664 - RNA, 19 nt, Homo sapiens
  misc_RNA (1)...(19): siRNA sense strand
uaagaagaaagcaguacug

SEQ ID NO: 1717665 - RNA, 19 nt, Homo sapiens
  misc_RNA (1)...(19): siRNA sense strand
uggauugcuucuaucuuug

SEQ ID NO: 1717666 - RNA, 19 nt, Homo sapiens
  misc_RNA (1)...(19): siRNA sense strand
uuacucuucuucugcacaa

SEQ ID NO: 1717667 - RNA, 19 nt, Homo sapiens
  misc_RNA (1)...(19): siRNA sense strand
ccuacacaguccaucaaau

SEQ ID NO: 1717668 - RNA, 19 nt, Homo sapiens
  misc_RNA (1)...(19): siRNA sense strand
uagcuacuggucacaauau

SEQ ID NO: 1717669 - RNA, 19 nt, Homo sapiens
  misc_RNA (1)...(19): siRNA sense strand
aaagauuacguccucauag

SEQ ID NO: 1717670 - RNA, 19 nt, Homo sapiens
  misc_RNA (1)...(19): siRNA sense strand
ggagaccagccuacacagu

SEQ ID NO: 1717671 - RNA, 19 nt, Homo sapiens
  misc_RNA (1)...(19): siRNA sense strand
cgaguggauugcuucuauc

SEQ ID NO: 1717672 - RNA, 19 nt, Homo sapiens
  misc_RNA (1)...(19): siRNA sense strand
uuacagcuacuuuugguua

SEQ ID NO: 1717673 - RNA, 19 nt, Homo sapiens
  misc_RNA (1)...(19): siRNA sense strand
aauagcuacuggucacaau

SEQ ID NO: 1717674 - RNA, 19 nt, Homo sapiens
  misc_RNA (1)...(19): siRNA sense strand
cagguugaaugaggcauca

SEQ ID NO: 1717675 - RNA, 19 nt, Homo sapiens
  misc_RNA (1)...(19): siRNA sense strand
aggaaaugcuugguuugug

SEQ ID NO: 1717676 - RNA, 19 nt, Homo sapiens
  misc_RNA (1)...(19): siRNA sense strand
gaaagcaguacuguguuac

SEQ ID NO: 1717677 - RNA, 19 nt, Homo sapiens
  misc_RNA (1)...(19): siRNA sense strand
cugcauugcugcccuucug

SEQ ID NO: 1717678 - RNA, 19 nt, Homo sapiens
  misc_RNA (1)...(19): siRNA sense strand
caguaugggaucccuaaau

SEQ ID NO: 1717679 - RNA, 19 nt, Homo sapiens
  misc_RNA (1)...(19): siRNA sense strand
uguuaccuuugcagucuuu

SEQ ID NO: 1717680 - RNA, 19 nt, Homo sapiens
  misc_RNA (1)...(19): siRNA sense strand
gcuuccagaucaaccucaa

SEQ ID NO: 1717681 - RNA, 19 nt, Homo sapiens
  misc_RNA (1)...(19): siRNA sense strand
ugggaucccuaaauguauc

SEQ ID NO: 1717682 - RNA, 19 nt, Homo sapiens
  misc_RNA (1)...(19): siRNA sense strand
guaagaagaaagcaguacu

SEQ ID NO: 1717683 - RNA, 19 nt, Homo sapiens
  misc_RNA (1)...(19): siRNA sense strand
cuggauagucguaaacuuc

SEQ ID NO: 1717684 - RNA, 19 nt, Homo sapiens
  misc_RNA (1)...(19): siRNA sense strand
gauguccggcuuccagauc

SEQ ID NO: 1717685 - RNA, 19 nt, Homo sapiens
  misc_RNA (1)...(19): siRNA sense strand
guaugggaucccuaaaugu

SEQ ID NO: 1717686 - RNA, 19 nt, Homo sapiens
  misc_RNA (1)...(19): siRNA sense strand
gaagaaagcaguacugugu

SEQ ID NO: 1717687 - RNA, 19 nt, Homo sapiens
  misc_RNA (1)...(19): siRNA sense strand
gaaagauuacguccucaua

SEQ ID NO: 1717688 - RNA, 19 nt, Homo sapiens
  misc_RNA (1)...(19): siRNA sense strand
agaaagcaguacuguguua

SEQ ID NO: 1717689 - RNA, 19 nt, Homo sapiens
  misc_RNA (1)...(19): siRNA sense strand
gggaggaaaugcuugguuu

SEQ ID NO: 1717690 - RNA, 19 nt, Homo sapiens
  misc_RNA (1)...(19): siRNA sense strand
ggaaaugcuugguuugugu

SEQ ID NO: 1717691 - RNA, 19 nt, Homo sapiens
  misc_RNA (1)...(19): siRNA sense strand
guggauugcuucuaucuuu

SEQ ID NO: 1717692 - RNA, 19 nt, Homo sapiens
  misc_RNA (1)...(19): siRNA sense strand
gaacuuccgccuuguaaga

SEQ ID NO: 1717693 - RNA, 19 nt, Homo sapiens
  misc_RNA (1)...(19): siRNA sense strand
cuacacaguccaucaaaua

SEQ ID NO: 1717694 - RNA, 19 nt, Homo sapiens
  misc_RNA (1)...(19): siRNA sense strand
gaauuguccuccugcaguu

SEQ ID NO: 1717695 - RNA, 19 nt, Homo sapiens
  misc_RNA (1)...(19): siRNA sense strand
gaaaugcuugguuugugua

SEQ ID NO: 1717696 - RNA, 19 nt, Homo sapiens
  misc_RNA (1)...(19): siRNA sense strand
gauagacuuuguuguuaca

SEQ ID NO: 1717697 - RNA, 19 nt, Homo sapiens
  misc_RNA (1)...(19): siRNA sense strand
gcuacuggucacaauauua

SEQ ID NO: 1717698 - RNA, 19 nt, Homo sapiens
  misc_RNA (1)...(19): siRNA sense strand
uaugggaucccuaaaugua

SEQ ID NO: 1717699 - RNA, 19 nt, Homo sapiens
  misc_RNA (1)...(19): siRNA sense strand
uugcugcccuucugcuuua

SEQ ID NO: 1717700 - RNA, 19 nt, Homo sapiens
  misc_RNA (1)...(19): siRNA sense strand
ucguaaacuuccuaugaua

SEQ ID NO: 1717701 - RNA, 19 nt, Homo sapiens
  misc_RNA (1)...(19): siRNA sense strand
gguuauccauucagguuga

SEQ ID NO: 1717702 - RNA, 19 nt, Homo sapiens
  misc_RNA (1)...(19): siRNA sense strand
ucgaguggauugcuucuau

SEQ ID NO: 1717703 - RNA, 19 nt, Homo sapiens
  misc_RNA (1)...(19): siRNA sense strand
ucugcacaauucuauguua

SEQ ID NO: 1717704 - RNA, 19 nt, Homo sapiens
  misc_RNA (1)...(19): siRNA sense strand
gguguaaacauaugugaug

SEQ ID NO: 1717705 - RNA, 19 nt, Homo sapiens
  misc_RNA (1)...(19): siRNA sense strand
ugugauauuuggcuuucua

SEQ ID NO: 1717706 - RNA, 19 nt, Homo sapiens
  misc_RNA (1)...(19): siRNA sense strand
caaacagaaauucaaguga

SEQ ID NO: 1717707 - RNA, 19 nt, Homo sapiens
  misc_RNA (1)...(19): siRNA sense strand
aguaugggaucccuaaaug

SEQ ID NO: 1717708 - RNA, 19 nt, Homo sapiens
  misc_RNA (1)...(19): siRNA sense strand
gaugaacuuccgccuugua

SEQ ID NO: 1717709 - RNA, 19 nt, Homo sapiens
  misc_RNA (1)...(19): siRNA sense strand
uuacacuuguugccacuuu

SEQ ID NO: 1717710 - RNA, 19 nt, Homo sapiens
  misc_RNA (1)...(19): siRNA sense strand
cauaugugauguaaauugg

SEQ ID NO: 1717711 - RNA, 19 nt, Homo sapiens
  misc_RNA (1)...(19): siRNA sense strand
ccaaacagaaauucaagug

SEQ ID NO: 1717712 - RNA, 19 nt, Homo sapiens
  misc_RNA (1)...(19): siRNA sense strand
gucguaaacuuccuaugau

SEQ ID NO: 1717713 - RNA, 19 nt, Homo sapiens
  misc_RNA (1)...(19): siRNA sense strand
cauaggcgauuacucuucu

SEQ ID NO: 1717714 - RNA, 19 nt, Homo sapiens
  misc_RNA (1)...(19): siRNA sense strand
cuacuggucacaauauuau

SEQ ID NO: 1717715 - RNA, 19 nt, Homo sapiens
  misc_RNA (1)...(19): siRNA sense strand
ggaggaaaugcuugguuug

SEQ ID NO: 1717716 - RNA, 19 nt, Homo sapiens
  misc_RNA (1)...(19): siRNA sense strand
gaggaaaugcuugguuugu

SEQ ID NO: 1717717 - RNA, 19 nt, Homo sapiens
  misc_RNA (1)...(19): siRNA sense strand
agucguaaacuuccuauga

SEQ ID NO: 1717718 - RNA, 19 nt, Homo sapiens
  misc_RNA (1)...(19): siRNA sense strand
uugcuucuaucuuugcuuu

SEQ ID NO: 1717719 - RNA, 19 nt, Homo sapiens
  misc_RNA (1)...(19): siRNA sense strand
ucaagguccucgaguggau

SEQ ID NO: 1717720 - RNA, 19 nt, Homo sapiens
  misc_RNA (1)...(19): siRNA sense strand
ccucauaggcgauuacucu

SEQ ID NO: 1717721 - RNA, 19 nt, Homo sapiens
  misc_RNA (1)...(19): siRNA sense strand
gcacaauucuauguuaccu

SEQ ID NO: 1717722 - RNA, 19 nt, Homo sapiens
  misc_RNA (1)...(19): siRNA sense strand
gauagucguaaacuuccua

SEQ ID NO: 1717723 - RNA, 19 nt, Homo sapiens
  misc_RNA (1)...(19): siRNA sense strand
agacuuuguuguuacacuu

SEQ ID NO: 1717724 - RNA, 19 nt, Homo sapiens
  misc_RNA (1)...(19): siRNA sense strand
uauguuaccuuugcagucu

SEQ ID NO: 1717725 - RNA, 19 nt, Homo sapiens
  misc_RNA (1)...(19): siRNA sense strand
ugauagacuuuguuguuac

SEQ ID NO: 1717726 - RNA, 19 nt, Homo sapiens
  misc_RNA (1)...(19): siRNA sense strand
uuuaagggccaaacagaaa

SEQ ID NO: 1717727 - RNA, 19 nt, Homo sapiens
  misc_RNA (1)...(19): siRNA sense strand
gggccaaacagaaauucaa

SEQ ID NO: 1717728 - RNA, 19 nt, Homo sapiens
  misc_RNA (1)...(19): siRNA sense strand
ggaaagauuacguccucau

SEQ ID NO: 1717729 - RNA, 19 nt, Homo sapiens
  misc_RNA (1)...(19): siRNA sense strand
cacaguccaucaaauacau

SEQ ID NO: 1717730 - RNA, 19 nt, Homo sapiens
  misc_RNA (1)...(19): siRNA sense strand
gcccuucugcuuuauguug

SEQ ID NO: 1717731 - RNA, 19 nt, Homo sapiens
  misc_RNA (1)...(19): siRNA sense strand
aagauuacguccucauagg

SEQ ID NO: 1717732 - RNA, 19 nt, Homo sapiens
  misc_RNA (1)...(19): siRNA sense strand
uaagggccaaacagaaauu

SEQ ID NO: 1717733 - RNA, 19 nt, Homo sapiens
  misc_RNA (1)...(19): siRNA sense strand
ggcgauuacucuucuucug

SEQ ID NO: 1717734 - RNA, 19 nt, Homo sapiens
  misc_RNA (1)...(19): siRNA sense strand
uaagaagaaagcaguacug

SEQ ID NO: 1717735 - RNA, 19 nt, Homo sapiens
  misc_RNA (1)...(19): siRNA sense strand
uggauugcuucuaucuuug

SEQ ID NO: 1717736 - RNA, 19 nt, Homo sapiens
  misc_RNA (1)...(19): siRNA sense strand
uuacucuucuucugcacaa

SEQ ID NO: 1717737 - RNA, 19 nt, Homo sapiens
  misc_RNA (1)...(19): siRNA sense strand
ccuacacaguccaucaaau

SEQ ID NO: 1717738 - RNA, 19 nt, Homo sapiens
  misc_RNA (1)...(19): siRNA sense strand
uagcuacuggucacaauau

SEQ ID NO: 1717739 - RNA, 19 nt, Homo sapiens
  misc_RNA (1)...(19): siRNA sense strand
aaagauuacguccucauag

SEQ ID NO: 1717740 - RNA, 19 nt, Homo sapiens
  misc_RNA (1)...(19): siRNA sense strand
ggagaccagccuacacagu

SEQ ID NO: 1717741 - RNA, 19 nt, Homo sapiens
  misc_RNA (1)...(19): siRNA sense strand
cgaguggauugcuucuauc

SEQ ID NO: 1717742 - RNA, 19 nt, Homo sapiens
  misc_RNA (1)...(19): siRNA sense strand
aauagcuacuggucacaau

SEQ ID NO: 1717743 - RNA, 19 nt, Homo sapiens
  misc_RNA (1)...(19): siRNA sense strand
uuacagcuacuuuugguua

SEQ ID NO: 1717744 - RNA, 19 nt, Homo sapiens
  misc_RNA (1)...(19): siRNA sense strand
cagguugaaugaggcauca

SEQ ID NO: 1717745 - RNA, 19 nt, Homo sapiens
  misc_RNA (1)...(19): siRNA sense strand
aggaaaugcuugguuugug

SEQ ID NO: 1717746 - RNA, 19 nt, Homo sapiens
  misc_RNA (1)...(19): siRNA sense strand
gaaagcaguacuguguuac

SEQ ID NO: 1717747 - RNA, 19 nt, Homo sapiens
  misc_RNA (1)...(19): siRNA sense strand
cugcauugcugcccuucug

SEQ ID NO: 1717748 - RNA, 19 nt, Homo sapiens
  misc_RNA (1)...(19): siRNA sense strand
caguaugggaucccuaaau

SEQ ID NO: 1717749 - RNA, 19 nt, Homo sapiens
  misc_RNA (1)...(19): siRNA sense strand
gcuuccagaucaaccucaa

SEQ ID NO: 1717750 - RNA, 19 nt, Homo sapiens
  misc_RNA (1)...(19): siRNA sense strand
ugggaucccuaaauguauc

SEQ ID NO: 1717751 - RNA, 19 nt, Homo sapiens
  misc_RNA (1)...(19): siRNA sense strand
guaagaagaaagcaguacu

SEQ ID NO: 1717752 - RNA, 19 nt, Homo sapiens
  misc_RNA (1)...(19): siRNA sense strand
cuggauagucguaaacuuc

SEQ ID NO: 1717753 - RNA, 19 nt, Homo sapiens
  misc_RNA (1)...(19): siRNA sense strand
uguuaccuuugcagucuuu

SEQ ID NO: 1717754 - RNA, 19 nt, Homo sapiens
  misc_RNA (1)...(19): siRNA sense strand
guaugggaucccuaaaugu

SEQ ID NO: 1717755 - RNA, 19 nt, Homo sapiens
  misc_RNA (1)...(19): siRNA sense strand
gaagaaagcaguacugugu

SEQ ID NO: 1717756 - RNA, 19 nt, Homo sapiens
  misc_RNA (1)...(19): siRNA sense strand
gaaagauuacguccucaua

SEQ ID NO: 1717757 - RNA, 19 nt, Homo sapiens
  misc_RNA (1)...(19): siRNA sense strand
agaaagcaguacuguguua

SEQ ID NO: 1717758 - RNA, 19 nt, Homo sapiens
  misc_RNA (1)...(19): siRNA sense strand
gggaggaaaugcuugguuu

SEQ ID NO: 1717759 - RNA, 19 nt, Homo sapiens
  misc_RNA (1)...(19): siRNA sense strand
ggaaaugcuugguuugugu

SEQ ID NO: 1717760 - RNA, 19 nt, Homo sapiens
  misc_RNA (1)...(19): siRNA sense strand
guggauugcuucuaucuuu

SEQ ID NO: 1717761 - RNA, 19 nt, Homo sapiens
  misc_RNA (1)...(19): siRNA sense strand
gaacuuccgccuuguaaga

SEQ ID NO: 1717762 - RNA, 19 nt, Homo sapiens
  misc_RNA (1)...(19): siRNA sense strand
cuacacaguccaucaaaua

SEQ ID NO: 1717763 - RNA, 19 nt, Homo sapiens
  misc_RNA (1)...(19): siRNA sense strand
gaauuguccuccugcaguu

SEQ ID NO: 1717764 - RNA, 19 nt, Homo sapiens
  misc_RNA (1)...(19): siRNA sense strand
gaaaugcuugguuugugua

SEQ ID NO: 1717765 - RNA, 19 nt, Homo sapiens
  misc_RNA (1)...(19): siRNA sense strand
gauagacuuuguuguuaca

SEQ ID NO: 1717766 - RNA, 19 nt, Homo sapiens
  misc_RNA (1)...(19): siRNA sense strand
gcuacuggucacaauauua

SEQ ID NO: 1717767 - RNA, 19 nt, Homo sapiens
  misc_RNA (1)...(19): siRNA sense strand
uaugggaucccuaaaugua

SEQ ID NO: 1717768 - RNA, 19 nt, Homo sapiens
  misc_RNA (1)...(19): siRNA sense strand
uugcugcccuucugcuuua

SEQ ID NO: 1717769 - RNA, 19 nt, Homo sapiens
  misc_RNA (1)...(19): siRNA sense strand
ucguaaacuuccuaugaua

SEQ ID NO: 1717770 - RNA, 19 nt, Homo sapiens
  misc_RNA (1)...(19): siRNA sense strand
gguuauccauucagguuga

SEQ ID NO: 1717771 - RNA, 19 nt, Homo sapiens
  misc_RNA (1)...(19): siRNA sense strand
ucgaguggauugcuucuau

SEQ ID NO: 1717772 - RNA, 19 nt, Homo sapiens
  misc_RNA (1)...(19): siRNA sense strand
ucugcacaauucuauguua

SEQ ID NO: 1717773 - RNA, 19 nt, Homo sapiens
  misc_RNA (1)...(19): siRNA sense strand
gguguaaacauaugugaug

SEQ ID NO: 1717774 - RNA, 19 nt, Homo sapiens
  misc_RNA (1)...(19): siRNA sense strand
ugugauauuuggcuuucua

SEQ ID NO: 1717775 - RNA, 19 nt, Homo sapiens
  misc_RNA (1)...(19): siRNA sense strand
caaacagaaauucaaguga

SEQ ID NO: 1717776 - RNA, 19 nt, Homo sapiens
  misc_RNA (1)...(19): siRNA sense strand
aguaugggaucccuaaaug

SEQ ID NO: 1717777 - RNA, 19 nt, Homo sapiens
  misc_RNA (1)...(19): siRNA sense strand
gaugaacuuccgccuugua

SEQ ID NO: 1717778 - RNA, 19 nt, Homo sapiens
  misc_RNA (1)...(19): siRNA sense strand
uuacacuuguugccacuuu

SEQ ID NO: 1717779 - RNA, 19 nt, Homo sapiens
  misc_RNA (1)...(19): siRNA sense strand
cauaugugauguaaauugg

SEQ ID NO: 1717780 - RNA, 19 nt, Homo sapiens
  misc_RNA (1)...(19): siRNA sense strand
ccaaacagaaauucaagug

SEQ ID NO: 1717781 - RNA, 19 nt, Homo sapiens
  misc_RNA (1)...(19): siRNA sense strand
gucguaaacuuccuaugau

SEQ ID NO: 1717782 - RNA, 19 nt, Homo sapiens
  misc_RNA (1)...(19): siRNA sense strand
cauaggcgauuacucuucu

SEQ ID NO: 1717783 - RNA, 19 nt, Homo sapiens
  misc_RNA (1)...(19): siRNA sense strand
cuacuggucacaauauuau

SEQ ID NO: 1717784 - RNA, 19 nt, Homo sapiens
  misc_RNA (1)...(19): siRNA sense strand
ggaggaaaugcuugguuug

SEQ ID NO: 1717785 - RNA, 19 nt, Homo sapiens
  misc_RNA (1)...(19): siRNA sense strand
gaggaaaugcuugguuugu

SEQ ID NO: 1717786 - RNA, 19 nt, Homo sapiens
  misc_RNA (1)...(19): siRNA sense strand
uugcuucuaucuuugcuuu

SEQ ID NO: 1717787 - RNA, 19 nt, Homo sapiens
  misc_RNA (1)...(19): siRNA sense strand
agucguaaacuuccuauga

SEQ ID NO: 1717788 - RNA, 19 nt, Homo sapiens
  misc_RNA (1)...(19): siRNA sense strand
ucaagguccucgaguggau

SEQ ID NO: 1717789 - RNA, 19 nt, Homo sapiens
  misc_RNA (1)...(19): siRNA sense strand
ccucauaggcgauuacucu

SEQ ID NO: 1717790 - RNA, 19 nt, Homo sapiens
  misc_RNA (1)...(19): siRNA sense strand
gcacaauucuauguuaccu

SEQ ID NO: 1717791 - RNA, 19 nt, Homo sapiens
  misc_RNA (1)...(19): siRNA sense strand
gauagucguaaacuuccua

SEQ ID NO: 1717792 - RNA, 19 nt, Homo sapiens
  misc_RNA (1)...(19): siRNA sense strand
agacuuuguuguuacacuu

SEQ ID NO: 1717793 - RNA, 19 nt, Homo sapiens
  misc_RNA (1)...(19): siRNA sense strand
gggccaaacagaaauucaa

SEQ ID NO: 1717794 - RNA, 19 nt, Homo sapiens
  misc_RNA (1)...(19): siRNA sense strand
ugauagacuuuguuguuac

SEQ ID NO: 1717795 - RNA, 19 nt, Homo sapiens
  misc_RNA (1)...(19): siRNA sense strand
uuuaagggccaaacagaaa

SEQ ID NO: 1717796 - RNA, 19 nt, Homo sapiens
  misc_RNA (1)...(19): siRNA sense strand
uauguuaccuuugcagucu

SEQ ID NO: 1717797 - RNA, 19 nt, Homo sapiens
  misc_RNA (1)...(19): siRNA sense strand
ggaaagauuacguccucau

SEQ ID NO: 1717798 - RNA, 19 nt, Homo sapiens
  misc_RNA (1)...(19): siRNA sense strand
cacaguccaucaaauacau

SEQ ID NO: 1717799 - RNA, 19 nt, Homo sapiens
  misc_RNA (1)...(19): siRNA sense strand
gcccuucugcuuuauguug

SEQ ID NO: 1717800 - RNA, 19 nt, Homo sapiens
  misc_RNA (1)...(19): siRNA sense strand
aagauuacguccucauagg

SEQ ID NO: 1717801 - RNA, 19 nt, Homo sapiens
  misc_RNA (1)...(19): siRNA sense strand
uaagggccaaacagaaauu

SEQ ID NO: 1717802 - RNA, 19 nt, Homo sapiens
  misc_RNA (1)...(19): siRNA sense strand
ggcgauuacucuucuucug

SEQ ID NO: 1717803 - RNA, 19 nt, Homo sapiens
  misc_RNA (1)...(19): siRNA sense strand
uaagaagaaagcaguacug

SEQ ID NO: 1717804 - RNA, 19 nt, Homo sapiens
  misc_RNA (1)...(19): siRNA sense strand
uggauugcuucuaucuuug

SEQ ID NO: 1717805 - RNA, 19 nt, Homo sapiens
  misc_RNA (1)...(19): siRNA sense strand
uuacucuucuucugcacaa

SEQ ID NO: 1717806 - RNA, 19 nt, Homo sapiens
  misc_RNA (1)...(19): siRNA sense strand
ccuacacaguccaucaaau

SEQ ID NO: 1717807 - RNA, 19 nt, Homo sapiens
  misc_RNA (1)...(19): siRNA sense strand
uagcuacuggucacaauau

SEQ ID NO: 1717808 - RNA, 19 nt, Homo sapiens
  misc_RNA (1)...(19): siRNA sense strand
aaagauuacguccucauag

SEQ ID NO: 1717809 - RNA, 19 nt, Homo sapiens
  misc_RNA (1)...(19): siRNA sense strand
ggagaccagccuacacagu

SEQ ID NO: 1717810 - RNA, 19 nt, Homo sapiens
  misc_RNA (1)...(19): siRNA sense strand
cgaguggauugcuucuauc

SEQ ID NO: 1717811 - RNA, 19 nt, Homo sapiens
  misc_RNA (1)...(19): siRNA sense strand
uuacagcuacuuuugguua

SEQ ID NO: 1717812 - RNA, 19 nt, Homo sapiens
  misc_RNA (1)...(19): siRNA sense strand
aauagcuacuggucacaau

SEQ ID NO: 1717813 - RNA, 19 nt, Homo sapiens
  misc_RNA (1)...(19): siRNA sense strand
cagguugaaugaggcauca

SEQ ID NO: 1717814 - RNA, 19 nt, Homo sapiens
  misc_RNA (1)...(19): siRNA sense strand
aggaaaugcuugguuugug

SEQ ID NO: 1717815 - RNA, 19 nt, Homo sapiens
  misc_RNA (1)...(19): siRNA sense strand
gaaagcaguacuguguuac

SEQ ID NO: 1717816 - RNA, 19 nt, Homo sapiens
  misc_RNA (1)...(19): siRNA sense strand
cugcauugcugcccuucug

SEQ ID NO: 1717817 - RNA, 19 nt, Homo sapiens
  misc_RNA (1)...(19): siRNA sense strand
caguaugggaucccuaaau

SEQ ID NO: 1717818 - RNA, 19 nt, Homo sapiens
  misc_RNA (1)...(19): siRNA sense strand
uguuaccuuugcagucuuu

SEQ ID NO: 1717819 - RNA, 19 nt, Homo sapiens
  misc_RNA (1)...(19): siRNA sense strand
gcuuccagaucaaccucaa

SEQ ID NO: 1717820 - RNA, 19 nt, Homo sapiens
  misc_RNA (1)...(19): siRNA sense strand
ugggaucccuaaauguauc

SEQ ID NO: 1717821 - RNA, 19 nt, Homo sapiens
  misc_RNA (1)...(19): siRNA sense strand
guaagaagaaagcaguacu

SEQ ID NO: 1717822 - RNA, 19 nt, Homo sapiens
  misc_RNA (1)...(19): siRNA sense strand
cuggauagucguaaacuuc

SEQ ID NO: 1717823 - RNA, 19 nt, Homo sapiens
  misc_RNA (1)...(19): siRNA sense strand
gauguccggcuuccagauc

SEQ ID NO: 1717824 - RNA, 19 nt, Homo sapiens
  misc_RNA (1)...(19): siRNA sense strand
guaugggaucccuaaaugu

SEQ ID NO: 1717825 - RNA, 19 nt, Homo sapiens
  misc_RNA (1)...(19): siRNA sense strand
gaagaaagcaguacugugu

SEQ ID NO: 1717826 - RNA, 19 nt, Homo sapiens
  misc_RNA (1)...(19): siRNA sense strand
gaaagauuacguccucaua

SEQ ID NO: 1717827 - RNA, 19 nt, Homo sapiens
  misc_RNA (1)...(19): siRNA sense strand
agaaagcaguacuguguua

SEQ ID NO: 1717828 - RNA, 19 nt, Homo sapiens
  misc_RNA (1)...(19): siRNA sense strand
gggaggaaaugcuugguuu

SEQ ID NO: 1717829 - RNA, 19 nt, Homo sapiens
  misc_RNA (1)...(19): siRNA sense strand
ggaaaugcuugguuugugu

SEQ ID NO: 1717830 - RNA, 19 nt, Homo sapiens
  misc_RNA (1)...(19): siRNA sense strand
guggauugcuucuaucuuu

SEQ ID NO: 1717831 - RNA, 19 nt, Homo sapiens
  misc_RNA (1)...(19): siRNA sense strand
gaacuuccgccuuguaaga

SEQ ID NO: 1717832 - RNA, 19 nt, Homo sapiens
  misc_RNA (1)...(19): siRNA sense strand
cuacacaguccaucaaaua

SEQ ID NO: 1717833 - RNA, 19 nt, Homo sapiens
  misc_RNA (1)...(19): siRNA sense strand
gaauuguccuccugcaguu

SEQ ID NO: 1717834 - RNA, 19 nt, Homo sapiens
  misc_RNA (1)...(19): siRNA sense strand
gaaaugcuugguuugugua

SEQ ID NO: 1717835 - RNA, 19 nt, Homo sapiens
  misc_RNA (1)...(19): siRNA sense strand
gauagacuuuguuguuaca

SEQ ID NO: 1717836 - RNA, 19 nt, Homo sapiens
  misc_RNA (1)...(19): siRNA sense strand
gcuacuggucacaauauua

SEQ ID NO: 1717837 - RNA, 19 nt, Homo sapiens
  misc_RNA (1)...(19): siRNA sense strand
uaugggaucccuaaaugua

SEQ ID NO: 1717838 - RNA, 19 nt, Homo sapiens
  misc_RNA (1)...(19): siRNA sense strand
uugcugcccuucugcuuua

SEQ ID NO: 1717839 - RNA, 19 nt, Homo sapiens
  misc_RNA (1)...(19): siRNA sense strand
ucguaaacuuccuaugaua

SEQ ID NO: 1717840 - RNA, 19 nt, Homo sapiens
  misc_RNA (1)...(19): siRNA sense strand
gguuauccauucagguuga

SEQ ID NO: 1717841 - RNA, 19 nt, Homo sapiens
  misc_RNA (1)...(19): siRNA sense strand
ucgaguggauugcuucuau

SEQ ID NO: 1717842 - RNA, 19 nt, Homo sapiens
  misc_RNA (1)...(19): siRNA sense strand
ucugcacaauucuauguua

SEQ ID NO: 1717843 - RNA, 19 nt, Homo sapiens
  misc_RNA (1)...(19): siRNA sense strand
gguguaaacauaugugaug

SEQ ID NO: 1717844 - RNA, 19 nt, Homo sapiens
  misc_RNA (1)...(19): siRNA sense strand
ugugauauuuggcuuucua

SEQ ID NO: 1717845 - RNA, 19 nt, Homo sapiens
  misc_RNA (1)...(19): siRNA sense strand
caaacagaaauucaaguga

SEQ ID NO: 1717846 - RNA, 19 nt, Homo sapiens
  misc_RNA (1)...(19): siRNA sense strand
aguaugggaucccuaaaug

SEQ ID NO: 1717847 - RNA, 19 nt, Homo sapiens
  misc_RNA (1)...(19): siRNA sense strand
gaugaacuuccgccuugua

SEQ ID NO: 1717848 - RNA, 19 nt, Homo sapiens
  misc_RNA (1)...(19): siRNA sense strand
uuacacuuguugccacuuu

SEQ ID NO: 1717849 - RNA, 19 nt, Homo sapiens
  misc_RNA (1)...(19): siRNA sense strand
cauaugugauguaaauugg

SEQ ID NO: 1717850 - RNA, 19 nt, Homo sapiens
  misc_RNA (1)...(19): siRNA sense strand
ccaaacagaaauucaagug

SEQ ID NO: 1717851 - RNA, 19 nt, Homo sapiens
  misc_RNA (1)...(19): siRNA sense strand
gucguaaacuuccuaugau

SEQ ID NO: 1717852 - RNA, 19 nt, Homo sapiens
  misc_RNA (1)...(19): siRNA sense strand
cauaggcgauuacucuucu

SEQ ID NO: 1717853 - RNA, 19 nt, Homo sapiens
  misc_RNA (1)...(19): siRNA sense strand
cuacuggucacaauauuau

SEQ ID NO: 1717854 - RNA, 19 nt, Homo sapiens
  misc_RNA (1)...(19): siRNA sense strand
ggaggaaaugcuugguuug

SEQ ID NO: 1717855 - RNA, 19 nt, Homo sapiens
  misc_RNA (1)...(19): siRNA sense strand
gaggaaaugcuugguuugu

SEQ ID NO: 1717856 - RNA, 19 nt, Homo sapiens
  misc_RNA (1)...(19): siRNA sense strand
agucguaaacuuccuauga

SEQ ID NO: 1717857 - RNA, 19 nt, Homo sapiens
  misc_RNA (1)...(19): siRNA sense strand
uugcuucuaucuuugcuuu

SEQ ID NO: 1717858 - RNA, 19 nt, Homo sapiens
  misc_RNA (1)...(19): siRNA sense strand
ucaagguccucgaguggau

SEQ ID NO: 1717859 - RNA, 19 nt, Homo sapiens
  misc_RNA (1)...(19): siRNA sense strand
ccucauaggcgauuacucu

SEQ ID NO: 1717860 - RNA, 19 nt, Homo sapiens
  misc_RNA (1)...(19): siRNA sense strand
gcacaauucuauguuaccu

SEQ ID NO: 1717861 - RNA, 19 nt, Homo sapiens
  misc_RNA (1)...(19): siRNA sense strand
gauagucguaaacuuccua

SEQ ID NO: 1717862 - RNA, 19 nt, Homo sapiens
  misc_RNA (1)...(19): siRNA sense strand
agacuuuguuguuacacuu

SEQ ID NO: 1717863 - RNA, 19 nt, Homo sapiens
  misc_RNA (1)...(19): siRNA sense strand
uauguuaccuuugcagucu

SEQ ID NO: 1717864 - RNA, 19 nt, Homo sapiens
  misc_RNA (1)...(19): siRNA sense strand
ugauagacuuuguuguuac

SEQ ID NO: 1717865 - RNA, 19 nt, Homo sapiens
  misc_RNA (1)...(19): siRNA sense strand
uuuaagggccaaacagaaa

SEQ ID NO: 1717866 - RNA, 19 nt, Homo sapiens
  misc_RNA (1)...(19): siRNA sense strand
gggccaaacagaaauucaa

SEQ ID NO: 1717867 - RNA, 19 nt, Homo sapiens
  misc_RNA (1)...(19): siRNA sense strand
ggaaagauuacguccucau

SEQ ID NO: 1717868 - RNA, 19 nt, Homo sapiens
  misc_RNA (1)...(19): siRNA sense strand
cacaguccaucaaauacau

SEQ ID NO: 1717869 - RNA, 19 nt, Homo sapiens
  misc_RNA (1)...(19): siRNA sense strand
gcccuucugcuuuauguug

SEQ ID NO: 1717870 - RNA, 19 nt, Homo sapiens
  misc_RNA (1)...(19): siRNA sense strand
aagauuacguccucauagg

SEQ ID NO: 1717871 - RNA, 19 nt, Homo sapiens
  misc_RNA (1)...(19): siRNA sense strand
uaagggccaaacagaaauu

SEQ ID NO: 1717872 - RNA, 19 nt, Homo sapiens
  misc_RNA (1)...(19): siRNA sense strand
ggcgauuacucuucuucug

SEQ ID NO: 1717873 - RNA, 19 nt, Homo sapiens
  misc_RNA (1)...(19): siRNA sense strand
uaagaagaaagcaguacug

SEQ ID NO: 1717874 - RNA, 19 nt, Homo sapiens
  misc_RNA (1)...(19): siRNA sense strand
uggauugcuucuaucuuug

SEQ ID NO: 1717875 - RNA, 19 nt, Homo sapiens
  misc_RNA (1)...(19): siRNA sense strand
uuacucuucuucugcacaa

SEQ ID NO: 1717876 - RNA, 19 nt, Homo sapiens
  misc_RNA (1)...(19): siRNA sense strand
ccuacacaguccaucaaau

SEQ ID NO: 1717877 - RNA, 19 nt, Homo sapiens
  misc_RNA (1)...(19): siRNA sense strand
uagcuacuggucacaauau

SEQ ID NO: 1717878 - RNA, 19 nt, Homo sapiens
  misc_RNA (1)...(19): siRNA sense strand
aaagauuacguccucauag

SEQ ID NO: 1717879 - RNA, 19 nt, Homo sapiens
  misc_RNA (1)...(19): siRNA sense strand
ggagaccagccuacacagu

SEQ ID NO: 1717880 - RNA, 19 nt, Homo sapiens
  misc_RNA (1)...(19): siRNA sense strand
cgaguggauugcuucuauc

SEQ ID NO: 1717881 - RNA, 19 nt, Homo sapiens
  misc_RNA (1)...(19): siRNA sense strand
aauagcuacuggucacaau

SEQ ID NO: 1717882 - RNA, 19 nt, Homo sapiens
  misc_RNA (1)...(19): siRNA sense strand
uuacagcuacuuuugguua

SEQ ID NO: 1717883 - RNA, 19 nt, Homo sapiens
  misc_RNA (1)...(19): siRNA sense strand
cagguugaaugaggcauca

SEQ ID NO: 1717884 - RNA, 19 nt, Homo sapiens
  misc_RNA (1)...(19): siRNA sense strand
aggaaaugcuugguuugug

SEQ ID NO: 1717885 - RNA, 19 nt, Homo sapiens
  misc_RNA (1)...(19): siRNA sense strand
gaaagcaguacuguguuac

SEQ ID NO: 1717886 - RNA, 19 nt, Homo sapiens
  misc_RNA (1)...(19): siRNA sense strand
cugcauugcugcccuucug

SEQ ID NO: 1717887 - RNA, 19 nt, Homo sapiens
  misc_RNA (1)...(19): siRNA sense strand
caguaugggaucccuaaau

SEQ ID NO: 1717888 - RNA, 19 nt, Homo sapiens
  misc_RNA (1)...(19): siRNA sense strand
gcuuccagaucaaccucaa

SEQ ID NO: 1717889 - RNA, 19 nt, Homo sapiens
  misc_RNA (1)...(19): siRNA sense strand
ugggaucccuaaauguauc

SEQ ID NO: 1717890 - RNA, 19 nt, Homo sapiens
  misc_RNA (1)...(19): siRNA sense strand
guaagaagaaagcaguacu

SEQ ID NO: 1717891 - RNA, 19 nt, Homo sapiens
  misc_RNA (1)...(19): siRNA sense strand
cuggauagucguaaacuuc

SEQ ID NO: 1717892 - RNA, 19 nt, Homo sapiens
  misc_RNA (1)...(19): siRNA sense strand
uguuaccuuugcagucuuu

SEQ ID NO: 1717893 - RNA, 19 nt, Homo sapiens
  misc_RNA (1)...(19): siRNA sense strand
guaugggaucccuaaaugu

SEQ ID NO: 1717894 - RNA, 19 nt, Homo sapiens
  misc_RNA (1)...(19): siRNA sense strand
ggacaucaauauucuucua

SEQ ID NO: 1717895 - RNA, 19 nt, Homo sapiens
  misc_RNA (1)...(19): siRNA sense strand
gccaggacaucuccaguua

SEQ ID NO: 1717896 - RNA, 19 nt, Homo sapiens
  misc_RNA (1)...(19): siRNA sense strand
gaugaugacuugguggaua

SEQ ID NO: 1717897 - RNA, 19 nt, Homo sapiens
  misc_RNA (1)...(19): siRNA sense strand
cugauugccuguaauguua

SEQ ID NO: 1717898 - RNA, 19 nt, Homo sapiens
  misc_RNA (1)...(19): siRNA sense strand
gcagguaugaccaguauaa

SEQ ID NO: 1717899 - RNA, 19 nt, Homo sapiens
  misc_RNA (1)...(19): siRNA sense strand
gcacagccauccaugaagu

SEQ ID NO: 1717900 - RNA, 19 nt, Homo sapiens
  misc_RNA (1)...(19): siRNA sense strand
ggaaaugccucaaguacac

SEQ ID NO: 1717901 - RNA, 19 nt, Homo sapiens
  misc_RNA (1)...(19): siRNA sense strand
gaagugaggaugaaucaga

SEQ ID NO: 1717902 - RNA, 19 nt, Homo sapiens
  misc_RNA (1)...(19): siRNA sense strand
cagcauucaugaagaagua

SEQ ID NO: 1717903 - RNA, 19 nt, Homo sapiens
  misc_RNA (1)...(19): siRNA sense strand
gaauauggccuuucugucu

SEQ ID NO: 1717904 - RNA, 19 nt, Homo sapiens
  misc_RNA (1)...(19): siRNA sense strand
uagccaagaucaagaaguu

SEQ ID NO: 1717905 - RNA, 19 nt, Homo sapiens
  misc_RNA (1)...(19): siRNA sense strand
ugagcaagaugcaggauga

SEQ ID NO: 1717906 - RNA, 19 nt, Homo sapiens
  misc_RNA (1)...(19): siRNA sense strand
ccaccuacauugcagaaga

SEQ ID NO: 1717907 - RNA, 19 nt, Homo sapiens
  misc_RNA (1)...(19): siRNA sense strand
gaagcgaagugaggaugaa

SEQ ID NO: 1717908 - RNA, 19 nt, Homo sapiens
  misc_RNA (1)...(19): siRNA sense strand
ucacugcugucacgauuug

SEQ ID NO: 1717909 - RNA, 19 nt, Homo sapiens
  misc_RNA (1)...(19): siRNA sense strand
agaggaagcuguggaguug

SEQ ID NO: 1717910 - RNA, 19 nt, Homo sapiens
  misc_RNA (1)...(19): siRNA sense strand
ggagggcauugucacuaaa

SEQ ID NO: 1717911 - RNA, 19 nt, Homo sapiens
  misc_RNA (1)...(19): siRNA sense strand
gguuugcauugaugaauuu

SEQ ID NO: 1717912 - RNA, 19 nt, Homo sapiens
  misc_RNA (1)...(19): siRNA sense strand
gagcagaagaggaagagaa

SEQ ID NO: 1717913 - RNA, 19 nt, Homo sapiens
  misc_RNA (1)...(19): siRNA sense strand
gaucaagaaguucaguaaa

SEQ ID NO: 1717914 - RNA, 19 nt, Homo sapiens
  misc_RNA (1)...(19): siRNA sense strand
gugcagcauucaugaagaa

SEQ ID NO: 1717915 - RNA, 19 nt, Homo sapiens
  misc_RNA (1)...(19): siRNA sense strand
gauggugagugcagcauuc

SEQ ID NO: 1717916 - RNA, 19 nt, Homo sapiens
  misc_RNA (1)...(19): siRNA sense strand
cacagaugaucccaacuuu

SEQ ID NO: 1717917 - RNA, 19 nt, Homo sapiens
  misc_RNA (1)...(19): siRNA sense strand
caaguacacacuccaaaga

SEQ ID NO: 1717918 - RNA, 19 nt, Homo sapiens
  misc_RNA (1)...(19): siRNA sense strand
ggaagaccagggaauuuau

SEQ ID NO: 1717919 - RNA, 19 nt, Homo sapiens
  misc_RNA (1)...(19): siRNA sense strand
gagauuaccuggacuuccu

SEQ ID NO: 1717920 - RNA, 19 nt, Homo sapiens
  misc_RNA (1)...(19): siRNA sense strand
acacccagauuuaugagaa

SEQ ID NO: 1717921 - RNA, 19 nt, Homo sapiens
  misc_RNA (1)...(19): siRNA sense strand
gaggaagaccagggaauuu

SEQ ID NO: 1717922 - RNA, 19 nt, Homo sapiens
  misc_RNA (1)...(19): siRNA sense strand
agaaggagaagaaacguaa

SEQ ID NO: 1717923 - RNA, 19 nt, Homo sapiens
  misc_RNA (1)...(19): siRNA sense strand
caggacaucuccaguuaca

SEQ ID NO: 1717924 - RNA, 19 nt, Homo sapiens
  misc_RNA (1)...(19): siRNA sense strand
gcugaucagugacaaccaa

SEQ ID NO: 1717925 - RNA, 19 nt, Homo sapiens
  misc_RNA (1)...(19): siRNA sense strand
gaccaaggaaucccagaaa

SEQ ID NO: 1717926 - RNA, 19 nt, Homo sapiens
  misc_RNA (1)...(19): siRNA sense strand
cagcaggacacccagauuu

SEQ ID NO: 1717927 - RNA, 19 nt, Homo sapiens
  misc_RNA (1)...(19): siRNA sense strand
cagaugaucccaacuuuag

SEQ ID NO: 1717928 - RNA, 19 nt, Homo sapiens
  misc_RNA (1)...(19): siRNA sense strand
aauauggccuuucugucua

SEQ ID NO: 1717929 - RNA, 19 nt, Homo sapiens
  misc_RNA (1)...(19): siRNA sense strand
gaccauagagcgacguuau

SEQ ID NO: 1717930 - RNA, 19 nt, Homo sapiens
  misc_RNA (1)...(19): siRNA sense strand
cggcagguaugaccaguau

SEQ ID NO: 1717931 - RNA, 19 nt, Homo sapiens
  misc_RNA (1)...(19): siRNA sense strand
cuaaccggcuucugaacaa

SEQ ID NO: 1717932 - RNA, 19 nt, Homo sapiens
  misc_RNA (1)...(19): siRNA sense strand
gcaagaugcaggaugacaa

SEQ ID NO: 1717933 - RNA, 19 nt, Homo sapiens
  misc_RNA (1)...(19): siRNA sense strand
gcaugaaucgccucacaga

SEQ ID NO: 1717934 - RNA, 19 nt, Homo sapiens
  misc_RNA (1)...(19): siRNA sense strand
aaaguggaguugagugaau

SEQ ID NO: 1717935 - RNA, 19 nt, Homo sapiens
  misc_RNA (1)...(19): siRNA sense strand
aaucagagacagaagauga

SEQ ID NO: 1717936 - RNA, 19 nt, Homo sapiens
  misc_RNA (1)...(19): siRNA sense strand
gagaaggagaagaaacgua

SEQ ID NO: 1717937 - RNA, 19 nt, Homo sapiens
  misc_RNA (1)...(19): siRNA sense strand
ugagaagcaugacaaccuu

SEQ ID NO: 1717938 - RNA, 19 nt, Homo sapiens
  misc_RNA (1)...(19): siRNA sense strand
gaauuuaucagagcaaagu

SEQ ID NO: 1717939 - RNA, 19 nt, Homo sapiens
  misc_RNA (1)...(19): siRNA sense strand
ccacagaugaucccaacuu

SEQ ID NO: 1717940 - RNA, 19 nt, Homo sapiens
  misc_RNA (1)...(19): siRNA sense strand
uggagggcauugucacuaa

SEQ ID NO: 1717941 - RNA, 19 nt, Homo sapiens
  misc_RNA (1)...(19): siRNA sense strand
gagcgacguuauucugauc

SEQ ID NO: 1717942 - RNA, 19 nt, Homo sapiens
  misc_RNA (1)...(19): siRNA sense strand
gagcccuucucuucaguug

SEQ ID NO: 1717943 - RNA, 19 nt, Homo sapiens
  misc_RNA (1)...(19): siRNA sense strand
gaaaguggaguugagugaa

SEQ ID NO: 1717944 - RNA, 19 nt, Homo sapiens
  misc_RNA (1)...(19): siRNA sense strand
caaggaaucccagaaagug

SEQ ID NO: 1717945 - RNA, 19 nt, Homo sapiens
  misc_RNA (1)...(19): siRNA sense strand
gaccagggaauuuaucaga

SEQ ID NO: 1717946 - RNA, 19 nt, Homo sapiens
  misc_RNA (1)...(19): siRNA sense strand
ggagucggccaccuacauu

SEQ ID NO: 1717947 - RNA, 19 nt, Homo sapiens
  misc_RNA (1)...(19): siRNA sense strand
gcuaugcccuuggguagug

SEQ ID NO: 1717948 - RNA, 19 nt, Homo sapiens
  misc_RNA (1)...(19): siRNA sense strand
gaucucagaccauguccuu

SEQ ID NO: 1717949 - RNA, 19 nt, Homo sapiens
  misc_RNA (1)...(19): siRNA sense strand
cgauuugacuugcucuuca

SEQ ID NO: 1717950 - RNA, 19 nt, Homo sapiens
  misc_RNA (1)...(19): siRNA sense strand
gcaggacacccagauuuau

SEQ ID NO: 1717951 - RNA, 19 nt, Homo sapiens
  misc_RNA (1)...(19): siRNA sense strand
ugaaucgccucacagaauc

SEQ ID NO: 1717952 - RNA, 19 nt, Homo sapiens
  misc_RNA (1)...(19): siRNA sense strand
gggaggcucagagagauua

SEQ ID NO: 1717953 - RNA, 19 nt, Homo sapiens
  misc_RNA (1)...(19): siRNA sense strand
cuacuaagaagaccauaga

SEQ ID NO: 1717954 - RNA, 19 nt, Homo sapiens
  misc_RNA (1)...(19): siRNA sense strand
ggcaucaucuuccucaucu

SEQ ID NO: 1717955 - RNA, 19 nt, Homo sapiens
  misc_RNA (1)...(19): siRNA sense strand
gggaauuuaucagagcaaa

SEQ ID NO: 1717956 - RNA, 19 nt, Homo sapiens
  misc_RNA (1)...(19): siRNA sense strand
cuacauugcagaagaguau

SEQ ID NO: 1717957 - RNA, 19 nt, Homo sapiens
  misc_RNA (1)...(19): siRNA sense strand
uaaauguucucuaguucgu

SEQ ID NO: 1717958 - RNA, 19 nt, Homo sapiens
  misc_RNA (1)...(19): siRNA sense strand
ccagccagaugccaaagau

SEQ ID NO: 1717959 - RNA, 19 nt, Homo sapiens
  misc_RNA (1)...(19): siRNA sense strand
guaugaggaguucuacgua

SEQ ID NO: 1717960 - RNA, 19 nt, Homo sapiens
  misc_RNA (1)...(19): siRNA sense strand
acagaugaucccaacuuua

SEQ ID NO: 1717961 - RNA, 19 nt, Homo sapiens
  misc_RNA (1)...(19): siRNA sense strand
ccaaggaugaggagaacaa

SEQ ID NO: 1717962 - RNA, 19 nt, Homo sapiens
  misc_RNA (1)...(19): siRNA sense strand
aggaagaccagggaauuua

SEQ ID NO: 1717963 - RNA, 19 nt, Homo sapiens
  misc_RNA (1)...(19): siRNA sense strand
cuaccuaugccaagcagua

SEQ ID NO: 1717964 - RNA, 19 nt, Homo sapiens
  misc_RNA (1)...(19): siRNA sense strand
caucaucuuccucaucuga

SEQ ID NO: 1717965 - RNA, 19 nt, Homo sapiens
  misc_RNA (1)...(19): siRNA sense strand
ccaaagauggggauucaua

SEQ ID NO: 1717966 - RNA, 19 nt, Homo sapiens
  misc_RNA (1)...(19): siRNA sense strand
gaagaccagggaauuuauc

SEQ ID NO: 1717967 - RNA, 19 nt, Homo sapiens
  misc_RNA (1)...(19): siRNA sense strand
caaccaauaccggcugauu

SEQ ID NO: 1717968 - RNA, 19 nt, Homo sapiens
  misc_RNA (1)...(19): siRNA sense strand
ggagaucucagaccauguc

SEQ ID NO: 1717969 - RNA, 19 nt, Homo sapiens
  misc_RNA (1)...(19): siRNA sense strand
cgaggaagaccagggaauu

SEQ ID NO: 1717970 - RNA, 19 nt, Homo sapiens
  misc_RNA (1)...(19): siRNA sense strand
uuaagcagaugagcaagga

SEQ ID NO: 1717971 - RNA, 19 nt, Homo sapiens
  misc_RNA (1)...(19): siRNA sense strand
cauucuggaugaugacuug

SEQ ID NO: 1717972 - RNA, 19 nt, Homo sapiens
  misc_RNA (1)...(19): siRNA sense strand
uucgggagcugaucaguga

SEQ ID NO: 1717973 - RNA, 19 nt, Homo sapiens
  misc_RNA (1)...(19): siRNA sense strand
gagacagaauauggccuuu

SEQ ID NO: 1717974 - RNA, 19 nt, Homo sapiens
  misc_RNA (1)...(19): siRNA sense strand
ccuguaauguuaagcagau

SEQ ID NO: 1717975 - RNA, 19 nt, Homo sapiens
  misc_RNA (1)...(19): siRNA sense strand
caagaugcaggaugacaau

SEQ ID NO: 1717976 - RNA, 19 nt, Homo sapiens
  misc_RNA (1)...(19): siRNA sense strand
cagaagaggaagagaagga

SEQ ID NO: 1717977 - RNA, 19 nt, Homo sapiens
  misc_RNA (1)...(19): siRNA sense strand
ggaugaaucagagacagaa

SEQ ID NO: 1717978 - RNA, 19 nt, Homo sapiens
  misc_RNA (1)...(19): siRNA sense strand
gcgaagugaggaugaauca

SEQ ID NO: 1717979 - RNA, 19 nt, Homo sapiens
  misc_RNA (1)...(19): siRNA sense strand
ggagaagaaacguaagaag

SEQ ID NO: 1717980 - RNA, 19 nt, Homo sapiens
  misc_RNA (1)...(19): siRNA sense strand
gaucagugacaaccaauac

SEQ ID NO: 1717981 - RNA, 19 nt, Homo sapiens
  misc_RNA (1)...(19): siRNA sense strand
gaacgagaccuagaaaaug

SEQ ID NO: 1717982 - RNA, 19 nt, Homo sapiens
  misc_RNA (1)...(19): siRNA sense strand
ggaacgagaccuagaaaau

SEQ ID NO: 1717983 - RNA, 19 nt, Homo sapiens
  misc_RNA (1)...(19): siRNA sense strand
gucacuaaauguucucuag

SEQ ID NO: 1717984 - RNA, 19 nt, Homo sapiens
  misc_RNA (1)...(19): siRNA sense strand
cuacaugggaccaagaaga

SEQ ID NO: 1717985 - RNA, 19 nt, Homo sapiens
  misc_RNA (1)...(19): siRNA sense strand
gggcuaaccggcuucugaa

SEQ ID NO: 1717986 - RNA, 19 nt, Homo sapiens
  misc_RNA (1)...(19): siRNA sense strand
aaugcccgcugcaguguuu

SEQ ID NO: 1717987 - RNA, 19 nt, Homo sapiens
  misc_RNA (1)...(19): siRNA sense strand
augaugacuugguggauaa

SEQ ID NO: 1717988 - RNA, 19 nt, Homo sapiens
  misc_RNA (1)...(19): siRNA sense strand
uccaggagaugccggagaa

SEQ ID NO: 1717989 - RNA, 19 nt, Homo sapiens
  misc_RNA (1)...(19): siRNA sense strand
cagaggaagcuguggaguu

SEQ ID NO: 1717990 - RNA, 19 nt, Homo sapiens
  misc_RNA (1)...(19): siRNA sense strand
gcccuucucuucaguugag

SEQ ID NO: 1717991 - RNA, 19 nt, Homo sapiens
  misc_RNA (1)...(19): siRNA sense strand
ccaaggaaucccagaaagu

SEQ ID NO: 1717992 - RNA, 19 nt, Homo sapiens
  misc_RNA (1)...(19): siRNA sense strand
caaagacggcagacucaca

SEQ ID NO: 1717993 - RNA, 19 nt, Homo sapiens
  misc_RNA (1)...(19): siRNA sense strand
cggcaugaaucgccucaca

SEQ ID NO: 1717994 - RNA, 19 nt, Homo sapiens
  misc_RNA (1)...(19): siRNA sense strand
agaauuagcugaagcauug

SEQ ID NO: 1717995 - RNA, 19 nt, Homo sapiens
  misc_RNA (1)...(19): siRNA sense strand
acagacaacucaucucuua

SEQ ID NO: 1717996 - RNA, 19 nt, Homo sapiens
  misc_RNA (1)...(19): siRNA sense strand
uaacaaaguugaagccauu

SEQ ID NO: 1717997 - RNA, 19 nt, Homo sapiens
  misc_RNA (1)...(19): siRNA sense strand
gaacaucagauucaaguaa

SEQ ID NO: 1717998 - RNA, 19 nt, Homo sapiens
  misc_RNA (1)...(19): siRNA sense strand
ggacauaucuauucuuacu

SEQ ID NO: 1717999 - RNA, 19 nt, Homo sapiens
  misc_RNA (1)...(19): siRNA sense strand
guggacauaucuauucuua

SEQ ID NO: 1718000 - RNA, 19 nt, Homo sapiens
  misc_RNA (1)...(19): siRNA sense strand
gauguuaguucaccacuga

SEQ ID NO: 1718001 - RNA, 19 nt, Homo sapiens
  misc_RNA (1)...(19): siRNA sense strand
caagaucgguauugcauga

SEQ ID NO: 1718002 - RNA, 19 nt, Homo sapiens
  misc_RNA (1)...(19): siRNA sense strand
gaaagaagaauuagcugaa

SEQ ID NO: 1718003 - RNA, 19 nt, Homo sapiens
  misc_RNA (1)...(19): siRNA sense strand
gggaacagauguaaaugug

SEQ ID NO: 1718004 - RNA, 19 nt, Homo sapiens
  misc_RNA (1)...(19): siRNA sense strand
ccagcugccucauacuuua

SEQ ID NO: 1718005 - RNA, 19 nt, Homo sapiens
  misc_RNA (1)...(19): siRNA sense strand
ccaggaaaccagacauuua

SEQ ID NO: 1718006 - RNA, 19 nt, Homo sapiens
  misc_RNA (1)...(19): siRNA sense strand
caaaugcauucuucagcua

SEQ ID NO: 1718007 - RNA, 19 nt, Homo sapiens
  misc_RNA (1)...(19): siRNA sense strand
gugaacacaucaaaucauu

SEQ ID NO: 1718008 - RNA, 19 nt, Homo sapiens
  misc_RNA (1)...(19): siRNA sense strand
ccucuugacuuugauguua

SEQ ID NO: 1718009 - RNA, 19 nt, Homo sapiens
  misc_RNA (1)...(19): siRNA sense strand
acaaugaucucguugacaa

SEQ ID NO: 1718010 - RNA, 19 nt, Homo sapiens
  misc_RNA (1)...(19): siRNA sense strand
gaaaguacaagaucgguau

SEQ ID NO: 1718011 - RNA, 19 nt, Homo sapiens
  misc_RNA (1)...(19): siRNA sense strand
ugaagaagcagaacagaaa

SEQ ID NO: 1718012 - RNA, 19 nt, Homo sapiens
  misc_RNA (1)...(19): siRNA sense strand
gcauugaagacuaagaaua

SEQ ID NO: 1718013 - RNA, 19 nt, Homo sapiens
  misc_RNA (1)...(19): siRNA sense strand
ggaaaccagacauuuauga

SEQ ID NO: 1718014 - RNA, 19 nt, Homo sapiens
  misc_RNA (1)...(19): siRNA sense strand
caagaugaaugaaaguaca

SEQ ID NO: 1718015 - RNA, 19 nt, Homo sapiens
  misc_RNA (1)...(19): siRNA sense strand
gggacaaucugacauagca

SEQ ID NO: 1718016 - RNA, 19 nt, Homo sapiens
  misc_RNA (1)...(19): siRNA sense strand
agagauuucuucagcguuu

SEQ ID NO: 1718017 - RNA, 19 nt, Homo sapiens
  misc_RNA (1)...(19): siRNA sense strand
agagaaacguguggaauug

SEQ ID NO: 1718018 - RNA, 19 nt, Homo sapiens
  misc_RNA (1)...(19): siRNA sense strand
ugugaagucugucuacaaa

SEQ ID NO: 1718019 - RNA, 19 nt, Homo sapiens
  misc_RNA (1)...(19): siRNA sense strand
gcauggcacucauccacaa

SEQ ID NO: 1718020 - RNA, 19 nt, Homo sapiens
  misc_RNA (1)...(19): siRNA sense strand
ugaguaaugugaagucugu

SEQ ID NO: 1718021 - RNA, 19 nt, Homo sapiens
  misc_RNA (1)...(19): siRNA sense strand
gaucaucugucagcucaau

SEQ ID NO: 1718022 - RNA, 19 nt, Homo sapiens
  misc_RNA (1)...(19): siRNA sense strand
agaagcccaugcuaaagua

SEQ ID NO: 1718023 - RNA, 19 nt, Homo sapiens
  misc_RNA (1)...(19): siRNA sense strand
gaugauuuccugacaguga

SEQ ID NO: 1718024 - RNA, 19 nt, Homo sapiens
  misc_RNA (1)...(19): siRNA sense strand
gcaaguggaucugcagucu

SEQ ID NO: 1718025 - RNA, 19 nt, Homo sapiens
  misc_RNA (1)...(19): siRNA sense strand
gggaaugguuucugcauac

SEQ ID NO: 1718026 - RNA, 19 nt, Homo sapiens
  misc_RNA (1)...(19): siRNA sense strand
gaagcagaacagaaacuuu

SEQ ID NO: 1718027 - RNA, 19 nt, Homo sapiens
  misc_RNA (1)...(19): siRNA sense strand
gcauggccuugaugaagaa

SEQ ID NO: 1718028 - RNA, 19 nt, Homo sapiens
  misc_RNA (1)...(19): siRNA sense strand
gcagacaccacacacaguu

SEQ ID NO: 1718029 - RNA, 19 nt, Homo sapiens
  misc_RNA (1)...(19): siRNA sense strand
ggagauuaauguuauuggu

SEQ ID NO: 1718030 - RNA, 19 nt, Homo sapiens
  misc_RNA (1)...(19): siRNA sense strand
uggcauagauauuacugaa

SEQ ID NO: 1718031 - RNA, 19 nt, Homo sapiens
  misc_RNA (1)...(19): siRNA sense strand
gaagauauaguggcaagug

SEQ ID NO: 1718032 - RNA, 19 nt, Homo sapiens
  misc_RNA (1)...(19): siRNA sense strand
ggcagcagcagaagauaua

SEQ ID NO: 1718033 - RNA, 19 nt, Homo sapiens
  misc_RNA (1)...(19): siRNA sense strand
cagagaaacguguggaauu

SEQ ID NO: 1718034 - RNA, 19 nt, Homo sapiens
  misc_RNA (1)...(19): siRNA sense strand
caucgaggcuuauguagac

SEQ ID NO: 1718035 - RNA, 19 nt, Homo sapiens
  misc_RNA (1)...(19): siRNA sense strand
ugaaagacccugagacaag

SEQ ID NO: 1718036 - RNA, 19 nt, Homo sapiens
  misc_RNA (1)...(19): siRNA sense strand
ggacauggcggugcuaaag

SEQ ID NO: 1718037 - RNA, 19 nt, Homo sapiens
  misc_RNA (1)...(19): siRNA sense strand
ggacuggcaucguggacau

SEQ ID NO: 1718038 - RNA, 19 nt, Homo sapiens
  misc_RNA (1)...(19): siRNA sense strand
gaaaauguuggcauagaua

SEQ ID NO: 1718039 - RNA, 19 nt, Homo sapiens
  misc_RNA (1)...(19): siRNA sense strand
gaagggcuccagugcaguu

SEQ ID NO: 1718040 - RNA, 19 nt, Homo sapiens
  misc_RNA (1)...(19): siRNA sense strand
ugacuuugauguuaguuca

SEQ ID NO: 1718041 - RNA, 19 nt, Homo sapiens
  misc_RNA (1)...(19): siRNA sense strand
caggaaaccagacauuuau

SEQ ID NO: 1718042 - RNA, 19 nt, Homo sapiens
  misc_RNA (1)...(19): siRNA sense strand
ggacagagugaauguuaca

SEQ ID NO: 1718043 - RNA, 19 nt, Homo sapiens
  misc_RNA (1)...(19): siRNA sense strand
aaguggaucugcagucuga

SEQ ID NO: 1718044 - RNA, 19 nt, Homo sapiens
  misc_RNA (1)...(19): siRNA sense strand
caaucugacauagcaauua

SEQ ID NO: 1718045 - RNA, 19 nt, Homo sapiens
  misc_RNA (1)...(19): siRNA sense strand
caaaacaccagcucuaaaa

SEQ ID NO: 1718046 - RNA, 19 nt, Homo sapiens
  misc_RNA (1)...(19): siRNA sense strand
guaaacggaaagaagaauu

SEQ ID NO: 1718047 - RNA, 19 nt, Homo sapiens
  misc_RNA (1)...(19): siRNA sense strand
uaagaccauucaacgcauu

SEQ ID NO: 1718048 - RNA, 19 nt, Homo sapiens
  misc_RNA (1)...(19): siRNA sense strand
agaagaaaauguuggcaua

SEQ ID NO: 1718049 - RNA, 19 nt, Homo sapiens
  misc_RNA (1)...(19): siRNA sense strand
cgacagcuagagucauuaa

SEQ ID NO: 1718050 - RNA, 19 nt, Homo sapiens
  misc_RNA (1)...(19): siRNA sense strand
ugaggaagauuggcaguag

SEQ ID NO: 1718051 - RNA, 19 nt, Homo sapiens
  misc_RNA (1)...(19): siRNA sense strand
gacaagaugaaugaaagua

SEQ ID NO: 1718052 - RNA, 19 nt, Homo sapiens
  misc_RNA (1)...(19): siRNA sense strand
ggaauugcuuaaggaacuu

SEQ ID NO: 1718053 - RNA, 19 nt, Homo sapiens
  misc_RNA (1)...(19): siRNA sense strand
gaaaacggaugcaaaacgu

SEQ ID NO: 1718054 - RNA, 19 nt, Homo sapiens
  misc_RNA (1)...(19): siRNA sense strand
guagacaugaggaagauug

SEQ ID NO: 1718055 - RNA, 19 nt, Homo sapiens
  misc_RNA (1)...(19): siRNA sense strand
gacaacggcaucugcugua

SEQ ID NO: 1718056 - RNA, 19 nt, Homo sapiens
  misc_RNA (1)...(19): siRNA sense strand
guacagacaacucaucucu

SEQ ID NO: 1718057 - RNA, 19 nt, Homo sapiens
  misc_RNA (1)...(19): siRNA sense strand
gcaaauuucgggcugagau

SEQ ID NO: 1718058 - RNA, 19 nt, Homo sapiens
  misc_RNA (1)...(19): siRNA sense strand
gaauguuacaggcaucuau

SEQ ID NO: 1718059 - RNA, 19 nt, Homo sapiens
  misc_RNA (1)...(19): siRNA sense strand
ccaagagugaguaauguga

SEQ ID NO: 1718060 - RNA, 19 nt, Homo sapiens
  misc_RNA (1)...(19): siRNA sense strand
gcuaaaguaagauugucua

SEQ ID NO: 1718061 - RNA, 19 nt, Homo sapiens
  misc_RNA (1)...(19): siRNA sense strand
gcugccucauacuuuauua

SEQ ID NO: 1718062 - RNA, 19 nt, Homo sapiens
  misc_RNA (1)...(19): siRNA sense strand
agauauuacugaaccucua

SEQ ID NO: 1718063 - RNA, 19 nt, Homo sapiens
  misc_RNA (1)...(19): siRNA sense strand
ccuggcagaugaugauuuc

SEQ ID NO: 1718064 - RNA, 19 nt, Homo sapiens
  misc_RNA (1)...(19): siRNA sense strand
gaaaccagacauuuaugag

SEQ ID NO: 1718065 - RNA, 19 nt, Homo sapiens
  misc_RNA (1)...(19): siRNA sense strand
aaacguguggaauugcuua

SEQ ID NO: 1718066 - RNA, 19 nt, Homo sapiens
  misc_RNA (1)...(19): siRNA sense strand
gaccagcucaucaccauca

SEQ ID NO: 1718067 - RNA, 19 nt, Homo sapiens
  misc_RNA (1)...(19): siRNA sense strand
uacugaaccucuauacaug

SEQ ID NO: 1718068 - RNA, 19 nt, Homo sapiens
  misc_RNA (1)...(19): siRNA sense strand
uuacugaaccucuauacau

SEQ ID NO: 1718069 - RNA, 19 nt, Homo sapiens
  misc_RNA (1)...(19): siRNA sense strand
gauauuacugaaccucuau

SEQ ID NO: 1718070 - RNA, 19 nt, Homo sapiens
  misc_RNA (1)...(19): siRNA sense strand
gagucucaguggaauccua

SEQ ID NO: 1718071 - RNA, 19 nt, Homo sapiens
  misc_RNA (1)...(19): siRNA sense strand
guaaugaaagacccugaga

SEQ ID NO: 1718072 - RNA, 19 nt, Homo sapiens
  misc_RNA (1)...(19): siRNA sense strand
cugcguacguaaugaaaga

SEQ ID NO: 1718073 - RNA, 19 nt, Homo sapiens
  misc_RNA (1)...(19): siRNA sense strand
ugucauucauuaucggaaa

SEQ ID NO: 1718074 - RNA, 19 nt, Homo sapiens
  misc_RNA (1)...(19): siRNA sense strand
gaauaugagaaaccugaau

SEQ ID NO: 1718075 - RNA, 19 nt, Homo sapiens
  misc_RNA (1)...(19): siRNA sense strand
aaagaagaauuagcugaag

SEQ ID NO: 1718076 - RNA, 19 nt, Homo sapiens
  misc_RNA (1)...(19): siRNA sense strand
cuucagcuaucccucuuga

SEQ ID NO: 1718077 - RNA, 19 nt, Homo sapiens
  misc_RNA (1)...(19): siRNA sense strand
ucgacaagaugaaugaaag

SEQ ID NO: 1718078 - RNA, 19 nt, Homo sapiens
  misc_RNA (1)...(19): siRNA sense strand
acaagcagaugaucaagcu

SEQ ID NO: 1718079 - RNA, 19 nt, Homo sapiens
  misc_RNA (1)...(19): siRNA sense strand
ccacaaccgcucccucuuc

SEQ ID NO: 1718080 - RNA, 19 nt, Homo sapiens
  misc_RNA (1)...(19): siRNA sense strand
gcaagugagcagucucuag

SEQ ID NO: 1718081 - RNA, 19 nt, Homo sapiens
  misc_RNA (1)...(19): siRNA sense strand
gcauuuaugaacaugaaga

SEQ ID NO: 1718082 - RNA, 19 nt, Homo sapiens
  misc_RNA (1)...(19): siRNA sense strand
uuaguucaccacugacaua

SEQ ID NO: 1718083 - RNA, 19 nt, Homo sapiens
  misc_RNA (1)...(19): siRNA sense strand
aagauauaguggcaaguga

SEQ ID NO: 1718084 - RNA, 19 nt, Homo sapiens
  misc_RNA (1)...(19): siRNA sense strand
gaucaagcuucaggagucu

SEQ ID NO: 1718085 - RNA, 19 nt, Homo sapiens
  misc_RNA (1)...(19): siRNA sense strand
gcaaaacaccagcucuaaa

SEQ ID NO: 1718086 - RNA, 19 nt, Homo sapiens
  misc_RNA (1)...(19): siRNA sense strand
ugaagccauugauguggaa

SEQ ID NO: 1718087 - RNA, 19 nt, Homo sapiens
  misc_RNA (1)...(19): siRNA sense strand
ucucaucgaggcuuaugua

SEQ ID NO: 1718088 - RNA, 19 nt, Homo sapiens
  misc_RNA (1)...(19): siRNA sense strand
gcuggacccucaggacgaa

SEQ ID NO: 1718089 - RNA, 19 nt, Homo sapiens
  misc_RNA (1)...(19): siRNA sense strand
ugaaugaaaguacaagauc

SEQ ID NO: 1718090 - RNA, 19 nt, Homo sapiens
  misc_RNA (1)...(19): siRNA sense strand
gaugaguucgacaagauga

SEQ ID NO: 1718091 - RNA, 19 nt, Homo sapiens
  misc_RNA (1)...(19): siRNA sense strand
aaaccagacauuuaugaga

SEQ ID NO: 1718092 - RNA, 19 nt, Homo sapiens
  misc_RNA (1)...(19): siRNA sense strand
uggaauugcuuaaggaacu

SEQ ID NO: 1718093 - RNA, 19 nt, Homo sapiens
  misc_RNA (1)...(19): siRNA sense strand
caagagugaguaaugugaa

SEQ ID NO: 1718094 - RNA, 19 nt, Homo sapiens
  misc_RNA (1)...(19): siRNA sense strand
agaauuagcugaagcauug

SEQ ID NO: 1718095 - RNA, 19 nt, Homo sapiens
  misc_RNA (1)...(19): siRNA sense strand
acagacaacucaucucuua

SEQ ID NO: 1718096 - RNA, 19 nt, Homo sapiens
  misc_RNA (1)...(19): siRNA sense strand
uaacaaaguugaagccauu

SEQ ID NO: 1718097 - RNA, 19 nt, Homo sapiens
  misc_RNA (1)...(19): siRNA sense strand
gaacaucagauucaaguaa

SEQ ID NO: 1718098 - RNA, 19 nt, Homo sapiens
  misc_RNA (1)...(19): siRNA sense strand
ggacauaucuauucuuacu

SEQ ID NO: 1718099 - RNA, 19 nt, Homo sapiens
  misc_RNA (1)...(19): siRNA sense strand
guggacauaucuauucuua

SEQ ID NO: 1718100 - RNA, 19 nt, Homo sapiens
  misc_RNA (1)...(19): siRNA sense strand
gauguuaguucaccacuga

SEQ ID NO: 1718101 - RNA, 19 nt, Homo sapiens
  misc_RNA (1)...(19): siRNA sense strand
caagaucgguauugcauga

SEQ ID NO: 1718102 - RNA, 19 nt, Homo sapiens
  misc_RNA (1)...(19): siRNA sense strand
gaaagaagaauuagcugaa

SEQ ID NO: 1718103 - RNA, 19 nt, Homo sapiens
  misc_RNA (1)...(19): siRNA sense strand
gggaacagauguaaaugug

SEQ ID NO: 1718104 - RNA, 19 nt, Homo sapiens
  misc_RNA (1)...(19): siRNA sense strand
ccagcugccucauacuuua

SEQ ID NO: 1718105 - RNA, 19 nt, Homo sapiens
  misc_RNA (1)...(19): siRNA sense strand
ccaggaaaccagacauuua

SEQ ID NO: 1718106 - RNA, 19 nt, Homo sapiens
  misc_RNA (1)...(19): siRNA sense strand
caaaugcauucuucagcua

SEQ ID NO: 1718107 - RNA, 19 nt, Homo sapiens
  misc_RNA (1)...(19): siRNA sense strand
gugaacacaucaaaucauu

SEQ ID NO: 1718108 - RNA, 19 nt, Homo sapiens
  misc_RNA (1)...(19): siRNA sense strand
ccucuugacuuugauguua

SEQ ID NO: 1718109 - RNA, 19 nt, Homo sapiens
  misc_RNA (1)...(19): siRNA sense strand
acaaugaucucguugacaa

SEQ ID NO: 1718110 - RNA, 19 nt, Homo sapiens
  misc_RNA (1)...(19): siRNA sense strand
gaaaguacaagaucgguau

SEQ ID NO: 1718111 - RNA, 19 nt, Homo sapiens
  misc_RNA (1)...(19): siRNA sense strand
ugaagaagcagaacagaaa

SEQ ID NO: 1718112 - RNA, 19 nt, Homo sapiens
  misc_RNA (1)...(19): siRNA sense strand
gcauugaagacuaagaaua

SEQ ID NO: 1718113 - RNA, 19 nt, Homo sapiens
  misc_RNA (1)...(19): siRNA sense strand
ggaaaccagacauuuauga

SEQ ID NO: 1718114 - RNA, 19 nt, Homo sapiens
  misc_RNA (1)...(19): siRNA sense strand
caagaugaaugaaaguaca

SEQ ID NO: 1718115 - RNA, 19 nt, Homo sapiens
  misc_RNA (1)...(19): siRNA sense strand
gggacaaucugacauagca

SEQ ID NO: 1718116 - RNA, 19 nt, Homo sapiens
  misc_RNA (1)...(19): siRNA sense strand
agagauuucuucagcguuu

SEQ ID NO: 1718117 - RNA, 19 nt, Homo sapiens
  misc_RNA (1)...(19): siRNA sense strand
agagaaacguguggaauug

SEQ ID NO: 1718118 - RNA, 19 nt, Homo sapiens
  misc_RNA (1)...(19): siRNA sense strand
ugugaagucugucuacaaa

SEQ ID NO: 1718119 - RNA, 19 nt, Homo sapiens
  misc_RNA (1)...(19): siRNA sense strand
gcauggcacucauccacaa

SEQ ID NO: 1718120 - RNA, 19 nt, Homo sapiens
  misc_RNA (1)...(19): siRNA sense strand
ugaguaaugugaagucugu

SEQ ID NO: 1718121 - RNA, 19 nt, Homo sapiens
  misc_RNA (1)...(19): siRNA sense strand
gaucaucugucagcucaau

SEQ ID NO: 1718122 - RNA, 19 nt, Homo sapiens
  misc_RNA (1)...(19): siRNA sense strand
agaagcccaugcuaaagua

SEQ ID NO: 1718123 - RNA, 19 nt, Homo sapiens
  misc_RNA (1)...(19): siRNA sense strand
gaugauuuccugacaguga

SEQ ID NO: 1718124 - RNA, 19 nt, Homo sapiens
  misc_RNA (1)...(19): siRNA sense strand
gcaaguggaucugcagucu

SEQ ID NO: 1718125 - RNA, 19 nt, Homo sapiens
  misc_RNA (1)...(19): siRNA sense strand
gggaaugguuucugcauac

SEQ ID NO: 1718126 - RNA, 19 nt, Homo sapiens
  misc_RNA (1)...(19): siRNA sense strand
gaagcagaacagaaacuuu

SEQ ID NO: 1718127 - RNA, 19 nt, Homo sapiens
  misc_RNA (1)...(19): siRNA sense strand
gcauggccuugaugaagaa

SEQ ID NO: 1718128 - RNA, 19 nt, Homo sapiens
  misc_RNA (1)...(19): siRNA sense strand
gcagacaccacacacaguu

SEQ ID NO: 1718129 - RNA, 19 nt, Homo sapiens
  misc_RNA (1)...(19): siRNA sense strand
ggagauuaauguuauuggu

SEQ ID NO: 1718130 - RNA, 19 nt, Homo sapiens
  misc_RNA (1)...(19): siRNA sense strand
uggcauagauauuacugaa

SEQ ID NO: 1718131 - RNA, 19 nt, Homo sapiens
  misc_RNA (1)...(19): siRNA sense strand
gaagauauaguggcaagug

SEQ ID NO: 1718132 - RNA, 19 nt, Homo sapiens
  misc_RNA (1)...(19): siRNA sense strand
ggcagcagcagaagauaua

SEQ ID NO: 1718133 - RNA, 19 nt, Homo sapiens
  misc_RNA (1)...(19): siRNA sense strand
cagagaaacguguggaauu

SEQ ID NO: 1718134 - RNA, 19 nt, Homo sapiens
  misc_RNA (1)...(19): siRNA sense strand
caucgaggcuuauguagac

SEQ ID NO: 1718135 - RNA, 19 nt, Homo sapiens
  misc_RNA (1)...(19): siRNA sense strand
ugaaagacccugagacaag

SEQ ID NO: 1718136 - RNA, 19 nt, Homo sapiens
  misc_RNA (1)...(19): siRNA sense strand
ggacauggcggugcuaaag

SEQ ID NO: 1718137 - RNA, 19 nt, Homo sapiens
  misc_RNA (1)...(19): siRNA sense strand
ggacuggcaucguggacau

SEQ ID NO: 1718138 - RNA, 19 nt, Homo sapiens
  misc_RNA (1)...(19): siRNA sense strand
gaaaauguuggcauagaua

SEQ ID NO: 1718139 - RNA, 19 nt, Homo sapiens
  misc_RNA (1)...(19): siRNA sense strand
gaagggcuccagugcaguu

SEQ ID NO: 1718140 - RNA, 19 nt, Homo sapiens
  misc_RNA (1)...(19): siRNA sense strand
ugacuuugauguuaguuca

SEQ ID NO: 1718141 - RNA, 19 nt, Homo sapiens
  misc_RNA (1)...(19): siRNA sense strand
caggaaaccagacauuuau

SEQ ID NO: 1718142 - RNA, 19 nt, Homo sapiens
  misc_RNA (1)...(19): siRNA sense strand
ggacagagugaauguuaca

SEQ ID NO: 1718143 - RNA, 19 nt, Homo sapiens
  misc_RNA (1)...(19): siRNA sense strand
aaguggaucugcagucuga

SEQ ID NO: 1718144 - RNA, 19 nt, Homo sapiens
  misc_RNA (1)...(19): siRNA sense strand
caaucugacauagcaauua

SEQ ID NO: 1718145 - RNA, 19 nt, Homo sapiens
  misc_RNA (1)...(19): siRNA sense strand
caaaacaccagcucuaaaa

SEQ ID NO: 1718146 - RNA, 19 nt, Homo sapiens
  misc_RNA (1)...(19): siRNA sense strand
guaaacggaaagaagaauu

SEQ ID NO: 1718147 - RNA, 19 nt, Homo sapiens
  misc_RNA (1)...(19): siRNA sense strand
uaagaccauucaacgcauu

SEQ ID NO: 1718148 - RNA, 19 nt, Homo sapiens
  misc_RNA (1)...(19): siRNA sense strand
agaagaaaauguuggcaua

SEQ ID NO: 1718149 - RNA, 19 nt, Homo sapiens
  misc_RNA (1)...(19): siRNA sense strand
cgacagcuagagucauuaa

SEQ ID NO: 1718150 - RNA, 19 nt, Homo sapiens
  misc_RNA (1)...(19): siRNA sense strand
ugaggaagauuggcaguag

SEQ ID NO: 1718151 - RNA, 19 nt, Homo sapiens
  misc_RNA (1)...(19): siRNA sense strand
gacaagaugaaugaaagua

SEQ ID NO: 1718152 - RNA, 19 nt, Homo sapiens
  misc_RNA (1)...(19): siRNA sense strand
ggaauugcuuaaggaacuu

SEQ ID NO: 1718153 - RNA, 19 nt, Homo sapiens
  misc_RNA (1)...(19): siRNA sense strand
gaaaacggaugcaaaacgu

SEQ ID NO: 1718154 - RNA, 19 nt, Homo sapiens
  misc_RNA (1)...(19): siRNA sense strand
guagacaugaggaagauug

SEQ ID NO: 1718155 - RNA, 19 nt, Homo sapiens
  misc_RNA (1)...(19): siRNA sense strand
gacaacggcaucugcugua

SEQ ID NO: 1718156 - RNA, 19 nt, Homo sapiens
  misc_RNA (1)...(19): siRNA sense strand
guacagacaacucaucucu

SEQ ID NO: 1718157 - RNA, 19 nt, Homo sapiens
  misc_RNA (1)...(19): siRNA sense strand
gcaaauuucgggcugagau

SEQ ID NO: 1718158 - RNA, 19 nt, Homo sapiens
  misc_RNA (1)...(19): siRNA sense strand
gaauguuacaggcaucuau

SEQ ID NO: 1718159 - RNA, 19 nt, Homo sapiens
  misc_RNA (1)...(19): siRNA sense strand
ccaagagugaguaauguga

SEQ ID NO: 1718160 - RNA, 19 nt, Homo sapiens
  misc_RNA (1)...(19): siRNA sense strand
gcuaaaguaagauugucua

SEQ ID NO: 1718161 - RNA, 19 nt, Homo sapiens
  misc_RNA (1)...(19): siRNA sense strand
gcugccucauacuuuauua

SEQ ID NO: 1718162 - RNA, 19 nt, Homo sapiens
  misc_RNA (1)...(19): siRNA sense strand
agauauuacugaaccucua

SEQ ID NO: 1718163 - RNA, 19 nt, Homo sapiens
  misc_RNA (1)...(19): siRNA sense strand
ccuggcagaugaugauuuc

SEQ ID NO: 1718164 - RNA, 19 nt, Homo sapiens
  misc_RNA (1)...(19): siRNA sense strand
gaaaccagacauuuaugag

SEQ ID NO: 1718165 - RNA, 19 nt, Homo sapiens
  misc_RNA (1)...(19): siRNA sense strand
aaacguguggaauugcuua

SEQ ID NO: 1718166 - RNA, 19 nt, Homo sapiens
  misc_RNA (1)...(19): siRNA sense strand
gaccagcucaucaccauca

SEQ ID NO: 1718167 - RNA, 19 nt, Homo sapiens
  misc_RNA (1)...(19): siRNA sense strand
uacugaaccucuauacaug

SEQ ID NO: 1718168 - RNA, 19 nt, Homo sapiens
  misc_RNA (1)...(19): siRNA sense strand
uuacugaaccucuauacau

SEQ ID NO: 1718169 - RNA, 19 nt, Homo sapiens
  misc_RNA (1)...(19): siRNA sense strand
gauauuacugaaccucuau

SEQ ID NO: 1718170 - RNA, 19 nt, Homo sapiens
  misc_RNA (1)...(19): siRNA sense strand
gagucucaguggaauccua

SEQ ID NO: 1718171 - RNA, 19 nt, Homo sapiens
  misc_RNA (1)...(19): siRNA sense strand
guaaugaaagacccugaga

SEQ ID NO: 1718172 - RNA, 19 nt, Homo sapiens
  misc_RNA (1)...(19): siRNA sense strand
cugcguacguaaugaaaga

SEQ ID NO: 1718173 - RNA, 19 nt, Homo sapiens
  misc_RNA (1)...(19): siRNA sense strand
ugucauucauuaucggaaa

SEQ ID NO: 1718174 - RNA, 19 nt, Homo sapiens
  misc_RNA (1)...(19): siRNA sense strand
gaauaugagaaaccugaau

SEQ ID NO: 1718175 - RNA, 19 nt, Homo sapiens
  misc_RNA (1)...(19): siRNA sense strand
aaagaagaauuagcugaag

SEQ ID NO: 1718176 - RNA, 19 nt, Homo sapiens
  misc_RNA (1)...(19): siRNA sense strand
cuucagcuaucccucuuga

SEQ ID NO: 1718177 - RNA, 19 nt, Homo sapiens
  misc_RNA (1)...(19): siRNA sense strand
ucgacaagaugaaugaaag

SEQ ID NO: 1718178 - RNA, 19 nt, Homo sapiens
  misc_RNA (1)...(19): siRNA sense strand
acaagcagaugaucaagcu

SEQ ID NO: 1718179 - RNA, 19 nt, Homo sapiens
  misc_RNA (1)...(19): siRNA sense strand
ccacaaccgcucccucuuc

SEQ ID NO: 1718180 - RNA, 19 nt, Homo sapiens
  misc_RNA (1)...(19): siRNA sense strand
gcaagugagcagucucuag

SEQ ID NO: 1718181 - RNA, 19 nt, Homo sapiens
  misc_RNA (1)...(19): siRNA sense strand
gcauuuaugaacaugaaga

SEQ ID NO: 1718182 - RNA, 19 nt, Homo sapiens
  misc_RNA (1)...(19): siRNA sense strand
uuaguucaccacugacaua

SEQ ID NO: 1718183 - RNA, 19 nt, Homo sapiens
  misc_RNA (1)...(19): siRNA sense strand
aagauauaguggcaaguga

SEQ ID NO: 1718184 - RNA, 19 nt, Homo sapiens
  misc_RNA (1)...(19): siRNA sense strand
gaucaagcuucaggagucu

SEQ ID NO: 1718185 - RNA, 19 nt, Homo sapiens
  misc_RNA (1)...(19): siRNA sense strand
gcaaaacaccagcucuaaa

SEQ ID NO: 1718186 - RNA, 19 nt, Homo sapiens
  misc_RNA (1)...(19): siRNA sense strand
ugaagccauugauguggaa

SEQ ID NO: 1718187 - RNA, 19 nt, Homo sapiens
  misc_RNA (1)...(19): siRNA sense strand
ucucaucgaggcuuaugua

SEQ ID NO: 1718188 - RNA, 19 nt, Homo sapiens
  misc_RNA (1)...(19): siRNA sense strand
gcuggacccucaggacgaa

SEQ ID NO: 1718189 - RNA, 19 nt, Homo sapiens
  misc_RNA (1)...(19): siRNA sense strand
ugaaugaaaguacaagauc

SEQ ID NO: 1718190 - RNA, 19 nt, Homo sapiens
  misc_RNA (1)...(19): siRNA sense strand
gaugaguucgacaagauga

SEQ ID NO: 1718191 - RNA, 19 nt, Homo sapiens
  misc_RNA (1)...(19): siRNA sense strand
aaaccagacauuuaugaga

SEQ ID NO: 1718192 - RNA, 19 nt, Homo sapiens
  misc_RNA (1)...(19): siRNA sense strand
uggaauugcuuaaggaacu

SEQ ID NO: 1718193 - RNA, 19 nt, Homo sapiens
  misc_RNA (1)...(19): siRNA sense strand
caagagugaguaaugugaa

SEQ ID NO: 1718194 - RNA, 19 nt, Homo sapiens
  misc_RNA (1)...(19): siRNA sense strand
gccagaaccuuccuuauua

SEQ ID NO: 1718195 - RNA, 19 nt, Homo sapiens
  misc_RNA (1)...(19): siRNA sense strand
gaggaaagcugcaucuuau

SEQ ID NO: 1718196 - RNA, 19 nt, Homo sapiens
  misc_RNA (1)...(19): siRNA sense strand
gcaagugcauacagaaaua

SEQ ID NO: 1718197 - RNA, 19 nt, Homo sapiens
  misc_RNA (1)...(19): siRNA sense strand
gaaccuuccuuauuagaaa

SEQ ID NO: 1718198 - RNA, 19 nt, Homo sapiens
  misc_RNA (1)...(19): siRNA sense strand
gaacauuucugcagagaca

SEQ ID NO: 1718199 - RNA, 19 nt, Homo sapiens
  misc_RNA (1)...(19): siRNA sense strand
ggaggaaagcugcaucuua

SEQ ID NO: 1718200 - RNA, 19 nt, Homo sapiens
  misc_RNA (1)...(19): siRNA sense strand
gaaauaugcccacacauca

SEQ ID NO: 1718201 - RNA, 19 nt, Homo sapiens
  misc_RNA (1)...(19): siRNA sense strand
gugcauuauuucugucuua

SEQ ID NO: 1718202 - RNA, 19 nt, Homo sapiens
  misc_RNA (1)...(19): siRNA sense strand
aaacaucgcccaacacaga

SEQ ID NO: 1718203 - RNA, 19 nt, Homo sapiens
  misc_RNA (1)...(19): siRNA sense strand
gaagacuuaucccaacaga

SEQ ID NO: 1718204 - RNA, 19 nt, Homo sapiens
  misc_RNA (1)...(19): siRNA sense strand
ggacugcuccucucuuaga

SEQ ID NO: 1718205 - RNA, 19 nt, Homo sapiens
  misc_RNA (1)...(19): siRNA sense strand
ugacaaacaucgcccaaca

SEQ ID NO: 1718206 - RNA, 19 nt, Homo sapiens
  misc_RNA (1)...(19): siRNA sense strand
gaucuaacaguaagaaaug

SEQ ID NO: 1718207 - RNA, 19 nt, Homo sapiens
  misc_RNA (1)...(19): siRNA sense strand
ucaaauguccacaguguaa

SEQ ID NO: 1718208 - RNA, 19 nt, Homo sapiens
  misc_RNA (1)...(19): siRNA sense strand
ggccagaaccuuccuuauu

SEQ ID NO: 1718209 - RNA, 19 nt, Homo sapiens
  misc_RNA (1)...(19): siRNA sense strand
gacaacaccuuggaagaga

SEQ ID NO: 1718210 - RNA, 19 nt, Homo sapiens
  misc_RNA (1)...(19): siRNA sense strand
aaagggagcugcuaucaac

SEQ ID NO: 1718211 - RNA, 19 nt, Homo sapiens
  misc_RNA (1)...(19): siRNA sense strand
ggaaagcugcaucuuaugu

SEQ ID NO: 1718212 - RNA, 19 nt, Homo sapiens
  misc_RNA (1)...(19): siRNA sense strand
gaaggaaugccagagauug

SEQ ID NO: 1718213 - RNA, 19 nt, Homo sapiens
  misc_RNA (1)...(19): siRNA sense strand
caagaaaugcugagaaugg

SEQ ID NO: 1718214 - RNA, 19 nt, Homo sapiens
  misc_RNA (1)...(19): siRNA sense strand
cagcaaagcauuucuucaa

SEQ ID NO: 1718215 - RNA, 19 nt, Homo sapiens
  misc_RNA (1)...(19): siRNA sense strand
aggaagaucugcuuugugu

SEQ ID NO: 1718216 - RNA, 19 nt, Homo sapiens
  misc_RNA (1)...(19): siRNA sense strand
gaaagcugcaucuuauguu

SEQ ID NO: 1718217 - RNA, 19 nt, Homo sapiens
  misc_RNA (1)...(19): siRNA sense strand
cuacauaccugaaaacuca

SEQ ID NO: 1718218 - RNA, 19 nt, Homo sapiens
  misc_RNA (1)...(19): siRNA sense strand
ggguugccuuucacaauuu

SEQ ID NO: 1718219 - RNA, 19 nt, Homo sapiens
  misc_RNA (1)...(19): siRNA sense strand
acagaaauaugcccacaca

SEQ ID NO: 1718220 - RNA, 19 nt, Homo sapiens
  misc_RNA (1)...(19): siRNA sense strand
cuuauguugugaagacuua

SEQ ID NO: 1718221 - RNA, 19 nt, Homo sapiens
  misc_RNA (1)...(19): siRNA sense strand
caacacagaacauccaaca

SEQ ID NO: 1718222 - RNA, 19 nt, Homo sapiens
  misc_RNA (1)...(19): siRNA sense strand
acacagaacauccaacaug

SEQ ID NO: 1718223 - RNA, 19 nt, Homo sapiens
  misc_RNA (1)...(19): siRNA sense strand
cagcgugcauuauuucugu

SEQ ID NO: 1718224 - RNA, 19 nt, Homo sapiens
  misc_RNA (1)...(19): siRNA sense strand
ccagaaccuuccuuauuag

SEQ ID NO: 1718225 - RNA, 19 nt, Homo sapiens
  misc_RNA (1)...(19): siRNA sense strand
aaagcugcaucuuauguug

SEQ ID NO: 1718226 - RNA, 19 nt, Homo sapiens
  misc_RNA (1)...(19): siRNA sense strand
gaucagugccucagaaacu

SEQ ID NO: 1718227 - RNA, 19 nt, Homo sapiens
  misc_RNA (1)...(19): siRNA sense strand
guaagaaaugggaguguga

SEQ ID NO: 1718228 - RNA, 19 nt, Homo sapiens
  misc_RNA (1)...(19): siRNA sense strand
cuucaaauguccacagugu

SEQ ID NO: 1718229 - RNA, 19 nt, Homo sapiens
  misc_RNA (1)...(19): siRNA sense strand
gagaaaaucugccaagacu

SEQ ID NO: 1718230 - RNA, 19 nt, Homo sapiens
  misc_RNA (1)...(19): siRNA sense strand
gcagagacaacaccuugga

SEQ ID NO: 1718231 - RNA, 19 nt, Homo sapiens
  misc_RNA (1)...(19): siRNA sense strand
agggacugcuccucucuua

SEQ ID NO: 1718232 - RNA, 19 nt, Homo sapiens
  misc_RNA (1)...(19): siRNA sense strand
gagacaacaccuuggaaga

SEQ ID NO: 1718233 - RNA, 19 nt, Homo sapiens
  misc_RNA (1)...(19): siRNA sense strand
gacaauaucagcgugcauu

SEQ ID NO: 1718234 - RNA, 19 nt, Homo sapiens
  misc_RNA (1)...(19): siRNA sense strand
acacaucagcaaagcauuu

SEQ ID NO: 1718235 - RNA, 19 nt, Homo sapiens
  misc_RNA (1)...(19): siRNA sense strand
cuaggaagaucugcuuugu

SEQ ID NO: 1718236 - RNA, 19 nt, Homo sapiens
  misc_RNA (1)...(19): siRNA sense strand
agcaaagcauuucuucaaa

SEQ ID NO: 1718237 - RNA, 19 nt, Homo sapiens
  misc_RNA (1)...(19): siRNA sense strand
guccaagggugucagaauc

SEQ ID NO: 1718238 - RNA, 19 nt, Homo sapiens
  misc_RNA (1)...(19): siRNA sense strand
agacuuaucccaacagagu

SEQ ID NO: 1718239 - RNA, 19 nt, Homo sapiens
  misc_RNA (1)...(19): siRNA sense strand
gaaaaucugccaagacuag

SEQ ID NO: 1718240 - RNA, 19 nt, Homo sapiens
  misc_RNA (1)...(19): siRNA sense strand
agaaauaugcccacacauc

SEQ ID NO: 1718241 - RNA, 19 nt, Homo sapiens
  misc_RNA (1)...(19): siRNA sense strand
gugaagacuuaucccaaca

SEQ ID NO: 1718242 - RNA, 19 nt, Homo sapiens
  misc_RNA (1)...(19): siRNA sense strand
aaagaaggaaugccagaga

SEQ ID NO: 1718243 - RNA, 19 nt, Homo sapiens
  misc_RNA (1)...(19): siRNA sense strand
ggaaugccagagauugaga

SEQ ID NO: 1718244 - RNA, 19 nt, Homo sapiens
  misc_RNA (1)...(19): siRNA sense strand
aaggaucagugccucagaa

SEQ ID NO: 1718245 - RNA, 19 nt, Homo sapiens
  misc_RNA (1)...(19): siRNA sense strand
acaauaucagcgugcauua

SEQ ID NO: 1718246 - RNA, 19 nt, Homo sapiens
  misc_RNA (1)...(19): siRNA sense strand
caccgcaagugcauacaga

SEQ ID NO: 1718247 - RNA, 19 nt, Homo sapiens
  misc_RNA (1)...(19): siRNA sense strand
aagaaggaaugccagagau

SEQ ID NO: 1718248 - RNA, 19 nt, Homo sapiens
  misc_RNA (1)...(19): siRNA sense strand
gggguugccuuucacaauu

SEQ ID NO: 1718249 - RNA, 19 nt, Homo sapiens
  misc_RNA (1)...(19): siRNA sense strand
auaucagcgugcauuauuu

SEQ ID NO: 1718250 - RNA, 19 nt, Homo sapiens
  misc_RNA (1)...(19): siRNA sense strand
gaaggaucagugccucaga

SEQ ID NO: 1718251 - RNA, 19 nt, Homo sapiens
  misc_RNA (1)...(19): siRNA sense strand
ccacacaucagcaaagcau

SEQ ID NO: 1718252 - RNA, 19 nt, Homo sapiens
  misc_RNA (1)...(19): siRNA sense strand
auccagagcccguguugua

SEQ ID NO: 1718253 - RNA, 19 nt, Homo sapiens
  misc_RNA (1)...(19): siRNA sense strand
aaacuuccaucugccuugu

SEQ ID NO: 1718254 - RNA, 19 nt, Homo sapiens
  misc_RNA (1)...(19): siRNA sense strand
gccaagacuaggaggguaa

SEQ ID NO: 1718255 - RNA, 19 nt, Homo sapiens
  misc_RNA (1)...(19): siRNA sense strand
caauaucagcgugcauuau

SEQ ID NO: 1718256 - RNA, 19 nt, Homo sapiens
  misc_RNA (1)...(19): siRNA sense strand
aaaagaguuuccucaagaa

SEQ ID NO: 1718257 - RNA, 19 nt, Homo sapiens
  misc_RNA (1)...(19): siRNA sense strand
gguccaagggugucagaau

SEQ ID NO: 1718258 - RNA, 19 nt, Homo sapiens
  misc_RNA (1)...(19): siRNA sense strand
ggccuuucuuggacugauu

SEQ ID NO: 1718259 - RNA, 19 nt, Homo sapiens
  misc_RNA (1)...(19): siRNA sense strand
acaacaccuuggaagagaa

SEQ ID NO: 1718260 - RNA, 19 nt, Homo sapiens
  misc_RNA (1)...(19): siRNA sense strand
acaaacaucgcccaacaca

SEQ ID NO: 1718261 - RNA, 19 nt, Homo sapiens
  misc_RNA (1)...(19): siRNA sense strand
ggugucagaaucacuaaca

SEQ ID NO: 1718262 - RNA, 19 nt, Homo sapiens
  misc_RNA (1)...(19): siRNA sense strand
gaaugccagagauugagaa

SEQ ID NO: 1718263 - RNA, 19 nt, Homo sapiens
  misc_RNA (1)...(19): siRNA sense strand
agaaggaaugccagagauu

SEQ ID NO: 1718264 - RNA, 19 nt, Homo sapiens
  misc_RNA (1)...(19): siRNA sense strand
ugccagagauugagaaaau

SEQ ID NO: 1718265 - RNA, 19 nt, Homo sapiens
  misc_RNA (1)...(19): siRNA sense strand
gggccuguuugcuggcuau

SEQ ID NO: 1718266 - RNA, 19 nt, Homo sapiens
  misc_RNA (1)...(19): siRNA sense strand
caacaccuuggaagagaau

SEQ ID NO: 1718267 - RNA, 19 nt, Homo sapiens
  misc_RNA (1)...(19): siRNA sense strand
gagcccguguuguagucaa

SEQ ID NO: 1718268 - RNA, 19 nt, Homo sapiens
  misc_RNA (1)...(19): siRNA sense strand
uaucagcgugcauuauuuc

SEQ ID NO: 1718269 - RNA, 19 nt, Homo sapiens
  misc_RNA (1)...(19): siRNA sense strand
ccgcaagugcauacagaaa

SEQ ID NO: 1718270 - RNA, 19 nt, Homo sapiens
  misc_RNA (1)...(19): siRNA sense strand
caucagcaaagcauuucuu

SEQ ID NO: 1718271 - RNA, 19 nt, Homo sapiens
  misc_RNA (1)...(19): siRNA sense strand
cagagcccguguuguaguc

SEQ ID NO: 1718272 - RNA, 19 nt, Homo sapiens
  misc_RNA (1)...(19): siRNA sense strand
ucuaguaagcugccucaga

SEQ ID NO: 1718273 - RNA, 19 nt, Homo sapiens
  misc_RNA (1)...(19): siRNA sense strand
caagugcauacagaaauau

SEQ ID NO: 1718274 - RNA, 19 nt, Homo sapiens
  misc_RNA (1)...(19): siRNA sense strand
aaggaaugccagagauuga

SEQ ID NO: 1718275 - RNA, 19 nt, Homo sapiens
  misc_RNA (1)...(19): siRNA sense strand
cagaaccuuccuuauuaga

SEQ ID NO: 1718276 - RNA, 19 nt, Homo sapiens
  misc_RNA (1)...(19): siRNA sense strand
cuucagaaagacaauauca

SEQ ID NO: 1718277 - RNA, 19 nt, Homo sapiens
  misc_RNA (1)...(19): siRNA sense strand
ucaacugccagaaggauca

SEQ ID NO: 1718278 - RNA, 19 nt, Homo sapiens
  misc_RNA (1)...(19): siRNA sense strand
gccagaaccuuccuuauua

SEQ ID NO: 1718279 - RNA, 19 nt, Homo sapiens
  misc_RNA (1)...(19): siRNA sense strand
gaggaaagcugcaucuuau

SEQ ID NO: 1718280 - RNA, 19 nt, Homo sapiens
  misc_RNA (1)...(19): siRNA sense strand
gcaagugcauacagaaaua

SEQ ID NO: 1718281 - RNA, 19 nt, Homo sapiens
  misc_RNA (1)...(19): siRNA sense strand
gaaccuuccuuauuagaaa

SEQ ID NO: 1718282 - RNA, 19 nt, Homo sapiens
  misc_RNA (1)...(19): siRNA sense strand
gaacauuucugcagagaca

SEQ ID NO: 1718283 - RNA, 19 nt, Homo sapiens
  misc_RNA (1)...(19): siRNA sense strand
ggaggaaagcugcaucuua

SEQ ID NO: 1718284 - RNA, 19 nt, Homo sapiens
  misc_RNA (1)...(19): siRNA sense strand
gaaauaugcccacacauca

SEQ ID NO: 1718285 - RNA, 19 nt, Homo sapiens
  misc_RNA (1)...(19): siRNA sense strand
gugcauuauuucugucuua

SEQ ID NO: 1718286 - RNA, 19 nt, Homo sapiens
  misc_RNA (1)...(19): siRNA sense strand
aaacaucgcccaacacaga

SEQ ID NO: 1718287 - RNA, 19 nt, Homo sapiens
  misc_RNA (1)...(19): siRNA sense strand
gaagacuuaucccaacaga

SEQ ID NO: 1718288 - RNA, 19 nt, Homo sapiens
  misc_RNA (1)...(19): siRNA sense strand
ggacugcuccucucuuaga

SEQ ID NO: 1718289 - RNA, 19 nt, Homo sapiens
  misc_RNA (1)...(19): siRNA sense strand
ugacaaacaucgcccaaca

SEQ ID NO: 1718290 - RNA, 19 nt, Homo sapiens
  misc_RNA (1)...(19): siRNA sense strand
gaucuaacaguaagaaaug

SEQ ID NO: 1718291 - RNA, 19 nt, Homo sapiens
  misc_RNA (1)...(19): siRNA sense strand
ucaaauguccacaguguaa

SEQ ID NO: 1718292 - RNA, 19 nt, Homo sapiens
  misc_RNA (1)...(19): siRNA sense strand
ggccagaaccuuccuuauu

SEQ ID NO: 1718293 - RNA, 19 nt, Homo sapiens
  misc_RNA (1)...(19): siRNA sense strand
gacaacaccuuggaagaga

SEQ ID NO: 1718294 - RNA, 19 nt, Homo sapiens
  misc_RNA (1)...(19): siRNA sense strand
aaagggagcugcuaucaac

SEQ ID NO: 1718295 - RNA, 19 nt, Homo sapiens
  misc_RNA (1)...(19): siRNA sense strand
ggaaagcugcaucuuaugu

SEQ ID NO: 1718296 - RNA, 19 nt, Homo sapiens
  misc_RNA (1)...(19): siRNA sense strand
gaaggaaugccagagauug

SEQ ID NO: 1718297 - RNA, 19 nt, Homo sapiens
  misc_RNA (1)...(19): siRNA sense strand
caagaaaugcugagaaugg

SEQ ID NO: 1718298 - RNA, 19 nt, Homo sapiens
  misc_RNA (1)...(19): siRNA sense strand
cagcaaagcauuucuucaa

SEQ ID NO: 1718299 - RNA, 19 nt, Homo sapiens
  misc_RNA (1)...(19): siRNA sense strand
aggaagaucugcuuugugu

SEQ ID NO: 1718300 - RNA, 19 nt, Homo sapiens
  misc_RNA (1)...(19): siRNA sense strand
gaaagcugcaucuuauguu

SEQ ID NO: 1718301 - RNA, 19 nt, Homo sapiens
  misc_RNA (1)...(19): siRNA sense strand
cuacauaccugaaaacuca

SEQ ID NO: 1718302 - RNA, 19 nt, Homo sapiens
  misc_RNA (1)...(19): siRNA sense strand
ggguugccuuucacaauuu

SEQ ID NO: 1718303 - RNA, 19 nt, Homo sapiens
  misc_RNA (1)...(19): siRNA sense strand
acagaaauaugcccacaca

SEQ ID NO: 1718304 - RNA, 19 nt, Homo sapiens
  misc_RNA (1)...(19): siRNA sense strand
cuuauguugugaagacuua

SEQ ID NO: 1718305 - RNA, 19 nt, Homo sapiens
  misc_RNA (1)...(19): siRNA sense strand
caacacagaacauccaaca

SEQ ID NO: 1718306 - RNA, 19 nt, Homo sapiens
  misc_RNA (1)...(19): siRNA sense strand
acacagaacauccaacaug

SEQ ID NO: 1718307 - RNA, 19 nt, Homo sapiens
  misc_RNA (1)...(19): siRNA sense strand
cagcgugcauuauuucugu

SEQ ID NO: 1718308 - RNA, 19 nt, Homo sapiens
  misc_RNA (1)...(19): siRNA sense strand
ccagaaccuuccuuauuag

SEQ ID NO: 1718309 - RNA, 19 nt, Homo sapiens
  misc_RNA (1)...(19): siRNA sense strand
aaagcugcaucuuauguug

SEQ ID NO: 1718310 - RNA, 19 nt, Homo sapiens
  misc_RNA (1)...(19): siRNA sense strand
gaucagugccucagaaacu

SEQ ID NO: 1718311 - RNA, 19 nt, Homo sapiens
  misc_RNA (1)...(19): siRNA sense strand
guaagaaaugggaguguga

SEQ ID NO: 1718312 - RNA, 19 nt, Homo sapiens
  misc_RNA (1)...(19): siRNA sense strand
cuucaaauguccacagugu

SEQ ID NO: 1718313 - RNA, 19 nt, Homo sapiens
  misc_RNA (1)...(19): siRNA sense strand
gagaaaaucugccaagacu

SEQ ID NO: 1718314 - RNA, 19 nt, Homo sapiens
  misc_RNA (1)...(19): siRNA sense strand
gcagagacaacaccuugga

SEQ ID NO: 1718315 - RNA, 19 nt, Homo sapiens
  misc_RNA (1)...(19): siRNA sense strand
agggacugcuccucucuua

SEQ ID NO: 1718316 - RNA, 19 nt, Homo sapiens
  misc_RNA (1)...(19): siRNA sense strand
gagacaacaccuuggaaga

SEQ ID NO: 1718317 - RNA, 19 nt, Homo sapiens
  misc_RNA (1)...(19): siRNA sense strand
gacaauaucagcgugcauu

SEQ ID NO: 1718318 - RNA, 19 nt, Homo sapiens
  misc_RNA (1)...(19): siRNA sense strand
acacaucagcaaagcauuu

SEQ ID NO: 1718319 - RNA, 19 nt, Homo sapiens
  misc_RNA (1)...(19): siRNA sense strand
cuaggaagaucugcuuugu

SEQ ID NO: 1718320 - RNA, 19 nt, Homo sapiens
  misc_RNA (1)...(19): siRNA sense strand
agcaaagcauuucuucaaa

SEQ ID NO: 1718321 - RNA, 19 nt, Homo sapiens
  misc_RNA (1)...(19): siRNA sense strand
guccaagggugucagaauc

SEQ ID NO: 1718322 - RNA, 19 nt, Homo sapiens
  misc_RNA (1)...(19): siRNA sense strand
agacuuaucccaacagagu

SEQ ID NO: 1718323 - RNA, 19 nt, Homo sapiens
  misc_RNA (1)...(19): siRNA sense strand
gaaaaucugccaagacuag

SEQ ID NO: 1718324 - RNA, 19 nt, Homo sapiens
  misc_RNA (1)...(19): siRNA sense strand
agaaauaugcccacacauc

SEQ ID NO: 1718325 - RNA, 19 nt, Homo sapiens
  misc_RNA (1)...(19): siRNA sense strand
gugaagacuuaucccaaca

SEQ ID NO: 1718326 - RNA, 19 nt, Homo sapiens
  misc_RNA (1)...(19): siRNA sense strand
aaagaaggaaugccagaga

SEQ ID NO: 1718327 - RNA, 19 nt, Homo sapiens
  misc_RNA (1)...(19): siRNA sense strand
ggaaugccagagauugaga

SEQ ID NO: 1718328 - RNA, 19 nt, Homo sapiens
  misc_RNA (1)...(19): siRNA sense strand
aaggaucagugccucagaa

SEQ ID NO: 1718329 - RNA, 19 nt, Homo sapiens
  misc_RNA (1)...(19): siRNA sense strand
acaauaucagcgugcauua

SEQ ID NO: 1718330 - RNA, 19 nt, Homo sapiens
  misc_RNA (1)...(19): siRNA sense strand
caccgcaagugcauacaga

SEQ ID NO: 1718331 - RNA, 19 nt, Homo sapiens
  misc_RNA (1)...(19): siRNA sense strand
aagaaggaaugccagagau

SEQ ID NO: 1718332 - RNA, 19 nt, Homo sapiens
  misc_RNA (1)...(19): siRNA sense strand
gggguugccuuucacaauu

SEQ ID NO: 1718333 - RNA, 19 nt, Homo sapiens
  misc_RNA (1)...(19): siRNA sense strand
auaucagcgugcauuauuu

SEQ ID NO: 1718334 - RNA, 19 nt, Homo sapiens
  misc_RNA (1)...(19): siRNA sense strand
gaaggaucagugccucaga

SEQ ID NO: 1718335 - RNA, 19 nt, Homo sapiens
  misc_RNA (1)...(19): siRNA sense strand
ccacacaucagcaaagcau

SEQ ID NO: 1718336 - RNA, 19 nt, Homo sapiens
  misc_RNA (1)...(19): siRNA sense strand
auccagagcccguguugua

SEQ ID NO: 1718337 - RNA, 19 nt, Homo sapiens
  misc_RNA (1)...(19): siRNA sense strand
aaacuuccaucugccuugu

SEQ ID NO: 1718338 - RNA, 19 nt, Homo sapiens
  misc_RNA (1)...(19): siRNA sense strand
gccaagacuaggaggguaa

SEQ ID NO: 1718339 - RNA, 19 nt, Homo sapiens
  misc_RNA (1)...(19): siRNA sense strand
caauaucagcgugcauuau

SEQ ID NO: 1718340 - RNA, 19 nt, Homo sapiens
  misc_RNA (1)...(19): siRNA sense strand
aaaagaguuuccucaagaa

SEQ ID NO: 1718341 - RNA, 19 nt, Homo sapiens
  misc_RNA (1)...(19): siRNA sense strand
gguccaagggugucagaau

SEQ ID NO: 1718342 - RNA, 19 nt, Homo sapiens
  misc_RNA (1)...(19): siRNA sense strand
ggccuuucuuggacugauu

SEQ ID NO: 1718343 - RNA, 19 nt, Homo sapiens
  misc_RNA (1)...(19): siRNA sense strand
acaacaccuuggaagagaa

SEQ ID NO: 1718344 - RNA, 19 nt, Homo sapiens
  misc_RNA (1)...(19): siRNA sense strand
acaaacaucgcccaacaca

SEQ ID NO: 1718345 - RNA, 19 nt, Homo sapiens
  misc_RNA (1)...(19): siRNA sense strand
ggugucagaaucacuaaca

SEQ ID NO: 1718346 - RNA, 19 nt, Homo sapiens
  misc_RNA (1)...(19): siRNA sense strand
gaaugccagagauugagaa

SEQ ID NO: 1718347 - RNA, 19 nt, Homo sapiens
  misc_RNA (1)...(19): siRNA sense strand
agaaggaaugccagagauu

SEQ ID NO: 1718348 - RNA, 19 nt, Homo sapiens
  misc_RNA (1)...(19): siRNA sense strand
ugccagagauugagaaaau

SEQ ID NO: 1718349 - RNA, 19 nt, Homo sapiens
  misc_RNA (1)...(19): siRNA sense strand
gggccuguuugcuggcuau

SEQ ID NO: 1718350 - RNA, 19 nt, Homo sapiens
  misc_RNA (1)...(19): siRNA sense strand
caacaccuuggaagagaau

SEQ ID NO: 1718351 - RNA, 19 nt, Homo sapiens
  misc_RNA (1)...(19): siRNA sense strand
gagcccguguuguagucaa

SEQ ID NO: 1718352 - RNA, 19 nt, Homo sapiens
  misc_RNA (1)...(19): siRNA sense strand
uaucagcgugcauuauuuc

SEQ ID NO: 1718353 - RNA, 19 nt, Homo sapiens
  misc_RNA (1)...(19): siRNA sense strand
ccgcaagugcauacagaaa

SEQ ID NO: 1718354 - RNA, 19 nt, Homo sapiens
  misc_RNA (1)...(19): siRNA sense strand
caucagcaaagcauuucuu

SEQ ID NO: 1718355 - RNA, 19 nt, Homo sapiens
  misc_RNA (1)...(19): siRNA sense strand
cagagcccguguuguaguc

SEQ ID NO: 1718356 - RNA, 19 nt, Homo sapiens
  misc_RNA (1)...(19): siRNA sense strand
ucuaguaagcugccucaga

SEQ ID NO: 1718357 - RNA, 19 nt, Homo sapiens
  misc_RNA (1)...(19): siRNA sense strand
caagugcauacagaaauau

SEQ ID NO: 1718358 - RNA, 19 nt, Homo sapiens
  misc_RNA (1)...(19): siRNA sense strand
aaggaaugccagagauuga

SEQ ID NO: 1718359 - RNA, 19 nt, Homo sapiens
  misc_RNA (1)...(19): siRNA sense strand
cagaaccuuccuuauuaga

SEQ ID NO: 1718360 - RNA, 19 nt, Homo sapiens
  misc_RNA (1)...(19): siRNA sense strand
cuucagaaagacaauauca

SEQ ID NO: 1718361 - RNA, 19 nt, Homo sapiens
  misc_RNA (1)...(19): siRNA sense strand
ucaacugccagaaggauca

SEQ ID NO: 1718362 - RNA, 19 nt, Homo sapiens
  misc_RNA (1)...(19): siRNA sense strand
caacaugacugcaaagugu

SEQ ID NO: 1718363 - RNA, 19 nt, Homo sapiens
  misc_RNA (1)...(19): siRNA sense strand
gcuaugagcuucagauaca

SEQ ID NO: 1718364 - RNA, 19 nt, Homo sapiens
  misc_RNA (1)...(19): siRNA sense strand
gaagguaucuggugaugca

SEQ ID NO: 1718365 - RNA, 19 nt, Homo sapiens
  misc_RNA (1)...(19): siRNA sense strand
ggaaagaguguaugaauuc

SEQ ID NO: 1718366 - RNA, 19 nt, Homo sapiens
  misc_RNA (1)...(19): siRNA sense strand
gggaaagaguguaugaauu

SEQ ID NO: 1718367 - RNA, 19 nt, Homo sapiens
  misc_RNA (1)...(19): siRNA sense strand
gcaauuuccuuaugugaag

SEQ ID NO: 1718368 - RNA, 19 nt, Homo sapiens
  misc_RNA (1)...(19): siRNA sense strand
uaagacacauuccuuuaug

SEQ ID NO: 1718369 - RNA, 19 nt, Homo sapiens
  misc_RNA (1)...(19): siRNA sense strand
acagaaaugugaccgauau

SEQ ID NO: 1718370 - RNA, 19 nt, Homo sapiens
  misc_RNA (1)...(19): siRNA sense strand
ccgcaucccucacaugaaa

SEQ ID NO: 1718371 - RNA, 19 nt, Homo sapiens
  misc_RNA (1)...(19): siRNA sense strand
caacaggcgucaacaguac

SEQ ID NO: 1718372 - RNA, 19 nt, Homo sapiens
  misc_RNA (1)...(19): siRNA sense strand
gauccaaacccaccaauca

SEQ ID NO: 1718373 - RNA, 19 nt, Homo sapiens
  misc_RNA (1)...(19): siRNA sense strand
gaccuuaacagaaauguga

SEQ ID NO: 1718374 - RNA, 19 nt, Homo sapiens
  misc_RNA (1)...(19): siRNA sense strand
ccugggaccuuaacagaaa

SEQ ID NO: 1718375 - RNA, 19 nt, Homo sapiens
  misc_RNA (1)...(19): siRNA sense strand
uaugugaagugaccaacua

SEQ ID NO: 1718376 - RNA, 19 nt, Homo sapiens
  misc_RNA (1)...(19): siRNA sense strand
gaacaggucagagacagaa

SEQ ID NO: 1718377 - RNA, 19 nt, Homo sapiens
  misc_RNA (1)...(19): siRNA sense strand
guaauaagacacauuccuu

SEQ ID NO: 1718378 - RNA, 19 nt, Homo sapiens
  misc_RNA (1)...(19): siRNA sense strand
ucacagaacaggucagaga

SEQ ID NO: 1718379 - RNA, 19 nt, Homo sapiens
  misc_RNA (1)...(19): siRNA sense strand
gaaagaguguaugaauucu

SEQ ID NO: 1718380 - RNA, 19 nt, Homo sapiens
  misc_RNA (1)...(19): siRNA sense strand
caguugaccugggaccuua

SEQ ID NO: 1718381 - RNA, 19 nt, Homo sapiens
  misc_RNA (1)...(19): siRNA sense strand
ggagcaauuuccuuaugug

SEQ ID NO: 1718382 - RNA, 19 nt, Homo sapiens
  misc_RNA (1)...(19): siRNA sense strand
ucacgaaccuaaggaugaa

SEQ ID NO: 1718383 - RNA, 19 nt, Homo sapiens
  misc_RNA (1)...(19): siRNA sense strand
uaaagacgccgacuauucu

SEQ ID NO: 1718384 - RNA, 19 nt, Homo sapiens
  misc_RNA (1)...(19): siRNA sense strand
cagauaaguuugucgucuu

SEQ ID NO: 1718385 - RNA, 19 nt, Homo sapiens
  misc_RNA (1)...(19): siRNA sense strand
ccaccaaucacgaaccuaa

SEQ ID NO: 1718386 - RNA, 19 nt, Homo sapiens
  misc_RNA (1)...(19): siRNA sense strand
ccaacaggcgucaacagua

SEQ ID NO: 1718387 - RNA, 19 nt, Homo sapiens
  misc_RNA (1)...(19): siRNA sense strand
gaaaugugaccgauaucga

SEQ ID NO: 1718388 - RNA, 19 nt, Homo sapiens
  misc_RNA (1)...(19): siRNA sense strand
ugaccgauaucgagugugu

SEQ ID NO: 1718389 - RNA, 19 nt, Homo sapiens
  misc_RNA (1)...(19): siRNA sense strand
agauaaguuugucgucuuu

SEQ ID NO: 1718390 - RNA, 19 nt, Homo sapiens
  misc_RNA (1)...(19): siRNA sense strand
uuaaagacgccgacuauuc

SEQ ID NO: 1718391 - RNA, 19 nt, Homo sapiens
  misc_RNA (1)...(19): siRNA sense strand
gagcaauuuccuuauguga

SEQ ID NO: 1718392 - RNA, 19 nt, Homo sapiens
  misc_RNA (1)...(19): siRNA sense strand
aagcaaaggcucagcaguu

SEQ ID NO: 1718393 - RNA, 19 nt, Homo sapiens
  misc_RNA (1)...(19): siRNA sense strand
aggagugucuggugacuga

SEQ ID NO: 1718394 - RNA, 19 nt, Homo sapiens
  misc_RNA (1)...(19): siRNA sense strand
gagaaugcagccuguaauc

SEQ ID NO: 1718395 - RNA, 19 nt, Homo sapiens
  misc_RNA (1)...(19): siRNA sense strand
ggauucaugacguggauuu

SEQ ID NO: 1718396 - RNA, 19 nt, Homo sapiens
  misc_RNA (1)...(19): siRNA sense strand
cgauaucgaguguguuaaa

SEQ ID NO: 1718397 - RNA, 19 nt, Homo sapiens
  misc_RNA (1)...(19): siRNA sense strand
guuuggagcaauuuccuua

SEQ ID NO: 1718398 - RNA, 19 nt, Homo sapiens
  misc_RNA (1)...(19): siRNA sense strand
gcaaaggcucagcaguuga

SEQ ID NO: 1718399 - RNA, 19 nt, Homo sapiens
  misc_RNA (1)...(19): siRNA sense strand
aaacgaaggaagauccaaa

SEQ ID NO: 1718400 - RNA, 19 nt, Homo sapiens
  misc_RNA (1)...(19): siRNA sense strand
gagcgcagccuucgguauc

SEQ ID NO: 1718401 - RNA, 19 nt, Homo sapiens
  misc_RNA (1)...(19): siRNA sense strand
gauaucgaguguguuaaag

SEQ ID NO: 1718402 - RNA, 19 nt, Homo sapiens
  misc_RNA (1)...(19): siRNA sense strand
gaccugggaccuuaacaga

SEQ ID NO: 1718403 - RNA, 19 nt, Homo sapiens
  misc_RNA (1)...(19): siRNA sense strand
cacccaacaugacugcaaa

SEQ ID NO: 1718404 - RNA, 19 nt, Homo sapiens
  misc_RNA (1)...(19): siRNA sense strand
cagaaccuccuuccagcua

SEQ ID NO: 1718405 - RNA, 19 nt, Homo sapiens
  misc_RNA (1)...(19): siRNA sense strand
ugacugcaaaguguaauaa

SEQ ID NO: 1718406 - RNA, 19 nt, Homo sapiens
  misc_RNA (1)...(19): siRNA sense strand
ggaggagggcgcaaacaca

SEQ ID NO: 1718407 - RNA, 19 nt, Homo sapiens
  misc_RNA (1)...(19): siRNA sense strand
gaagauccaaacccaccaa

SEQ ID NO: 1718408 - RNA, 19 nt, Homo sapiens
  misc_RNA (1)...(19): siRNA sense strand
caacaguacgagugucuuc

SEQ ID NO: 1718409 - RNA, 19 nt, Homo sapiens
  misc_RNA (1)...(19): siRNA sense strand
acugcaaaguguaauaaga

SEQ ID NO: 1718410 - RNA, 19 nt, Homo sapiens
  misc_RNA (1)...(19): siRNA sense strand
aaguacaggucgugcagaa

SEQ ID NO: 1718411 - RNA, 19 nt, Homo sapiens
  misc_RNA (1)...(19): siRNA sense strand
agcaaaggcucagcaguug

SEQ ID NO: 1718412 - RNA, 19 nt, Homo sapiens
  misc_RNA (1)...(19): siRNA sense strand
aaucgcaaauuucgcuaug

SEQ ID NO: 1718413 - RNA, 19 nt, Homo sapiens
  misc_RNA (1)...(19): siRNA sense strand
caaauuucgcuaugagcuu

SEQ ID NO: 1718414 - RNA, 19 nt, Homo sapiens
  misc_RNA (1)...(19): siRNA sense strand
uggagcaauuuccuuaugu

SEQ ID NO: 1718415 - RNA, 19 nt, Homo sapiens
  misc_RNA (1)...(19): siRNA sense strand
gaaccuccuuccagcuacu

SEQ ID NO: 1718416 - RNA, 19 nt, Homo sapiens
  misc_RNA (1)...(19): siRNA sense strand
gaaugcagccuguaaucac

SEQ ID NO: 1718417 - RNA, 19 nt, Homo sapiens
  misc_RNA (1)...(19): siRNA sense strand
aagagaaugcagccuguaa

SEQ ID NO: 1718418 - RNA, 19 nt, Homo sapiens
  misc_RNA (1)...(19): siRNA sense strand
uggauccucuucccugaga

SEQ ID NO: 1718419 - RNA, 19 nt, Homo sapiens
  misc_RNA (1)...(19): siRNA sense strand
cgggaaagaguguaugaau

SEQ ID NO: 1718420 - RNA, 19 nt, Homo sapiens
  misc_RNA (1)...(19): siRNA sense strand
guacaggucgugcagaaaa

SEQ ID NO: 1718421 - RNA, 19 nt, Homo sapiens
  misc_RNA (1)...(19): siRNA sense strand
uaucgaguguguuaaagac

SEQ ID NO: 1718422 - RNA, 19 nt, Homo sapiens
  misc_RNA (1)...(19): siRNA sense strand
gcaguugaccugggaccuu

SEQ ID NO: 1718423 - RNA, 19 nt, Homo sapiens
  misc_RNA (1)...(19): siRNA sense strand
gcaggugcggagaaucuga

SEQ ID NO: 1718424 - RNA, 19 nt, Homo sapiens
  misc_RNA (1)...(19): siRNA sense strand
uguuaaagacgccgacuau

SEQ ID NO: 1718425 - RNA, 19 nt, Homo sapiens
  misc_RNA (1)...(19): siRNA sense strand
caaacccaccaaucacgaa

SEQ ID NO: 1718426 - RNA, 19 nt, Homo sapiens
  misc_RNA (1)...(19): siRNA sense strand
cuccagcgguucucaaagu

SEQ ID NO: 1718427 - RNA, 19 nt, Homo sapiens
  misc_RNA (1)...(19): siRNA sense strand
gggcaggugcggagaaucu

SEQ ID NO: 1718428 - RNA, 19 nt, Homo sapiens
  misc_RNA (1)...(19): siRNA sense strand
accgauaucgaguguguua

SEQ ID NO: 1718429 - RNA, 19 nt, Homo sapiens
  misc_RNA (1)...(19): siRNA sense strand
ucgcaaauuucgcuaugag

SEQ ID NO: 1718430 - RNA, 19 nt, Homo sapiens
  misc_RNA (1)...(19): siRNA sense strand
ugagaagucauuucaaucg

SEQ ID NO: 1718431 - RNA, 19 nt, Homo sapiens
  misc_RNA (1)...(19): siRNA sense strand
uuggagcaauuuccuuaug

SEQ ID NO: 1718432 - RNA, 19 nt, Homo sapiens
  misc_RNA (1)...(19): siRNA sense strand
gccaacaggcgucaacagu

SEQ ID NO: 1718433 - RNA, 19 nt, Homo sapiens
  misc_RNA (1)...(19): siRNA sense strand
gaugcucagggaacacgua

SEQ ID NO: 1718434 - RNA, 19 nt, Homo sapiens
  misc_RNA (1)...(19): siRNA sense strand
ggaggagugucuggugacu

SEQ ID NO: 1718435 - RNA, 19 nt, Homo sapiens
  misc_RNA (1)...(19): siRNA sense strand
uuuaugcacuggaaaauga

SEQ ID NO: 1718436 - RNA, 19 nt, Homo sapiens
  misc_RNA (1)...(19): siRNA sense strand
ccaacaugacugcaaagug

SEQ ID NO: 1718437 - RNA, 19 nt, Homo sapiens
  misc_RNA (1)...(19): siRNA sense strand
gcucagggaacacguaucg

SEQ ID NO: 1718438 - RNA, 19 nt, Homo sapiens
  misc_RNA (1)...(19): siRNA sense strand
gaaccuaaggaugaaagca

SEQ ID NO: 1718439 - RNA, 19 nt, Homo sapiens
  misc_RNA (1)...(19): siRNA sense strand
gcaucccucacaugaaaga

SEQ ID NO: 1718440 - RNA, 19 nt, Homo sapiens
  misc_RNA (1)...(19): siRNA sense strand
ccucuucccugagaacagu

SEQ ID NO: 1718441 - RNA, 19 nt, Homo sapiens
  misc_RNA (1)...(19): siRNA sense strand
guuaaagacgccgacuauu

SEQ ID NO: 1718442 - RNA, 19 nt, Homo sapiens
  misc_RNA (1)...(19): siRNA sense strand
ggagcgcagccuucgguau

SEQ ID NO: 1718443 - RNA, 19 nt, Homo sapiens
  misc_RNA (1)...(19): siRNA sense strand
ugccggcagugaacaauag

SEQ ID NO: 1718444 - RNA, 19 nt, Homo sapiens
  misc_RNA (1)...(19): siRNA sense strand
ggugacagcuuccaaaacg

SEQ ID NO: 1718445 - RNA, 19 nt, Homo sapiens
  misc_RNA (1)...(19): siRNA sense strand
aaagacgccgacuauucua

SEQ ID NO: 1718446 - RNA, 19 nt, Homo sapiens
  misc_RNA (1)...(19): siRNA sense strand
accuaaggaugaaagcaaa

SEQ ID NO: 1718447 - RNA, 19 nt, Homo sapiens
  misc_RNA (1)...(19): siRNA sense strand
aaugcagccuguaaucaca

SEQ ID NO: 1718448 - RNA, 19 nt, Homo sapiens
  misc_RNA (1)...(19): siRNA sense strand
ucgcuaugagcuucagaua

SEQ ID NO: 1718449 - RNA, 19 nt, Homo sapiens
  misc_RNA (1)...(19): siRNA sense strand
uuaacuccacccaacauga

SEQ ID NO: 1718450 - RNA, 19 nt, Homo sapiens
  misc_RNA (1)...(19): siRNA sense strand
cagcuacucaauccuggaa

SEQ ID NO: 1718451 - RNA, 19 nt, Homo sapiens
  misc_RNA (1)...(19): siRNA sense strand
gcaaacgaaggaagaucca

SEQ ID NO: 1718452 - RNA, 19 nt, Homo sapiens
  misc_RNA (1)...(19): siRNA sense strand
ugcaaaguguaauaagaca

SEQ ID NO: 1718453 - RNA, 19 nt, Homo sapiens
  misc_RNA (1)...(19): siRNA sense strand
caaaggcucagcaguugac

SEQ ID NO: 1718454 - RNA, 19 nt, Homo sapiens
  misc_RNA (1)...(19): siRNA sense strand
ccacccaacaugacugcaa

SEQ ID NO: 1718455 - RNA, 19 nt, Homo sapiens
  misc_RNA (1)...(19): siRNA sense strand
gaaaggagauccacaugaa

SEQ ID NO: 1718456 - RNA, 19 nt, Homo sapiens
  misc_RNA (1)...(19): siRNA sense strand
gcaaugauggcaacaguua

SEQ ID NO: 1718457 - RNA, 19 nt, Homo sapiens
  misc_RNA (1)...(19): siRNA sense strand
gcaggacaaucgcacuuua

SEQ ID NO: 1718458 - RNA, 19 nt, Homo sapiens
  misc_RNA (1)...(19): siRNA sense strand
gaucaccucugccuaucua

SEQ ID NO: 1718459 - RNA, 19 nt, Homo sapiens
  misc_RNA (1)...(19): siRNA sense strand
gaacgcagcagagugauaa

SEQ ID NO: 1718460 - RNA, 19 nt, Homo sapiens
  misc_RNA (1)...(19): siRNA sense strand
ggcaauauauguacuggaa

SEQ ID NO: 1718461 - RNA, 19 nt, Homo sapiens
  misc_RNA (1)...(19): siRNA sense strand
gaagaucaccucugccuau

SEQ ID NO: 1718462 - RNA, 19 nt, Homo sapiens
  misc_RNA (1)...(19): siRNA sense strand
aguuugaggugcugaauua

SEQ ID NO: 1718463 - RNA, 19 nt, Homo sapiens
  misc_RNA (1)...(19): siRNA sense strand
guagauggcaauauaugua

SEQ ID NO: 1718464 - RNA, 19 nt, Homo sapiens
  misc_RNA (1)...(19): siRNA sense strand
agaaauagcagagaaacua

SEQ ID NO: 1718465 - RNA, 19 nt, Homo sapiens
  misc_RNA (1)...(19): siRNA sense strand
gauuacugguucaggauaa

SEQ ID NO: 1718466 - RNA, 19 nt, Homo sapiens
  misc_RNA (1)...(19): siRNA sense strand
gaagaaaggagauccacau

SEQ ID NO: 1718467 - RNA, 19 nt, Homo sapiens
  misc_RNA (1)...(19): siRNA sense strand
aagggaagcucaagauuca

SEQ ID NO: 1718468 - RNA, 19 nt, Homo sapiens
  misc_RNA (1)...(19): siRNA sense strand
gagaaugccuauaagaaaa

SEQ ID NO: 1718469 - RNA, 19 nt, Homo sapiens
  misc_RNA (1)...(19): siRNA sense strand
gcagagugauaacuguaga

SEQ ID NO: 1718470 - RNA, 19 nt, Homo sapiens
  misc_RNA (1)...(19): siRNA sense strand
ugagaaugccuauaagaaa

SEQ ID NO: 1718471 - RNA, 19 nt, Homo sapiens
  misc_RNA (1)...(19): siRNA sense strand
cacaagcauuccuaucuuu

SEQ ID NO: 1718472 - RNA, 19 nt, Homo sapiens
  misc_RNA (1)...(19): siRNA sense strand
aaacugcgcuauggaaugu

SEQ ID NO: 1718473 - RNA, 19 nt, Homo sapiens
  misc_RNA (1)...(19): siRNA sense strand
caaaagaaauagcagagaa

SEQ ID NO: 1718474 - RNA, 19 nt, Homo sapiens
  misc_RNA (1)...(19): siRNA sense strand
gaccgugucuuacaucagu

SEQ ID NO: 1718475 - RNA, 19 nt, Homo sapiens
  misc_RNA (1)...(19): siRNA sense strand
gcagcagagugauaacugu

SEQ ID NO: 1718476 - RNA, 19 nt, Homo sapiens
  misc_RNA (1)...(19): siRNA sense strand
gcaagggaagcucaagauu

SEQ ID NO: 1718477 - RNA, 19 nt, Homo sapiens
  misc_RNA (1)...(19): siRNA sense strand
aacuguagauggcaauaua

SEQ ID NO: 1718478 - RNA, 19 nt, Homo sapiens
  misc_RNA (1)...(19): siRNA sense strand
acacaagcauuccuaucuu

SEQ ID NO: 1718479 - RNA, 19 nt, Homo sapiens
  misc_RNA (1)...(19): siRNA sense strand
caagggaagcucaagauuc

SEQ ID NO: 1718480 - RNA, 19 nt, Homo sapiens
  misc_RNA (1)...(19): siRNA sense strand
gaaauagcagagaaacuag

SEQ ID NO: 1718481 - RNA, 19 nt, Homo sapiens
  misc_RNA (1)...(19): siRNA sense strand
ggagauccacaugaaauga

SEQ ID NO: 1718482 - RNA, 19 nt, Homo sapiens
  misc_RNA (1)...(19): siRNA sense strand
cgacuauaauggcaacugu

SEQ ID NO: 1718483 - RNA, 19 nt, Homo sapiens
  misc_RNA (1)...(19): siRNA sense strand
gggaagcucaagauucaaa

SEQ ID NO: 1718484 - RNA, 19 nt, Homo sapiens
  misc_RNA (1)...(19): siRNA sense strand
gauccgagaagcaaugaug

SEQ ID NO: 1718485 - RNA, 19 nt, Homo sapiens
  misc_RNA (1)...(19): siRNA sense strand
uugaauaccugaaguucga

SEQ ID NO: 1718486 - RNA, 19 nt, Homo sapiens
  misc_RNA (1)...(19): siRNA sense strand
caucuucagugacuuugug

SEQ ID NO: 1718487 - RNA, 19 nt, Homo sapiens
  misc_RNA (1)...(19): siRNA sense strand
agaggcggauucagaagaa

SEQ ID NO: 1718488 - RNA, 19 nt, Homo sapiens
  misc_RNA (1)...(19): siRNA sense strand
ggacauugaauaccugaag

SEQ ID NO: 1718489 - RNA, 19 nt, Homo sapiens
  misc_RNA (1)...(19): siRNA sense strand
ccacaugaaaugaagauca

SEQ ID NO: 1718490 - RNA, 19 nt, Homo sapiens
  misc_RNA (1)...(19): siRNA sense strand
acagaacgcagcagaguga

SEQ ID NO: 1718491 - RNA, 19 nt, Homo sapiens
  misc_RNA (1)...(19): siRNA sense strand
gagauccacaugaaaugaa

SEQ ID NO: 1718492 - RNA, 19 nt, Homo sapiens
  misc_RNA (1)...(19): siRNA sense strand
ggagaaauuuuacgaugau

SEQ ID NO: 1718493 - RNA, 19 nt, Homo sapiens
  misc_RNA (1)...(19): siRNA sense strand
gcagagaaacuaggcuuca

SEQ ID NO: 1718494 - RNA, 19 nt, Homo sapiens
  misc_RNA (1)...(19): siRNA sense strand
gcaaacugcgcuauggaau

SEQ ID NO: 1718495 - RNA, 19 nt, Homo sapiens
  misc_RNA (1)...(19): siRNA sense strand
cagagaaacuaggcuucaa

SEQ ID NO: 1718496 - RNA, 19 nt, Homo sapiens
  misc_RNA (1)...(19): siRNA sense strand
cauuggagcucaucagacu

SEQ ID NO: 1718497 - RNA, 19 nt, Homo sapiens
  misc_RNA (1)...(19): siRNA sense strand
gaauaccugaaguucgaua

SEQ ID NO: 1718498 - RNA, 19 nt, Homo sapiens
  misc_RNA (1)...(19): siRNA sense strand
ggugguagaggacauugaa

SEQ ID NO: 1718499 - RNA, 19 nt, Homo sapiens
  misc_RNA (1)...(19): siRNA sense strand
ggacaaucgcacuuuauac

SEQ ID NO: 1718500 - RNA, 19 nt, Homo sapiens
  misc_RNA (1)...(19): siRNA sense strand
gacauugaauaccugaagu

SEQ ID NO: 1718501 - RNA, 19 nt, Homo sapiens
  misc_RNA (1)...(19): siRNA sense strand
ggauaaagcaagcaaaaga

SEQ ID NO: 1718502 - RNA, 19 nt, Homo sapiens
  misc_RNA (1)...(19): siRNA sense strand
guccagaggcggauucaga

SEQ ID NO: 1718503 - RNA, 19 nt, Homo sapiens
  misc_RNA (1)...(19): siRNA sense strand
caaacugcgcuauggaaug

SEQ ID NO: 1718504 - RNA, 19 nt, Homo sapiens
  misc_RNA (1)...(19): siRNA sense strand
ugguagaggacauugaaua

SEQ ID NO: 1718505 - RNA, 19 nt, Homo sapiens
  misc_RNA (1)...(19): siRNA sense strand
guacaaccagggauucauc

SEQ ID NO: 1718506 - RNA, 19 nt, Homo sapiens
  misc_RNA (1)...(19): siRNA sense strand
ugucuuacaucaguucaga

SEQ ID NO: 1718507 - RNA, 19 nt, Homo sapiens
  misc_RNA (1)...(19): siRNA sense strand
cagcagagugauaacugua

SEQ ID NO: 1718508 - RNA, 19 nt, Homo sapiens
  misc_RNA (1)...(19): siRNA sense strand
agaaaggagauccacauga

SEQ ID NO: 1718509 - RNA, 19 nt, Homo sapiens
  misc_RNA (1)...(19): siRNA sense strand
gcaauauauguacuggaaa

SEQ ID NO: 1718510 - RNA, 19 nt, Homo sapiens
  misc_RNA (1)...(19): siRNA sense strand
gaugauccgagaagcaaug

SEQ ID NO: 1718511 - RNA, 19 nt, Homo sapiens
  misc_RNA (1)...(19): siRNA sense strand
ugaagagcgucaccaucug

SEQ ID NO: 1718512 - RNA, 19 nt, Homo sapiens
  misc_RNA (1)...(19): siRNA sense strand
acaaguggaucuggcugaa

SEQ ID NO: 1718513 - RNA, 19 nt, Homo sapiens
  misc_RNA (1)...(19): siRNA sense strand
gguagaggacauugaauac

SEQ ID NO: 1718514 - RNA, 19 nt, Homo sapiens
  misc_RNA (1)...(19): siRNA sense strand
gcgucaccaucugcgauua

SEQ ID NO: 1718515 - RNA, 19 nt, Homo sapiens
  misc_RNA (1)...(19): siRNA sense strand
aagcaaugauggcaacagu

SEQ ID NO: 1718516 - RNA, 19 nt, Homo sapiens
  misc_RNA (1)...(19): siRNA sense strand
aggacaaucgcacuuuaua

SEQ ID NO: 1718517 - RNA, 19 nt, Homo sapiens
  misc_RNA (1)...(19): siRNA sense strand
gaccacaggacaagguguu

SEQ ID NO: 1718518 - RNA, 19 nt, Homo sapiens
  misc_RNA (1)...(19): siRNA sense strand
acuguaguuuggagaaauu

SEQ ID NO: 1718519 - RNA, 19 nt, Homo sapiens
  misc_RNA (1)...(19): siRNA sense strand
uagaggacauugaauaccu

SEQ ID NO: 1718520 - RNA, 19 nt, Homo sapiens
  misc_RNA (1)...(19): siRNA sense strand
cgcgugagaggaauucaua

SEQ ID NO: 1718521 - RNA, 19 nt, Homo sapiens
  misc_RNA (1)...(19): siRNA sense strand
aaaggagauccacaugaaa

SEQ ID NO: 1718522 - RNA, 19 nt, Homo sapiens
  misc_RNA (1)...(19): siRNA sense strand
gacaguaccacaggagaug

SEQ ID NO: 1718523 - RNA, 19 nt, Homo sapiens
  misc_RNA (1)...(19): siRNA sense strand
uaccugaaguucgauaaag

SEQ ID NO: 1718524 - RNA, 19 nt, Homo sapiens
  misc_RNA (1)...(19): siRNA sense strand
uugagaaugccuauaagaa

SEQ ID NO: 1718525 - RNA, 19 nt, Homo sapiens
  misc_RNA (1)...(19): siRNA sense strand
aaggagauccacaugaaau

SEQ ID NO: 1718526 - RNA, 19 nt, Homo sapiens
  misc_RNA (1)...(19): siRNA sense strand
gaggcggauucagaagaaa

SEQ ID NO: 1718527 - RNA, 19 nt, Homo sapiens
  misc_RNA (1)...(19): siRNA sense strand
cagaugccuuggagcacuu

SEQ ID NO: 1718528 - RNA, 19 nt, Homo sapiens
  misc_RNA (1)...(19): siRNA sense strand
aaguggaucuggcugaagu

SEQ ID NO: 1718529 - RNA, 19 nt, Homo sapiens
  misc_RNA (1)...(19): siRNA sense strand
gacuauaauggcaacugua

SEQ ID NO: 1718530 - RNA, 19 nt, Homo sapiens
  misc_RNA (1)...(19): siRNA sense strand
cgauuacugguucaggaua

SEQ ID NO: 1718531 - RNA, 19 nt, Homo sapiens
  misc_RNA (1)...(19): siRNA sense strand
cagaggcggauucagaaga

SEQ ID NO: 1718532 - RNA, 19 nt, Homo sapiens
  misc_RNA (1)...(19): siRNA sense strand
ugacagaacgcagcagagu

SEQ ID NO: 1718533 - RNA, 19 nt, Homo sapiens
  misc_RNA (1)...(19): siRNA sense strand
caggacaaucgcacuuuau

SEQ ID NO: 1718534 - RNA, 19 nt, Homo sapiens
  misc_RNA (1)...(19): siRNA sense strand
uggaggcgauguacaacca

SEQ ID NO: 1718535 - RNA, 19 nt, Homo sapiens
  misc_RNA (1)...(19): siRNA sense strand
gacugaccgugucuuacau

SEQ ID NO: 1718536 - RNA, 19 nt, Homo sapiens
  misc_RNA (1)...(19): siRNA sense strand
uaacuguagauggcaauau

SEQ ID NO: 1718537 - RNA, 19 nt, Homo sapiens
  misc_RNA (1)...(19): siRNA sense strand
uacacaagcauuccuaucu

SEQ ID NO: 1718538 - RNA, 19 nt, Homo sapiens
  misc_RNA (1)...(19): siRNA sense strand
gacaaucgcacuuuauacc

SEQ ID NO: 1718539 - RNA, 19 nt, Homo sapiens
  misc_RNA (1)...(19): siRNA sense strand
cacaugaaaugaagaucac

SEQ ID NO: 1718540 - RNA, 19 nt, Homo sapiens
  misc_RNA (1)...(19): siRNA sense strand
agaacgcagcagagugaua

SEQ ID NO: 1718541 - RNA, 19 nt, Homo sapiens
  misc_RNA (1)...(19): siRNA sense strand
cgauguacaaccagggauu

SEQ ID NO: 1718542 - RNA, 19 nt, Homo sapiens
  misc_RNA (1)...(19): siRNA sense strand
gauguacaaccagggauuc

SEQ ID NO: 1718543 - RNA, 19 nt, Homo sapiens
  misc_RNA (1)...(19): siRNA sense strand
gcuggaacuuucugaauua

SEQ ID NO: 1718544 - RNA, 19 nt, Homo sapiens
  misc_RNA (1)...(19): siRNA sense strand
ggacagaggaggcuaauga

SEQ ID NO: 1718545 - RNA, 19 nt, Homo sapiens
  misc_RNA (1)...(19): siRNA sense strand
ucacaugggucaacuguuc

SEQ ID NO: 1718546 - RNA, 19 nt, Homo sapiens
  misc_RNA (1)...(19): siRNA sense strand
ucaacuaccucuucuaugg

SEQ ID NO: 1718547 - RNA, 19 nt, Homo sapiens
  misc_RNA (1)...(19): siRNA sense strand
ggcuggaacuuucugaauu

SEQ ID NO: 1718548 - RNA, 19 nt, Homo sapiens
  misc_RNA (1)...(19): siRNA sense strand
guuaaugggucucucuuca

SEQ ID NO: 1718549 - RNA, 19 nt, Homo sapiens
  misc_RNA (1)...(19): siRNA sense strand
caaugucgcuuaugucacu

SEQ ID NO: 1718550 - RNA, 19 nt, Homo sapiens
  misc_RNA (1)...(19): siRNA sense strand
cacgguugcuggacagaua

SEQ ID NO: 1718551 - RNA, 19 nt, Homo sapiens
  misc_RNA (1)...(19): siRNA sense strand
ggaacuuucugaauuacgu

SEQ ID NO: 1718552 - RNA, 19 nt, Homo sapiens
  misc_RNA (1)...(19): siRNA sense strand
uguacacacucaucaacua

SEQ ID NO: 1718553 - RNA, 19 nt, Homo sapiens
  misc_RNA (1)...(19): siRNA sense strand
gaucaugcccauuucuguu

SEQ ID NO: 1718554 - RNA, 19 nt, Homo sapiens
  misc_RNA (1)...(19): siRNA sense strand
gaaugcauuugagaauuuc

SEQ ID NO: 1718555 - RNA, 19 nt, Homo sapiens
  misc_RNA (1)...(19): siRNA sense strand
uauggaggcuggaacuuuc

SEQ ID NO: 1718556 - RNA, 19 nt, Homo sapiens
  misc_RNA (1)...(19): siRNA sense strand
caucaacuaccucuucuau

SEQ ID NO: 1718557 - RNA, 19 nt, Homo sapiens
  misc_RNA (1)...(19): siRNA sense strand
ugacugaggagcuuguuga

SEQ ID NO: 1718558 - RNA, 19 nt, Homo sapiens
  misc_RNA (1)...(19): siRNA sense strand
guacacacucaucaacuau

SEQ ID NO: 1718559 - RNA, 19 nt, Homo sapiens
  misc_RNA (1)...(19): siRNA sense strand
ucuauuuccuggguguuua

SEQ ID NO: 1718560 - RNA, 19 nt, Homo sapiens
  misc_RNA (1)...(19): siRNA sense strand
gcuggaagaagccugauau

SEQ ID NO: 1718561 - RNA, 19 nt, Homo sapiens
  misc_RNA (1)...(19): siRNA sense strand
acacacucaucaacuaugu

SEQ ID NO: 1718562 - RNA, 19 nt, Homo sapiens
  misc_RNA (1)...(19): siRNA sense strand
gcaaaggagaguacuucug

SEQ ID NO: 1718563 - RNA, 19 nt, Homo sapiens
  misc_RNA (1)...(19): siRNA sense strand
guguuucagugacuucauu

SEQ ID NO: 1718564 - RNA, 19 nt, Homo sapiens
  misc_RNA (1)...(19): siRNA sense strand
uaugugggcuucaucaacu

SEQ ID NO: 1718565 - RNA, 19 nt, Homo sapiens
  misc_RNA (1)...(19): siRNA sense strand
aggagugccugucuauuuc

SEQ ID NO: 1718566 - RNA, 19 nt, Homo sapiens
  misc_RNA (1)...(19): siRNA sense strand
gccaaugucgcuuauguca

SEQ ID NO: 1718567 - RNA, 19 nt, Homo sapiens
  misc_RNA (1)...(19): siRNA sense strand
ucgcuuaugucacugcaau

SEQ ID NO: 1718568 - RNA, 19 nt, Homo sapiens
  misc_RNA (1)...(19): siRNA sense strand
gcccugcucuucacaugca

SEQ ID NO: 1718569 - RNA, 19 nt, Homo sapiens
  misc_RNA (1)...(19): siRNA sense strand
ugacuucauugagcugcua

SEQ ID NO: 1718570 - RNA, 19 nt, Homo sapiens
  misc_RNA (1)...(19): siRNA sense strand
ggagccaaagaaugcauuu

SEQ ID NO: 1718571 - RNA, 19 nt, Homo sapiens
  misc_RNA (1)...(19): siRNA sense strand
guguaugucuuugccaaug

SEQ ID NO: 1718572 - RNA, 19 nt, Homo sapiens
  misc_RNA (1)...(19): siRNA sense strand
ccaucccacuggucacauu

SEQ ID NO: 1718573 - RNA, 19 nt, Homo sapiens
  misc_RNA (1)...(19): siRNA sense strand
ccagagccaucuucaucuc

SEQ ID NO: 1718574 - RNA, 19 nt, Homo sapiens
  misc_RNA (1)...(19): siRNA sense strand
caagaucaaccugcuguuc

SEQ ID NO: 1718575 - RNA, 19 nt, Homo sapiens
  misc_RNA (1)...(19): siRNA sense strand
ggagucauggccuggauca

SEQ ID NO: 1718576 - RNA, 19 nt, Homo sapiens
  misc_RNA (1)...(19): siRNA sense strand
agauguguguggucgugua

SEQ ID NO: 1718577 - RNA, 19 nt, Homo sapiens
  misc_RNA (1)...(19): siRNA sense strand
ggaucaugcccauuucugu

SEQ ID NO: 1718578 - RNA, 19 nt, Homo sapiens
  misc_RNA (1)...(19): siRNA sense strand
uuacgugacugaggagcuu

SEQ ID NO: 1718579 - RNA, 19 nt, Homo sapiens
  misc_RNA (1)...(19): siRNA sense strand
gagcagcagcagcccaugu

SEQ ID NO: 1718580 - RNA, 19 nt, Homo sapiens
  misc_RNA (1)...(19): siRNA sense strand
cgacauguacacacucauc

SEQ ID NO: 1718581 - RNA, 19 nt, Homo sapiens
  misc_RNA (1)...(19): siRNA sense strand
cagcccugcucuucacaug

SEQ ID NO: 1718582 - RNA, 19 nt, Homo sapiens
  misc_RNA (1)...(19): siRNA sense strand
gccuggaucaugcccauuu

SEQ ID NO: 1718583 - RNA, 19 nt, Homo sapiens
  misc_RNA (1)...(19): siRNA sense strand
ucagggcuccuuugccuau

SEQ ID NO: 1718584 - RNA, 19 nt, Homo sapiens
  misc_RNA (1)...(19): siRNA sense strand
cuauggaggcuggaacuuu

SEQ ID NO: 1718585 - RNA, 19 nt, Homo sapiens
  misc_RNA (1)...(19): siRNA sense strand
ccagcgacauguacacacu

SEQ ID NO: 1718586 - RNA, 19 nt, Homo sapiens
  misc_RNA (1)...(19): siRNA sense strand
gauaugcaaaggagaguac

SEQ ID NO: 1718587 - RNA, 19 nt, Homo sapiens
  misc_RNA (1)...(19): siRNA sense strand
uugccaaugucgcuuaugu

SEQ ID NO: 1718588 - RNA, 19 nt, Homo sapiens
  misc_RNA (1)...(19): siRNA sense strand
gauuguacagauaugcaaa

SEQ ID NO: 1718589 - RNA, 19 nt, Homo sapiens
  misc_RNA (1)...(19): siRNA sense strand
ggaguuaaugggucucucu

SEQ ID NO: 1718590 - RNA, 19 nt, Homo sapiens
  misc_RNA (1)...(19): siRNA sense strand
ggauuguacagauaugcaa

SEQ ID NO: 1718591 - RNA, 19 nt, Homo sapiens
  misc_RNA (1)...(19): siRNA sense strand
ggaggcuaaugaggacaug

SEQ ID NO: 1718592 - RNA, 19 nt, Homo sapiens
  misc_RNA (1)...(19): siRNA sense strand
caucaucuacuugcuguuc

SEQ ID NO: 1718593 - RNA, 19 nt, Homo sapiens
  misc_RNA (1)...(19): siRNA sense strand
gacauguacacacucauca

SEQ ID NO: 1718594 - RNA, 19 nt, Homo sapiens
  misc_RNA (1)...(19): siRNA sense strand
cuguugcccuguccacauu

SEQ ID NO: 1718595 - RNA, 19 nt, Homo sapiens
  misc_RNA (1)...(19): siRNA sense strand
gggcuccuuugccuaugga

SEQ ID NO: 1718596 - RNA, 19 nt, Homo sapiens
  misc_RNA (1)...(19): siRNA sense strand
ccacccggguucaagacau

SEQ ID NO: 1718597 - RNA, 19 nt, Homo sapiens
  misc_RNA (1)...(19): siRNA sense strand
ccaguguguuggccaugau

SEQ ID NO: 1718598 - RNA, 19 nt, Homo sapiens
  misc_RNA (1)...(19): siRNA sense strand
guaugucuuugccaauguc

SEQ ID NO: 1718599 - RNA, 19 nt, Homo sapiens
  misc_RNA (1)...(19): siRNA sense strand
ucccagagccaucuucauc

SEQ ID NO: 1718600 - RNA, 19 nt, Homo sapiens
  misc_RNA (1)...(19): siRNA sense strand
ucaacuaugugggcuucau

SEQ ID NO: 1718601 - RNA, 19 nt, Homo sapiens
  misc_RNA (1)...(19): siRNA sense strand
gcuggaacuuucugaauua

SEQ ID NO: 1718602 - RNA, 19 nt, Homo sapiens
  misc_RNA (1)...(19): siRNA sense strand
ggacagaggaggcuaauga

SEQ ID NO: 1718603 - RNA, 19 nt, Homo sapiens
  misc_RNA (1)...(19): siRNA sense strand
ucaacuaccucuucuaugg

SEQ ID NO: 1718604 - RNA, 19 nt, Homo sapiens
  misc_RNA (1)...(19): siRNA sense strand
ggcuggaacuuucugaauu

SEQ ID NO: 1718605 - RNA, 19 nt, Homo sapiens
  misc_RNA (1)...(19): siRNA sense strand
guuaaugggucucucuuca

SEQ ID NO: 1718606 - RNA, 19 nt, Homo sapiens
  misc_RNA (1)...(19): siRNA sense strand
caaugucgcuuaugucacu

SEQ ID NO: 1718607 - RNA, 19 nt, Homo sapiens
  misc_RNA (1)...(19): siRNA sense strand
cacgguugcuggacagaua

SEQ ID NO: 1718608 - RNA, 19 nt, Homo sapiens
  misc_RNA (1)...(19): siRNA sense strand
ggaacuuucugaauuacgu

SEQ ID NO: 1718609 - RNA, 19 nt, Homo sapiens
  misc_RNA (1)...(19): siRNA sense strand
uguacacacucaucaacua

SEQ ID NO: 1718610 - RNA, 19 nt, Homo sapiens
  misc_RNA (1)...(19): siRNA sense strand
gaucaugcccauuucuguu

SEQ ID NO: 1718611 - RNA, 19 nt, Homo sapiens
  misc_RNA (1)...(19): siRNA sense strand
gaaugcauuugagaauuuc

SEQ ID NO: 1718612 - RNA, 19 nt, Homo sapiens
  misc_RNA (1)...(19): siRNA sense strand
uauggaggcuggaacuuuc

SEQ ID NO: 1718613 - RNA, 19 nt, Homo sapiens
  misc_RNA (1)...(19): siRNA sense strand
caucaacuaccucuucuau

SEQ ID NO: 1718614 - RNA, 19 nt, Homo sapiens
  misc_RNA (1)...(19): siRNA sense strand
ugacugaggagcuuguuga

SEQ ID NO: 1718615 - RNA, 19 nt, Homo sapiens
  misc_RNA (1)...(19): siRNA sense strand
guacacacucaucaacuau

SEQ ID NO: 1718616 - RNA, 19 nt, Homo sapiens
  misc_RNA (1)...(19): siRNA sense strand
ucuauuuccuggguguuua

SEQ ID NO: 1718617 - RNA, 19 nt, Homo sapiens
  misc_RNA (1)...(19): siRNA sense strand
gcuggaagaagccugauau

SEQ ID NO: 1718618 - RNA, 19 nt, Homo sapiens
  misc_RNA (1)...(19): siRNA sense strand
acacacucaucaacuaugu

SEQ ID NO: 1718619 - RNA, 19 nt, Homo sapiens
  misc_RNA (1)...(19): siRNA sense strand
gcaaaggagaguacuucug

SEQ ID NO: 1718620 - RNA, 19 nt, Homo sapiens
  misc_RNA (1)...(19): siRNA sense strand
guguuucagugacuucauu

SEQ ID NO: 1718621 - RNA, 19 nt, Homo sapiens
  misc_RNA (1)...(19): siRNA sense strand
uaugugggcuucaucaacu

SEQ ID NO: 1718622 - RNA, 19 nt, Homo sapiens
  misc_RNA (1)...(19): siRNA sense strand
aggagugccugucuauuuc

SEQ ID NO: 1718623 - RNA, 19 nt, Homo sapiens
  misc_RNA (1)...(19): siRNA sense strand
gccaaugucgcuuauguca

SEQ ID NO: 1718624 - RNA, 19 nt, Homo sapiens
  misc_RNA (1)...(19): siRNA sense strand
ucgcuuaugucacugcaau

SEQ ID NO: 1718625 - RNA, 19 nt, Homo sapiens
  misc_RNA (1)...(19): siRNA sense strand
gcccugcucuucacaugca

SEQ ID NO: 1718626 - RNA, 19 nt, Homo sapiens
  misc_RNA (1)...(19): siRNA sense strand
ugacuucauugagcugcua

SEQ ID NO: 1718627 - RNA, 19 nt, Homo sapiens
  misc_RNA (1)...(19): siRNA sense strand
ccagagccaucuucaucuc

SEQ ID NO: 1718628 - RNA, 19 nt, Homo sapiens
  misc_RNA (1)...(19): siRNA sense strand
ggagccaaagaaugcauuu

SEQ ID NO: 1718629 - RNA, 19 nt, Homo sapiens
  misc_RNA (1)...(19): siRNA sense strand
guguaugucuuugccaaug

SEQ ID NO: 1718630 - RNA, 19 nt, Homo sapiens
  misc_RNA (1)...(19): siRNA sense strand
ccaucccacuggucacauu

SEQ ID NO: 1718631 - RNA, 19 nt, Homo sapiens
  misc_RNA (1)...(19): siRNA sense strand
caagaucaaccugcuguuc

SEQ ID NO: 1718632 - RNA, 19 nt, Homo sapiens
  misc_RNA (1)...(19): siRNA sense strand
ggagucauggccuggauca

SEQ ID NO: 1718633 - RNA, 19 nt, Homo sapiens
  misc_RNA (1)...(19): siRNA sense strand
agauguguguggucgugua

SEQ ID NO: 1718634 - RNA, 19 nt, Homo sapiens
  misc_RNA (1)...(19): siRNA sense strand
ggaucaugcccauuucugu

SEQ ID NO: 1718635 - RNA, 19 nt, Homo sapiens
  misc_RNA (1)...(19): siRNA sense strand
uuacgugacugaggagcuu

SEQ ID NO: 1718636 - RNA, 19 nt, Homo sapiens
  misc_RNA (1)...(19): siRNA sense strand
gagcagcagcagcccaugu

SEQ ID NO: 1718637 - RNA, 19 nt, Homo sapiens
  misc_RNA (1)...(19): siRNA sense strand
cgacauguacacacucauc

SEQ ID NO: 1718638 - RNA, 19 nt, Homo sapiens
  misc_RNA (1)...(19): siRNA sense strand
cagcccugcucuucacaug

SEQ ID NO: 1718639 - RNA, 19 nt, Homo sapiens
  misc_RNA (1)...(19): siRNA sense strand
gccuggaucaugcccauuu

SEQ ID NO: 1718640 - RNA, 19 nt, Homo sapiens
  misc_RNA (1)...(19): siRNA sense strand
ucagggcuccuuugccuau

SEQ ID NO: 1718641 - RNA, 19 nt, Homo sapiens
  misc_RNA (1)...(19): siRNA sense strand
gauuguacagauaugcaaa

SEQ ID NO: 1718642 - RNA, 19 nt, Homo sapiens
  misc_RNA (1)...(19): siRNA sense strand
ccagcgacauguacacacu

SEQ ID NO: 1718643 - RNA, 19 nt, Homo sapiens
  misc_RNA (1)...(19): siRNA sense strand
gauaugcaaaggagaguac

SEQ ID NO: 1718644 - RNA, 19 nt, Homo sapiens
  misc_RNA (1)...(19): siRNA sense strand
uugccaaugucgcuuaugu

SEQ ID NO: 1718645 - RNA, 19 nt, Homo sapiens
  misc_RNA (1)...(19): siRNA sense strand
cuauggaggcuggaacuuu

SEQ ID NO: 1718646 - RNA, 19 nt, Homo sapiens
  misc_RNA (1)...(19): siRNA sense strand
ggaguuaaugggucucucu

SEQ ID NO: 1718647 - RNA, 19 nt, Homo sapiens
  misc_RNA (1)...(19): siRNA sense strand
gacauguacacacucauca

SEQ ID NO: 1718648 - RNA, 19 nt, Homo sapiens
  misc_RNA (1)...(19): siRNA sense strand
ggaggcuaaugaggacaug

SEQ ID NO: 1718649 - RNA, 19 nt, Homo sapiens
  misc_RNA (1)...(19): siRNA sense strand
caucaucuacuugcuguuc

SEQ ID NO: 1718650 - RNA, 19 nt, Homo sapiens
  misc_RNA (1)...(19): siRNA sense strand
ggauuguacagauaugcaa

SEQ ID NO: 1718651 - RNA, 19 nt, Homo sapiens
  misc_RNA (1)...(19): siRNA sense strand
cuguugcccuguccacauu

SEQ ID NO: 1718652 - RNA, 19 nt, Homo sapiens
  misc_RNA (1)...(19): siRNA sense strand
guaugucuuugccaauguc

SEQ ID NO: 1718653 - RNA, 19 nt, Homo sapiens
  misc_RNA (1)...(19): siRNA sense strand
gggcuccuuugccuaugga

SEQ ID NO: 1718654 - RNA, 19 nt, Homo sapiens
  misc_RNA (1)...(19): siRNA sense strand
ccaguguguuggccaugau

SEQ ID NO: 1718655 - RNA, 19 nt, Homo sapiens
  misc_RNA (1)...(19): siRNA sense strand
ucccagagccaucuucauc

SEQ ID NO: 1718656 - RNA, 19 nt, Homo sapiens
  misc_RNA (1)...(19): siRNA sense strand
ucaacuaugugggcuucau

SEQ ID NO: 1718657 - RNA, 19 nt, Homo sapiens
  misc_RNA (1)...(19): siRNA sense strand
ccaaacagcugcccucauu

SEQ ID NO: 1718658 - RNA, 19 nt, Homo sapiens
  misc_RNA (1)...(19): siRNA sense strand
ggagagagauugaugacuu

SEQ ID NO: 1718659 - RNA, 19 nt, Homo sapiens
  misc_RNA (1)...(19): siRNA sense strand
ggaaguaugugucucagaa

SEQ ID NO: 1718660 - RNA, 19 nt, Homo sapiens
  misc_RNA (1)...(19): siRNA sense strand
gaucugggauggaauugua

SEQ ID NO: 1718661 - RNA, 19 nt, Homo sapiens
  misc_RNA (1)...(19): siRNA sense strand
gaacagauuucauucaaac

SEQ ID NO: 1718662 - RNA, 19 nt, Homo sapiens
  misc_RNA (1)...(19): siRNA sense strand
caacagaucaagaacauuu

SEQ ID NO: 1718663 - RNA, 19 nt, Homo sapiens
  misc_RNA (1)...(19): siRNA sense strand
ccaaacagcugcaguucuu

SEQ ID NO: 1718664 - RNA, 19 nt, Homo sapiens
  misc_RNA (1)...(19): siRNA sense strand
uggaagagcuggucacuau

SEQ ID NO: 1718665 - RNA, 19 nt, Homo sapiens
  misc_RNA (1)...(19): siRNA sense strand
gagagagauugaugacuuu

SEQ ID NO: 1718666 - RNA, 19 nt, Homo sapiens
  misc_RNA (1)...(19): siRNA sense strand
caaagaggauaaugagaga

SEQ ID NO: 1718667 - RNA, 19 nt, Homo sapiens
  misc_RNA (1)...(19): siRNA sense strand
gguuaaagcucuucuugga

SEQ ID NO: 1718668 - RNA, 19 nt, Homo sapiens
  misc_RNA (1)...(19): siRNA sense strand
caagaucgaugccgugaug

SEQ ID NO: 1718669 - RNA, 19 nt, Homo sapiens
  misc_RNA (1)...(19): siRNA sense strand
uggaaugccugaacaauga

SEQ ID NO: 1718670 - RNA, 19 nt, Homo sapiens
  misc_RNA (1)...(19): siRNA sense strand
gagcaugguucaucgauag

SEQ ID NO: 1718671 - RNA, 19 nt, Homo sapiens
  misc_RNA (1)...(19): siRNA sense strand
aagaaaggcuugugcagaa

SEQ ID NO: 1718672 - RNA, 19 nt, Homo sapiens
  misc_RNA (1)...(19): siRNA sense strand
cgaaugcacacucaaauaa

SEQ ID NO: 1718673 - RNA, 19 nt, Homo sapiens
  misc_RNA (1)...(19): siRNA sense strand
caacaucuguguccucuac

SEQ ID NO: 1718674 - RNA, 19 nt, Homo sapiens
  misc_RNA (1)...(19): siRNA sense strand
uaaagaagcacacagucua

SEQ ID NO: 1718675 - RNA, 19 nt, Homo sapiens
  misc_RNA (1)...(19): siRNA sense strand
ugacaacucucacacagau

SEQ ID NO: 1718676 - RNA, 19 nt, Homo sapiens
  misc_RNA (1)...(19): siRNA sense strand
gagcuauguuucugaaguu

SEQ ID NO: 1718677 - RNA, 19 nt, Homo sapiens
  misc_RNA (1)...(19): siRNA sense strand
ugacaugcuucguaaauuc

SEQ ID NO: 1718678 - RNA, 19 nt, Homo sapiens
  misc_RNA (1)...(19): siRNA sense strand
gaccauuccuguuacaaau

SEQ ID NO: 1718679 - RNA, 19 nt, Homo sapiens
  misc_RNA (1)...(19): siRNA sense strand
ggucauccgugugaaguuu

SEQ ID NO: 1718680 - RNA, 19 nt, Homo sapiens
  misc_RNA (1)...(19): siRNA sense strand
gcagaaguccagaagguuu

SEQ ID NO: 1718681 - RNA, 19 nt, Homo sapiens
  misc_RNA (1)...(19): siRNA sense strand
ggagucgacugcagagaga

SEQ ID NO: 1718682 - RNA, 19 nt, Homo sapiens
  misc_RNA (1)...(19): siRNA sense strand
cagauggguucgugaguuu

SEQ ID NO: 1718683 - RNA, 19 nt, Homo sapiens
  misc_RNA (1)...(19): siRNA sense strand
gaagaacagauuucauuca

SEQ ID NO: 1718684 - RNA, 19 nt, Homo sapiens
  misc_RNA (1)...(19): siRNA sense strand
gcacaguucucagacaauc

SEQ ID NO: 1718685 - RNA, 19 nt, Homo sapiens
  misc_RNA (1)...(19): siRNA sense strand
gaaugcacacucaaauaaa

SEQ ID NO: 1718686 - RNA, 19 nt, Homo sapiens
  misc_RNA (1)...(19): siRNA sense strand
gggauggaauuguagagaa

SEQ ID NO: 1718687 - RNA, 19 nt, Homo sapiens
  misc_RNA (1)...(19): siRNA sense strand
gaaggaugccauacgcuuu

SEQ ID NO: 1718688 - RNA, 19 nt, Homo sapiens
  misc_RNA (1)...(19): siRNA sense strand
gaaucaaagaggauaauga

SEQ ID NO: 1718689 - RNA, 19 nt, Homo sapiens
  misc_RNA (1)...(19): siRNA sense strand
ccucuuuccugaauucuuu

SEQ ID NO: 1718690 - RNA, 19 nt, Homo sapiens
  misc_RNA (1)...(19): siRNA sense strand
uuaaagcucuucuuggaau

SEQ ID NO: 1718691 - RNA, 19 nt, Homo sapiens
  misc_RNA (1)...(19): siRNA sense strand
aaacugcuguuccuauuca

SEQ ID NO: 1718692 - RNA, 19 nt, Homo sapiens
  misc_RNA (1)...(19): siRNA sense strand
gugugaaguuugucaauga

SEQ ID NO: 1718693 - RNA, 19 nt, Homo sapiens
  misc_RNA (1)...(19): siRNA sense strand
gaagaccauuccuguuaca

SEQ ID NO: 1718694 - RNA, 19 nt, Homo sapiens
  misc_RNA (1)...(19): siRNA sense strand
aagcagggauugaucaaga

SEQ ID NO: 1718695 - RNA, 19 nt, Homo sapiens
  misc_RNA (1)...(19): siRNA sense strand
gagaucaucaagagaguuu

SEQ ID NO: 1718696 - RNA, 19 nt, Homo sapiens
  misc_RNA (1)...(19): siRNA sense strand
agaauuaccugcagcucuu

SEQ ID NO: 1718697 - RNA, 19 nt, Homo sapiens
  misc_RNA (1)...(19): siRNA sense strand
gauaaugagagauuugaga

SEQ ID NO: 1718698 - RNA, 19 nt, Homo sapiens
  misc_RNA (1)...(19): siRNA sense strand
ggauuccguuccauuauca

SEQ ID NO: 1718699 - RNA, 19 nt, Homo sapiens
  misc_RNA (1)...(19): siRNA sense strand
uggaagagaucaucaagag

SEQ ID NO: 1718700 - RNA, 19 nt, Homo sapiens
  misc_RNA (1)...(19): siRNA sense strand
ucacgaugcuugucaccuu

SEQ ID NO: 1718701 - RNA, 19 nt, Homo sapiens
  misc_RNA (1)...(19): siRNA sense strand
gaacacgggcuuugaacuc

SEQ ID NO: 1718702 - RNA, 19 nt, Homo sapiens
  misc_RNA (1)...(19): siRNA sense strand
cauccuacauccaugagaa

SEQ ID NO: 1718703 - RNA, 19 nt, Homo sapiens
  misc_RNA (1)...(19): siRNA sense strand
ugagagauuugagaaguug

SEQ ID NO: 1718704 - RNA, 19 nt, Homo sapiens
  misc_RNA (1)...(19): siRNA sense strand
gaugagagagcuauguuuc

SEQ ID NO: 1718705 - RNA, 19 nt, Homo sapiens
  misc_RNA (1)...(19): siRNA sense strand
gcgggcagcuguugugauc

SEQ ID NO: 1718706 - RNA, 19 nt, Homo sapiens
  misc_RNA (1)...(19): siRNA sense strand
uaccagaccucgcugacaa

SEQ ID NO: 1718707 - RNA, 19 nt, Homo sapiens
  misc_RNA (1)...(19): siRNA sense strand
ccagaagguuugcaacauc

SEQ ID NO: 1718708 - RNA, 19 nt, Homo sapiens
  misc_RNA (1)...(19): siRNA sense strand
ucaagaacauuuuguggua

SEQ ID NO: 1718709 - RNA, 19 nt, Homo sapiens
  misc_RNA (1)...(19): siRNA sense strand
ggauucaacagaucaagaa

SEQ ID NO: 1718710 - RNA, 19 nt, Homo sapiens
  misc_RNA (1)...(19): siRNA sense strand
gaccagcgaugaaccacau

SEQ ID NO: 1718711 - RNA, 19 nt, Homo sapiens
  misc_RNA (1)...(19): siRNA sense strand
gaacaaugacacugaagag

SEQ ID NO: 1718712 - RNA, 19 nt, Homo sapiens
  misc_RNA (1)...(19): siRNA sense strand
cacaauccuugaugacauu

SEQ ID NO: 1718713 - RNA, 19 nt, Homo sapiens
  misc_RNA (1)...(19): siRNA sense strand
caccacagcgucuucuaua

SEQ ID NO: 1718714 - RNA, 19 nt, Homo sapiens
  misc_RNA (1)...(19): siRNA sense strand
gcacucaaucuguucaaga

SEQ ID NO: 1718715 - RNA, 19 nt, Homo sapiens
  misc_RNA (1)...(19): siRNA sense strand
gcaaauauaaugggacauc

SEQ ID NO: 1718716 - RNA, 19 nt, Homo sapiens
  misc_RNA (1)...(19): siRNA sense strand
ucucaucucuggcgacaau

SEQ ID NO: 1718717 - RNA, 19 nt, Homo sapiens
  misc_RNA (1)...(19): siRNA sense strand
gaagagcuggucacuaucu

SEQ ID NO: 1718718 - RNA, 19 nt, Homo sapiens
  misc_RNA (1)...(19): siRNA sense strand
agaaugugcucccagugaa

SEQ ID NO: 1718719 - RNA, 19 nt, Homo sapiens
  misc_RNA (1)...(19): siRNA sense strand
gaacugcagcgucucaucu

SEQ ID NO: 1718720 - RNA, 19 nt, Homo sapiens
  misc_RNA (1)...(19): siRNA sense strand
ggacgaagcagggauugau

SEQ ID NO: 1718721 - RNA, 19 nt, Homo sapiens
  misc_RNA (1)...(19): siRNA sense strand
ucacaauccuugaugacau

SEQ ID NO: 1718722 - RNA, 19 nt, Homo sapiens
  misc_RNA (1)...(19): siRNA sense strand
gcgaaaggaucucaaaccu

SEQ ID NO: 1718723 - RNA, 19 nt, Homo sapiens
  misc_RNA (1)...(19): siRNA sense strand
ugagagagcuauguuucug

SEQ ID NO: 1718724 - RNA, 19 nt, Homo sapiens
  misc_RNA (1)...(19): siRNA sense strand
cacaguugauccugcagua

SEQ ID NO: 1718725 - RNA, 19 nt, Homo sapiens
  misc_RNA (1)...(19): siRNA sense strand
ccuaaggugugguaugugu

SEQ ID NO: 1718726 - RNA, 19 nt, Homo sapiens
  misc_RNA (1)...(19): siRNA sense strand
agagagcuauguuucugaa

SEQ ID NO: 1718727 - RNA, 19 nt, Homo sapiens
  misc_RNA (1)...(19): siRNA sense strand
cgaaaggaucucaaaccua

SEQ ID NO: 1718728 - RNA, 19 nt, Homo sapiens
  misc_RNA (1)...(19): siRNA sense strand
gaugaucugggauggaauu

SEQ ID NO: 1718729 - RNA, 19 nt, Homo sapiens
  misc_RNA (1)...(19): siRNA sense strand
ccacuggcauccuguccuu

SEQ ID NO: 1718730 - RNA, 19 nt, Homo sapiens
  misc_RNA (1)...(19): siRNA sense strand
agagagauaucaggagaga

SEQ ID NO: 1718731 - RNA, 19 nt, Homo sapiens
  misc_RNA (1)...(19): siRNA sense strand
gaaacugcuguuccuauuc

SEQ ID NO: 1718732 - RNA, 19 nt, Homo sapiens
  misc_RNA (1)...(19): siRNA sense strand
caaacagcugcccucauua

SEQ ID NO: 1718733 - RNA, 19 nt, Homo sapiens
  misc_RNA (1)...(19): siRNA sense strand
uaucuccucuuuccugaau

SEQ ID NO: 1718734 - RNA, 19 nt, Homo sapiens
  misc_RNA (1)...(19): siRNA sense strand
gccauacgcuuugucuaau

SEQ ID NO: 1718735 - RNA, 19 nt, Homo sapiens
  misc_RNA (1)...(19): siRNA sense strand
ggaugagagagcuauguuu

SEQ ID NO: 1718736 - RNA, 19 nt, Homo sapiens
  misc_RNA (1)...(19): siRNA sense strand
ucuggaagauuuaaagaag

SEQ ID NO: 1718737 - RNA, 19 nt, Homo sapiens
  misc_RNA (1)...(19): siRNA sense strand
gcaucaguccggaauauuc

SEQ ID NO: 1718738 - RNA, 19 nt, Homo sapiens
  misc_RNA (1)...(19): siRNA sense strand
gcacuuuaacagcagcuuu

SEQ ID NO: 1718739 - RNA, 19 nt, Homo sapiens
  misc_RNA (1)...(19): siRNA sense strand
agagauaucaggagagaga

SEQ ID NO: 1718740 - RNA, 19 nt, Homo sapiens
  misc_RNA (1)...(19): siRNA sense strand
uggaugaacugccuucucu

SEQ ID NO: 1718741 - RNA, 19 nt, Homo sapiens
  misc_RNA (1)...(19): siRNA sense strand
ggauggaauuguagagaac

SEQ ID NO: 1718742 - RNA, 19 nt, Homo sapiens
  misc_RNA (1)...(19): siRNA sense strand
cagaaugugcucccaguga

SEQ ID NO: 1718743 - RNA, 19 nt, Homo sapiens
  misc_RNA (1)...(19): siRNA sense strand
gcaggacucccgacucauc

SEQ ID NO: 1718744 - RNA, 19 nt, Homo sapiens
  misc_RNA (1)...(19): siRNA sense strand
ggaagucacagagucauca

SEQ ID NO: 1718745 - RNA, 19 nt, Homo sapiens
  misc_RNA (1)...(19): siRNA sense strand
ucgaaugcacacucaaaua

SEQ ID NO: 1718746 - RNA, 19 nt, Homo sapiens
  misc_RNA (1)...(19): siRNA sense strand
gaucgaugccgugauguau

SEQ ID NO: 1718747 - RNA, 19 nt, Homo sapiens
  misc_RNA (1)...(19): siRNA sense strand
gggaaaaggugaaagucuu

SEQ ID NO: 1718748 - RNA, 19 nt, Homo sapiens
  misc_RNA (1)...(19): siRNA sense strand
ggaaaauucuucggggaaa

SEQ ID NO: 1718749 - RNA, 19 nt, Homo sapiens
  misc_RNA (1)...(19): siRNA sense strand
gggauucgccuaccucaag

SEQ ID NO: 1718750 - RNA, 19 nt, Homo sapiens
  misc_RNA (1)...(19): siRNA sense strand
agaccucgcugacaacucu

SEQ ID NO: 1718751 - RNA, 19 nt, Homo sapiens
  misc_RNA (1)...(19): siRNA sense strand
gauaucaggagagagauug

SEQ ID NO: 1718752 - RNA, 19 nt, Homo sapiens
  misc_RNA (1)...(19): siRNA sense strand
cggcaucaguccggaauau

SEQ ID NO: 1718753 - RNA, 19 nt, Homo sapiens
  misc_RNA (1)...(19): siRNA sense strand
ccagugaagagucuccuaa

SEQ ID NO: 1718754 - RNA, 19 nt, Homo sapiens
  misc_RNA (1)...(19): siRNA sense strand
acagauggguucgugaguu

SEQ ID NO: 1718755 - RNA, 19 nt, Homo sapiens
  misc_RNA (1)...(19): siRNA sense strand
aaugagagauuugagaagu

SEQ ID NO: 1718756 - RNA, 19 nt, Homo sapiens
  misc_RNA (1)...(19): siRNA sense strand
cuacuacggugguuuccau

SEQ ID NO: 1718757 - RNA, 19 nt, Homo sapiens
  misc_RNA (1)...(19): siRNA sense strand
ggagagagauugaugacuu

SEQ ID NO: 1718758 - RNA, 19 nt, Homo sapiens
  misc_RNA (1)...(19): siRNA sense strand
ggaaguaugugucucagaa

SEQ ID NO: 1718759 - RNA, 19 nt, Homo sapiens
  misc_RNA (1)...(19): siRNA sense strand
gaucugggauggaauugua

SEQ ID NO: 1718760 - RNA, 19 nt, Homo sapiens
  misc_RNA (1)...(19): siRNA sense strand
gaacagauuucauucaaac

SEQ ID NO: 1718761 - RNA, 19 nt, Homo sapiens
  misc_RNA (1)...(19): siRNA sense strand
caacagaucaagaacauuu

SEQ ID NO: 1718762 - RNA, 19 nt, Homo sapiens
  misc_RNA (1)...(19): siRNA sense strand
ccaaacagcugcaguucuu

SEQ ID NO: 1718763 - RNA, 19 nt, Homo sapiens
  misc_RNA (1)...(19): siRNA sense strand
uggaagagcuggucacuau

SEQ ID NO: 1718764 - RNA, 19 nt, Homo sapiens
  misc_RNA (1)...(19): siRNA sense strand
gagagagauugaugacuuu

SEQ ID NO: 1718765 - RNA, 19 nt, Homo sapiens
  misc_RNA (1)...(19): siRNA sense strand
caaagaggauaaugagaga

SEQ ID NO: 1718766 - RNA, 19 nt, Homo sapiens
  misc_RNA (1)...(19): siRNA sense strand
gguuaaagcucuucuugga

SEQ ID NO: 1718767 - RNA, 19 nt, Homo sapiens
  misc_RNA (1)...(19): siRNA sense strand
caagaucgaugccgugaug

SEQ ID NO: 1718768 - RNA, 19 nt, Homo sapiens
  misc_RNA (1)...(19): siRNA sense strand
uggaaugccugaacaauga

SEQ ID NO: 1718769 - RNA, 19 nt, Homo sapiens
  misc_RNA (1)...(19): siRNA sense strand
gagcaugguucaucgauag

SEQ ID NO: 1718770 - RNA, 19 nt, Homo sapiens
  misc_RNA (1)...(19): siRNA sense strand
aagaaaggcuugugcagaa

SEQ ID NO: 1718771 - RNA, 19 nt, Homo sapiens
  misc_RNA (1)...(19): siRNA sense strand
caacaucuguguccucuac

SEQ ID NO: 1718772 - RNA, 19 nt, Homo sapiens
  misc_RNA (1)...(19): siRNA sense strand
ugacaacucucacacagau

SEQ ID NO: 1718773 - RNA, 19 nt, Homo sapiens
  misc_RNA (1)...(19): siRNA sense strand
ugacaugcuucguaaauuc

SEQ ID NO: 1718774 - RNA, 19 nt, Homo sapiens
  misc_RNA (1)...(19): siRNA sense strand
gcagaaguccagaagguuu

SEQ ID NO: 1718775 - RNA, 19 nt, Homo sapiens
  misc_RNA (1)...(19): siRNA sense strand
ggagucgacugcagagaga

SEQ ID NO: 1718776 - RNA, 19 nt, Homo sapiens
  misc_RNA (1)...(19): siRNA sense strand
cagauggguucgugaguuu

SEQ ID NO: 1718777 - RNA, 19 nt, Homo sapiens
  misc_RNA (1)...(19): siRNA sense strand
gaagaacagauuucauuca

SEQ ID NO: 1718778 - RNA, 19 nt, Homo sapiens
  misc_RNA (1)...(19): siRNA sense strand
gcacaguucucagacaauc

SEQ ID NO: 1718779 - RNA, 19 nt, Homo sapiens
  misc_RNA (1)...(19): siRNA sense strand
gggauggaauuguagagaa

SEQ ID NO: 1718780 - RNA, 19 nt, Homo sapiens
  misc_RNA (1)...(19): siRNA sense strand
gaaggaugccauacgcuuu

SEQ ID NO: 1718781 - RNA, 19 nt, Homo sapiens
  misc_RNA (1)...(19): siRNA sense strand
gaaucaaagaggauaauga

SEQ ID NO: 1718782 - RNA, 19 nt, Homo sapiens
  misc_RNA (1)...(19): siRNA sense strand
ccucuuuccugaauucuuu

SEQ ID NO: 1718783 - RNA, 19 nt, Homo sapiens
  misc_RNA (1)...(19): siRNA sense strand
uuaaagcucuucuuggaau

SEQ ID NO: 1718784 - RNA, 19 nt, Homo sapiens
  misc_RNA (1)...(19): siRNA sense strand
aaacugcuguuccuauuca

SEQ ID NO: 1718785 - RNA, 19 nt, Homo sapiens
  misc_RNA (1)...(19): siRNA sense strand
gauaaugagagauuugaga

SEQ ID NO: 1718786 - RNA, 19 nt, Homo sapiens
  misc_RNA (1)...(19): siRNA sense strand
ucacgaugcuugucaccuu

SEQ ID NO: 1718787 - RNA, 19 nt, Homo sapiens
  misc_RNA (1)...(19): siRNA sense strand
ugagagauuugagaaguug

SEQ ID NO: 1718788 - RNA, 19 nt, Homo sapiens
  misc_RNA (1)...(19): siRNA sense strand
gcgggcagcuguugugauc

SEQ ID NO: 1718789 - RNA, 19 nt, Homo sapiens
  misc_RNA (1)...(19): siRNA sense strand
uaccagaccucgcugacaa

SEQ ID NO: 1718790 - RNA, 19 nt, Homo sapiens
  misc_RNA (1)...(19): siRNA sense strand
ccagaagguuugcaacauc

SEQ ID NO: 1718791 - RNA, 19 nt, Homo sapiens
  misc_RNA (1)...(19): siRNA sense strand
ucaagaacauuuuguggua

SEQ ID NO: 1718792 - RNA, 19 nt, Homo sapiens
  misc_RNA (1)...(19): siRNA sense strand
ggauucaacagaucaagaa

SEQ ID NO: 1718793 - RNA, 19 nt, Homo sapiens
  misc_RNA (1)...(19): siRNA sense strand
gaccagcgaugaaccacau

SEQ ID NO: 1718794 - RNA, 19 nt, Homo sapiens
  misc_RNA (1)...(19): siRNA sense strand
gaacaaugacacugaagag

SEQ ID NO: 1718795 - RNA, 19 nt, Homo sapiens
  misc_RNA (1)...(19): siRNA sense strand
cacaauccuugaugacauu

SEQ ID NO: 1718796 - RNA, 19 nt, Homo sapiens
  misc_RNA (1)...(19): siRNA sense strand
gcaaauauaaugggacauc

SEQ ID NO: 1718797 - RNA, 19 nt, Homo sapiens
  misc_RNA (1)...(19): siRNA sense strand
gaagagcuggucacuaucu

SEQ ID NO: 1718798 - RNA, 19 nt, Homo sapiens
  misc_RNA (1)...(19): siRNA sense strand
agaaugugcucccagugaa

SEQ ID NO: 1718799 - RNA, 19 nt, Homo sapiens
  misc_RNA (1)...(19): siRNA sense strand
ucacaauccuugaugacau

SEQ ID NO: 1718800 - RNA, 19 nt, Homo sapiens
  misc_RNA (1)...(19): siRNA sense strand
gcgaaaggaucucaaaccu

SEQ ID NO: 1718801 - RNA, 19 nt, Homo sapiens
  misc_RNA (1)...(19): siRNA sense strand
cacaguugauccugcagua

SEQ ID NO: 1718802 - RNA, 19 nt, Homo sapiens
  misc_RNA (1)...(19): siRNA sense strand
ccuaaggugugguaugugu

SEQ ID NO: 1718803 - RNA, 19 nt, Homo sapiens
  misc_RNA (1)...(19): siRNA sense strand
cgaaaggaucucaaaccua

SEQ ID NO: 1718804 - RNA, 19 nt, Homo sapiens
  misc_RNA (1)...(19): siRNA sense strand
agagagauaucaggagaga

SEQ ID NO: 1718805 - RNA, 19 nt, Homo sapiens
  misc_RNA (1)...(19): siRNA sense strand
gaugaucugggauggaauu

SEQ ID NO: 1718806 - RNA, 19 nt, Homo sapiens
  misc_RNA (1)...(19): siRNA sense strand
ccacuggcauccuguccuu

SEQ ID NO: 1718807 - RNA, 19 nt, Homo sapiens
  misc_RNA (1)...(19): siRNA sense strand
gaaacugcuguuccuauuc

SEQ ID NO: 1718808 - RNA, 19 nt, Homo sapiens
  misc_RNA (1)...(19): siRNA sense strand
uaucuccucuuuccugaau

SEQ ID NO: 1718809 - RNA, 19 nt, Homo sapiens
  misc_RNA (1)...(19): siRNA sense strand
gccauacgcuuugucuaau

SEQ ID NO: 1718810 - RNA, 19 nt, Homo sapiens
  misc_RNA (1)...(19): siRNA sense strand
gcaucaguccggaauauuc

SEQ ID NO: 1718811 - RNA, 19 nt, Homo sapiens
  misc_RNA (1)...(19): siRNA sense strand
gcacuuuaacagcagcuuu

SEQ ID NO: 1718812 - RNA, 19 nt, Homo sapiens
  misc_RNA (1)...(19): siRNA sense strand
agagauaucaggagagaga

SEQ ID NO: 1718813 - RNA, 19 nt, Homo sapiens
  misc_RNA (1)...(19): siRNA sense strand
ggauggaauuguagagaac

SEQ ID NO: 1718814 - RNA, 19 nt, Homo sapiens
  misc_RNA (1)...(19): siRNA sense strand
cagaaugugcucccaguga

SEQ ID NO: 1718815 - RNA, 19 nt, Homo sapiens
  misc_RNA (1)...(19): siRNA sense strand
gcaggacucccgacucauc

SEQ ID NO: 1718816 - RNA, 19 nt, Homo sapiens
  misc_RNA (1)...(19): siRNA sense strand
gaucgaugccgugauguau

SEQ ID NO: 1718817 - RNA, 19 nt, Homo sapiens
  misc_RNA (1)...(19): siRNA sense strand
gggaaaaggugaaagucuu

SEQ ID NO: 1718818 - RNA, 19 nt, Homo sapiens
  misc_RNA (1)...(19): siRNA sense strand
gauaucaggagagagauug

SEQ ID NO: 1718819 - RNA, 19 nt, Homo sapiens
  misc_RNA (1)...(19): siRNA sense strand
agaccucgcugacaacucu

SEQ ID NO: 1718820 - RNA, 19 nt, Homo sapiens
  misc_RNA (1)...(19): siRNA sense strand
cggcaucaguccggaauau

SEQ ID NO: 1718821 - RNA, 19 nt, Homo sapiens
  misc_RNA (1)...(19): siRNA sense strand
ccagugaagagucuccuaa

SEQ ID NO: 1718822 - RNA, 19 nt, Homo sapiens
  misc_RNA (1)...(19): siRNA sense strand
acagauggguucgugaguu

SEQ ID NO: 1718823 - RNA, 19 nt, Homo sapiens
  misc_RNA (1)...(19): siRNA sense strand
ggaaaauucuucggggaaa

SEQ ID NO: 1718824 - RNA, 19 nt, Homo sapiens
  misc_RNA (1)...(19): siRNA sense strand
gaggauaaugagagauuug

SEQ ID NO: 1718825 - RNA, 19 nt, Homo sapiens
  misc_RNA (1)...(19): siRNA sense strand
ugccauacgcuuugucuaa

SEQ ID NO: 1718826 - RNA, 19 nt, Homo sapiens
  misc_RNA (1)...(19): siRNA sense strand
aaugagagauuugagaagu

SEQ ID NO: 1718827 - RNA, 19 nt, Homo sapiens
  misc_RNA (1)...(19): siRNA sense strand
cugcaggacucccgacuca

SEQ ID NO: 1718828 - RNA, 19 nt, Homo sapiens
  misc_RNA (1)...(19): siRNA sense strand
ccacaugucaucccucaca

SEQ ID NO: 1718829 - RNA, 19 nt, Homo sapiens
  misc_RNA (1)...(19): siRNA sense strand
gaacucgacagggacagaa

SEQ ID NO: 1718830 - RNA, 19 nt, Homo sapiens
  misc_RNA (1)...(19): siRNA sense strand
agagcaugguucaucgaua

SEQ ID NO: 1718831 - RNA, 19 nt, Homo sapiens
  misc_RNA (1)...(19): siRNA sense strand
cagaagguuugcaacaucu

SEQ ID NO: 1718832 - RNA, 19 nt, Homo sapiens
  misc_RNA (1)...(19): siRNA sense strand
ccauacgcuuugucuaaug

SEQ ID NO: 1718833 - RNA, 19 nt, Homo sapiens
  misc_RNA (1)...(19): siRNA sense strand
cgugauguaugugaaaguu

SEQ ID NO: 1718834 - RNA, 19 nt, Homo sapiens
  misc_RNA (1)...(19): siRNA sense strand
ugacucaucucagcacagu

SEQ ID NO: 1718835 - RNA, 19 nt, Homo sapiens
  misc_RNA (1)...(19): siRNA sense strand
gaaaauucuucggggaaaa

SEQ ID NO: 1718836 - RNA, 19 nt, Homo sapiens
  misc_RNA (1)...(19): siRNA sense strand
ccugaacaaugacacugaa

SEQ ID NO: 1718837 - RNA, 19 nt, Homo sapiens
  misc_RNA (1)...(19): siRNA sense strand
caaauauaaugggacaucu

SEQ ID NO: 1718838 - RNA, 19 nt, Homo sapiens
  misc_RNA (1)...(19): siRNA sense strand
ggaccucacccuccuuugg

SEQ ID NO: 1718839 - RNA, 19 nt, Homo sapiens
  misc_RNA (1)...(19): siRNA sense strand
ccaaggagaaggagaaacu

SEQ ID NO: 1718840 - RNA, 19 nt, Homo sapiens
  misc_RNA (1)...(19): siRNA sense strand
ggucucacuuaccuugaug

SEQ ID NO: 1718841 - RNA, 19 nt, Homo sapiens
  misc_RNA (1)...(19): siRNA sense strand
caaugcacuugaucaccaa

SEQ ID NO: 1718842 - RNA, 19 nt, Homo sapiens
  misc_RNA (1)...(19): siRNA sense strand
gggcaaccuccuacacuug

SEQ ID NO: 1718843 - RNA, 19 nt, Homo sapiens
  misc_RNA (1)...(19): siRNA sense strand
ucgaugccgugauguaugu

SEQ ID NO: 1718844 - RNA, 19 nt, Homo sapiens
  misc_RNA (1)...(19): siRNA sense strand
gggcagcuguugugaucca

SEQ ID NO: 1718845 - RNA, 19 nt, Homo sapiens
  misc_RNA (1)...(19): siRNA sense strand
caaccagcauggauuuuau

SEQ ID NO: 1718846 - RNA, 19 nt, Homo sapiens
  misc_RNA (1)...(19): siRNA sense strand
uaaagcucuucuuggaaug

SEQ ID NO: 1718847 - RNA, 19 nt, Homo sapiens
  misc_RNA (1)...(19): siRNA sense strand
cugcagaaguccagaaggu

SEQ ID NO: 1718848 - RNA, 19 nt, Homo sapiens
  misc_RNA (1)...(19): siRNA sense strand
ucaccaaacagcugcaguu

SEQ ID NO: 1718849 - RNA, 19 nt, Homo sapiens
  misc_RNA (1)...(19): siRNA sense strand
guaugugucucagaagaag

SEQ ID NO: 1718850 - RNA, 19 nt, Homo sapiens
  misc_RNA (1)...(19): siRNA sense strand
gaccucacccuccuuugga

SEQ ID NO: 1718851 - RNA, 19 nt, Homo sapiens
  misc_RNA (1)...(19): siRNA sense strand
gcgccucacuguuuuagaa

SEQ ID NO: 1718852 - RNA, 19 nt, Homo sapiens
  misc_RNA (1)...(19): siRNA sense strand
agaggauaaugagagauuu

SEQ ID NO: 1718853 - RNA, 19 nt, Homo sapiens
  misc_RNA (1)...(19): siRNA sense strand
aaguaugugucucagaaga

SEQ ID NO: 1718854 - RNA, 19 nt, Homo sapiens
  misc_RNA (1)...(19): siRNA sense strand
gaagguuugcaacaucugu

SEQ ID NO: 1718855 - RNA, 19 nt, Homo sapiens
  misc_RNA (1)...(19): siRNA sense strand
aagaggauaaugagagauu

SEQ ID NO: 1718856 - RNA, 19 nt, Homo sapiens
  misc_RNA (1)...(19): siRNA sense strand
ccugaauucuuuuguguuu

SEQ ID NO: 1718857 - RNA, 19 nt, Homo sapiens
  misc_RNA (1)...(19): siRNA sense strand
ccaaacagcugcccucauu

SEQ ID NO: 1718858 - RNA, 19 nt, Homo sapiens
  misc_RNA (1)...(19): siRNA sense strand
ggagagagauugaugacuu

SEQ ID NO: 1718859 - RNA, 19 nt, Homo sapiens
  misc_RNA (1)...(19): siRNA sense strand
ggaaguaugugucucagaa

SEQ ID NO: 1718860 - RNA, 19 nt, Homo sapiens
  misc_RNA (1)...(19): siRNA sense strand
gaucugggauggaauugua

SEQ ID NO: 1718861 - RNA, 19 nt, Homo sapiens
  misc_RNA (1)...(19): siRNA sense strand
gaacagauuucauucaaac

SEQ ID NO: 1718862 - RNA, 19 nt, Homo sapiens
  misc_RNA (1)...(19): siRNA sense strand
caacagaucaagaacauuu

SEQ ID NO: 1718863 - RNA, 19 nt, Homo sapiens
  misc_RNA (1)...(19): siRNA sense strand
ccaaacagcugcaguucuu

SEQ ID NO: 1718864 - RNA, 19 nt, Homo sapiens
  misc_RNA (1)...(19): siRNA sense strand
uggaagagcuggucacuau

SEQ ID NO: 1718865 - RNA, 19 nt, Homo sapiens
  misc_RNA (1)...(19): siRNA sense strand
gagagagauugaugacuuu

SEQ ID NO: 1718866 - RNA, 19 nt, Homo sapiens
  misc_RNA (1)...(19): siRNA sense strand
caaagaggauaaugagaga

SEQ ID NO: 1718867 - RNA, 19 nt, Homo sapiens
  misc_RNA (1)...(19): siRNA sense strand
gguuaaagcucuucuugga

SEQ ID NO: 1718868 - RNA, 19 nt, Homo sapiens
  misc_RNA (1)...(19): siRNA sense strand
caagaucgaugccgugaug

SEQ ID NO: 1718869 - RNA, 19 nt, Homo sapiens
  misc_RNA (1)...(19): siRNA sense strand
uggaaugccugaacaauga

SEQ ID NO: 1718870 - RNA, 19 nt, Homo sapiens
  misc_RNA (1)...(19): siRNA sense strand
gagcaugguucaucgauag

SEQ ID NO: 1718871 - RNA, 19 nt, Homo sapiens
  misc_RNA (1)...(19): siRNA sense strand
aagaaaggcuugugcagaa

SEQ ID NO: 1718872 - RNA, 19 nt, Homo sapiens
  misc_RNA (1)...(19): siRNA sense strand
cgaaugcacacucaaauaa

SEQ ID NO: 1718873 - RNA, 19 nt, Homo sapiens
  misc_RNA (1)...(19): siRNA sense strand
caacaucuguguccucuac

SEQ ID NO: 1718874 - RNA, 19 nt, Homo sapiens
  misc_RNA (1)...(19): siRNA sense strand
uaaagaagcacacagucua

SEQ ID NO: 1718875 - RNA, 19 nt, Homo sapiens
  misc_RNA (1)...(19): siRNA sense strand
ugacaacucucacacagau

SEQ ID NO: 1718876 - RNA, 19 nt, Homo sapiens
  misc_RNA (1)...(19): siRNA sense strand
gagcuauguuucugaaguu

SEQ ID NO: 1718877 - RNA, 19 nt, Homo sapiens
  misc_RNA (1)...(19): siRNA sense strand
ugacaugcuucguaaauuc

SEQ ID NO: 1718878 - RNA, 19 nt, Homo sapiens
  misc_RNA (1)...(19): siRNA sense strand
gaccauuccuguuacaaau

SEQ ID NO: 1718879 - RNA, 19 nt, Homo sapiens
  misc_RNA (1)...(19): siRNA sense strand
ggucauccgugugaaguuu

SEQ ID NO: 1718880 - RNA, 19 nt, Homo sapiens
  misc_RNA (1)...(19): siRNA sense strand
gcagaaguccagaagguuu

SEQ ID NO: 1718881 - RNA, 19 nt, Homo sapiens
  misc_RNA (1)...(19): siRNA sense strand
ggagucgacugcagagaga

SEQ ID NO: 1718882 - RNA, 19 nt, Homo sapiens
  misc_RNA (1)...(19): siRNA sense strand
cagauggguucgugaguuu

SEQ ID NO: 1718883 - RNA, 19 nt, Homo sapiens
  misc_RNA (1)...(19): siRNA sense strand
gaagaacagauuucauuca

SEQ ID NO: 1718884 - RNA, 19 nt, Homo sapiens
  misc_RNA (1)...(19): siRNA sense strand
gcacaguucucagacaauc

SEQ ID NO: 1718885 - RNA, 19 nt, Homo sapiens
  misc_RNA (1)...(19): siRNA sense strand
gaaugcacacucaaauaaa

SEQ ID NO: 1718886 - RNA, 19 nt, Homo sapiens
  misc_RNA (1)...(19): siRNA sense strand
gggauggaauuguagagaa

SEQ ID NO: 1718887 - RNA, 19 nt, Homo sapiens
  misc_RNA (1)...(19): siRNA sense strand
gaaggaugccauacgcuuu

SEQ ID NO: 1718888 - RNA, 19 nt, Homo sapiens
  misc_RNA (1)...(19): siRNA sense strand
gaaucaaagaggauaauga

SEQ ID NO: 1718889 - RNA, 19 nt, Homo sapiens
  misc_RNA (1)...(19): siRNA sense strand
ccucuuuccugaauucuuu

SEQ ID NO: 1718890 - RNA, 19 nt, Homo sapiens
  misc_RNA (1)...(19): siRNA sense strand
uuaaagcucuucuuggaau

SEQ ID NO: 1718891 - RNA, 19 nt, Homo sapiens
  misc_RNA (1)...(19): siRNA sense strand
aaacugcuguuccuauuca

SEQ ID NO: 1718892 - RNA, 19 nt, Homo sapiens
  misc_RNA (1)...(19): siRNA sense strand
gugugaaguuugucaauga

SEQ ID NO: 1718893 - RNA, 19 nt, Homo sapiens
  misc_RNA (1)...(19): siRNA sense strand
gaagaccauuccuguuaca

SEQ ID NO: 1718894 - RNA, 19 nt, Homo sapiens
  misc_RNA (1)...(19): siRNA sense strand
aagcagggauugaucaaga

SEQ ID NO: 1718895 - RNA, 19 nt, Homo sapiens
  misc_RNA (1)...(19): siRNA sense strand
gagaucaucaagagaguuu

SEQ ID NO: 1718896 - RNA, 19 nt, Homo sapiens
  misc_RNA (1)...(19): siRNA sense strand
agaauuaccugcagcucuu

SEQ ID NO: 1718897 - RNA, 19 nt, Homo sapiens
  misc_RNA (1)...(19): siRNA sense strand
gauaaugagagauuugaga

SEQ ID NO: 1718898 - RNA, 19 nt, Homo sapiens
  misc_RNA (1)...(19): siRNA sense strand
ggauuccguuccauuauca

SEQ ID NO: 1718899 - RNA, 19 nt, Homo sapiens
  misc_RNA (1)...(19): siRNA sense strand
uggaagagaucaucaagag

SEQ ID NO: 1718900 - RNA, 19 nt, Homo sapiens
  misc_RNA (1)...(19): siRNA sense strand
ucacgaugcuugucaccuu

SEQ ID NO: 1718901 - RNA, 19 nt, Homo sapiens
  misc_RNA (1)...(19): siRNA sense strand
gaacacgggcuuugaacuc

SEQ ID NO: 1718902 - RNA, 19 nt, Homo sapiens
  misc_RNA (1)...(19): siRNA sense strand
cauccuacauccaugagaa

SEQ ID NO: 1718903 - RNA, 19 nt, Homo sapiens
  misc_RNA (1)...(19): siRNA sense strand
ugagagauuugagaaguug

SEQ ID NO: 1718904 - RNA, 19 nt, Homo sapiens
  misc_RNA (1)...(19): siRNA sense strand
gaugagagagcuauguuuc

SEQ ID NO: 1718905 - RNA, 19 nt, Homo sapiens
  misc_RNA (1)...(19): siRNA sense strand
gcgggcagcuguugugauc

SEQ ID NO: 1718906 - RNA, 19 nt, Homo sapiens
  misc_RNA (1)...(19): siRNA sense strand
uaccagaccucgcugacaa

SEQ ID NO: 1718907 - RNA, 19 nt, Homo sapiens
  misc_RNA (1)...(19): siRNA sense strand
ccagaagguuugcaacauc

SEQ ID NO: 1718908 - RNA, 19 nt, Homo sapiens
  misc_RNA (1)...(19): siRNA sense strand
ucaagaacauuuuguggua

SEQ ID NO: 1718909 - RNA, 19 nt, Homo sapiens
  misc_RNA (1)...(19): siRNA sense strand
ggauucaacagaucaagaa

SEQ ID NO: 1718910 - RNA, 19 nt, Homo sapiens
  misc_RNA (1)...(19): siRNA sense strand
gaccagcgaugaaccacau

SEQ ID NO: 1718911 - RNA, 19 nt, Homo sapiens
  misc_RNA (1)...(19): siRNA sense strand
gaacaaugacacugaagag

SEQ ID NO: 1718912 - RNA, 19 nt, Homo sapiens
  misc_RNA (1)...(19): siRNA sense strand
cacaauccuugaugacauu

SEQ ID NO: 1718913 - RNA, 19 nt, Homo sapiens
  misc_RNA (1)...(19): siRNA sense strand
caccacagcgucuucuaua

SEQ ID NO: 1718914 - RNA, 19 nt, Homo sapiens
  misc_RNA (1)...(19): siRNA sense strand
gcacucaaucuguucaaga

SEQ ID NO: 1718915 - RNA, 19 nt, Homo sapiens
  misc_RNA (1)...(19): siRNA sense strand
gcaaauauaaugggacauc

SEQ ID NO: 1718916 - RNA, 19 nt, Homo sapiens
  misc_RNA (1)...(19): siRNA sense strand
ucucaucucuggcgacaau

SEQ ID NO: 1718917 - RNA, 19 nt, Homo sapiens
  misc_RNA (1)...(19): siRNA sense strand
gaagagcuggucacuaucu

SEQ ID NO: 1718918 - RNA, 19 nt, Homo sapiens
  misc_RNA (1)...(19): siRNA sense strand
agaaugugcucccagugaa

SEQ ID NO: 1718919 - RNA, 19 nt, Homo sapiens
  misc_RNA (1)...(19): siRNA sense strand
gaacugcagcgucucaucu

SEQ ID NO: 1718920 - RNA, 19 nt, Homo sapiens
  misc_RNA (1)...(19): siRNA sense strand
ggacgaagcagggauugau

SEQ ID NO: 1718921 - RNA, 19 nt, Homo sapiens
  misc_RNA (1)...(19): siRNA sense strand
ucacaauccuugaugacau

SEQ ID NO: 1718922 - RNA, 19 nt, Homo sapiens
  misc_RNA (1)...(19): siRNA sense strand
gcgaaaggaucucaaaccu

SEQ ID NO: 1718923 - RNA, 19 nt, Homo sapiens
  misc_RNA (1)...(19): siRNA sense strand
ugagagagcuauguuucug

SEQ ID NO: 1718924 - RNA, 19 nt, Homo sapiens
  misc_RNA (1)...(19): siRNA sense strand
cacaguugauccugcagua

SEQ ID NO: 1718925 - RNA, 19 nt, Homo sapiens
  misc_RNA (1)...(19): siRNA sense strand
ccuaaggugugguaugugu

SEQ ID NO: 1718926 - RNA, 19 nt, Homo sapiens
  misc_RNA (1)...(19): siRNA sense strand
agagagcuauguuucugaa

SEQ ID NO: 1718927 - RNA, 19 nt, Homo sapiens
  misc_RNA (1)...(19): siRNA sense strand
cgaaaggaucucaaaccua

SEQ ID NO: 1718928 - RNA, 19 nt, Homo sapiens
  misc_RNA (1)...(19): siRNA sense strand
gaugaucugggauggaauu

SEQ ID NO: 1718929 - RNA, 19 nt, Homo sapiens
  misc_RNA (1)...(19): siRNA sense strand
ccacuggcauccuguccuu

SEQ ID NO: 1718930 - RNA, 19 nt, Homo sapiens
  misc_RNA (1)...(19): siRNA sense strand
agagagauaucaggagaga

SEQ ID NO: 1718931 - RNA, 19 nt, Homo sapiens
  misc_RNA (1)...(19): siRNA sense strand
gaaacugcuguuccuauuc

SEQ ID NO: 1718932 - RNA, 19 nt, Homo sapiens
  misc_RNA (1)...(19): siRNA sense strand
caaacagcugcccucauua

SEQ ID NO: 1718933 - RNA, 19 nt, Homo sapiens
  misc_RNA (1)...(19): siRNA sense strand
uaucuccucuuuccugaau

SEQ ID NO: 1718934 - RNA, 19 nt, Homo sapiens
  misc_RNA (1)...(19): siRNA sense strand
gccauacgcuuugucuaau

SEQ ID NO: 1718935 - RNA, 19 nt, Homo sapiens
  misc_RNA (1)...(19): siRNA sense strand
ggaugagagagcuauguuu

SEQ ID NO: 1718936 - RNA, 19 nt, Homo sapiens
  misc_RNA (1)...(19): siRNA sense strand
ucuggaagauuuaaagaag

SEQ ID NO: 1718937 - RNA, 19 nt, Homo sapiens
  misc_RNA (1)...(19): siRNA sense strand
gcaucaguccggaauauuc

SEQ ID NO: 1718938 - RNA, 19 nt, Homo sapiens
  misc_RNA (1)...(19): siRNA sense strand
gcacuuuaacagcagcuuu

SEQ ID NO: 1718939 - RNA, 19 nt, Homo sapiens
  misc_RNA (1)...(19): siRNA sense strand
agagauaucaggagagaga

SEQ ID NO: 1718940 - RNA, 19 nt, Homo sapiens
  misc_RNA (1)...(19): siRNA sense strand
uggaugaacugccuucucu

SEQ ID NO: 1718941 - RNA, 19 nt, Homo sapiens
  misc_RNA (1)...(19): siRNA sense strand
ggauggaauuguagagaac

SEQ ID NO: 1718942 - RNA, 19 nt, Homo sapiens
  misc_RNA (1)...(19): siRNA sense strand
cagaaugugcucccaguga

SEQ ID NO: 1718943 - RNA, 19 nt, Homo sapiens
  misc_RNA (1)...(19): siRNA sense strand
gcaggacucccgacucauc

SEQ ID NO: 1718944 - RNA, 19 nt, Homo sapiens
  misc_RNA (1)...(19): siRNA sense strand
ggaagucacagagucauca

SEQ ID NO: 1718945 - RNA, 19 nt, Homo sapiens
  misc_RNA (1)...(19): siRNA sense strand
ucgaaugcacacucaaaua

SEQ ID NO: 1718946 - RNA, 19 nt, Homo sapiens
  misc_RNA (1)...(19): siRNA sense strand
gaucgaugccgugauguau

SEQ ID NO: 1718947 - RNA, 19 nt, Homo sapiens
  misc_RNA (1)...(19): siRNA sense strand
gggaaaaggugaaagucuu

SEQ ID NO: 1718948 - RNA, 19 nt, Homo sapiens
  misc_RNA (1)...(19): siRNA sense strand
ggaaaauucuucggggaaa

SEQ ID NO: 1718949 - RNA, 19 nt, Homo sapiens
  misc_RNA (1)...(19): siRNA sense strand
gggauucgccuaccucaag

SEQ ID NO: 1718950 - RNA, 19 nt, Homo sapiens
  misc_RNA (1)...(19): siRNA sense strand
agaccucgcugacaacucu

SEQ ID NO: 1718951 - RNA, 19 nt, Homo sapiens
  misc_RNA (1)...(19): siRNA sense strand
gauaucaggagagagauug

SEQ ID NO: 1718952 - RNA, 19 nt, Homo sapiens
  misc_RNA (1)...(19): siRNA sense strand
cggcaucaguccggaauau

SEQ ID NO: 1718953 - RNA, 19 nt, Homo sapiens
  misc_RNA (1)...(19): siRNA sense strand
ccagugaagagucuccuaa

SEQ ID NO: 1718954 - RNA, 19 nt, Homo sapiens
  misc_RNA (1)...(19): siRNA sense strand
acagauggguucgugaguu

SEQ ID NO: 1718955 - RNA, 19 nt, Homo sapiens
  misc_RNA (1)...(19): siRNA sense strand
aaugagagauuugagaagu

SEQ ID NO: 1718956 - RNA, 19 nt, Homo sapiens
  misc_RNA (1)...(19): siRNA sense strand
cuacuacggugguuuccau

SEQ ID NO: 1718957 - RNA, 19 nt, Homo sapiens
  misc_RNA (1)...(19): siRNA sense strand
ccaaacagcugcccucauu

SEQ ID NO: 1718958 - RNA, 19 nt, Homo sapiens
  misc_RNA (1)...(19): siRNA sense strand
ggagagagauugaugacuu

SEQ ID NO: 1718959 - RNA, 19 nt, Homo sapiens
  misc_RNA (1)...(19): siRNA sense strand
ggaaguaugugucucagaa

SEQ ID NO: 1718960 - RNA, 19 nt, Homo sapiens
  misc_RNA (1)...(19): siRNA sense strand
gaucugggauggaauugua

SEQ ID NO: 1718961 - RNA, 19 nt, Homo sapiens
  misc_RNA (1)...(19): siRNA sense strand
gaacagauuucauucaaac

SEQ ID NO: 1718962 - RNA, 19 nt, Homo sapiens
  misc_RNA (1)...(19): siRNA sense strand
caacagaucaagaacauuu

SEQ ID NO: 1718963 - RNA, 19 nt, Homo sapiens
  misc_RNA (1)...(19): siRNA sense strand
ccaaacagcugcaguucuu

SEQ ID NO: 1718964 - RNA, 19 nt, Homo sapiens
  misc_RNA (1)...(19): siRNA sense strand
uggaagagcuggucacuau

SEQ ID NO: 1718965 - RNA, 19 nt, Homo sapiens
  misc_RNA (1)...(19): siRNA sense strand
gagagagauugaugacuuu

SEQ ID NO: 1718966 - RNA, 19 nt, Homo sapiens
  misc_RNA (1)...(19): siRNA sense strand
caaagaggauaaugagaga

SEQ ID NO: 1718967 - RNA, 19 nt, Homo sapiens
  misc_RNA (1)...(19): siRNA sense strand
gguuaaagcucuucuugga

SEQ ID NO: 1718968 - RNA, 19 nt, Homo sapiens
  misc_RNA (1)...(19): siRNA sense strand
caagaucgaugccgugaug

SEQ ID NO: 1718969 - RNA, 19 nt, Homo sapiens
  misc_RNA (1)...(19): siRNA sense strand
uggaaugccugaacaauga

SEQ ID NO: 1718970 - RNA, 19 nt, Homo sapiens
  misc_RNA (1)...(19): siRNA sense strand
gagcaugguucaucgauag

SEQ ID NO: 1718971 - RNA, 19 nt, Homo sapiens
  misc_RNA (1)...(19): siRNA sense strand
aagaaaggcuugugcagaa

SEQ ID NO: 1718972 - RNA, 19 nt, Homo sapiens
  misc_RNA (1)...(19): siRNA sense strand
cgaaugcacacucaaauaa

SEQ ID NO: 1718973 - RNA, 19 nt, Homo sapiens
  misc_RNA (1)...(19): siRNA sense strand
caacaucuguguccucuac

SEQ ID NO: 1718974 - RNA, 19 nt, Homo sapiens
  misc_RNA (1)...(19): siRNA sense strand
uaaagaagcacacagucua

SEQ ID NO: 1718975 - RNA, 19 nt, Homo sapiens
  misc_RNA (1)...(19): siRNA sense strand
ugacaacucucacacagau

SEQ ID NO: 1718976 - RNA, 19 nt, Homo sapiens
  misc_RNA (1)...(19): siRNA sense strand
gagcuauguuucugaaguu

SEQ ID NO: 1718977 - RNA, 19 nt, Homo sapiens
  misc_RNA (1)...(19): siRNA sense strand
ugacaugcuucguaaauuc

SEQ ID NO: 1718978 - RNA, 19 nt, Homo sapiens
  misc_RNA (1)...(19): siRNA sense strand
gaccauuccuguuacaaau

SEQ ID NO: 1718979 - RNA, 19 nt, Homo sapiens
  misc_RNA (1)...(19): siRNA sense strand
ggucauccgugugaaguuu

SEQ ID NO: 1718980 - RNA, 19 nt, Homo sapiens
  misc_RNA (1)...(19): siRNA sense strand
gcagaaguccagaagguuu

SEQ ID NO: 1718981 - RNA, 19 nt, Homo sapiens
  misc_RNA (1)...(19): siRNA sense strand
ggagucgacugcagagaga

SEQ ID NO: 1718982 - RNA, 19 nt, Homo sapiens
  misc_RNA (1)...(19): siRNA sense strand
cagauggguucgugaguuu

SEQ ID NO: 1718983 - RNA, 19 nt, Homo sapiens
  misc_RNA (1)...(19): siRNA sense strand
gaagaacagauuucauuca

SEQ ID NO: 1718984 - RNA, 19 nt, Homo sapiens
  misc_RNA (1)...(19): siRNA sense strand
gcacaguucucagacaauc

SEQ ID NO: 1718985 - RNA, 19 nt, Homo sapiens
  misc_RNA (1)...(19): siRNA sense strand
gaaugcacacucaaauaaa

SEQ ID NO: 1718986 - RNA, 19 nt, Homo sapiens
  misc_RNA (1)...(19): siRNA sense strand
gggauggaauuguagagaa

SEQ ID NO: 1718987 - RNA, 19 nt, Homo sapiens
  misc_RNA (1)...(19): siRNA sense strand
gaaggaugccauacgcuuu

SEQ ID NO: 1718988 - RNA, 19 nt, Homo sapiens
  misc_RNA (1)...(19): siRNA sense strand
gaaucaaagaggauaauga

SEQ ID NO: 1718989 - RNA, 19 nt, Homo sapiens
  misc_RNA (1)...(19): siRNA sense strand
ccucuuuccugaauucuuu

SEQ ID NO: 1718990 - RNA, 19 nt, Homo sapiens
  misc_RNA (1)...(19): siRNA sense strand
uuaaagcucuucuuggaau

SEQ ID NO: 1718991 - RNA, 19 nt, Homo sapiens
  misc_RNA (1)...(19): siRNA sense strand
aaacugcuguuccuauuca

SEQ ID NO: 1718992 - RNA, 19 nt, Homo sapiens
  misc_RNA (1)...(19): siRNA sense strand
gugugaaguuugucaauga

SEQ ID NO: 1718993 - RNA, 19 nt, Homo sapiens
  misc_RNA (1)...(19): siRNA sense strand
gaagaccauuccuguuaca

SEQ ID NO: 1718994 - RNA, 19 nt, Homo sapiens
  misc_RNA (1)...(19): siRNA sense strand
aagcagggauugaucaaga

SEQ ID NO: 1718995 - RNA, 19 nt, Homo sapiens
  misc_RNA (1)...(19): siRNA sense strand
gagaucaucaagagaguuu

SEQ ID NO: 1718996 - RNA, 19 nt, Homo sapiens
  misc_RNA (1)...(19): siRNA sense strand
agaauuaccugcagcucuu

SEQ ID NO: 1718997 - RNA, 19 nt, Homo sapiens
  misc_RNA (1)...(19): siRNA sense strand
gauaaugagagauuugaga

SEQ ID NO: 1718998 - RNA, 19 nt, Homo sapiens
  misc_RNA (1)...(19): siRNA sense strand
ggauuccguuccauuauca

SEQ ID NO: 1718999 - RNA, 19 nt, Homo sapiens
  misc_RNA (1)...(19): siRNA sense strand
uggaagagaucaucaagag

SEQ ID NO: 1719000 - RNA, 19 nt, Homo sapiens
  misc_RNA (1)...(19): siRNA sense strand
ucacgaugcuugucaccuu

SEQ ID NO: 1719001 - RNA, 19 nt, Homo sapiens
  misc_RNA (1)...(19): siRNA sense strand
gaacacgggcuuugaacuc

SEQ ID NO: 1719002 - RNA, 19 nt, Homo sapiens
  misc_RNA (1)...(19): siRNA sense strand
cauccuacauccaugagaa

SEQ ID NO: 1719003 - RNA, 19 nt, Homo sapiens
  misc_RNA (1)...(19): siRNA sense strand
ugagagauuugagaaguug

SEQ ID NO: 1719004 - RNA, 19 nt, Homo sapiens
  misc_RNA (1)...(19): siRNA sense strand
gaugagagagcuauguuuc

SEQ ID NO: 1719005 - RNA, 19 nt, Homo sapiens
  misc_RNA (1)...(19): siRNA sense strand
gcgggcagcuguugugauc

SEQ ID NO: 1719006 - RNA, 19 nt, Homo sapiens
  misc_RNA (1)...(19): siRNA sense strand
uaccagaccucgcugacaa

SEQ ID NO: 1719007 - RNA, 19 nt, Homo sapiens
  misc_RNA (1)...(19): siRNA sense strand
ccagaagguuugcaacauc

SEQ ID NO: 1719008 - RNA, 19 nt, Homo sapiens
  misc_RNA (1)...(19): siRNA sense strand
ucaagaacauuuuguggua

SEQ ID NO: 1719009 - RNA, 19 nt, Homo sapiens
  misc_RNA (1)...(19): siRNA sense strand
ggauucaacagaucaagaa

SEQ ID NO: 1719010 - RNA, 19 nt, Homo sapiens
  misc_RNA (1)...(19): siRNA sense strand
gaccagcgaugaaccacau

SEQ ID NO: 1719011 - RNA, 19 nt, Homo sapiens
  misc_RNA (1)...(19): siRNA sense strand
gaacaaugacacugaagag

SEQ ID NO: 1719012 - RNA, 19 nt, Homo sapiens
  misc_RNA (1)...(19): siRNA sense strand
cacaauccuugaugacauu

SEQ ID NO: 1719013 - RNA, 19 nt, Homo sapiens
  misc_RNA (1)...(19): siRNA sense strand
caccacagcgucuucuaua

SEQ ID NO: 1719014 - RNA, 19 nt, Homo sapiens
  misc_RNA (1)...(19): siRNA sense strand
gcacucaaucuguucaaga

SEQ ID NO: 1719015 - RNA, 19 nt, Homo sapiens
  misc_RNA (1)...(19): siRNA sense strand
gcaaauauaaugggacauc

SEQ ID NO: 1719016 - RNA, 19 nt, Homo sapiens
  misc_RNA (1)...(19): siRNA sense strand
ucucaucucuggcgacaau

SEQ ID NO: 1719017 - RNA, 19 nt, Homo sapiens
  misc_RNA (1)...(19): siRNA sense strand
gaagagcuggucacuaucu

SEQ ID NO: 1719018 - RNA, 19 nt, Homo sapiens
  misc_RNA (1)...(19): siRNA sense strand
agaaugugcucccagugaa

SEQ ID NO: 1719019 - RNA, 19 nt, Homo sapiens
  misc_RNA (1)...(19): siRNA sense strand
gaacugcagcgucucaucu

SEQ ID NO: 1719020 - RNA, 19 nt, Homo sapiens
  misc_RNA (1)...(19): siRNA sense strand
ggacgaagcagggauugau

SEQ ID NO: 1719021 - RNA, 19 nt, Homo sapiens
  misc_RNA (1)...(19): siRNA sense strand
ucacaauccuugaugacau

SEQ ID NO: 1719022 - RNA, 19 nt, Homo sapiens
  misc_RNA (1)...(19): siRNA sense strand
gcgaaaggaucucaaaccu

SEQ ID NO: 1719023 - RNA, 19 nt, Homo sapiens
  misc_RNA (1)...(19): siRNA sense strand
ugagagagcuauguuucug

SEQ ID NO: 1719024 - RNA, 19 nt, Homo sapiens
  misc_RNA (1)...(19): siRNA sense strand
cacaguugauccugcagua

SEQ ID NO: 1719025 - RNA, 19 nt, Homo sapiens
  misc_RNA (1)...(19): siRNA sense strand
ccuaaggugugguaugugu

SEQ ID NO: 1719026 - RNA, 19 nt, Homo sapiens
  misc_RNA (1)...(19): siRNA sense strand
agagagcuauguuucugaa

SEQ ID NO: 1719027 - RNA, 19 nt, Homo sapiens
  misc_RNA (1)...(19): siRNA sense strand
cgaaaggaucucaaaccua

SEQ ID NO: 1719028 - RNA, 19 nt, Homo sapiens
  misc_RNA (1)...(19): siRNA sense strand
gaugaucugggauggaauu

SEQ ID NO: 1719029 - RNA, 19 nt, Homo sapiens
  misc_RNA (1)...(19): siRNA sense strand
ccacuggcauccuguccuu

SEQ ID NO: 1719030 - RNA, 19 nt, Homo sapiens
  misc_RNA (1)...(19): siRNA sense strand
agagagauaucaggagaga

SEQ ID NO: 1719031 - RNA, 19 nt, Homo sapiens
  misc_RNA (1)...(19): siRNA sense strand
gaaacugcuguuccuauuc

SEQ ID NO: 1719032 - RNA, 19 nt, Homo sapiens
  misc_RNA (1)...(19): siRNA sense strand
caaacagcugcccucauua

SEQ ID NO: 1719033 - RNA, 19 nt, Homo sapiens
  misc_RNA (1)...(19): siRNA sense strand
uaucuccucuuuccugaau

SEQ ID NO: 1719034 - RNA, 19 nt, Homo sapiens
  misc_RNA (1)...(19): siRNA sense strand
gccauacgcuuugucuaau

SEQ ID NO: 1719035 - RNA, 19 nt, Homo sapiens
  misc_RNA (1)...(19): siRNA sense strand
ggaugagagagcuauguuu

SEQ ID NO: 1719036 - RNA, 19 nt, Homo sapiens
  misc_RNA (1)...(19): siRNA sense strand
ucuggaagauuuaaagaag

SEQ ID NO: 1719037 - RNA, 19 nt, Homo sapiens
  misc_RNA (1)...(19): siRNA sense strand
gcaucaguccggaauauuc

SEQ ID NO: 1719038 - RNA, 19 nt, Homo sapiens
  misc_RNA (1)...(19): siRNA sense strand
gcacuuuaacagcagcuuu

SEQ ID NO: 1719039 - RNA, 19 nt, Homo sapiens
  misc_RNA (1)...(19): siRNA sense strand
agagauaucaggagagaga

SEQ ID NO: 1719040 - RNA, 19 nt, Homo sapiens
  misc_RNA (1)...(19): siRNA sense strand
uggaugaacugccuucucu

SEQ ID NO: 1719041 - RNA, 19 nt, Homo sapiens
  misc_RNA (1)...(19): siRNA sense strand
ggauggaauuguagagaac

SEQ ID NO: 1719042 - RNA, 19 nt, Homo sapiens
  misc_RNA (1)...(19): siRNA sense strand
cagaaugugcucccaguga

SEQ ID NO: 1719043 - RNA, 19 nt, Homo sapiens
  misc_RNA (1)...(19): siRNA sense strand
gcaggacucccgacucauc

SEQ ID NO: 1719044 - RNA, 19 nt, Homo sapiens
  misc_RNA (1)...(19): siRNA sense strand
ggaagucacagagucauca

SEQ ID NO: 1719045 - RNA, 19 nt, Homo sapiens
  misc_RNA (1)...(19): siRNA sense strand
ucgaaugcacacucaaaua

SEQ ID NO: 1719046 - RNA, 19 nt, Homo sapiens
  misc_RNA (1)...(19): siRNA sense strand
gaucgaugccgugauguau

SEQ ID NO: 1719047 - RNA, 19 nt, Homo sapiens
  misc_RNA (1)...(19): siRNA sense strand
gggaaaaggugaaagucuu

SEQ ID NO: 1719048 - RNA, 19 nt, Homo sapiens
  misc_RNA (1)...(19): siRNA sense strand
ggaaaauucuucggggaaa

SEQ ID NO: 1719049 - RNA, 19 nt, Homo sapiens
  misc_RNA (1)...(19): siRNA sense strand
gggauucgccuaccucaag

SEQ ID NO: 1719050 - RNA, 19 nt, Homo sapiens
  misc_RNA (1)...(19): siRNA sense strand
agaccucgcugacaacucu

SEQ ID NO: 1719051 - RNA, 19 nt, Homo sapiens
  misc_RNA (1)...(19): siRNA sense strand
gauaucaggagagagauug

SEQ ID NO: 1719052 - RNA, 19 nt, Homo sapiens
  misc_RNA (1)...(19): siRNA sense strand
cggcaucaguccggaauau

SEQ ID NO: 1719053 - RNA, 19 nt, Homo sapiens
  misc_RNA (1)...(19): siRNA sense strand
ccagugaagagucuccuaa

SEQ ID NO: 1719054 - RNA, 19 nt, Homo sapiens
  misc_RNA (1)...(19): siRNA sense strand
acagauggguucgugaguu

SEQ ID NO: 1719055 - RNA, 19 nt, Homo sapiens
  misc_RNA (1)...(19): siRNA sense strand
aaugagagauuugagaagu

SEQ ID NO: 1719056 - RNA, 19 nt, Homo sapiens
  misc_RNA (1)...(19): siRNA sense strand
cuacuacggugguuuccau

SEQ ID NO: 1719057 - RNA, 19 nt, Homo sapiens
  misc_RNA (1)...(19): siRNA sense strand
ggagagagauugaugacuu

SEQ ID NO: 1719058 - RNA, 19 nt, Homo sapiens
  misc_RNA (1)...(19): siRNA sense strand
ggaaguaugugucucagaa

SEQ ID NO: 1719059 - RNA, 19 nt, Homo sapiens
  misc_RNA (1)...(19): siRNA sense strand
gaucugggauggaauugua

SEQ ID NO: 1719060 - RNA, 19 nt, Homo sapiens
  misc_RNA (1)...(19): siRNA sense strand
gaacagauuucauucaaac

SEQ ID NO: 1719061 - RNA, 19 nt, Homo sapiens
  misc_RNA (1)...(19): siRNA sense strand
caacagaucaagaacauuu

SEQ ID NO: 1719062 - RNA, 19 nt, Homo sapiens
  misc_RNA (1)...(19): siRNA sense strand
ccaaacagcugcaguucuu

SEQ ID NO: 1719063 - RNA, 19 nt, Homo sapiens
  misc_RNA (1)...(19): siRNA sense strand
uggaagagcuggucacuau

SEQ ID NO: 1719064 - RNA, 19 nt, Homo sapiens
  misc_RNA (1)...(19): siRNA sense strand
gagagagauugaugacuuu

SEQ ID NO: 1719065 - RNA, 19 nt, Homo sapiens
  misc_RNA (1)...(19): siRNA sense strand
caaagaggauaaugagaga

SEQ ID NO: 1719066 - RNA, 19 nt, Homo sapiens
  misc_RNA (1)...(19): siRNA sense strand
gguuaaagcucuucuugga

SEQ ID NO: 1719067 - RNA, 19 nt, Homo sapiens
  misc_RNA (1)...(19): siRNA sense strand
caagaucgaugccgugaug

SEQ ID NO: 1719068 - RNA, 19 nt, Homo sapiens
  misc_RNA (1)...(19): siRNA sense strand
uggaaugccugaacaauga

SEQ ID NO: 1719069 - RNA, 19 nt, Homo sapiens
  misc_RNA (1)...(19): siRNA sense strand
gagcaugguucaucgauag

SEQ ID NO: 1719070 - RNA, 19 nt, Homo sapiens
  misc_RNA (1)...(19): siRNA sense strand
aagaaaggcuugugcagaa

SEQ ID NO: 1719071 - RNA, 19 nt, Homo sapiens
  misc_RNA (1)...(19): siRNA sense strand
caacaucuguguccucuac

SEQ ID NO: 1719072 - RNA, 19 nt, Homo sapiens
  misc_RNA (1)...(19): siRNA sense strand
ugacaacucucacacagau

SEQ ID NO: 1719073 - RNA, 19 nt, Homo sapiens
  misc_RNA (1)...(19): siRNA sense strand
ugacaugcuucguaaauuc

SEQ ID NO: 1719074 - RNA, 19 nt, Homo sapiens
  misc_RNA (1)...(19): siRNA sense strand
gcagaaguccagaagguuu

SEQ ID NO: 1719075 - RNA, 19 nt, Homo sapiens
  misc_RNA (1)...(19): siRNA sense strand
ggagucgacugcagagaga

SEQ ID NO: 1719076 - RNA, 19 nt, Homo sapiens
  misc_RNA (1)...(19): siRNA sense strand
cagauggguucgugaguuu

SEQ ID NO: 1719077 - RNA, 19 nt, Homo sapiens
  misc_RNA (1)...(19): siRNA sense strand
gaagaacagauuucauuca

SEQ ID NO: 1719078 - RNA, 19 nt, Homo sapiens
  misc_RNA (1)...(19): siRNA sense strand
gcacaguucucagacaauc

SEQ ID NO: 1719079 - RNA, 19 nt, Homo sapiens
  misc_RNA (1)...(19): siRNA sense strand
gggauggaauuguagagaa

SEQ ID NO: 1719080 - RNA, 19 nt, Homo sapiens
  misc_RNA (1)...(19): siRNA sense strand
gaaggaugccauacgcuuu

SEQ ID NO: 1719081 - RNA, 19 nt, Homo sapiens
  misc_RNA (1)...(19): siRNA sense strand
gaaucaaagaggauaauga

SEQ ID NO: 1719082 - RNA, 19 nt, Homo sapiens
  misc_RNA (1)...(19): siRNA sense strand
ccucuuuccugaauucuuu

SEQ ID NO: 1719083 - RNA, 19 nt, Homo sapiens
  misc_RNA (1)...(19): siRNA sense strand
uuaaagcucuucuuggaau

SEQ ID NO: 1719084 - RNA, 19 nt, Homo sapiens
  misc_RNA (1)...(19): siRNA sense strand
aaacugcuguuccuauuca

SEQ ID NO: 1719085 - RNA, 19 nt, Homo sapiens
  misc_RNA (1)...(19): siRNA sense strand
gauaaugagagauuugaga

SEQ ID NO: 1719086 - RNA, 19 nt, Homo sapiens
  misc_RNA (1)...(19): siRNA sense strand
ucacgaugcuugucaccuu

SEQ ID NO: 1719087 - RNA, 19 nt, Homo sapiens
  misc_RNA (1)...(19): siRNA sense strand
ugagagauuugagaaguug

SEQ ID NO: 1719088 - RNA, 19 nt, Homo sapiens
  misc_RNA (1)...(19): siRNA sense strand
gcgggcagcuguugugauc

SEQ ID NO: 1719089 - RNA, 19 nt, Homo sapiens
  misc_RNA (1)...(19): siRNA sense strand
uaccagaccucgcugacaa

SEQ ID NO: 1719090 - RNA, 19 nt, Homo sapiens
  misc_RNA (1)...(19): siRNA sense strand
ccagaagguuugcaacauc

SEQ ID NO: 1719091 - RNA, 19 nt, Homo sapiens
  misc_RNA (1)...(19): siRNA sense strand
ucaagaacauuuuguggua

SEQ ID NO: 1719092 - RNA, 19 nt, Homo sapiens
  misc_RNA (1)...(19): siRNA sense strand
ggauucaacagaucaagaa

SEQ ID NO: 1719093 - RNA, 19 nt, Homo sapiens
  misc_RNA (1)...(19): siRNA sense strand
gaccagcgaugaaccacau

SEQ ID NO: 1719094 - RNA, 19 nt, Homo sapiens
  misc_RNA (1)...(19): siRNA sense strand
gaacaaugacacugaagag

SEQ ID NO: 1719095 - RNA, 19 nt, Homo sapiens
  misc_RNA (1)...(19): siRNA sense strand
cacaauccuugaugacauu

SEQ ID NO: 1719096 - RNA, 19 nt, Homo sapiens
  misc_RNA (1)...(19): siRNA sense strand
gcaaauauaaugggacauc

SEQ ID NO: 1719097 - RNA, 19 nt, Homo sapiens
  misc_RNA (1)...(19): siRNA sense strand
gaagagcuggucacuaucu

SEQ ID NO: 1719098 - RNA, 19 nt, Homo sapiens
  misc_RNA (1)...(19): siRNA sense strand
agaaugugcucccagugaa

SEQ ID NO: 1719099 - RNA, 19 nt, Homo sapiens
  misc_RNA (1)...(19): siRNA sense strand
ucacaauccuugaugacau

SEQ ID NO: 1719100 - RNA, 19 nt, Homo sapiens
  misc_RNA (1)...(19): siRNA sense strand
gcgaaaggaucucaaaccu

SEQ ID NO: 1719101 - RNA, 19 nt, Homo sapiens
  misc_RNA (1)...(19): siRNA sense strand
cacaguugauccugcagua

SEQ ID NO: 1719102 - RNA, 19 nt, Homo sapiens
  misc_RNA (1)...(19): siRNA sense strand
ccuaaggugugguaugugu

SEQ ID NO: 1719103 - RNA, 19 nt, Homo sapiens
  misc_RNA (1)...(19): siRNA sense strand
cgaaaggaucucaaaccua

SEQ ID NO: 1719104 - RNA, 19 nt, Homo sapiens
  misc_RNA (1)...(19): siRNA sense strand
agagagauaucaggagaga

SEQ ID NO: 1719105 - RNA, 19 nt, Homo sapiens
  misc_RNA (1)...(19): siRNA sense strand
gaugaucugggauggaauu

SEQ ID NO: 1719106 - RNA, 19 nt, Homo sapiens
  misc_RNA (1)...(19): siRNA sense strand
ccacuggcauccuguccuu

SEQ ID NO: 1719107 - RNA, 19 nt, Homo sapiens
  misc_RNA (1)...(19): siRNA sense strand
gaaacugcuguuccuauuc

SEQ ID NO: 1719108 - RNA, 19 nt, Homo sapiens
  misc_RNA (1)...(19): siRNA sense strand
uaucuccucuuuccugaau

SEQ ID NO: 1719109 - RNA, 19 nt, Homo sapiens
  misc_RNA (1)...(19): siRNA sense strand
gccauacgcuuugucuaau

SEQ ID NO: 1719110 - RNA, 19 nt, Homo sapiens
  misc_RNA (1)...(19): siRNA sense strand
gcaucaguccggaauauuc

SEQ ID NO: 1719111 - RNA, 19 nt, Homo sapiens
  misc_RNA (1)...(19): siRNA sense strand
gcacuuuaacagcagcuuu

SEQ ID NO: 1719112 - RNA, 19 nt, Homo sapiens
  misc_RNA (1)...(19): siRNA sense strand
agagauaucaggagagaga

SEQ ID NO: 1719113 - RNA, 19 nt, Homo sapiens
  misc_RNA (1)...(19): siRNA sense strand
ggauggaauuguagagaac

SEQ ID NO: 1719114 - RNA, 19 nt, Homo sapiens
  misc_RNA (1)...(19): siRNA sense strand
cagaaugugcucccaguga

SEQ ID NO: 1719115 - RNA, 19 nt, Homo sapiens
  misc_RNA (1)...(19): siRNA sense strand
gcaggacucccgacucauc

SEQ ID NO: 1719116 - RNA, 19 nt, Homo sapiens
  misc_RNA (1)...(19): siRNA sense strand
gaucgaugccgugauguau

SEQ ID NO: 1719117 - RNA, 19 nt, Homo sapiens
  misc_RNA (1)...(19): siRNA sense strand
gggaaaaggugaaagucuu

SEQ ID NO: 1719118 - RNA, 19 nt, Homo sapiens
  misc_RNA (1)...(19): siRNA sense strand
gauaucaggagagagauug

SEQ ID NO: 1719119 - RNA, 19 nt, Homo sapiens
  misc_RNA (1)...(19): siRNA sense strand
agaccucgcugacaacucu

SEQ ID NO: 1719120 - RNA, 19 nt, Homo sapiens
  misc_RNA (1)...(19): siRNA sense strand
cggcaucaguccggaauau

SEQ ID NO: 1719121 - RNA, 19 nt, Homo sapiens
  misc_RNA (1)...(19): siRNA sense strand
ccagugaagagucuccuaa

SEQ ID NO: 1719122 - RNA, 19 nt, Homo sapiens
  misc_RNA (1)...(19): siRNA sense strand
acagauggguucgugaguu

SEQ ID NO: 1719123 - RNA, 19 nt, Homo sapiens
  misc_RNA (1)...(19): siRNA sense strand
ggaaaauucuucggggaaa

SEQ ID NO: 1719124 - RNA, 19 nt, Homo sapiens
  misc_RNA (1)...(19): siRNA sense strand
gaggauaaugagagauuug

SEQ ID NO: 1719125 - RNA, 19 nt, Homo sapiens
  misc_RNA (1)...(19): siRNA sense strand
ugccauacgcuuugucuaa

SEQ ID NO: 1719126 - RNA, 19 nt, Homo sapiens
  misc_RNA (1)...(19): siRNA sense strand
aaugagagauuugagaagu

SEQ ID NO: 1719127 - RNA, 19 nt, Homo sapiens
  misc_RNA (1)...(19): siRNA sense strand
cugcaggacucccgacuca

SEQ ID NO: 1719128 - RNA, 19 nt, Homo sapiens
  misc_RNA (1)...(19): siRNA sense strand
ccacaugucaucccucaca

SEQ ID NO: 1719129 - RNA, 19 nt, Homo sapiens
  misc_RNA (1)...(19): siRNA sense strand
gaacucgacagggacagaa

SEQ ID NO: 1719130 - RNA, 19 nt, Homo sapiens
  misc_RNA (1)...(19): siRNA sense strand
agagcaugguucaucgaua

SEQ ID NO: 1719131 - RNA, 19 nt, Homo sapiens
  misc_RNA (1)...(19): siRNA sense strand
cagaagguuugcaacaucu

SEQ ID NO: 1719132 - RNA, 19 nt, Homo sapiens
  misc_RNA (1)...(19): siRNA sense strand
ccauacgcuuugucuaaug

SEQ ID NO: 1719133 - RNA, 19 nt, Homo sapiens
  misc_RNA (1)...(19): siRNA sense strand
cgugauguaugugaaaguu

SEQ ID NO: 1719134 - RNA, 19 nt, Homo sapiens
  misc_RNA (1)...(19): siRNA sense strand
ugacucaucucagcacagu

SEQ ID NO: 1719135 - RNA, 19 nt, Homo sapiens
  misc_RNA (1)...(19): siRNA sense strand
gaaaauucuucggggaaaa

SEQ ID NO: 1719136 - RNA, 19 nt, Homo sapiens
  misc_RNA (1)...(19): siRNA sense strand
ccugaacaaugacacugaa

SEQ ID NO: 1719137 - RNA, 19 nt, Homo sapiens
  misc_RNA (1)...(19): siRNA sense strand
caaauauaaugggacaucu

SEQ ID NO: 1719138 - RNA, 19 nt, Homo sapiens
  misc_RNA (1)...(19): siRNA sense strand
ggaccucacccuccuuugg

SEQ ID NO: 1719139 - RNA, 19 nt, Homo sapiens
  misc_RNA (1)...(19): siRNA sense strand
ccaaggagaaggagaaacu

SEQ ID NO: 1719140 - RNA, 19 nt, Homo sapiens
  misc_RNA (1)...(19): siRNA sense strand
ggucucacuuaccuugaug

SEQ ID NO: 1719141 - RNA, 19 nt, Homo sapiens
  misc_RNA (1)...(19): siRNA sense strand
caaugcacuugaucaccaa

SEQ ID NO: 1719142 - RNA, 19 nt, Homo sapiens
  misc_RNA (1)...(19): siRNA sense strand
gggcaaccuccuacacuug

SEQ ID NO: 1719143 - RNA, 19 nt, Homo sapiens
  misc_RNA (1)...(19): siRNA sense strand
ucgaugccgugauguaugu

SEQ ID NO: 1719144 - RNA, 19 nt, Homo sapiens
  misc_RNA (1)...(19): siRNA sense strand
gggcagcuguugugaucca

SEQ ID NO: 1719145 - RNA, 19 nt, Homo sapiens
  misc_RNA (1)...(19): siRNA sense strand
caaccagcauggauuuuau

SEQ ID NO: 1719146 - RNA, 19 nt, Homo sapiens
  misc_RNA (1)...(19): siRNA sense strand
uaaagcucuucuuggaaug

SEQ ID NO: 1719147 - RNA, 19 nt, Homo sapiens
  misc_RNA (1)...(19): siRNA sense strand
cugcagaaguccagaaggu

SEQ ID NO: 1719148 - RNA, 19 nt, Homo sapiens
  misc_RNA (1)...(19): siRNA sense strand
ucaccaaacagcugcaguu

SEQ ID NO: 1719149 - RNA, 19 nt, Homo sapiens
  misc_RNA (1)...(19): siRNA sense strand
guaugugucucagaagaag

SEQ ID NO: 1719150 - RNA, 19 nt, Homo sapiens
  misc_RNA (1)...(19): siRNA sense strand
gaccucacccuccuuugga

SEQ ID NO: 1719151 - RNA, 19 nt, Homo sapiens
  misc_RNA (1)...(19): siRNA sense strand
gcgccucacuguuuuagaa

SEQ ID NO: 1719152 - RNA, 19 nt, Homo sapiens
  misc_RNA (1)...(19): siRNA sense strand
agaggauaaugagagauuu

SEQ ID NO: 1719153 - RNA, 19 nt, Homo sapiens
  misc_RNA (1)...(19): siRNA sense strand
aaguaugugucucagaaga

SEQ ID NO: 1719154 - RNA, 19 nt, Homo sapiens
  misc_RNA (1)...(19): siRNA sense strand
gaagguuugcaacaucugu

SEQ ID NO: 1719155 - RNA, 19 nt, Homo sapiens
  misc_RNA (1)...(19): siRNA sense strand
aagaggauaaugagagauu

SEQ ID NO: 1719156 - RNA, 19 nt, Homo sapiens
  misc_RNA (1)...(19): siRNA sense strand
ccugaauucuuuuguguuu

SEQ ID NO: 1719157 - RNA, 19 nt, Homo sapiens
  misc_RNA (1)...(19): siRNA sense strand
ccaaacagcugcccucauu

SEQ ID NO: 1719158 - RNA, 19 nt, Homo sapiens
  misc_RNA (1)...(19): siRNA sense strand
ggagagagauugaugacuu

SEQ ID NO: 1719159 - RNA, 19 nt, Homo sapiens
  misc_RNA (1)...(19): siRNA sense strand
ggaaguaugugucucagaa

SEQ ID NO: 1719160 - RNA, 19 nt, Homo sapiens
  misc_RNA (1)...(19): siRNA sense strand
gaucugggauggaauugua

SEQ ID NO: 1719161 - RNA, 19 nt, Homo sapiens
  misc_RNA (1)...(19): siRNA sense strand
gaacagauuucauucaaac

SEQ ID NO: 1719162 - RNA, 19 nt, Homo sapiens
  misc_RNA (1)...(19): siRNA sense strand
caacagaucaagaacauuu

SEQ ID NO: 1719163 - RNA, 19 nt, Homo sapiens
  misc_RNA (1)...(19): siRNA sense strand
ccaaacagcugcaguucuu

SEQ ID NO: 1719164 - RNA, 19 nt, Homo sapiens
  misc_RNA (1)...(19): siRNA sense strand
uggaagagcuggucacuau

SEQ ID NO: 1719165 - RNA, 19 nt, Homo sapiens
  misc_RNA (1)...(19): siRNA sense strand
gagagagauugaugacuuu

SEQ ID NO: 1719166 - RNA, 19 nt, Homo sapiens
  misc_RNA (1)...(19): siRNA sense strand
caaagaggauaaugagaga

SEQ ID NO: 1719167 - RNA, 19 nt, Homo sapiens
  misc_RNA (1)...(19): siRNA sense strand
gguuaaagcucuucuugga

SEQ ID NO: 1719168 - RNA, 19 nt, Homo sapiens
  misc_RNA (1)...(19): siRNA sense strand
caagaucgaugccgugaug

SEQ ID NO: 1719169 - RNA, 19 nt, Homo sapiens
  misc_RNA (1)...(19): siRNA sense strand
uggaaugccugaacaauga

SEQ ID NO: 1719170 - RNA, 19 nt, Homo sapiens
  misc_RNA (1)...(19): siRNA sense strand
gagcaugguucaucgauag

SEQ ID NO: 1719171 - RNA, 19 nt, Homo sapiens
  misc_RNA (1)...(19): siRNA sense strand
aagaaaggcuugugcagaa

SEQ ID NO: 1719172 - RNA, 19 nt, Homo sapiens
  misc_RNA (1)...(19): siRNA sense strand
cgaaugcacacucaaauaa

SEQ ID NO: 1719173 - RNA, 19 nt, Homo sapiens
  misc_RNA (1)...(19): siRNA sense strand
caacaucuguguccucuac

SEQ ID NO: 1719174 - RNA, 19 nt, Homo sapiens
  misc_RNA (1)...(19): siRNA sense strand
uaaagaagcacacagucua

SEQ ID NO: 1719175 - RNA, 19 nt, Homo sapiens
  misc_RNA (1)...(19): siRNA sense strand
ugacaacucucacacagau

SEQ ID NO: 1719176 - RNA, 19 nt, Homo sapiens
  misc_RNA (1)...(19): siRNA sense strand
gagcuauguuucugaaguu

SEQ ID NO: 1719177 - RNA, 19 nt, Homo sapiens
  misc_RNA (1)...(19): siRNA sense strand
ugacaugcuucguaaauuc

SEQ ID NO: 1719178 - RNA, 19 nt, Homo sapiens
  misc_RNA (1)...(19): siRNA sense strand
gaccauuccuguuacaaau

SEQ ID NO: 1719179 - RNA, 19 nt, Homo sapiens
  misc_RNA (1)...(19): siRNA sense strand
ggucauccgugugaaguuu

SEQ ID NO: 1719180 - RNA, 19 nt, Homo sapiens
  misc_RNA (1)...(19): siRNA sense strand
gcagaaguccagaagguuu

SEQ ID NO: 1719181 - RNA, 19 nt, Homo sapiens
  misc_RNA (1)...(19): siRNA sense strand
ggagucgacugcagagaga

SEQ ID NO: 1719182 - RNA, 19 nt, Homo sapiens
  misc_RNA (1)...(19): siRNA sense strand
cagauggguucgugaguuu

SEQ ID NO: 1719183 - RNA, 19 nt, Homo sapiens
  misc_RNA (1)...(19): siRNA sense strand
gaagaacagauuucauuca

SEQ ID NO: 1719184 - RNA, 19 nt, Homo sapiens
  misc_RNA (1)...(19): siRNA sense strand
gcacaguucucagacaauc

SEQ ID NO: 1719185 - RNA, 19 nt, Homo sapiens
  misc_RNA (1)...(19): siRNA sense strand
gaaugcacacucaaauaaa

SEQ ID NO: 1719186 - RNA, 19 nt, Homo sapiens
  misc_RNA (1)...(19): siRNA sense strand
gggauggaauuguagagaa

SEQ ID NO: 1719187 - RNA, 19 nt, Homo sapiens
  misc_RNA (1)...(19): siRNA sense strand
gaaggaugccauacgcuuu

SEQ ID NO: 1719188 - RNA, 19 nt, Homo sapiens
  misc_RNA (1)...(19): siRNA sense strand
gaaucaaagaggauaauga

SEQ ID NO: 1719189 - RNA, 19 nt, Homo sapiens
  misc_RNA (1)...(19): siRNA sense strand
ccucuuuccugaauucuuu

SEQ ID NO: 1719190 - RNA, 19 nt, Homo sapiens
  misc_RNA (1)...(19): siRNA sense strand
uuaaagcucuucuuggaau

SEQ ID NO: 1719191 - RNA, 19 nt, Homo sapiens
  misc_RNA (1)...(19): siRNA sense strand
aaacugcuguuccuauuca

SEQ ID NO: 1719192 - RNA, 19 nt, Homo sapiens
  misc_RNA (1)...(19): siRNA sense strand
gugugaaguuugucaauga

SEQ ID NO: 1719193 - RNA, 19 nt, Homo sapiens
  misc_RNA (1)...(19): siRNA sense strand
gaagaccauuccuguuaca

SEQ ID NO: 1719194 - RNA, 19 nt, Homo sapiens
  misc_RNA (1)...(19): siRNA sense strand
aagcagggauugaucaaga

SEQ ID NO: 1719195 - RNA, 19 nt, Homo sapiens
  misc_RNA (1)...(19): siRNA sense strand
gagaucaucaagagaguuu

SEQ ID NO: 1719196 - RNA, 19 nt, Homo sapiens
  misc_RNA (1)...(19): siRNA sense strand
agaauuaccugcagcucuu

SEQ ID NO: 1719197 - RNA, 19 nt, Homo sapiens
  misc_RNA (1)...(19): siRNA sense strand
gauaaugagagauuugaga

SEQ ID NO: 1719198 - RNA, 19 nt, Homo sapiens
  misc_RNA (1)...(19): siRNA sense strand
ggauuccguuccauuauca

SEQ ID NO: 1719199 - RNA, 19 nt, Homo sapiens
  misc_RNA (1)...(19): siRNA sense strand
uggaagagaucaucaagag

SEQ ID NO: 1719200 - RNA, 19 nt, Homo sapiens
  misc_RNA (1)...(19): siRNA sense strand
ucacgaugcuugucaccuu

SEQ ID NO: 1719201 - RNA, 19 nt, Homo sapiens
  misc_RNA (1)...(19): siRNA sense strand
gaacacgggcuuugaacuc

SEQ ID NO: 1719202 - RNA, 19 nt, Homo sapiens
  misc_RNA (1)...(19): siRNA sense strand
cauccuacauccaugagaa

SEQ ID NO: 1719203 - RNA, 19 nt, Homo sapiens
  misc_RNA (1)...(19): siRNA sense strand
ugagagauuugagaaguug

SEQ ID NO: 1719204 - RNA, 19 nt, Homo sapiens
  misc_RNA (1)...(19): siRNA sense strand
gaugagagagcuauguuuc

SEQ ID NO: 1719205 - RNA, 19 nt, Homo sapiens
  misc_RNA (1)...(19): siRNA sense strand
gcgggcagcuguugugauc

SEQ ID NO: 1719206 - RNA, 19 nt, Homo sapiens
  misc_RNA (1)...(19): siRNA sense strand
uaccagaccucgcugacaa

SEQ ID NO: 1719207 - RNA, 19 nt, Homo sapiens
  misc_RNA (1)...(19): siRNA sense strand
ccagaagguuugcaacauc

SEQ ID NO: 1719208 - RNA, 19 nt, Homo sapiens
  misc_RNA (1)...(19): siRNA sense strand
ucaagaacauuuuguggua

SEQ ID NO: 1719209 - RNA, 19 nt, Homo sapiens
  misc_RNA (1)...(19): siRNA sense strand
ggauucaacagaucaagaa

SEQ ID NO: 1719210 - RNA, 19 nt, Homo sapiens
  misc_RNA (1)...(19): siRNA sense strand
gaccagcgaugaaccacau

SEQ ID NO: 1719211 - RNA, 19 nt, Homo sapiens
  misc_RNA (1)...(19): siRNA sense strand
gaacaaugacacugaagag

SEQ ID NO: 1719212 - RNA, 19 nt, Homo sapiens
  misc_RNA (1)...(19): siRNA sense strand
cacaauccuugaugacauu

SEQ ID NO: 1719213 - RNA, 19 nt, Homo sapiens
  misc_RNA (1)...(19): siRNA sense strand
caccacagcgucuucuaua

SEQ ID NO: 1719214 - RNA, 19 nt, Homo sapiens
  misc_RNA (1)...(19): siRNA sense strand
gcacucaaucuguucaaga

SEQ ID NO: 1719215 - RNA, 19 nt, Homo sapiens
  misc_RNA (1)...(19): siRNA sense strand
gcaaauauaaugggacauc

SEQ ID NO: 1719216 - RNA, 19 nt, Homo sapiens
  misc_RNA (1)...(19): siRNA sense strand
ucucaucucuggcgacaau

SEQ ID NO: 1719217 - RNA, 19 nt, Homo sapiens
  misc_RNA (1)...(19): siRNA sense strand
gaagagcuggucacuaucu

SEQ ID NO: 1719218 - RNA, 19 nt, Homo sapiens
  misc_RNA (1)...(19): siRNA sense strand
agaaugugcucccagugaa

SEQ ID NO: 1719219 - RNA, 19 nt, Homo sapiens
  misc_RNA (1)...(19): siRNA sense strand
gaacugcagcgucucaucu

SEQ ID NO: 1719220 - RNA, 19 nt, Homo sapiens
  misc_RNA (1)...(19): siRNA sense strand
ggacgaagcagggauugau

SEQ ID NO: 1719221 - RNA, 19 nt, Homo sapiens
  misc_RNA (1)...(19): siRNA sense strand
ucacaauccuugaugacau

SEQ ID NO: 1719222 - RNA, 19 nt, Homo sapiens
  misc_RNA (1)...(19): siRNA sense strand
gcgaaaggaucucaaaccu

SEQ ID NO: 1719223 - RNA, 19 nt, Homo sapiens
  misc_RNA (1)...(19): siRNA sense strand
ugagagagcuauguuucug

SEQ ID NO: 1719224 - RNA, 19 nt, Homo sapiens
  misc_RNA (1)...(19): siRNA sense strand
cacaguugauccugcagua

SEQ ID NO: 1719225 - RNA, 19 nt, Homo sapiens
  misc_RNA (1)...(19): siRNA sense strand
ccuaaggugugguaugugu

SEQ ID NO: 1719226 - RNA, 19 nt, Homo sapiens
  misc_RNA (1)...(19): siRNA sense strand
agagagcuauguuucugaa

SEQ ID NO: 1719227 - RNA, 19 nt, Homo sapiens
  misc_RNA (1)...(19): siRNA sense strand
cgaaaggaucucaaaccua

SEQ ID NO: 1719228 - RNA, 19 nt, Homo sapiens
  misc_RNA (1)...(19): siRNA sense strand
gaugaucugggauggaauu

SEQ ID NO: 1719229 - RNA, 19 nt, Homo sapiens
  misc_RNA (1)...(19): siRNA sense strand
ccacuggcauccuguccuu

SEQ ID NO: 1719230 - RNA, 19 nt, Homo sapiens
  misc_RNA (1)...(19): siRNA sense strand
agagagauaucaggagaga

SEQ ID NO: 1719231 - RNA, 19 nt, Homo sapiens
  misc_RNA (1)...(19): siRNA sense strand
gaaacugcuguuccuauuc

SEQ ID NO: 1719232 - RNA, 19 nt, Homo sapiens
  misc_RNA (1)...(19): siRNA sense strand
caaacagcugcccucauua

SEQ ID NO: 1719233 - RNA, 19 nt, Homo sapiens
  misc_RNA (1)...(19): siRNA sense strand
uaucuccucuuuccugaau

SEQ ID NO: 1719234 - RNA, 19 nt, Homo sapiens
  misc_RNA (1)...(19): siRNA sense strand
gccauacgcuuugucuaau

SEQ ID NO: 1719235 - RNA, 19 nt, Homo sapiens
  misc_RNA (1)...(19): siRNA sense strand
ggaugagagagcuauguuu

SEQ ID NO: 1719236 - RNA, 19 nt, Homo sapiens
  misc_RNA (1)...(19): siRNA sense strand
ucuggaagauuuaaagaag

SEQ ID NO: 1719237 - RNA, 19 nt, Homo sapiens
  misc_RNA (1)...(19): siRNA sense strand
gcaucaguccggaauauuc

SEQ ID NO: 1719238 - RNA, 19 nt, Homo sapiens
  misc_RNA (1)...(19): siRNA sense strand
gcacuuuaacagcagcuuu

SEQ ID NO: 1719239 - RNA, 19 nt, Homo sapiens
  misc_RNA (1)...(19): siRNA sense strand
agagauaucaggagagaga

SEQ ID NO: 1719240 - RNA, 19 nt, Homo sapiens
  misc_RNA (1)...(19): siRNA sense strand
uggaugaacugccuucucu

SEQ ID NO: 1719241 - RNA, 19 nt, Homo sapiens
  misc_RNA (1)...(19): siRNA sense strand
ggauggaauuguagagaac

SEQ ID NO: 1719242 - RNA, 19 nt, Homo sapiens
  misc_RNA (1)...(19): siRNA sense strand
cagaaugugcucccaguga

SEQ ID NO: 1719243 - RNA, 19 nt, Homo sapiens
  misc_RNA (1)...(19): siRNA sense strand
gcaggacucccgacucauc

SEQ ID NO: 1719244 - RNA, 19 nt, Homo sapiens
  misc_RNA (1)...(19): siRNA sense strand
ggaagucacagagucauca

SEQ ID NO: 1719245 - RNA, 19 nt, Homo sapiens
  misc_RNA (1)...(19): siRNA sense strand
ucgaaugcacacucaaaua

SEQ ID NO: 1719246 - RNA, 19 nt, Homo sapiens
  misc_RNA (1)...(19): siRNA sense strand
gaucgaugccgugauguau

SEQ ID NO: 1719247 - RNA, 19 nt, Homo sapiens
  misc_RNA (1)...(19): siRNA sense strand
gggaaaaggugaaagucuu

SEQ ID NO: 1719248 - RNA, 19 nt, Homo sapiens
  misc_RNA (1)...(19): siRNA sense strand
ggaaaauucuucggggaaa

SEQ ID NO: 1719249 - RNA, 19 nt, Homo sapiens
  misc_RNA (1)...(19): siRNA sense strand
gggauucgccuaccucaag

SEQ ID NO: 1719250 - RNA, 19 nt, Homo sapiens
  misc_RNA (1)...(19): siRNA sense strand
agaccucgcugacaacucu

SEQ ID NO: 1719251 - RNA, 19 nt, Homo sapiens
  misc_RNA (1)...(19): siRNA sense strand
gauaucaggagagagauug

SEQ ID NO: 1719252 - RNA, 19 nt, Homo sapiens
  misc_RNA (1)...(19): siRNA sense strand
cggcaucaguccggaauau

SEQ ID NO: 1719253 - RNA, 19 nt, Homo sapiens
  misc_RNA (1)...(19): siRNA sense strand
ccagugaagagucuccuaa

SEQ ID NO: 1719254 - RNA, 19 nt, Homo sapiens
  misc_RNA (1)...(19): siRNA sense strand
acagauggguucgugaguu

SEQ ID NO: 1719255 - RNA, 19 nt, Homo sapiens
  misc_RNA (1)...(19): siRNA sense strand
aaugagagauuugagaagu

SEQ ID NO: 1719256 - RNA, 19 nt, Homo sapiens
  misc_RNA (1)...(19): siRNA sense strand
cuacuacggugguuuccau

SEQ ID NO: 1719257 - RNA, 19 nt, Homo sapiens
  misc_RNA (1)...(19): siRNA sense strand
ggaaacaucauauggaauu

SEQ ID NO: 1719258 - RNA, 19 nt, Homo sapiens
  misc_RNA (1)...(19): siRNA sense strand
gaaaucagacaucaacaaa

SEQ ID NO: 1719259 - RNA, 19 nt, Homo sapiens
  misc_RNA (1)...(19): siRNA sense strand
gauaaugagucggaaguaa

SEQ ID NO: 1719260 - RNA, 19 nt, Homo sapiens
  misc_RNA (1)...(19): siRNA sense strand
ugaaggcccuggauaauga

SEQ ID NO: 1719261 - RNA, 19 nt, Homo sapiens
  misc_RNA (1)...(19): siRNA sense strand
cagcagcagugaacaaauu

SEQ ID NO: 1719262 - RNA, 19 nt, Homo sapiens
  misc_RNA (1)...(19): siRNA sense strand
cagcacaucugucauugaa

SEQ ID NO: 1719263 - RNA, 19 nt, Homo sapiens
  misc_RNA (1)...(19): siRNA sense strand
gacggucccugaggaauua

SEQ ID NO: 1719264 - RNA, 19 nt, Homo sapiens
  misc_RNA (1)...(19): siRNA sense strand
gaauagaggacgaauacaa

SEQ ID NO: 1719265 - RNA, 19 nt, Homo sapiens
  misc_RNA (1)...(19): siRNA sense strand
uaaaguaggugucuucaac

SEQ ID NO: 1719266 - RNA, 19 nt, Homo sapiens
  misc_RNA (1)...(19): siRNA sense strand
gcacaucugucauugaaac

SEQ ID NO: 1719267 - RNA, 19 nt, Homo sapiens
  misc_RNA (1)...(19): siRNA sense strand
gaauugggaucaagugaag

SEQ ID NO: 1719268 - RNA, 19 nt, Homo sapiens
  misc_RNA (1)...(19): siRNA sense strand
gaagaauagaggacgaaua

SEQ ID NO: 1719269 - RNA, 19 nt, Homo sapiens
  misc_RNA (1)...(19): siRNA sense strand
gaggacgaauacaagguua

SEQ ID NO: 1719270 - RNA, 19 nt, Homo sapiens
  misc_RNA (1)...(19): siRNA sense strand
aaacaucgguggagcuuuc

SEQ ID NO: 1719271 - RNA, 19 nt, Homo sapiens
  misc_RNA (1)...(19): siRNA sense strand
cuagauacguguucaggaa

SEQ ID NO: 1719272 - RNA, 19 nt, Homo sapiens
  misc_RNA (1)...(19): siRNA sense strand
ccacagauauugaaguuuu

SEQ ID NO: 1719273 - RNA, 19 nt, Homo sapiens
  misc_RNA (1)...(19): siRNA sense strand
guaggugucuucaacaaca

SEQ ID NO: 1719274 - RNA, 19 nt, Homo sapiens
  misc_RNA (1)...(19): siRNA sense strand
ggaaaucagacaucaacaa

SEQ ID NO: 1719275 - RNA, 19 nt, Homo sapiens
  misc_RNA (1)...(19): siRNA sense strand
ggucgaggcuuugguuaug

SEQ ID NO: 1719276 - RNA, 19 nt, Homo sapiens
  misc_RNA (1)...(19): siRNA sense strand
caaagcagcacaucuguca

SEQ ID NO: 1719277 - RNA, 19 nt, Homo sapiens
  misc_RNA (1)...(19): siRNA sense strand
ccggaaacaucauauggaa

SEQ ID NO: 1719278 - RNA, 19 nt, Homo sapiens
  misc_RNA (1)...(19): siRNA sense strand
gccaguaucuuugccagaa

SEQ ID NO: 1719279 - RNA, 19 nt, Homo sapiens
  misc_RNA (1)...(19): siRNA sense strand
gaauucaucagacuccaaa

SEQ ID NO: 1719280 - RNA, 19 nt, Homo sapiens
  misc_RNA (1)...(19): siRNA sense strand
aauacaagguuaugagguu

SEQ ID NO: 1719281 - RNA, 19 nt, Homo sapiens
  misc_RNA (1)...(19): siRNA sense strand
caucugucauugaaacaaa

SEQ ID NO: 1719282 - RNA, 19 nt, Homo sapiens
  misc_RNA (1)...(19): siRNA sense strand
acagcuagguccaguuuau

SEQ ID NO: 1719283 - RNA, 19 nt, Homo sapiens
  misc_RNA (1)...(19): siRNA sense strand
gaaacaucauauggaauuc

SEQ ID NO: 1719284 - RNA, 19 nt, Homo sapiens
  misc_RNA (1)...(19): siRNA sense strand
acagaauggucgaggcuuu

SEQ ID NO: 1719285 - RNA, 19 nt, Homo sapiens
  misc_RNA (1)...(19): siRNA sense strand
caagugaaggcccuggaua

SEQ ID NO: 1719286 - RNA, 19 nt, Homo sapiens
  misc_RNA (1)...(19): siRNA sense strand
gaaagccaccaccaaguca

SEQ ID NO: 1719287 - RNA, 19 nt, Homo sapiens
  misc_RNA (1)...(19): siRNA sense strand
gaagaagaacccaccaaac

SEQ ID NO: 1719288 - RNA, 19 nt, Homo sapiens
  misc_RNA (1)...(19): siRNA sense strand
ucacagcuagguccaguuu

SEQ ID NO: 1719289 - RNA, 19 nt, Homo sapiens
  misc_RNA (1)...(19): siRNA sense strand
ggagacaugaagacaaaga

SEQ ID NO: 1719290 - RNA, 19 nt, Homo sapiens
  misc_RNA (1)...(19): siRNA sense strand
uuggagacaugaagacaaa

SEQ ID NO: 1719291 - RNA, 19 nt, Homo sapiens
  misc_RNA (1)...(19): siRNA sense strand
auacaagguuaugagguua

SEQ ID NO: 1719292 - RNA, 19 nt, Homo sapiens
  misc_RNA (1)...(19): siRNA sense strand
gccuuucgaugaagauuau

SEQ ID NO: 1719293 - RNA, 19 nt, Homo sapiens
  misc_RNA (1)...(19): siRNA sense strand
gcagugaacaaauucgaau

SEQ ID NO: 1719294 - RNA, 19 nt, Homo sapiens
  misc_RNA (1)...(19): siRNA sense strand
gauacguguucaggaauga

SEQ ID NO: 1719295 - RNA, 19 nt, Homo sapiens
  misc_RNA (1)...(19): siRNA sense strand
ucaucagacuccaaaauua

SEQ ID NO: 1719296 - RNA, 19 nt, Homo sapiens
  misc_RNA (1)...(19): siRNA sense strand
ccugaggaauuacagaaug

SEQ ID NO: 1719297 - RNA, 19 nt, Homo sapiens
  misc_RNA (1)...(19): siRNA sense strand
ugccacagauauugaaguu

SEQ ID NO: 1719298 - RNA, 19 nt, Homo sapiens
  misc_RNA (1)...(19): siRNA sense strand
ucagccaucaguacaauaa

SEQ ID NO: 1719299 - RNA, 19 nt, Homo sapiens
  misc_RNA (1)...(19): siRNA sense strand
gacaugaagacaaagaaga

SEQ ID NO: 1719300 - RNA, 19 nt, Homo sapiens
  misc_RNA (1)...(19): siRNA sense strand
ggacgaauacaagguuaug

SEQ ID NO: 1719301 - RNA, 19 nt, Homo sapiens
  misc_RNA (1)...(19): siRNA sense strand
ggaaguaaaaggauacaaa

SEQ ID NO: 1719302 - RNA, 19 nt, Homo sapiens
  misc_RNA (1)...(19): siRNA sense strand
agacaaagcagcacaucug

SEQ ID NO: 1719303 - RNA, 19 nt, Homo sapiens
  misc_RNA (1)...(19): siRNA sense strand
agaagaagaacccaccaaa

SEQ ID NO: 1719304 - RNA, 19 nt, Homo sapiens
  misc_RNA (1)...(19): siRNA sense strand
guacagauggaacagacaa

SEQ ID NO: 1719305 - RNA, 19 nt, Homo sapiens
  misc_RNA (1)...(19): siRNA sense strand
guuaaauauuggagacaug

SEQ ID NO: 1719306 - RNA, 19 nt, Homo sapiens
  misc_RNA (1)...(19): siRNA sense strand
ggauaaugagucggaagua

SEQ ID NO: 1719307 - RNA, 19 nt, Homo sapiens
  misc_RNA (1)...(19): siRNA sense strand
ccaaaccaccagccaguau

SEQ ID NO: 1719308 - RNA, 19 nt, Homo sapiens
  misc_RNA (1)...(19): siRNA sense strand
gaaugcauguacgcuguca

SEQ ID NO: 1719309 - RNA, 19 nt, Homo sapiens
  misc_RNA (1)...(19): siRNA sense strand
gcugucaaggcauauaauu

SEQ ID NO: 1719310 - RNA, 19 nt, Homo sapiens
  misc_RNA (1)...(19): siRNA sense strand
aagaauagaggacgaauac

SEQ ID NO: 1719311 - RNA, 19 nt, Homo sapiens
  misc_RNA (1)...(19): siRNA sense strand
gccaucaguacaauaauga

SEQ ID NO: 1719312 - RNA, 19 nt, Homo sapiens
  misc_RNA (1)...(19): siRNA sense strand
caucauauggaauucauca

SEQ ID NO: 1719313 - RNA, 19 nt, Homo sapiens
  misc_RNA (1)...(19): siRNA sense strand
guaaaaggauacaaagucu

SEQ ID NO: 1719314 - RNA, 19 nt, Homo sapiens
  misc_RNA (1)...(19): siRNA sense strand
gagacaugaagacaaagaa

SEQ ID NO: 1719315 - RNA, 19 nt, Homo sapiens
  misc_RNA (1)...(19): siRNA sense strand
aauaaugauuucccucaca

SEQ ID NO: 1719316 - RNA, 19 nt, Homo sapiens
  misc_RNA (1)...(19): siRNA sense strand
aagcagcacaucugucauu

SEQ ID NO: 1719317 - RNA, 19 nt, Homo sapiens
  misc_RNA (1)...(19): siRNA sense strand
gagaagaauagaggacgaa

SEQ ID NO: 1719318 - RNA, 19 nt, Homo sapiens
  misc_RNA (1)...(19): siRNA sense strand
gcagcacaucugucauuga

SEQ ID NO: 1719319 - RNA, 19 nt, Homo sapiens
  misc_RNA (1)...(19): siRNA sense strand
auaaugagucggaaguaaa

SEQ ID NO: 1719320 - RNA, 19 nt, Homo sapiens
  misc_RNA (1)...(19): siRNA sense strand
cgaaagccaccaccaaguc

SEQ ID NO: 1719321 - RNA, 19 nt, Homo sapiens
  misc_RNA (1)...(19): siRNA sense strand
acaagguuaugagguuaaa

SEQ ID NO: 1719322 - RNA, 19 nt, Homo sapiens
  misc_RNA (1)...(19): siRNA sense strand
gguuaaauauuggagacau

SEQ ID NO: 1719323 - RNA, 19 nt, Homo sapiens
  misc_RNA (1)...(19): siRNA sense strand
ggagcuuucuuugccuuuc

SEQ ID NO: 1719324 - RNA, 19 nt, Homo sapiens
  misc_RNA (1)...(19): siRNA sense strand
gugaaggcccuggauaaug

SEQ ID NO: 1719325 - RNA, 19 nt, Homo sapiens
  misc_RNA (1)...(19): siRNA sense strand
acaugaagacaaagaagaa

SEQ ID NO: 1719326 - RNA, 19 nt, Homo sapiens
  misc_RNA (1)...(19): siRNA sense strand
ucauauggaauucaucaga

SEQ ID NO: 1719327 - RNA, 19 nt, Homo sapiens
  misc_RNA (1)...(19): siRNA sense strand
ugaauugggaucaagugaa

SEQ ID NO: 1719328 - RNA, 19 nt, Homo sapiens
  misc_RNA (1)...(19): siRNA sense strand
ggaauucaucagacuccaa

SEQ ID NO: 1719329 - RNA, 19 nt, Homo sapiens
  misc_RNA (1)...(19): siRNA sense strand
acuuagcugucaaggcaua

SEQ ID NO: 1719330 - RNA, 19 nt, Homo sapiens
  misc_RNA (1)...(19): siRNA sense strand
gacaaagcagcacaucugu

SEQ ID NO: 1719331 - RNA, 19 nt, Homo sapiens
  misc_RNA (1)...(19): siRNA sense strand
aaguaggugucuucaacaa

SEQ ID NO: 1719332 - RNA, 19 nt, Homo sapiens
  misc_RNA (1)...(19): siRNA sense strand
aagugaaggcccuggauaa

SEQ ID NO: 1719333 - RNA, 19 nt, Homo sapiens
  misc_RNA (1)...(19): siRNA sense strand
gguuaaaguaggugucuuc

SEQ ID NO: 1719334 - RNA, 19 nt, Homo sapiens
  misc_RNA (1)...(19): siRNA sense strand
caucgguggagcuuucuuu

SEQ ID NO: 1719335 - RNA, 19 nt, Homo sapiens
  misc_RNA (1)...(19): siRNA sense strand
ugucaaggcauauaauucu

SEQ ID NO: 1719336 - RNA, 19 nt, Homo sapiens
  misc_RNA (1)...(19): siRNA sense strand
ccacuucgaaugcauguac

SEQ ID NO: 1719337 - RNA, 19 nt, Homo sapiens
  misc_RNA (1)...(19): siRNA sense strand
agauacguguucaggaaug

SEQ ID NO: 1719338 - RNA, 19 nt, Homo sapiens
  misc_RNA (1)...(19): siRNA sense strand
uuccaaagauaucaaaugc

SEQ ID NO: 1719339 - RNA, 19 nt, Homo sapiens
  misc_RNA (1)...(19): siRNA sense strand
agacggucccugaggaauu

SEQ ID NO: 1719340 - RNA, 19 nt, Homo sapiens
  misc_RNA (1)...(19): siRNA sense strand
ccaccagccaguaucuuug

SEQ ID NO: 1719341 - RNA, 19 nt, Homo sapiens
  misc_RNA (1)...(19): siRNA sense strand
uacgaacaguuggaaauca

SEQ ID NO: 1719342 - RNA, 19 nt, Homo sapiens
  misc_RNA (1)...(19): siRNA sense strand
uagcugucaaggcauauaa

SEQ ID NO: 1719343 - RNA, 19 nt, Homo sapiens
  misc_RNA (1)...(19): siRNA sense strand
agccaucaguacaauaaug

SEQ ID NO: 1719344 - RNA, 19 nt, Homo sapiens
  misc_RNA (1)...(19): siRNA sense strand
ggcagcagcagugaacaaa

SEQ ID NO: 1719345 - RNA, 19 nt, Homo sapiens
  misc_RNA (1)...(19): siRNA sense strand
ugucagccaucaguacaau

SEQ ID NO: 1719346 - RNA, 19 nt, Homo sapiens
  misc_RNA (1)...(19): siRNA sense strand
gaaguaaaaggauacaaag

SEQ ID NO: 1719347 - RNA, 19 nt, Homo sapiens
  misc_RNA (1)...(19): siRNA sense strand
uuucuuugccuuucgauga

SEQ ID NO: 1719348 - RNA, 19 nt, Homo sapiens
  misc_RNA (1)...(19): siRNA sense strand
ucucucccuuugagguuaa

SEQ ID NO: 1719349 - RNA, 19 nt, Homo sapiens
  misc_RNA (1)...(19): siRNA sense strand
gcagcagcagugaacaaau

SEQ ID NO: 1719350 - RNA, 19 nt, Homo sapiens
  misc_RNA (1)...(19): siRNA sense strand
gauggcagcagcagugaac

SEQ ID NO: 1719351 - RNA, 19 nt, Homo sapiens
  misc_RNA (1)...(19): siRNA sense strand
gagauggcagcagcaguga

SEQ ID NO: 1719352 - RNA, 19 nt, Homo sapiens
  misc_RNA (1)...(19): siRNA sense strand
gucaaggcauauaauucug

SEQ ID NO: 1719353 - RNA, 19 nt, Homo sapiens
  misc_RNA (1)...(19): siRNA sense strand
caugaagacaaagaagaaa

SEQ ID NO: 1719354 - RNA, 19 nt, Homo sapiens
  misc_RNA (1)...(19): siRNA sense strand
gagcuuucuuugccuuucg

SEQ ID NO: 1719355 - RNA, 19 nt, Homo sapiens
  misc_RNA (1)...(19): siRNA sense strand
ucaaugugacaacccgaaa

SEQ ID NO: 1719356 - RNA, 19 nt, Homo sapiens
  misc_RNA (1)...(19): siRNA sense strand
aauacgaacaguuggaaau

SEQ ID NO: 1719357 - RNA, 19 nt, Homo sapiens
  misc_RNA (1)...(19): siRNA sense strand
ggaaacaucauauggaauu

SEQ ID NO: 1719358 - RNA, 19 nt, Homo sapiens
  misc_RNA (1)...(19): siRNA sense strand
gaaaucagacaucaacaaa

SEQ ID NO: 1719359 - RNA, 19 nt, Homo sapiens
  misc_RNA (1)...(19): siRNA sense strand
gauaaugagucggaaguaa

SEQ ID NO: 1719360 - RNA, 19 nt, Homo sapiens
  misc_RNA (1)...(19): siRNA sense strand
ugaaggcccuggauaauga

SEQ ID NO: 1719361 - RNA, 19 nt, Homo sapiens
  misc_RNA (1)...(19): siRNA sense strand
cagcagcagugaacaaauu

SEQ ID NO: 1719362 - RNA, 19 nt, Homo sapiens
  misc_RNA (1)...(19): siRNA sense strand
cagcacaucugucauugaa

SEQ ID NO: 1719363 - RNA, 19 nt, Homo sapiens
  misc_RNA (1)...(19): siRNA sense strand
gaauagaggacgaauacaa

SEQ ID NO: 1719364 - RNA, 19 nt, Homo sapiens
  misc_RNA (1)...(19): siRNA sense strand
uaaaguaggugucuucaac

SEQ ID NO: 1719365 - RNA, 19 nt, Homo sapiens
  misc_RNA (1)...(19): siRNA sense strand
gcacaucugucauugaaac

SEQ ID NO: 1719366 - RNA, 19 nt, Homo sapiens
  misc_RNA (1)...(19): siRNA sense strand
gaauugggaucaagugaag

SEQ ID NO: 1719367 - RNA, 19 nt, Homo sapiens
  misc_RNA (1)...(19): siRNA sense strand
gaagaauagaggacgaaua

SEQ ID NO: 1719368 - RNA, 19 nt, Homo sapiens
  misc_RNA (1)...(19): siRNA sense strand
gaggacgaauacaagguua

SEQ ID NO: 1719369 - RNA, 19 nt, Homo sapiens
  misc_RNA (1)...(19): siRNA sense strand
aaacaucgguggagcuuuc

SEQ ID NO: 1719370 - RNA, 19 nt, Homo sapiens
  misc_RNA (1)...(19): siRNA sense strand
ccacagauauugaaguuuu

SEQ ID NO: 1719371 - RNA, 19 nt, Homo sapiens
  misc_RNA (1)...(19): siRNA sense strand
cuagauacguguucaggaa

SEQ ID NO: 1719372 - RNA, 19 nt, Homo sapiens
  misc_RNA (1)...(19): siRNA sense strand
guaggugucuucaacaaca

SEQ ID NO: 1719373 - RNA, 19 nt, Homo sapiens
  misc_RNA (1)...(19): siRNA sense strand
ggaaaucagacaucaacaa

SEQ ID NO: 1719374 - RNA, 19 nt, Homo sapiens
  misc_RNA (1)...(19): siRNA sense strand
caaagcagcacaucuguca

SEQ ID NO: 1719375 - RNA, 19 nt, Homo sapiens
  misc_RNA (1)...(19): siRNA sense strand
ccggaaacaucauauggaa

SEQ ID NO: 1719376 - RNA, 19 nt, Homo sapiens
  misc_RNA (1)...(19): siRNA sense strand
gccaguaucuuugccagaa

SEQ ID NO: 1719377 - RNA, 19 nt, Homo sapiens
  misc_RNA (1)...(19): siRNA sense strand
gaauucaucagacuccaaa

SEQ ID NO: 1719378 - RNA, 19 nt, Homo sapiens
  misc_RNA (1)...(19): siRNA sense strand
aauacaagguuaugagguu

SEQ ID NO: 1719379 - RNA, 19 nt, Homo sapiens
  misc_RNA (1)...(19): siRNA sense strand
caucugucauugaaacaaa

SEQ ID NO: 1719380 - RNA, 19 nt, Homo sapiens
  misc_RNA (1)...(19): siRNA sense strand
acagcuagguccaguuuau

SEQ ID NO: 1719381 - RNA, 19 nt, Homo sapiens
  misc_RNA (1)...(19): siRNA sense strand
gaaacaucauauggaauuc

SEQ ID NO: 1719382 - RNA, 19 nt, Homo sapiens
  misc_RNA (1)...(19): siRNA sense strand
gaaagccaccaccaaguca

SEQ ID NO: 1719383 - RNA, 19 nt, Homo sapiens
  misc_RNA (1)...(19): siRNA sense strand
caagugaaggcccuggaua

SEQ ID NO: 1719384 - RNA, 19 nt, Homo sapiens
  misc_RNA (1)...(19): siRNA sense strand
gaagaagaacccaccaaac

SEQ ID NO: 1719385 - RNA, 19 nt, Homo sapiens
  misc_RNA (1)...(19): siRNA sense strand
ucacagcuagguccaguuu

SEQ ID NO: 1719386 - RNA, 19 nt, Homo sapiens
  misc_RNA (1)...(19): siRNA sense strand
ggagacaugaagacaaaga

SEQ ID NO: 1719387 - RNA, 19 nt, Homo sapiens
  misc_RNA (1)...(19): siRNA sense strand
uuggagacaugaagacaaa

SEQ ID NO: 1719388 - RNA, 19 nt, Homo sapiens
  misc_RNA (1)...(19): siRNA sense strand
auacaagguuaugagguua

SEQ ID NO: 1719389 - RNA, 19 nt, Homo sapiens
  misc_RNA (1)...(19): siRNA sense strand
gauacguguucaggaauga

SEQ ID NO: 1719390 - RNA, 19 nt, Homo sapiens
  misc_RNA (1)...(19): siRNA sense strand
gcagugaacaaauucgaau

SEQ ID NO: 1719391 - RNA, 19 nt, Homo sapiens
  misc_RNA (1)...(19): siRNA sense strand
gccuuucgaugaagauuau

SEQ ID NO: 1719392 - RNA, 19 nt, Homo sapiens
  misc_RNA (1)...(19): siRNA sense strand
ucaucagacuccaaaauua

SEQ ID NO: 1719393 - RNA, 19 nt, Homo sapiens
  misc_RNA (1)...(19): siRNA sense strand
ugccacagauauugaaguu

SEQ ID NO: 1719394 - RNA, 19 nt, Homo sapiens
  misc_RNA (1)...(19): siRNA sense strand
ucagccaucaguacaauaa

SEQ ID NO: 1719395 - RNA, 19 nt, Homo sapiens
  misc_RNA (1)...(19): siRNA sense strand
gacaugaagacaaagaaga

SEQ ID NO: 1719396 - RNA, 19 nt, Homo sapiens
  misc_RNA (1)...(19): siRNA sense strand
ggacgaauacaagguuaug

SEQ ID NO: 1719397 - RNA, 19 nt, Homo sapiens
  misc_RNA (1)...(19): siRNA sense strand
ggaaguaaaaggauacaaa

SEQ ID NO: 1719398 - RNA, 19 nt, Homo sapiens
  misc_RNA (1)...(19): siRNA sense strand
agacaaagcagcacaucug

SEQ ID NO: 1719399 - RNA, 19 nt, Homo sapiens
  misc_RNA (1)...(19): siRNA sense strand
guuaaauauuggagacaug

SEQ ID NO: 1719400 - RNA, 19 nt, Homo sapiens
  misc_RNA (1)...(19): siRNA sense strand
guacagauggaacagacaa

SEQ ID NO: 1719401 - RNA, 19 nt, Homo sapiens
  misc_RNA (1)...(19): siRNA sense strand
agaagaagaacccaccaaa

SEQ ID NO: 1719402 - RNA, 19 nt, Homo sapiens
  misc_RNA (1)...(19): siRNA sense strand
ggauaaugagucggaagua

SEQ ID NO: 1719403 - RNA, 19 nt, Homo sapiens
  misc_RNA (1)...(19): siRNA sense strand
gcugucaaggcauauaauu

SEQ ID NO: 1719404 - RNA, 19 nt, Homo sapiens
  misc_RNA (1)...(19): siRNA sense strand
gaaugcauguacgcuguca

SEQ ID NO: 1719405 - RNA, 19 nt, Homo sapiens
  misc_RNA (1)...(19): siRNA sense strand
ccaaaccaccagccaguau

SEQ ID NO: 1719406 - RNA, 19 nt, Homo sapiens
  misc_RNA (1)...(19): siRNA sense strand
aagaauagaggacgaauac

SEQ ID NO: 1719407 - RNA, 19 nt, Homo sapiens
  misc_RNA (1)...(19): siRNA sense strand
gccaucaguacaauaauga

SEQ ID NO: 1719408 - RNA, 19 nt, Homo sapiens
  misc_RNA (1)...(19): siRNA sense strand
caucauauggaauucauca

SEQ ID NO: 1719409 - RNA, 19 nt, Homo sapiens
  misc_RNA (1)...(19): siRNA sense strand
guaaaaggauacaaagucu

SEQ ID NO: 1719410 - RNA, 19 nt, Homo sapiens
  misc_RNA (1)...(19): siRNA sense strand
gagacaugaagacaaagaa

SEQ ID NO: 1719411 - RNA, 19 nt, Homo sapiens
  misc_RNA (1)...(19): siRNA sense strand
aauaaugauuucccucaca

SEQ ID NO: 1719412 - RNA, 19 nt, Homo sapiens
  misc_RNA (1)...(19): siRNA sense strand
aagcagcacaucugucauu

SEQ ID NO: 1719413 - RNA, 19 nt, Homo sapiens
  misc_RNA (1)...(19): siRNA sense strand
gagaagaauagaggacgaa

SEQ ID NO: 1719414 - RNA, 19 nt, Homo sapiens
  misc_RNA (1)...(19): siRNA sense strand
gcagcacaucugucauuga

SEQ ID NO: 1719415 - RNA, 19 nt, Homo sapiens
  misc_RNA (1)...(19): siRNA sense strand
auaaugagucggaaguaaa

SEQ ID NO: 1719416 - RNA, 19 nt, Homo sapiens
  misc_RNA (1)...(19): siRNA sense strand
cgaaagccaccaccaaguc

SEQ ID NO: 1719417 - RNA, 19 nt, Homo sapiens
  misc_RNA (1)...(19): siRNA sense strand
acaagguuaugagguuaaa

SEQ ID NO: 1719418 - RNA, 19 nt, Homo sapiens
  misc_RNA (1)...(19): siRNA sense strand
gguuaaauauuggagacau

SEQ ID NO: 1719419 - RNA, 19 nt, Homo sapiens
  misc_RNA (1)...(19): siRNA sense strand
ggagcuuucuuugccuuuc

SEQ ID NO: 1719420 - RNA, 19 nt, Homo sapiens
  misc_RNA (1)...(19): siRNA sense strand
gugaaggcccuggauaaug

SEQ ID NO: 1719421 - RNA, 19 nt, Homo sapiens
  misc_RNA (1)...(19): siRNA sense strand
acaugaagacaaagaagaa

SEQ ID NO: 1719422 - RNA, 19 nt, Homo sapiens
  misc_RNA (1)...(19): siRNA sense strand
ucauauggaauucaucaga

SEQ ID NO: 1719423 - RNA, 19 nt, Homo sapiens
  misc_RNA (1)...(19): siRNA sense strand
ugaauugggaucaagugaa

SEQ ID NO: 1719424 - RNA, 19 nt, Homo sapiens
  misc_RNA (1)...(19): siRNA sense strand
ggaauucaucagacuccaa

SEQ ID NO: 1719425 - RNA, 19 nt, Homo sapiens
  misc_RNA (1)...(19): siRNA sense strand
acuuagcugucaaggcaua

SEQ ID NO: 1719426 - RNA, 19 nt, Homo sapiens
  misc_RNA (1)...(19): siRNA sense strand
gacaaagcagcacaucugu

SEQ ID NO: 1719427 - RNA, 19 nt, Homo sapiens
  misc_RNA (1)...(19): siRNA sense strand
aagugaaggcccuggauaa

SEQ ID NO: 1719428 - RNA, 19 nt, Homo sapiens
  misc_RNA (1)...(19): siRNA sense strand
aaguaggugucuucaacaa

SEQ ID NO: 1719429 - RNA, 19 nt, Homo sapiens
  misc_RNA (1)...(19): siRNA sense strand
caucgguggagcuuucuuu

SEQ ID NO: 1719430 - RNA, 19 nt, Homo sapiens
  misc_RNA (1)...(19): siRNA sense strand
gguuaaaguaggugucuuc

SEQ ID NO: 1719431 - RNA, 19 nt, Homo sapiens
  misc_RNA (1)...(19): siRNA sense strand
ugucaaggcauauaauucu

SEQ ID NO: 1719432 - RNA, 19 nt, Homo sapiens
  misc_RNA (1)...(19): siRNA sense strand
ccacuucgaaugcauguac

SEQ ID NO: 1719433 - RNA, 19 nt, Homo sapiens
  misc_RNA (1)...(19): siRNA sense strand
uacgaacaguuggaaauca

SEQ ID NO: 1719434 - RNA, 19 nt, Homo sapiens
  misc_RNA (1)...(19): siRNA sense strand
uuccaaagauaucaaaugc

SEQ ID NO: 1719435 - RNA, 19 nt, Homo sapiens
  misc_RNA (1)...(19): siRNA sense strand
agauacguguucaggaaug

SEQ ID NO: 1719436 - RNA, 19 nt, Homo sapiens
  misc_RNA (1)...(19): siRNA sense strand
ccaccagccaguaucuuug

SEQ ID NO: 1719437 - RNA, 19 nt, Homo sapiens
  misc_RNA (1)...(19): siRNA sense strand
uagcugucaaggcauauaa

SEQ ID NO: 1719438 - RNA, 19 nt, Homo sapiens
  misc_RNA (1)...(19): siRNA sense strand
agccaucaguacaauaaug

SEQ ID NO: 1719439 - RNA, 19 nt, Homo sapiens
  misc_RNA (1)...(19): siRNA sense strand
ggcagcagcagugaacaaa

SEQ ID NO: 1719440 - RNA, 19 nt, Homo sapiens
  misc_RNA (1)...(19): siRNA sense strand
ugucagccaucaguacaau

SEQ ID NO: 1719441 - RNA, 19 nt, Homo sapiens
  misc_RNA (1)...(19): siRNA sense strand
gaaguaaaaggauacaaag

SEQ ID NO: 1719442 - RNA, 19 nt, Homo sapiens
  misc_RNA (1)...(19): siRNA sense strand
uuucuuugccuuucgauga

SEQ ID NO: 1719443 - RNA, 19 nt, Homo sapiens
  misc_RNA (1)...(19): siRNA sense strand
gucaaggcauauaauucug

SEQ ID NO: 1719444 - RNA, 19 nt, Homo sapiens
  misc_RNA (1)...(19): siRNA sense strand
gcagcagcagugaacaaau

SEQ ID NO: 1719445 - RNA, 19 nt, Homo sapiens
  misc_RNA (1)...(19): siRNA sense strand
gauggcagcagcagugaac

SEQ ID NO: 1719446 - RNA, 19 nt, Homo sapiens
  misc_RNA (1)...(19): siRNA sense strand
gagauggcagcagcaguga

SEQ ID NO: 1719447 - RNA, 19 nt, Homo sapiens
  misc_RNA (1)...(19): siRNA sense strand
ucucucccuuugagguuaa

SEQ ID NO: 1719448 - RNA, 19 nt, Homo sapiens
  misc_RNA (1)...(19): siRNA sense strand
caugaagacaaagaagaaa

SEQ ID NO: 1719449 - RNA, 19 nt, Homo sapiens
  misc_RNA (1)...(19): siRNA sense strand
gagcuuucuuugccuuucg

SEQ ID NO: 1719450 - RNA, 19 nt, Homo sapiens
  misc_RNA (1)...(19): siRNA sense strand
ucaaugugacaacccgaaa

SEQ ID NO: 1719451 - RNA, 19 nt, Homo sapiens
  misc_RNA (1)...(19): siRNA sense strand
aauacgaacaguuggaaau

SEQ ID NO: 1719452 - RNA, 19 nt, Homo sapiens
  misc_RNA (1)...(19): siRNA sense strand
caaaccaccagccaguauc

SEQ ID NO: 1719453 - RNA, 19 nt, Homo sapiens
  misc_RNA (1)...(19): siRNA sense strand
cagaagaagaacccaccaa

SEQ ID NO: 1719454 - RNA, 19 nt, Homo sapiens
  misc_RNA (1)...(19): siRNA sense strand
cgaauuccaaagauaucaa

SEQ ID NO: 1719455 - RNA, 19 nt, Homo sapiens
  misc_RNA (1)...(19): siRNA sense strand
agaagaacccaccaaacca

SEQ ID NO: 1719456 - RNA, 19 nt, Homo sapiens
  misc_RNA (1)...(19): siRNA sense strand
caguaucuuugccagaagu

SEQ ID NO: 1719457 - RNA, 19 nt, Homo sapiens
  misc_RNA (1)...(19): siRNA sense strand
ggaaacaucauauggaauu

SEQ ID NO: 1719458 - RNA, 19 nt, Homo sapiens
  misc_RNA (1)...(19): siRNA sense strand
gaaaucagacaucaacaaa

SEQ ID NO: 1719459 - RNA, 19 nt, Homo sapiens
  misc_RNA (1)...(19): siRNA sense strand
gauaaugagucggaaguaa

SEQ ID NO: 1719460 - RNA, 19 nt, Homo sapiens
  misc_RNA (1)...(19): siRNA sense strand
ugaaggcccuggauaauga

SEQ ID NO: 1719461 - RNA, 19 nt, Homo sapiens
  misc_RNA (1)...(19): siRNA sense strand
cagcagcagugaacaaauu

SEQ ID NO: 1719462 - RNA, 19 nt, Homo sapiens
  misc_RNA (1)...(19): siRNA sense strand
cagcacaucugucauugaa

SEQ ID NO: 1719463 - RNA, 19 nt, Homo sapiens
  misc_RNA (1)...(19): siRNA sense strand
gacggucccugaggaauua

SEQ ID NO: 1719464 - RNA, 19 nt, Homo sapiens
  misc_RNA (1)...(19): siRNA sense strand
gaauagaggacgaauacaa

SEQ ID NO: 1719465 - RNA, 19 nt, Homo sapiens
  misc_RNA (1)...(19): siRNA sense strand
uaaaguaggugucuucaac

SEQ ID NO: 1719466 - RNA, 19 nt, Homo sapiens
  misc_RNA (1)...(19): siRNA sense strand
gcacaucugucauugaaac

SEQ ID NO: 1719467 - RNA, 19 nt, Homo sapiens
  misc_RNA (1)...(19): siRNA sense strand
gaauugggaucaagugaag

SEQ ID NO: 1719468 - RNA, 19 nt, Homo sapiens
  misc_RNA (1)...(19): siRNA sense strand
gaagaauagaggacgaaua

SEQ ID NO: 1719469 - RNA, 19 nt, Homo sapiens
  misc_RNA (1)...(19): siRNA sense strand
gaggacgaauacaagguua

SEQ ID NO: 1719470 - RNA, 19 nt, Homo sapiens
  misc_RNA (1)...(19): siRNA sense strand
aaacaucgguggagcuuuc

SEQ ID NO: 1719471 - RNA, 19 nt, Homo sapiens
  misc_RNA (1)...(19): siRNA sense strand
cuagauacguguucaggaa

SEQ ID NO: 1719472 - RNA, 19 nt, Homo sapiens
  misc_RNA (1)...(19): siRNA sense strand
ccacagauauugaaguuuu

SEQ ID NO: 1719473 - RNA, 19 nt, Homo sapiens
  misc_RNA (1)...(19): siRNA sense strand
guaggugucuucaacaaca

SEQ ID NO: 1719474 - RNA, 19 nt, Homo sapiens
  misc_RNA (1)...(19): siRNA sense strand
ggaaaucagacaucaacaa

SEQ ID NO: 1719475 - RNA, 19 nt, Homo sapiens
  misc_RNA (1)...(19): siRNA sense strand
ggucgaggcuuugguuaug

SEQ ID NO: 1719476 - RNA, 19 nt, Homo sapiens
  misc_RNA (1)...(19): siRNA sense strand
caaagcagcacaucuguca

SEQ ID NO: 1719477 - RNA, 19 nt, Homo sapiens
  misc_RNA (1)...(19): siRNA sense strand
ccggaaacaucauauggaa

SEQ ID NO: 1719478 - RNA, 19 nt, Homo sapiens
  misc_RNA (1)...(19): siRNA sense strand
gccaguaucuuugccagaa

SEQ ID NO: 1719479 - RNA, 19 nt, Homo sapiens
  misc_RNA (1)...(19): siRNA sense strand
gaauucaucagacuccaaa

SEQ ID NO: 1719480 - RNA, 19 nt, Homo sapiens
  misc_RNA (1)...(19): siRNA sense strand
aauacaagguuaugagguu

SEQ ID NO: 1719481 - RNA, 19 nt, Homo sapiens
  misc_RNA (1)...(19): siRNA sense strand
caucugucauugaaacaaa

SEQ ID NO: 1719482 - RNA, 19 nt, Homo sapiens
  misc_RNA (1)...(19): siRNA sense strand
acagcuagguccaguuuau

SEQ ID NO: 1719483 - RNA, 19 nt, Homo sapiens
  misc_RNA (1)...(19): siRNA sense strand
gaaacaucauauggaauuc

SEQ ID NO: 1719484 - RNA, 19 nt, Homo sapiens
  misc_RNA (1)...(19): siRNA sense strand
acagaauggucgaggcuuu

SEQ ID NO: 1719485 - RNA, 19 nt, Homo sapiens
  misc_RNA (1)...(19): siRNA sense strand
caagugaaggcccuggaua

SEQ ID NO: 1719486 - RNA, 19 nt, Homo sapiens
  misc_RNA (1)...(19): siRNA sense strand
gaaagccaccaccaaguca

SEQ ID NO: 1719487 - RNA, 19 nt, Homo sapiens
  misc_RNA (1)...(19): siRNA sense strand
gaagaagaacccaccaaac

SEQ ID NO: 1719488 - RNA, 19 nt, Homo sapiens
  misc_RNA (1)...(19): siRNA sense strand
ucacagcuagguccaguuu

SEQ ID NO: 1719489 - RNA, 19 nt, Homo sapiens
  misc_RNA (1)...(19): siRNA sense strand
ggagacaugaagacaaaga

SEQ ID NO: 1719490 - RNA, 19 nt, Homo sapiens
  misc_RNA (1)...(19): siRNA sense strand
uuggagacaugaagacaaa

SEQ ID NO: 1719491 - RNA, 19 nt, Homo sapiens
  misc_RNA (1)...(19): siRNA sense strand
auacaagguuaugagguua

SEQ ID NO: 1719492 - RNA, 19 nt, Homo sapiens
  misc_RNA (1)...(19): siRNA sense strand
gccuuucgaugaagauuau

SEQ ID NO: 1719493 - RNA, 19 nt, Homo sapiens
  misc_RNA (1)...(19): siRNA sense strand
gcagugaacaaauucgaau

SEQ ID NO: 1719494 - RNA, 19 nt, Homo sapiens
  misc_RNA (1)...(19): siRNA sense strand
gauacguguucaggaauga

SEQ ID NO: 1719495 - RNA, 19 nt, Homo sapiens
  misc_RNA (1)...(19): siRNA sense strand
ucaucagacuccaaaauua

SEQ ID NO: 1719496 - RNA, 19 nt, Homo sapiens
  misc_RNA (1)...(19): siRNA sense strand
ccugaggaauuacagaaug

SEQ ID NO: 1719497 - RNA, 19 nt, Homo sapiens
  misc_RNA (1)...(19): siRNA sense strand
ugccacagauauugaaguu

SEQ ID NO: 1719498 - RNA, 19 nt, Homo sapiens
  misc_RNA (1)...(19): siRNA sense strand
ucagccaucaguacaauaa

SEQ ID NO: 1719499 - RNA, 19 nt, Homo sapiens
  misc_RNA (1)...(19): siRNA sense strand
gacaugaagacaaagaaga

SEQ ID NO: 1719500 - RNA, 19 nt, Homo sapiens
  misc_RNA (1)...(19): siRNA sense strand
ggacgaauacaagguuaug

SEQ ID NO: 1719501 - RNA, 19 nt, Homo sapiens
  misc_RNA (1)...(19): siRNA sense strand
ggaaguaaaaggauacaaa

SEQ ID NO: 1719502 - RNA, 19 nt, Homo sapiens
  misc_RNA (1)...(19): siRNA sense strand
agacaaagcagcacaucug

SEQ ID NO: 1719503 - RNA, 19 nt, Homo sapiens
  misc_RNA (1)...(19): siRNA sense strand
agaagaagaacccaccaaa

SEQ ID NO: 1719504 - RNA, 19 nt, Homo sapiens
  misc_RNA (1)...(19): siRNA sense strand
guacagauggaacagacaa

SEQ ID NO: 1719505 - RNA, 19 nt, Homo sapiens
  misc_RNA (1)...(19): siRNA sense strand
guuaaauauuggagacaug

SEQ ID NO: 1719506 - RNA, 19 nt, Homo sapiens
  misc_RNA (1)...(19): siRNA sense strand
ggauaaugagucggaagua

SEQ ID NO: 1719507 - RNA, 19 nt, Homo sapiens
  misc_RNA (1)...(19): siRNA sense strand
ccaaaccaccagccaguau

SEQ ID NO: 1719508 - RNA, 19 nt, Homo sapiens
  misc_RNA (1)...(19): siRNA sense strand
gaaugcauguacgcuguca

SEQ ID NO: 1719509 - RNA, 19 nt, Homo sapiens
  misc_RNA (1)...(19): siRNA sense strand
gcugucaaggcauauaauu

SEQ ID NO: 1719510 - RNA, 19 nt, Homo sapiens
  misc_RNA (1)...(19): siRNA sense strand
aagaauagaggacgaauac

SEQ ID NO: 1719511 - RNA, 19 nt, Homo sapiens
  misc_RNA (1)...(19): siRNA sense strand
gccaucaguacaauaauga

SEQ ID NO: 1719512 - RNA, 19 nt, Homo sapiens
  misc_RNA (1)...(19): siRNA sense strand
caucauauggaauucauca

SEQ ID NO: 1719513 - RNA, 19 nt, Homo sapiens
  misc_RNA (1)...(19): siRNA sense strand
guaaaaggauacaaagucu

SEQ ID NO: 1719514 - RNA, 19 nt, Homo sapiens
  misc_RNA (1)...(19): siRNA sense strand
gagacaugaagacaaagaa

SEQ ID NO: 1719515 - RNA, 19 nt, Homo sapiens
  misc_RNA (1)...(19): siRNA sense strand
aauaaugauuucccucaca

SEQ ID NO: 1719516 - RNA, 19 nt, Homo sapiens
  misc_RNA (1)...(19): siRNA sense strand
aagcagcacaucugucauu

SEQ ID NO: 1719517 - RNA, 19 nt, Homo sapiens
  misc_RNA (1)...(19): siRNA sense strand
gagaagaauagaggacgaa

SEQ ID NO: 1719518 - RNA, 19 nt, Homo sapiens
  misc_RNA (1)...(19): siRNA sense strand
gcagcacaucugucauuga

SEQ ID NO: 1719519 - RNA, 19 nt, Homo sapiens
  misc_RNA (1)...(19): siRNA sense strand
auaaugagucggaaguaaa

SEQ ID NO: 1719520 - RNA, 19 nt, Homo sapiens
  misc_RNA (1)...(19): siRNA sense strand
cgaaagccaccaccaaguc

SEQ ID NO: 1719521 - RNA, 19 nt, Homo sapiens
  misc_RNA (1)...(19): siRNA sense strand
acaagguuaugagguuaaa

SEQ ID NO: 1719522 - RNA, 19 nt, Homo sapiens
  misc_RNA (1)...(19): siRNA sense strand
gguuaaauauuggagacau

SEQ ID NO: 1719523 - RNA, 19 nt, Homo sapiens
  misc_RNA (1)...(19): siRNA sense strand
ggagcuuucuuugccuuuc

SEQ ID NO: 1719524 - RNA, 19 nt, Homo sapiens
  misc_RNA (1)...(19): siRNA sense strand
gugaaggcccuggauaaug

SEQ ID NO: 1719525 - RNA, 19 nt, Homo sapiens
  misc_RNA (1)...(19): siRNA sense strand
acaugaagacaaagaagaa

SEQ ID NO: 1719526 - RNA, 19 nt, Homo sapiens
  misc_RNA (1)...(19): siRNA sense strand
ucauauggaauucaucaga

SEQ ID NO: 1719527 - RNA, 19 nt, Homo sapiens
  misc_RNA (1)...(19): siRNA sense strand
ugaauugggaucaagugaa

SEQ ID NO: 1719528 - RNA, 19 nt, Homo sapiens
  misc_RNA (1)...(19): siRNA sense strand
ggaauucaucagacuccaa

SEQ ID NO: 1719529 - RNA, 19 nt, Homo sapiens
  misc_RNA (1)...(19): siRNA sense strand
acuuagcugucaaggcaua

SEQ ID NO: 1719530 - RNA, 19 nt, Homo sapiens
  misc_RNA (1)...(19): siRNA sense strand
gacaaagcagcacaucugu

SEQ ID NO: 1719531 - RNA, 19 nt, Homo sapiens
  misc_RNA (1)...(19): siRNA sense strand
aaguaggugucuucaacaa

SEQ ID NO: 1719532 - RNA, 19 nt, Homo sapiens
  misc_RNA (1)...(19): siRNA sense strand
aagugaaggcccuggauaa

SEQ ID NO: 1719533 - RNA, 19 nt, Homo sapiens
  misc_RNA (1)...(19): siRNA sense strand
gguuaaaguaggugucuuc

SEQ ID NO: 1719534 - RNA, 19 nt, Homo sapiens
  misc_RNA (1)...(19): siRNA sense strand
caucgguggagcuuucuuu

SEQ ID NO: 1719535 - RNA, 19 nt, Homo sapiens
  misc_RNA (1)...(19): siRNA sense strand
ugucaaggcauauaauucu

SEQ ID NO: 1719536 - RNA, 19 nt, Homo sapiens
  misc_RNA (1)...(19): siRNA sense strand
ccacuucgaaugcauguac

SEQ ID NO: 1719537 - RNA, 19 nt, Homo sapiens
  misc_RNA (1)...(19): siRNA sense strand
agauacguguucaggaaug

SEQ ID NO: 1719538 - RNA, 19 nt, Homo sapiens
  misc_RNA (1)...(19): siRNA sense strand
uuccaaagauaucaaaugc

SEQ ID NO: 1719539 - RNA, 19 nt, Homo sapiens
  misc_RNA (1)...(19): siRNA sense strand
agacggucccugaggaauu

SEQ ID NO: 1719540 - RNA, 19 nt, Homo sapiens
  misc_RNA (1)...(19): siRNA sense strand
ccaccagccaguaucuuug

SEQ ID NO: 1719541 - RNA, 19 nt, Homo sapiens
  misc_RNA (1)...(19): siRNA sense strand
uacgaacaguuggaaauca

SEQ ID NO: 1719542 - RNA, 19 nt, Homo sapiens
  misc_RNA (1)...(19): siRNA sense strand
uagcugucaaggcauauaa

SEQ ID NO: 1719543 - RNA, 19 nt, Homo sapiens
  misc_RNA (1)...(19): siRNA sense strand
agccaucaguacaauaaug

SEQ ID NO: 1719544 - RNA, 19 nt, Homo sapiens
  misc_RNA (1)...(19): siRNA sense strand
ggcagcagcagugaacaaa

SEQ ID NO: 1719545 - RNA, 19 nt, Homo sapiens
  misc_RNA (1)...(19): siRNA sense strand
ugucagccaucaguacaau

SEQ ID NO: 1719546 - RNA, 19 nt, Homo sapiens
  misc_RNA (1)...(19): siRNA sense strand
gaaguaaaaggauacaaag

SEQ ID NO: 1719547 - RNA, 19 nt, Homo sapiens
  misc_RNA (1)...(19): siRNA sense strand
uuucuuugccuuucgauga

SEQ ID NO: 1719548 - RNA, 19 nt, Homo sapiens
  misc_RNA (1)...(19): siRNA sense strand
ucucucccuuugagguuaa

SEQ ID NO: 1719549 - RNA, 19 nt, Homo sapiens
  misc_RNA (1)...(19): siRNA sense strand
gcagcagcagugaacaaau

SEQ ID NO: 1719550 - RNA, 19 nt, Homo sapiens
  misc_RNA (1)...(19): siRNA sense strand
gauggcagcagcagugaac

SEQ ID NO: 1719551 - RNA, 19 nt, Homo sapiens
  misc_RNA (1)...(19): siRNA sense strand
gagauggcagcagcaguga

SEQ ID NO: 1719552 - RNA, 19 nt, Homo sapiens
  misc_RNA (1)...(19): siRNA sense strand
gucaaggcauauaauucug

SEQ ID NO: 1719553 - RNA, 19 nt, Homo sapiens
  misc_RNA (1)...(19): siRNA sense strand
caugaagacaaagaagaaa

SEQ ID NO: 1719554 - RNA, 19 nt, Homo sapiens
  misc_RNA (1)...(19): siRNA sense strand
gagcuuucuuugccuuucg

SEQ ID NO: 1719555 - RNA, 19 nt, Homo sapiens
  misc_RNA (1)...(19): siRNA sense strand
ucaaugugacaacccgaaa

SEQ ID NO: 1719556 - RNA, 19 nt, Homo sapiens
  misc_RNA (1)...(19): siRNA sense strand
aauacgaacaguuggaaau

SEQ ID NO: 1719557 - RNA, 19 nt, Homo sapiens
  misc_RNA (1)...(19): siRNA sense strand
gcuggaacuuucugaauua

SEQ ID NO: 1719558 - RNA, 19 nt, Homo sapiens
  misc_RNA (1)...(19): siRNA sense strand
ggacagaggaggcuaauga

SEQ ID NO: 1719559 - RNA, 19 nt, Homo sapiens
  misc_RNA (1)...(19): siRNA sense strand
ucacaugggucaacuguuc

SEQ ID NO: 1719560 - RNA, 19 nt, Homo sapiens
  misc_RNA (1)...(19): siRNA sense strand
ucaacuaccucuucuaugg

SEQ ID NO: 1719561 - RNA, 19 nt, Homo sapiens
  misc_RNA (1)...(19): siRNA sense strand
ggcuggaacuuucugaauu

SEQ ID NO: 1719562 - RNA, 19 nt, Homo sapiens
  misc_RNA (1)...(19): siRNA sense strand
guuaaugggucucucuuca

SEQ ID NO: 1719563 - RNA, 19 nt, Homo sapiens
  misc_RNA (1)...(19): siRNA sense strand
caaugucgcuuaugucacu

SEQ ID NO: 1719564 - RNA, 19 nt, Homo sapiens
  misc_RNA (1)...(19): siRNA sense strand
cacgguugcuggacagaua

SEQ ID NO: 1719565 - RNA, 19 nt, Homo sapiens
  misc_RNA (1)...(19): siRNA sense strand
ggaacuuucugaauuacgu

SEQ ID NO: 1719566 - RNA, 19 nt, Homo sapiens
  misc_RNA (1)...(19): siRNA sense strand
uguacacacucaucaacua

SEQ ID NO: 1719567 - RNA, 19 nt, Homo sapiens
  misc_RNA (1)...(19): siRNA sense strand
gaucaugcccauuucuguu

SEQ ID NO: 1719568 - RNA, 19 nt, Homo sapiens
  misc_RNA (1)...(19): siRNA sense strand
gaaugcauuugagaauuuc

SEQ ID NO: 1719569 - RNA, 19 nt, Homo sapiens
  misc_RNA (1)...(19): siRNA sense strand
uauggaggcuggaacuuuc

SEQ ID NO: 1719570 - RNA, 19 nt, Homo sapiens
  misc_RNA (1)...(19): siRNA sense strand
caucaacuaccucuucuau

SEQ ID NO: 1719571 - RNA, 19 nt, Homo sapiens
  misc_RNA (1)...(19): siRNA sense strand
ugacugaggagcuuguuga

SEQ ID NO: 1719572 - RNA, 19 nt, Homo sapiens
  misc_RNA (1)...(19): siRNA sense strand
guacacacucaucaacuau

SEQ ID NO: 1719573 - RNA, 19 nt, Homo sapiens
  misc_RNA (1)...(19): siRNA sense strand
ucuauuuccuggguguuua

SEQ ID NO: 1719574 - RNA, 19 nt, Homo sapiens
  misc_RNA (1)...(19): siRNA sense strand
gcuggaagaagccugauau

SEQ ID NO: 1719575 - RNA, 19 nt, Homo sapiens
  misc_RNA (1)...(19): siRNA sense strand
acacacucaucaacuaugu

SEQ ID NO: 1719576 - RNA, 19 nt, Homo sapiens
  misc_RNA (1)...(19): siRNA sense strand
gcaaaggagaguacuucug

SEQ ID NO: 1719577 - RNA, 19 nt, Homo sapiens
  misc_RNA (1)...(19): siRNA sense strand
guguuucagugacuucauu

SEQ ID NO: 1719578 - RNA, 19 nt, Homo sapiens
  misc_RNA (1)...(19): siRNA sense strand
uaugugggcuucaucaacu

SEQ ID NO: 1719579 - RNA, 19 nt, Homo sapiens
  misc_RNA (1)...(19): siRNA sense strand
aggagugccugucuauuuc

SEQ ID NO: 1719580 - RNA, 19 nt, Homo sapiens
  misc_RNA (1)...(19): siRNA sense strand
gccaaugucgcuuauguca

SEQ ID NO: 1719581 - RNA, 19 nt, Homo sapiens
  misc_RNA (1)...(19): siRNA sense strand
ucgcuuaugucacugcaau

SEQ ID NO: 1719582 - RNA, 19 nt, Homo sapiens
  misc_RNA (1)...(19): siRNA sense strand
gcccugcucuucacaugca

SEQ ID NO: 1719583 - RNA, 19 nt, Homo sapiens
  misc_RNA (1)...(19): siRNA sense strand
ugacuucauugagcugcua

SEQ ID NO: 1719584 - RNA, 19 nt, Homo sapiens
  misc_RNA (1)...(19): siRNA sense strand
ggagccaaagaaugcauuu

SEQ ID NO: 1719585 - RNA, 19 nt, Homo sapiens
  misc_RNA (1)...(19): siRNA sense strand
guguaugucuuugccaaug

SEQ ID NO: 1719586 - RNA, 19 nt, Homo sapiens
  misc_RNA (1)...(19): siRNA sense strand
ccaucccacuggucacauu

SEQ ID NO: 1719587 - RNA, 19 nt, Homo sapiens
  misc_RNA (1)...(19): siRNA sense strand
ccagagccaucuucaucuc

SEQ ID NO: 1719588 - RNA, 19 nt, Homo sapiens
  misc_RNA (1)...(19): siRNA sense strand
caagaucaaccugcuguuc

SEQ ID NO: 1719589 - RNA, 19 nt, Homo sapiens
  misc_RNA (1)...(19): siRNA sense strand
ggagucauggccuggauca

SEQ ID NO: 1719590 - RNA, 19 nt, Homo sapiens
  misc_RNA (1)...(19): siRNA sense strand
agauguguguggucgugua

SEQ ID NO: 1719591 - RNA, 19 nt, Homo sapiens
  misc_RNA (1)...(19): siRNA sense strand
ggaucaugcccauuucugu

SEQ ID NO: 1719592 - RNA, 19 nt, Homo sapiens
  misc_RNA (1)...(19): siRNA sense strand
uuacgugacugaggagcuu

SEQ ID NO: 1719593 - RNA, 19 nt, Homo sapiens
  misc_RNA (1)...(19): siRNA sense strand
gagcagcagcagcccaugu

SEQ ID NO: 1719594 - RNA, 19 nt, Homo sapiens
  misc_RNA (1)...(19): siRNA sense strand
cgacauguacacacucauc

SEQ ID NO: 1719595 - RNA, 19 nt, Homo sapiens
  misc_RNA (1)...(19): siRNA sense strand
cagcccugcucuucacaug

SEQ ID NO: 1719596 - RNA, 19 nt, Homo sapiens
  misc_RNA (1)...(19): siRNA sense strand
gccuggaucaugcccauuu

SEQ ID NO: 1719597 - RNA, 19 nt, Homo sapiens
  misc_RNA (1)...(19): siRNA sense strand
ucagggcuccuuugccuau

SEQ ID NO: 1719598 - RNA, 19 nt, Homo sapiens
  misc_RNA (1)...(19): siRNA sense strand
cuauggaggcuggaacuuu

SEQ ID NO: 1719599 - RNA, 19 nt, Homo sapiens
  misc_RNA (1)...(19): siRNA sense strand
ccagcgacauguacacacu

SEQ ID NO: 1719600 - RNA, 19 nt, Homo sapiens
  misc_RNA (1)...(19): siRNA sense strand
gauaugcaaaggagaguac

SEQ ID NO: 1719601 - RNA, 19 nt, Homo sapiens
  misc_RNA (1)...(19): siRNA sense strand
uugccaaugucgcuuaugu

SEQ ID NO: 1719602 - RNA, 19 nt, Homo sapiens
  misc_RNA (1)...(19): siRNA sense strand
gauuguacagauaugcaaa

SEQ ID NO: 1719603 - RNA, 19 nt, Homo sapiens
  misc_RNA (1)...(19): siRNA sense strand
ggaguuaaugggucucucu

SEQ ID NO: 1719604 - RNA, 19 nt, Homo sapiens
  misc_RNA (1)...(19): siRNA sense strand
ggauuguacagauaugcaa

SEQ ID NO: 1719605 - RNA, 19 nt, Homo sapiens
  misc_RNA (1)...(19): siRNA sense strand
ggaggcuaaugaggacaug

SEQ ID NO: 1719606 - RNA, 19 nt, Homo sapiens
  misc_RNA (1)...(19): siRNA sense strand
caucaucuacuugcuguuc

SEQ ID NO: 1719607 - RNA, 19 nt, Homo sapiens
  misc_RNA (1)...(19): siRNA sense strand
gacauguacacacucauca

SEQ ID NO: 1719608 - RNA, 19 nt, Homo sapiens
  misc_RNA (1)...(19): siRNA sense strand
cuguugcccuguccacauu

SEQ ID NO: 1719609 - RNA, 19 nt, Homo sapiens
  misc_RNA (1)...(19): siRNA sense strand
gggcuccuuugccuaugga

SEQ ID NO: 1719610 - RNA, 19 nt, Homo sapiens
  misc_RNA (1)...(19): siRNA sense strand
ccacccggguucaagacau

SEQ ID NO: 1719611 - RNA, 19 nt, Homo sapiens
  misc_RNA (1)...(19): siRNA sense strand
ccaguguguuggccaugau

SEQ ID NO: 1719612 - RNA, 19 nt, Homo sapiens
  misc_RNA (1)...(19): siRNA sense strand
guaugucuuugccaauguc

SEQ ID NO: 1719613 - RNA, 19 nt, Homo sapiens
  misc_RNA (1)...(19): siRNA sense strand
ucccagagccaucuucauc

SEQ ID NO: 1719614 - RNA, 19 nt, Homo sapiens
  misc_RNA (1)...(19): siRNA sense strand
ucaacuaugugggcuucau

SEQ ID NO: 1719615 - RNA, 19 nt, Homo sapiens
  misc_RNA (1)...(19): siRNA sense strand
gcuggaacuuucugaauua

SEQ ID NO: 1719616 - RNA, 19 nt, Homo sapiens
  misc_RNA (1)...(19): siRNA sense strand
ggacagaggaggcuaauga

SEQ ID NO: 1719617 - RNA, 19 nt, Homo sapiens
  misc_RNA (1)...(19): siRNA sense strand
ucaacuaccucuucuaugg

SEQ ID NO: 1719618 - RNA, 19 nt, Homo sapiens
  misc_RNA (1)...(19): siRNA sense strand
ggcuggaacuuucugaauu

SEQ ID NO: 1719619 - RNA, 19 nt, Homo sapiens
  misc_RNA (1)...(19): siRNA sense strand
guuaaugggucucucuuca

SEQ ID NO: 1719620 - RNA, 19 nt, Homo sapiens
  misc_RNA (1)...(19): siRNA sense strand
caaugucgcuuaugucacu

SEQ ID NO: 1719621 - RNA, 19 nt, Homo sapiens
  misc_RNA (1)...(19): siRNA sense strand
cacgguugcuggacagaua

SEQ ID NO: 1719622 - RNA, 19 nt, Homo sapiens
  misc_RNA (1)...(19): siRNA sense strand
ggaacuuucugaauuacgu

SEQ ID NO: 1719623 - RNA, 19 nt, Homo sapiens
  misc_RNA (1)...(19): siRNA sense strand
uguacacacucaucaacua

SEQ ID NO: 1719624 - RNA, 19 nt, Homo sapiens
  misc_RNA (1)...(19): siRNA sense strand
gaucaugcccauuucuguu

SEQ ID NO: 1719625 - RNA, 19 nt, Homo sapiens
  misc_RNA (1)...(19): siRNA sense strand
gaaugcauuugagaauuuc

SEQ ID NO: 1719626 - RNA, 19 nt, Homo sapiens
  misc_RNA (1)...(19): siRNA sense strand
uauggaggcuggaacuuuc

SEQ ID NO: 1719627 - RNA, 19 nt, Homo sapiens
  misc_RNA (1)...(19): siRNA sense strand
caucaacuaccucuucuau

SEQ ID NO: 1719628 - RNA, 19 nt, Homo sapiens
  misc_RNA (1)...(19): siRNA sense strand
ugacugaggagcuuguuga

SEQ ID NO: 1719629 - RNA, 19 nt, Homo sapiens
  misc_RNA (1)...(19): siRNA sense strand
guacacacucaucaacuau

SEQ ID NO: 1719630 - RNA, 19 nt, Homo sapiens
  misc_RNA (1)...(19): siRNA sense strand
ucuauuuccuggguguuua

SEQ ID NO: 1719631 - RNA, 19 nt, Homo sapiens
  misc_RNA (1)...(19): siRNA sense strand
gcuggaagaagccugauau

SEQ ID NO: 1719632 - RNA, 19 nt, Homo sapiens
  misc_RNA (1)...(19): siRNA sense strand
acacacucaucaacuaugu

SEQ ID NO: 1719633 - RNA, 19 nt, Homo sapiens
  misc_RNA (1)...(19): siRNA sense strand
gcaaaggagaguacuucug

SEQ ID NO: 1719634 - RNA, 19 nt, Homo sapiens
  misc_RNA (1)...(19): siRNA sense strand
guguuucagugacuucauu

SEQ ID NO: 1719635 - RNA, 19 nt, Homo sapiens
  misc_RNA (1)...(19): siRNA sense strand
uaugugggcuucaucaacu

SEQ ID NO: 1719636 - RNA, 19 nt, Homo sapiens
  misc_RNA (1)...(19): siRNA sense strand
aggagugccugucuauuuc

SEQ ID NO: 1719637 - RNA, 19 nt, Homo sapiens
  misc_RNA (1)...(19): siRNA sense strand
gccaaugucgcuuauguca

SEQ ID NO: 1719638 - RNA, 19 nt, Homo sapiens
  misc_RNA (1)...(19): siRNA sense strand
ucgcuuaugucacugcaau

SEQ ID NO: 1719639 - RNA, 19 nt, Homo sapiens
  misc_RNA (1)...(19): siRNA sense strand
gcccugcucuucacaugca

SEQ ID NO: 1719640 - RNA, 19 nt, Homo sapiens
  misc_RNA (1)...(19): siRNA sense strand
ugacuucauugagcugcua

SEQ ID NO: 1719641 - RNA, 19 nt, Homo sapiens
  misc_RNA (1)...(19): siRNA sense strand
ccagagccaucuucaucuc

SEQ ID NO: 1719642 - RNA, 19 nt, Homo sapiens
  misc_RNA (1)...(19): siRNA sense strand
ggagccaaagaaugcauuu

SEQ ID NO: 1719643 - RNA, 19 nt, Homo sapiens
  misc_RNA (1)...(19): siRNA sense strand
guguaugucuuugccaaug

SEQ ID NO: 1719644 - RNA, 19 nt, Homo sapiens
  misc_RNA (1)...(19): siRNA sense strand
ccaucccacuggucacauu

SEQ ID NO: 1719645 - RNA, 19 nt, Homo sapiens
  misc_RNA (1)...(19): siRNA sense strand
caagaucaaccugcuguuc

SEQ ID NO: 1719646 - RNA, 19 nt, Homo sapiens
  misc_RNA (1)...(19): siRNA sense strand
ggagucauggccuggauca

SEQ ID NO: 1719647 - RNA, 19 nt, Homo sapiens
  misc_RNA (1)...(19): siRNA sense strand
agauguguguggucgugua

SEQ ID NO: 1719648 - RNA, 19 nt, Homo sapiens
  misc_RNA (1)...(19): siRNA sense strand
ggaucaugcccauuucugu

SEQ ID NO: 1719649 - RNA, 19 nt, Homo sapiens
  misc_RNA (1)...(19): siRNA sense strand
uuacgugacugaggagcuu

SEQ ID NO: 1719650 - RNA, 19 nt, Homo sapiens
  misc_RNA (1)...(19): siRNA sense strand
gagcagcagcagcccaugu

SEQ ID NO: 1719651 - RNA, 19 nt, Homo sapiens
  misc_RNA (1)...(19): siRNA sense strand
cgacauguacacacucauc

SEQ ID NO: 1719652 - RNA, 19 nt, Homo sapiens
  misc_RNA (1)...(19): siRNA sense strand
cagcccugcucuucacaug

SEQ ID NO: 1719653 - RNA, 19 nt, Homo sapiens
  misc_RNA (1)...(19): siRNA sense strand
gccuggaucaugcccauuu

SEQ ID NO: 1719654 - RNA, 19 nt, Homo sapiens
  misc_RNA (1)...(19): siRNA sense strand
ucagggcuccuuugccuau

SEQ ID NO: 1719655 - RNA, 19 nt, Homo sapiens
  misc_RNA (1)...(19): siRNA sense strand
gauuguacagauaugcaaa

SEQ ID NO: 1719656 - RNA, 19 nt, Homo sapiens
  misc_RNA (1)...(19): siRNA sense strand
ccagcgacauguacacacu

SEQ ID NO: 1719657 - RNA, 19 nt, Homo sapiens
  misc_RNA (1)...(19): siRNA sense strand
gauaugcaaaggagaguac

SEQ ID NO: 1719658 - RNA, 19 nt, Homo sapiens
  misc_RNA (1)...(19): siRNA sense strand
uugccaaugucgcuuaugu

SEQ ID NO: 1719659 - RNA, 19 nt, Homo sapiens
  misc_RNA (1)...(19): siRNA sense strand
cuauggaggcuggaacuuu

SEQ ID NO: 1719660 - RNA, 19 nt, Homo sapiens
  misc_RNA (1)...(19): siRNA sense strand
ggaguuaaugggucucucu

SEQ ID NO: 1719661 - RNA, 19 nt, Homo sapiens
  misc_RNA (1)...(19): siRNA sense strand
gacauguacacacucauca

SEQ ID NO: 1719662 - RNA, 19 nt, Homo sapiens
  misc_RNA (1)...(19): siRNA sense strand
ggaggcuaaugaggacaug

SEQ ID NO: 1719663 - RNA, 19 nt, Homo sapiens
  misc_RNA (1)...(19): siRNA sense strand
caucaucuacuugcuguuc

SEQ ID NO: 1719664 - RNA, 19 nt, Homo sapiens
  misc_RNA (1)...(19): siRNA sense strand
ggauuguacagauaugcaa

SEQ ID NO: 1719665 - RNA, 19 nt, Homo sapiens
  misc_RNA (1)...(19): siRNA sense strand
cuguugcccuguccacauu

SEQ ID NO: 1719666 - RNA, 19 nt, Homo sapiens
  misc_RNA (1)...(19): siRNA sense strand
guaugucuuugccaauguc

SEQ ID NO: 1719667 - RNA, 19 nt, Homo sapiens
  misc_RNA (1)...(19): siRNA sense strand
gggcuccuuugccuaugga

SEQ ID NO: 1719668 - RNA, 19 nt, Homo sapiens
  misc_RNA (1)...(19): siRNA sense strand
ccaguguguuggccaugau

SEQ ID NO: 1719669 - RNA, 19 nt, Homo sapiens
  misc_RNA (1)...(19): siRNA sense strand
ucccagagccaucuucauc

SEQ ID NO: 1719670 - RNA, 19 nt, Homo sapiens
  misc_RNA (1)...(19): siRNA sense strand
ucaacuaugugggcuucau

SEQ ID NO: 1719671 - RNA, 19 nt, Homo sapiens
  misc_RNA (1)...(19): siRNA sense strand
gagcaacacuguaucucuu

SEQ ID NO: 1719672 - RNA, 19 nt, Homo sapiens
  misc_RNA (1)...(19): siRNA sense strand
ccaaugaucaauacaaguu

SEQ ID NO: 1719673 - RNA, 19 nt, Homo sapiens
  misc_RNA (1)...(19): siRNA sense strand
ggaacguccagauuucuaa

SEQ ID NO: 1719674 - RNA, 19 nt, Homo sapiens
  misc_RNA (1)...(19): siRNA sense strand
uacaaguucuacucaguga

SEQ ID NO: 1719675 - RNA, 19 nt, Homo sapiens
  misc_RNA (1)...(19): siRNA sense strand
caaguucuacucagugaau

SEQ ID NO: 1719676 - RNA, 19 nt, Homo sapiens
  misc_RNA (1)...(19): siRNA sense strand
ggagcaacacuguaucucu

SEQ ID NO: 1719677 - RNA, 19 nt, Homo sapiens
  misc_RNA (1)...(19): siRNA sense strand
acucagugaauguggauua

SEQ ID NO: 1719678 - RNA, 19 nt, Homo sapiens
  misc_RNA (1)...(19): siRNA sense strand
aauacaaguucuacucagu

SEQ ID NO: 1719679 - RNA, 19 nt, Homo sapiens
  misc_RNA (1)...(19): siRNA sense strand
gauguuuguugggacagaa

SEQ ID NO: 1719680 - RNA, 19 nt, Homo sapiens
  misc_RNA (1)...(19): siRNA sense strand
ucaauacaaguucuacuca

SEQ ID NO: 1719681 - RNA, 19 nt, Homo sapiens
  misc_RNA (1)...(19): siRNA sense strand
ucaauccagauguuuguug

SEQ ID NO: 1719682 - RNA, 19 nt, Homo sapiens
  misc_RNA (1)...(19): siRNA sense strand
cagugaauguggauuacag

SEQ ID NO: 1719683 - RNA, 19 nt, Homo sapiens
  misc_RNA (1)...(19): siRNA sense strand
guucaauccagauguuugu

SEQ ID NO: 1719684 - RNA, 19 nt, Homo sapiens
  misc_RNA (1)...(19): siRNA sense strand
ucccaaugaucaauacaag

SEQ ID NO: 1719685 - RNA, 19 nt, Homo sapiens
  misc_RNA (1)...(19): siRNA sense strand
ucucuugcgucuggcauug

SEQ ID NO: 1719686 - RNA, 19 nt, Homo sapiens
  misc_RNA (1)...(19): siRNA sense strand
cuacuggagcaacacugua

SEQ ID NO: 1719687 - RNA, 19 nt, Homo sapiens
  misc_RNA (1)...(19): siRNA sense strand
ucaacgagcugcccgagaa

SEQ ID NO: 1719688 - RNA, 19 nt, Homo sapiens
  misc_RNA (1)...(19): siRNA sense strand
gagagggcuucaucacuga

SEQ ID NO: 1719689 - RNA, 19 nt, Homo sapiens
  misc_RNA (1)...(19): siRNA sense strand
gagaccagaggaaggaauu

SEQ ID NO: 1719690 - RNA, 19 nt, Homo sapiens
  misc_RNA (1)...(19): siRNA sense strand
gaagguggaggaucucucu

SEQ ID NO: 1719691 - RNA, 19 nt, Homo sapiens
  misc_RNA (1)...(19): siRNA sense strand
gagccuggaugugaaugga

SEQ ID NO: 1719692 - RNA, 19 nt, Homo sapiens
  misc_RNA (1)...(19): siRNA sense strand
cagauugcggguccaagua

SEQ ID NO: 1719693 - RNA, 19 nt, Homo sapiens
  misc_RNA (1)...(19): siRNA sense strand
cggcgaccauccagcagaa

SEQ ID NO: 1719694 - RNA, 19 nt, Homo sapiens
  misc_RNA (1)...(19): siRNA sense strand
ccacacauucuccaacuac

SEQ ID NO: 1719695 - RNA, 19 nt, Homo sapiens
  misc_RNA (1)...(19): siRNA sense strand
ccucgugacccucuggaaa

SEQ ID NO: 1719696 - RNA, 19 nt, Homo sapiens
  misc_RNA (1)...(19): siRNA sense strand
ucuggagccuggaugugaa

SEQ ID NO: 1719697 - RNA, 19 nt, Homo sapiens
  misc_RNA (1)...(19): siRNA sense strand
gaagagggguucgaguucu

SEQ ID NO: 1719698 - RNA, 19 nt, Homo sapiens
  misc_RNA (1)...(19): siRNA sense strand
gcggcguggacacucauua

SEQ ID NO: 1719699 - RNA, 19 nt, Homo sapiens
  misc_RNA (1)...(19): siRNA sense strand
aguggaagguggaggaucu

SEQ ID NO: 1719700 - RNA, 19 nt, Homo sapiens
  misc_RNA (1)...(19): siRNA sense strand
ccagauugcggguccaagu

SEQ ID NO: 1719701 - RNA, 19 nt, Homo sapiens
  misc_RNA (1)...(19): siRNA sense strand
gcgaccauccagcagaaga

SEQ ID NO: 1719702 - RNA, 19 nt, Homo sapiens
  misc_RNA (1)...(19): siRNA sense strand
cagaagagcgaugccaagu

SEQ ID NO: 1719703 - RNA, 19 nt, Homo sapiens
  misc_RNA (1)...(19): siRNA sense strand
ucaacgagcugcccgagaa

SEQ ID NO: 1719704 - RNA, 19 nt, Homo sapiens
  misc_RNA (1)...(19): siRNA sense strand
gagagggcuucaucacuga

SEQ ID NO: 1719705 - RNA, 19 nt, Homo sapiens
  misc_RNA (1)...(19): siRNA sense strand
gagaccagaggaaggaauu

SEQ ID NO: 1719706 - RNA, 19 nt, Homo sapiens
  misc_RNA (1)...(19): siRNA sense strand
gaagguggaggaucucucu

SEQ ID NO: 1719707 - RNA, 19 nt, Homo sapiens
  misc_RNA (1)...(19): siRNA sense strand
gagccuggaugugaaugga

SEQ ID NO: 1719708 - RNA, 19 nt, Homo sapiens
  misc_RNA (1)...(19): siRNA sense strand
cagauugcggguccaagua

SEQ ID NO: 1719709 - RNA, 19 nt, Homo sapiens
  misc_RNA (1)...(19): siRNA sense strand
cggcgaccauccagcagaa

SEQ ID NO: 1719710 - RNA, 19 nt, Homo sapiens
  misc_RNA (1)...(19): siRNA sense strand
ccacacauucuccaacuac

SEQ ID NO: 1719711 - RNA, 19 nt, Homo sapiens
  misc_RNA (1)...(19): siRNA sense strand
ccucgugacccucuggaaa

SEQ ID NO: 1719712 - RNA, 19 nt, Homo sapiens
  misc_RNA (1)...(19): siRNA sense strand
ucuggagccuggaugugaa

SEQ ID NO: 1719713 - RNA, 19 nt, Homo sapiens
  misc_RNA (1)...(19): siRNA sense strand
gaagagggguucgaguucu

SEQ ID NO: 1719714 - RNA, 19 nt, Homo sapiens
  misc_RNA (1)...(19): siRNA sense strand
gcggcguggacacucauua

SEQ ID NO: 1719715 - RNA, 19 nt, Homo sapiens
  misc_RNA (1)...(19): siRNA sense strand
aguggaagguggaggaucu

SEQ ID NO: 1719716 - RNA, 19 nt, Homo sapiens
  misc_RNA (1)...(19): siRNA sense strand
ccagauugcggguccaagu

SEQ ID NO: 1719717 - RNA, 19 nt, Homo sapiens
  misc_RNA (1)...(19): siRNA sense strand
gcgaccauccagcagaaga

SEQ ID NO: 1719718 - RNA, 19 nt, Homo sapiens
  misc_RNA (1)...(19): siRNA sense strand
cagaagagcgaugccaagu

SEQ ID NO: 1719719 - RNA, 19 nt, Homo sapiens
  misc_RNA (1)...(19): siRNA sense strand
ucaacgagcugcccgagaa

SEQ ID NO: 1719720 - RNA, 19 nt, Homo sapiens
  misc_RNA (1)...(19): siRNA sense strand
gagagggcuucaucacuga

SEQ ID NO: 1719721 - RNA, 19 nt, Homo sapiens
  misc_RNA (1)...(19): siRNA sense strand
gagaccagaggaaggaauu

SEQ ID NO: 1719722 - RNA, 19 nt, Homo sapiens
  misc_RNA (1)...(19): siRNA sense strand
gaagguggaggaucucucu

SEQ ID NO: 1719723 - RNA, 19 nt, Homo sapiens
  misc_RNA (1)...(19): siRNA sense strand
gagccuggaugugaaugga

SEQ ID NO: 1719724 - RNA, 19 nt, Homo sapiens
  misc_RNA (1)...(19): siRNA sense strand
cagauugcggguccaagua

SEQ ID NO: 1719725 - RNA, 19 nt, Homo sapiens
  misc_RNA (1)...(19): siRNA sense strand
cggcgaccauccagcagaa

SEQ ID NO: 1719726 - RNA, 19 nt, Homo sapiens
  misc_RNA (1)...(19): siRNA sense strand
ccacacauucuccaacuac

SEQ ID NO: 1719727 - RNA, 19 nt, Homo sapiens
  misc_RNA (1)...(19): siRNA sense strand
ccucgugacccucuggaaa

SEQ ID NO: 1719728 - RNA, 19 nt, Homo sapiens
  misc_RNA (1)...(19): siRNA sense strand
ucuggagccuggaugugaa

SEQ ID NO: 1719729 - RNA, 19 nt, Homo sapiens
  misc_RNA (1)...(19): siRNA sense strand
gaagagggguucgaguucu

SEQ ID NO: 1719730 - RNA, 19 nt, Homo sapiens
  misc_RNA (1)...(19): siRNA sense strand
gcggcguggacacucauua

SEQ ID NO: 1719731 - RNA, 19 nt, Homo sapiens
  misc_RNA (1)...(19): siRNA sense strand
aguggaagguggaggaucu

SEQ ID NO: 1719732 - RNA, 19 nt, Homo sapiens
  misc_RNA (1)...(19): siRNA sense strand
ccagauugcggguccaagu

SEQ ID NO: 1719733 - RNA, 19 nt, Homo sapiens
  misc_RNA (1)...(19): siRNA sense strand
gcgaccauccagcagaaga

SEQ ID NO: 1719734 - RNA, 19 nt, Homo sapiens
  misc_RNA (1)...(19): siRNA sense strand
cagaagagcgaugccaagu

SEQ ID NO: 1719735 - RNA, 19 nt, Homo sapiens
  misc_RNA (1)...(19): siRNA sense strand
ucaacgagcugcccgagaa

SEQ ID NO: 1719736 - RNA, 19 nt, Homo sapiens
  misc_RNA (1)...(19): siRNA sense strand
gagagggcuucaucacuga

SEQ ID NO: 1719737 - RNA, 19 nt, Homo sapiens
  misc_RNA (1)...(19): siRNA sense strand
gagaccagaggaaggaauu

SEQ ID NO: 1719738 - RNA, 19 nt, Homo sapiens
  misc_RNA (1)...(19): siRNA sense strand
gaagguggaggaucucucu

SEQ ID NO: 1719739 - RNA, 19 nt, Homo sapiens
  misc_RNA (1)...(19): siRNA sense strand
gagccuggaugugaaugga

SEQ ID NO: 1719740 - RNA, 19 nt, Homo sapiens
  misc_RNA (1)...(19): siRNA sense strand
cagauugcggguccaagua

SEQ ID NO: 1719741 - RNA, 19 nt, Homo sapiens
  misc_RNA (1)...(19): siRNA sense strand
cggcgaccauccagcagaa

SEQ ID NO: 1719742 - RNA, 19 nt, Homo sapiens
  misc_RNA (1)...(19): siRNA sense strand
ccacacauucuccaacuac

SEQ ID NO: 1719743 - RNA, 19 nt, Homo sapiens
  misc_RNA (1)...(19): siRNA sense strand
ccucgugacccucuggaaa

SEQ ID NO: 1719744 - RNA, 19 nt, Homo sapiens
  misc_RNA (1)...(19): siRNA sense strand
ucuggagccuggaugugaa

SEQ ID NO: 1719745 - RNA, 19 nt, Homo sapiens
  misc_RNA (1)...(19): siRNA sense strand
gaagagggguucgaguucu

SEQ ID NO: 1719746 - RNA, 19 nt, Homo sapiens
  misc_RNA (1)...(19): siRNA sense strand
gcggcguggacacucauua

SEQ ID NO: 1719747 - RNA, 19 nt, Homo sapiens
  misc_RNA (1)...(19): siRNA sense strand
aguggaagguggaggaucu

SEQ ID NO: 1719748 - RNA, 19 nt, Homo sapiens
  misc_RNA (1)...(19): siRNA sense strand
ccagauugcggguccaagu

SEQ ID NO: 1719749 - RNA, 19 nt, Homo sapiens
  misc_RNA (1)...(19): siRNA sense strand
gcgaccauccagcagaaga

SEQ ID NO: 1719750 - RNA, 19 nt, Homo sapiens
  misc_RNA (1)...(19): siRNA sense strand
cagaagagcgaugccaagu

SEQ ID NO: 1719751 - RNA, 19 nt, Homo sapiens
  misc_RNA (1)...(19): siRNA sense strand
ucaacgagcugcccgagaa

SEQ ID NO: 1719752 - RNA, 19 nt, Homo sapiens
  misc_RNA (1)...(19): siRNA sense strand
gagagggcuucaucacuga

SEQ ID NO: 1719753 - RNA, 19 nt, Homo sapiens
  misc_RNA (1)...(19): siRNA sense strand
gagaccagaggaaggaauu

SEQ ID NO: 1719754 - RNA, 19 nt, Homo sapiens
  misc_RNA (1)...(19): siRNA sense strand
gaagguggaggaucucucu

SEQ ID NO: 1719755 - RNA, 19 nt, Homo sapiens
  misc_RNA (1)...(19): siRNA sense strand
gagccuggaugugaaugga

SEQ ID NO: 1719756 - RNA, 19 nt, Homo sapiens
  misc_RNA (1)...(19): siRNA sense strand
cagauugcggguccaagua

SEQ ID NO: 1719757 - RNA, 19 nt, Homo sapiens
  misc_RNA (1)...(19): siRNA sense strand
cggcgaccauccagcagaa

SEQ ID NO: 1719758 - RNA, 19 nt, Homo sapiens
  misc_RNA (1)...(19): siRNA sense strand
ccacacauucuccaacuac

SEQ ID NO: 1719759 - RNA, 19 nt, Homo sapiens
  misc_RNA (1)...(19): siRNA sense strand
ccucgugacccucuggaaa

SEQ ID NO: 1719760 - RNA, 19 nt, Homo sapiens
  misc_RNA (1)...(19): siRNA sense strand
ucuggagccuggaugugaa

SEQ ID NO: 1719761 - RNA, 19 nt, Homo sapiens
  misc_RNA (1)...(19): siRNA sense strand
gaagagggguucgaguucu

SEQ ID NO: 1719762 - RNA, 19 nt, Homo sapiens
  misc_RNA (1)...(19): siRNA sense strand
gcggcguggacacucauua

SEQ ID NO: 1719763 - RNA, 19 nt, Homo sapiens
  misc_RNA (1)...(19): siRNA sense strand
aguggaagguggaggaucu

SEQ ID NO: 1719764 - RNA, 19 nt, Homo sapiens
  misc_RNA (1)...(19): siRNA sense strand
ccagauugcggguccaagu

SEQ ID NO: 1719765 - RNA, 19 nt, Homo sapiens
  misc_RNA (1)...(19): siRNA sense strand
gcgaccauccagcagaaga

SEQ ID NO: 1719766 - RNA, 19 nt, Homo sapiens
  misc_RNA (1)...(19): siRNA sense strand
cagaagagcgaugccaagu

SEQ ID NO: 1719767 - RNA, 19 nt, Homo sapiens
  misc_RNA (1)...(19): siRNA sense strand
ucaacgagcugcccgagaa

SEQ ID NO: 1719768 - RNA, 19 nt, Homo sapiens
  misc_RNA (1)...(19): siRNA sense strand
gagagggcuucaucacuga

SEQ ID NO: 1719769 - RNA, 19 nt, Homo sapiens
  misc_RNA (1)...(19): siRNA sense strand
gagaccagaggaaggaauu

SEQ ID NO: 1719770 - RNA, 19 nt, Homo sapiens
  misc_RNA (1)...(19): siRNA sense strand
gaagguggaggaucucucu

SEQ ID NO: 1719771 - RNA, 19 nt, Homo sapiens
  misc_RNA (1)...(19): siRNA sense strand
gagccuggaugugaaugga

SEQ ID NO: 1719772 - RNA, 19 nt, Homo sapiens
  misc_RNA (1)...(19): siRNA sense strand
cagauugcggguccaagua

SEQ ID NO: 1719773 - RNA, 19 nt, Homo sapiens
  misc_RNA (1)...(19): siRNA sense strand
cggcgaccauccagcagaa

SEQ ID NO: 1719774 - RNA, 19 nt, Homo sapiens
  misc_RNA (1)...(19): siRNA sense strand
ccacacauucuccaacuac

SEQ ID NO: 1719775 - RNA, 19 nt, Homo sapiens
  misc_RNA (1)...(19): siRNA sense strand
ccucgugacccucuggaaa

SEQ ID NO: 1719776 - RNA, 19 nt, Homo sapiens
  misc_RNA (1)...(19): siRNA sense strand
ucuggagccuggaugugaa

SEQ ID NO: 1719777 - RNA, 19 nt, Homo sapiens
  misc_RNA (1)...(19): siRNA sense strand
gaagagggguucgaguucu

SEQ ID NO: 1719778 - RNA, 19 nt, Homo sapiens
  misc_RNA (1)...(19): siRNA sense strand
gcggcguggacacucauua

SEQ ID NO: 1719779 - RNA, 19 nt, Homo sapiens
  misc_RNA (1)...(19): siRNA sense strand
aguggaagguggaggaucu

SEQ ID NO: 1719780 - RNA, 19 nt, Homo sapiens
  misc_RNA (1)...(19): siRNA sense strand
ccagauugcggguccaagu

SEQ ID NO: 1719781 - RNA, 19 nt, Homo sapiens
  misc_RNA (1)...(19): siRNA sense strand
gcgaccauccagcagaaga

SEQ ID NO: 1719782 - RNA, 19 nt, Homo sapiens
  misc_RNA (1)...(19): siRNA sense strand
cagaagagcgaugccaagu

SEQ ID NO: 1719783 - RNA, 19 nt, Homo sapiens
  misc_RNA (1)...(19): siRNA sense strand
gggcauaucaccuuuaaua

SEQ ID NO: 1719784 - RNA, 19 nt, Homo sapiens
  misc_RNA (1)...(19): siRNA sense strand
cagaauaguuggagggaua

SEQ ID NO: 1719785 - RNA, 19 nt, Homo sapiens
  misc_RNA (1)...(19): siRNA sense strand
ggaguucuaugugauauuu

SEQ ID NO: 1719786 - RNA, 19 nt, Homo sapiens
  misc_RNA (1)...(19): siRNA sense strand
ucacaacccuggacuuauu

SEQ ID NO: 1719787 - RNA, 19 nt, Homo sapiens
  misc_RNA (1)...(19): siRNA sense strand
gaagggaagcugcauauga

SEQ ID NO: 1719788 - RNA, 19 nt, Homo sapiens
  misc_RNA (1)...(19): siRNA sense strand
ggaagaacccuauguuaug

SEQ ID NO: 1719789 - RNA, 19 nt, Homo sapiens
  misc_RNA (1)...(19): siRNA sense strand
gaagaacccuauguuaugu

SEQ ID NO: 1719790 - RNA, 19 nt, Homo sapiens
  misc_RNA (1)...(19): siRNA sense strand
aaagacaaguccagcaaua

SEQ ID NO: 1719791 - RNA, 19 nt, Homo sapiens
  misc_RNA (1)...(19): siRNA sense strand
ggaggcaucuucauuguuc

SEQ ID NO: 1719792 - RNA, 19 nt, Homo sapiens
  misc_RNA (1)...(19): siRNA sense strand
cuaaauaguuucugguuug

SEQ ID NO: 1719793 - RNA, 19 nt, Homo sapiens
  misc_RNA (1)...(19): siRNA sense strand
gcugggcacuccucuauuu

SEQ ID NO: 1719794 - RNA, 19 nt, Homo sapiens
  misc_RNA (1)...(19): siRNA sense strand
agagauggaucaacaauga

SEQ ID NO: 1719795 - RNA, 19 nt, Homo sapiens
  misc_RNA (1)...(19): siRNA sense strand
ugacagauuugaaggauau

SEQ ID NO: 1719796 - RNA, 19 nt, Homo sapiens
  misc_RNA (1)...(19): siRNA sense strand
ggacuuauuugcuuuggau

SEQ ID NO: 1719797 - RNA, 19 nt, Homo sapiens
  misc_RNA (1)...(19): siRNA sense strand
gcaaggaguucuaugugau

SEQ ID NO: 1719798 - RNA, 19 nt, Homo sapiens
  misc_RNA (1)...(19): siRNA sense strand
gaucaacaaugaccuucuu

SEQ ID NO: 1719799 - RNA, 19 nt, Homo sapiens
  misc_RNA (1)...(19): siRNA sense strand
ucaaagcucccuccagaua

SEQ ID NO: 1719800 - RNA, 19 nt, Homo sapiens
  misc_RNA (1)...(19): siRNA sense strand
acaaaucacggaagaauaa

SEQ ID NO: 1719801 - RNA, 19 nt, Homo sapiens
  misc_RNA (1)...(19): siRNA sense strand
aaagcucccuccagauaua

SEQ ID NO: 1719802 - RNA, 19 nt, Homo sapiens
  misc_RNA (1)...(19): siRNA sense strand
gagaagaugugggcuuuca

SEQ ID NO: 1719803 - RNA, 19 nt, Homo sapiens
  misc_RNA (1)...(19): siRNA sense strand
gaauuagcuuucaaguuug

SEQ ID NO: 1719804 - RNA, 19 nt, Homo sapiens
  misc_RNA (1)...(19): siRNA sense strand
gaagaagggaagcugcaua

SEQ ID NO: 1719805 - RNA, 19 nt, Homo sapiens
  misc_RNA (1)...(19): siRNA sense strand
gccuagaccuguugaaaga

SEQ ID NO: 1719806 - RNA, 19 nt, Homo sapiens
  misc_RNA (1)...(19): siRNA sense strand
ucaaggagaugaagaaagg

SEQ ID NO: 1719807 - RNA, 19 nt, Homo sapiens
  misc_RNA (1)...(19): siRNA sense strand
ucucgaaguuccacacaua

SEQ ID NO: 1719808 - RNA, 19 nt, Homo sapiens
  misc_RNA (1)...(19): siRNA sense strand
uaugacauccagagaauua

SEQ ID NO: 1719809 - RNA, 19 nt, Homo sapiens
  misc_RNA (1)...(19): siRNA sense strand
caaucuggcugccuucuug

SEQ ID NO: 1719810 - RNA, 19 nt, Homo sapiens
  misc_RNA (1)...(19): siRNA sense strand
ggcaaggaguucuauguga

SEQ ID NO: 1719811 - RNA, 19 nt, Homo sapiens
  misc_RNA (1)...(19): siRNA sense strand
gauauugccuagaccuguu

SEQ ID NO: 1719812 - RNA, 19 nt, Homo sapiens
  misc_RNA (1)...(19): siRNA sense strand
gguccuuucuguauuugua

SEQ ID NO: 1719813 - RNA, 19 nt, Homo sapiens
  misc_RNA (1)...(19): siRNA sense strand
uuaugaaccugaucaaaga

SEQ ID NO: 1719814 - RNA, 19 nt, Homo sapiens
  misc_RNA (1)...(19): siRNA sense strand
gguuagagauggaucaaca

SEQ ID NO: 1719815 - RNA, 19 nt, Homo sapiens
  misc_RNA (1)...(19): siRNA sense strand
ccagauauuuggauguaug

SEQ ID NO: 1719816 - RNA, 19 nt, Homo sapiens
  misc_RNA (1)...(19): siRNA sense strand
aaaccaagauagaauaugg

SEQ ID NO: 1719817 - RNA, 19 nt, Homo sapiens
  misc_RNA (1)...(19): siRNA sense strand
gaagaaaggcaaggaguuc

SEQ ID NO: 1719818 - RNA, 19 nt, Homo sapiens
  misc_RNA (1)...(19): siRNA sense strand
gaaagaauugucaaacauc

SEQ ID NO: 1719819 - RNA, 19 nt, Homo sapiens
  misc_RNA (1)...(19): siRNA sense strand
cagcugcccucugggaaua

SEQ ID NO: 1719820 - RNA, 19 nt, Homo sapiens
  misc_RNA (1)...(19): siRNA sense strand
ggagugggaacaccuauug

SEQ ID NO: 1719821 - RNA, 19 nt, Homo sapiens
  misc_RNA (1)...(19): siRNA sense strand
caacagaacacucauuguc

SEQ ID NO: 1719822 - RNA, 19 nt, Homo sapiens
  misc_RNA (1)...(19): siRNA sense strand
uacaagagcucaucaaagc

SEQ ID NO: 1719823 - RNA, 19 nt, Homo sapiens
  misc_RNA (1)...(19): siRNA sense strand
cauccuggguuucauuuau

SEQ ID NO: 1719824 - RNA, 19 nt, Homo sapiens
  misc_RNA (1)...(19): siRNA sense strand
ucaccagcauuaacagaaa

SEQ ID NO: 1719825 - RNA, 19 nt, Homo sapiens
  misc_RNA (1)...(19): siRNA sense strand
aaaugagccuguuaauguu

SEQ ID NO: 1719826 - RNA, 19 nt, Homo sapiens
  misc_RNA (1)...(19): siRNA sense strand
gaagaugugggcuuucaug

SEQ ID NO: 1719827 - RNA, 19 nt, Homo sapiens
  misc_RNA (1)...(19): siRNA sense strand
uggaucugguccucuauua

SEQ ID NO: 1719828 - RNA, 19 nt, Homo sapiens
  misc_RNA (1)...(19): siRNA sense strand
caaagcaaaccaagauaga

SEQ ID NO: 1719829 - RNA, 19 nt, Homo sapiens
  misc_RNA (1)...(19): siRNA sense strand
gcaaagcaaaccaagauag

SEQ ID NO: 1719830 - RNA, 19 nt, Homo sapiens
  misc_RNA (1)...(19): siRNA sense strand
caaggaguucuaugugaua

SEQ ID NO: 1719831 - RNA, 19 nt, Homo sapiens
  misc_RNA (1)...(19): siRNA sense strand
ugauaagccucuauaugga

SEQ ID NO: 1719832 - RNA, 19 nt, Homo sapiens
  misc_RNA (1)...(19): siRNA sense strand
gaagcugcauaugaugaaa

SEQ ID NO: 1719833 - RNA, 19 nt, Homo sapiens
  misc_RNA (1)...(19): siRNA sense strand
gcaaaccaagauagaauau

SEQ ID NO: 1719834 - RNA, 19 nt, Homo sapiens
  misc_RNA (1)...(19): siRNA sense strand
agucagcuguguacucuuu

SEQ ID NO: 1719835 - RNA, 19 nt, Homo sapiens
  misc_RNA (1)...(19): siRNA sense strand
agagagugcucaccacaga

SEQ ID NO: 1719836 - RNA, 19 nt, Homo sapiens
  misc_RNA (1)...(19): siRNA sense strand
caacaaugaccuucuucaa

SEQ ID NO: 1719837 - RNA, 19 nt, Homo sapiens
  misc_RNA (1)...(19): siRNA sense strand
ggagggauauggugguuuu

SEQ ID NO: 1719838 - RNA, 19 nt, Homo sapiens
  misc_RNA (1)...(19): siRNA sense strand
gauaagccucuauauggaa

SEQ ID NO: 1719839 - RNA, 19 nt, Homo sapiens
  misc_RNA (1)...(19): siRNA sense strand
cgaggaagacaacaaagaa

SEQ ID NO: 1719840 - RNA, 19 nt, Homo sapiens
  misc_RNA (1)...(19): siRNA sense strand
agaccgcccugguaagaaa

SEQ ID NO: 1719841 - RNA, 19 nt, Homo sapiens
  misc_RNA (1)...(19): siRNA sense strand
ccuaugacauccagagaau

SEQ ID NO: 1719842 - RNA, 19 nt, Homo sapiens
  misc_RNA (1)...(19): siRNA sense strand
ucacggaagaauaaugaua

SEQ ID NO: 1719843 - RNA, 19 nt, Homo sapiens
  misc_RNA (1)...(19): siRNA sense strand
aagggaagcugcauaugau

SEQ ID NO: 1719844 - RNA, 19 nt, Homo sapiens
  misc_RNA (1)...(19): siRNA sense strand
cagcagaccgcccugguaa

SEQ ID NO: 1719845 - RNA, 19 nt, Homo sapiens
  misc_RNA (1)...(19): siRNA sense strand
gaucugguccucuauuaca

SEQ ID NO: 1719846 - RNA, 19 nt, Homo sapiens
  misc_RNA (1)...(19): siRNA sense strand
gaaguuccacacauacaga

SEQ ID NO: 1719847 - RNA, 19 nt, Homo sapiens
  misc_RNA (1)...(19): siRNA sense strand
gcagaccgcccugguaaga

SEQ ID NO: 1719848 - RNA, 19 nt, Homo sapiens
  misc_RNA (1)...(19): siRNA sense strand
ugucauccaucauugagaa

SEQ ID NO: 1719849 - RNA, 19 nt, Homo sapiens
  misc_RNA (1)...(19): siRNA sense strand
guacaguggcguaaacaug

SEQ ID NO: 1719850 - RNA, 19 nt, Homo sapiens
  misc_RNA (1)...(19): siRNA sense strand
uugcaaugcucucgaaguu

SEQ ID NO: 1719851 - RNA, 19 nt, Homo sapiens
  misc_RNA (1)...(19): siRNA sense strand
ugaaggauauugccuagac

SEQ ID NO: 1719852 - RNA, 19 nt, Homo sapiens
  misc_RNA (1)...(19): siRNA sense strand
gaaaucugauaagccucua

SEQ ID NO: 1719853 - RNA, 19 nt, Homo sapiens
  misc_RNA (1)...(19): siRNA sense strand
ucagugcugugcagucuau

SEQ ID NO: 1719854 - RNA, 19 nt, Homo sapiens
  misc_RNA (1)...(19): siRNA sense strand
ggaagcugcauaugaugaa

SEQ ID NO: 1719855 - RNA, 19 nt, Homo sapiens
  misc_RNA (1)...(19): siRNA sense strand
uaacaccacauuaaccuau

SEQ ID NO: 1719856 - RNA, 19 nt, Homo sapiens
  misc_RNA (1)...(19): siRNA sense strand
aaaaugagccuguuaaugu

SEQ ID NO: 1719857 - RNA, 19 nt, Homo sapiens
  misc_RNA (1)...(19): siRNA sense strand
gaaaggcaaggaguucuau

SEQ ID NO: 1719858 - RNA, 19 nt, Homo sapiens
  misc_RNA (1)...(19): siRNA sense strand
gcagucaccagcauuaaca

SEQ ID NO: 1719859 - RNA, 19 nt, Homo sapiens
  misc_RNA (1)...(19): siRNA sense strand
ugguguggcugcucucuuu

SEQ ID NO: 1719860 - RNA, 19 nt, Homo sapiens
  misc_RNA (1)...(19): siRNA sense strand
uggaagaacccuauguuau

SEQ ID NO: 1719861 - RNA, 19 nt, Homo sapiens
  misc_RNA (1)...(19): siRNA sense strand
gcagugccauagacauaag

SEQ ID NO: 1719862 - RNA, 19 nt, Homo sapiens
  misc_RNA (1)...(19): siRNA sense strand
caacagugggcuuaacaug

SEQ ID NO: 1719863 - RNA, 19 nt, Homo sapiens
  misc_RNA (1)...(19): siRNA sense strand
caaagaggaaggaacugaa

SEQ ID NO: 1719864 - RNA, 19 nt, Homo sapiens
  misc_RNA (1)...(19): siRNA sense strand
gcaugaugaccgaguacua

SEQ ID NO: 1719865 - RNA, 19 nt, Homo sapiens
  misc_RNA (1)...(19): siRNA sense strand
gaagcccaaugguaccaau

SEQ ID NO: 1719866 - RNA, 19 nt, Homo sapiens
  misc_RNA (1)...(19): siRNA sense strand
ggcauaucaccuuuaauaa

SEQ ID NO: 1719867 - RNA, 19 nt, Homo sapiens
  misc_RNA (1)...(19): siRNA sense strand
ucacgugucauccaucauu

SEQ ID NO: 1719868 - RNA, 19 nt, Homo sapiens
  misc_RNA (1)...(19): siRNA sense strand
ccgcugaaauccuuaagca

SEQ ID NO: 1719869 - RNA, 19 nt, Homo sapiens
  misc_RNA (1)...(19): siRNA sense strand
gggaagcugcauaugauga

SEQ ID NO: 1719870 - RNA, 19 nt, Homo sapiens
  misc_RNA (1)...(19): siRNA sense strand
gaaacugcaaccucacuca

SEQ ID NO: 1719871 - RNA, 19 nt, Homo sapiens
  misc_RNA (1)...(19): siRNA sense strand
ucaccaccauucuggaaga

SEQ ID NO: 1719872 - RNA, 19 nt, Homo sapiens
  misc_RNA (1)...(19): siRNA sense strand
ggacagcaacaaagacaag

SEQ ID NO: 1719873 - RNA, 19 nt, Homo sapiens
  misc_RNA (1)...(19): siRNA sense strand
cagcacaggucuaauucgu

SEQ ID NO: 1719874 - RNA, 19 nt, Homo sapiens
  misc_RNA (1)...(19): siRNA sense strand
ggauguaugugcucuuagc

SEQ ID NO: 1719875 - RNA, 19 nt, Homo sapiens
  misc_RNA (1)...(19): siRNA sense strand
gguuaaagaacucauagau

SEQ ID NO: 1719876 - RNA, 19 nt, Homo sapiens
  misc_RNA (1)...(19): siRNA sense strand
gaugguuaaagaacucaua

SEQ ID NO: 1719877 - RNA, 19 nt, Homo sapiens
  misc_RNA (1)...(19): siRNA sense strand
gaagaauuagcuuucaagu

SEQ ID NO: 1719878 - RNA, 19 nt, Homo sapiens
  misc_RNA (1)...(19): siRNA sense strand
gccaacagaacacucauug

SEQ ID NO: 1719879 - RNA, 19 nt, Homo sapiens
  misc_RNA (1)...(19): siRNA sense strand
ugacggacagcaacaaaga

SEQ ID NO: 1719880 - RNA, 19 nt, Homo sapiens
  misc_RNA (1)...(19): siRNA sense strand
gacaaguccagcaauauca

SEQ ID NO: 1719881 - RNA, 19 nt, Homo sapiens
  misc_RNA (1)...(19): siRNA sense strand
gaugaucuggcaaagcaaa

SEQ ID NO: 1719882 - RNA, 19 nt, Homo sapiens
  misc_RNA (1)...(19): siRNA sense strand
cugauaagccucuauaugg

SEQ ID NO: 1719883 - RNA, 19 nt, Homo sapiens
  misc_RNA (1)...(19): siRNA sense strand
gggcauaucaccuuuaaua

SEQ ID NO: 1719884 - RNA, 19 nt, Homo sapiens
  misc_RNA (1)...(19): siRNA sense strand
cagaauaguuggagggaua

SEQ ID NO: 1719885 - RNA, 19 nt, Homo sapiens
  misc_RNA (1)...(19): siRNA sense strand
ggaguucuaugugauauuu

SEQ ID NO: 1719886 - RNA, 19 nt, Homo sapiens
  misc_RNA (1)...(19): siRNA sense strand
ucacaacccuggacuuauu

SEQ ID NO: 1719887 - RNA, 19 nt, Homo sapiens
  misc_RNA (1)...(19): siRNA sense strand
gaagggaagcugcauauga

SEQ ID NO: 1719888 - RNA, 19 nt, Homo sapiens
  misc_RNA (1)...(19): siRNA sense strand
ggaagaacccuauguuaug

SEQ ID NO: 1719889 - RNA, 19 nt, Homo sapiens
  misc_RNA (1)...(19): siRNA sense strand
gaagaacccuauguuaugu

SEQ ID NO: 1719890 - RNA, 19 nt, Homo sapiens
  misc_RNA (1)...(19): siRNA sense strand
aaagacaaguccagcaaua

SEQ ID NO: 1719891 - RNA, 19 nt, Homo sapiens
  misc_RNA (1)...(19): siRNA sense strand
ggaggcaucuucauuguuc

SEQ ID NO: 1719892 - RNA, 19 nt, Homo sapiens
  misc_RNA (1)...(19): siRNA sense strand
cuaaauaguuucugguuug

SEQ ID NO: 1719893 - RNA, 19 nt, Homo sapiens
  misc_RNA (1)...(19): siRNA sense strand
gcugggcacuccucuauuu

SEQ ID NO: 1719894 - RNA, 19 nt, Homo sapiens
  misc_RNA (1)...(19): siRNA sense strand
agagauggaucaacaauga

SEQ ID NO: 1719895 - RNA, 19 nt, Homo sapiens
  misc_RNA (1)...(19): siRNA sense strand
ugacagauuugaaggauau

SEQ ID NO: 1719896 - RNA, 19 nt, Homo sapiens
  misc_RNA (1)...(19): siRNA sense strand
ggacuuauuugcuuuggau

SEQ ID NO: 1719897 - RNA, 19 nt, Homo sapiens
  misc_RNA (1)...(19): siRNA sense strand
gcaaggaguucuaugugau

SEQ ID NO: 1719898 - RNA, 19 nt, Homo sapiens
  misc_RNA (1)...(19): siRNA sense strand
gaucaacaaugaccuucuu

SEQ ID NO: 1719899 - RNA, 19 nt, Homo sapiens
  misc_RNA (1)...(19): siRNA sense strand
ucaaagcucccuccagaua

SEQ ID NO: 1719900 - RNA, 19 nt, Homo sapiens
  misc_RNA (1)...(19): siRNA sense strand
acaaaucacggaagaauaa

SEQ ID NO: 1719901 - RNA, 19 nt, Homo sapiens
  misc_RNA (1)...(19): siRNA sense strand
aaagcucccuccagauaua

SEQ ID NO: 1719902 - RNA, 19 nt, Homo sapiens
  misc_RNA (1)...(19): siRNA sense strand
gagaagaugugggcuuuca

SEQ ID NO: 1719903 - RNA, 19 nt, Homo sapiens
  misc_RNA (1)...(19): siRNA sense strand
gaauuagcuuucaaguuug

SEQ ID NO: 1719904 - RNA, 19 nt, Homo sapiens
  misc_RNA (1)...(19): siRNA sense strand
gaagaagggaagcugcaua

SEQ ID NO: 1719905 - RNA, 19 nt, Homo sapiens
  misc_RNA (1)...(19): siRNA sense strand
gccuagaccuguugaaaga

SEQ ID NO: 1719906 - RNA, 19 nt, Homo sapiens
  misc_RNA (1)...(19): siRNA sense strand
ucaaggagaugaagaaagg

SEQ ID NO: 1719907 - RNA, 19 nt, Homo sapiens
  misc_RNA (1)...(19): siRNA sense strand
ucucgaaguuccacacaua

SEQ ID NO: 1719908 - RNA, 19 nt, Homo sapiens
  misc_RNA (1)...(19): siRNA sense strand
uaugacauccagagaauua

SEQ ID NO: 1719909 - RNA, 19 nt, Homo sapiens
  misc_RNA (1)...(19): siRNA sense strand
caaucuggcugccuucuug

SEQ ID NO: 1719910 - RNA, 19 nt, Homo sapiens
  misc_RNA (1)...(19): siRNA sense strand
ggcaaggaguucuauguga

SEQ ID NO: 1719911 - RNA, 19 nt, Homo sapiens
  misc_RNA (1)...(19): siRNA sense strand
gauauugccuagaccuguu

SEQ ID NO: 1719912 - RNA, 19 nt, Homo sapiens
  misc_RNA (1)...(19): siRNA sense strand
gguccuuucuguauuugua

SEQ ID NO: 1719913 - RNA, 19 nt, Homo sapiens
  misc_RNA (1)...(19): siRNA sense strand
uuaugaaccugaucaaaga

SEQ ID NO: 1719914 - RNA, 19 nt, Homo sapiens
  misc_RNA (1)...(19): siRNA sense strand
gguuagagauggaucaaca

SEQ ID NO: 1719915 - RNA, 19 nt, Homo sapiens
  misc_RNA (1)...(19): siRNA sense strand
ccagauauuuggauguaug

SEQ ID NO: 1719916 - RNA, 19 nt, Homo sapiens
  misc_RNA (1)...(19): siRNA sense strand
aaaccaagauagaauaugg

SEQ ID NO: 1719917 - RNA, 19 nt, Homo sapiens
  misc_RNA (1)...(19): siRNA sense strand
gaagaaaggcaaggaguuc

SEQ ID NO: 1719918 - RNA, 19 nt, Homo sapiens
  misc_RNA (1)...(19): siRNA sense strand
gaaagaauugucaaacauc

SEQ ID NO: 1719919 - RNA, 19 nt, Homo sapiens
  misc_RNA (1)...(19): siRNA sense strand
cagcugcccucugggaaua

SEQ ID NO: 1719920 - RNA, 19 nt, Homo sapiens
  misc_RNA (1)...(19): siRNA sense strand
ggagugggaacaccuauug

SEQ ID NO: 1719921 - RNA, 19 nt, Homo sapiens
  misc_RNA (1)...(19): siRNA sense strand
caacagaacacucauuguc

SEQ ID NO: 1719922 - RNA, 19 nt, Homo sapiens
  misc_RNA (1)...(19): siRNA sense strand
uacaagagcucaucaaagc

SEQ ID NO: 1719923 - RNA, 19 nt, Homo sapiens
  misc_RNA (1)...(19): siRNA sense strand
cauccuggguuucauuuau

SEQ ID NO: 1719924 - RNA, 19 nt, Homo sapiens
  misc_RNA (1)...(19): siRNA sense strand
ucaccagcauuaacagaaa

SEQ ID NO: 1719925 - RNA, 19 nt, Homo sapiens
  misc_RNA (1)...(19): siRNA sense strand
aaaugagccuguuaauguu

SEQ ID NO: 1719926 - RNA, 19 nt, Homo sapiens
  misc_RNA (1)...(19): siRNA sense strand
gaagaugugggcuuucaug

SEQ ID NO: 1719927 - RNA, 19 nt, Homo sapiens
  misc_RNA (1)...(19): siRNA sense strand
uggaucugguccucuauua

SEQ ID NO: 1719928 - RNA, 19 nt, Homo sapiens
  misc_RNA (1)...(19): siRNA sense strand
caaagcaaaccaagauaga

SEQ ID NO: 1719929 - RNA, 19 nt, Homo sapiens
  misc_RNA (1)...(19): siRNA sense strand
gcaaagcaaaccaagauag

SEQ ID NO: 1719930 - RNA, 19 nt, Homo sapiens
  misc_RNA (1)...(19): siRNA sense strand
caaggaguucuaugugaua

SEQ ID NO: 1719931 - RNA, 19 nt, Homo sapiens
  misc_RNA (1)...(19): siRNA sense strand
ugauaagccucuauaugga

SEQ ID NO: 1719932 - RNA, 19 nt, Homo sapiens
  misc_RNA (1)...(19): siRNA sense strand
gaagcugcauaugaugaaa

SEQ ID NO: 1719933 - RNA, 19 nt, Homo sapiens
  misc_RNA (1)...(19): siRNA sense strand
gcaaaccaagauagaauau

SEQ ID NO: 1719934 - RNA, 19 nt, Homo sapiens
  misc_RNA (1)...(19): siRNA sense strand
agucagcuguguacucuuu

SEQ ID NO: 1719935 - RNA, 19 nt, Homo sapiens
  misc_RNA (1)...(19): siRNA sense strand
agagagugcucaccacaga

SEQ ID NO: 1719936 - RNA, 19 nt, Homo sapiens
  misc_RNA (1)...(19): siRNA sense strand
caacaaugaccuucuucaa

SEQ ID NO: 1719937 - RNA, 19 nt, Homo sapiens
  misc_RNA (1)...(19): siRNA sense strand
ggagggauauggugguuuu

SEQ ID NO: 1719938 - RNA, 19 nt, Homo sapiens
  misc_RNA (1)...(19): siRNA sense strand
gauaagccucuauauggaa

SEQ ID NO: 1719939 - RNA, 19 nt, Homo sapiens
  misc_RNA (1)...(19): siRNA sense strand
cgaggaagacaacaaagaa

SEQ ID NO: 1719940 - RNA, 19 nt, Homo sapiens
  misc_RNA (1)...(19): siRNA sense strand
agaccgcccugguaagaaa

SEQ ID NO: 1719941 - RNA, 19 nt, Homo sapiens
  misc_RNA (1)...(19): siRNA sense strand
ccuaugacauccagagaau

SEQ ID NO: 1719942 - RNA, 19 nt, Homo sapiens
  misc_RNA (1)...(19): siRNA sense strand
ucacggaagaauaaugaua

SEQ ID NO: 1719943 - RNA, 19 nt, Homo sapiens
  misc_RNA (1)...(19): siRNA sense strand
aagggaagcugcauaugau

SEQ ID NO: 1719944 - RNA, 19 nt, Homo sapiens
  misc_RNA (1)...(19): siRNA sense strand
cagcagaccgcccugguaa

SEQ ID NO: 1719945 - RNA, 19 nt, Homo sapiens
  misc_RNA (1)...(19): siRNA sense strand
gaucugguccucuauuaca

SEQ ID NO: 1719946 - RNA, 19 nt, Homo sapiens
  misc_RNA (1)...(19): siRNA sense strand
gaaguuccacacauacaga

SEQ ID NO: 1719947 - RNA, 19 nt, Homo sapiens
  misc_RNA (1)...(19): siRNA sense strand
gcagaccgcccugguaaga

SEQ ID NO: 1719948 - RNA, 19 nt, Homo sapiens
  misc_RNA (1)...(19): siRNA sense strand
ugucauccaucauugagaa

SEQ ID NO: 1719949 - RNA, 19 nt, Homo sapiens
  misc_RNA (1)...(19): siRNA sense strand
guacaguggcguaaacaug

SEQ ID NO: 1719950 - RNA, 19 nt, Homo sapiens
  misc_RNA (1)...(19): siRNA sense strand
uugcaaugcucucgaaguu

SEQ ID NO: 1719951 - RNA, 19 nt, Homo sapiens
  misc_RNA (1)...(19): siRNA sense strand
ugaaggauauugccuagac

SEQ ID NO: 1719952 - RNA, 19 nt, Homo sapiens
  misc_RNA (1)...(19): siRNA sense strand
gaaaucugauaagccucua

SEQ ID NO: 1719953 - RNA, 19 nt, Homo sapiens
  misc_RNA (1)...(19): siRNA sense strand
ucagugcugugcagucuau

SEQ ID NO: 1719954 - RNA, 19 nt, Homo sapiens
  misc_RNA (1)...(19): siRNA sense strand
ggaagcugcauaugaugaa

SEQ ID NO: 1719955 - RNA, 19 nt, Homo sapiens
  misc_RNA (1)...(19): siRNA sense strand
uaacaccacauuaaccuau

SEQ ID NO: 1719956 - RNA, 19 nt, Homo sapiens
  misc_RNA (1)...(19): siRNA sense strand
aaaaugagccuguuaaugu

SEQ ID NO: 1719957 - RNA, 19 nt, Homo sapiens
  misc_RNA (1)...(19): siRNA sense strand
gaaaggcaaggaguucuau

SEQ ID NO: 1719958 - RNA, 19 nt, Homo sapiens
  misc_RNA (1)...(19): siRNA sense strand
gcagucaccagcauuaaca

SEQ ID NO: 1719959 - RNA, 19 nt, Homo sapiens
  misc_RNA (1)...(19): siRNA sense strand
ugguguggcugcucucuuu

SEQ ID NO: 1719960 - RNA, 19 nt, Homo sapiens
  misc_RNA (1)...(19): siRNA sense strand
uggaagaacccuauguuau

SEQ ID NO: 1719961 - RNA, 19 nt, Homo sapiens
  misc_RNA (1)...(19): siRNA sense strand
gcagugccauagacauaag

SEQ ID NO: 1719962 - RNA, 19 nt, Homo sapiens
  misc_RNA (1)...(19): siRNA sense strand
caacagugggcuuaacaug

SEQ ID NO: 1719963 - RNA, 19 nt, Homo sapiens
  misc_RNA (1)...(19): siRNA sense strand
caaagaggaaggaacugaa

SEQ ID NO: 1719964 - RNA, 19 nt, Homo sapiens
  misc_RNA (1)...(19): siRNA sense strand
gcaugaugaccgaguacua

SEQ ID NO: 1719965 - RNA, 19 nt, Homo sapiens
  misc_RNA (1)...(19): siRNA sense strand
gaagcccaaugguaccaau

SEQ ID NO: 1719966 - RNA, 19 nt, Homo sapiens
  misc_RNA (1)...(19): siRNA sense strand
ggcauaucaccuuuaauaa

SEQ ID NO: 1719967 - RNA, 19 nt, Homo sapiens
  misc_RNA (1)...(19): siRNA sense strand
ucacgugucauccaucauu

SEQ ID NO: 1719968 - RNA, 19 nt, Homo sapiens
  misc_RNA (1)...(19): siRNA sense strand
ccgcugaaauccuuaagca

SEQ ID NO: 1719969 - RNA, 19 nt, Homo sapiens
  misc_RNA (1)...(19): siRNA sense strand
gggaagcugcauaugauga

SEQ ID NO: 1719970 - RNA, 19 nt, Homo sapiens
  misc_RNA (1)...(19): siRNA sense strand
gaaacugcaaccucacuca

SEQ ID NO: 1719971 - RNA, 19 nt, Homo sapiens
  misc_RNA (1)...(19): siRNA sense strand
ucaccaccauucuggaaga

SEQ ID NO: 1719972 - RNA, 19 nt, Homo sapiens
  misc_RNA (1)...(19): siRNA sense strand
ggacagcaacaaagacaag

SEQ ID NO: 1719973 - RNA, 19 nt, Homo sapiens
  misc_RNA (1)...(19): siRNA sense strand
cagcacaggucuaauucgu

SEQ ID NO: 1719974 - RNA, 19 nt, Homo sapiens
  misc_RNA (1)...(19): siRNA sense strand
ggauguaugugcucuuagc

SEQ ID NO: 1719975 - RNA, 19 nt, Homo sapiens
  misc_RNA (1)...(19): siRNA sense strand
gguuaaagaacucauagau

SEQ ID NO: 1719976 - RNA, 19 nt, Homo sapiens
  misc_RNA (1)...(19): siRNA sense strand
gaugguuaaagaacucaua

SEQ ID NO: 1719977 - RNA, 19 nt, Homo sapiens
  misc_RNA (1)...(19): siRNA sense strand
gaagaauuagcuuucaagu

SEQ ID NO: 1719978 - RNA, 19 nt, Homo sapiens
  misc_RNA (1)...(19): siRNA sense strand
gccaacagaacacucauug

SEQ ID NO: 1719979 - RNA, 19 nt, Homo sapiens
  misc_RNA (1)...(19): siRNA sense strand
ugacggacagcaacaaaga

SEQ ID NO: 1719980 - RNA, 19 nt, Homo sapiens
  misc_RNA (1)...(19): siRNA sense strand
gacaaguccagcaauauca

SEQ ID NO: 1719981 - RNA, 19 nt, Homo sapiens
  misc_RNA (1)...(19): siRNA sense strand
gaugaucuggcaaagcaaa

SEQ ID NO: 1719982 - RNA, 19 nt, Homo sapiens
  misc_RNA (1)...(19): siRNA sense strand
cugauaagccucuauaugg

SEQ ID NO: 1719983 - RNA, 19 nt, Homo sapiens
  misc_RNA (1)...(19): siRNA sense strand
ggaaacaucauauggaauu

SEQ ID NO: 1719984 - RNA, 19 nt, Homo sapiens
  misc_RNA (1)...(19): siRNA sense strand
gaaaucagacaucaacaaa

SEQ ID NO: 1719985 - RNA, 19 nt, Homo sapiens
  misc_RNA (1)...(19): siRNA sense strand
gauaaugagucggaaguaa

SEQ ID NO: 1719986 - RNA, 19 nt, Homo sapiens
  misc_RNA (1)...(19): siRNA sense strand
ugaaggcccuggauaauga

SEQ ID NO: 1719987 - RNA, 19 nt, Homo sapiens
  misc_RNA (1)...(19): siRNA sense strand
cagcagcagugaacaaauu

SEQ ID NO: 1719988 - RNA, 19 nt, Homo sapiens
  misc_RNA (1)...(19): siRNA sense strand
cagcacaucugucauugaa

SEQ ID NO: 1719989 - RNA, 19 nt, Homo sapiens
  misc_RNA (1)...(19): siRNA sense strand
gacggucccugaggaauua

SEQ ID NO: 1719990 - RNA, 19 nt, Homo sapiens
  misc_RNA (1)...(19): siRNA sense strand
gaauagaggacgaauacaa

SEQ ID NO: 1719991 - RNA, 19 nt, Homo sapiens
  misc_RNA (1)...(19): siRNA sense strand
uaaaguaggugucuucaac

SEQ ID NO: 1719992 - RNA, 19 nt, Homo sapiens
  misc_RNA (1)...(19): siRNA sense strand
gcacaucugucauugaaac

SEQ ID NO: 1719993 - RNA, 19 nt, Homo sapiens
  misc_RNA (1)...(19): siRNA sense strand
gaauugggaucaagugaag

SEQ ID NO: 1719994 - RNA, 19 nt, Homo sapiens
  misc_RNA (1)...(19): siRNA sense strand
gaagaauagaggacgaaua

SEQ ID NO: 1719995 - RNA, 19 nt, Homo sapiens
  misc_RNA (1)...(19): siRNA sense strand
gaggacgaauacaagguua

SEQ ID NO: 1719996 - RNA, 19 nt, Homo sapiens
  misc_RNA (1)...(19): siRNA sense strand
aaacaucgguggagcuuuc

SEQ ID NO: 1719997 - RNA, 19 nt, Homo sapiens
  misc_RNA (1)...(19): siRNA sense strand
cuagauacguguucaggaa

SEQ ID NO: 1719998 - RNA, 19 nt, Homo sapiens
  misc_RNA (1)...(19): siRNA sense strand
ccacagauauugaaguuuu

SEQ ID NO: 1719999 - RNA, 19 nt, Homo sapiens
  misc_RNA (1)...(19): siRNA sense strand
guaggugucuucaacaaca

SEQ ID NO: 1720000 - RNA, 19 nt, Homo sapiens
  misc_RNA (1)...(19): siRNA sense strand
ggaaaucagacaucaacaa

SEQ ID NO: 1720001 - RNA, 19 nt, Homo sapiens
  misc_RNA (1)...(19): siRNA sense strand
ggucgaggcuuugguuaug

SEQ ID NO: 1720002 - RNA, 19 nt, Homo sapiens
  misc_RNA (1)...(19): siRNA sense strand
caaagcagcacaucuguca

SEQ ID NO: 1720003 - RNA, 19 nt, Homo sapiens
  misc_RNA (1)...(19): siRNA sense strand
ccggaaacaucauauggaa

SEQ ID NO: 1720004 - RNA, 19 nt, Homo sapiens
  misc_RNA (1)...(19): siRNA sense strand
gccaguaucuuugccagaa

SEQ ID NO: 1720005 - RNA, 19 nt, Homo sapiens
  misc_RNA (1)...(19): siRNA sense strand
gaauucaucagacuccaaa

SEQ ID NO: 1720006 - RNA, 19 nt, Homo sapiens
  misc_RNA (1)...(19): siRNA sense strand
aauacaagguuaugagguu

SEQ ID NO: 1720007 - RNA, 19 nt, Homo sapiens
  misc_RNA (1)...(19): siRNA sense strand
caucugucauugaaacaaa

SEQ ID NO: 1720008 - RNA, 19 nt, Homo sapiens
  misc_RNA (1)...(19): siRNA sense strand
acagcuagguccaguuuau

SEQ ID NO: 1720009 - RNA, 19 nt, Homo sapiens
  misc_RNA (1)...(19): siRNA sense strand
gaaacaucauauggaauuc

SEQ ID NO: 1720010 - RNA, 19 nt, Homo sapiens
  misc_RNA (1)...(19): siRNA sense strand
acagaauggucgaggcuuu

SEQ ID NO: 1720011 - RNA, 19 nt, Homo sapiens
  misc_RNA (1)...(19): siRNA sense strand
caagugaaggcccuggaua

SEQ ID NO: 1720012 - RNA, 19 nt, Homo sapiens
  misc_RNA (1)...(19): siRNA sense strand
gaaagccaccaccaaguca

SEQ ID NO: 1720013 - RNA, 19 nt, Homo sapiens
  misc_RNA (1)...(19): siRNA sense strand
gaagaagaacccaccaaac

SEQ ID NO: 1720014 - RNA, 19 nt, Homo sapiens
  misc_RNA (1)...(19): siRNA sense strand
ucacagcuagguccaguuu

SEQ ID NO: 1720015 - RNA, 19 nt, Homo sapiens
  misc_RNA (1)...(19): siRNA sense strand
ggagacaugaagacaaaga

SEQ ID NO: 1720016 - RNA, 19 nt, Homo sapiens
  misc_RNA (1)...(19): siRNA sense strand
uuggagacaugaagacaaa

SEQ ID NO: 1720017 - RNA, 19 nt, Homo sapiens
  misc_RNA (1)...(19): siRNA sense strand
auacaagguuaugagguua

SEQ ID NO: 1720018 - RNA, 19 nt, Homo sapiens
  misc_RNA (1)...(19): siRNA sense strand
gccuuucgaugaagauuau

SEQ ID NO: 1720019 - RNA, 19 nt, Homo sapiens
  misc_RNA (1)...(19): siRNA sense strand
gcagugaacaaauucgaau

SEQ ID NO: 1720020 - RNA, 19 nt, Homo sapiens
  misc_RNA (1)...(19): siRNA sense strand
gauacguguucaggaauga

SEQ ID NO: 1720021 - RNA, 19 nt, Homo sapiens
  misc_RNA (1)...(19): siRNA sense strand
ucaucagacuccaaaauua

SEQ ID NO: 1720022 - RNA, 19 nt, Homo sapiens
  misc_RNA (1)...(19): siRNA sense strand
ccugaggaauuacagaaug

SEQ ID NO: 1720023 - RNA, 19 nt, Homo sapiens
  misc_RNA (1)...(19): siRNA sense strand
ugccacagauauugaaguu

SEQ ID NO: 1720024 - RNA, 19 nt, Homo sapiens
  misc_RNA (1)...(19): siRNA sense strand
ucagccaucaguacaauaa

SEQ ID NO: 1720025 - RNA, 19 nt, Homo sapiens
  misc_RNA (1)...(19): siRNA sense strand
gacaugaagacaaagaaga

SEQ ID NO: 1720026 - RNA, 19 nt, Homo sapiens
  misc_RNA (1)...(19): siRNA sense strand
ggacgaauacaagguuaug

SEQ ID NO: 1720027 - RNA, 19 nt, Homo sapiens
  misc_RNA (1)...(19): siRNA sense strand
ggaaguaaaaggauacaaa

SEQ ID NO: 1720028 - RNA, 19 nt, Homo sapiens
  misc_RNA (1)...(19): siRNA sense strand
agacaaagcagcacaucug

SEQ ID NO: 1720029 - RNA, 19 nt, Homo sapiens
  misc_RNA (1)...(19): siRNA sense strand
agaagaagaacccaccaaa

SEQ ID NO: 1720030 - RNA, 19 nt, Homo sapiens
  misc_RNA (1)...(19): siRNA sense strand
guacagauggaacagacaa

SEQ ID NO: 1720031 - RNA, 19 nt, Homo sapiens
  misc_RNA (1)...(19): siRNA sense strand
guuaaauauuggagacaug

SEQ ID NO: 1720032 - RNA, 19 nt, Homo sapiens
  misc_RNA (1)...(19): siRNA sense strand
ggauaaugagucggaagua

SEQ ID NO: 1720033 - RNA, 19 nt, Homo sapiens
  misc_RNA (1)...(19): siRNA sense strand
ccaaaccaccagccaguau

SEQ ID NO: 1720034 - RNA, 19 nt, Homo sapiens
  misc_RNA (1)...(19): siRNA sense strand
gaaugcauguacgcuguca

SEQ ID NO: 1720035 - RNA, 19 nt, Homo sapiens
  misc_RNA (1)...(19): siRNA sense strand
gcugucaaggcauauaauu

SEQ ID NO: 1720036 - RNA, 19 nt, Homo sapiens
  misc_RNA (1)...(19): siRNA sense strand
aagaauagaggacgaauac

SEQ ID NO: 1720037 - RNA, 19 nt, Homo sapiens
  misc_RNA (1)...(19): siRNA sense strand
gccaucaguacaauaauga

SEQ ID NO: 1720038 - RNA, 19 nt, Homo sapiens
  misc_RNA (1)...(19): siRNA sense strand
caucauauggaauucauca

SEQ ID NO: 1720039 - RNA, 19 nt, Homo sapiens
  misc_RNA (1)...(19): siRNA sense strand
guaaaaggauacaaagucu

SEQ ID NO: 1720040 - RNA, 19 nt, Homo sapiens
  misc_RNA (1)...(19): siRNA sense strand
gagacaugaagacaaagaa

SEQ ID NO: 1720041 - RNA, 19 nt, Homo sapiens
  misc_RNA (1)...(19): siRNA sense strand
aauaaugauuucccucaca

SEQ ID NO: 1720042 - RNA, 19 nt, Homo sapiens
  misc_RNA (1)...(19): siRNA sense strand
aagcagcacaucugucauu

SEQ ID NO: 1720043 - RNA, 19 nt, Homo sapiens
  misc_RNA (1)...(19): siRNA sense strand
gagaagaauagaggacgaa

SEQ ID NO: 1720044 - RNA, 19 nt, Homo sapiens
  misc_RNA (1)...(19): siRNA sense strand
gcagcacaucugucauuga

SEQ ID NO: 1720045 - RNA, 19 nt, Homo sapiens
  misc_RNA (1)...(19): siRNA sense strand
auaaugagucggaaguaaa

SEQ ID NO: 1720046 - RNA, 19 nt, Homo sapiens
  misc_RNA (1)...(19): siRNA sense strand
cgaaagccaccaccaaguc

SEQ ID NO: 1720047 - RNA, 19 nt, Homo sapiens
  misc_RNA (1)...(19): siRNA sense strand
acaagguuaugagguuaaa

SEQ ID NO: 1720048 - RNA, 19 nt, Homo sapiens
  misc_RNA (1)...(19): siRNA sense strand
gguuaaauauuggagacau

SEQ ID NO: 1720049 - RNA, 19 nt, Homo sapiens
  misc_RNA (1)...(19): siRNA sense strand
ggagcuuucuuugccuuuc

SEQ ID NO: 1720050 - RNA, 19 nt, Homo sapiens
  misc_RNA (1)...(19): siRNA sense strand
gugaaggcccuggauaaug

SEQ ID NO: 1720051 - RNA, 19 nt, Homo sapiens
  misc_RNA (1)...(19): siRNA sense strand
acaugaagacaaagaagaa

SEQ ID NO: 1720052 - RNA, 19 nt, Homo sapiens
  misc_RNA (1)...(19): siRNA sense strand
ucauauggaauucaucaga

SEQ ID NO: 1720053 - RNA, 19 nt, Homo sapiens
  misc_RNA (1)...(19): siRNA sense strand
ugaauugggaucaagugaa

SEQ ID NO: 1720054 - RNA, 19 nt, Homo sapiens
  misc_RNA (1)...(19): siRNA sense strand
ggaauucaucagacuccaa

SEQ ID NO: 1720055 - RNA, 19 nt, Homo sapiens
  misc_RNA (1)...(19): siRNA sense strand
acuuagcugucaaggcaua

SEQ ID NO: 1720056 - RNA, 19 nt, Homo sapiens
  misc_RNA (1)...(19): siRNA sense strand
gacaaagcagcacaucugu

SEQ ID NO: 1720057 - RNA, 19 nt, Homo sapiens
  misc_RNA (1)...(19): siRNA sense strand
aaguaggugucuucaacaa

SEQ ID NO: 1720058 - RNA, 19 nt, Homo sapiens
  misc_RNA (1)...(19): siRNA sense strand
aagugaaggcccuggauaa

SEQ ID NO: 1720059 - RNA, 19 nt, Homo sapiens
  misc_RNA (1)...(19): siRNA sense strand
gguuaaaguaggugucuuc

SEQ ID NO: 1720060 - RNA, 19 nt, Homo sapiens
  misc_RNA (1)...(19): siRNA sense strand
caucgguggagcuuucuuu

SEQ ID NO: 1720061 - RNA, 19 nt, Homo sapiens
  misc_RNA (1)...(19): siRNA sense strand
ugucaaggcauauaauucu

SEQ ID NO: 1720062 - RNA, 19 nt, Homo sapiens
  misc_RNA (1)...(19): siRNA sense strand
ccacuucgaaugcauguac

SEQ ID NO: 1720063 - RNA, 19 nt, Homo sapiens
  misc_RNA (1)...(19): siRNA sense strand
agauacguguucaggaaug

SEQ ID NO: 1720064 - RNA, 19 nt, Homo sapiens
  misc_RNA (1)...(19): siRNA sense strand
uuccaaagauaucaaaugc

SEQ ID NO: 1720065 - RNA, 19 nt, Homo sapiens
  misc_RNA (1)...(19): siRNA sense strand
agacggucccugaggaauu

SEQ ID NO: 1720066 - RNA, 19 nt, Homo sapiens
  misc_RNA (1)...(19): siRNA sense strand
ccaccagccaguaucuuug

SEQ ID NO: 1720067 - RNA, 19 nt, Homo sapiens
  misc_RNA (1)...(19): siRNA sense strand
uacgaacaguuggaaauca

SEQ ID NO: 1720068 - RNA, 19 nt, Homo sapiens
  misc_RNA (1)...(19): siRNA sense strand
uagcugucaaggcauauaa

SEQ ID NO: 1720069 - RNA, 19 nt, Homo sapiens
  misc_RNA (1)...(19): siRNA sense strand
agccaucaguacaauaaug

SEQ ID NO: 1720070 - RNA, 19 nt, Homo sapiens
  misc_RNA (1)...(19): siRNA sense strand
ggcagcagcagugaacaaa

SEQ ID NO: 1720071 - RNA, 19 nt, Homo sapiens
  misc_RNA (1)...(19): siRNA sense strand
ugucagccaucaguacaau

SEQ ID NO: 1720072 - RNA, 19 nt, Homo sapiens
  misc_RNA (1)...(19): siRNA sense strand
gaaguaaaaggauacaaag

SEQ ID NO: 1720073 - RNA, 19 nt, Homo sapiens
  misc_RNA (1)...(19): siRNA sense strand
uuucuuugccuuucgauga

SEQ ID NO: 1720074 - RNA, 19 nt, Homo sapiens
  misc_RNA (1)...(19): siRNA sense strand
ucucucccuuugagguuaa

SEQ ID NO: 1720075 - RNA, 19 nt, Homo sapiens
  misc_RNA (1)...(19): siRNA sense strand
gcagcagcagugaacaaau

SEQ ID NO: 1720076 - RNA, 19 nt, Homo sapiens
  misc_RNA (1)...(19): siRNA sense strand
gauggcagcagcagugaac

SEQ ID NO: 1720077 - RNA, 19 nt, Homo sapiens
  misc_RNA (1)...(19): siRNA sense strand
gagauggcagcagcaguga

SEQ ID NO: 1720078 - RNA, 19 nt, Homo sapiens
  misc_RNA (1)...(19): siRNA sense strand
gucaaggcauauaauucug

SEQ ID NO: 1720079 - RNA, 19 nt, Homo sapiens
  misc_RNA (1)...(19): siRNA sense strand
caugaagacaaagaagaaa

SEQ ID NO: 1720080 - RNA, 19 nt, Homo sapiens
  misc_RNA (1)...(19): siRNA sense strand
gagcuuucuuugccuuucg

SEQ ID NO: 1720081 - RNA, 19 nt, Homo sapiens
  misc_RNA (1)...(19): siRNA sense strand
ucaaugugacaacccgaaa

SEQ ID NO: 1720082 - RNA, 19 nt, Homo sapiens
  misc_RNA (1)...(19): siRNA sense strand
aauacgaacaguuggaaau

SEQ ID NO: 1720083 - RNA, 19 nt, Homo sapiens
  misc_RNA (1)...(19): siRNA sense strand
ggaaacaucauauggaauu

SEQ ID NO: 1720084 - RNA, 19 nt, Homo sapiens
  misc_RNA (1)...(19): siRNA sense strand
gaaaucagacaucaacaaa

SEQ ID NO: 1720085 - RNA, 19 nt, Homo sapiens
  misc_RNA (1)...(19): siRNA sense strand
gauaaugagucggaaguaa

SEQ ID NO: 1720086 - RNA, 19 nt, Homo sapiens
  misc_RNA (1)...(19): siRNA sense strand
ugaaggcccuggauaauga

SEQ ID NO: 1720087 - RNA, 19 nt, Homo sapiens
  misc_RNA (1)...(19): siRNA sense strand
cagcagcagugaacaaauu

SEQ ID NO: 1720088 - RNA, 19 nt, Homo sapiens
  misc_RNA (1)...(19): siRNA sense strand
cagcacaucugucauugaa

SEQ ID NO: 1720089 - RNA, 19 nt, Homo sapiens
  misc_RNA (1)...(19): siRNA sense strand
gaauagaggacgaauacaa

SEQ ID NO: 1720090 - RNA, 19 nt, Homo sapiens
  misc_RNA (1)...(19): siRNA sense strand
uaaaguaggugucuucaac

SEQ ID NO: 1720091 - RNA, 19 nt, Homo sapiens
  misc_RNA (1)...(19): siRNA sense strand
gcacaucugucauugaaac

SEQ ID NO: 1720092 - RNA, 19 nt, Homo sapiens
  misc_RNA (1)...(19): siRNA sense strand
gaauugggaucaagugaag

SEQ ID NO: 1720093 - RNA, 19 nt, Homo sapiens
  misc_RNA (1)...(19): siRNA sense strand
gaagaauagaggacgaaua

SEQ ID NO: 1720094 - RNA, 19 nt, Homo sapiens
  misc_RNA (1)...(19): siRNA sense strand
gaggacgaauacaagguua

SEQ ID NO: 1720095 - RNA, 19 nt, Homo sapiens
  misc_RNA (1)...(19): siRNA sense strand
aaacaucgguggagcuuuc

SEQ ID NO: 1720096 - RNA, 19 nt, Homo sapiens
  misc_RNA (1)...(19): siRNA sense strand
ccacagauauugaaguuuu

SEQ ID NO: 1720097 - RNA, 19 nt, Homo sapiens
  misc_RNA (1)...(19): siRNA sense strand
cuagauacguguucaggaa

SEQ ID NO: 1720098 - RNA, 19 nt, Homo sapiens
  misc_RNA (1)...(19): siRNA sense strand
guaggugucuucaacaaca

SEQ ID NO: 1720099 - RNA, 19 nt, Homo sapiens
  misc_RNA (1)...(19): siRNA sense strand
ggaaaucagacaucaacaa

SEQ ID NO: 1720100 - RNA, 19 nt, Homo sapiens
  misc_RNA (1)...(19): siRNA sense strand
caaagcagcacaucuguca

SEQ ID NO: 1720101 - RNA, 19 nt, Homo sapiens
  misc_RNA (1)...(19): siRNA sense strand
ccggaaacaucauauggaa

SEQ ID NO: 1720102 - RNA, 19 nt, Homo sapiens
  misc_RNA (1)...(19): siRNA sense strand
gccaguaucuuugccagaa

SEQ ID NO: 1720103 - RNA, 19 nt, Homo sapiens
  misc_RNA (1)...(19): siRNA sense strand
gaauucaucagacuccaaa

SEQ ID NO: 1720104 - RNA, 19 nt, Homo sapiens
  misc_RNA (1)...(19): siRNA sense strand
aauacaagguuaugagguu

SEQ ID NO: 1720105 - RNA, 19 nt, Homo sapiens
  misc_RNA (1)...(19): siRNA sense strand
caucugucauugaaacaaa

SEQ ID NO: 1720106 - RNA, 19 nt, Homo sapiens
  misc_RNA (1)...(19): siRNA sense strand
acagcuagguccaguuuau

SEQ ID NO: 1720107 - RNA, 19 nt, Homo sapiens
  misc_RNA (1)...(19): siRNA sense strand
gaaacaucauauggaauuc

SEQ ID NO: 1720108 - RNA, 19 nt, Homo sapiens
  misc_RNA (1)...(19): siRNA sense strand
gaaagccaccaccaaguca

SEQ ID NO: 1720109 - RNA, 19 nt, Homo sapiens
  misc_RNA (1)...(19): siRNA sense strand
caagugaaggcccuggaua

SEQ ID NO: 1720110 - RNA, 19 nt, Homo sapiens
  misc_RNA (1)...(19): siRNA sense strand
gaagaagaacccaccaaac

SEQ ID NO: 1720111 - RNA, 19 nt, Homo sapiens
  misc_RNA (1)...(19): siRNA sense strand
ucacagcuagguccaguuu

SEQ ID NO: 1720112 - RNA, 19 nt, Homo sapiens
  misc_RNA (1)...(19): siRNA sense strand
ggagacaugaagacaaaga

SEQ ID NO: 1720113 - RNA, 19 nt, Homo sapiens
  misc_RNA (1)...(19): siRNA sense strand
uuggagacaugaagacaaa

SEQ ID NO: 1720114 - RNA, 19 nt, Homo sapiens
  misc_RNA (1)...(19): siRNA sense strand
auacaagguuaugagguua

SEQ ID NO: 1720115 - RNA, 19 nt, Homo sapiens
  misc_RNA (1)...(19): siRNA sense strand
gauacguguucaggaauga

SEQ ID NO: 1720116 - RNA, 19 nt, Homo sapiens
  misc_RNA (1)...(19): siRNA sense strand
gcagugaacaaauucgaau

SEQ ID NO: 1720117 - RNA, 19 nt, Homo sapiens
  misc_RNA (1)...(19): siRNA sense strand
gccuuucgaugaagauuau

SEQ ID NO: 1720118 - RNA, 19 nt, Homo sapiens
  misc_RNA (1)...(19): siRNA sense strand
ucaucagacuccaaaauua

SEQ ID NO: 1720119 - RNA, 19 nt, Homo sapiens
  misc_RNA (1)...(19): siRNA sense strand
ugccacagauauugaaguu

SEQ ID NO: 1720120 - RNA, 19 nt, Homo sapiens
  misc_RNA (1)...(19): siRNA sense strand
ucagccaucaguacaauaa

SEQ ID NO: 1720121 - RNA, 19 nt, Homo sapiens
  misc_RNA (1)...(19): siRNA sense strand
gacaugaagacaaagaaga

SEQ ID NO: 1720122 - RNA, 19 nt, Homo sapiens
  misc_RNA (1)...(19): siRNA sense strand
ggacgaauacaagguuaug

SEQ ID NO: 1720123 - RNA, 19 nt, Homo sapiens
  misc_RNA (1)...(19): siRNA sense strand
ggaaguaaaaggauacaaa

SEQ ID NO: 1720124 - RNA, 19 nt, Homo sapiens
  misc_RNA (1)...(19): siRNA sense strand
agacaaagcagcacaucug

SEQ ID NO: 1720125 - RNA, 19 nt, Homo sapiens
  misc_RNA (1)...(19): siRNA sense strand
guuaaauauuggagacaug

SEQ ID NO: 1720126 - RNA, 19 nt, Homo sapiens
  misc_RNA (1)...(19): siRNA sense strand
guacagauggaacagacaa

SEQ ID NO: 1720127 - RNA, 19 nt, Homo sapiens
  misc_RNA (1)...(19): siRNA sense strand
agaagaagaacccaccaaa

SEQ ID NO: 1720128 - RNA, 19 nt, Homo sapiens
  misc_RNA (1)...(19): siRNA sense strand
ggauaaugagucggaagua

SEQ ID NO: 1720129 - RNA, 19 nt, Homo sapiens
  misc_RNA (1)...(19): siRNA sense strand
gcugucaaggcauauaauu

SEQ ID NO: 1720130 - RNA, 19 nt, Homo sapiens
  misc_RNA (1)...(19): siRNA sense strand
gaaugcauguacgcuguca

SEQ ID NO: 1720131 - RNA, 19 nt, Homo sapiens
  misc_RNA (1)...(19): siRNA sense strand
ccaaaccaccagccaguau

SEQ ID NO: 1720132 - RNA, 19 nt, Homo sapiens
  misc_RNA (1)...(19): siRNA sense strand
aagaauagaggacgaauac

SEQ ID NO: 1720133 - RNA, 19 nt, Homo sapiens
  misc_RNA (1)...(19): siRNA sense strand
gccaucaguacaauaauga

SEQ ID NO: 1720134 - RNA, 19 nt, Homo sapiens
  misc_RNA (1)...(19): siRNA sense strand
caucauauggaauucauca

SEQ ID NO: 1720135 - RNA, 19 nt, Homo sapiens
  misc_RNA (1)...(19): siRNA sense strand
guaaaaggauacaaagucu

SEQ ID NO: 1720136 - RNA, 19 nt, Homo sapiens
  misc_RNA (1)...(19): siRNA sense strand
gagacaugaagacaaagaa

SEQ ID NO: 1720137 - RNA, 19 nt, Homo sapiens
  misc_RNA (1)...(19): siRNA sense strand
aauaaugauuucccucaca

SEQ ID NO: 1720138 - RNA, 19 nt, Homo sapiens
  misc_RNA (1)...(19): siRNA sense strand
aagcagcacaucugucauu

SEQ ID NO: 1720139 - RNA, 19 nt, Homo sapiens
  misc_RNA (1)...(19): siRNA sense strand
gagaagaauagaggacgaa

SEQ ID NO: 1720140 - RNA, 19 nt, Homo sapiens
  misc_RNA (1)...(19): siRNA sense strand
gcagcacaucugucauuga

SEQ ID NO: 1720141 - RNA, 19 nt, Homo sapiens
  misc_RNA (1)...(19): siRNA sense strand
auaaugagucggaaguaaa

SEQ ID NO: 1720142 - RNA, 19 nt, Homo sapiens
  misc_RNA (1)...(19): siRNA sense strand
cgaaagccaccaccaaguc

SEQ ID NO: 1720143 - RNA, 19 nt, Homo sapiens
  misc_RNA (1)...(19): siRNA sense strand
acaagguuaugagguuaaa

SEQ ID NO: 1720144 - RNA, 19 nt, Homo sapiens
  misc_RNA (1)...(19): siRNA sense strand
gguuaaauauuggagacau

SEQ ID NO: 1720145 - RNA, 19 nt, Homo sapiens
  misc_RNA (1)...(19): siRNA sense strand
ggagcuuucuuugccuuuc

SEQ ID NO: 1720146 - RNA, 19 nt, Homo sapiens
  misc_RNA (1)...(19): siRNA sense strand
gugaaggcccuggauaaug

SEQ ID NO: 1720147 - RNA, 19 nt, Homo sapiens
  misc_RNA (1)...(19): siRNA sense strand
acaugaagacaaagaagaa

SEQ ID NO: 1720148 - RNA, 19 nt, Homo sapiens
  misc_RNA (1)...(19): siRNA sense strand
ucauauggaauucaucaga

SEQ ID NO: 1720149 - RNA, 19 nt, Homo sapiens
  misc_RNA (1)...(19): siRNA sense strand
ugaauugggaucaagugaa

SEQ ID NO: 1720150 - RNA, 19 nt, Homo sapiens
  misc_RNA (1)...(19): siRNA sense strand
ggaauucaucagacuccaa

SEQ ID NO: 1720151 - RNA, 19 nt, Homo sapiens
  misc_RNA (1)...(19): siRNA sense strand
acuuagcugucaaggcaua

SEQ ID NO: 1720152 - RNA, 19 nt, Homo sapiens
  misc_RNA (1)...(19): siRNA sense strand
gacaaagcagcacaucugu

SEQ ID NO: 1720153 - RNA, 19 nt, Homo sapiens
  misc_RNA (1)...(19): siRNA sense strand
aagugaaggcccuggauaa

SEQ ID NO: 1720154 - RNA, 19 nt, Homo sapiens
  misc_RNA (1)...(19): siRNA sense strand
aaguaggugucuucaacaa

SEQ ID NO: 1720155 - RNA, 19 nt, Homo sapiens
  misc_RNA (1)...(19): siRNA sense strand
caucgguggagcuuucuuu

SEQ ID NO: 1720156 - RNA, 19 nt, Homo sapiens
  misc_RNA (1)...(19): siRNA sense strand
gguuaaaguaggugucuuc

SEQ ID NO: 1720157 - RNA, 19 nt, Homo sapiens
  misc_RNA (1)...(19): siRNA sense strand
ugucaaggcauauaauucu

SEQ ID NO: 1720158 - RNA, 19 nt, Homo sapiens
  misc_RNA (1)...(19): siRNA sense strand
ccacuucgaaugcauguac

SEQ ID NO: 1720159 - RNA, 19 nt, Homo sapiens
  misc_RNA (1)...(19): siRNA sense strand
uacgaacaguuggaaauca

SEQ ID NO: 1720160 - RNA, 19 nt, Homo sapiens
  misc_RNA (1)...(19): siRNA sense strand
uuccaaagauaucaaaugc

SEQ ID NO: 1720161 - RNA, 19 nt, Homo sapiens
  misc_RNA (1)...(19): siRNA sense strand
agauacguguucaggaaug

SEQ ID NO: 1720162 - RNA, 19 nt, Homo sapiens
  misc_RNA (1)...(19): siRNA sense strand
ccaccagccaguaucuuug

SEQ ID NO: 1720163 - RNA, 19 nt, Homo sapiens
  misc_RNA (1)...(19): siRNA sense strand
uagcugucaaggcauauaa

SEQ ID NO: 1720164 - RNA, 19 nt, Homo sapiens
  misc_RNA (1)...(19): siRNA sense strand
agccaucaguacaauaaug

SEQ ID NO: 1720165 - RNA, 19 nt, Homo sapiens
  misc_RNA (1)...(19): siRNA sense strand
ggcagcagcagugaacaaa

SEQ ID NO: 1720166 - RNA, 19 nt, Homo sapiens
  misc_RNA (1)...(19): siRNA sense strand
ugucagccaucaguacaau

SEQ ID NO: 1720167 - RNA, 19 nt, Homo sapiens
  misc_RNA (1)...(19): siRNA sense strand
gaaguaaaaggauacaaag

SEQ ID NO: 1720168 - RNA, 19 nt, Homo sapiens
  misc_RNA (1)...(19): siRNA sense strand
uuucuuugccuuucgauga

SEQ ID NO: 1720169 - RNA, 19 nt, Homo sapiens
  misc_RNA (1)...(19): siRNA sense strand
gucaaggcauauaauucug

SEQ ID NO: 1720170 - RNA, 19 nt, Homo sapiens
  misc_RNA (1)...(19): siRNA sense strand
gcagcagcagugaacaaau

SEQ ID NO: 1720171 - RNA, 19 nt, Homo sapiens
  misc_RNA (1)...(19): siRNA sense strand
gauggcagcagcagugaac

SEQ ID NO: 1720172 - RNA, 19 nt, Homo sapiens
  misc_RNA (1)...(19): siRNA sense strand
gagauggcagcagcaguga

SEQ ID NO: 1720173 - RNA, 19 nt, Homo sapiens
  misc_RNA (1)...(19): siRNA sense strand
ucucucccuuugagguuaa

SEQ ID NO: 1720174 - RNA, 19 nt, Homo sapiens
  misc_RNA (1)...(19): siRNA sense strand
caugaagacaaagaagaaa

SEQ ID NO: 1720175 - RNA, 19 nt, Homo sapiens
  misc_RNA (1)...(19): siRNA sense strand
gagcuuucuuugccuuucg

SEQ ID NO: 1720176 - RNA, 19 nt, Homo sapiens
  misc_RNA (1)...(19): siRNA sense strand
ucaaugugacaacccgaaa

SEQ ID NO: 1720177 - RNA, 19 nt, Homo sapiens
  misc_RNA (1)...(19): siRNA sense strand
aauacgaacaguuggaaau

SEQ ID NO: 1720178 - RNA, 19 nt, Homo sapiens
  misc_RNA (1)...(19): siRNA sense strand
caaaccaccagccaguauc

SEQ ID NO: 1720179 - RNA, 19 nt, Homo sapiens
  misc_RNA (1)...(19): siRNA sense strand
cagaagaagaacccaccaa

SEQ ID NO: 1720180 - RNA, 19 nt, Homo sapiens
  misc_RNA (1)...(19): siRNA sense strand
cgaauuccaaagauaucaa

SEQ ID NO: 1720181 - RNA, 19 nt, Homo sapiens
  misc_RNA (1)...(19): siRNA sense strand
agaagaacccaccaaacca

SEQ ID NO: 1720182 - RNA, 19 nt, Homo sapiens
  misc_RNA (1)...(19): siRNA sense strand
caguaucuuugccagaagu

SEQ ID NO: 1720183 - RNA, 19 nt, Homo sapiens
  misc_RNA (1)...(19): siRNA sense strand
ggaaacaucauauggaauu

SEQ ID NO: 1720184 - RNA, 19 nt, Homo sapiens
  misc_RNA (1)...(19): siRNA sense strand
gaaaucagacaucaacaaa

SEQ ID NO: 1720185 - RNA, 19 nt, Homo sapiens
  misc_RNA (1)...(19): siRNA sense strand
gauaaugagucggaaguaa

SEQ ID NO: 1720186 - RNA, 19 nt, Homo sapiens
  misc_RNA (1)...(19): siRNA sense strand
ugaaggcccuggauaauga

SEQ ID NO: 1720187 - RNA, 19 nt, Homo sapiens
  misc_RNA (1)...(19): siRNA sense strand
cagcagcagugaacaaauu

SEQ ID NO: 1720188 - RNA, 19 nt, Homo sapiens
  misc_RNA (1)...(19): siRNA sense strand
cagcacaucugucauugaa

SEQ ID NO: 1720189 - RNA, 19 nt, Homo sapiens
  misc_RNA (1)...(19): siRNA sense strand
gacggucccugaggaauua

SEQ ID NO: 1720190 - RNA, 19 nt, Homo sapiens
  misc_RNA (1)...(19): siRNA sense strand
gaauagaggacgaauacaa

SEQ ID NO: 1720191 - RNA, 19 nt, Homo sapiens
  misc_RNA (1)...(19): siRNA sense strand
uaaaguaggugucuucaac

SEQ ID NO: 1720192 - RNA, 19 nt, Homo sapiens
  misc_RNA (1)...(19): siRNA sense strand
gcacaucugucauugaaac

SEQ ID NO: 1720193 - RNA, 19 nt, Homo sapiens
  misc_RNA (1)...(19): siRNA sense strand
gaauugggaucaagugaag

SEQ ID NO: 1720194 - RNA, 19 nt, Homo sapiens
  misc_RNA (1)...(19): siRNA sense strand
gaagaauagaggacgaaua

SEQ ID NO: 1720195 - RNA, 19 nt, Homo sapiens
  misc_RNA (1)...(19): siRNA sense strand
gaggacgaauacaagguua

SEQ ID NO: 1720196 - RNA, 19 nt, Homo sapiens
  misc_RNA (1)...(19): siRNA sense strand
aaacaucgguggagcuuuc

SEQ ID NO: 1720197 - RNA, 19 nt, Homo sapiens
  misc_RNA (1)...(19): siRNA sense strand
cuagauacguguucaggaa

SEQ ID NO: 1720198 - RNA, 19 nt, Homo sapiens
  misc_RNA (1)...(19): siRNA sense strand
ccacagauauugaaguuuu

SEQ ID NO: 1720199 - RNA, 19 nt, Homo sapiens
  misc_RNA (1)...(19): siRNA sense strand
guaggugucuucaacaaca

SEQ ID NO: 1720200 - RNA, 19 nt, Homo sapiens
  misc_RNA (1)...(19): siRNA sense strand
ggaaaucagacaucaacaa

SEQ ID NO: 1720201 - RNA, 19 nt, Homo sapiens
  misc_RNA (1)...(19): siRNA sense strand
ggucgaggcuuugguuaug

SEQ ID NO: 1720202 - RNA, 19 nt, Homo sapiens
  misc_RNA (1)...(19): siRNA sense strand
caaagcagcacaucuguca

SEQ ID NO: 1720203 - RNA, 19 nt, Homo sapiens
  misc_RNA (1)...(19): siRNA sense strand
ccggaaacaucauauggaa

SEQ ID NO: 1720204 - RNA, 19 nt, Homo sapiens
  misc_RNA (1)...(19): siRNA sense strand
gccaguaucuuugccagaa

SEQ ID NO: 1720205 - RNA, 19 nt, Homo sapiens
  misc_RNA (1)...(19): siRNA sense strand
gaauucaucagacuccaaa

SEQ ID NO: 1720206 - RNA, 19 nt, Homo sapiens
  misc_RNA (1)...(19): siRNA sense strand
aauacaagguuaugagguu

SEQ ID NO: 1720207 - RNA, 19 nt, Homo sapiens
  misc_RNA (1)...(19): siRNA sense strand
caucugucauugaaacaaa

SEQ ID NO: 1720208 - RNA, 19 nt, Homo sapiens
  misc_RNA (1)...(19): siRNA sense strand
acagcuagguccaguuuau

SEQ ID NO: 1720209 - RNA, 19 nt, Homo sapiens
  misc_RNA (1)...(19): siRNA sense strand
gaaacaucauauggaauuc

SEQ ID NO: 1720210 - RNA, 19 nt, Homo sapiens
  misc_RNA (1)...(19): siRNA sense strand
acagaauggucgaggcuuu

SEQ ID NO: 1720211 - RNA, 19 nt, Homo sapiens
  misc_RNA (1)...(19): siRNA sense strand
caagugaaggcccuggaua

SEQ ID NO: 1720212 - RNA, 19 nt, Homo sapiens
  misc_RNA (1)...(19): siRNA sense strand
gaaagccaccaccaaguca

SEQ ID NO: 1720213 - RNA, 19 nt, Homo sapiens
  misc_RNA (1)...(19): siRNA sense strand
gaagaagaacccaccaaac

SEQ ID NO: 1720214 - RNA, 19 nt, Homo sapiens
  misc_RNA (1)...(19): siRNA sense strand
ucacagcuagguccaguuu

SEQ ID NO: 1720215 - RNA, 19 nt, Homo sapiens
  misc_RNA (1)...(19): siRNA sense strand
ggagacaugaagacaaaga

SEQ ID NO: 1720216 - RNA, 19 nt, Homo sapiens
  misc_RNA (1)...(19): siRNA sense strand
uuggagacaugaagacaaa

SEQ ID NO: 1720217 - RNA, 19 nt, Homo sapiens
  misc_RNA (1)...(19): siRNA sense strand
auacaagguuaugagguua

SEQ ID NO: 1720218 - RNA, 19 nt, Homo sapiens
  misc_RNA (1)...(19): siRNA sense strand
gccuuucgaugaagauuau

SEQ ID NO: 1720219 - RNA, 19 nt, Homo sapiens
  misc_RNA (1)...(19): siRNA sense strand
gcagugaacaaauucgaau

SEQ ID NO: 1720220 - RNA, 19 nt, Homo sapiens
  misc_RNA (1)...(19): siRNA sense strand
gauacguguucaggaauga

SEQ ID NO: 1720221 - RNA, 19 nt, Homo sapiens
  misc_RNA (1)...(19): siRNA sense strand
ucaucagacuccaaaauua

SEQ ID NO: 1720222 - RNA, 19 nt, Homo sapiens
  misc_RNA (1)...(19): siRNA sense strand
ccugaggaauuacagaaug

SEQ ID NO: 1720223 - RNA, 19 nt, Homo sapiens
  misc_RNA (1)...(19): siRNA sense strand
ugccacagauauugaaguu

SEQ ID NO: 1720224 - RNA, 19 nt, Homo sapiens
  misc_RNA (1)...(19): siRNA sense strand
ucagccaucaguacaauaa

SEQ ID NO: 1720225 - RNA, 19 nt, Homo sapiens
  misc_RNA (1)...(19): siRNA sense strand
gacaugaagacaaagaaga

SEQ ID NO: 1720226 - RNA, 19 nt, Homo sapiens
  misc_RNA (1)...(19): siRNA sense strand
ggacgaauacaagguuaug

SEQ ID NO: 1720227 - RNA, 19 nt, Homo sapiens
  misc_RNA (1)...(19): siRNA sense strand
ggaaguaaaaggauacaaa

SEQ ID NO: 1720228 - RNA, 19 nt, Homo sapiens
  misc_RNA (1)...(19): siRNA sense strand
agacaaagcagcacaucug

SEQ ID NO: 1720229 - RNA, 19 nt, Homo sapiens
  misc_RNA (1)...(19): siRNA sense strand
agaagaagaacccaccaaa

SEQ ID NO: 1720230 - RNA, 19 nt, Homo sapiens
  misc_RNA (1)...(19): siRNA sense strand
guacagauggaacagacaa

SEQ ID NO: 1720231 - RNA, 19 nt, Homo sapiens
  misc_RNA (1)...(19): siRNA sense strand
guuaaauauuggagacaug

SEQ ID NO: 1720232 - RNA, 19 nt, Homo sapiens
  misc_RNA (1)...(19): siRNA sense strand
ggauaaugagucggaagua

SEQ ID NO: 1720233 - RNA, 19 nt, Homo sapiens
  misc_RNA (1)...(19): siRNA sense strand
ccaaaccaccagccaguau

SEQ ID NO: 1720234 - RNA, 19 nt, Homo sapiens
  misc_RNA (1)...(19): siRNA sense strand
gaaugcauguacgcuguca

SEQ ID NO: 1720235 - RNA, 19 nt, Homo sapiens
  misc_RNA (1)...(19): siRNA sense strand
gcugucaaggcauauaauu

SEQ ID NO: 1720236 - RNA, 19 nt, Homo sapiens
  misc_RNA (1)...(19): siRNA sense strand
aagaauagaggacgaauac

SEQ ID NO: 1720237 - RNA, 19 nt, Homo sapiens
  misc_RNA (1)...(19): siRNA sense strand
gccaucaguacaauaauga

SEQ ID NO: 1720238 - RNA, 19 nt, Homo sapiens
  misc_RNA (1)...(19): siRNA sense strand
caucauauggaauucauca

SEQ ID NO: 1720239 - RNA, 19 nt, Homo sapiens
  misc_RNA (1)...(19): siRNA sense strand
guaaaaggauacaaagucu

SEQ ID NO: 1720240 - RNA, 19 nt, Homo sapiens
  misc_RNA (1)...(19): siRNA sense strand
gagacaugaagacaaagaa

SEQ ID NO: 1720241 - RNA, 19 nt, Homo sapiens
  misc_RNA (1)...(19): siRNA sense strand
aauaaugauuucccucaca

SEQ ID NO: 1720242 - RNA, 19 nt, Homo sapiens
  misc_RNA (1)...(19): siRNA sense strand
aagcagcacaucugucauu

SEQ ID NO: 1720243 - RNA, 19 nt, Homo sapiens
  misc_RNA (1)...(19): siRNA sense strand
gagaagaauagaggacgaa

SEQ ID NO: 1720244 - RNA, 19 nt, Homo sapiens
  misc_RNA (1)...(19): siRNA sense strand
gcagcacaucugucauuga

SEQ ID NO: 1720245 - RNA, 19 nt, Homo sapiens
  misc_RNA (1)...(19): siRNA sense strand
auaaugagucggaaguaaa

SEQ ID NO: 1720246 - RNA, 19 nt, Homo sapiens
  misc_RNA (1)...(19): siRNA sense strand
cgaaagccaccaccaaguc

SEQ ID NO: 1720247 - RNA, 19 nt, Homo sapiens
  misc_RNA (1)...(19): siRNA sense strand
acaagguuaugagguuaaa

SEQ ID NO: 1720248 - RNA, 19 nt, Homo sapiens
  misc_RNA (1)...(19): siRNA sense strand
gguuaaauauuggagacau

SEQ ID NO: 1720249 - RNA, 19 nt, Homo sapiens
  misc_RNA (1)...(19): siRNA sense strand
ggagcuuucuuugccuuuc

SEQ ID NO: 1720250 - RNA, 19 nt, Homo sapiens
  misc_RNA (1)...(19): siRNA sense strand
gugaaggcccuggauaaug

SEQ ID NO: 1720251 - RNA, 19 nt, Homo sapiens
  misc_RNA (1)...(19): siRNA sense strand
acaugaagacaaagaagaa

SEQ ID NO: 1720252 - RNA, 19 nt, Homo sapiens
  misc_RNA (1)...(19): siRNA sense strand
ucauauggaauucaucaga

SEQ ID NO: 1720253 - RNA, 19 nt, Homo sapiens
  misc_RNA (1)...(19): siRNA sense strand
ugaauugggaucaagugaa

SEQ ID NO: 1720254 - RNA, 19 nt, Homo sapiens
  misc_RNA (1)...(19): siRNA sense strand
ggaauucaucagacuccaa

SEQ ID NO: 1720255 - RNA, 19 nt, Homo sapiens
  misc_RNA (1)...(19): siRNA sense strand
acuuagcugucaaggcaua

SEQ ID NO: 1720256 - RNA, 19 nt, Homo sapiens
  misc_RNA (1)...(19): siRNA sense strand
gacaaagcagcacaucugu

SEQ ID NO: 1720257 - RNA, 19 nt, Homo sapiens
  misc_RNA (1)...(19): siRNA sense strand
aaguaggugucuucaacaa

SEQ ID NO: 1720258 - RNA, 19 nt, Homo sapiens
  misc_RNA (1)...(19): siRNA sense strand
aagugaaggcccuggauaa

SEQ ID NO: 1720259 - RNA, 19 nt, Homo sapiens
  misc_RNA (1)...(19): siRNA sense strand
gguuaaaguaggugucuuc

SEQ ID NO: 1720260 - RNA, 19 nt, Homo sapiens
  misc_RNA (1)...(19): siRNA sense strand
caucgguggagcuuucuuu

SEQ ID NO: 1720261 - RNA, 19 nt, Homo sapiens
  misc_RNA (1)...(19): siRNA sense strand
ugucaaggcauauaauucu

SEQ ID NO: 1720262 - RNA, 19 nt, Homo sapiens
  misc_RNA (1)...(19): siRNA sense strand
ccacuucgaaugcauguac

SEQ ID NO: 1720263 - RNA, 19 nt, Homo sapiens
  misc_RNA (1)...(19): siRNA sense strand
agauacguguucaggaaug

SEQ ID NO: 1720264 - RNA, 19 nt, Homo sapiens
  misc_RNA (1)...(19): siRNA sense strand
uuccaaagauaucaaaugc

SEQ ID NO: 1720265 - RNA, 19 nt, Homo sapiens
  misc_RNA (1)...(19): siRNA sense strand
agacggucccugaggaauu

SEQ ID NO: 1720266 - RNA, 19 nt, Homo sapiens
  misc_RNA (1)...(19): siRNA sense strand
ccaccagccaguaucuuug

SEQ ID NO: 1720267 - RNA, 19 nt, Homo sapiens
  misc_RNA (1)...(19): siRNA sense strand
uacgaacaguuggaaauca

SEQ ID NO: 1720268 - RNA, 19 nt, Homo sapiens
  misc_RNA (1)...(19): siRNA sense strand
uagcugucaaggcauauaa

SEQ ID NO: 1720269 - RNA, 19 nt, Homo sapiens
  misc_RNA (1)...(19): siRNA sense strand
agccaucaguacaauaaug

SEQ ID NO: 1720270 - RNA, 19 nt, Homo sapiens
  misc_RNA (1)...(19): siRNA sense strand
ggcagcagcagugaacaaa

SEQ ID NO: 1720271 - RNA, 19 nt, Homo sapiens
  misc_RNA (1)...(19): siRNA sense strand
ugucagccaucaguacaau

SEQ ID NO: 1720272 - RNA, 19 nt, Homo sapiens
  misc_RNA (1)...(19): siRNA sense strand
gaaguaaaaggauacaaag

SEQ ID NO: 1720273 - RNA, 19 nt, Homo sapiens
  misc_RNA (1)...(19): siRNA sense strand
uuucuuugccuuucgauga

SEQ ID NO: 1720274 - RNA, 19 nt, Homo sapiens
  misc_RNA (1)...(19): siRNA sense strand
ucucucccuuugagguuaa

SEQ ID NO: 1720275 - RNA, 19 nt, Homo sapiens
  misc_RNA (1)...(19): siRNA sense strand
gcagcagcagugaacaaau

SEQ ID NO: 1720276 - RNA, 19 nt, Homo sapiens
  misc_RNA (1)...(19): siRNA sense strand
gauggcagcagcagugaac

SEQ ID NO: 1720277 - RNA, 19 nt, Homo sapiens
  misc_RNA (1)...(19): siRNA sense strand
gagauggcagcagcaguga

SEQ ID NO: 1720278 - RNA, 19 nt, Homo sapiens
  misc_RNA (1)...(19): siRNA sense strand
gucaaggcauauaauucug

SEQ ID NO: 1720279 - RNA, 19 nt, Homo sapiens
  misc_RNA (1)...(19): siRNA sense strand
caugaagacaaagaagaaa

SEQ ID NO: 1720280 - RNA, 19 nt, Homo sapiens
  misc_RNA (1)...(19): siRNA sense strand
gagcuuucuuugccuuucg

SEQ ID NO: 1720281 - RNA, 19 nt, Homo sapiens
  misc_RNA (1)...(19): siRNA sense strand
ucaaugugacaacccgaaa

SEQ ID NO: 1720282 - RNA, 19 nt, Homo sapiens
  misc_RNA (1)...(19): siRNA sense strand
aauacgaacaguuggaaau

SEQ ID NO: 1720283 - RNA, 19 nt, Homo sapiens
  misc_RNA (1)...(19): siRNA sense strand
guggacagaugaagaauua

SEQ ID NO: 1720284 - RNA, 19 nt, Homo sapiens
  misc_RNA (1)...(19): siRNA sense strand
ugacucggcuggcgucuuu

SEQ ID NO: 1720285 - RNA, 19 nt, Homo sapiens
  misc_RNA (1)...(19): siRNA sense strand
gaccagaucccagguguuc

SEQ ID NO: 1720286 - RNA, 19 nt, Homo sapiens
  misc_RNA (1)...(19): siRNA sense strand
ucagcggacucaugugguu

SEQ ID NO: 1720287 - RNA, 19 nt, Homo sapiens
  misc_RNA (1)...(19): siRNA sense strand
gugguggugugcacauuga

SEQ ID NO: 1720288 - RNA, 19 nt, Homo sapiens
  misc_RNA (1)...(19): siRNA sense strand
ccaguggacagaugaagaa

SEQ ID NO: 1720289 - RNA, 19 nt, Homo sapiens
  misc_RNA (1)...(19): siRNA sense strand
ggacagaugaagaauuagg

SEQ ID NO: 1720290 - RNA, 19 nt, Homo sapiens
  misc_RNA (1)...(19): siRNA sense strand
gaugaagaauuagguaucc

SEQ ID NO: 1720291 - RNA, 19 nt, Homo sapiens
  misc_RNA (1)...(19): siRNA sense strand
uuagguaucccuccugaug

SEQ ID NO: 1720292 - RNA, 19 nt, Homo sapiens
  misc_RNA (1)...(19): siRNA sense strand
gaugguggaguccgucaug

SEQ ID NO: 1720293 - RNA, 19 nt, Homo sapiens
  misc_RNA (1)...(19): siRNA sense strand
acagaugaagaauuaggua

SEQ ID NO: 1720294 - RNA, 19 nt, Homo sapiens
  misc_RNA (1)...(19): siRNA sense strand
cagaugaagaauuagguau

SEQ ID NO: 1720295 - RNA, 19 nt, Homo sapiens
  misc_RNA (1)...(19): siRNA sense strand
gucuuucgcucgcguugga

SEQ ID NO: 1720296 - RNA, 19 nt, Homo sapiens
  misc_RNA (1)...(19): siRNA sense strand
guaucccuccugaugauga

SEQ ID NO: 1720297 - RNA, 19 nt, Homo sapiens
  misc_RNA (1)...(19): siRNA sense strand
gcacggacugcuggagaug

SEQ ID NO: 1720298 - RNA, 19 nt, Homo sapiens
  misc_RNA (1)...(19): siRNA sense strand
uaucccuccugaugaugaa

SEQ ID NO: 1720299 - RNA, 19 nt, Homo sapiens
  misc_RNA (1)...(19): siRNA sense strand
guucuucagcggacucaug

SEQ ID NO: 1720300 - RNA, 19 nt, Homo sapiens
  misc_RNA (1)...(19): siRNA sense strand
caacagaaaucguuuguga

SEQ ID NO: 1720301 - RNA, 19 nt, Homo sapiens
  misc_RNA (1)...(19): siRNA sense strand
gaugaugacucaacuauug

SEQ ID NO: 1720302 - RNA, 19 nt, Homo sapiens
  misc_RNA (1)...(19): siRNA sense strand
ccacugaccuuaucaaaga

SEQ ID NO: 1720303 - RNA, 19 nt, Homo sapiens
  misc_RNA (1)...(19): siRNA sense strand
gcaauuggcugcuuugaca

SEQ ID NO: 1720304 - RNA, 19 nt, Homo sapiens
  misc_RNA (1)...(19): siRNA sense strand
gaacaucucccauuugaau

SEQ ID NO: 1720305 - RNA, 19 nt, Homo sapiens
  misc_RNA (1)...(19): siRNA sense strand
gaagauaacagaagcuaaa

SEQ ID NO: 1720306 - RNA, 19 nt, Homo sapiens
  misc_RNA (1)...(19): siRNA sense strand
ggaccuggcuaugcaaaua

SEQ ID NO: 1720307 - RNA, 19 nt, Homo sapiens
  misc_RNA (1)...(19): siRNA sense strand
gagaauagcaguuuaugaa

SEQ ID NO: 1720308 - RNA, 19 nt, Homo sapiens
  misc_RNA (1)...(19): siRNA sense strand
gaauagcaguuuaugaaga

SEQ ID NO: 1720309 - RNA, 19 nt, Homo sapiens
  misc_RNA (1)...(19): siRNA sense strand
gaagaaaucacacaaguca

SEQ ID NO: 1720310 - RNA, 19 nt, Homo sapiens
  misc_RNA (1)...(19): siRNA sense strand
gaaaggaaccagccucuga

SEQ ID NO: 1720311 - RNA, 19 nt, Homo sapiens
  misc_RNA (1)...(19): siRNA sense strand
gaaaugaaagaccugguua

SEQ ID NO: 1720312 - RNA, 19 nt, Homo sapiens
  misc_RNA (1)...(19): siRNA sense strand
caaaugagguuuucaguuu

SEQ ID NO: 1720313 - RNA, 19 nt, Homo sapiens
  misc_RNA (1)...(19): siRNA sense strand
gcaagaauaccaagacaaa

SEQ ID NO: 1720314 - RNA, 19 nt, Homo sapiens
  misc_RNA (1)...(19): siRNA sense strand
gaaacuggauuugaaugaa

SEQ ID NO: 1720315 - RNA, 19 nt, Homo sapiens
  misc_RNA (1)...(19): siRNA sense strand
gcacuuaauuuccagacaa

SEQ ID NO: 1720316 - RNA, 19 nt, Homo sapiens
  misc_RNA (1)...(19): siRNA sense strand
gaacagagagcuaagcaau

SEQ ID NO: 1720317 - RNA, 19 nt, Homo sapiens
  misc_RNA (1)...(19): siRNA sense strand
gugaacaucucccauuuga

SEQ ID NO: 1720318 - RNA, 19 nt, Homo sapiens
  misc_RNA (1)...(19): siRNA sense strand
ugaaagaccugguuaagag

SEQ ID NO: 1720319 - RNA, 19 nt, Homo sapiens
  misc_RNA (1)...(19): siRNA sense strand
gcuggaaacuccucuguug

SEQ ID NO: 1720320 - RNA, 19 nt, Homo sapiens
  misc_RNA (1)...(19): siRNA sense strand
gaaugcagguugucagaug

SEQ ID NO: 1720321 - RNA, 19 nt, Homo sapiens
  misc_RNA (1)...(19): siRNA sense strand
gaacacguguggauucauc

SEQ ID NO: 1720322 - RNA, 19 nt, Homo sapiens
  misc_RNA (1)...(19): siRNA sense strand
gaagcuaaauccaaagaca

SEQ ID NO: 1720323 - RNA, 19 nt, Homo sapiens
  misc_RNA (1)...(19): siRNA sense strand
gaggagacaucccaggaaa

SEQ ID NO: 1720324 - RNA, 19 nt, Homo sapiens
  misc_RNA (1)...(19): siRNA sense strand
ugucuaaucuggugaacua

SEQ ID NO: 1720325 - RNA, 19 nt, Homo sapiens
  misc_RNA (1)...(19): siRNA sense strand
ggaaauacgucagcagauc

SEQ ID NO: 1720326 - RNA, 19 nt, Homo sapiens
  misc_RNA (1)...(19): siRNA sense strand
caaaguaaacggcaagaaa

SEQ ID NO: 1720327 - RNA, 19 nt, Homo sapiens
  misc_RNA (1)...(19): siRNA sense strand
gagaacgacuccagcagaa

SEQ ID NO: 1720328 - RNA, 19 nt, Homo sapiens
  misc_RNA (1)...(19): siRNA sense strand
cagaagaaaugucuaaucu

SEQ ID NO: 1720329 - RNA, 19 nt, Homo sapiens
  misc_RNA (1)...(19): siRNA sense strand
gaagcgagaacauauuaaa

SEQ ID NO: 1720330 - RNA, 19 nt, Homo sapiens
  misc_RNA (1)...(19): siRNA sense strand
agaaggagguaaauucauu

SEQ ID NO: 1720331 - RNA, 19 nt, Homo sapiens
  misc_RNA (1)...(19): siRNA sense strand
gaacacacuaccaaguaua

SEQ ID NO: 1720332 - RNA, 19 nt, Homo sapiens
  misc_RNA (1)...(19): siRNA sense strand
gaucaugguucaucaacga

SEQ ID NO: 1720333 - RNA, 19 nt, Homo sapiens
  misc_RNA (1)...(19): siRNA sense strand
ccaaggaaaugcugugaau

SEQ ID NO: 1720334 - RNA, 19 nt, Homo sapiens
  misc_RNA (1)...(19): siRNA sense strand
gaacuaaagcaacagaaau

SEQ ID NO: 1720335 - RNA, 19 nt, Homo sapiens
  misc_RNA (1)...(19): siRNA sense strand
acagagagcuaagcaauug

SEQ ID NO: 1720336 - RNA, 19 nt, Homo sapiens
  misc_RNA (1)...(19): siRNA sense strand
caucgaagcuuuaucaaac

SEQ ID NO: 1720337 - RNA, 19 nt, Homo sapiens
  misc_RNA (1)...(19): siRNA sense strand
gaagaaggagguaaauuca

SEQ ID NO: 1720338 - RNA, 19 nt, Homo sapiens
  misc_RNA (1)...(19): siRNA sense strand
caagugggaugaugacuca

SEQ ID NO: 1720339 - RNA, 19 nt, Homo sapiens
  misc_RNA (1)...(19): siRNA sense strand
ggucauauauccaggaagu

SEQ ID NO: 1720340 - RNA, 19 nt, Homo sapiens
  misc_RNA (1)...(19): siRNA sense strand
gaagaguggcuacagauug

SEQ ID NO: 1720341 - RNA, 19 nt, Homo sapiens
  misc_RNA (1)...(19): siRNA sense strand
gaagaagaaccuauugugu

SEQ ID NO: 1720342 - RNA, 19 nt, Homo sapiens
  misc_RNA (1)...(19): siRNA sense strand
ucaaagaaaucugugagaa

SEQ ID NO: 1720343 - RNA, 19 nt, Homo sapiens
  misc_RNA (1)...(19): siRNA sense strand
gcagaagagugucagaaca

SEQ ID NO: 1720344 - RNA, 19 nt, Homo sapiens
  misc_RNA (1)...(19): siRNA sense strand
caagaacaguauuauagug

SEQ ID NO: 1720345 - RNA, 19 nt, Homo sapiens
  misc_RNA (1)...(19): siRNA sense strand
ggaagaugaagaagaagua

SEQ ID NO: 1720346 - RNA, 19 nt, Homo sapiens
  misc_RNA (1)...(19): siRNA sense strand
ccagaaguguacagaguuu

SEQ ID NO: 1720347 - RNA, 19 nt, Homo sapiens
  misc_RNA (1)...(19): siRNA sense strand
caaagaaaucugugagaaa

SEQ ID NO: 1720348 - RNA, 19 nt, Homo sapiens
  misc_RNA (1)...(19): siRNA sense strand
cagaagcgagaacauauua

SEQ ID NO: 1720349 - RNA, 19 nt, Homo sapiens
  misc_RNA (1)...(19): siRNA sense strand
cagaaugacuacuugagaa

SEQ ID NO: 1720350 - RNA, 19 nt, Homo sapiens
  misc_RNA (1)...(19): siRNA sense strand
gcaccaaauucgucaagug

SEQ ID NO: 1720351 - RNA, 19 nt, Homo sapiens
  misc_RNA (1)...(19): siRNA sense strand
uaagagacaccacaagaaa

SEQ ID NO: 1720352 - RNA, 19 nt, Homo sapiens
  misc_RNA (1)...(19): siRNA sense strand
gcacaacaccuaccucaca

SEQ ID NO: 1720353 - RNA, 19 nt, Homo sapiens
  misc_RNA (1)...(19): siRNA sense strand
caugacaacugaaauaucu

SEQ ID NO: 1720354 - RNA, 19 nt, Homo sapiens
  misc_RNA (1)...(19): siRNA sense strand
agacagagcuacuggaucu

SEQ ID NO: 1720355 - RNA, 19 nt, Homo sapiens
  misc_RNA (1)...(19): siRNA sense strand
uaacagaagcuaaauccaa

SEQ ID NO: 1720356 - RNA, 19 nt, Homo sapiens
  misc_RNA (1)...(19): siRNA sense strand
caucagaggcuccaaguga

SEQ ID NO: 1720357 - RNA, 19 nt, Homo sapiens
  misc_RNA (1)...(19): siRNA sense strand
ggaaggcauuuaagaccaa

SEQ ID NO: 1720358 - RNA, 19 nt, Homo sapiens
  misc_RNA (1)...(19): siRNA sense strand
ccaaaggacuugaacaacu

SEQ ID NO: 1720359 - RNA, 19 nt, Homo sapiens
  misc_RNA (1)...(19): siRNA sense strand
ggauuugaaugaagacaug

SEQ ID NO: 1720360 - RNA, 19 nt, Homo sapiens
  misc_RNA (1)...(19): siRNA sense strand
aaccauaucuuaccguuga

SEQ ID NO: 1720361 - RNA, 19 nt, Homo sapiens
  misc_RNA (1)...(19): siRNA sense strand
gaccugaaauugauaacau

SEQ ID NO: 1720362 - RNA, 19 nt, Homo sapiens
  misc_RNA (1)...(19): siRNA sense strand
ugucaaagaugccagaugu

SEQ ID NO: 1720363 - RNA, 19 nt, Homo sapiens
  misc_RNA (1)...(19): siRNA sense strand
uagaagaagcgcaaaguaa

SEQ ID NO: 1720364 - RNA, 19 nt, Homo sapiens
  misc_RNA (1)...(19): siRNA sense strand
ggaagaagaaccuauugug

SEQ ID NO: 1720365 - RNA, 19 nt, Homo sapiens
  misc_RNA (1)...(19): siRNA sense strand
ucucguggcuuuccaagaa

SEQ ID NO: 1720366 - RNA, 19 nt, Homo sapiens
  misc_RNA (1)...(19): siRNA sense strand
gccaaggaauggacaaaug

SEQ ID NO: 1720367 - RNA, 19 nt, Homo sapiens
  misc_RNA (1)...(19): siRNA sense strand
aaagaaaucugugagaaag

SEQ ID NO: 1720368 - RNA, 19 nt, Homo sapiens
  misc_RNA (1)...(19): siRNA sense strand
ugacggaugucgcagaaga

SEQ ID NO: 1720369 - RNA, 19 nt, Homo sapiens
  misc_RNA (1)...(19): siRNA sense strand
gaaaugacccaaaaguuaa

SEQ ID NO: 1720370 - RNA, 19 nt, Homo sapiens
  misc_RNA (1)...(19): siRNA sense strand
ccacagaagaaaugucuaa

SEQ ID NO: 1720371 - RNA, 19 nt, Homo sapiens
  misc_RNA (1)...(19): siRNA sense strand
ucaagaagggcaccaaauu

SEQ ID NO: 1720372 - RNA, 19 nt, Homo sapiens
  misc_RNA (1)...(19): siRNA sense strand
acauagaagugaaagacua

SEQ ID NO: 1720373 - RNA, 19 nt, Homo sapiens
  misc_RNA (1)...(19): siRNA sense strand
gcaaguccaaguauugauu

SEQ ID NO: 1720374 - RNA, 19 nt, Homo sapiens
  misc_RNA (1)...(19): siRNA sense strand
gaaacacuacaaagaaaug

SEQ ID NO: 1720375 - RNA, 19 nt, Homo sapiens
  misc_RNA (1)...(19): siRNA sense strand
ggaaguagauauguuuggu

SEQ ID NO: 1720376 - RNA, 19 nt, Homo sapiens
  misc_RNA (1)...(19): siRNA sense strand
caguggaauuuguagaaua

SEQ ID NO: 1720377 - RNA, 19 nt, Homo sapiens
  misc_RNA (1)...(19): siRNA sense strand
aaacuccucuguugagaug

SEQ ID NO: 1720378 - RNA, 19 nt, Homo sapiens
  misc_RNA (1)...(19): siRNA sense strand
ggaaacuccucuguugaga

SEQ ID NO: 1720379 - RNA, 19 nt, Homo sapiens
  misc_RNA (1)...(19): siRNA sense strand
cugagaaacuggauuugaa

SEQ ID NO: 1720380 - RNA, 19 nt, Homo sapiens
  misc_RNA (1)...(19): siRNA sense strand
gagcaagaauaccaagaca

SEQ ID NO: 1720381 - RNA, 19 nt, Homo sapiens
  misc_RNA (1)...(19): siRNA sense strand
cacuauaucugucuaagga

SEQ ID NO: 1720382 - RNA, 19 nt, Homo sapiens
  misc_RNA (1)...(19): siRNA sense strand
ccucagcucuucuggaaug

SEQ ID NO: 1720383 - RNA, 19 nt, Homo sapiens
  misc_RNA (1)...(19): siRNA sense strand
caaaggacuugaacaacuc

SEQ ID NO: 1720384 - RNA, 19 nt, Homo sapiens
  misc_RNA (1)...(19): siRNA sense strand
cgacgacgaugaugaugau

SEQ ID NO: 1720385 - RNA, 19 nt, Homo sapiens
  misc_RNA (1)...(19): siRNA sense strand
aagaguggcuacagauuga

SEQ ID NO: 1720386 - RNA, 19 nt, Homo sapiens
  misc_RNA (1)...(19): siRNA sense strand
ggaaagaucagugaagaca

SEQ ID NO: 1720387 - RNA, 19 nt, Homo sapiens
  misc_RNA (1)...(19): siRNA sense strand
aacagaagcuaaauccaaa

SEQ ID NO: 1720388 - RNA, 19 nt, Homo sapiens
  misc_RNA (1)...(19): siRNA sense strand
agaaaucugugagaaagaa

SEQ ID NO: 1720389 - RNA, 19 nt, Homo sapiens
  misc_RNA (1)...(19): siRNA sense strand
ggcaagaacaguauuauag

SEQ ID NO: 1720390 - RNA, 19 nt, Homo sapiens
  misc_RNA (1)...(19): siRNA sense strand
gaaaaccacugaccuuauc

SEQ ID NO: 1720391 - RNA, 19 nt, Homo sapiens
  misc_RNA (1)...(19): siRNA sense strand
acagaaaucguuugugaaa

SEQ ID NO: 1720392 - RNA, 19 nt, Homo sapiens
  misc_RNA (1)...(19): siRNA sense strand
caaggaggaaggcauuuaa

SEQ ID NO: 1720393 - RNA, 19 nt, Homo sapiens
  misc_RNA (1)...(19): siRNA sense strand
gggaugcccuucucaugga

SEQ ID NO: 1720394 - RNA, 19 nt, Homo sapiens
  misc_RNA (1)...(19): siRNA sense strand
gaaaggaaagaucagugaa

SEQ ID NO: 1720395 - RNA, 19 nt, Homo sapiens
  misc_RNA (1)...(19): siRNA sense strand
agaagaagcgcaaaguaaa

SEQ ID NO: 1720396 - RNA, 19 nt, Homo sapiens
  misc_RNA (1)...(19): siRNA sense strand
gcgagaacauauuaaacug

SEQ ID NO: 1720397 - RNA, 19 nt, Homo sapiens
  misc_RNA (1)...(19): siRNA sense strand
gcaagaacaguauuauagu

SEQ ID NO: 1720398 - RNA, 19 nt, Homo sapiens
  misc_RNA (1)...(19): siRNA sense strand
ugaaaugacccaaaaguua

SEQ ID NO: 1720399 - RNA, 19 nt, Homo sapiens
  misc_RNA (1)...(19): siRNA sense strand
ugaagaaggagguaaauuc

SEQ ID NO: 1720400 - RNA, 19 nt, Homo sapiens
  misc_RNA (1)...(19): siRNA sense strand
caacagaaaucguuuguga

SEQ ID NO: 1720401 - RNA, 19 nt, Homo sapiens
  misc_RNA (1)...(19): siRNA sense strand
gaugaugacucaacuauug

SEQ ID NO: 1720402 - RNA, 19 nt, Homo sapiens
  misc_RNA (1)...(19): siRNA sense strand
ccacugaccuuaucaaaga

SEQ ID NO: 1720403 - RNA, 19 nt, Homo sapiens
  misc_RNA (1)...(19): siRNA sense strand
gcaauuggcugcuuugaca

SEQ ID NO: 1720404 - RNA, 19 nt, Homo sapiens
  misc_RNA (1)...(19): siRNA sense strand
gaacaucucccauuugaau

SEQ ID NO: 1720405 - RNA, 19 nt, Homo sapiens
  misc_RNA (1)...(19): siRNA sense strand
gaagauaacagaagcuaaa

SEQ ID NO: 1720406 - RNA, 19 nt, Homo sapiens
  misc_RNA (1)...(19): siRNA sense strand
ggaccuggcuaugcaaaua

SEQ ID NO: 1720407 - RNA, 19 nt, Homo sapiens
  misc_RNA (1)...(19): siRNA sense strand
gagaauagcaguuuaugaa

SEQ ID NO: 1720408 - RNA, 19 nt, Homo sapiens
  misc_RNA (1)...(19): siRNA sense strand
gaauagcaguuuaugaaga

SEQ ID NO: 1720409 - RNA, 19 nt, Homo sapiens
  misc_RNA (1)...(19): siRNA sense strand
gaagaaaucacacaaguca

SEQ ID NO: 1720410 - RNA, 19 nt, Homo sapiens
  misc_RNA (1)...(19): siRNA sense strand
gaaaggaaccagccucuga

SEQ ID NO: 1720411 - RNA, 19 nt, Homo sapiens
  misc_RNA (1)...(19): siRNA sense strand
gaaaugaaagaccugguua

SEQ ID NO: 1720412 - RNA, 19 nt, Homo sapiens
  misc_RNA (1)...(19): siRNA sense strand
caaaugagguuuucaguuu

SEQ ID NO: 1720413 - RNA, 19 nt, Homo sapiens
  misc_RNA (1)...(19): siRNA sense strand
gaaacuggauuugaaugaa

SEQ ID NO: 1720414 - RNA, 19 nt, Homo sapiens
  misc_RNA (1)...(19): siRNA sense strand
gcacuuaauuuccagacaa

SEQ ID NO: 1720415 - RNA, 19 nt, Homo sapiens
  misc_RNA (1)...(19): siRNA sense strand
gaacagagagcuaagcaau

SEQ ID NO: 1720416 - RNA, 19 nt, Homo sapiens
  misc_RNA (1)...(19): siRNA sense strand
gugaacaucucccauuuga

SEQ ID NO: 1720417 - RNA, 19 nt, Homo sapiens
  misc_RNA (1)...(19): siRNA sense strand
ugaaagaccugguuaagag

SEQ ID NO: 1720418 - RNA, 19 nt, Homo sapiens
  misc_RNA (1)...(19): siRNA sense strand
gcuggaaacuccucuguug

SEQ ID NO: 1720419 - RNA, 19 nt, Homo sapiens
  misc_RNA (1)...(19): siRNA sense strand
gaaugcagguugucagaug

SEQ ID NO: 1720420 - RNA, 19 nt, Homo sapiens
  misc_RNA (1)...(19): siRNA sense strand
gaacacguguggauucauc

SEQ ID NO: 1720421 - RNA, 19 nt, Homo sapiens
  misc_RNA (1)...(19): siRNA sense strand
gaagcuaaauccaaagaca

SEQ ID NO: 1720422 - RNA, 19 nt, Homo sapiens
  misc_RNA (1)...(19): siRNA sense strand
ugucuaaucuggugaacua

SEQ ID NO: 1720423 - RNA, 19 nt, Homo sapiens
  misc_RNA (1)...(19): siRNA sense strand
ggaaauacgucagcagauc

SEQ ID NO: 1720424 - RNA, 19 nt, Homo sapiens
  misc_RNA (1)...(19): siRNA sense strand
caaaguaaacggcaagaaa

SEQ ID NO: 1720425 - RNA, 19 nt, Homo sapiens
  misc_RNA (1)...(19): siRNA sense strand
gagaacgacuccagcagaa

SEQ ID NO: 1720426 - RNA, 19 nt, Homo sapiens
  misc_RNA (1)...(19): siRNA sense strand
cagaagaaaugucuaaucu

SEQ ID NO: 1720427 - RNA, 19 nt, Homo sapiens
  misc_RNA (1)...(19): siRNA sense strand
gaagcgagaacauauuaaa

SEQ ID NO: 1720428 - RNA, 19 nt, Homo sapiens
  misc_RNA (1)...(19): siRNA sense strand
agaaggagguaaauucauu

SEQ ID NO: 1720429 - RNA, 19 nt, Homo sapiens
  misc_RNA (1)...(19): siRNA sense strand
gaacacacuaccaaguaua

SEQ ID NO: 1720430 - RNA, 19 nt, Homo sapiens
  misc_RNA (1)...(19): siRNA sense strand
gaucaugguucaucaacga

SEQ ID NO: 1720431 - RNA, 19 nt, Homo sapiens
  misc_RNA (1)...(19): siRNA sense strand
ccaaggaaaugcugugaau

SEQ ID NO: 1720432 - RNA, 19 nt, Homo sapiens
  misc_RNA (1)...(19): siRNA sense strand
gaacuaaagcaacagaaau

SEQ ID NO: 1720433 - RNA, 19 nt, Homo sapiens
  misc_RNA (1)...(19): siRNA sense strand
acagagagcuaagcaauug

SEQ ID NO: 1720434 - RNA, 19 nt, Homo sapiens
  misc_RNA (1)...(19): siRNA sense strand
caucgaagcuuuaucaaac

SEQ ID NO: 1720435 - RNA, 19 nt, Homo sapiens
  misc_RNA (1)...(19): siRNA sense strand
gaagaaggagguaaauuca

SEQ ID NO: 1720436 - RNA, 19 nt, Homo sapiens
  misc_RNA (1)...(19): siRNA sense strand
gaagaguggcuacagauug

SEQ ID NO: 1720437 - RNA, 19 nt, Homo sapiens
  misc_RNA (1)...(19): siRNA sense strand
ggucauauauccaggaagu

SEQ ID NO: 1720438 - RNA, 19 nt, Homo sapiens
  misc_RNA (1)...(19): siRNA sense strand
caagugggaugaugacuca

SEQ ID NO: 1720439 - RNA, 19 nt, Homo sapiens
  misc_RNA (1)...(19): siRNA sense strand
gaagaagaaccuauugugu

SEQ ID NO: 1720440 - RNA, 19 nt, Homo sapiens
  misc_RNA (1)...(19): siRNA sense strand
ucaaagaaaucugugagaa

SEQ ID NO: 1720441 - RNA, 19 nt, Homo sapiens
  misc_RNA (1)...(19): siRNA sense strand
gcagaagagugucagaaca

SEQ ID NO: 1720442 - RNA, 19 nt, Homo sapiens
  misc_RNA (1)...(19): siRNA sense strand
caagaacaguauuauagug

SEQ ID NO: 1720443 - RNA, 19 nt, Homo sapiens
  misc_RNA (1)...(19): siRNA sense strand
ggaagaugaagaagaagua

SEQ ID NO: 1720444 - RNA, 19 nt, Homo sapiens
  misc_RNA (1)...(19): siRNA sense strand
ccagaaguguacagaguuu

SEQ ID NO: 1720445 - RNA, 19 nt, Homo sapiens
  misc_RNA (1)...(19): siRNA sense strand
caaagaaaucugugagaaa

SEQ ID NO: 1720446 - RNA, 19 nt, Homo sapiens
  misc_RNA (1)...(19): siRNA sense strand
cagaagcgagaacauauua

SEQ ID NO: 1720447 - RNA, 19 nt, Homo sapiens
  misc_RNA (1)...(19): siRNA sense strand
cagaaugacuacuugagaa

SEQ ID NO: 1720448 - RNA, 19 nt, Homo sapiens
  misc_RNA (1)...(19): siRNA sense strand
gcaccaaauucgucaagug

SEQ ID NO: 1720449 - RNA, 19 nt, Homo sapiens
  misc_RNA (1)...(19): siRNA sense strand
uaagagacaccacaagaaa

SEQ ID NO: 1720450 - RNA, 19 nt, Homo sapiens
  misc_RNA (1)...(19): siRNA sense strand
gcacaacaccuaccucaca

SEQ ID NO: 1720451 - RNA, 19 nt, Homo sapiens
  misc_RNA (1)...(19): siRNA sense strand
caugacaacugaaauaucu

SEQ ID NO: 1720452 - RNA, 19 nt, Homo sapiens
  misc_RNA (1)...(19): siRNA sense strand
gaccugaaauugauaacau

SEQ ID NO: 1720453 - RNA, 19 nt, Homo sapiens
  misc_RNA (1)...(19): siRNA sense strand
uaacagaagcuaaauccaa

SEQ ID NO: 1720454 - RNA, 19 nt, Homo sapiens
  misc_RNA (1)...(19): siRNA sense strand
caucagaggcuccaaguga

SEQ ID NO: 1720455 - RNA, 19 nt, Homo sapiens
  misc_RNA (1)...(19): siRNA sense strand
ggaaggcauuuaagaccaa

SEQ ID NO: 1720456 - RNA, 19 nt, Homo sapiens
  misc_RNA (1)...(19): siRNA sense strand
ccaaaggacuugaacaacu

SEQ ID NO: 1720457 - RNA, 19 nt, Homo sapiens
  misc_RNA (1)...(19): siRNA sense strand
agacagagcuacuggaucu

SEQ ID NO: 1720458 - RNA, 19 nt, Homo sapiens
  misc_RNA (1)...(19): siRNA sense strand
ggauuugaaugaagacaug

SEQ ID NO: 1720459 - RNA, 19 nt, Homo sapiens
  misc_RNA (1)...(19): siRNA sense strand
aaccauaucuuaccguuga

SEQ ID NO: 1720460 - RNA, 19 nt, Homo sapiens
  misc_RNA (1)...(19): siRNA sense strand
ugucaaagaugccagaugu

SEQ ID NO: 1720461 - RNA, 19 nt, Homo sapiens
  misc_RNA (1)...(19): siRNA sense strand
uagaagaagcgcaaaguaa

SEQ ID NO: 1720462 - RNA, 19 nt, Homo sapiens
  misc_RNA (1)...(19): siRNA sense strand
ggaagaagaaccuauugug

SEQ ID NO: 1720463 - RNA, 19 nt, Homo sapiens
  misc_RNA (1)...(19): siRNA sense strand
ucucguggcuuuccaagaa

SEQ ID NO: 1720464 - RNA, 19 nt, Homo sapiens
  misc_RNA (1)...(19): siRNA sense strand
gccaaggaauggacaaaug

SEQ ID NO: 1720465 - RNA, 19 nt, Homo sapiens
  misc_RNA (1)...(19): siRNA sense strand
aaagaaaucugugagaaag

SEQ ID NO: 1720466 - RNA, 19 nt, Homo sapiens
  misc_RNA (1)...(19): siRNA sense strand
ugacggaugucgcagaaga

SEQ ID NO: 1720467 - RNA, 19 nt, Homo sapiens
  misc_RNA (1)...(19): siRNA sense strand
gaaaugacccaaaaguuaa

SEQ ID NO: 1720468 - RNA, 19 nt, Homo sapiens
  misc_RNA (1)...(19): siRNA sense strand
ccacagaagaaaugucuaa

SEQ ID NO: 1720469 - RNA, 19 nt, Homo sapiens
  misc_RNA (1)...(19): siRNA sense strand
ucaagaagggcaccaaauu

SEQ ID NO: 1720470 - RNA, 19 nt, Homo sapiens
  misc_RNA (1)...(19): siRNA sense strand
acauagaagugaaagacua

SEQ ID NO: 1720471 - RNA, 19 nt, Homo sapiens
  misc_RNA (1)...(19): siRNA sense strand
gcaaguccaaguauugauu

SEQ ID NO: 1720472 - RNA, 19 nt, Homo sapiens
  misc_RNA (1)...(19): siRNA sense strand
gaaacacuacaaagaaaug

SEQ ID NO: 1720473 - RNA, 19 nt, Homo sapiens
  misc_RNA (1)...(19): siRNA sense strand
ggaaguagauauguuuggu

SEQ ID NO: 1720474 - RNA, 19 nt, Homo sapiens
  misc_RNA (1)...(19): siRNA sense strand
caguggaauuuguagaaua

SEQ ID NO: 1720475 - RNA, 19 nt, Homo sapiens
  misc_RNA (1)...(19): siRNA sense strand
aaacuccucuguugagaug

SEQ ID NO: 1720476 - RNA, 19 nt, Homo sapiens
  misc_RNA (1)...(19): siRNA sense strand
ggaaacuccucuguugaga

SEQ ID NO: 1720477 - RNA, 19 nt, Homo sapiens
  misc_RNA (1)...(19): siRNA sense strand
cugagaaacuggauuugaa

SEQ ID NO: 1720478 - RNA, 19 nt, Homo sapiens
  misc_RNA (1)...(19): siRNA sense strand
cacuauaucugucuaagga

SEQ ID NO: 1720479 - RNA, 19 nt, Homo sapiens
  misc_RNA (1)...(19): siRNA sense strand
ccucagcucuucuggaaug

SEQ ID NO: 1720480 - RNA, 19 nt, Homo sapiens
  misc_RNA (1)...(19): siRNA sense strand
caaaggacuugaacaacuc

SEQ ID NO: 1720481 - RNA, 19 nt, Homo sapiens
  misc_RNA (1)...(19): siRNA sense strand
cgacgacgaugaugaugau

SEQ ID NO: 1720482 - RNA, 19 nt, Homo sapiens
  misc_RNA (1)...(19): siRNA sense strand
aagaguggcuacagauuga

SEQ ID NO: 1720483 - RNA, 19 nt, Homo sapiens
  misc_RNA (1)...(19): siRNA sense strand
aacagaagcuaaauccaaa

SEQ ID NO: 1720484 - RNA, 19 nt, Homo sapiens
  misc_RNA (1)...(19): siRNA sense strand
agaaaucugugagaaagaa

SEQ ID NO: 1720485 - RNA, 19 nt, Homo sapiens
  misc_RNA (1)...(19): siRNA sense strand
ggcaagaacaguauuauag

SEQ ID NO: 1720486 - RNA, 19 nt, Homo sapiens
  misc_RNA (1)...(19): siRNA sense strand
gaaaaccacugaccuuauc

SEQ ID NO: 1720487 - RNA, 19 nt, Homo sapiens
  misc_RNA (1)...(19): siRNA sense strand
acagaaaucguuugugaaa

SEQ ID NO: 1720488 - RNA, 19 nt, Homo sapiens
  misc_RNA (1)...(19): siRNA sense strand
caaggaggaaggcauuuaa

SEQ ID NO: 1720489 - RNA, 19 nt, Homo sapiens
  misc_RNA (1)...(19): siRNA sense strand
aagaagaaguggccaagga

SEQ ID NO: 1720490 - RNA, 19 nt, Homo sapiens
  misc_RNA (1)...(19): siRNA sense strand
agaagaagcgcaaaguaaa

SEQ ID NO: 1720491 - RNA, 19 nt, Homo sapiens
  misc_RNA (1)...(19): siRNA sense strand
gcgagaacauauuaaacug

SEQ ID NO: 1720492 - RNA, 19 nt, Homo sapiens
  misc_RNA (1)...(19): siRNA sense strand
gcaagaacaguauuauagu

SEQ ID NO: 1720493 - RNA, 19 nt, Homo sapiens
  misc_RNA (1)...(19): siRNA sense strand
ugaaaugacccaaaaguua

SEQ ID NO: 1720494 - RNA, 19 nt, Homo sapiens
  misc_RNA (1)...(19): siRNA sense strand
ugaagaaggagguaaauuc

SEQ ID NO: 1720495 - RNA, 19 nt, Homo sapiens
  misc_RNA (1)...(19): siRNA sense strand
gggaugcccuucucaugga

SEQ ID NO: 1720496 - RNA, 19 nt, Homo sapiens
  misc_RNA (1)...(19): siRNA sense strand
gacgcugccugcugucuuu

SEQ ID NO: 1720497 - RNA, 19 nt, Homo sapiens
  misc_RNA (1)...(19): siRNA sense strand
uaauagacuugaaggacaa

SEQ ID NO: 1720498 - RNA, 19 nt, Homo sapiens
  misc_RNA (1)...(19): siRNA sense strand
gaagaagaaguaaagaaag

SEQ ID NO: 1720499 - RNA, 19 nt, Homo sapiens
  misc_RNA (1)...(19): siRNA sense strand
gaagaugaagaagaaguaa

SEQ ID NO: 1720500 - RNA, 19 nt, Homo sapiens
  misc_RNA (1)...(19): siRNA sense strand
gaagaagccuuauugguaa

SEQ ID NO: 1720501 - RNA, 19 nt, Homo sapiens
  misc_RNA (1)...(19): siRNA sense strand
ggaagaagccuuauuggua

SEQ ID NO: 1720502 - RNA, 19 nt, Homo sapiens
  misc_RNA (1)...(19): siRNA sense strand
gaagauugccuaucacaua

SEQ ID NO: 1720503 - RNA, 19 nt, Homo sapiens
  misc_RNA (1)...(19): siRNA sense strand
ugggagacauguucaauua

SEQ ID NO: 1720504 - RNA, 19 nt, Homo sapiens
  misc_RNA (1)...(19): siRNA sense strand
gaaaaggaguuacaguuga

SEQ ID NO: 1720505 - RNA, 19 nt, Homo sapiens
  misc_RNA (1)...(19): siRNA sense strand
caauauggcugcugauucu

SEQ ID NO: 1720506 - RNA, 19 nt, Homo sapiens
  misc_RNA (1)...(19): siRNA sense strand
gggaagcucuuuguaaugu

SEQ ID NO: 1720507 - RNA, 19 nt, Homo sapiens
  misc_RNA (1)...(19): siRNA sense strand
ggcaacaacuggauuuaug

SEQ ID NO: 1720508 - RNA, 19 nt, Homo sapiens
  misc_RNA (1)...(19): siRNA sense strand
caaagaaacacuccaggaa

SEQ ID NO: 1720509 - RNA, 19 nt, Homo sapiens
  misc_RNA (1)...(19): siRNA sense strand
uaaagcagaugcaaguauc

SEQ ID NO: 1720510 - RNA, 19 nt, Homo sapiens
  misc_RNA (1)...(19): siRNA sense strand
ggagacauguucaauuacu

SEQ ID NO: 1720511 - RNA, 19 nt, Homo sapiens
  misc_RNA (1)...(19): siRNA sense strand
gguauugggucaucgugaa

SEQ ID NO: 1720512 - RNA, 19 nt, Homo sapiens
  misc_RNA (1)...(19): siRNA sense strand
aagaaacacuccaggaaau

SEQ ID NO: 1720513 - RNA, 19 nt, Homo sapiens
  misc_RNA (1)...(19): siRNA sense strand
ucacauacauggcaacaac

SEQ ID NO: 1720514 - RNA, 19 nt, Homo sapiens
  misc_RNA (1)...(19): siRNA sense strand
gaagagggccaucaaacuc

SEQ ID NO: 1720515 - RNA, 19 nt, Homo sapiens
  misc_RNA (1)...(19): siRNA sense strand
ccauguaccugaucugcuu

SEQ ID NO: 1720516 - RNA, 19 nt, Homo sapiens
  misc_RNA (1)...(19): siRNA sense strand
cuaguaaccuucugcuugu

SEQ ID NO: 1720517 - RNA, 19 nt, Homo sapiens
  misc_RNA (1)...(19): siRNA sense strand
gcaucucccuggcaauaug

SEQ ID NO: 1720518 - RNA, 19 nt, Homo sapiens
  misc_RNA (1)...(19): siRNA sense strand
caaguucaaccacuguuaa

SEQ ID NO: 1720519 - RNA, 19 nt, Homo sapiens
  misc_RNA (1)...(19): siRNA sense strand
gcaauauggcugcugauuc

SEQ ID NO: 1720520 - RNA, 19 nt, Homo sapiens
  misc_RNA (1)...(19): siRNA sense strand
aaagaaacacuccaggaaa

SEQ ID NO: 1720521 - RNA, 19 nt, Homo sapiens
  misc_RNA (1)...(19): siRNA sense strand
guaaagcagaugcaaguau

SEQ ID NO: 1720522 - RNA, 19 nt, Homo sapiens
  misc_RNA (1)...(19): siRNA sense strand
gugguggguuugccaagua

SEQ ID NO: 1720523 - RNA, 19 nt, Homo sapiens
  misc_RNA (1)...(19): siRNA sense strand
ccuugaagauugccuauca

SEQ ID NO: 1720524 - RNA, 19 nt, Homo sapiens
  misc_RNA (1)...(19): siRNA sense strand
gagacauguucaauuacuu

SEQ ID NO: 1720525 - RNA, 19 nt, Homo sapiens
  misc_RNA (1)...(19): siRNA sense strand
gcagagguauugggucauc

SEQ ID NO: 1720526 - RNA, 19 nt, Homo sapiens
  misc_RNA (1)...(19): siRNA sense strand
caucuguccucacuggaaa

SEQ ID NO: 1720527 - RNA, 19 nt, Homo sapiens
  misc_RNA (1)...(19): siRNA sense strand
gaugaaaacucagagaaga

SEQ ID NO: 1720528 - RNA, 19 nt, Homo sapiens
  misc_RNA (1)...(19): siRNA sense strand
ggaagagggccaucaaacu

SEQ ID NO: 1720529 - RNA, 19 nt, Homo sapiens
  misc_RNA (1)...(19): siRNA sense strand
ucaauuacuuccucucucu

SEQ ID NO: 1720530 - RNA, 19 nt, Homo sapiens
  misc_RNA (1)...(19): siRNA sense strand
aaguaucccucaccucaaa

SEQ ID NO: 1720531 - RNA, 19 nt, Homo sapiens
  misc_RNA (1)...(19): siRNA sense strand
ucagggaucaugcaaagaa

SEQ ID NO: 1720532 - RNA, 19 nt, Homo sapiens
  misc_RNA (1)...(19): siRNA sense strand
uggcugaccuccucucugu

SEQ ID NO: 1720533 - RNA, 19 nt, Homo sapiens
  misc_RNA (1)...(19): siRNA sense strand
ggaaaaggaguuacaguug

SEQ ID NO: 1720534 - RNA, 19 nt, Homo sapiens
  misc_RNA (1)...(19): siRNA sense strand
gaaauccagcucuuacucu

SEQ ID NO: 1720535 - RNA, 19 nt, Homo sapiens
  misc_RNA (1)...(19): siRNA sense strand
ucuaugcccuguacauugu

SEQ ID NO: 1720536 - RNA, 19 nt, Homo sapiens
  misc_RNA (1)...(19): siRNA sense strand
ccaggaaauccagcucuua

SEQ ID NO: 1720537 - RNA, 19 nt, Homo sapiens
  misc_RNA (1)...(19): siRNA sense strand
gaguuacaguugaaacagu

SEQ ID NO: 1720538 - RNA, 19 nt, Homo sapiens
  misc_RNA (1)...(19): siRNA sense strand
ucaaguucaaccacuguua

SEQ ID NO: 1720539 - RNA, 19 nt, Homo sapiens
  misc_RNA (1)...(19): siRNA sense strand
ccucacagccucugccuau

SEQ ID NO: 1720540 - RNA, 19 nt, Homo sapiens
  misc_RNA (1)...(19): siRNA sense strand
gcucuuacucuucaaguuc

SEQ ID NO: 1720541 - RNA, 19 nt, Homo sapiens
  misc_RNA (1)...(19): siRNA sense strand
ggaaauccagcucuuacuc

SEQ ID NO: 1720542 - RNA, 19 nt, Homo sapiens
  misc_RNA (1)...(19): siRNA sense strand
aagcagaccaucuucauuc

SEQ ID NO: 1720543 - RNA, 19 nt, Homo sapiens
  misc_RNA (1)...(19): siRNA sense strand
gaacaucacgaccugucau

SEQ ID NO: 1720544 - RNA, 19 nt, Homo sapiens
  misc_RNA (1)...(19): siRNA sense strand
ggaagcucuuuguaaugug

SEQ ID NO: 1720545 - RNA, 19 nt, Homo sapiens
  misc_RNA (1)...(19): siRNA sense strand
uaaugugcuuauuggcuuu

SEQ ID NO: 1720546 - RNA, 19 nt, Homo sapiens
  misc_RNA (1)...(19): siRNA sense strand
gcaacaacuggauuuaugg

SEQ ID NO: 1720547 - RNA, 19 nt, Homo sapiens
  misc_RNA (1)...(19): siRNA sense strand
aaauccagcucuuacucuu

SEQ ID NO: 1720548 - RNA, 19 nt, Homo sapiens
  misc_RNA (1)...(19): siRNA sense strand
ccacgucacuggaaaagga

SEQ ID NO: 1720549 - RNA, 19 nt, Homo sapiens
  misc_RNA (1)...(19): siRNA sense strand
guagcccucugccucucua

SEQ ID NO: 1720550 - RNA, 19 nt, Homo sapiens
  misc_RNA (1)...(19): siRNA sense strand
caucccacgucacuggaaa

SEQ ID NO: 1720551 - RNA, 19 nt, Homo sapiens
  misc_RNA (1)...(19): siRNA sense strand
gcaucuguccucacuggaa

SEQ ID NO: 1720552 - RNA, 19 nt, Homo sapiens
  misc_RNA (1)...(19): siRNA sense strand
guacuguuccauucucuuc

SEQ ID NO: 1720553 - RNA, 19 nt, Homo sapiens
  misc_RNA (1)...(19): siRNA sense strand
gcacccugcugugauuuac

SEQ ID NO: 1720554 - RNA, 19 nt, Homo sapiens
  misc_RNA (1)...(19): siRNA sense strand
uggcaucucccuggcaaua

SEQ ID NO: 1720555 - RNA, 19 nt, Homo sapiens
  misc_RNA (1)...(19): siRNA sense strand
aagauugccuaucacauac

SEQ ID NO: 1720556 - RNA, 19 nt, Homo sapiens
  misc_RNA (1)...(19): siRNA sense strand
aaaaggaguuacaguugaa

SEQ ID NO: 1720557 - RNA, 19 nt, Homo sapiens
  misc_RNA (1)...(19): siRNA sense strand
uuucagggaucaugcaaag

SEQ ID NO: 1720558 - RNA, 19 nt, Homo sapiens
  misc_RNA (1)...(19): siRNA sense strand
ucacagccucugccuaugu

SEQ ID NO: 1720559 - RNA, 19 nt, Homo sapiens
  misc_RNA (1)...(19): siRNA sense strand
cugaucugcuucacuccua

SEQ ID NO: 1720560 - RNA, 19 nt, Homo sapiens
  misc_RNA (1)...(19): siRNA sense strand
gauugccuaucacauacau

SEQ ID NO: 1720561 - RNA, 19 nt, Homo sapiens
  misc_RNA (1)...(19): siRNA sense strand
gcucuccuuugccgaagug

SEQ ID NO: 1720562 - RNA, 19 nt, Homo sapiens
  misc_RNA (1)...(19): siRNA sense strand
aaaggaagagggccaucaa

SEQ ID NO: 1720563 - RNA, 19 nt, Homo sapiens
  misc_RNA (1)...(19): siRNA sense strand
caggaagaaggcaaacauu

SEQ ID NO: 1720564 - RNA, 19 nt, Homo sapiens
  misc_RNA (1)...(19): siRNA sense strand
ccaggaagaaggcaaacau

SEQ ID NO: 1720565 - RNA, 19 nt, Homo sapiens
  misc_RNA (1)...(19): siRNA sense strand
gcauggcccugugggucuu

SEQ ID NO: 1720566 - RNA, 19 nt, Homo sapiens
  misc_RNA (1)...(19): siRNA sense strand
caccaucccuuuguauguc

SEQ ID NO: 1720567 - RNA, 19 nt, Homo sapiens
  misc_RNA (1)...(19): siRNA sense strand
cauggcaacaacuggauuu

SEQ ID NO: 1720568 - RNA, 19 nt, Homo sapiens
  misc_RNA (1)...(19): siRNA sense strand
aggaagaaggcaaacauug

SEQ ID NO: 1720569 - RNA, 19 nt, Homo sapiens
  misc_RNA (1)...(19): siRNA sense strand
uguuaagaccuccuauuga

SEQ ID NO: 1720570 - RNA, 19 nt, Homo sapiens
  misc_RNA (1)...(19): siRNA sense strand
gugggagacauguucaauu

SEQ ID NO: 1720571 - RNA, 19 nt, Homo sapiens
  misc_RNA (1)...(19): siRNA sense strand
ggucaccaucccuuuguau

SEQ ID NO: 1720572 - RNA, 19 nt, Homo sapiens
  misc_RNA (1)...(19): siRNA sense strand
ggcaauauggcugcugauu

SEQ ID NO: 1720573 - RNA, 19 nt, Homo sapiens
  misc_RNA (1)...(19): siRNA sense strand
ccacugucuuccuuccaau

SEQ ID NO: 1720574 - RNA, 19 nt, Homo sapiens
  misc_RNA (1)...(19): siRNA sense strand
cuguuaagaccuccuauug

SEQ ID NO: 1720575 - RNA, 19 nt, Homo sapiens
  misc_RNA (1)...(19): siRNA sense strand
ccaugucuaugcccuguac

SEQ ID NO: 1720576 - RNA, 19 nt, Homo sapiens
  misc_RNA (1)...(19): siRNA sense strand
ggccagagccaugucuaug

SEQ ID NO: 1720577 - RNA, 19 nt, Homo sapiens
  misc_RNA (1)...(19): siRNA sense strand
ugcuuguggugcauuauuu

SEQ ID NO: 1720578 - RNA, 19 nt, Homo sapiens
  misc_RNA (1)...(19): siRNA sense strand
cacgaccugucaugauguu

SEQ ID NO: 1720579 - RNA, 19 nt, Homo sapiens
  misc_RNA (1)...(19): siRNA sense strand
ucaccaucccuuuguaugu

SEQ ID NO: 1720580 - RNA, 19 nt, Homo sapiens
  misc_RNA (1)...(19): siRNA sense strand
gcccugugggucuuucuuu

SEQ ID NO: 1720581 - RNA, 19 nt, Homo sapiens
  misc_RNA (1)...(19): siRNA sense strand
caaguaucccucaccucaa

SEQ ID NO: 1720582 - RNA, 19 nt, Homo sapiens
  misc_RNA (1)...(19): siRNA sense strand
gaccuccucucugucaucu

SEQ ID NO: 1720583 - RNA, 19 nt, Homo sapiens
  misc_RNA (1)...(19): siRNA sense strand
agacauguucaauuacuuc

SEQ ID NO: 1720584 - RNA, 19 nt, Homo sapiens
  misc_RNA (1)...(19): siRNA sense strand
uuuguaaugugcuuauugg

SEQ ID NO: 1720585 - RNA, 19 nt, Homo sapiens
  misc_RNA (1)...(19): siRNA sense strand
caggaaauccagcucuuac

SEQ ID NO: 1720586 - RNA, 19 nt, Homo sapiens
  misc_RNA (1)...(19): siRNA sense strand
gucuaugcccuguacauug

SEQ ID NO: 1720587 - RNA, 19 nt, Homo sapiens
  misc_RNA (1)...(19): siRNA sense strand
gggccagagccaugucuau

SEQ ID NO: 1720588 - RNA, 19 nt, Homo sapiens
  misc_RNA (1)...(19): siRNA sense strand
cauguacuguuccauucuc

SEQ ID NO: 1720589 - RNA, 19 nt, Homo sapiens
  misc_RNA (1)...(19): siRNA sense strand
ccacuguuaagaccuccua

SEQ ID NO: 1720590 - RNA, 19 nt, Homo sapiens
  misc_RNA (1)...(19): siRNA sense strand
cauccaaggaaccaauaga

SEQ ID NO: 1720591 - RNA, 19 nt, Homo sapiens
  misc_RNA (1)...(19): siRNA sense strand
gcucuuggugggagacaug

SEQ ID NO: 1720592 - RNA, 19 nt, Homo sapiens
  misc_RNA (1)...(19): siRNA sense strand
ucagugugcagagguauug

SEQ ID NO: 1720593 - RNA, 19 nt, Homo sapiens
  misc_RNA (1)...(19): siRNA sense strand
caacaacacugauggcuua

SEQ ID NO: 1720594 - RNA, 19 nt, Homo sapiens
  misc_RNA (1)...(19): siRNA sense strand
gcaggaauauuaucuuguu

SEQ ID NO: 1720595 - RNA, 19 nt, Homo sapiens
  misc_RNA (1)...(19): siRNA sense strand
gcacaccuaugccuuggua

SEQ ID NO: 1720596 - RNA, 19 nt, Homo sapiens
  misc_RNA (1)...(19): siRNA sense strand
caacacugauggcuuauau

SEQ ID NO: 1720597 - RNA, 19 nt, Homo sapiens
  misc_RNA (1)...(19): siRNA sense strand
gaaaucacuccacugcuua

SEQ ID NO: 1720598 - RNA, 19 nt, Homo sapiens
  misc_RNA (1)...(19): siRNA sense strand
aagccaaccuuacccauua

SEQ ID NO: 1720599 - RNA, 19 nt, Homo sapiens
  misc_RNA (1)...(19): siRNA sense strand
gggaacaacuggguauuug

SEQ ID NO: 1720600 - RNA, 19 nt, Homo sapiens
  misc_RNA (1)...(19): siRNA sense strand
ggcauucuuuggauucuua

SEQ ID NO: 1720601 - RNA, 19 nt, Homo sapiens
  misc_RNA (1)...(19): siRNA sense strand
uaagugcccugaagaaagu

SEQ ID NO: 1720602 - RNA, 19 nt, Homo sapiens
  misc_RNA (1)...(19): siRNA sense strand
gcuuagauccauuccuuua

SEQ ID NO: 1720603 - RNA, 19 nt, Homo sapiens
  misc_RNA (1)...(19): siRNA sense strand
agaaaucacuccacugcuu

SEQ ID NO: 1720604 - RNA, 19 nt, Homo sapiens
  misc_RNA (1)...(19): siRNA sense strand
gaacaacuggguauuugga

SEQ ID NO: 1720605 - RNA, 19 nt, Homo sapiens
  misc_RNA (1)...(19): siRNA sense strand
uguguuacauugcccuuua

SEQ ID NO: 1720606 - RNA, 19 nt, Homo sapiens
  misc_RNA (1)...(19): siRNA sense strand
gccaucauccggacacuua

SEQ ID NO: 1720607 - RNA, 19 nt, Homo sapiens
  misc_RNA (1)...(19): siRNA sense strand
cugaccagcuccuuaagua

SEQ ID NO: 1720608 - RNA, 19 nt, Homo sapiens
  misc_RNA (1)...(19): siRNA sense strand
acacugauggcuuauauuu

SEQ ID NO: 1720609 - RNA, 19 nt, Homo sapiens
  misc_RNA (1)...(19): siRNA sense strand
gggcaacaguuuucuuaua

SEQ ID NO: 1720610 - RNA, 19 nt, Homo sapiens
  misc_RNA (1)...(19): siRNA sense strand
uacugaagcaggaauauua

SEQ ID NO: 1720611 - RNA, 19 nt, Homo sapiens
  misc_RNA (1)...(19): siRNA sense strand
cugcuuaccuuacaaaaua

SEQ ID NO: 1720612 - RNA, 19 nt, Homo sapiens
  misc_RNA (1)...(19): siRNA sense strand
ccaccacagucaucuucua

SEQ ID NO: 1720613 - RNA, 19 nt, Homo sapiens
  misc_RNA (1)...(19): siRNA sense strand
ccacagucaucuucuaugg

SEQ ID NO: 1720614 - RNA, 19 nt, Homo sapiens
  misc_RNA (1)...(19): siRNA sense strand
cauuugugcuuaucaucua

SEQ ID NO: 1720615 - RNA, 19 nt, Homo sapiens
  misc_RNA (1)...(19): siRNA sense strand
guaccugaccagcuccuua

SEQ ID NO: 1720616 - RNA, 19 nt, Homo sapiens
  misc_RNA (1)...(19): siRNA sense strand
cuuaauaguugcuuagauc

SEQ ID NO: 1720617 - RNA, 19 nt, Homo sapiens
  misc_RNA (1)...(19): siRNA sense strand
uggguagucuuaauaguug

SEQ ID NO: 1720618 - RNA, 19 nt, Homo sapiens
  misc_RNA (1)...(19): siRNA sense strand
aagcaggaauauuaucuug

SEQ ID NO: 1720619 - RNA, 19 nt, Homo sapiens
  misc_RNA (1)...(19): siRNA sense strand
uacauugcccuuuaagaua

SEQ ID NO: 1720620 - RNA, 19 nt, Homo sapiens
  misc_RNA (1)...(19): siRNA sense strand
ccaacucuauuacuucauc

SEQ ID NO: 1720621 - RNA, 19 nt, Homo sapiens
  misc_RNA (1)...(19): siRNA sense strand
ggaauauuaucuuguucag

SEQ ID NO: 1720622 - RNA, 19 nt, Homo sapiens
  misc_RNA (1)...(19): siRNA sense strand
ggacaggagccacgauuac

SEQ ID NO: 1720623 - RNA, 19 nt, Homo sapiens
  misc_RNA (1)...(19): siRNA sense strand
ucacuccacugcuuaccuu

SEQ ID NO: 1720624 - RNA, 19 nt, Homo sapiens
  misc_RNA (1)...(19): siRNA sense strand
agaugguugugguauguua

SEQ ID NO: 1720625 - RNA, 19 nt, Homo sapiens
  misc_RNA (1)...(19): siRNA sense strand
gaagcaggaauauuaucuu

SEQ ID NO: 1720626 - RNA, 19 nt, Homo sapiens
  misc_RNA (1)...(19): siRNA sense strand
agaaagugcuucacaucuc

SEQ ID NO: 1720627 - RNA, 19 nt, Homo sapiens
  misc_RNA (1)...(19): siRNA sense strand
uuacauugcccuuuaagau

SEQ ID NO: 1720628 - RNA, 19 nt, Homo sapiens
  misc_RNA (1)...(19): siRNA sense strand
ucuuauauaugcugccauu

SEQ ID NO: 1720629 - RNA, 19 nt, Homo sapiens
  misc_RNA (1)...(19): siRNA sense strand
ccaucuaccuccugguguu

SEQ ID NO: 1720630 - RNA, 19 nt, Homo sapiens
  misc_RNA (1)...(19): siRNA sense strand
ggcaacaguuuucuuauau

SEQ ID NO: 1720631 - RNA, 19 nt, Homo sapiens
  misc_RNA (1)...(19): siRNA sense strand
acauugcccuuuaagauag

SEQ ID NO: 1720632 - RNA, 19 nt, Homo sapiens
  misc_RNA (1)...(19): siRNA sense strand
uccggacacuuaaugcaua

SEQ ID NO: 1720633 - RNA, 19 nt, Homo sapiens
  misc_RNA (1)...(19): siRNA sense strand
uugcuuagauccauuccuu

SEQ ID NO: 1720634 - RNA, 19 nt, Homo sapiens
  misc_RNA (1)...(19): siRNA sense strand
gcuaacuacuacuacaaca

SEQ ID NO: 1720635 - RNA, 19 nt, Homo sapiens
  misc_RNA (1)...(19): siRNA sense strand
cuuaaugcauacgaucaua

SEQ ID NO: 1720636 - RNA, 19 nt, Homo sapiens
  misc_RNA (1)...(19): siRNA sense strand
acugauaccugccaucuac

SEQ ID NO: 1720637 - RNA, 19 nt, Homo sapiens
  misc_RNA (1)...(19): siRNA sense strand
uagcuuaucaucucaaugg

SEQ ID NO: 1720638 - RNA, 19 nt, Homo sapiens
  misc_RNA (1)...(19): siRNA sense strand
acaaacaacuuggcaaagc

SEQ ID NO: 1720639 - RNA, 19 nt, Homo sapiens
  misc_RNA (1)...(19): siRNA sense strand
ucuauuacuucaucuccuu

SEQ ID NO: 1720640 - RNA, 19 nt, Homo sapiens
  misc_RNA (1)...(19): siRNA sense strand
guccucaucucccuuccaa

SEQ ID NO: 1720641 - RNA, 19 nt, Homo sapiens
  misc_RNA (1)...(19): siRNA sense strand
guguuacauugcccuuuaa

SEQ ID NO: 1720642 - RNA, 19 nt, Homo sapiens
  misc_RNA (1)...(19): siRNA sense strand
caaccuggccauugcagau

SEQ ID NO: 1720643 - RNA, 19 nt, Homo sapiens
  misc_RNA (1)...(19): siRNA sense strand
auacaaacaacuuggcaaa

SEQ ID NO: 1720644 - RNA, 19 nt, Homo sapiens
  misc_RNA (1)...(19): siRNA sense strand
acaccaaccuggccauugc

SEQ ID NO: 1720645 - RNA, 19 nt, Homo sapiens
  misc_RNA (1)...(19): siRNA sense strand
ggacuggugugggcaacag

SEQ ID NO: 1720646 - RNA, 19 nt, Homo sapiens
  misc_RNA (1)...(19): siRNA sense strand
ucaccaugcuaacuacuac

SEQ ID NO: 1720647 - RNA, 19 nt, Homo sapiens
  misc_RNA (1)...(19): siRNA sense strand
uaacuacuacuacaacaac

SEQ ID NO: 1720648 - RNA, 19 nt, Homo sapiens
  misc_RNA (1)...(19): siRNA sense strand
caugcuaacuacuacuaca

SEQ ID NO: 1720649 - RNA, 19 nt, Homo sapiens
  misc_RNA (1)...(19): siRNA sense strand
uaccugaccagcuccuuaa

SEQ ID NO: 1720650 - RNA, 19 nt, Homo sapiens
  misc_RNA (1)...(19): siRNA sense strand
ccacugcuuaccuuacaaa

SEQ ID NO: 1720651 - RNA, 19 nt, Homo sapiens
  misc_RNA (1)...(19): siRNA sense strand
uaaggcgagucuccucauc

SEQ ID NO: 1720652 - RNA, 19 nt, Homo sapiens
  misc_RNA (1)...(19): siRNA sense strand
uaaugcauacgaucauaga

SEQ ID NO: 1720653 - RNA, 19 nt, Homo sapiens
  misc_RNA (1)...(19): siRNA sense strand
ccuaugccuugguaacaug

SEQ ID NO: 1720654 - RNA, 19 nt, Homo sapiens
  misc_RNA (1)...(19): siRNA sense strand
aaagccaaccuuacccauu

SEQ ID NO: 1720655 - RNA, 19 nt, Homo sapiens
  misc_RNA (1)...(19): siRNA sense strand
ggaaaaugauacaaacaac

SEQ ID NO: 1720656 - RNA, 19 nt, Homo sapiens
  misc_RNA (1)...(19): siRNA sense strand
cuuaucaucuacugcuaug

SEQ ID NO: 1720657 - RNA, 19 nt, Homo sapiens
  misc_RNA (1)...(19): siRNA sense strand
aaaauuaagugcccugaag

SEQ ID NO: 1720658 - RNA, 19 nt, Homo sapiens
  misc_RNA (1)...(19): siRNA sense strand
gaugguugugguauguuaa

SEQ ID NO: 1720659 - RNA, 19 nt, Homo sapiens
  misc_RNA (1)...(19): siRNA sense strand
auagaugguugugguaugu

SEQ ID NO: 1720660 - RNA, 19 nt, Homo sapiens
  misc_RNA (1)...(19): siRNA sense strand
gugacccuguggaugcuuu

SEQ ID NO: 1720661 - RNA, 19 nt, Homo sapiens
  misc_RNA (1)...(19): siRNA sense strand
gugccuggguagucuuaau

SEQ ID NO: 1720662 - RNA, 19 nt, Homo sapiens
  misc_RNA (1)...(19): siRNA sense strand
ggacacuuaaugcauacga

SEQ ID NO: 1720663 - RNA, 19 nt, Homo sapiens
  misc_RNA (1)...(19): siRNA sense strand
ccuuccaacucuauuacuu

SEQ ID NO: 1720664 - RNA, 19 nt, Homo sapiens
  misc_RNA (1)...(19): siRNA sense strand
caucuguaccacuguauuc

SEQ ID NO: 1720665 - RNA, 19 nt, Homo sapiens
  misc_RNA (1)...(19): siRNA sense strand
gacacuuaaugcauacgau

SEQ ID NO: 1720666 - RNA, 19 nt, Homo sapiens
  misc_RNA (1)...(19): siRNA sense strand
gaccagcuccuuaaguacu

SEQ ID NO: 1720667 - RNA, 19 nt, Homo sapiens
  misc_RNA (1)...(19): siRNA sense strand
ggaacaacuggguauuugg

SEQ ID NO: 1720668 - RNA, 19 nt, Homo sapiens
  misc_RNA (1)...(19): siRNA sense strand
caggaauauuaucuuguuc

SEQ ID NO: 1720669 - RNA, 19 nt, Homo sapiens
  misc_RNA (1)...(19): siRNA sense strand
cgagucuccucauccuugu

SEQ ID NO: 1720670 - RNA, 19 nt, Homo sapiens
  misc_RNA (1)...(19): siRNA sense strand
uggacaggagccacgauua

SEQ ID NO: 1720671 - RNA, 19 nt, Homo sapiens
  misc_RNA (1)...(19): siRNA sense strand
caucucccuuccaacucua

SEQ ID NO: 1720672 - RNA, 19 nt, Homo sapiens
  misc_RNA (1)...(19): siRNA sense strand
uuaagugcccugaagaaag

SEQ ID NO: 1720673 - RNA, 19 nt, Homo sapiens
  misc_RNA (1)...(19): siRNA sense strand
aaauuaagugcccugaaga

SEQ ID NO: 1720674 - RNA, 19 nt, Homo sapiens
  misc_RNA (1)...(19): siRNA sense strand
ugaagcaggaauauuaucu

SEQ ID NO: 1720675 - RNA, 19 nt, Homo sapiens
  misc_RNA (1)...(19): siRNA sense strand
ugucagaguggcauggaaa

SEQ ID NO: 1720676 - RNA, 19 nt, Homo sapiens
  misc_RNA (1)...(19): siRNA sense strand
ccagcuccuuaaguacuaa

SEQ ID NO: 1720677 - RNA, 19 nt, Homo sapiens
  misc_RNA (1)...(19): siRNA sense strand
cuggguagucuuaauaguu

SEQ ID NO: 1720678 - RNA, 19 nt, Homo sapiens
  misc_RNA (1)...(19): siRNA sense strand
uuauucaccaugcuaacua

SEQ ID NO: 1720679 - RNA, 19 nt, Homo sapiens
  misc_RNA (1)...(19): siRNA sense strand
agaguggcauggaaaauga

SEQ ID NO: 1720680 - RNA, 19 nt, Homo sapiens
  misc_RNA (1)...(19): siRNA sense strand
caccacagucaucuucuau

SEQ ID NO: 1720681 - RNA, 19 nt, Homo sapiens
  misc_RNA (1)...(19): siRNA sense strand
cauacgaucauagaugguu

SEQ ID NO: 1720682 - RNA, 19 nt, Homo sapiens
  misc_RNA (1)...(19): siRNA sense strand
gcauggaaaaugauacaaa

SEQ ID NO: 1720683 - RNA, 19 nt, Homo sapiens
  misc_RNA (1)...(19): siRNA sense strand
caggagccacgauuacugu

SEQ ID NO: 1720684 - RNA, 19 nt, Homo sapiens
  misc_RNA (1)...(19): siRNA sense strand
ucauacugaagcaggaaua

SEQ ID NO: 1720685 - RNA, 19 nt, Homo sapiens
  misc_RNA (1)...(19): siRNA sense strand
ugggaacaacuggguauuu

SEQ ID NO: 1720686 - RNA, 19 nt, Homo sapiens
  misc_RNA (1)...(19): siRNA sense strand
agccaaccuuacccauuaa

SEQ ID NO: 1720687 - RNA, 19 nt, Homo sapiens
  misc_RNA (1)...(19): siRNA sense strand
caacucuauuacuucaucu

SEQ ID NO: 1720688 - RNA, 19 nt, Homo sapiens
  misc_RNA (1)...(19): siRNA sense strand
uuccaacucuauuacuuca

SEQ ID NO: 1720689 - RNA, 19 nt, Homo sapiens
  misc_RNA (1)...(19): siRNA sense strand
ucaucucccuuccaacucu

SEQ ID NO: 1720690 - RNA, 19 nt, Homo sapiens
  misc_RNA (1)...(19): siRNA sense strand
cgaaagauaugugggauaa

SEQ ID NO: 1720691 - RNA, 19 nt, Homo sapiens
  misc_RNA (1)...(19): siRNA sense strand
gcagauauauuucacugau

SEQ ID NO: 1720692 - RNA, 19 nt, Homo sapiens
  misc_RNA (1)...(19): siRNA sense strand
ucacagcccuuacggauug

SEQ ID NO: 1720693 - RNA, 19 nt, Homo sapiens
  misc_RNA (1)...(19): siRNA sense strand
gcacauacugggaggauuu

SEQ ID NO: 1720694 - RNA, 19 nt, Homo sapiens
  misc_RNA (1)...(19): siRNA sense strand
caacauccaaggcagcuua

SEQ ID NO: 1720695 - RNA, 19 nt, Homo sapiens
  misc_RNA (1)...(19): siRNA sense strand
gaacggcagauauauuuca

SEQ ID NO: 1720696 - RNA, 19 nt, Homo sapiens
  misc_RNA (1)...(19): siRNA sense strand
ucaagaccgugugcacaua

SEQ ID NO: 1720697 - RNA, 19 nt, Homo sapiens
  misc_RNA (1)...(19): siRNA sense strand
gauccucgcggugcaaaua

SEQ ID NO: 1720698 - RNA, 19 nt, Homo sapiens
  misc_RNA (1)...(19): siRNA sense strand
gcgacagcauggccaacua

SEQ ID NO: 1720699 - RNA, 19 nt, Homo sapiens
  misc_RNA (1)...(19): siRNA sense strand
caagugcgaugcggucuuc

SEQ ID NO: 1720700 - RNA, 19 nt, Homo sapiens
  misc_RNA (1)...(19): siRNA sense strand
aaagauaugugggauaaac

SEQ ID NO: 1720701 - RNA, 19 nt, Homo sapiens
  misc_RNA (1)...(19): siRNA sense strand
gggauaaacugagaaaaga

SEQ ID NO: 1720702 - RNA, 19 nt, Homo sapiens
  misc_RNA (1)...(19): siRNA sense strand
uaaguugaacggcagauau

SEQ ID NO: 1720703 - RNA, 19 nt, Homo sapiens
  misc_RNA (1)...(19): siRNA sense strand
uugaacggcagauauauuu

SEQ ID NO: 1720704 - RNA, 19 nt, Homo sapiens
  misc_RNA (1)...(19): siRNA sense strand
ccaaggcagcuuauucgaa

SEQ ID NO: 1720705 - RNA, 19 nt, Homo sapiens
  misc_RNA (1)...(19): siRNA sense strand
gcgaaagauaugugggaua

SEQ ID NO: 1720706 - RNA, 19 nt, Homo sapiens
  misc_RNA (1)...(19): siRNA sense strand
uaugugggauaaacugaga

SEQ ID NO: 1720707 - RNA, 19 nt, Homo sapiens
  misc_RNA (1)...(19): siRNA sense strand
gacaagacgaacaucaaga

SEQ ID NO: 1720708 - RNA, 19 nt, Homo sapiens
  misc_RNA (1)...(19): siRNA sense strand
gauaugugggauaaacuga

SEQ ID NO: 1720709 - RNA, 19 nt, Homo sapiens
  misc_RNA (1)...(19): siRNA sense strand
guugaacggcagauauauu

SEQ ID NO: 1720710 - RNA, 19 nt, Homo sapiens
  misc_RNA (1)...(19): siRNA sense strand
gaaagauaugugggauaaa

SEQ ID NO: 1720711 - RNA, 19 nt, Homo sapiens
  misc_RNA (1)...(19): siRNA sense strand
cauccaaggcagcuuauuc

SEQ ID NO: 1720712 - RNA, 19 nt, Homo sapiens
  misc_RNA (1)...(19): siRNA sense strand
aaguugaacggcagauaua

SEQ ID NO: 1720713 - RNA, 19 nt, Homo sapiens
  misc_RNA (1)...(19): siRNA sense strand
cgacaagacgaacaucaag

SEQ ID NO: 1720714 - RNA, 19 nt, Homo sapiens
  misc_RNA (1)...(19): siRNA sense strand
cagauauauuucacugauc

SEQ ID NO: 1720715 - RNA, 19 nt, Homo sapiens
  misc_RNA (1)...(19): siRNA sense strand
ccuuacggauugccaggaa

SEQ ID NO: 1720716 - RNA, 19 nt, Homo sapiens
  misc_RNA (1)...(19): siRNA sense strand
gcaagugcgaugcggucuu

SEQ ID NO: 1720717 - RNA, 19 nt, Homo sapiens
  misc_RNA (1)...(19): siRNA sense strand
gacgacaagacgaacauca

SEQ ID NO: 1720718 - RNA, 19 nt, Homo sapiens
  misc_RNA (1)...(19): siRNA sense strand
ggaaggggcgaaagauaug

SEQ ID NO: 1720719 - RNA, 19 nt, Homo sapiens
  misc_RNA (1)...(19): siRNA sense strand
uagaugacgugauggauua

SEQ ID NO: 1720720 - RNA, 19 nt, Homo sapiens
  misc_RNA (1)...(19): siRNA sense strand
ggaccaaggugcagagaug

SEQ ID NO: 1720721 - RNA, 19 nt, Homo sapiens
  misc_RNA (1)...(19): siRNA sense strand
gaagccaaguuauuauguu

SEQ ID NO: 1720722 - RNA, 19 nt, Homo sapiens
  misc_RNA (1)...(19): siRNA sense strand
aaucagagcuguugguaga

SEQ ID NO: 1720723 - RNA, 19 nt, Homo sapiens
  misc_RNA (1)...(19): siRNA sense strand
gcaaugcugccuccuuuaa

SEQ ID NO: 1720724 - RNA, 19 nt, Homo sapiens
  misc_RNA (1)...(19): siRNA sense strand
gaggagagacugccuauuc

SEQ ID NO: 1720725 - RNA, 19 nt, Homo sapiens
  misc_RNA (1)...(19): siRNA sense strand
gaacaguaccucccucuca

SEQ ID NO: 1720726 - RNA, 19 nt, Homo sapiens
  misc_RNA (1)...(19): siRNA sense strand
gauaugaugauacugauga

SEQ ID NO: 1720727 - RNA, 19 nt, Homo sapiens
  misc_RNA (1)...(19): siRNA sense strand
ugaaggauuugaucugguu

SEQ ID NO: 1720728 - RNA, 19 nt, Homo sapiens
  misc_RNA (1)...(19): siRNA sense strand
gugcagagauggacaagag

SEQ ID NO: 1720729 - RNA, 19 nt, Homo sapiens
  misc_RNA (1)...(19): siRNA sense strand
gugauggauuaucuuguua

SEQ ID NO: 1720730 - RNA, 19 nt, Homo sapiens
  misc_RNA (1)...(19): siRNA sense strand
ccgcaaugcugccuccuuu

SEQ ID NO: 1720731 - RNA, 19 nt, Homo sapiens
  misc_RNA (1)...(19): siRNA sense strand
cagccuaucucaguacaaa

SEQ ID NO: 1720732 - RNA, 19 nt, Homo sapiens
  misc_RNA (1)...(19): siRNA sense strand
gccaauaccuaugccugua

SEQ ID NO: 1720733 - RNA, 19 nt, Homo sapiens
  misc_RNA (1)...(19): siRNA sense strand
cgugauggauuaucuuguu

SEQ ID NO: 1720734 - RNA, 19 nt, Homo sapiens
  misc_RNA (1)...(19): siRNA sense strand
guucagaagccaaguuauu

SEQ ID NO: 1720735 - RNA, 19 nt, Homo sapiens
  misc_RNA (1)...(19): siRNA sense strand
gaagcuagagccgcaaauu

SEQ ID NO: 1720736 - RNA, 19 nt, Homo sapiens
  misc_RNA (1)...(19): siRNA sense strand
ccagcgaucugagcauaaa

SEQ ID NO: 1720737 - RNA, 19 nt, Homo sapiens
  misc_RNA (1)...(19): siRNA sense strand
gagagacugccuauucuga

SEQ ID NO: 1720738 - RNA, 19 nt, Homo sapiens
  misc_RNA (1)...(19): siRNA sense strand
gcagagaacggugugaaga

SEQ ID NO: 1720739 - RNA, 19 nt, Homo sapiens
  misc_RNA (1)...(19): siRNA sense strand
aaaggagcauuggauauga

SEQ ID NO: 1720740 - RNA, 19 nt, Homo sapiens
  misc_RNA (1)...(19): siRNA sense strand
gccaaguuauuauguuaga

SEQ ID NO: 1720741 - RNA, 19 nt, Homo sapiens
  misc_RNA (1)...(19): siRNA sense strand
gaauuugccaggaagaaug

SEQ ID NO: 1720742 - RNA, 19 nt, Homo sapiens
  misc_RNA (1)...(19): siRNA sense strand
gaauguguauagugccaau

SEQ ID NO: 1720743 - RNA, 19 nt, Homo sapiens
  misc_RNA (1)...(19): siRNA sense strand
caaaucagagcuguuggua

SEQ ID NO: 1720744 - RNA, 19 nt, Homo sapiens
  misc_RNA (1)...(19): siRNA sense strand
aaucagccaucaacucaga

SEQ ID NO: 1720745 - RNA, 19 nt, Homo sapiens
  misc_RNA (1)...(19): siRNA sense strand
cgacaucuacucaguguuc

SEQ ID NO: 1720746 - RNA, 19 nt, Homo sapiens
  misc_RNA (1)...(19): siRNA sense strand
ggaaaaggagcauuggaua

SEQ ID NO: 1720747 - RNA, 19 nt, Homo sapiens
  misc_RNA (1)...(19): siRNA sense strand
ccaggaagaauguguauag

SEQ ID NO: 1720748 - RNA, 19 nt, Homo sapiens
  misc_RNA (1)...(19): siRNA sense strand
ugugugagauggcagagaa

SEQ ID NO: 1720749 - RNA, 19 nt, Homo sapiens
  misc_RNA (1)...(19): siRNA sense strand
ugaaucagccaucaacuca

SEQ ID NO: 1720750 - RNA, 19 nt, Homo sapiens
  misc_RNA (1)...(19): siRNA sense strand
guauagugccaaucagaaa

SEQ ID NO: 1720751 - RNA, 19 nt, Homo sapiens
  misc_RNA (1)...(19): siRNA sense strand
gccaucaacucagauuguu

SEQ ID NO: 1720752 - RNA, 19 nt, Homo sapiens
  misc_RNA (1)...(19): siRNA sense strand
guacaaaggaccaguaucc

SEQ ID NO: 1720753 - RNA, 19 nt, Homo sapiens
  misc_RNA (1)...(19): siRNA sense strand
gccaacagaccauuucuca

SEQ ID NO: 1720754 - RNA, 19 nt, Homo sapiens
  misc_RNA (1)...(19): siRNA sense strand
gaaaaugcacucaccaaau

SEQ ID NO: 1720755 - RNA, 19 nt, Homo sapiens
  misc_RNA (1)...(19): siRNA sense strand
cgugagcaguggcguagaa

SEQ ID NO: 1720756 - RNA, 19 nt, Homo sapiens
  misc_RNA (1)...(19): siRNA sense strand
ucucauggguagaguggaa

SEQ ID NO: 1720757 - RNA, 19 nt, Homo sapiens
  misc_RNA (1)...(19): siRNA sense strand
ugauugaauuugccaggaa

SEQ ID NO: 1720758 - RNA, 19 nt, Homo sapiens
  misc_RNA (1)...(19): siRNA sense strand
ggcgacaucuacucagugu

SEQ ID NO: 1720759 - RNA, 19 nt, Homo sapiens
  misc_RNA (1)...(19): siRNA sense strand
aaaaugcacucaccaaauc

SEQ ID NO: 1720760 - RNA, 19 nt, Homo sapiens
  misc_RNA (1)...(19): siRNA sense strand
ucagaaugcucaggaccaa

SEQ ID NO: 1720761 - RNA, 19 nt, Homo sapiens
  misc_RNA (1)...(19): siRNA sense strand
gaaaaggagcauuggauau

SEQ ID NO: 1720762 - RNA, 19 nt, Homo sapiens
  misc_RNA (1)...(19): siRNA sense strand
ccaauaccuaugccuguaa

SEQ ID NO: 1720763 - RNA, 19 nt, Homo sapiens
  misc_RNA (1)...(19): siRNA sense strand
gcugguaggucccuuuuau

SEQ ID NO: 1720764 - RNA, 19 nt, Homo sapiens
  misc_RNA (1)...(19): siRNA sense strand
uucagaagccaaguuauua

SEQ ID NO: 1720765 - RNA, 19 nt, Homo sapiens
  misc_RNA (1)...(19): siRNA sense strand
ccagugcucugcccaucau

SEQ ID NO: 1720766 - RNA, 19 nt, Homo sapiens
  misc_RNA (1)...(19): siRNA sense strand
gguuaaagaagcuaagcaa

SEQ ID NO: 1720767 - RNA, 19 nt, Homo sapiens
  misc_RNA (1)...(19): siRNA sense strand
caaugcugccuccuuuaaa

SEQ ID NO: 1720768 - RNA, 19 nt, Homo sapiens
  misc_RNA (1)...(19): siRNA sense strand
gagcacauugagucacgua

SEQ ID NO: 1720769 - RNA, 19 nt, Homo sapiens
  misc_RNA (1)...(19): siRNA sense strand
ucagaagccaaguuauuau

SEQ ID NO: 1720770 - RNA, 19 nt, Homo sapiens
  misc_RNA (1)...(19): siRNA sense strand
gacagccuccucacuucua

SEQ ID NO: 1720771 - RNA, 19 nt, Homo sapiens
  misc_RNA (1)...(19): siRNA sense strand
ucacguacucuugcaauug

SEQ ID NO: 1720772 - RNA, 19 nt, Homo sapiens
  misc_RNA (1)...(19): siRNA sense strand
gagcauuggauaugaugau

SEQ ID NO: 1720773 - RNA, 19 nt, Homo sapiens
  misc_RNA (1)...(19): siRNA sense strand
uuucucagcuccauucuac

SEQ ID NO: 1720774 - RNA, 19 nt, Homo sapiens
  misc_RNA (1)...(19): siRNA sense strand
guuaaagaagcuaagcaaa

SEQ ID NO: 1720775 - RNA, 19 nt, Homo sapiens
  misc_RNA (1)...(19): siRNA sense strand
ugggaucccugucuaccaa

SEQ ID NO: 1720776 - RNA, 19 nt, Homo sapiens
  misc_RNA (1)...(19): siRNA sense strand
gcugugacgacuacuguga

SEQ ID NO: 1720777 - RNA, 19 nt, Homo sapiens
  misc_RNA (1)...(19): siRNA sense strand
uuggugagcuccacguaug

SEQ ID NO: 1720778 - RNA, 19 nt, Homo sapiens
  misc_RNA (1)...(19): siRNA sense strand
gauggauuaucuuguuaac

SEQ ID NO: 1720779 - RNA, 19 nt, Homo sapiens
  misc_RNA (1)...(19): siRNA sense strand
ccucauguccucagccuau

SEQ ID NO: 1720780 - RNA, 19 nt, Homo sapiens
  misc_RNA (1)...(19): siRNA sense strand
cagaagccaaguuauuaug

SEQ ID NO: 1720781 - RNA, 19 nt, Homo sapiens
  misc_RNA (1)...(19): siRNA sense strand
caauaccuaugccuguaag

SEQ ID NO: 1720782 - RNA, 19 nt, Homo sapiens
  misc_RNA (1)...(19): siRNA sense strand
gucacguacucuugcaauu

SEQ ID NO: 1720783 - RNA, 19 nt, Homo sapiens
  misc_RNA (1)...(19): siRNA sense strand
caccaaaucagagcuguug

SEQ ID NO: 1720784 - RNA, 19 nt, Homo sapiens
  misc_RNA (1)...(19): siRNA sense strand
gcaguugccaauaccuaug

SEQ ID NO: 1720785 - RNA, 19 nt, Homo sapiens
  misc_RNA (1)...(19): siRNA sense strand
caagguguaccacagaaca

SEQ ID NO: 1720786 - RNA, 19 nt, Homo sapiens
  misc_RNA (1)...(19): siRNA sense strand
caacauccaagguguacca

SEQ ID NO: 1720787 - RNA, 19 nt, Homo sapiens
  misc_RNA (1)...(19): siRNA sense strand
gccacacccuccuguccaa

SEQ ID NO: 1720788 - RNA, 19 nt, Homo sapiens
  misc_RNA (1)...(19): siRNA sense strand
agacaggauugaggagaga

SEQ ID NO: 1720789 - RNA, 19 nt, Homo sapiens
  misc_RNA (1)...(19): siRNA sense strand
ggagagacugccuauucug

SEQ ID NO: 1720790 - RNA, 19 nt, Homo sapiens
  misc_RNA (1)...(19): siRNA sense strand
ugaagucugugugugagau

SEQ ID NO: 1720791 - RNA, 19 nt, Homo sapiens
  misc_RNA (1)...(19): siRNA sense strand
uuagaugacgugauggauu

SEQ ID NO: 1720792 - RNA, 19 nt, Homo sapiens
  misc_RNA (1)...(19): siRNA sense strand
guggucaguggcagcauua

SEQ ID NO: 1720793 - RNA, 19 nt, Homo sapiens
  misc_RNA (1)...(19): siRNA sense strand
caguaucccuaccugaagu

SEQ ID NO: 1720794 - RNA, 19 nt, Homo sapiens
  misc_RNA (1)...(19): siRNA sense strand
ucaguacaaaggaccagua

SEQ ID NO: 1720795 - RNA, 19 nt, Homo sapiens
  misc_RNA (1)...(19): siRNA sense strand
aagcuagagccgcaaauug

SEQ ID NO: 1720796 - RNA, 19 nt, Homo sapiens
  misc_RNA (1)...(19): siRNA sense strand
cauuggauaugaugauacu

SEQ ID NO: 1720797 - RNA, 19 nt, Homo sapiens
  misc_RNA (1)...(19): siRNA sense strand
caggaagaauguguauagu

SEQ ID NO: 1720798 - RNA, 19 nt, Homo sapiens
  misc_RNA (1)...(19): siRNA sense strand
guaaggggcuagacaggau

SEQ ID NO: 1720799 - RNA, 19 nt, Homo sapiens
  misc_RNA (1)...(19): siRNA sense strand
cagcuccauucuacuguuc

SEQ ID NO: 1720800 - RNA, 19 nt, Homo sapiens
  misc_RNA (1)...(19): siRNA sense strand
ucagcuccauucuacuguu

SEQ ID NO: 1720801 - RNA, 19 nt, Homo sapiens
  misc_RNA (1)...(19): siRNA sense strand
gaccauuucucagcuccau

SEQ ID NO: 1720802 - RNA, 19 nt, Homo sapiens
  misc_RNA (1)...(19): siRNA sense strand
ucacugaggaagaacuaga

SEQ ID NO: 1720803 - RNA, 19 nt, Homo sapiens
  misc_RNA (1)...(19): siRNA sense strand
cuacuguucaccugauuga

SEQ ID NO: 1720804 - RNA, 19 nt, Homo sapiens
  misc_RNA (1)...(19): siRNA sense strand
acccagcgaucugagcaua

SEQ ID NO: 1720805 - RNA, 19 nt, Homo sapiens
  misc_RNA (1)...(19): siRNA sense strand
gacgugauggauuaucuug

SEQ ID NO: 1720806 - RNA, 19 nt, Homo sapiens
  misc_RNA (1)...(19): siRNA sense strand
agcauuggauaugaugaua

SEQ ID NO: 1720807 - RNA, 19 nt, Homo sapiens
  misc_RNA (1)...(19): siRNA sense strand
cagcaggguuaaagaagcu

SEQ ID NO: 1720808 - RNA, 19 nt, Homo sapiens
  misc_RNA (1)...(19): siRNA sense strand
gcaaggggcagcugcagaa

SEQ ID NO: 1720809 - RNA, 19 nt, Homo sapiens
  misc_RNA (1)...(19): siRNA sense strand
aaugcugccuccuuuaaag

SEQ ID NO: 1720810 - RNA, 19 nt, Homo sapiens
  misc_RNA (1)...(19): siRNA sense strand
caggcgacaucuacucagu

SEQ ID NO: 1720811 - RNA, 19 nt, Homo sapiens
  misc_RNA (1)...(19): siRNA sense strand
gcucucagcaggguuaaag

SEQ ID NO: 1720812 - RNA, 19 nt, Homo sapiens
  misc_RNA (1)...(19): siRNA sense strand
ucaggaugcucaggauaag

SEQ ID NO: 1720813 - RNA, 19 nt, Homo sapiens
  misc_RNA (1)...(19): siRNA sense strand
gcaggguuaaagaagcuaa

SEQ ID NO: 1720814 - RNA, 19 nt, Homo sapiens
  misc_RNA (1)...(19): siRNA sense strand
gcaguguggagaagaccaa

SEQ ID NO: 1720815 - RNA, 19 nt, Homo sapiens
  misc_RNA (1)...(19): siRNA sense strand
gcacauugagucacguacu

SEQ ID NO: 1720816 - RNA, 19 nt, Homo sapiens
  misc_RNA (1)...(19): siRNA sense strand
aggagagacugccuauucu

SEQ ID NO: 1720817 - RNA, 19 nt, Homo sapiens
  misc_RNA (1)...(19): siRNA sense strand
caggcucucagcaggguua

SEQ ID NO: 1720818 - RNA, 19 nt, Homo sapiens
  misc_RNA (1)...(19): siRNA sense strand
cagcauuaacacagucuug

SEQ ID NO: 1720819 - RNA, 19 nt, Homo sapiens
  misc_RNA (1)...(19): siRNA sense strand
ggaaggcgcuugaaacaua

SEQ ID NO: 1720820 - RNA, 19 nt, Homo sapiens
  misc_RNA (1)...(19): siRNA sense strand
uaacaacggugcuaucaua

SEQ ID NO: 1720821 - RNA, 19 nt, Homo sapiens
  misc_RNA (1)...(19): siRNA sense strand
ucaaaugccuucccuaaua

SEQ ID NO: 1720822 - RNA, 19 nt, Homo sapiens
  misc_RNA (1)...(19): siRNA sense strand
ggacagaaauucacaagga

SEQ ID NO: 1720823 - RNA, 19 nt, Homo sapiens
  misc_RNA (1)...(19): siRNA sense strand
aaacauaacuccuucugua

SEQ ID NO: 1720824 - RNA, 19 nt, Homo sapiens
  misc_RNA (1)...(19): siRNA sense strand
cagaagagcuggaguuauu

SEQ ID NO: 1720825 - RNA, 19 nt, Homo sapiens
  misc_RNA (1)...(19): siRNA sense strand
gcucaaagcaguucacuua

SEQ ID NO: 1720826 - RNA, 19 nt, Homo sapiens
  misc_RNA (1)...(19): siRNA sense strand
ggaauaagucucccuguua

SEQ ID NO: 1720827 - RNA, 19 nt, Homo sapiens
  misc_RNA (1)...(19): siRNA sense strand
ugacuucucuucaguauuu

SEQ ID NO: 1720828 - RNA, 19 nt, Homo sapiens
  misc_RNA (1)...(19): siRNA sense strand
gacgaaaucuugaaguuaa

SEQ ID NO: 1720829 - RNA, 19 nt, Homo sapiens
  misc_RNA (1)...(19): siRNA sense strand
gcacuuaucugaacucaca

SEQ ID NO: 1720830 - RNA, 19 nt, Homo sapiens
  misc_RNA (1)...(19): siRNA sense strand
gcagugaaauugaccagua

SEQ ID NO: 1720831 - RNA, 19 nt, Homo sapiens
  misc_RNA (1)...(19): siRNA sense strand
gaaaccaaaucuagacaaa

SEQ ID NO: 1720832 - RNA, 19 nt, Homo sapiens
  misc_RNA (1)...(19): siRNA sense strand
ggacaaaccugagcuagga

SEQ ID NO: 1720833 - RNA, 19 nt, Homo sapiens
  misc_RNA (1)...(19): siRNA sense strand
ggaagcacaugccaaguuu

SEQ ID NO: 1720834 - RNA, 19 nt, Homo sapiens
  misc_RNA (1)...(19): siRNA sense strand
gcacaacccuuaaguccaa

SEQ ID NO: 1720835 - RNA, 19 nt, Homo sapiens
  misc_RNA (1)...(19): siRNA sense strand
gcagaacaauucagucaaa

SEQ ID NO: 1720836 - RNA, 19 nt, Homo sapiens
  misc_RNA (1)...(19): siRNA sense strand
gguaauggcuucucuacuu

SEQ ID NO: 1720837 - RNA, 19 nt, Homo sapiens
  misc_RNA (1)...(19): siRNA sense strand
caacauugcucaguuugua

SEQ ID NO: 1720838 - RNA, 19 nt, Homo sapiens
  misc_RNA (1)...(19): siRNA sense strand
caauucagcuucaaagaaa

SEQ ID NO: 1720839 - RNA, 19 nt, Homo sapiens
  misc_RNA (1)...(19): siRNA sense strand
caaaugccuucccuaauaa

SEQ ID NO: 1720840 - RNA, 19 nt, Homo sapiens
  misc_RNA (1)...(19): siRNA sense strand
gcuaggaccuguaauucua

SEQ ID NO: 1720841 - RNA, 19 nt, Homo sapiens
  misc_RNA (1)...(19): siRNA sense strand
gaggacagccuuauuaauu

SEQ ID NO: 1720842 - RNA, 19 nt, Homo sapiens
  misc_RNA (1)...(19): siRNA sense strand
ccaguggacucaaaucaua

SEQ ID NO: 1720843 - RNA, 19 nt, Homo sapiens
  misc_RNA (1)...(19): siRNA sense strand
gaagauauuucacggacuu

SEQ ID NO: 1720844 - RNA, 19 nt, Homo sapiens
  misc_RNA (1)...(19): siRNA sense strand
gaaagacucuauacaacug

SEQ ID NO: 1720845 - RNA, 19 nt, Homo sapiens
  misc_RNA (1)...(19): siRNA sense strand
uuacagccauuauccauua

SEQ ID NO: 1720846 - RNA, 19 nt, Homo sapiens
  misc_RNA (1)...(19): siRNA sense strand
gaacacagaguaaugacua

SEQ ID NO: 1720847 - RNA, 19 nt, Homo sapiens
  misc_RNA (1)...(19): siRNA sense strand
gcucaaagauccuuagcaa

SEQ ID NO: 1720848 - RNA, 19 nt, Homo sapiens
  misc_RNA (1)...(19): siRNA sense strand
gaagacaacucagggagaa

SEQ ID NO: 1720849 - RNA, 19 nt, Homo sapiens
  misc_RNA (1)...(19): siRNA sense strand
ggauuuggcucucgcauug

SEQ ID NO: 1720850 - RNA, 19 nt, Homo sapiens
  misc_RNA (1)...(19): siRNA sense strand
ggacucaaaucauaacuuc

SEQ ID NO: 1720851 - RNA, 19 nt, Homo sapiens
  misc_RNA (1)...(19): siRNA sense strand
gguaguauuugaccugaua

SEQ ID NO: 1720852 - RNA, 19 nt, Homo sapiens
  misc_RNA (1)...(19): siRNA sense strand
ggauguaacucacaaaaua

SEQ ID NO: 1720853 - RNA, 19 nt, Homo sapiens
  misc_RNA (1)...(19): siRNA sense strand
caacauggcugcgacgaaa

SEQ ID NO: 1720854 - RNA, 19 nt, Homo sapiens
  misc_RNA (1)...(19): siRNA sense strand
gaacaugccacuuacuauu

SEQ ID NO: 1720855 - RNA, 19 nt, Homo sapiens
  misc_RNA (1)...(19): siRNA sense strand
gaaagugauucuucauugu

SEQ ID NO: 1720856 - RNA, 19 nt, Homo sapiens
  misc_RNA (1)...(19): siRNA sense strand
ccaagaggauucucaaaug

SEQ ID NO: 1720857 - RNA, 19 nt, Homo sapiens
  misc_RNA (1)...(19): siRNA sense strand
gagaaggaaacaauaguua

SEQ ID NO: 1720858 - RNA, 19 nt, Homo sapiens
  misc_RNA (1)...(19): siRNA sense strand
gaccugauauguaaaguug

SEQ ID NO: 1720859 - RNA, 19 nt, Homo sapiens
  misc_RNA (1)...(19): siRNA sense strand
caagagagauugguugaga

SEQ ID NO: 1720860 - RNA, 19 nt, Homo sapiens
  misc_RNA (1)...(19): siRNA sense strand
gcucaaguuucccaguuua

SEQ ID NO: 1720861 - RNA, 19 nt, Homo sapiens
  misc_RNA (1)...(19): siRNA sense strand
ggaacucacugcugaugaa

SEQ ID NO: 1720862 - RNA, 19 nt, Homo sapiens
  misc_RNA (1)...(19): siRNA sense strand
gaaaucacagugcacauaa

SEQ ID NO: 1720863 - RNA, 19 nt, Homo sapiens
  misc_RNA (1)...(19): siRNA sense strand
aaagagaccuucaggaugu

SEQ ID NO: 1720864 - RNA, 19 nt, Homo sapiens
  misc_RNA (1)...(19): siRNA sense strand
caaggaucaugcucaguua

SEQ ID NO: 1720865 - RNA, 19 nt, Homo sapiens
  misc_RNA (1)...(19): siRNA sense strand
cuacaacugugcagaaauu

SEQ ID NO: 1720866 - RNA, 19 nt, Homo sapiens
  misc_RNA (1)...(19): siRNA sense strand
gcucagaaauggcauagug

SEQ ID NO: 1720867 - RNA, 19 nt, Homo sapiens
  misc_RNA (1)...(19): siRNA sense strand
gcaguucuuuggcaucuaa

SEQ ID NO: 1720868 - RNA, 19 nt, Homo sapiens
  misc_RNA (1)...(19): siRNA sense strand
uagaagauguccugauuga

SEQ ID NO: 1720869 - RNA, 19 nt, Homo sapiens
  misc_RNA (1)...(19): siRNA sense strand
gaaccaaguccuacaaaga

SEQ ID NO: 1720870 - RNA, 19 nt, Homo sapiens
  misc_RNA (1)...(19): siRNA sense strand
gaaccauacaucagaguua

SEQ ID NO: 1720871 - RNA, 19 nt, Homo sapiens
  misc_RNA (1)...(19): siRNA sense strand
caacauucauccucucuau

SEQ ID NO: 1720872 - RNA, 19 nt, Homo sapiens
  misc_RNA (1)...(19): siRNA sense strand
caaagcaguucacuuaauc

SEQ ID NO: 1720873 - RNA, 19 nt, Homo sapiens
  misc_RNA (1)...(19): siRNA sense strand
aaacuaacccuauagcuuu

SEQ ID NO: 1720874 - RNA, 19 nt, Homo sapiens
  misc_RNA (1)...(19): siRNA sense strand
gcagugauauugagcuaau

SEQ ID NO: 1720875 - RNA, 19 nt, Homo sapiens
  misc_RNA (1)...(19): siRNA sense strand
ggagagcaauuauggacaa

SEQ ID NO: 1720876 - RNA, 19 nt, Homo sapiens
  misc_RNA (1)...(19): siRNA sense strand
caaauacgaaacaggauua

SEQ ID NO: 1720877 - RNA, 19 nt, Homo sapiens
  misc_RNA (1)...(19): siRNA sense strand
guacauagcugagaagacu

SEQ ID NO: 1720878 - RNA, 19 nt, Homo sapiens
  misc_RNA (1)...(19): siRNA sense strand
gcaaacgccuagcucaaug

SEQ ID NO: 1720879 - RNA, 19 nt, Homo sapiens
  misc_RNA (1)...(19): siRNA sense strand
gaaucaugguguucacuuu

SEQ ID NO: 1720880 - RNA, 19 nt, Homo sapiens
  misc_RNA (1)...(19): siRNA sense strand
ugauauagauccagaugaa

SEQ ID NO: 1720881 - RNA, 19 nt, Homo sapiens
  misc_RNA (1)...(19): siRNA sense strand
gcaguuaacccauaaagau

SEQ ID NO: 1720882 - RNA, 19 nt, Homo sapiens
  misc_RNA (1)...(19): siRNA sense strand
cugcuaaccuucucuuuaa

SEQ ID NO: 1720883 - RNA, 19 nt, Homo sapiens
  misc_RNA (1)...(19): siRNA sense strand
ggagggauaugucucugaa

SEQ ID NO: 1720884 - RNA, 19 nt, Homo sapiens
  misc_RNA (1)...(19): siRNA sense strand
gugggaaucuuacaaguga

SEQ ID NO: 1720885 - RNA, 19 nt, Homo sapiens
  misc_RNA (1)...(19): siRNA sense strand
caacgagaauuuaaaccuu

SEQ ID NO: 1720886 - RNA, 19 nt, Homo sapiens
  misc_RNA (1)...(19): siRNA sense strand
gcaguucacuuaaucucuu

SEQ ID NO: 1720887 - RNA, 19 nt, Homo sapiens
  misc_RNA (1)...(19): siRNA sense strand
gaaacuauguagcagcaau

SEQ ID NO: 1720888 - RNA, 19 nt, Homo sapiens
  misc_RNA (1)...(19): siRNA sense strand
ggacagccuuauuaauuuc

SEQ ID NO: 1720889 - RNA, 19 nt, Homo sapiens
  misc_RNA (1)...(19): siRNA sense strand
ucagaggacagccuuauua

SEQ ID NO: 1720890 - RNA, 19 nt, Homo sapiens
  misc_RNA (1)...(19): siRNA sense strand
caaaggagucacaguagua

SEQ ID NO: 1720891 - RNA, 19 nt, Homo sapiens
  misc_RNA (1)...(19): siRNA sense strand
gaagaguguggaacuauuu

SEQ ID NO: 1720892 - RNA, 19 nt, Homo sapiens
  misc_RNA (1)...(19): siRNA sense strand
gcaagugauuucaguguuc

SEQ ID NO: 1720893 - RNA, 19 nt, Homo sapiens
  misc_RNA (1)...(19): siRNA sense strand
agaccgaacugaugauauu

SEQ ID NO: 1720894 - RNA, 19 nt, Homo sapiens
  misc_RNA (1)...(19): siRNA sense strand
ugacaaagcacuaaagaau

SEQ ID NO: 1720895 - RNA, 19 nt, Homo sapiens
  misc_RNA (1)...(19): siRNA sense strand
ugaaugggcagauuugaua

SEQ ID NO: 1720896 - RNA, 19 nt, Homo sapiens
  misc_RNA (1)...(19): siRNA sense strand
gcugaccaauuucugcuua

SEQ ID NO: 1720897 - RNA, 19 nt, Homo sapiens
  misc_RNA (1)...(19): siRNA sense strand
gcaaggaucaugcucaguu

SEQ ID NO: 1720898 - RNA, 19 nt, Homo sapiens
  misc_RNA (1)...(19): siRNA sense strand
gaagauguccugauugaag

SEQ ID NO: 1720899 - RNA, 19 nt, Homo sapiens
  misc_RNA (1)...(19): siRNA sense strand
caagccaucuccagacauu

SEQ ID NO: 1720900 - RNA, 19 nt, Homo sapiens
  misc_RNA (1)...(19): siRNA sense strand
gaacuugagacaacagauu

SEQ ID NO: 1720901 - RNA, 19 nt, Homo sapiens
  misc_RNA (1)...(19): siRNA sense strand
acaggaagcuuucuaugga

SEQ ID NO: 1720902 - RNA, 19 nt, Homo sapiens
  misc_RNA (1)...(19): siRNA sense strand
gcgacgaaaucuugaaguu

SEQ ID NO: 1720903 - RNA, 19 nt, Homo sapiens
  misc_RNA (1)...(19): siRNA sense strand
caaaugaugagcauagaaa

SEQ ID NO: 1720904 - RNA, 19 nt, Homo sapiens
  misc_RNA (1)...(19): siRNA sense strand
ugacagacuuucccuccua

SEQ ID NO: 1720905 - RNA, 19 nt, Homo sapiens
  misc_RNA (1)...(19): siRNA sense strand
cuacugaaguguuugaaga

SEQ ID NO: 1720906 - RNA, 19 nt, Homo sapiens
  misc_RNA (1)...(19): siRNA sense strand
ucuagaagauguccugauu

SEQ ID NO: 1720907 - RNA, 19 nt, Homo sapiens
  misc_RNA (1)...(19): siRNA sense strand
acaaagaacuugagacaac

SEQ ID NO: 1720908 - RNA, 19 nt, Homo sapiens
  misc_RNA (1)...(19): siRNA sense strand
ucaaagcaguucacuuaau

SEQ ID NO: 1720909 - RNA, 19 nt, Homo sapiens
  misc_RNA (1)...(19): siRNA sense strand
gguuauuccuuuacuugua

SEQ ID NO: 1720910 - RNA, 19 nt, Homo sapiens
  misc_RNA (1)...(19): siRNA sense strand
cauaacuccuucuguauau

SEQ ID NO: 1720911 - RNA, 19 nt, Homo sapiens
  misc_RNA (1)...(19): siRNA sense strand
aagaguagcugugguuauu

SEQ ID NO: 1720912 - RNA, 19 nt, Homo sapiens
  misc_RNA (1)...(19): siRNA sense strand
ggagcggguuauuccuuua

SEQ ID NO: 1720913 - RNA, 19 nt, Homo sapiens
  misc_RNA (1)...(19): siRNA sense strand
ccgcaucucuuaccacuau

SEQ ID NO: 1720914 - RNA, 19 nt, Homo sapiens
  misc_RNA (1)...(19): siRNA sense strand
cagaaugcuuugcugagua

SEQ ID NO: 1720915 - RNA, 19 nt, Homo sapiens
  misc_RNA (1)...(19): siRNA sense strand
ccagaagccucagaugauu

SEQ ID NO: 1720916 - RNA, 19 nt, Homo sapiens
  misc_RNA (1)...(19): siRNA sense strand
gcaguggaauccucucaau

SEQ ID NO: 1720917 - RNA, 19 nt, Homo sapiens
  misc_RNA (1)...(19): siRNA sense strand
ucacaucuacucugccuua

SEQ ID NO: 1720918 - RNA, 19 nt, Homo sapiens
  misc_RNA (1)...(19): siRNA sense strand
caaaccauguuccagcaaa

SEQ ID NO: 1720919 - RNA, 19 nt, Homo sapiens
  misc_RNA (1)...(19): siRNA sense strand
ucaacgagcugcccgagaa

SEQ ID NO: 1720920 - RNA, 19 nt, Homo sapiens
  misc_RNA (1)...(19): siRNA sense strand
gagagggcuucaucacuga

SEQ ID NO: 1720921 - RNA, 19 nt, Homo sapiens
  misc_RNA (1)...(19): siRNA sense strand
gagaccagaggaaggaauu

SEQ ID NO: 1720922 - RNA, 19 nt, Homo sapiens
  misc_RNA (1)...(19): siRNA sense strand
gaagguggaggaucucucu

SEQ ID NO: 1720923 - RNA, 19 nt, Homo sapiens
  misc_RNA (1)...(19): siRNA sense strand
gagccuggaugugaaugga

SEQ ID NO: 1720924 - RNA, 19 nt, Homo sapiens
  misc_RNA (1)...(19): siRNA sense strand
cagauugcggguccaagua

SEQ ID NO: 1720925 - RNA, 19 nt, Homo sapiens
  misc_RNA (1)...(19): siRNA sense strand
cggcgaccauccagcagaa

SEQ ID NO: 1720926 - RNA, 19 nt, Homo sapiens
  misc_RNA (1)...(19): siRNA sense strand
ccacacauucuccaacuac

SEQ ID NO: 1720927 - RNA, 19 nt, Homo sapiens
  misc_RNA (1)...(19): siRNA sense strand
ccucgugacccucuggaaa

SEQ ID NO: 1720928 - RNA, 19 nt, Homo sapiens
  misc_RNA (1)...(19): siRNA sense strand
ucuggagccuggaugugaa

SEQ ID NO: 1720929 - RNA, 19 nt, Homo sapiens
  misc_RNA (1)...(19): siRNA sense strand
gaagagggguucgaguucu

SEQ ID NO: 1720930 - RNA, 19 nt, Homo sapiens
  misc_RNA (1)...(19): siRNA sense strand
gcggcguggacacucauua

SEQ ID NO: 1720931 - RNA, 19 nt, Homo sapiens
  misc_RNA (1)...(19): siRNA sense strand
aguggaagguggaggaucu

SEQ ID NO: 1720932 - RNA, 19 nt, Homo sapiens
  misc_RNA (1)...(19): siRNA sense strand
ccagauugcggguccaagu

SEQ ID NO: 1720933 - RNA, 19 nt, Homo sapiens
  misc_RNA (1)...(19): siRNA sense strand
gcgaccauccagcagaaga

SEQ ID NO: 1720934 - RNA, 19 nt, Homo sapiens
  misc_RNA (1)...(19): siRNA sense strand
cagaagagcgaugccaagu

SEQ ID NO: 1720935 - RNA, 19 nt, Homo sapiens
  misc_RNA (1)...(19): siRNA sense strand
ucaacgagcugcccgagaa

SEQ ID NO: 1720936 - RNA, 19 nt, Homo sapiens
  misc_RNA (1)...(19): siRNA sense strand
gagagggcuucaucacuga

SEQ ID NO: 1720937 - RNA, 19 nt, Homo sapiens
  misc_RNA (1)...(19): siRNA sense strand
gagaccagaggaaggaauu

SEQ ID NO: 1720938 - RNA, 19 nt, Homo sapiens
  misc_RNA (1)...(19): siRNA sense strand
gaagguggaggaucucucu

SEQ ID NO: 1720939 - RNA, 19 nt, Homo sapiens
  misc_RNA (1)...(19): siRNA sense strand
gagccuggaugugaaugga

SEQ ID NO: 1720940 - RNA, 19 nt, Homo sapiens
  misc_RNA (1)...(19): siRNA sense strand
cagauugcggguccaagua

SEQ ID NO: 1720941 - RNA, 19 nt, Homo sapiens
  misc_RNA (1)...(19): siRNA sense strand
cggcgaccauccagcagaa

SEQ ID NO: 1720942 - RNA, 19 nt, Homo sapiens
  misc_RNA (1)...(19): siRNA sense strand
ccacacauucuccaacuac

SEQ ID NO: 1720943 - RNA, 19 nt, Homo sapiens
  misc_RNA (1)...(19): siRNA sense strand
ccucgugacccucuggaaa

SEQ ID NO: 1720944 - RNA, 19 nt, Homo sapiens
  misc_RNA (1)...(19): siRNA sense strand
ucuggagccuggaugugaa

SEQ ID NO: 1720945 - RNA, 19 nt, Homo sapiens
  misc_RNA (1)...(19): siRNA sense strand
gaagagggguucgaguucu

SEQ ID NO: 1720946 - RNA, 19 nt, Homo sapiens
  misc_RNA (1)...(19): siRNA sense strand
gcggcguggacacucauua

SEQ ID NO: 1720947 - RNA, 19 nt, Homo sapiens
  misc_RNA (1)...(19): siRNA sense strand
aguggaagguggaggaucu

SEQ ID NO: 1720948 - RNA, 19 nt, Homo sapiens
  misc_RNA (1)...(19): siRNA sense strand
ccagauugcggguccaagu

SEQ ID NO: 1720949 - RNA, 19 nt, Homo sapiens
  misc_RNA (1)...(19): siRNA sense strand
gcgaccauccagcagaaga

SEQ ID NO: 1720950 - RNA, 19 nt, Homo sapiens
  misc_RNA (1)...(19): siRNA sense strand
cagaagagcgaugccaagu

SEQ ID NO: 1720951 - RNA, 19 nt, Homo sapiens
  misc_RNA (1)...(19): siRNA sense strand
ucaacgagcugcccgagaa

SEQ ID NO: 1720952 - RNA, 19 nt, Homo sapiens
  misc_RNA (1)...(19): siRNA sense strand
gagagggcuucaucacuga

SEQ ID NO: 1720953 - RNA, 19 nt, Homo sapiens
  misc_RNA (1)...(19): siRNA sense strand
gagaccagaggaaggaauu

SEQ ID NO: 1720954 - RNA, 19 nt, Homo sapiens
  misc_RNA (1)...(19): siRNA sense strand
gaagguggaggaucucucu

SEQ ID NO: 1720955 - RNA, 19 nt, Homo sapiens
  misc_RNA (1)...(19): siRNA sense strand
gagccuggaugugaaugga

SEQ ID NO: 1720956 - RNA, 19 nt, Homo sapiens
  misc_RNA (1)...(19): siRNA sense strand
cagauugcggguccaagua

SEQ ID NO: 1720957 - RNA, 19 nt, Homo sapiens
  misc_RNA (1)...(19): siRNA sense strand
cggcgaccauccagcagaa

SEQ ID NO: 1720958 - RNA, 19 nt, Homo sapiens
  misc_RNA (1)...(19): siRNA sense strand
ccacacauucuccaacuac

SEQ ID NO: 1720959 - RNA, 19 nt, Homo sapiens
  misc_RNA (1)...(19): siRNA sense strand
ccucgugacccucuggaaa

SEQ ID NO: 1720960 - RNA, 19 nt, Homo sapiens
  misc_RNA (1)...(19): siRNA sense strand
ucuggagccuggaugugaa

SEQ ID NO: 1720961 - RNA, 19 nt, Homo sapiens
  misc_RNA (1)...(19): siRNA sense strand
gaagagggguucgaguucu

SEQ ID NO: 1720962 - RNA, 19 nt, Homo sapiens
  misc_RNA (1)...(19): siRNA sense strand
gcggcguggacacucauua

SEQ ID NO: 1720963 - RNA, 19 nt, Homo sapiens
  misc_RNA (1)...(19): siRNA sense strand
aguggaagguggaggaucu

SEQ ID NO: 1720964 - RNA, 19 nt, Homo sapiens
  misc_RNA (1)...(19): siRNA sense strand
ccagauugcggguccaagu

SEQ ID NO: 1720965 - RNA, 19 nt, Homo sapiens
  misc_RNA (1)...(19): siRNA sense strand
gcgaccauccagcagaaga

SEQ ID NO: 1720966 - RNA, 19 nt, Homo sapiens
  misc_RNA (1)...(19): siRNA sense strand
cagaagagcgaugccaagu

SEQ ID NO: 1720967 - RNA, 19 nt, Homo sapiens
  misc_RNA (1)...(19): siRNA sense strand
gcgaugagguggacuugua

SEQ ID NO: 1720968 - RNA, 19 nt, Homo sapiens
  misc_RNA (1)...(19): siRNA sense strand
ucaaggagcuguucagagu

SEQ ID NO: 1720969 - RNA, 19 nt, Homo sapiens
  misc_RNA (1)...(19): siRNA sense strand
ggagauaaugucagcauga

SEQ ID NO: 1720970 - RNA, 19 nt, Homo sapiens
  misc_RNA (1)...(19): siRNA sense strand
ugaagagacugaucaagca

SEQ ID NO: 1720971 - RNA, 19 nt, Homo sapiens
  misc_RNA (1)...(19): siRNA sense strand
gaagaggacccugaaagug

SEQ ID NO: 1720972 - RNA, 19 nt, Homo sapiens
  misc_RNA (1)...(19): siRNA sense strand
ggaagaggacccugaaagu

SEQ ID NO: 1720973 - RNA, 19 nt, Homo sapiens
  misc_RNA (1)...(19): siRNA sense strand
gagauaaugucagcaugau

SEQ ID NO: 1720974 - RNA, 19 nt, Homo sapiens
  misc_RNA (1)...(19): siRNA sense strand
ggccugagauagacaguca

SEQ ID NO: 1720975 - RNA, 19 nt, Homo sapiens
  misc_RNA (1)...(19): siRNA sense strand
ugaaugacaccaucaagga

SEQ ID NO: 1720976 - RNA, 19 nt, Homo sapiens
  misc_RNA (1)...(19): siRNA sense strand
gcaaagaucagagugaaac

SEQ ID NO: 1720977 - RNA, 19 nt, Homo sapiens
  misc_RNA (1)...(19): siRNA sense strand
caaugcaugucugcgauga

SEQ ID NO: 1720978 - RNA, 19 nt, Homo sapiens
  misc_RNA (1)...(19): siRNA sense strand
ggaacuggcaccacuacug

SEQ ID NO: 1720979 - RNA, 19 nt, Homo sapiens
  misc_RNA (1)...(19): siRNA sense strand
gagugaaacaggauaagau

SEQ ID NO: 1720980 - RNA, 19 nt, Homo sapiens
  misc_RNA (1)...(19): siRNA sense strand
ccgagaaccugaagagacu

SEQ ID NO: 1720981 - RNA, 19 nt, Homo sapiens
  misc_RNA (1)...(19): siRNA sense strand
cugcaaagaucagagugaa

SEQ ID NO: 1720982 - RNA, 19 nt, Homo sapiens
  misc_RNA (1)...(19): siRNA sense strand
uccgggagcugggagauaa

SEQ ID NO: 1720983 - RNA, 19 nt, Homo sapiens
  misc_RNA (1)...(19): siRNA sense strand
gaucagagugaaacaggau

SEQ ID NO: 1720984 - RNA, 19 nt, Homo sapiens
  misc_RNA (1)...(19): siRNA sense strand
caucugguguacccugaga

SEQ ID NO: 1720985 - RNA, 19 nt, Homo sapiens
  misc_RNA (1)...(19): siRNA sense strand
gagcugggagauaauguca

SEQ ID NO: 1720986 - RNA, 19 nt, Homo sapiens
  misc_RNA (1)...(19): siRNA sense strand
ugaaagugcucaccuuccu

SEQ ID NO: 1720987 - RNA, 19 nt, Homo sapiens
  misc_RNA (1)...(19): siRNA sense strand
ccacccagccuucaucaag

SEQ ID NO: 1720988 - RNA, 19 nt, Homo sapiens
  misc_RNA (1)...(19): siRNA sense strand
gcacgaugcagacuuugag

SEQ ID NO: 1720989 - RNA, 19 nt, Homo sapiens
  misc_RNA (1)...(19): siRNA sense strand
acccagccuucaucaagua

SEQ ID NO: 1720990 - RNA, 19 nt, Homo sapiens
  misc_RNA (1)...(19): siRNA sense strand
cagccuucaucaaguaugu

SEQ ID NO: 1720991 - RNA, 19 nt, Homo sapiens
  misc_RNA (1)...(19): siRNA sense strand
caccuuggccuccaucaau

SEQ ID NO: 1720992 - RNA, 19 nt, Homo sapiens
  misc_RNA (1)...(19): siRNA sense strand
cuucaucaaguaugucuuu

SEQ ID NO: 1720993 - RNA, 19 nt, Homo sapiens
  misc_RNA (1)...(19): siRNA sense strand
gagaaccugaagagacuga

SEQ ID NO: 1720994 - RNA, 19 nt, Homo sapiens
  misc_RNA (1)...(19): siRNA sense strand
ugagggagucuucuuaugg

SEQ ID NO: 1720995 - RNA, 19 nt, Homo sapiens
  misc_RNA (1)...(19): siRNA sense strand
gacgacaccuaccgauggu

SEQ ID NO: 1720996 - RNA, 19 nt, Homo sapiens
  misc_RNA (1)...(19): siRNA sense strand
cuuaugggccugagauaga

SEQ ID NO: 1720997 - RNA, 19 nt, Homo sapiens
  misc_RNA (1)...(19): siRNA sense strand
ucagagugaaacaggauaa

SEQ ID NO: 1720998 - RNA, 19 nt, Homo sapiens
  misc_RNA (1)...(19): siRNA sense strand
cugagggagucuucuuaug

SEQ ID NO: 1720999 - RNA, 19 nt, Homo sapiens
  misc_RNA (1)...(19): siRNA sense strand
caagaccacccaccaucug

SEQ ID NO: 1721000 - RNA, 19 nt, Homo sapiens
  misc_RNA (1)...(19): siRNA sense strand
gaaccugaagagacugauc

SEQ ID NO: 1721001 - RNA, 19 nt, Homo sapiens
  misc_RNA (1)...(19): siRNA sense strand
accuuggccuccaucaaua

SEQ ID NO: 1721002 - RNA, 19 nt, Homo sapiens
  misc_RNA (1)...(19): siRNA sense strand
cacccagccuucaucaagu

SEQ ID NO: 1721003 - RNA, 19 nt, Homo sapiens
  misc_RNA (1)...(19): siRNA sense strand
ucggucaucuucucaaugc

SEQ ID NO: 1721004 - RNA, 19 nt, Homo sapiens
  misc_RNA (1)...(19): siRNA sense strand
cacgggcgauacccaucua

SEQ ID NO: 1721005 - RNA, 19 nt, Homo sapiens
  misc_RNA (1)...(19): siRNA sense strand
ucaccuccuucuuccugaa

SEQ ID NO: 1721006 - RNA, 19 nt, Homo sapiens
  misc_RNA (1)...(19): siRNA sense strand
caucaaggagcuguucaga

SEQ ID NO: 1721007 - RNA, 19 nt, Homo sapiens
  misc_RNA (1)...(19): siRNA sense strand
cugggaauguggacccuau

SEQ ID NO: 1721008 - RNA, 19 nt, Homo sapiens
  misc_RNA (1)...(19): siRNA sense strand
caucaccacgggcaccauu

SEQ ID NO: 1721009 - RNA, 19 nt, Homo sapiens
  misc_RNA (1)...(19): siRNA sense strand
gcacgggcgauacccaucu

SEQ ID NO: 1721010 - RNA, 19 nt, Homo sapiens
  misc_RNA (1)...(19): siRNA sense strand
gcaccauuucccacaccua

SEQ ID NO: 1721011 - RNA, 19 nt, Homo sapiens
  misc_RNA (1)...(19): siRNA sense strand
ucaccuuccucgugcucuu

SEQ ID NO: 1721012 - RNA, 19 nt, Homo sapiens
  misc_RNA (1)...(19): siRNA sense strand
cggaagaggacccugaaag

SEQ ID NO: 1721013 - RNA, 19 nt, Homo sapiens
  misc_RNA (1)...(19): siRNA sense strand
gcgaugagguggacuugua

SEQ ID NO: 1721014 - RNA, 19 nt, Homo sapiens
  misc_RNA (1)...(19): siRNA sense strand
ucaaggagcuguucagagu

SEQ ID NO: 1721015 - RNA, 19 nt, Homo sapiens
  misc_RNA (1)...(19): siRNA sense strand
ggagauaaugucagcauga

SEQ ID NO: 1721016 - RNA, 19 nt, Homo sapiens
  misc_RNA (1)...(19): siRNA sense strand
ugaagagacugaucaagca

SEQ ID NO: 1721017 - RNA, 19 nt, Homo sapiens
  misc_RNA (1)...(19): siRNA sense strand
gaagaggacccugaaagug

SEQ ID NO: 1721018 - RNA, 19 nt, Homo sapiens
  misc_RNA (1)...(19): siRNA sense strand
ggaagaggacccugaaagu

SEQ ID NO: 1721019 - RNA, 19 nt, Homo sapiens
  misc_RNA (1)...(19): siRNA sense strand
gagauaaugucagcaugau

SEQ ID NO: 1721020 - RNA, 19 nt, Homo sapiens
  misc_RNA (1)...(19): siRNA sense strand
ggccugagauagacaguca

SEQ ID NO: 1721021 - RNA, 19 nt, Homo sapiens
  misc_RNA (1)...(19): siRNA sense strand
ugaaugacaccaucaagga

SEQ ID NO: 1721022 - RNA, 19 nt, Homo sapiens
  misc_RNA (1)...(19): siRNA sense strand
gcaaagaucagagugaaac

SEQ ID NO: 1721023 - RNA, 19 nt, Homo sapiens
  misc_RNA (1)...(19): siRNA sense strand
caaugcaugucugcgauga

SEQ ID NO: 1721024 - RNA, 19 nt, Homo sapiens
  misc_RNA (1)...(19): siRNA sense strand
ggaacuggcaccacuacug

SEQ ID NO: 1721025 - RNA, 19 nt, Homo sapiens
  misc_RNA (1)...(19): siRNA sense strand
gagugaaacaggauaagau

SEQ ID NO: 1721026 - RNA, 19 nt, Homo sapiens
  misc_RNA (1)...(19): siRNA sense strand
ccgagaaccugaagagacu

SEQ ID NO: 1721027 - RNA, 19 nt, Homo sapiens
  misc_RNA (1)...(19): siRNA sense strand
cugcaaagaucagagugaa

SEQ ID NO: 1721028 - RNA, 19 nt, Homo sapiens
  misc_RNA (1)...(19): siRNA sense strand
uccgggagcugggagauaa

SEQ ID NO: 1721029 - RNA, 19 nt, Homo sapiens
  misc_RNA (1)...(19): siRNA sense strand
gaucagagugaaacaggau

SEQ ID NO: 1721030 - RNA, 19 nt, Homo sapiens
  misc_RNA (1)...(19): siRNA sense strand
caucugguguacccugaga

SEQ ID NO: 1721031 - RNA, 19 nt, Homo sapiens
  misc_RNA (1)...(19): siRNA sense strand
gagcugggagauaauguca

SEQ ID NO: 1721032 - RNA, 19 nt, Homo sapiens
  misc_RNA (1)...(19): siRNA sense strand
ugaaagugcucaccuuccu

SEQ ID NO: 1721033 - RNA, 19 nt, Homo sapiens
  misc_RNA (1)...(19): siRNA sense strand
ccacccagccuucaucaag

SEQ ID NO: 1721034 - RNA, 19 nt, Homo sapiens
  misc_RNA (1)...(19): siRNA sense strand
gcacgaugcagacuuugag

SEQ ID NO: 1721035 - RNA, 19 nt, Homo sapiens
  misc_RNA (1)...(19): siRNA sense strand
acccagccuucaucaagua

SEQ ID NO: 1721036 - RNA, 19 nt, Homo sapiens
  misc_RNA (1)...(19): siRNA sense strand
cagccuucaucaaguaugu

SEQ ID NO: 1721037 - RNA, 19 nt, Homo sapiens
  misc_RNA (1)...(19): siRNA sense strand
caccuuggccuccaucaau

SEQ ID NO: 1721038 - RNA, 19 nt, Homo sapiens
  misc_RNA (1)...(19): siRNA sense strand
cuucaucaaguaugucuuu

SEQ ID NO: 1721039 - RNA, 19 nt, Homo sapiens
  misc_RNA (1)...(19): siRNA sense strand
gagaaccugaagagacuga

SEQ ID NO: 1721040 - RNA, 19 nt, Homo sapiens
  misc_RNA (1)...(19): siRNA sense strand
ugagggagucuucuuaugg

SEQ ID NO: 1721041 - RNA, 19 nt, Homo sapiens
  misc_RNA (1)...(19): siRNA sense strand
gacgacaccuaccgauggu

SEQ ID NO: 1721042 - RNA, 19 nt, Homo sapiens
  misc_RNA (1)...(19): siRNA sense strand
cuuaugggccugagauaga

SEQ ID NO: 1721043 - RNA, 19 nt, Homo sapiens
  misc_RNA (1)...(19): siRNA sense strand
ucagagugaaacaggauaa

SEQ ID NO: 1721044 - RNA, 19 nt, Homo sapiens
  misc_RNA (1)...(19): siRNA sense strand
cugagggagucuucuuaug

SEQ ID NO: 1721045 - RNA, 19 nt, Homo sapiens
  misc_RNA (1)...(19): siRNA sense strand
caagaccacccaccaucug

SEQ ID NO: 1721046 - RNA, 19 nt, Homo sapiens
  misc_RNA (1)...(19): siRNA sense strand
gaaccugaagagacugauc

SEQ ID NO: 1721047 - RNA, 19 nt, Homo sapiens
  misc_RNA (1)...(19): siRNA sense strand
accuuggccuccaucaaua

SEQ ID NO: 1721048 - RNA, 19 nt, Homo sapiens
  misc_RNA (1)...(19): siRNA sense strand
cacccagccuucaucaagu

SEQ ID NO: 1721049 - RNA, 19 nt, Homo sapiens
  misc_RNA (1)...(19): siRNA sense strand
ucggucaucuucucaaugc

SEQ ID NO: 1721050 - RNA, 19 nt, Homo sapiens
  misc_RNA (1)...(19): siRNA sense strand
cacgggcgauacccaucua

SEQ ID NO: 1721051 - RNA, 19 nt, Homo sapiens
  misc_RNA (1)...(19): siRNA sense strand
ucaccuccuucuuccugaa

SEQ ID NO: 1721052 - RNA, 19 nt, Homo sapiens
  misc_RNA (1)...(19): siRNA sense strand
caucaaggagcuguucaga

SEQ ID NO: 1721053 - RNA, 19 nt, Homo sapiens
  misc_RNA (1)...(19): siRNA sense strand
cugggaauguggacccuau

SEQ ID NO: 1721054 - RNA, 19 nt, Homo sapiens
  misc_RNA (1)...(19): siRNA sense strand
caucaccacgggcaccauu

SEQ ID NO: 1721055 - RNA, 19 nt, Homo sapiens
  misc_RNA (1)...(19): siRNA sense strand
gcacgggcgauacccaucu

SEQ ID NO: 1721056 - RNA, 19 nt, Homo sapiens
  misc_RNA (1)...(19): siRNA sense strand
gcaccauuucccacaccua

SEQ ID NO: 1721057 - RNA, 19 nt, Homo sapiens
  misc_RNA (1)...(19): siRNA sense strand
ucaccuuccucgugcucuu

SEQ ID NO: 1721058 - RNA, 19 nt, Homo sapiens
  misc_RNA (1)...(19): siRNA sense strand
cggaagaggacccugaaag

SEQ ID NO: 1721059 - RNA, 19 nt, Homo sapiens
  misc_RNA (1)...(19): siRNA sense strand
gagcaggaaucacccauua

SEQ ID NO: 1721060 - RNA, 19 nt, Homo sapiens
  misc_RNA (1)...(19): siRNA sense strand
gcaaacacaugcuuuaaug

SEQ ID NO: 1721061 - RNA, 19 nt, Homo sapiens
  misc_RNA (1)...(19): siRNA sense strand
ggaaauugcagaaguguua

SEQ ID NO: 1721062 - RNA, 19 nt, Homo sapiens
  misc_RNA (1)...(19): siRNA sense strand
gaaaccaaaucaagcuaaa

SEQ ID NO: 1721063 - RNA, 19 nt, Homo sapiens
  misc_RNA (1)...(19): siRNA sense strand
gcacugaucuguggcuuga

SEQ ID NO: 1721064 - RNA, 19 nt, Homo sapiens
  misc_RNA (1)...(19): siRNA sense strand
ucaaaucgcucgccucuca

SEQ ID NO: 1721065 - RNA, 19 nt, Homo sapiens
  misc_RNA (1)...(19): siRNA sense strand
ggugguaucuaaagaagaa

SEQ ID NO: 1721066 - RNA, 19 nt, Homo sapiens
  misc_RNA (1)...(19): siRNA sense strand
gcagaaguguuauuucaca

SEQ ID NO: 1721067 - RNA, 19 nt, Homo sapiens
  misc_RNA (1)...(19): siRNA sense strand
gaaguguuauuucacauuc

SEQ ID NO: 1721068 - RNA, 19 nt, Homo sapiens
  misc_RNA (1)...(19): siRNA sense strand
aaagagaccagcaaagaua

SEQ ID NO: 1721069 - RNA, 19 nt, Homo sapiens
  misc_RNA (1)...(19): siRNA sense strand
cagcaaagauacugaaaca

SEQ ID NO: 1721070 - RNA, 19 nt, Homo sapiens
  misc_RNA (1)...(19): siRNA sense strand
gaagaaguuuggcaauguc

SEQ ID NO: 1721071 - RNA, 19 nt, Homo sapiens
  misc_RNA (1)...(19): siRNA sense strand
ugagaucgguugcuggaaa

SEQ ID NO: 1721072 - RNA, 19 nt, Homo sapiens
  misc_RNA (1)...(19): siRNA sense strand
uguggaaggucuuaaugua

SEQ ID NO: 1721073 - RNA, 19 nt, Homo sapiens
  misc_RNA (1)...(19): siRNA sense strand
gguguucacuugaguuuua

SEQ ID NO: 1721074 - RNA, 19 nt, Homo sapiens
  misc_RNA (1)...(19): siRNA sense strand
gcaggaaucacccauuaug

SEQ ID NO: 1721075 - RNA, 19 nt, Homo sapiens
  misc_RNA (1)...(19): siRNA sense strand
gaagaaagacgaaaagaug

SEQ ID NO: 1721076 - RNA, 19 nt, Homo sapiens
  misc_RNA (1)...(19): siRNA sense strand
uggccaaggugguaucuaa

SEQ ID NO: 1721077 - RNA, 19 nt, Homo sapiens
  misc_RNA (1)...(19): siRNA sense strand
ccaaggugguaucuaaaga

SEQ ID NO: 1721078 - RNA, 19 nt, Homo sapiens
  misc_RNA (1)...(19): siRNA sense strand
ucaaggccauuucaucaga

SEQ ID NO: 1721079 - RNA, 19 nt, Homo sapiens
  misc_RNA (1)...(19): siRNA sense strand
cagaagaaguuuggcaaug

SEQ ID NO: 1721080 - RNA, 19 nt, Homo sapiens
  misc_RNA (1)...(19): siRNA sense strand
gcaaggaccaaguguggaa

SEQ ID NO: 1721081 - RNA, 19 nt, Homo sapiens
  misc_RNA (1)...(19): siRNA sense strand
caccaaaggaggaagauuu

SEQ ID NO: 1721082 - RNA, 19 nt, Homo sapiens
  misc_RNA (1)...(19): siRNA sense strand
gcaaguuccuccauaagcu

SEQ ID NO: 1721083 - RNA, 19 nt, Homo sapiens
  misc_RNA (1)...(19): siRNA sense strand
uaaugaagguggacaagag

SEQ ID NO: 1721084 - RNA, 19 nt, Homo sapiens
  misc_RNA (1)...(19): siRNA sense strand
ggaguguuccuuugcauug

SEQ ID NO: 1721085 - RNA, 19 nt, Homo sapiens
  misc_RNA (1)...(19): siRNA sense strand
cagaugaggcccagaagaa

SEQ ID NO: 1721086 - RNA, 19 nt, Homo sapiens
  misc_RNA (1)...(19): siRNA sense strand
gaugaacauuaguggcaaa

SEQ ID NO: 1721087 - RNA, 19 nt, Homo sapiens
  misc_RNA (1)...(19): siRNA sense strand
gaaaccacuuuggaaaaua

SEQ ID NO: 1721088 - RNA, 19 nt, Homo sapiens
  misc_RNA (1)...(19): siRNA sense strand
agaagaaguuuggcaaugu

SEQ ID NO: 1721089 - RNA, 19 nt, Homo sapiens
  misc_RNA (1)...(19): siRNA sense strand
gagaggcugucggcaaguu

SEQ ID NO: 1721090 - RNA, 19 nt, Homo sapiens
  misc_RNA (1)...(19): siRNA sense strand
gaaccaucuucuuuaacau

SEQ ID NO: 1721091 - RNA, 19 nt, Homo sapiens
  misc_RNA (1)...(19): siRNA sense strand
ggaaaacucuccgucuuug

SEQ ID NO: 1721092 - RNA, 19 nt, Homo sapiens
  misc_RNA (1)...(19): siRNA sense strand
caggacaucuugaccaucu

SEQ ID NO: 1721093 - RNA, 19 nt, Homo sapiens
  misc_RNA (1)...(19): siRNA sense strand
acagugacgauucauauuu

SEQ ID NO: 1721094 - RNA, 19 nt, Homo sapiens
  misc_RNA (1)...(19): siRNA sense strand
uugcagaaguguuauuuca

SEQ ID NO: 1721095 - RNA, 19 nt, Homo sapiens
  misc_RNA (1)...(19): siRNA sense strand
ucauuacgauuagccuaua

SEQ ID NO: 1721096 - RNA, 19 nt, Homo sapiens
  misc_RNA (1)...(19): siRNA sense strand
acugaucuguggcuugaua

SEQ ID NO: 1721097 - RNA, 19 nt, Homo sapiens
  misc_RNA (1)...(19): siRNA sense strand
ggaaaccacuuuggaaaau

SEQ ID NO: 1721098 - RNA, 19 nt, Homo sapiens
  misc_RNA (1)...(19): siRNA sense strand
ugacagugacgauucauau

SEQ ID NO: 1721099 - RNA, 19 nt, Homo sapiens
  misc_RNA (1)...(19): siRNA sense strand
gaaacgcuagugcaucuuc

SEQ ID NO: 1721100 - RNA, 19 nt, Homo sapiens
  misc_RNA (1)...(19): siRNA sense strand
gaccauagagcaggaauca

SEQ ID NO: 1721101 - RNA, 19 nt, Homo sapiens
  misc_RNA (1)...(19): siRNA sense strand
caaacacaugcuuuaauga

SEQ ID NO: 1721102 - RNA, 19 nt, Homo sapiens
  misc_RNA (1)...(19): siRNA sense strand
caaggugguaucuaaagaa

SEQ ID NO: 1721103 - RNA, 19 nt, Homo sapiens
  misc_RNA (1)...(19): siRNA sense strand
gcucgccucucaagcaaca

SEQ ID NO: 1721104 - RNA, 19 nt, Homo sapiens
  misc_RNA (1)...(19): siRNA sense strand
aagcucggcugaucuguuc

SEQ ID NO: 1721105 - RNA, 19 nt, Homo sapiens
  misc_RNA (1)...(19): siRNA sense strand
uagcugggaugacaguuca

SEQ ID NO: 1721106 - RNA, 19 nt, Homo sapiens
  misc_RNA (1)...(19): siRNA sense strand
cacauucagugacuucaga

SEQ ID NO: 1721107 - RNA, 19 nt, Homo sapiens
  misc_RNA (1)...(19): siRNA sense strand
ugacgagccaguggaguua

SEQ ID NO: 1721108 - RNA, 19 nt, Homo sapiens
  misc_RNA (1)...(19): siRNA sense strand
gaguguuccuuugcauuga

SEQ ID NO: 1721109 - RNA, 19 nt, Homo sapiens
  misc_RNA (1)...(19): siRNA sense strand
ccuauggaguguuccuuug

SEQ ID NO: 1721110 - RNA, 19 nt, Homo sapiens
  misc_RNA (1)...(19): siRNA sense strand
gaaaagaugaacauuagug

SEQ ID NO: 1721111 - RNA, 19 nt, Homo sapiens
  misc_RNA (1)...(19): siRNA sense strand
gcaugcaagucggaggaaa

SEQ ID NO: 1721112 - RNA, 19 nt, Homo sapiens
  misc_RNA (1)...(19): siRNA sense strand
ucggcaaguuccuccauaa

SEQ ID NO: 1721113 - RNA, 19 nt, Homo sapiens
  misc_RNA (1)...(19): siRNA sense strand
gccgcaagccagauuauga

SEQ ID NO: 1721114 - RNA, 19 nt, Homo sapiens
  misc_RNA (1)...(19): siRNA sense strand
cacaggcuauucagacaga

SEQ ID NO: 1721115 - RNA, 19 nt, Homo sapiens
  misc_RNA (1)...(19): siRNA sense strand
ugacaccaaugccaaguac

SEQ ID NO: 1721116 - RNA, 19 nt, Homo sapiens
  misc_RNA (1)...(19): siRNA sense strand
ggaggaaacgcuagugcau

SEQ ID NO: 1721117 - RNA, 19 nt, Homo sapiens
  misc_RNA (1)...(19): siRNA sense strand
gaucuacagaguuggauuc

SEQ ID NO: 1721118 - RNA, 19 nt, Homo sapiens
  misc_RNA (1)...(19): siRNA sense strand
gcucggugcccacuaacaa

SEQ ID NO: 1721119 - RNA, 19 nt, Homo sapiens
  misc_RNA (1)...(19): siRNA sense strand
gggaugacaguucagauuc

SEQ ID NO: 1721120 - RNA, 19 nt, Homo sapiens
  misc_RNA (1)...(19): siRNA sense strand
gacagugacgauucauauu

SEQ ID NO: 1721121 - RNA, 19 nt, Homo sapiens
  misc_RNA (1)...(19): siRNA sense strand
gacgaaaagaugaacauua

SEQ ID NO: 1721122 - RNA, 19 nt, Homo sapiens
  misc_RNA (1)...(19): siRNA sense strand
cauuacgauuagccuauaa

SEQ ID NO: 1721123 - RNA, 19 nt, Homo sapiens
  misc_RNA (1)...(19): siRNA sense strand
gcucagaaacuggcaaaca

SEQ ID NO: 1721124 - RNA, 19 nt, Homo sapiens
  misc_RNA (1)...(19): siRNA sense strand
gguauccucuaucauaaaa

SEQ ID NO: 1721125 - RNA, 19 nt, Homo sapiens
  misc_RNA (1)...(19): siRNA sense strand
caucaaggccuguggaaac

SEQ ID NO: 1721126 - RNA, 19 nt, Homo sapiens
  misc_RNA (1)...(19): siRNA sense strand
ggcaaacacaugcuuuaau

SEQ ID NO: 1721127 - RNA, 19 nt, Homo sapiens
  misc_RNA (1)...(19): siRNA sense strand
uauucgaucuacagaguug

SEQ ID NO: 1721128 - RNA, 19 nt, Homo sapiens
  misc_RNA (1)...(19): siRNA sense strand
gaucuguggcuugauaguu

SEQ ID NO: 1721129 - RNA, 19 nt, Homo sapiens
  misc_RNA (1)...(19): siRNA sense strand
ccuauaaggaucuugaaau

SEQ ID NO: 1721130 - RNA, 19 nt, Homo sapiens
  misc_RNA (1)...(19): siRNA sense strand
caagagcaaggaccaagug

SEQ ID NO: 1721131 - RNA, 19 nt, Homo sapiens
  misc_RNA (1)...(19): siRNA sense strand
ggucuuaauguaccaacaa

SEQ ID NO: 1721132 - RNA, 19 nt, Homo sapiens
  misc_RNA (1)...(19): siRNA sense strand
caucagauauguauuuugg

SEQ ID NO: 1721133 - RNA, 19 nt, Homo sapiens
  misc_RNA (1)...(19): siRNA sense strand
uuaaggagcaguucuuucu

SEQ ID NO: 1721134 - RNA, 19 nt, Homo sapiens
  misc_RNA (1)...(19): siRNA sense strand
gaaauugcagaaguguuau

SEQ ID NO: 1721135 - RNA, 19 nt, Homo sapiens
  misc_RNA (1)...(19): siRNA sense strand
ggacaucuugaccaucuuc

SEQ ID NO: 1721136 - RNA, 19 nt, Homo sapiens
  misc_RNA (1)...(19): siRNA sense strand
gagcucagaaacuggcaaa

SEQ ID NO: 1721137 - RNA, 19 nt, Homo sapiens
  misc_RNA (1)...(19): siRNA sense strand
gcuagugcaucuuccuuuu

SEQ ID NO: 1721138 - RNA, 19 nt, Homo sapiens
  misc_RNA (1)...(19): siRNA sense strand
gucggcaaguuccuccaua

SEQ ID NO: 1721139 - RNA, 19 nt, Homo sapiens
  misc_RNA (1)...(19): siRNA sense strand
ugucaaggccauuucauca

SEQ ID NO: 1721140 - RNA, 19 nt, Homo sapiens
  misc_RNA (1)...(19): siRNA sense strand
gaaguuuggcaaugucaag

SEQ ID NO: 1721141 - RNA, 19 nt, Homo sapiens
  misc_RNA (1)...(19): siRNA sense strand
cagauuaugagccaguuga

SEQ ID NO: 1721142 - RNA, 19 nt, Homo sapiens
  misc_RNA (1)...(19): siRNA sense strand
ugaugacagugacgauuca

SEQ ID NO: 1721143 - RNA, 19 nt, Homo sapiens
  misc_RNA (1)...(19): siRNA sense strand
caaaugaagaaagacgaaa

SEQ ID NO: 1721144 - RNA, 19 nt, Homo sapiens
  misc_RNA (1)...(19): siRNA sense strand
acgauuagccuauaaggau

SEQ ID NO: 1721145 - RNA, 19 nt, Homo sapiens
  misc_RNA (1)...(19): siRNA sense strand
gaaguuugggagcucagaa

SEQ ID NO: 1721146 - RNA, 19 nt, Homo sapiens
  misc_RNA (1)...(19): siRNA sense strand
cuucagauaugcagaccau

SEQ ID NO: 1721147 - RNA, 19 nt, Homo sapiens
  misc_RNA (1)...(19): siRNA sense strand
ggaucgcuacgguucuuaa

SEQ ID NO: 1721148 - RNA, 19 nt, Homo sapiens
  misc_RNA (1)...(19): siRNA sense strand
aggaaacgcuagugcaucu

SEQ ID NO: 1721149 - RNA, 19 nt, Homo sapiens
  misc_RNA (1)...(19): siRNA sense strand
caggaucgcuacgguucuu

SEQ ID NO: 1721150 - RNA, 19 nt, Homo sapiens
  misc_RNA (1)...(19): siRNA sense strand
gauuaugagccaguugaaa

SEQ ID NO: 1721151 - RNA, 19 nt, Homo sapiens
  misc_RNA (1)...(19): siRNA sense strand
gaaaaccacaggcuauuca

SEQ ID NO: 1721152 - RNA, 19 nt, Homo sapiens
  misc_RNA (1)...(19): siRNA sense strand
ugacaguucagauuccuau

SEQ ID NO: 1721153 - RNA, 19 nt, Homo sapiens
  misc_RNA (1)...(19): siRNA sense strand
gucuuaauguaccaacaaa

SEQ ID NO: 1721154 - RNA, 19 nt, Homo sapiens
  misc_RNA (1)...(19): siRNA sense strand
caaggccauuucaucagau

SEQ ID NO: 1721155 - RNA, 19 nt, Homo sapiens
  misc_RNA (1)...(19): siRNA sense strand
gaugaggcccagaagaagu

SEQ ID NO: 1721156 - RNA, 19 nt, Homo sapiens
  misc_RNA (1)...(19): siRNA sense strand
caguucagauuccuauugg

SEQ ID NO: 1721157 - RNA, 19 nt, Homo sapiens
  misc_RNA (1)...(19): siRNA sense strand
ucaaaugaagaaagacgaa

SEQ ID NO: 1721158 - RNA, 19 nt, Homo sapiens
  misc_RNA (1)...(19): siRNA sense strand
agaaaccaaaucaagcuaa

SEQ ID NO: 1721159 - RNA, 19 nt, Homo sapiens
  misc_RNA (1)...(19): siRNA sense strand
gagaguaccugcuucagua

SEQ ID NO: 1721160 - RNA, 19 nt, Homo sapiens
  misc_RNA (1)...(19): siRNA sense strand
gaacauuucaccucucaua

SEQ ID NO: 1721161 - RNA, 19 nt, Homo sapiens
  misc_RNA (1)...(19): siRNA sense strand
cauuucaccucucauauua

SEQ ID NO: 1721162 - RNA, 19 nt, Homo sapiens
  misc_RNA (1)...(19): siRNA sense strand
cauaagagcccagcugaaa

SEQ ID NO: 1721163 - RNA, 19 nt, Homo sapiens
  misc_RNA (1)...(19): siRNA sense strand
gaaacgagaguaccugcuu

SEQ ID NO: 1721164 - RNA, 19 nt, Homo sapiens
  misc_RNA (1)...(19): siRNA sense strand
caacauaucuccggaaacc

SEQ ID NO: 1721165 - RNA, 19 nt, Homo sapiens
  misc_RNA (1)...(19): siRNA sense strand
gcaagaacaauaaaugucu

SEQ ID NO: 1721166 - RNA, 19 nt, Homo sapiens
  misc_RNA (1)...(19): siRNA sense strand
aaacugagagggauaggaa

SEQ ID NO: 1721167 - RNA, 19 nt, Homo sapiens
  misc_RNA (1)...(19): siRNA sense strand
uacaacauaucuccggaaa

SEQ ID NO: 1721168 - RNA, 19 nt, Homo sapiens
  misc_RNA (1)...(19): siRNA sense strand
gaaggaaaauuggaucgaa

SEQ ID NO: 1721169 - RNA, 19 nt, Homo sapiens
  misc_RNA (1)...(19): siRNA sense strand
ugagagggauaggaaagaa

SEQ ID NO: 1721170 - RNA, 19 nt, Homo sapiens
  misc_RNA (1)...(19): siRNA sense strand
gccgagcgguuggccauaa

SEQ ID NO: 1721171 - RNA, 19 nt, Homo sapiens
  misc_RNA (1)...(19): siRNA sense strand
ggagcucuguguggauuug

SEQ ID NO: 1721172 - RNA, 19 nt, Homo sapiens
  misc_RNA (1)...(19): siRNA sense strand
gaacaauaaaugucuaucc

SEQ ID NO: 1721173 - RNA, 19 nt, Homo sapiens
  misc_RNA (1)...(19): siRNA sense strand
aaacuuauccaggaaggaa

SEQ ID NO: 1721174 - RNA, 19 nt, Homo sapiens
  misc_RNA (1)...(19): siRNA sense strand
gccgagggcucaucgaaaa

SEQ ID NO: 1721175 - RNA, 19 nt, Homo sapiens
  misc_RNA (1)...(19): siRNA sense strand
gagagggauaggaaagaaa

SEQ ID NO: 1721176 - RNA, 19 nt, Homo sapiens
  misc_RNA (1)...(19): siRNA sense strand
aauccugccuugcuucguu

SEQ ID NO: 1721177 - RNA, 19 nt, Homo sapiens
  misc_RNA (1)...(19): siRNA sense strand
ggccuaugcaagaacaaua

SEQ ID NO: 1721178 - RNA, 19 nt, Homo sapiens
  misc_RNA (1)...(19): siRNA sense strand
ucgaacauuucaccucuca

SEQ ID NO: 1721179 - RNA, 19 nt, Homo sapiens
  misc_RNA (1)...(19): siRNA sense strand
gccuaugcaagaacaauaa

SEQ ID NO: 1721180 - RNA, 19 nt, Homo sapiens
  misc_RNA (1)...(19): siRNA sense strand
acauuucaccucucauauu

SEQ ID NO: 1721181 - RNA, 19 nt, Homo sapiens
  misc_RNA (1)...(19): siRNA sense strand
ugucuauccuaauuucaga

SEQ ID NO: 1721182 - RNA, 19 nt, Homo sapiens
  misc_RNA (1)...(19): siRNA sense strand
gaaaauuggaucgaacauu

SEQ ID NO: 1721183 - RNA, 19 nt, Homo sapiens
  misc_RNA (1)...(19): siRNA sense strand
cgaaaauccugccuugcuu

SEQ ID NO: 1721184 - RNA, 19 nt, Homo sapiens
  misc_RNA (1)...(19): siRNA sense strand
ugggagcucuguguggauu

SEQ ID NO: 1721185 - RNA, 19 nt, Homo sapiens
  misc_RNA (1)...(19): siRNA sense strand
ccagccgaauacaacauau

SEQ ID NO: 1721186 - RNA, 19 nt, Homo sapiens
  misc_RNA (1)...(19): siRNA sense strand
cgacccagccgaauacaac

SEQ ID NO: 1721187 - RNA, 19 nt, Homo sapiens
  misc_RNA (1)...(19): siRNA sense strand
cgagaguaccugcuucagu

SEQ ID NO: 1721188 - RNA, 19 nt, Homo sapiens
  misc_RNA (1)...(19): siRNA sense strand
uuucagacccacuccuaaa

SEQ ID NO: 1721189 - RNA, 19 nt, Homo sapiens
  misc_RNA (1)...(19): siRNA sense strand
ccccucaucuucauuuauu

SEQ ID NO: 1721190 - RNA, 19 nt, Homo sapiens
  misc_RNA (1)...(19): siRNA sense strand
gaaagcaacuccugacaau

SEQ ID NO: 1721191 - RNA, 19 nt, Homo sapiens
  misc_RNA (1)...(19): siRNA sense strand
caagauggauugcccguaa

SEQ ID NO: 1721192 - RNA, 19 nt, Homo sapiens
  misc_RNA (1)...(19): siRNA sense strand
caucagaccuucuagauuc

SEQ ID NO: 1721193 - RNA, 19 nt, Homo sapiens
  misc_RNA (1)...(19): siRNA sense strand
acaaggaacuuauugauca

SEQ ID NO: 1721194 - RNA, 19 nt, Homo sapiens
  misc_RNA (1)...(19): siRNA sense strand
gagauggacccugguauua

SEQ ID NO: 1721195 - RNA, 19 nt, Homo sapiens
  misc_RNA (1)...(19): siRNA sense strand
aagcaacuccugacaauua

SEQ ID NO: 1721196 - RNA, 19 nt, Homo sapiens
  misc_RNA (1)...(19): siRNA sense strand
gcccguaauuucuaugaua

SEQ ID NO: 1721197 - RNA, 19 nt, Homo sapiens
  misc_RNA (1)...(19): siRNA sense strand
gaacacugggaauauuaua

SEQ ID NO: 1721198 - RNA, 19 nt, Homo sapiens
  misc_RNA (1)...(19): siRNA sense strand
ucauaacucuggugaaugu

SEQ ID NO: 1721199 - RNA, 19 nt, Homo sapiens
  misc_RNA (1)...(19): siRNA sense strand
ggagauggacccugguauu

SEQ ID NO: 1721200 - RNA, 19 nt, Homo sapiens
  misc_RNA (1)...(19): siRNA sense strand
gaaggcugcugcuccuguu

SEQ ID NO: 1721201 - RNA, 19 nt, Homo sapiens
  misc_RNA (1)...(19): siRNA sense strand
cagaacacugggaauauua

SEQ ID NO: 1721202 - RNA, 19 nt, Homo sapiens
  misc_RNA (1)...(19): siRNA sense strand
gaacaauggccguccuuca

SEQ ID NO: 1721203 - RNA, 19 nt, Homo sapiens
  misc_RNA (1)...(19): siRNA sense strand
uaacucuggugaauguauu

SEQ ID NO: 1721204 - RNA, 19 nt, Homo sapiens
  misc_RNA (1)...(19): siRNA sense strand
ugagacaauugacaaggaa

SEQ ID NO: 1721205 - RNA, 19 nt, Homo sapiens
  misc_RNA (1)...(19): siRNA sense strand
aagcugaacuagcagaaau

SEQ ID NO: 1721206 - RNA, 19 nt, Homo sapiens
  misc_RNA (1)...(19): siRNA sense strand
gagauucuacauugcauug

SEQ ID NO: 1721207 - RNA, 19 nt, Homo sapiens
  misc_RNA (1)...(19): siRNA sense strand
agaaggcuaugucccagaa

SEQ ID NO: 1721208 - RNA, 19 nt, Homo sapiens
  misc_RNA (1)...(19): siRNA sense strand
gauggacccugguauuacu

SEQ ID NO: 1721209 - RNA, 19 nt, Homo sapiens
  misc_RNA (1)...(19): siRNA sense strand
ggauugcccguaauuucua

SEQ ID NO: 1721210 - RNA, 19 nt, Homo sapiens
  misc_RNA (1)...(19): siRNA sense strand
gaggagauggacccuggua

SEQ ID NO: 1721211 - RNA, 19 nt, Homo sapiens
  misc_RNA (1)...(19): siRNA sense strand
gcacucgccucggauuugg

SEQ ID NO: 1721212 - RNA, 19 nt, Homo sapiens
  misc_RNA (1)...(19): siRNA sense strand
cgaaagcaacuccugacaa

SEQ ID NO: 1721213 - RNA, 19 nt, Homo sapiens
  misc_RNA (1)...(19): siRNA sense strand
gacaaggaacuuauugauc

SEQ ID NO: 1721214 - RNA, 19 nt, Homo sapiens
  misc_RNA (1)...(19): siRNA sense strand
caaggaacuuauugaucau

SEQ ID NO: 1721215 - RNA, 19 nt, Homo sapiens
  misc_RNA (1)...(19): siRNA sense strand
gggaaaagacuauuuguca

SEQ ID NO: 1721216 - RNA, 19 nt, Homo sapiens
  misc_RNA (1)...(19): siRNA sense strand
ggaacuuauugaucauucu

SEQ ID NO: 1721217 - RNA, 19 nt, Homo sapiens
  misc_RNA (1)...(19): siRNA sense strand
ugacaaggaacuuauugau

SEQ ID NO: 1721218 - RNA, 19 nt, Homo sapiens
  misc_RNA (1)...(19): siRNA sense strand
acaauugacaaggaacuua

SEQ ID NO: 1721219 - RNA, 19 nt, Homo sapiens
  misc_RNA (1)...(19): siRNA sense strand
ggaaaagacuauuugucau

SEQ ID NO: 1721220 - RNA, 19 nt, Homo sapiens
  misc_RNA (1)...(19): siRNA sense strand
gggauuccaguagcaauuu

SEQ ID NO: 1721221 - RNA, 19 nt, Homo sapiens
  misc_RNA (1)...(19): siRNA sense strand
ugauaguccugaaaagaua

SEQ ID NO: 1721222 - RNA, 19 nt, Homo sapiens
  misc_RNA (1)...(19): siRNA sense strand
aagacuauuugucaucaga

SEQ ID NO: 1721223 - RNA, 19 nt, Homo sapiens
  misc_RNA (1)...(19): siRNA sense strand
caauggccguccuucagau

SEQ ID NO: 1721224 - RNA, 19 nt, Homo sapiens
  misc_RNA (1)...(19): siRNA sense strand
caauugacaaggaacuuau

SEQ ID NO: 1721225 - RNA, 19 nt, Homo sapiens
  misc_RNA (1)...(19): siRNA sense strand
gauugcccguaauuucuau

SEQ ID NO: 1721226 - RNA, 19 nt, Homo sapiens
  misc_RNA (1)...(19): siRNA sense strand
gaaaagacuauuugucauc

SEQ ID NO: 1721227 - RNA, 19 nt, Homo sapiens
  misc_RNA (1)...(19): siRNA sense strand
cuuccucacucguggcuuu

SEQ ID NO: 1721228 - RNA, 19 nt, Homo sapiens
  misc_RNA (1)...(19): siRNA sense strand
ggacccugguauuacuaug

SEQ ID NO: 1721229 - RNA, 19 nt, Homo sapiens
  misc_RNA (1)...(19): siRNA sense strand
agcaacuccugacaauuaa

SEQ ID NO: 1721230 - RNA, 19 nt, Homo sapiens
  misc_RNA (1)...(19): siRNA sense strand
gaacuuauugaucauucuc

SEQ ID NO: 1721231 - RNA, 19 nt, Homo sapiens
  misc_RNA (1)...(19): siRNA sense strand
gguauuacuaugagacaau

SEQ ID NO: 1721232 - RNA, 19 nt, Homo sapiens
  misc_RNA (1)...(19): siRNA sense strand
gauggauugcccguaauuu

SEQ ID NO: 1721233 - RNA, 19 nt, Homo sapiens
  misc_RNA (1)...(19): siRNA sense strand
gacccugguauuacuauga

SEQ ID NO: 1721234 - RNA, 19 nt, Homo sapiens
  misc_RNA (1)...(19): siRNA sense strand
caguggagaccaugggaaa

SEQ ID NO: 1721235 - RNA, 19 nt, Homo sapiens
  misc_RNA (1)...(19): siRNA sense strand
gaucauucuccgaaagcaa

SEQ ID NO: 1721236 - RNA, 19 nt, Homo sapiens
  misc_RNA (1)...(19): siRNA sense strand
gguaaaggagcuggaagug

SEQ ID NO: 1721237 - RNA, 19 nt, Homo sapiens
  misc_RNA (1)...(19): siRNA sense strand
uggucaagcugaacuagca

SEQ ID NO: 1721238 - RNA, 19 nt, Homo sapiens
  misc_RNA (1)...(19): siRNA sense strand
acaauggccguccuucaga

SEQ ID NO: 1721239 - RNA, 19 nt, Homo sapiens
  misc_RNA (1)...(19): siRNA sense strand
ucaucagaccuucuagauu

SEQ ID NO: 1721240 - RNA, 19 nt, Homo sapiens
  misc_RNA (1)...(19): siRNA sense strand
gauucuacauugcauugac

SEQ ID NO: 1721241 - RNA, 19 nt, Homo sapiens
  misc_RNA (1)...(19): siRNA sense strand
agaaauuccagaaggcuau

SEQ ID NO: 1721242 - RNA, 19 nt, Homo sapiens
  misc_RNA (1)...(19): siRNA sense strand
ugaacuagcagaaauucca

SEQ ID NO: 1721243 - RNA, 19 nt, Homo sapiens
  misc_RNA (1)...(19): siRNA sense strand
gaaauuccagaaggcuaug

SEQ ID NO: 1721244 - RNA, 19 nt, Homo sapiens
  misc_RNA (1)...(19): siRNA sense strand
uggccguccuucagauuga

SEQ ID NO: 1721245 - RNA, 19 nt, Homo sapiens
  misc_RNA (1)...(19): siRNA sense strand
caagcugaacuagcagaaa

SEQ ID NO: 1721246 - RNA, 19 nt, Homo sapiens
  misc_RNA (1)...(19): siRNA sense strand
gcugaacuagcagaaauuc

SEQ ID NO: 1721247 - RNA, 19 nt, Homo sapiens
  misc_RNA (1)...(19): siRNA sense strand
augagacaauugacaagga

SEQ ID NO: 1721248 - RNA, 19 nt, Homo sapiens
  misc_RNA (1)...(19): siRNA sense strand
ggauuccaguagcaauuuu

SEQ ID NO: 1721249 - RNA, 19 nt, Homo sapiens
  misc_RNA (1)...(19): siRNA sense strand
gucaucagaccuucuagau

SEQ ID NO: 1721250 - RNA, 19 nt, Homo sapiens
  misc_RNA (1)...(19): siRNA sense strand
ggguaaaggagcuggaagu

SEQ ID NO: 1721251 - RNA, 19 nt, Homo sapiens
  misc_RNA (1)...(19): siRNA sense strand
aggaacuuauugaucauuc

SEQ ID NO: 1721252 - RNA, 19 nt, Homo sapiens
  misc_RNA (1)...(19): siRNA sense strand
gcgaugagguggacuugua

SEQ ID NO: 1721253 - RNA, 19 nt, Homo sapiens
  misc_RNA (1)...(19): siRNA sense strand
ucaaggagcuguucagagu

SEQ ID NO: 1721254 - RNA, 19 nt, Homo sapiens
  misc_RNA (1)...(19): siRNA sense strand
ggagauaaugucagcauga

SEQ ID NO: 1721255 - RNA, 19 nt, Homo sapiens
  misc_RNA (1)...(19): siRNA sense strand
ugaagagacugaucaagca

SEQ ID NO: 1721256 - RNA, 19 nt, Homo sapiens
  misc_RNA (1)...(19): siRNA sense strand
gaagaggacccugaaagug

SEQ ID NO: 1721257 - RNA, 19 nt, Homo sapiens
  misc_RNA (1)...(19): siRNA sense strand
ggaagaggacccugaaagu

SEQ ID NO: 1721258 - RNA, 19 nt, Homo sapiens
  misc_RNA (1)...(19): siRNA sense strand
gagauaaugucagcaugau

SEQ ID NO: 1721259 - RNA, 19 nt, Homo sapiens
  misc_RNA (1)...(19): siRNA sense strand
ggccugagauagacaguca

SEQ ID NO: 1721260 - RNA, 19 nt, Homo sapiens
  misc_RNA (1)...(19): siRNA sense strand
ugaaugacaccaucaagga

SEQ ID NO: 1721261 - RNA, 19 nt, Homo sapiens
  misc_RNA (1)...(19): siRNA sense strand
gcaaagaucagagugaaac

SEQ ID NO: 1721262 - RNA, 19 nt, Homo sapiens
  misc_RNA (1)...(19): siRNA sense strand
caaugcaugucugcgauga

SEQ ID NO: 1721263 - RNA, 19 nt, Homo sapiens
  misc_RNA (1)...(19): siRNA sense strand
ggaacuggcaccacuacug

SEQ ID NO: 1721264 - RNA, 19 nt, Homo sapiens
  misc_RNA (1)...(19): siRNA sense strand
gagugaaacaggauaagau

SEQ ID NO: 1721265 - RNA, 19 nt, Homo sapiens
  misc_RNA (1)...(19): siRNA sense strand
ccgagaaccugaagagacu

SEQ ID NO: 1721266 - RNA, 19 nt, Homo sapiens
  misc_RNA (1)...(19): siRNA sense strand
cugcaaagaucagagugaa

SEQ ID NO: 1721267 - RNA, 19 nt, Homo sapiens
  misc_RNA (1)...(19): siRNA sense strand
uccgggagcugggagauaa

SEQ ID NO: 1721268 - RNA, 19 nt, Homo sapiens
  misc_RNA (1)...(19): siRNA sense strand
gaucagagugaaacaggau

SEQ ID NO: 1721269 - RNA, 19 nt, Homo sapiens
  misc_RNA (1)...(19): siRNA sense strand
caucugguguacccugaga

SEQ ID NO: 1721270 - RNA, 19 nt, Homo sapiens
  misc_RNA (1)...(19): siRNA sense strand
gagcugggagauaauguca

SEQ ID NO: 1721271 - RNA, 19 nt, Homo sapiens
  misc_RNA (1)...(19): siRNA sense strand
ugaaagugcucaccuuccu

SEQ ID NO: 1721272 - RNA, 19 nt, Homo sapiens
  misc_RNA (1)...(19): siRNA sense strand
ccacccagccuucaucaag

SEQ ID NO: 1721273 - RNA, 19 nt, Homo sapiens
  misc_RNA (1)...(19): siRNA sense strand
gcacgaugcagacuuugag

SEQ ID NO: 1721274 - RNA, 19 nt, Homo sapiens
  misc_RNA (1)...(19): siRNA sense strand
acccagccuucaucaagua

SEQ ID NO: 1721275 - RNA, 19 nt, Homo sapiens
  misc_RNA (1)...(19): siRNA sense strand
cagccuucaucaaguaugu

SEQ ID NO: 1721276 - RNA, 19 nt, Homo sapiens
  misc_RNA (1)...(19): siRNA sense strand
caccuuggccuccaucaau

SEQ ID NO: 1721277 - RNA, 19 nt, Homo sapiens
  misc_RNA (1)...(19): siRNA sense strand
cuucaucaaguaugucuuu

SEQ ID NO: 1721278 - RNA, 19 nt, Homo sapiens
  misc_RNA (1)...(19): siRNA sense strand
gagaaccugaagagacuga

SEQ ID NO: 1721279 - RNA, 19 nt, Homo sapiens
  misc_RNA (1)...(19): siRNA sense strand
ugagggagucuucuuaugg

SEQ ID NO: 1721280 - RNA, 19 nt, Homo sapiens
  misc_RNA (1)...(19): siRNA sense strand
gacgacaccuaccgauggu

SEQ ID NO: 1721281 - RNA, 19 nt, Homo sapiens
  misc_RNA (1)...(19): siRNA sense strand
cuuaugggccugagauaga

SEQ ID NO: 1721282 - RNA, 19 nt, Homo sapiens
  misc_RNA (1)...(19): siRNA sense strand
ucagagugaaacaggauaa

SEQ ID NO: 1721283 - RNA, 19 nt, Homo sapiens
  misc_RNA (1)...(19): siRNA sense strand
cugagggagucuucuuaug

SEQ ID NO: 1721284 - RNA, 19 nt, Homo sapiens
  misc_RNA (1)...(19): siRNA sense strand
caagaccacccaccaucug

SEQ ID NO: 1721285 - RNA, 19 nt, Homo sapiens
  misc_RNA (1)...(19): siRNA sense strand
gaaccugaagagacugauc

SEQ ID NO: 1721286 - RNA, 19 nt, Homo sapiens
  misc_RNA (1)...(19): siRNA sense strand
accuuggccuccaucaaua

SEQ ID NO: 1721287 - RNA, 19 nt, Homo sapiens
  misc_RNA (1)...(19): siRNA sense strand
cacccagccuucaucaagu

SEQ ID NO: 1721288 - RNA, 19 nt, Homo sapiens
  misc_RNA (1)...(19): siRNA sense strand
ucggucaucuucucaaugc

SEQ ID NO: 1721289 - RNA, 19 nt, Homo sapiens
  misc_RNA (1)...(19): siRNA sense strand
cacgggcgauacccaucua

SEQ ID NO: 1721290 - RNA, 19 nt, Homo sapiens
  misc_RNA (1)...(19): siRNA sense strand
ucaccuccuucuuccugaa

SEQ ID NO: 1721291 - RNA, 19 nt, Homo sapiens
  misc_RNA (1)...(19): siRNA sense strand
caucaaggagcuguucaga

SEQ ID NO: 1721292 - RNA, 19 nt, Homo sapiens
  misc_RNA (1)...(19): siRNA sense strand
cugggaauguggacccuau

SEQ ID NO: 1721293 - RNA, 19 nt, Homo sapiens
  misc_RNA (1)...(19): siRNA sense strand
caucaccacgggcaccauu

SEQ ID NO: 1721294 - RNA, 19 nt, Homo sapiens
  misc_RNA (1)...(19): siRNA sense strand
gcacgggcgauacccaucu

SEQ ID NO: 1721295 - RNA, 19 nt, Homo sapiens
  misc_RNA (1)...(19): siRNA sense strand
gcaccauuucccacaccua

SEQ ID NO: 1721296 - RNA, 19 nt, Homo sapiens
  misc_RNA (1)...(19): siRNA sense strand
ucaccuuccucgugcucuu

SEQ ID NO: 1721297 - RNA, 19 nt, Homo sapiens
  misc_RNA (1)...(19): siRNA sense strand
cggaagaggacccugaaag

SEQ ID NO: 1721298 - RNA, 19 nt, Homo sapiens
  misc_RNA (1)...(19): siRNA sense strand
gcgaugagguggacuugua

SEQ ID NO: 1721299 - RNA, 19 nt, Homo sapiens
  misc_RNA (1)...(19): siRNA sense strand
ucaaggagcuguucagagu

SEQ ID NO: 1721300 - RNA, 19 nt, Homo sapiens
  misc_RNA (1)...(19): siRNA sense strand
ggagauaaugucagcauga

SEQ ID NO: 1721301 - RNA, 19 nt, Homo sapiens
  misc_RNA (1)...(19): siRNA sense strand
ugaagagacugaucaagca

SEQ ID NO: 1721302 - RNA, 19 nt, Homo sapiens
  misc_RNA (1)...(19): siRNA sense strand
gaagaggacccugaaagug

SEQ ID NO: 1721303 - RNA, 19 nt, Homo sapiens
  misc_RNA (1)...(19): siRNA sense strand
ggaagaggacccugaaagu

SEQ ID NO: 1721304 - RNA, 19 nt, Homo sapiens
  misc_RNA (1)...(19): siRNA sense strand
gagauaaugucagcaugau

SEQ ID NO: 1721305 - RNA, 19 nt, Homo sapiens
  misc_RNA (1)...(19): siRNA sense strand
ggccugagauagacaguca

SEQ ID NO: 1721306 - RNA, 19 nt, Homo sapiens
  misc_RNA (1)...(19): siRNA sense strand
ugaaugacaccaucaagga

SEQ ID NO: 1721307 - RNA, 19 nt, Homo sapiens
  misc_RNA (1)...(19): siRNA sense strand
gcaaagaucagagugaaac

SEQ ID NO: 1721308 - RNA, 19 nt, Homo sapiens
  misc_RNA (1)...(19): siRNA sense strand
caaugcaugucugcgauga

SEQ ID NO: 1721309 - RNA, 19 nt, Homo sapiens
  misc_RNA (1)...(19): siRNA sense strand
ggaacuggcaccacuacug

SEQ ID NO: 1721310 - RNA, 19 nt, Homo sapiens
  misc_RNA (1)...(19): siRNA sense strand
gagugaaacaggauaagau

SEQ ID NO: 1721311 - RNA, 19 nt, Homo sapiens
  misc_RNA (1)...(19): siRNA sense strand
ccgagaaccugaagagacu

SEQ ID NO: 1721312 - RNA, 19 nt, Homo sapiens
  misc_RNA (1)...(19): siRNA sense strand
cugcaaagaucagagugaa

SEQ ID NO: 1721313 - RNA, 19 nt, Homo sapiens
  misc_RNA (1)...(19): siRNA sense strand
uccgggagcugggagauaa

SEQ ID NO: 1721314 - RNA, 19 nt, Homo sapiens
  misc_RNA (1)...(19): siRNA sense strand
gaucagagugaaacaggau

SEQ ID NO: 1721315 - RNA, 19 nt, Homo sapiens
  misc_RNA (1)...(19): siRNA sense strand
caucugguguacccugaga

SEQ ID NO: 1721316 - RNA, 19 nt, Homo sapiens
  misc_RNA (1)...(19): siRNA sense strand
gagcugggagauaauguca

SEQ ID NO: 1721317 - RNA, 19 nt, Homo sapiens
  misc_RNA (1)...(19): siRNA sense strand
ugaaagugcucaccuuccu

SEQ ID NO: 1721318 - RNA, 19 nt, Homo sapiens
  misc_RNA (1)...(19): siRNA sense strand
ccacccagccuucaucaag

SEQ ID NO: 1721319 - RNA, 19 nt, Homo sapiens
  misc_RNA (1)...(19): siRNA sense strand
gcacgaugcagacuuugag

SEQ ID NO: 1721320 - RNA, 19 nt, Homo sapiens
  misc_RNA (1)...(19): siRNA sense strand
acccagccuucaucaagua

SEQ ID NO: 1721321 - RNA, 19 nt, Homo sapiens
  misc_RNA (1)...(19): siRNA sense strand
cagccuucaucaaguaugu

SEQ ID NO: 1721322 - RNA, 19 nt, Homo sapiens
  misc_RNA (1)...(19): siRNA sense strand
caccuuggccuccaucaau

SEQ ID NO: 1721323 - RNA, 19 nt, Homo sapiens
  misc_RNA (1)...(19): siRNA sense strand
cuucaucaaguaugucuuu

SEQ ID NO: 1721324 - RNA, 19 nt, Homo sapiens
  misc_RNA (1)...(19): siRNA sense strand
gagaaccugaagagacuga

SEQ ID NO: 1721325 - RNA, 19 nt, Homo sapiens
  misc_RNA (1)...(19): siRNA sense strand
ugagggagucuucuuaugg

SEQ ID NO: 1721326 - RNA, 19 nt, Homo sapiens
  misc_RNA (1)...(19): siRNA sense strand
gacgacaccuaccgauggu

SEQ ID NO: 1721327 - RNA, 19 nt, Homo sapiens
  misc_RNA (1)...(19): siRNA sense strand
cuuaugggccugagauaga

SEQ ID NO: 1721328 - RNA, 19 nt, Homo sapiens
  misc_RNA (1)...(19): siRNA sense strand
ucagagugaaacaggauaa

SEQ ID NO: 1721329 - RNA, 19 nt, Homo sapiens
  misc_RNA (1)...(19): siRNA sense strand
cugagggagucuucuuaug

SEQ ID NO: 1721330 - RNA, 19 nt, Homo sapiens
  misc_RNA (1)...(19): siRNA sense strand
caagaccacccaccaucug

SEQ ID NO: 1721331 - RNA, 19 nt, Homo sapiens
  misc_RNA (1)...(19): siRNA sense strand
gaaccugaagagacugauc

SEQ ID NO: 1721332 - RNA, 19 nt, Homo sapiens
  misc_RNA (1)...(19): siRNA sense strand
accuuggccuccaucaaua

SEQ ID NO: 1721333 - RNA, 19 nt, Homo sapiens
  misc_RNA (1)...(19): siRNA sense strand
cacccagccuucaucaagu

SEQ ID NO: 1721334 - RNA, 19 nt, Homo sapiens
  misc_RNA (1)...(19): siRNA sense strand
ucggucaucuucucaaugc

SEQ ID NO: 1721335 - RNA, 19 nt, Homo sapiens
  misc_RNA (1)...(19): siRNA sense strand
cacgggcgauacccaucua

SEQ ID NO: 1721336 - RNA, 19 nt, Homo sapiens
  misc_RNA (1)...(19): siRNA sense strand
ucaccuccuucuuccugaa

SEQ ID NO: 1721337 - RNA, 19 nt, Homo sapiens
  misc_RNA (1)...(19): siRNA sense strand
caucaaggagcuguucaga

SEQ ID NO: 1721338 - RNA, 19 nt, Homo sapiens
  misc_RNA (1)...(19): siRNA sense strand
cugggaauguggacccuau

SEQ ID NO: 1721339 - RNA, 19 nt, Homo sapiens
  misc_RNA (1)...(19): siRNA sense strand
caucaccacgggcaccauu

SEQ ID NO: 1721340 - RNA, 19 nt, Homo sapiens
  misc_RNA (1)...(19): siRNA sense strand
gcacgggcgauacccaucu

SEQ ID NO: 1721341 - RNA, 19 nt, Homo sapiens
  misc_RNA (1)...(19): siRNA sense strand
gcaccauuucccacaccua

SEQ ID NO: 1721342 - RNA, 19 nt, Homo sapiens
  misc_RNA (1)...(19): siRNA sense strand
ucaccuuccucgugcucuu

SEQ ID NO: 1721343 - RNA, 19 nt, Homo sapiens
  misc_RNA (1)...(19): siRNA sense strand
cggaagaggacccugaaag

SEQ ID NO: 1721344 - RNA, 19 nt, Homo sapiens
  misc_RNA (1)...(19): siRNA sense strand
ggaggaaacugacguucua

SEQ ID NO: 1721345 - RNA, 19 nt, Homo sapiens
  misc_RNA (1)...(19): siRNA sense strand
aaacugacguucuaucuga

SEQ ID NO: 1721346 - RNA, 19 nt, Homo sapiens
  misc_RNA (1)...(19): siRNA sense strand
gcucuaacaugaucgauga

SEQ ID NO: 1721347 - RNA, 19 nt, Homo sapiens
  misc_RNA (1)...(19): siRNA sense strand
gcaauugagagcauucuua

SEQ ID NO: 1721348 - RNA, 19 nt, Homo sapiens
  misc_RNA (1)...(19): siRNA sense strand
ggccaaaccuggaggcauu

SEQ ID NO: 1721349 - RNA, 19 nt, Homo sapiens
  misc_RNA (1)...(19): siRNA sense strand
uaacugcucuaacaugauc

SEQ ID NO: 1721350 - RNA, 19 nt, Homo sapiens
  misc_RNA (1)...(19): siRNA sense strand
caauugagagcauucuuaa

SEQ ID NO: 1721351 - RNA, 19 nt, Homo sapiens
  misc_RNA (1)...(19): siRNA sense strand
caaggacggugacuggaau

SEQ ID NO: 1721352 - RNA, 19 nt, Homo sapiens
  misc_RNA (1)...(19): siRNA sense strand
gacggugacuggaaugaau

SEQ ID NO: 1721353 - RNA, 19 nt, Homo sapiens
  misc_RNA (1)...(19): siRNA sense strand
gaacgcaucagcaauugag

SEQ ID NO: 1721354 - RNA, 19 nt, Homo sapiens
  misc_RNA (1)...(19): siRNA sense strand
gcagccaccuuugccuuug

SEQ ID NO: 1721355 - RNA, 19 nt, Homo sapiens
  misc_RNA (1)...(19): siRNA sense strand
ggaaacugacguucuaucu

SEQ ID NO: 1721356 - RNA, 19 nt, Homo sapiens
  misc_RNA (1)...(19): siRNA sense strand
cgacauccaauccauauca

SEQ ID NO: 1721357 - RNA, 19 nt, Homo sapiens
  misc_RNA (1)...(19): siRNA sense strand
acagaacgcaucagcaauu

SEQ ID NO: 1721358 - RNA, 19 nt, Homo sapiens
  misc_RNA (1)...(19): siRNA sense strand
gaagaccaagacauucuga

SEQ ID NO: 1721359 - RNA, 19 nt, Homo sapiens
  misc_RNA (1)...(19): siRNA sense strand
cagaacgcaucagcaauug

SEQ ID NO: 1721360 - RNA, 19 nt, Homo sapiens
  misc_RNA (1)...(19): siRNA sense strand
caagacauucugauggaaa

SEQ ID NO: 1721361 - RNA, 19 nt, Homo sapiens
  misc_RNA (1)...(19): siRNA sense strand
gaaacugacguucuaucug

SEQ ID NO: 1721362 - RNA, 19 nt, Homo sapiens
  misc_RNA (1)...(19): siRNA sense strand
ggacuucaacaaccucaau

SEQ ID NO: 1721363 - RNA, 19 nt, Homo sapiens
  misc_RNA (1)...(19): siRNA sense strand
caucagcaauugagagcau

SEQ ID NO: 1721364 - RNA, 19 nt, Homo sapiens
  misc_RNA (1)...(19): siRNA sense strand
gacauccaauccauaucaa

SEQ ID NO: 1721365 - RNA, 19 nt, Homo sapiens
  misc_RNA (1)...(19): siRNA sense strand
cuaacaugaucgaugaaau

SEQ ID NO: 1721366 - RNA, 19 nt, Homo sapiens
  misc_RNA (1)...(19): siRNA sense strand
uuacagaacgcaucagcaa

SEQ ID NO: 1721367 - RNA, 19 nt, Homo sapiens
  misc_RNA (1)...(19): siRNA sense strand
ccaagacauucugauggaa

SEQ ID NO: 1721368 - RNA, 19 nt, Homo sapiens
  misc_RNA (1)...(19): siRNA sense strand
ggacuccaagcucccauga

SEQ ID NO: 1721369 - RNA, 19 nt, Homo sapiens
  misc_RNA (1)...(19): siRNA sense strand
ggacggugacuggaaugaa

SEQ ID NO: 1721370 - RNA, 19 nt, Homo sapiens
  misc_RNA (1)...(19): siRNA sense strand
gggaagaccaagacauucu

SEQ ID NO: 1721371 - RNA, 19 nt, Homo sapiens
  misc_RNA (1)...(19): siRNA sense strand
ugaaaacccuugagaaugc

SEQ ID NO: 1721372 - RNA, 19 nt, Homo sapiens
  misc_RNA (1)...(19): siRNA sense strand
uugaagacaagcuggguua

SEQ ID NO: 1721373 - RNA, 19 nt, Homo sapiens
  misc_RNA (1)...(19): siRNA sense strand
accaagacauucugaugga

SEQ ID NO: 1721374 - RNA, 19 nt, Homo sapiens
  misc_RNA (1)...(19): siRNA sense strand
ucaaggacggugacuggaa

SEQ ID NO: 1721375 - RNA, 19 nt, Homo sapiens
  misc_RNA (1)...(19): siRNA sense strand
ggaagaccaagacauucug

SEQ ID NO: 1721376 - RNA, 19 nt, Homo sapiens
  misc_RNA (1)...(19): siRNA sense strand
aagacaagcuggguuaacu

SEQ ID NO: 1721377 - RNA, 19 nt, Homo sapiens
  misc_RNA (1)...(19): siRNA sense strand
ugucaagaguuuacagaac

SEQ ID NO: 1721378 - RNA, 19 nt, Homo sapiens
  misc_RNA (1)...(19): siRNA sense strand
gaagacaagcuggguuaac

SEQ ID NO: 1721379 - RNA, 19 nt, Homo sapiens
  misc_RNA (1)...(19): siRNA sense strand
gcacccacgcgacauccaa

SEQ ID NO: 1721380 - RNA, 19 nt, Homo sapiens
  misc_RNA (1)...(19): siRNA sense strand
agaccaagacauucugaug

SEQ ID NO: 1721381 - RNA, 19 nt, Homo sapiens
  misc_RNA (1)...(19): siRNA sense strand
agaaugcgcaggcucaaca

SEQ ID NO: 1721382 - RNA, 19 nt, Homo sapiens
  misc_RNA (1)...(19): siRNA sense strand
ugccuuugcuggacuucaa

SEQ ID NO: 1721383 - RNA, 19 nt, Homo sapiens
  misc_RNA (1)...(19): siRNA sense strand
aggcucaacagacgacuuu

SEQ ID NO: 1721384 - RNA, 19 nt, Homo sapiens
  misc_RNA (1)...(19): siRNA sense strand
gaaguaauuccaccaauga

SEQ ID NO: 1721385 - RNA, 19 nt, Homo sapiens
  misc_RNA (1)...(19): siRNA sense strand
guaccugucuggauuauuc

SEQ ID NO: 1721386 - RNA, 19 nt, Homo sapiens
  misc_RNA (1)...(19): siRNA sense strand
gagaaguaauuccaccaau

SEQ ID NO: 1721387 - RNA, 19 nt, Homo sapiens
  misc_RNA (1)...(19): siRNA sense strand
ucuggagacuggagaagua

SEQ ID NO: 1721388 - RNA, 19 nt, Homo sapiens
  misc_RNA (1)...(19): siRNA sense strand
agaaguaauuccaccaaug

SEQ ID NO: 1721389 - RNA, 19 nt, Homo sapiens
  misc_RNA (1)...(19): siRNA sense strand
ggagacuggagaaguaauu

SEQ ID NO: 1721390 - RNA, 19 nt, Homo sapiens
  misc_RNA (1)...(19): siRNA sense strand
cugucuggauuauucauua

SEQ ID NO: 1721391 - RNA, 19 nt, Homo sapiens
  misc_RNA (1)...(19): siRNA sense strand
ggagaaguaauuccaccaa

SEQ ID NO: 1721392 - RNA, 19 nt, Homo sapiens
  misc_RNA (1)...(19): siRNA sense strand
agaauuuccugaucaacau

SEQ ID NO: 1721393 - RNA, 19 nt, Homo sapiens
  misc_RNA (1)...(19): siRNA sense strand
guacacuccggaugagaaa

SEQ ID NO: 1721394 - RNA, 19 nt, Homo sapiens
  misc_RNA (1)...(19): siRNA sense strand
guaauuccaccaaugaaag

SEQ ID NO: 1721395 - RNA, 19 nt, Homo sapiens
  misc_RNA (1)...(19): siRNA sense strand
gguacacuccggaugagaa

SEQ ID NO: 1721396 - RNA, 19 nt, Homo sapiens
  misc_RNA (1)...(19): siRNA sense strand
acuuguaccugucuggauu

SEQ ID NO: 1721397 - RNA, 19 nt, Homo sapiens
  misc_RNA (1)...(19): siRNA sense strand
uaauuccaccaaugaaaga

SEQ ID NO: 1721398 - RNA, 19 nt, Homo sapiens
  misc_RNA (1)...(19): siRNA sense strand
uuucacucauguacuugua

SEQ ID NO: 1721399 - RNA, 19 nt, Homo sapiens
  misc_RNA (1)...(19): siRNA sense strand
uuccaccaaugaaagaauu

SEQ ID NO: 1721400 - RNA, 19 nt, Homo sapiens
  misc_RNA (1)...(19): siRNA sense strand
aagaauuuccugaucaaca

SEQ ID NO: 1721401 - RNA, 19 nt, Homo sapiens
  misc_RNA (1)...(19): siRNA sense strand
gaaggcgauggcugaagga

SEQ ID NO: 1721402 - RNA, 19 nt, Homo sapiens
  misc_RNA (1)...(19): siRNA sense strand
aguaauuccaccaaugaaa

SEQ ID NO: 1721403 - RNA, 19 nt, Homo sapiens
  misc_RNA (1)...(19): siRNA sense strand
gaaguaauuccaccaauga

SEQ ID NO: 1721404 - RNA, 19 nt, Homo sapiens
  misc_RNA (1)...(19): siRNA sense strand
guaccugucuggauuauuc

SEQ ID NO: 1721405 - RNA, 19 nt, Homo sapiens
  misc_RNA (1)...(19): siRNA sense strand
gagaaguaauuccaccaau

SEQ ID NO: 1721406 - RNA, 19 nt, Homo sapiens
  misc_RNA (1)...(19): siRNA sense strand
ucuggagacuggagaagua

SEQ ID NO: 1721407 - RNA, 19 nt, Homo sapiens
  misc_RNA (1)...(19): siRNA sense strand
agaaguaauuccaccaaug

SEQ ID NO: 1721408 - RNA, 19 nt, Homo sapiens
  misc_RNA (1)...(19): siRNA sense strand
ggagacuggagaaguaauu

SEQ ID NO: 1721409 - RNA, 19 nt, Homo sapiens
  misc_RNA (1)...(19): siRNA sense strand
cugucuggauuauucauua

SEQ ID NO: 1721410 - RNA, 19 nt, Homo sapiens
  misc_RNA (1)...(19): siRNA sense strand
ggagaaguaauuccaccaa

SEQ ID NO: 1721411 - RNA, 19 nt, Homo sapiens
  misc_RNA (1)...(19): siRNA sense strand
agaauuuccugaucaacau

SEQ ID NO: 1721412 - RNA, 19 nt, Homo sapiens
  misc_RNA (1)...(19): siRNA sense strand
guacacuccggaugagaaa

SEQ ID NO: 1721413 - RNA, 19 nt, Homo sapiens
  misc_RNA (1)...(19): siRNA sense strand
guaauuccaccaaugaaag

SEQ ID NO: 1721414 - RNA, 19 nt, Homo sapiens
  misc_RNA (1)...(19): siRNA sense strand
gguacacuccggaugagaa

SEQ ID NO: 1721415 - RNA, 19 nt, Homo sapiens
  misc_RNA (1)...(19): siRNA sense strand
acuuguaccugucuggauu

SEQ ID NO: 1721416 - RNA, 19 nt, Homo sapiens
  misc_RNA (1)...(19): siRNA sense strand
uaauuccaccaaugaaaga

SEQ ID NO: 1721417 - RNA, 19 nt, Homo sapiens
  misc_RNA (1)...(19): siRNA sense strand
uuucacucauguacuugua

SEQ ID NO: 1721418 - RNA, 19 nt, Homo sapiens
  misc_RNA (1)...(19): siRNA sense strand
uuccaccaaugaaagaauu

SEQ ID NO: 1721419 - RNA, 19 nt, Homo sapiens
  misc_RNA (1)...(19): siRNA sense strand
aagaauuuccugaucaaca

SEQ ID NO: 1721420 - RNA, 19 nt, Homo sapiens
  misc_RNA (1)...(19): siRNA sense strand
gaaggcgauggcugaagga

SEQ ID NO: 1721421 - RNA, 19 nt, Homo sapiens
  misc_RNA (1)...(19): siRNA sense strand
aguaauuccaccaaugaaa

SEQ ID NO: 1721422 - RNA, 19 nt, Homo sapiens
  misc_RNA (1)...(19): siRNA sense strand
gaaauugacuuccgugaua

SEQ ID NO: 1721423 - RNA, 19 nt, Homo sapiens
  misc_RNA (1)...(19): siRNA sense strand
gaaagaagcucuaaaucca

SEQ ID NO: 1721424 - RNA, 19 nt, Homo sapiens
  misc_RNA (1)...(19): siRNA sense strand
gcucaucacugcauauuaa

SEQ ID NO: 1721425 - RNA, 19 nt, Homo sapiens
  misc_RNA (1)...(19): siRNA sense strand
gcauguaccuugauauuga

SEQ ID NO: 1721426 - RNA, 19 nt, Homo sapiens
  misc_RNA (1)...(19): siRNA sense strand
gaagugguuugccgaguua

SEQ ID NO: 1721427 - RNA, 19 nt, Homo sapiens
  misc_RNA (1)...(19): siRNA sense strand
ggaagaagaugggaaagaa

SEQ ID NO: 1721428 - RNA, 19 nt, Homo sapiens
  misc_RNA (1)...(19): siRNA sense strand
ggaacaagauuucaagaau

SEQ ID NO: 1721429 - RNA, 19 nt, Homo sapiens
  misc_RNA (1)...(19): siRNA sense strand
gagaauguguggaaagaaa

SEQ ID NO: 1721430 - RNA, 19 nt, Homo sapiens
  misc_RNA (1)...(19): siRNA sense strand
gagaagagauaaauuaguc

SEQ ID NO: 1721431 - RNA, 19 nt, Homo sapiens
  misc_RNA (1)...(19): siRNA sense strand
gacgucagcugcuucuuua

SEQ ID NO: 1721432 - RNA, 19 nt, Homo sapiens
  misc_RNA (1)...(19): siRNA sense strand
uauagaagaugcagggaua

SEQ ID NO: 1721433 - RNA, 19 nt, Homo sapiens
  misc_RNA (1)...(19): siRNA sense strand
gaugugaaguugucagauu

SEQ ID NO: 1721434 - RNA, 19 nt, Homo sapiens
  misc_RNA (1)...(19): siRNA sense strand
gauuacagcugccaauaga

SEQ ID NO: 1721435 - RNA, 19 nt, Homo sapiens
  misc_RNA (1)...(19): siRNA sense strand
ccaaagcccaacauuauua

SEQ ID NO: 1721436 - RNA, 19 nt, Homo sapiens
  misc_RNA (1)...(19): siRNA sense strand
gguguuaggucacgguuaa

SEQ ID NO: 1721437 - RNA, 19 nt, Homo sapiens
  misc_RNA (1)...(19): siRNA sense strand
gaacagaggaugaaagagu

SEQ ID NO: 1721438 - RNA, 19 nt, Homo sapiens
  misc_RNA (1)...(19): siRNA sense strand
gaagguauauacagaugug

SEQ ID NO: 1721439 - RNA, 19 nt, Homo sapiens
  misc_RNA (1)...(19): siRNA sense strand
gaagaccaauggcuagaga

SEQ ID NO: 1721440 - RNA, 19 nt, Homo sapiens
  misc_RNA (1)...(19): siRNA sense strand
cgaccaauuuaaagacuua

SEQ ID NO: 1721441 - RNA, 19 nt, Homo sapiens
  misc_RNA (1)...(19): siRNA sense strand
gaggaagucaccacuauuu

SEQ ID NO: 1721442 - RNA, 19 nt, Homo sapiens
  misc_RNA (1)...(19): siRNA sense strand
gcacagccacuaaucauau

SEQ ID NO: 1721443 - RNA, 19 nt, Homo sapiens
  misc_RNA (1)...(19): siRNA sense strand
caauauaaguugugaugug

SEQ ID NO: 1721444 - RNA, 19 nt, Homo sapiens
  misc_RNA (1)...(19): siRNA sense strand
ggaacauaaucaauaguga

SEQ ID NO: 1721445 - RNA, 19 nt, Homo sapiens
  misc_RNA (1)...(19): siRNA sense strand
guaaaugagccaaaugaaa

SEQ ID NO: 1721446 - RNA, 19 nt, Homo sapiens
  misc_RNA (1)...(19): siRNA sense strand
gaaacuacauaugagaaug

SEQ ID NO: 1721447 - RNA, 19 nt, Homo sapiens
  misc_RNA (1)...(19): siRNA sense strand
ugaacaaccuggaaccaaa

SEQ ID NO: 1721448 - RNA, 19 nt, Homo sapiens
  misc_RNA (1)...(19): siRNA sense strand
gaaguaaagauaaggaaga

SEQ ID NO: 1721449 - RNA, 19 nt, Homo sapiens
  misc_RNA (1)...(19): siRNA sense strand
gagagaagauaauuucaac

SEQ ID NO: 1721450 - RNA, 19 nt, Homo sapiens
  misc_RNA (1)...(19): siRNA sense strand
ggacaaggagacuacagua

SEQ ID NO: 1721451 - RNA, 19 nt, Homo sapiens
  misc_RNA (1)...(19): siRNA sense strand
ugacuuccgugauaucauu

SEQ ID NO: 1721452 - RNA, 19 nt, Homo sapiens
  misc_RNA (1)...(19): siRNA sense strand
gaugaaagaguuacuaauc

SEQ ID NO: 1721453 - RNA, 19 nt, Homo sapiens
  misc_RNA (1)...(19): siRNA sense strand
gagaacagaggaugaaaga

SEQ ID NO: 1721454 - RNA, 19 nt, Homo sapiens
  misc_RNA (1)...(19): siRNA sense strand
ccaccaaagcccaacauua

SEQ ID NO: 1721455 - RNA, 19 nt, Homo sapiens
  misc_RNA (1)...(19): siRNA sense strand
ucaaagaaguagcgucaga

SEQ ID NO: 1721456 - RNA, 19 nt, Homo sapiens
  misc_RNA (1)...(19): siRNA sense strand
gagcauguaccuugauauu

SEQ ID NO: 1721457 - RNA, 19 nt, Homo sapiens
  misc_RNA (1)...(19): siRNA sense strand
uguacagccucacauaaua

SEQ ID NO: 1721458 - RNA, 19 nt, Homo sapiens
  misc_RNA (1)...(19): siRNA sense strand
ccacaagaauucaaacaag

SEQ ID NO: 1721459 - RNA, 19 nt, Homo sapiens
  misc_RNA (1)...(19): siRNA sense strand
caccaaagcccaacauuau

SEQ ID NO: 1721460 - RNA, 19 nt, Homo sapiens
  misc_RNA (1)...(19): siRNA sense strand
ucagguggaugucaaagaa

SEQ ID NO: 1721461 - RNA, 19 nt, Homo sapiens
  misc_RNA (1)...(19): siRNA sense strand
ggaagcucaucacugcaua

SEQ ID NO: 1721462 - RNA, 19 nt, Homo sapiens
  misc_RNA (1)...(19): siRNA sense strand
gcacugcugcuaauucuug

SEQ ID NO: 1721463 - RNA, 19 nt, Homo sapiens
  misc_RNA (1)...(19): siRNA sense strand
ggaagaaagaugauauuag

SEQ ID NO: 1721464 - RNA, 19 nt, Homo sapiens
  misc_RNA (1)...(19): siRNA sense strand
gacaaucgguucgcuaugu

SEQ ID NO: 1721465 - RNA, 19 nt, Homo sapiens
  misc_RNA (1)...(19): siRNA sense strand
ggaaauaaagaccacauca

SEQ ID NO: 1721466 - RNA, 19 nt, Homo sapiens
  misc_RNA (1)...(19): siRNA sense strand
gcaccuacaucugacaaug

SEQ ID NO: 1721467 - RNA, 19 nt, Homo sapiens
  misc_RNA (1)...(19): siRNA sense strand
aaauuagucuuaccugcua

SEQ ID NO: 1721468 - RNA, 19 nt, Homo sapiens
  misc_RNA (1)...(19): siRNA sense strand
auacagaugugaaggaaga

SEQ ID NO: 1721469 - RNA, 19 nt, Homo sapiens
  misc_RNA (1)...(19): siRNA sense strand
acaauaaccugcagauucu

SEQ ID NO: 1721470 - RNA, 19 nt, Homo sapiens
  misc_RNA (1)...(19): siRNA sense strand
gaaccugaaaguauagauu

SEQ ID NO: 1721471 - RNA, 19 nt, Homo sapiens
  misc_RNA (1)...(19): siRNA sense strand
ggaaccaaauacaacuuau

SEQ ID NO: 1721472 - RNA, 19 nt, Homo sapiens
  misc_RNA (1)...(19): siRNA sense strand
gcagagagaggagaagaaa

SEQ ID NO: 1721473 - RNA, 19 nt, Homo sapiens
  misc_RNA (1)...(19): siRNA sense strand
ggagagaagauaauuucaa

SEQ ID NO: 1721474 - RNA, 19 nt, Homo sapiens
  misc_RNA (1)...(19): siRNA sense strand
caaaguagagcuuaguguu

SEQ ID NO: 1721475 - RNA, 19 nt, Homo sapiens
  misc_RNA (1)...(19): siRNA sense strand
gaaagggagcaauacagaa

SEQ ID NO: 1721476 - RNA, 19 nt, Homo sapiens
  misc_RNA (1)...(19): siRNA sense strand
ggaaagaagcucuaaaucc

SEQ ID NO: 1721477 - RNA, 19 nt, Homo sapiens
  misc_RNA (1)...(19): siRNA sense strand
uaacagacgucagcugcuu

SEQ ID NO: 1721478 - RNA, 19 nt, Homo sapiens
  misc_RNA (1)...(19): siRNA sense strand
gaaccgacaguuuaugaau

SEQ ID NO: 1721479 - RNA, 19 nt, Homo sapiens
  misc_RNA (1)...(19): siRNA sense strand
gaaguagcgucagaaaucu

SEQ ID NO: 1721480 - RNA, 19 nt, Homo sapiens
  misc_RNA (1)...(19): siRNA sense strand
ggacaaacacaagaagcua

SEQ ID NO: 1721481 - RNA, 19 nt, Homo sapiens
  misc_RNA (1)...(19): siRNA sense strand
ucaauucacuggagaagag

SEQ ID NO: 1721482 - RNA, 19 nt, Homo sapiens
  misc_RNA (1)...(19): siRNA sense strand
ucaggaacauaaucaauag

SEQ ID NO: 1721483 - RNA, 19 nt, Homo sapiens
  misc_RNA (1)...(19): siRNA sense strand
ggcaagcucuucuucaagu

SEQ ID NO: 1721484 - RNA, 19 nt, Homo sapiens
  misc_RNA (1)...(19): siRNA sense strand
caauguggguugcugaugu

SEQ ID NO: 1721485 - RNA, 19 nt, Homo sapiens
  misc_RNA (1)...(19): siRNA sense strand
gaaauaaagaccacaucau

SEQ ID NO: 1721486 - RNA, 19 nt, Homo sapiens
  misc_RNA (1)...(19): siRNA sense strand
ucagcugguuguaucauaa

SEQ ID NO: 1721487 - RNA, 19 nt, Homo sapiens
  misc_RNA (1)...(19): siRNA sense strand
guaauuggccugggaguug

SEQ ID NO: 1721488 - RNA, 19 nt, Homo sapiens
  misc_RNA (1)...(19): siRNA sense strand
ccauggaguucaaacaaug

SEQ ID NO: 1721489 - RNA, 19 nt, Homo sapiens
  misc_RNA (1)...(19): siRNA sense strand
guugugaugugaaaucgaa

SEQ ID NO: 1721490 - RNA, 19 nt, Homo sapiens
  misc_RNA (1)...(19): siRNA sense strand
uuaaagaugugaaguuguc

SEQ ID NO: 1721491 - RNA, 19 nt, Homo sapiens
  misc_RNA (1)...(19): siRNA sense strand
guggauggcuucacguuca

SEQ ID NO: 1721492 - RNA, 19 nt, Homo sapiens
  misc_RNA (1)...(19): siRNA sense strand
gucaggaacauaaucaaua

SEQ ID NO: 1721493 - RNA, 19 nt, Homo sapiens
  misc_RNA (1)...(19): siRNA sense strand
ugaugaagguauauacaga

SEQ ID NO: 1721494 - RNA, 19 nt, Homo sapiens
  misc_RNA (1)...(19): siRNA sense strand
uaaaugagccaaaugaaac

SEQ ID NO: 1721495 - RNA, 19 nt, Homo sapiens
  misc_RNA (1)...(19): siRNA sense strand
gcugcuaauucuuguggua

SEQ ID NO: 1721496 - RNA, 19 nt, Homo sapiens
  misc_RNA (1)...(19): siRNA sense strand
gaaccaaauacaacuuaug

SEQ ID NO: 1721497 - RNA, 19 nt, Homo sapiens
  misc_RNA (1)...(19): siRNA sense strand
gaacaaccuggaaccaaau

SEQ ID NO: 1721498 - RNA, 19 nt, Homo sapiens
  misc_RNA (1)...(19): siRNA sense strand
uggugaaccugaaaguaua

SEQ ID NO: 1721499 - RNA, 19 nt, Homo sapiens
  misc_RNA (1)...(19): siRNA sense strand
gcagggauauaucguuguc

SEQ ID NO: 1721500 - RNA, 19 nt, Homo sapiens
  misc_RNA (1)...(19): siRNA sense strand
gaaccaauaguggagauga

SEQ ID NO: 1721501 - RNA, 19 nt, Homo sapiens
  misc_RNA (1)...(19): siRNA sense strand
acaaggagacuacaguaaa

SEQ ID NO: 1721502 - RNA, 19 nt, Homo sapiens
  misc_RNA (1)...(19): siRNA sense strand
gguugcagcuguaaaugga

SEQ ID NO: 1721503 - RNA, 19 nt, Homo sapiens
  misc_RNA (1)...(19): siRNA sense strand
cacagccacuaaucauaua

SEQ ID NO: 1721504 - RNA, 19 nt, Homo sapiens
  misc_RNA (1)...(19): siRNA sense strand
caaaggacaaacacaagaa

SEQ ID NO: 1721505 - RNA, 19 nt, Homo sapiens
  misc_RNA (1)...(19): siRNA sense strand
cuggagaagagauaaauua

SEQ ID NO: 1721506 - RNA, 19 nt, Homo sapiens
  misc_RNA (1)...(19): siRNA sense strand
uaaaguuucuaacgacauc

SEQ ID NO: 1721507 - RNA, 19 nt, Homo sapiens
  misc_RNA (1)...(19): siRNA sense strand
caaagcccaacauuauuaa

SEQ ID NO: 1721508 - RNA, 19 nt, Homo sapiens
  misc_RNA (1)...(19): siRNA sense strand
gacaaggagacuacaguaa

SEQ ID NO: 1721509 - RNA, 19 nt, Homo sapiens
  misc_RNA (1)...(19): siRNA sense strand
agaaguagcgucagaaauc

SEQ ID NO: 1721510 - RNA, 19 nt, Homo sapiens
  misc_RNA (1)...(19): siRNA sense strand
gaagaugcagggauauauc

SEQ ID NO: 1721511 - RNA, 19 nt, Homo sapiens
  misc_RNA (1)...(19): siRNA sense strand
gaauucagcaugccaccaa

SEQ ID NO: 1721512 - RNA, 19 nt, Homo sapiens
  misc_RNA (1)...(19): siRNA sense strand
gagaggagaagaaaugaca

SEQ ID NO: 1721513 - RNA, 19 nt, Homo sapiens
  misc_RNA (1)...(19): siRNA sense strand
gauauaucguugucaagca

SEQ ID NO: 1721514 - RNA, 19 nt, Homo sapiens
  misc_RNA (1)...(19): siRNA sense strand
aagagcauguaccuugaua

SEQ ID NO: 1721515 - RNA, 19 nt, Homo sapiens
  misc_RNA (1)...(19): siRNA sense strand
caaggagagaagauaauuu

SEQ ID NO: 1721516 - RNA, 19 nt, Homo sapiens
  misc_RNA (1)...(19): siRNA sense strand
uaaagaacucgaagaagga

SEQ ID NO: 1721517 - RNA, 19 nt, Homo sapiens
  misc_RNA (1)...(19): siRNA sense strand
ggacagccaagcaguggaa

SEQ ID NO: 1721518 - RNA, 19 nt, Homo sapiens
  misc_RNA (1)...(19): siRNA sense strand
caaggagacuacaguaaaa

SEQ ID NO: 1721519 - RNA, 19 nt, Homo sapiens
  misc_RNA (1)...(19): siRNA sense strand
cagauucucaacaucaaua

SEQ ID NO: 1721520 - RNA, 19 nt, Homo sapiens
  misc_RNA (1)...(19): siRNA sense strand
cugaaaguauagauuggua

SEQ ID NO: 1721521 - RNA, 19 nt, Homo sapiens
  misc_RNA (1)...(19): siRNA sense strand
ggacggccguaucgaaguc

SEQ ID NO: 1721522 - RNA, 19 nt, Homo sapiens
  misc_RNA (1)...(19): siRNA sense strand
gaagagauaugcaaccauu

SEQ ID NO: 1721523 - RNA, 19 nt, Homo sapiens
  misc_RNA (1)...(19): siRNA sense strand
gcgauuaugugcccaaaua

SEQ ID NO: 1721524 - RNA, 19 nt, Homo sapiens
  misc_RNA (1)...(19): siRNA sense strand
caagagaaguuguggcaua

SEQ ID NO: 1721525 - RNA, 19 nt, Homo sapiens
  misc_RNA (1)...(19): siRNA sense strand
acagaaaggucuaucauuu

SEQ ID NO: 1721526 - RNA, 19 nt, Homo sapiens
  misc_RNA (1)...(19): siRNA sense strand
cagcagcacuccauuuaua

SEQ ID NO: 1721527 - RNA, 19 nt, Homo sapiens
  misc_RNA (1)...(19): siRNA sense strand
gcaaagcagugaauaagga

SEQ ID NO: 1721528 - RNA, 19 nt, Homo sapiens
  misc_RNA (1)...(19): siRNA sense strand
gagaaguuguggcauauaa

SEQ ID NO: 1721529 - RNA, 19 nt, Homo sapiens
  misc_RNA (1)...(19): siRNA sense strand
aaagagaacuggguccuua

SEQ ID NO: 1721530 - RNA, 19 nt, Homo sapiens
  misc_RNA (1)...(19): siRNA sense strand
ggacauaaaguuacaauuc

SEQ ID NO: 1721531 - RNA, 19 nt, Homo sapiens
  misc_RNA (1)...(19): siRNA sense strand
gaaguuguggcauauaaua

SEQ ID NO: 1721532 - RNA, 19 nt, Homo sapiens
  misc_RNA (1)...(19): siRNA sense strand
gaagucauuugcacugaaa

SEQ ID NO: 1721533 - RNA, 19 nt, Homo sapiens
  misc_RNA (1)...(19): siRNA sense strand
caaaggaaaugcuuaugga

SEQ ID NO: 1721534 - RNA, 19 nt, Homo sapiens
  misc_RNA (1)...(19): siRNA sense strand
ggaauaaacaggccaaaga

SEQ ID NO: 1721535 - RNA, 19 nt, Homo sapiens
  misc_RNA (1)...(19): siRNA sense strand
ugaagaaccaccaaaguua

SEQ ID NO: 1721536 - RNA, 19 nt, Homo sapiens
  misc_RNA (1)...(19): siRNA sense strand
gaaaaucgcuccuucuuca

SEQ ID NO: 1721537 - RNA, 19 nt, Homo sapiens
  misc_RNA (1)...(19): siRNA sense strand
ugaggugucuacuguaaua

SEQ ID NO: 1721538 - RNA, 19 nt, Homo sapiens
  misc_RNA (1)...(19): siRNA sense strand
gccuauagcucaccucgua

SEQ ID NO: 1721539 - RNA, 19 nt, Homo sapiens
  misc_RNA (1)...(19): siRNA sense strand
uagaaaggcuagagagaaa

SEQ ID NO: 1721540 - RNA, 19 nt, Homo sapiens
  misc_RNA (1)...(19): siRNA sense strand
gacuaaagcuggcagaaau

SEQ ID NO: 1721541 - RNA, 19 nt, Homo sapiens
  misc_RNA (1)...(19): siRNA sense strand
gaagcgcucugcuguacaa

SEQ ID NO: 1721542 - RNA, 19 nt, Homo sapiens
  misc_RNA (1)...(19): siRNA sense strand
gccaaugucuccucuaaug

SEQ ID NO: 1721543 - RNA, 19 nt, Homo sapiens
  misc_RNA (1)...(19): siRNA sense strand
ucacauagacuuugcugua

SEQ ID NO: 1721544 - RNA, 19 nt, Homo sapiens
  misc_RNA (1)...(19): siRNA sense strand
gaauaaaggagcacuacuu

SEQ ID NO: 1721545 - RNA, 19 nt, Homo sapiens
  misc_RNA (1)...(19): siRNA sense strand
gauagauugugacuuagaa

SEQ ID NO: 1721546 - RNA, 19 nt, Homo sapiens
  misc_RNA (1)...(19): siRNA sense strand
gaaauuggaacaccucgaa

SEQ ID NO: 1721547 - RNA, 19 nt, Homo sapiens
  misc_RNA (1)...(19): siRNA sense strand
ucaaaugaguuacgaagga

SEQ ID NO: 1721548 - RNA, 19 nt, Homo sapiens
  misc_RNA (1)...(19): siRNA sense strand
caagggacauggugaaaca

SEQ ID NO: 1721549 - RNA, 19 nt, Homo sapiens
  misc_RNA (1)...(19): siRNA sense strand
gagccacccugcaucauug

SEQ ID NO: 1721550 - RNA, 19 nt, Homo sapiens
  misc_RNA (1)...(19): siRNA sense strand
caucauugcuguacugugu

SEQ ID NO: 1721551 - RNA, 19 nt, Homo sapiens
  misc_RNA (1)...(19): siRNA sense strand
gauaauagcaaagcaguga

SEQ ID NO: 1721552 - RNA, 19 nt, Homo sapiens
  misc_RNA (1)...(19): siRNA sense strand
ggacaugucaguucuuuua

SEQ ID NO: 1721553 - RNA, 19 nt, Homo sapiens
  misc_RNA (1)...(19): siRNA sense strand
aggcuaauguggaguauaa

SEQ ID NO: 1721554 - RNA, 19 nt, Homo sapiens
  misc_RNA (1)...(19): siRNA sense strand
uaaggaguaugaagaguau

SEQ ID NO: 1721555 - RNA, 19 nt, Homo sapiens
  misc_RNA (1)...(19): siRNA sense strand
ggauggacaugucaaaucu

SEQ ID NO: 1721556 - RNA, 19 nt, Homo sapiens
  misc_RNA (1)...(19): siRNA sense strand
gaucauaacagaaggaaca

SEQ ID NO: 1721557 - RNA, 19 nt, Homo sapiens
  misc_RNA (1)...(19): siRNA sense strand
gaaaggcuagagagaaauu

SEQ ID NO: 1721558 - RNA, 19 nt, Homo sapiens
  misc_RNA (1)...(19): siRNA sense strand
caagaguccuguaucacuu

SEQ ID NO: 1721559 - RNA, 19 nt, Homo sapiens
  misc_RNA (1)...(19): siRNA sense strand
ugucaaaucuaccacaaga

SEQ ID NO: 1721560 - RNA, 19 nt, Homo sapiens
  misc_RNA (1)...(19): siRNA sense strand
ucacuguccugaucuaaug

SEQ ID NO: 1721561 - RNA, 19 nt, Homo sapiens
  misc_RNA (1)...(19): siRNA sense strand
caaaugaguuacgaaggaa

SEQ ID NO: 1721562 - RNA, 19 nt, Homo sapiens
  misc_RNA (1)...(19): siRNA sense strand
gacuaaagcacaagaggua

SEQ ID NO: 1721563 - RNA, 19 nt, Homo sapiens
  misc_RNA (1)...(19): siRNA sense strand
gcauguucauuauauguug

SEQ ID NO: 1721564 - RNA, 19 nt, Homo sapiens
  misc_RNA (1)...(19): siRNA sense strand
ccaccaaaguuaccacgaa

SEQ ID NO: 1721565 - RNA, 19 nt, Homo sapiens
  misc_RNA (1)...(19): siRNA sense strand
gucaaacucuucuaacaau

SEQ ID NO: 1721566 - RNA, 19 nt, Homo sapiens
  misc_RNA (1)...(19): siRNA sense strand
guccugaucuaaugaaaga

SEQ ID NO: 1721567 - RNA, 19 nt, Homo sapiens
  misc_RNA (1)...(19): siRNA sense strand
ggagagacuuucugucaac

SEQ ID NO: 1721568 - RNA, 19 nt, Homo sapiens
  misc_RNA (1)...(19): siRNA sense strand
gaauggacaugucaguucu

SEQ ID NO: 1721569 - RNA, 19 nt, Homo sapiens
  misc_RNA (1)...(19): siRNA sense strand
ggaauggacaugucaguuc

SEQ ID NO: 1721570 - RNA, 19 nt, Homo sapiens
  misc_RNA (1)...(19): siRNA sense strand
gcgcucugcuguacaaguu

SEQ ID NO: 1721571 - RNA, 19 nt, Homo sapiens
  misc_RNA (1)...(19): siRNA sense strand
aagaaugggucaggccuua

SEQ ID NO: 1721572 - RNA, 19 nt, Homo sapiens
  misc_RNA (1)...(19): siRNA sense strand
gaagagccacccugcauca

SEQ ID NO: 1721573 - RNA, 19 nt, Homo sapiens
  misc_RNA (1)...(19): siRNA sense strand
gcuaauagucacguauaua

SEQ ID NO: 1721574 - RNA, 19 nt, Homo sapiens
  misc_RNA (1)...(19): siRNA sense strand
cacauagacuuugcuguaa

SEQ ID NO: 1721575 - RNA, 19 nt, Homo sapiens
  misc_RNA (1)...(19): siRNA sense strand
guuggcauguucauuauau

SEQ ID NO: 1721576 - RNA, 19 nt, Homo sapiens
  misc_RNA (1)...(19): siRNA sense strand
gaacaacaggacauaaagu

SEQ ID NO: 1721577 - RNA, 19 nt, Homo sapiens
  misc_RNA (1)...(19): siRNA sense strand
uauuguggcuggucugaaa

SEQ ID NO: 1721578 - RNA, 19 nt, Homo sapiens
  misc_RNA (1)...(19): siRNA sense strand
uaggaagagugaagucauu

SEQ ID NO: 1721579 - RNA, 19 nt, Homo sapiens
  misc_RNA (1)...(19): siRNA sense strand
ucacguauauagaaguguu

SEQ ID NO: 1721580 - RNA, 19 nt, Homo sapiens
  misc_RNA (1)...(19): siRNA sense strand
gaucagcuccuccuuugug

SEQ ID NO: 1721581 - RNA, 19 nt, Homo sapiens
  misc_RNA (1)...(19): siRNA sense strand
ccacaagaauuucgugaac

SEQ ID NO: 1721582 - RNA, 19 nt, Homo sapiens
  misc_RNA (1)...(19): siRNA sense strand
caaaguuccuaccugugaa

SEQ ID NO: 1721583 - RNA, 19 nt, Homo sapiens
  misc_RNA (1)...(19): siRNA sense strand
gaacagauuuuggagaguu

SEQ ID NO: 1721584 - RNA, 19 nt, Homo sapiens
  misc_RNA (1)...(19): siRNA sense strand
cuugauggcuuguuguuug

SEQ ID NO: 1721585 - RNA, 19 nt, Homo sapiens
  misc_RNA (1)...(19): siRNA sense strand
ggaaggcaacuguguuuca

SEQ ID NO: 1721586 - RNA, 19 nt, Homo sapiens
  misc_RNA (1)...(19): siRNA sense strand
ugaauaaggaguaugaaga

SEQ ID NO: 1721587 - RNA, 19 nt, Homo sapiens
  misc_RNA (1)...(19): siRNA sense strand
agaauuucgugaacguaua

SEQ ID NO: 1721588 - RNA, 19 nt, Homo sapiens
  misc_RNA (1)...(19): siRNA sense strand
agaaauggauggacauguc

SEQ ID NO: 1721589 - RNA, 19 nt, Homo sapiens
  misc_RNA (1)...(19): siRNA sense strand
ggucaaacucuucuaacaa

SEQ ID NO: 1721590 - RNA, 19 nt, Homo sapiens
  misc_RNA (1)...(19): siRNA sense strand
gcuccuucuucaagcauua

SEQ ID NO: 1721591 - RNA, 19 nt, Homo sapiens
  misc_RNA (1)...(19): siRNA sense strand
gaacagccaggaucucaca

SEQ ID NO: 1721592 - RNA, 19 nt, Homo sapiens
  misc_RNA (1)...(19): siRNA sense strand
gugagccgguuacagagua

SEQ ID NO: 1721593 - RNA, 19 nt, Homo sapiens
  misc_RNA (1)...(19): siRNA sense strand
aagaguauguucuaacugu

SEQ ID NO: 1721594 - RNA, 19 nt, Homo sapiens
  misc_RNA (1)...(19): siRNA sense strand
uaaacagcauugaagaaca

SEQ ID NO: 1721595 - RNA, 19 nt, Homo sapiens
  misc_RNA (1)...(19): siRNA sense strand
gaaauacgacuuggcgaau

SEQ ID NO: 1721596 - RNA, 19 nt, Homo sapiens
  misc_RNA (1)...(19): siRNA sense strand
uggaucagcuccuccuuug

SEQ ID NO: 1721597 - RNA, 19 nt, Homo sapiens
  misc_RNA (1)...(19): siRNA sense strand
agaaaggucuaucauuugg

SEQ ID NO: 1721598 - RNA, 19 nt, Homo sapiens
  misc_RNA (1)...(19): siRNA sense strand
gagguacauucaacuggaa

SEQ ID NO: 1721599 - RNA, 19 nt, Homo sapiens
  misc_RNA (1)...(19): siRNA sense strand
gcacaagagguacauucaa

SEQ ID NO: 1721600 - RNA, 19 nt, Homo sapiens
  misc_RNA (1)...(19): siRNA sense strand
gacaagaucauaacagaag

SEQ ID NO: 1721601 - RNA, 19 nt, Homo sapiens
  misc_RNA (1)...(19): siRNA sense strand
ggacaagaucauaacagaa

SEQ ID NO: 1721602 - RNA, 19 nt, Homo sapiens
  misc_RNA (1)...(19): siRNA sense strand
gcacuacuuuaagccauau

SEQ ID NO: 1721603 - RNA, 19 nt, Homo sapiens
  misc_RNA (1)...(19): siRNA sense strand
gcaacuguguuucacuuac

SEQ ID NO: 1721604 - RNA, 19 nt, Homo sapiens
  misc_RNA (1)...(19): siRNA sense strand
ggaaucagccccaagcuaa

SEQ ID NO: 1721605 - RNA, 19 nt, Homo sapiens
  misc_RNA (1)...(19): siRNA sense strand
ggauguuucaaaugaguua

SEQ ID NO: 1721606 - RNA, 19 nt, Homo sapiens
  misc_RNA (1)...(19): siRNA sense strand
cagaaaggucuaucauuug

SEQ ID NO: 1721607 - RNA, 19 nt, Homo sapiens
  misc_RNA (1)...(19): siRNA sense strand
uggacaagaucauaacaga

SEQ ID NO: 1721608 - RNA, 19 nt, Homo sapiens
  misc_RNA (1)...(19): siRNA sense strand
ugaaacaccuaaacagcau

SEQ ID NO: 1721609 - RNA, 19 nt, Homo sapiens
  misc_RNA (1)...(19): siRNA sense strand
gaccggacggagauauuua

SEQ ID NO: 1721610 - RNA, 19 nt, Homo sapiens
  misc_RNA (1)...(19): siRNA sense strand
gaauaaggaguaugaagag

SEQ ID NO: 1721611 - RNA, 19 nt, Homo sapiens
  misc_RNA (1)...(19): siRNA sense strand
ggugucuacuguaauauuc

SEQ ID NO: 1721612 - RNA, 19 nt, Homo sapiens
  misc_RNA (1)...(19): siRNA sense strand
caagaagcgcucugcugua

SEQ ID NO: 1721613 - RNA, 19 nt, Homo sapiens
  misc_RNA (1)...(19): siRNA sense strand
gcagcacuccauuuauauu

SEQ ID NO: 1721614 - RNA, 19 nt, Homo sapiens
  misc_RNA (1)...(19): siRNA sense strand
gauugugacuuagaagaug

SEQ ID NO: 1721615 - RNA, 19 nt, Homo sapiens
  misc_RNA (1)...(19): siRNA sense strand
gaaaaguauuccaagagaa

SEQ ID NO: 1721616 - RNA, 19 nt, Homo sapiens
  misc_RNA (1)...(19): siRNA sense strand
acuuacugcucauucauua

SEQ ID NO: 1721617 - RNA, 19 nt, Homo sapiens
  misc_RNA (1)...(19): siRNA sense strand
ugauaccucuuuccaugaa

SEQ ID NO: 1721618 - RNA, 19 nt, Homo sapiens
  misc_RNA (1)...(19): siRNA sense strand
uacauggugucgcaaauga

SEQ ID NO: 1721619 - RNA, 19 nt, Homo sapiens
  misc_RNA (1)...(19): siRNA sense strand
acaacaggacauaaaguua

SEQ ID NO: 1721620 - RNA, 19 nt, Homo sapiens
  misc_RNA (1)...(19): siRNA sense strand
guaugaagaguauguucua

SEQ ID NO: 1721621 - RNA, 19 nt, Homo sapiens
  misc_RNA (1)...(19): siRNA sense strand
gaagaaccaccaaaguuac

SEQ ID NO: 1721622 - RNA, 19 nt, Homo sapiens
  misc_RNA (1)...(19): siRNA sense strand
gaagagauaugcaaccauu

SEQ ID NO: 1721623 - RNA, 19 nt, Homo sapiens
  misc_RNA (1)...(19): siRNA sense strand
gcgauuaugugcccaaaua

SEQ ID NO: 1721624 - RNA, 19 nt, Homo sapiens
  misc_RNA (1)...(19): siRNA sense strand
caagagaaguuguggcaua

SEQ ID NO: 1721625 - RNA, 19 nt, Homo sapiens
  misc_RNA (1)...(19): siRNA sense strand
acagaaaggucuaucauuu

SEQ ID NO: 1721626 - RNA, 19 nt, Homo sapiens
  misc_RNA (1)...(19): siRNA sense strand
cagcagcacuccauuuaua

SEQ ID NO: 1721627 - RNA, 19 nt, Homo sapiens
  misc_RNA (1)...(19): siRNA sense strand
gcaaagcagugaauaagga

SEQ ID NO: 1721628 - RNA, 19 nt, Homo sapiens
  misc_RNA (1)...(19): siRNA sense strand
gagaaguuguggcauauaa

SEQ ID NO: 1721629 - RNA, 19 nt, Homo sapiens
  misc_RNA (1)...(19): siRNA sense strand
aaagagaacuggguccuua

SEQ ID NO: 1721630 - RNA, 19 nt, Homo sapiens
  misc_RNA (1)...(19): siRNA sense strand
ggacauaaaguuacaauuc

SEQ ID NO: 1721631 - RNA, 19 nt, Homo sapiens
  misc_RNA (1)...(19): siRNA sense strand
gaaguuguggcauauaaua

SEQ ID NO: 1721632 - RNA, 19 nt, Homo sapiens
  misc_RNA (1)...(19): siRNA sense strand
gaagucauuugcacugaaa

SEQ ID NO: 1721633 - RNA, 19 nt, Homo sapiens
  misc_RNA (1)...(19): siRNA sense strand
caaaggaaaugcuuaugga

SEQ ID NO: 1721634 - RNA, 19 nt, Homo sapiens
  misc_RNA (1)...(19): siRNA sense strand
ggaauaaacaggccaaaga

SEQ ID NO: 1721635 - RNA, 19 nt, Homo sapiens
  misc_RNA (1)...(19): siRNA sense strand
ugaagaaccaccaaaguua

SEQ ID NO: 1721636 - RNA, 19 nt, Homo sapiens
  misc_RNA (1)...(19): siRNA sense strand
gaaaaucgcuccuucuuca

SEQ ID NO: 1721637 - RNA, 19 nt, Homo sapiens
  misc_RNA (1)...(19): siRNA sense strand
ugaggugucuacuguaaua

SEQ ID NO: 1721638 - RNA, 19 nt, Homo sapiens
  misc_RNA (1)...(19): siRNA sense strand
gccuauagcucaccucgua

SEQ ID NO: 1721639 - RNA, 19 nt, Homo sapiens
  misc_RNA (1)...(19): siRNA sense strand
uagaaaggcuagagagaaa

SEQ ID NO: 1721640 - RNA, 19 nt, Homo sapiens
  misc_RNA (1)...(19): siRNA sense strand
gacuaaagcuggcagaaau

SEQ ID NO: 1721641 - RNA, 19 nt, Homo sapiens
  misc_RNA (1)...(19): siRNA sense strand
gaagcgcucugcuguacaa

SEQ ID NO: 1721642 - RNA, 19 nt, Homo sapiens
  misc_RNA (1)...(19): siRNA sense strand
gccaaugucuccucuaaug

SEQ ID NO: 1721643 - RNA, 19 nt, Homo sapiens
  misc_RNA (1)...(19): siRNA sense strand
ucacauagacuuugcugua

SEQ ID NO: 1721644 - RNA, 19 nt, Homo sapiens
  misc_RNA (1)...(19): siRNA sense strand
gaauaaaggagcacuacuu

SEQ ID NO: 1721645 - RNA, 19 nt, Homo sapiens
  misc_RNA (1)...(19): siRNA sense strand
gauagauugugacuuagaa

SEQ ID NO: 1721646 - RNA, 19 nt, Homo sapiens
  misc_RNA (1)...(19): siRNA sense strand
gaaauuggaacaccucgaa

SEQ ID NO: 1721647 - RNA, 19 nt, Homo sapiens
  misc_RNA (1)...(19): siRNA sense strand
ucaaaugaguuacgaagga

SEQ ID NO: 1721648 - RNA, 19 nt, Homo sapiens
  misc_RNA (1)...(19): siRNA sense strand
caagggacauggugaaaca

SEQ ID NO: 1721649 - RNA, 19 nt, Homo sapiens
  misc_RNA (1)...(19): siRNA sense strand
gagccacccugcaucauug

SEQ ID NO: 1721650 - RNA, 19 nt, Homo sapiens
  misc_RNA (1)...(19): siRNA sense strand
caucauugcuguacugugu

SEQ ID NO: 1721651 - RNA, 19 nt, Homo sapiens
  misc_RNA (1)...(19): siRNA sense strand
gauaauagcaaagcaguga

SEQ ID NO: 1721652 - RNA, 19 nt, Homo sapiens
  misc_RNA (1)...(19): siRNA sense strand
ggacaugucaguucuuuua

SEQ ID NO: 1721653 - RNA, 19 nt, Homo sapiens
  misc_RNA (1)...(19): siRNA sense strand
aggcuaauguggaguauaa

SEQ ID NO: 1721654 - RNA, 19 nt, Homo sapiens
  misc_RNA (1)...(19): siRNA sense strand
uaaggaguaugaagaguau

SEQ ID NO: 1721655 - RNA, 19 nt, Homo sapiens
  misc_RNA (1)...(19): siRNA sense strand
ggauggacaugucaaaucu

SEQ ID NO: 1721656 - RNA, 19 nt, Homo sapiens
  misc_RNA (1)...(19): siRNA sense strand
gaucauaacagaaggaaca

SEQ ID NO: 1721657 - RNA, 19 nt, Homo sapiens
  misc_RNA (1)...(19): siRNA sense strand
gaaaggcuagagagaaauu

SEQ ID NO: 1721658 - RNA, 19 nt, Homo sapiens
  misc_RNA (1)...(19): siRNA sense strand
caagaguccuguaucacuu

SEQ ID NO: 1721659 - RNA, 19 nt, Homo sapiens
  misc_RNA (1)...(19): siRNA sense strand
ugucaaaucuaccacaaga

SEQ ID NO: 1721660 - RNA, 19 nt, Homo sapiens
  misc_RNA (1)...(19): siRNA sense strand
ucacuguccugaucuaaug

SEQ ID NO: 1721661 - RNA, 19 nt, Homo sapiens
  misc_RNA (1)...(19): siRNA sense strand
caaaugaguuacgaaggaa

SEQ ID NO: 1721662 - RNA, 19 nt, Homo sapiens
  misc_RNA (1)...(19): siRNA sense strand
gacuaaagcacaagaggua

SEQ ID NO: 1721663 - RNA, 19 nt, Homo sapiens
  misc_RNA (1)...(19): siRNA sense strand
gcauguucauuauauguug

SEQ ID NO: 1721664 - RNA, 19 nt, Homo sapiens
  misc_RNA (1)...(19): siRNA sense strand
ccaccaaaguuaccacgaa

SEQ ID NO: 1721665 - RNA, 19 nt, Homo sapiens
  misc_RNA (1)...(19): siRNA sense strand
gucaaacucuucuaacaau

SEQ ID NO: 1721666 - RNA, 19 nt, Homo sapiens
  misc_RNA (1)...(19): siRNA sense strand
guccugaucuaaugaaaga

SEQ ID NO: 1721667 - RNA, 19 nt, Homo sapiens
  misc_RNA (1)...(19): siRNA sense strand
ggagagacuuucugucaac

SEQ ID NO: 1721668 - RNA, 19 nt, Homo sapiens
  misc_RNA (1)...(19): siRNA sense strand
gaauggacaugucaguucu

SEQ ID NO: 1721669 - RNA, 19 nt, Homo sapiens
  misc_RNA (1)...(19): siRNA sense strand
ggaauggacaugucaguuc

SEQ ID NO: 1721670 - RNA, 19 nt, Homo sapiens
  misc_RNA (1)...(19): siRNA sense strand
gcgcucugcuguacaaguu

SEQ ID NO: 1721671 - RNA, 19 nt, Homo sapiens
  misc_RNA (1)...(19): siRNA sense strand
aagaaugggucaggccuua

SEQ ID NO: 1721672 - RNA, 19 nt, Homo sapiens
  misc_RNA (1)...(19): siRNA sense strand
gaagagccacccugcauca

SEQ ID NO: 1721673 - RNA, 19 nt, Homo sapiens
  misc_RNA (1)...(19): siRNA sense strand
gcuaauagucacguauaua

SEQ ID NO: 1721674 - RNA, 19 nt, Homo sapiens
  misc_RNA (1)...(19): siRNA sense strand
cacauagacuuugcuguaa

SEQ ID NO: 1721675 - RNA, 19 nt, Homo sapiens
  misc_RNA (1)...(19): siRNA sense strand
guuggcauguucauuauau

SEQ ID NO: 1721676 - RNA, 19 nt, Homo sapiens
  misc_RNA (1)...(19): siRNA sense strand
gaacaacaggacauaaagu

SEQ ID NO: 1721677 - RNA, 19 nt, Homo sapiens
  misc_RNA (1)...(19): siRNA sense strand
uauuguggcuggucugaaa

SEQ ID NO: 1721678 - RNA, 19 nt, Homo sapiens
  misc_RNA (1)...(19): siRNA sense strand
uaggaagagugaagucauu

SEQ ID NO: 1721679 - RNA, 19 nt, Homo sapiens
  misc_RNA (1)...(19): siRNA sense strand
ucacguauauagaaguguu

SEQ ID NO: 1721680 - RNA, 19 nt, Homo sapiens
  misc_RNA (1)...(19): siRNA sense strand
gaucagcuccuccuuugug

SEQ ID NO: 1721681 - RNA, 19 nt, Homo sapiens
  misc_RNA (1)...(19): siRNA sense strand
ccacaagaauuucgugaac

SEQ ID NO: 1721682 - RNA, 19 nt, Homo sapiens
  misc_RNA (1)...(19): siRNA sense strand
caaaguuccuaccugugaa

SEQ ID NO: 1721683 - RNA, 19 nt, Homo sapiens
  misc_RNA (1)...(19): siRNA sense strand
gaacagauuuuggagaguu

SEQ ID NO: 1721684 - RNA, 19 nt, Homo sapiens
  misc_RNA (1)...(19): siRNA sense strand
cuugauggcuuguuguuug

SEQ ID NO: 1721685 - RNA, 19 nt, Homo sapiens
  misc_RNA (1)...(19): siRNA sense strand
ggaaggcaacuguguuuca

SEQ ID NO: 1721686 - RNA, 19 nt, Homo sapiens
  misc_RNA (1)...(19): siRNA sense strand
ugaauaaggaguaugaaga

SEQ ID NO: 1721687 - RNA, 19 nt, Homo sapiens
  misc_RNA (1)...(19): siRNA sense strand
agaauuucgugaacguaua

SEQ ID NO: 1721688 - RNA, 19 nt, Homo sapiens
  misc_RNA (1)...(19): siRNA sense strand
agaaauggauggacauguc

SEQ ID NO: 1721689 - RNA, 19 nt, Homo sapiens
  misc_RNA (1)...(19): siRNA sense strand
ggucaaacucuucuaacaa

SEQ ID NO: 1721690 - RNA, 19 nt, Homo sapiens
  misc_RNA (1)...(19): siRNA sense strand
gcuccuucuucaagcauua

SEQ ID NO: 1721691 - RNA, 19 nt, Homo sapiens
  misc_RNA (1)...(19): siRNA sense strand
gaacagccaggaucucaca

SEQ ID NO: 1721692 - RNA, 19 nt, Homo sapiens
  misc_RNA (1)...(19): siRNA sense strand
gugagccgguuacagagua

SEQ ID NO: 1721693 - RNA, 19 nt, Homo sapiens
  misc_RNA (1)...(19): siRNA sense strand
aagaguauguucuaacugu

SEQ ID NO: 1721694 - RNA, 19 nt, Homo sapiens
  misc_RNA (1)...(19): siRNA sense strand
uaaacagcauugaagaaca

SEQ ID NO: 1721695 - RNA, 19 nt, Homo sapiens
  misc_RNA (1)...(19): siRNA sense strand
gaaauacgacuuggcgaau

SEQ ID NO: 1721696 - RNA, 19 nt, Homo sapiens
  misc_RNA (1)...(19): siRNA sense strand
uggaucagcuccuccuuug

SEQ ID NO: 1721697 - RNA, 19 nt, Homo sapiens
  misc_RNA (1)...(19): siRNA sense strand
agaaaggucuaucauuugg

SEQ ID NO: 1721698 - RNA, 19 nt, Homo sapiens
  misc_RNA (1)...(19): siRNA sense strand
gagguacauucaacuggaa

SEQ ID NO: 1721699 - RNA, 19 nt, Homo sapiens
  misc_RNA (1)...(19): siRNA sense strand
gcacaagagguacauucaa

SEQ ID NO: 1721700 - RNA, 19 nt, Homo sapiens
  misc_RNA (1)...(19): siRNA sense strand
gacaagaucauaacagaag

SEQ ID NO: 1721701 - RNA, 19 nt, Homo sapiens
  misc_RNA (1)...(19): siRNA sense strand
ggacaagaucauaacagaa

SEQ ID NO: 1721702 - RNA, 19 nt, Homo sapiens
  misc_RNA (1)...(19): siRNA sense strand
gcacuacuuuaagccauau

SEQ ID NO: 1721703 - RNA, 19 nt, Homo sapiens
  misc_RNA (1)...(19): siRNA sense strand
gcaacuguguuucacuuac

SEQ ID NO: 1721704 - RNA, 19 nt, Homo sapiens
  misc_RNA (1)...(19): siRNA sense strand
ggaaucagccccaagcuaa

SEQ ID NO: 1721705 - RNA, 19 nt, Homo sapiens
  misc_RNA (1)...(19): siRNA sense strand
ggauguuucaaaugaguua

SEQ ID NO: 1721706 - RNA, 19 nt, Homo sapiens
  misc_RNA (1)...(19): siRNA sense strand
cagaaaggucuaucauuug

SEQ ID NO: 1721707 - RNA, 19 nt, Homo sapiens
  misc_RNA (1)...(19): siRNA sense strand
uggacaagaucauaacaga

SEQ ID NO: 1721708 - RNA, 19 nt, Homo sapiens
  misc_RNA (1)...(19): siRNA sense strand
ugaaacaccuaaacagcau

SEQ ID NO: 1721709 - RNA, 19 nt, Homo sapiens
  misc_RNA (1)...(19): siRNA sense strand
gaccggacggagauauuua

SEQ ID NO: 1721710 - RNA, 19 nt, Homo sapiens
  misc_RNA (1)...(19): siRNA sense strand
gaauaaggaguaugaagag

SEQ ID NO: 1721711 - RNA, 19 nt, Homo sapiens
  misc_RNA (1)...(19): siRNA sense strand
ggugucuacuguaauauuc

SEQ ID NO: 1721712 - RNA, 19 nt, Homo sapiens
  misc_RNA (1)...(19): siRNA sense strand
caagaagcgcucugcugua

SEQ ID NO: 1721713 - RNA, 19 nt, Homo sapiens
  misc_RNA (1)...(19): siRNA sense strand
gcagcacuccauuuauauu

SEQ ID NO: 1721714 - RNA, 19 nt, Homo sapiens
  misc_RNA (1)...(19): siRNA sense strand
gauugugacuuagaagaug

SEQ ID NO: 1721715 - RNA, 19 nt, Homo sapiens
  misc_RNA (1)...(19): siRNA sense strand
gaaaaguauuccaagagaa

SEQ ID NO: 1721716 - RNA, 19 nt, Homo sapiens
  misc_RNA (1)...(19): siRNA sense strand
acuuacugcucauucauua

SEQ ID NO: 1721717 - RNA, 19 nt, Homo sapiens
  misc_RNA (1)...(19): siRNA sense strand
ugauaccucuuuccaugaa

SEQ ID NO: 1721718 - RNA, 19 nt, Homo sapiens
  misc_RNA (1)...(19): siRNA sense strand
uacauggugucgcaaauga

SEQ ID NO: 1721719 - RNA, 19 nt, Homo sapiens
  misc_RNA (1)...(19): siRNA sense strand
acaacaggacauaaaguua

SEQ ID NO: 1721720 - RNA, 19 nt, Homo sapiens
  misc_RNA (1)...(19): siRNA sense strand
guaugaagaguauguucua

SEQ ID NO: 1721721 - RNA, 19 nt, Homo sapiens
  misc_RNA (1)...(19): siRNA sense strand
gaagaaccaccaaaguuac

SEQ ID NO: 1721722 - RNA, 19 nt, Homo sapiens
  misc_RNA (1)...(19): siRNA sense strand
caagaaagaucacagauaa

SEQ ID NO: 1721723 - RNA, 19 nt, Homo sapiens
  misc_RNA (1)...(19): siRNA sense strand
gaagaaaggcaaaccauug

SEQ ID NO: 1721724 - RNA, 19 nt, Homo sapiens
  misc_RNA (1)...(19): siRNA sense strand
gcauaaagcacuacagaaa

SEQ ID NO: 1721725 - RNA, 19 nt, Homo sapiens
  misc_RNA (1)...(19): siRNA sense strand
uauaaacacuggcaauuug

SEQ ID NO: 1721726 - RNA, 19 nt, Homo sapiens
  misc_RNA (1)...(19): siRNA sense strand
ggaacgaugucgguuauug

SEQ ID NO: 1721727 - RNA, 19 nt, Homo sapiens
  misc_RNA (1)...(19): siRNA sense strand
gagggcagcauguuaauaa

SEQ ID NO: 1721728 - RNA, 19 nt, Homo sapiens
  misc_RNA (1)...(19): siRNA sense strand
gcuccauucucaucaauuu

SEQ ID NO: 1721729 - RNA, 19 nt, Homo sapiens
  misc_RNA (1)...(19): siRNA sense strand
gauacaaggcugcaaguuu

SEQ ID NO: 1721730 - RNA, 19 nt, Homo sapiens
  misc_RNA (1)...(19): siRNA sense strand
gaacaagagcccagucaga

SEQ ID NO: 1721731 - RNA, 19 nt, Homo sapiens
  misc_RNA (1)...(19): siRNA sense strand
ccacagggcuaguaguaga

SEQ ID NO: 1721732 - RNA, 19 nt, Homo sapiens
  misc_RNA (1)...(19): siRNA sense strand
agacauccaucucuuaaug

SEQ ID NO: 1721733 - RNA, 19 nt, Homo sapiens
  misc_RNA (1)...(19): siRNA sense strand
ugacaucugccaacaauuu

SEQ ID NO: 1721734 - RNA, 19 nt, Homo sapiens
  misc_RNA (1)...(19): siRNA sense strand
gagcgaauucggacauaua

SEQ ID NO: 1721735 - RNA, 19 nt, Homo sapiens
  misc_RNA (1)...(19): siRNA sense strand
gcaggagggcagcauguua

SEQ ID NO: 1721736 - RNA, 19 nt, Homo sapiens
  misc_RNA (1)...(19): siRNA sense strand
ggugacaucugccaacaau

SEQ ID NO: 1721737 - RNA, 19 nt, Homo sapiens
  misc_RNA (1)...(19): siRNA sense strand
caggauagcauaugaaguu

SEQ ID NO: 1721738 - RNA, 19 nt, Homo sapiens
  misc_RNA (1)...(19): siRNA sense strand
cagaugagguggaugugaa

SEQ ID NO: 1721739 - RNA, 19 nt, Homo sapiens
  misc_RNA (1)...(19): siRNA sense strand
cagaaggcaugcugaguug

SEQ ID NO: 1721740 - RNA, 19 nt, Homo sapiens
  misc_RNA (1)...(19): siRNA sense strand
cgagaaauauuugacaugu

SEQ ID NO: 1721741 - RNA, 19 nt, Homo sapiens
  misc_RNA (1)...(19): siRNA sense strand
ggaagaaaggcaaaccauu

SEQ ID NO: 1721742 - RNA, 19 nt, Homo sapiens
  misc_RNA (1)...(19): siRNA sense strand
gcauaugaaguucgugaua

SEQ ID NO: 1721743 - RNA, 19 nt, Homo sapiens
  misc_RNA (1)...(19): siRNA sense strand
gaacuugcacuggaagaaa

SEQ ID NO: 1721744 - RNA, 19 nt, Homo sapiens
  misc_RNA (1)...(19): siRNA sense strand
ggaugaacaccuuaaauca

SEQ ID NO: 1721745 - RNA, 19 nt, Homo sapiens
  misc_RNA (1)...(19): siRNA sense strand
gcaacaaagugcuagaaaa

SEQ ID NO: 1721746 - RNA, 19 nt, Homo sapiens
  misc_RNA (1)...(19): siRNA sense strand
ucaaucagcagaugaagaa

SEQ ID NO: 1721747 - RNA, 19 nt, Homo sapiens
  misc_RNA (1)...(19): siRNA sense strand
acaccaagaugcucuggaa

SEQ ID NO: 1721748 - RNA, 19 nt, Homo sapiens
  misc_RNA (1)...(19): siRNA sense strand
caggagauauugccaucaa

SEQ ID NO: 1721749 - RNA, 19 nt, Homo sapiens
  misc_RNA (1)...(19): siRNA sense strand
guagaaugccaacaagaaa

SEQ ID NO: 1721750 - RNA, 19 nt, Homo sapiens
  misc_RNA (1)...(19): siRNA sense strand
ugagguggaugugaaauug

SEQ ID NO: 1721751 - RNA, 19 nt, Homo sapiens
  misc_RNA (1)...(19): siRNA sense strand
cuucaucuguuaaguaaga

SEQ ID NO: 1721752 - RNA, 19 nt, Homo sapiens
  misc_RNA (1)...(19): siRNA sense strand
acaagaaagaucacagaua

SEQ ID NO: 1721753 - RNA, 19 nt, Homo sapiens
  misc_RNA (1)...(19): siRNA sense strand
caacaagaaagaucacaga

SEQ ID NO: 1721754 - RNA, 19 nt, Homo sapiens
  misc_RNA (1)...(19): siRNA sense strand
caggaacgaugucgguuau

SEQ ID NO: 1721755 - RNA, 19 nt, Homo sapiens
  misc_RNA (1)...(19): siRNA sense strand
gaacaagcaauugaagaau

SEQ ID NO: 1721756 - RNA, 19 nt, Homo sapiens
  misc_RNA (1)...(19): siRNA sense strand
ggagauauugccaucaaga

SEQ ID NO: 1721757 - RNA, 19 nt, Homo sapiens
  misc_RNA (1)...(19): siRNA sense strand
gauagugccgucagacuug

SEQ ID NO: 1721758 - RNA, 19 nt, Homo sapiens
  misc_RNA (1)...(19): siRNA sense strand
gacaucugccaacaauuua

SEQ ID NO: 1721759 - RNA, 19 nt, Homo sapiens
  misc_RNA (1)...(19): siRNA sense strand
ucucaucaauuuagacaga

SEQ ID NO: 1721760 - RNA, 19 nt, Homo sapiens
  misc_RNA (1)...(19): siRNA sense strand
gagcaaugucugcagcaua

SEQ ID NO: 1721761 - RNA, 19 nt, Homo sapiens
  misc_RNA (1)...(19): siRNA sense strand
caaaggagaaauaugacaa

SEQ ID NO: 1721762 - RNA, 19 nt, Homo sapiens
  misc_RNA (1)...(19): siRNA sense strand
ccaaacacuugagcaaugu

SEQ ID NO: 1721763 - RNA, 19 nt, Homo sapiens
  misc_RNA (1)...(19): siRNA sense strand
ugaagaagccauugcugaa

SEQ ID NO: 1721764 - RNA, 19 nt, Homo sapiens
  misc_RNA (1)...(19): siRNA sense strand
gggccuggaucagcuaauu

SEQ ID NO: 1721765 - RNA, 19 nt, Homo sapiens
  misc_RNA (1)...(19): siRNA sense strand
gaacgaugucgguuauugu

SEQ ID NO: 1721766 - RNA, 19 nt, Homo sapiens
  misc_RNA (1)...(19): siRNA sense strand
gaaaggcaaaccauugauc

SEQ ID NO: 1721767 - RNA, 19 nt, Homo sapiens
  misc_RNA (1)...(19): siRNA sense strand
ugaacaagcaauugaagaa

SEQ ID NO: 1721768 - RNA, 19 nt, Homo sapiens
  misc_RNA (1)...(19): siRNA sense strand
gaaaagcaguuacaagaac

SEQ ID NO: 1721769 - RNA, 19 nt, Homo sapiens
  misc_RNA (1)...(19): siRNA sense strand
gaaagacaagcgucagcaa

SEQ ID NO: 1721770 - RNA, 19 nt, Homo sapiens
  misc_RNA (1)...(19): siRNA sense strand
ccaaggauuugcgaauaga

SEQ ID NO: 1721771 - RNA, 19 nt, Homo sapiens
  misc_RNA (1)...(19): siRNA sense strand
gcaauuugaacuucugaau

SEQ ID NO: 1721772 - RNA, 19 nt, Homo sapiens
  misc_RNA (1)...(19): siRNA sense strand
guaguagaaugccaacaag

SEQ ID NO: 1721773 - RNA, 19 nt, Homo sapiens
  misc_RNA (1)...(19): siRNA sense strand
agaaauauauggagaaccu

SEQ ID NO: 1721774 - RNA, 19 nt, Homo sapiens
  misc_RNA (1)...(19): siRNA sense strand
gcuauaaacacuggcaauu

SEQ ID NO: 1721775 - RNA, 19 nt, Homo sapiens
  misc_RNA (1)...(19): siRNA sense strand
gcagccauuuaccaagaaa

SEQ ID NO: 1721776 - RNA, 19 nt, Homo sapiens
  misc_RNA (1)...(19): siRNA sense strand
ggagggcagcauguuaaua

SEQ ID NO: 1721777 - RNA, 19 nt, Homo sapiens
  misc_RNA (1)...(19): siRNA sense strand
gauagcauaugaaguucgu

SEQ ID NO: 1721778 - RNA, 19 nt, Homo sapiens
  misc_RNA (1)...(19): siRNA sense strand
cagcauaucccugugaaug

SEQ ID NO: 1721779 - RNA, 19 nt, Homo sapiens
  misc_RNA (1)...(19): siRNA sense strand
caggagggcagcauguuaa

SEQ ID NO: 1721780 - RNA, 19 nt, Homo sapiens
  misc_RNA (1)...(19): siRNA sense strand
auacaaggcugcaaguuuu

SEQ ID NO: 1721781 - RNA, 19 nt, Homo sapiens
  misc_RNA (1)...(19): siRNA sense strand
aaucgucaccuguguguuu

SEQ ID NO: 1721782 - RNA, 19 nt, Homo sapiens
  misc_RNA (1)...(19): siRNA sense strand
gaaguaugagggugggauu

SEQ ID NO: 1721783 - RNA, 19 nt, Homo sapiens
  misc_RNA (1)...(19): siRNA sense strand
uauuugacauguaccagaa

SEQ ID NO: 1721784 - RNA, 19 nt, Homo sapiens
  misc_RNA (1)...(19): siRNA sense strand
ccaacaauuuacccgagaa

SEQ ID NO: 1721785 - RNA, 19 nt, Homo sapiens
  misc_RNA (1)...(19): siRNA sense strand
cauaaagcacuacagaaau

SEQ ID NO: 1721786 - RNA, 19 nt, Homo sapiens
  misc_RNA (1)...(19): siRNA sense strand
uugcauucuucaucuguua

SEQ ID NO: 1721787 - RNA, 19 nt, Homo sapiens
  misc_RNA (1)...(19): siRNA sense strand
cuauaaacacuggcaauuu

SEQ ID NO: 1721788 - RNA, 19 nt, Homo sapiens
  misc_RNA (1)...(19): siRNA sense strand
ugccaaaggagaaauauga

SEQ ID NO: 1721789 - RNA, 19 nt, Homo sapiens
  misc_RNA (1)...(19): siRNA sense strand
agcaaugucugcagcauau

SEQ ID NO: 1721790 - RNA, 19 nt, Homo sapiens
  misc_RNA (1)...(19): siRNA sense strand
guaccaaacacuugagcaa

SEQ ID NO: 1721791 - RNA, 19 nt, Homo sapiens
  misc_RNA (1)...(19): siRNA sense strand
uggagaaccugaguaagga

SEQ ID NO: 1721792 - RNA, 19 nt, Homo sapiens
  misc_RNA (1)...(19): siRNA sense strand
cagagcgaauucggacaua

SEQ ID NO: 1721793 - RNA, 19 nt, Homo sapiens
  misc_RNA (1)...(19): siRNA sense strand
agacugaacaagcaauuga

SEQ ID NO: 1721794 - RNA, 19 nt, Homo sapiens
  misc_RNA (1)...(19): siRNA sense strand
ggagacugaacaagcaauu

SEQ ID NO: 1721795 - RNA, 19 nt, Homo sapiens
  misc_RNA (1)...(19): siRNA sense strand
caauuuagacagauacauc

SEQ ID NO: 1721796 - RNA, 19 nt, Homo sapiens
  misc_RNA (1)...(19): siRNA sense strand
uauaauuucacccaggaua

SEQ ID NO: 1721797 - RNA, 19 nt, Homo sapiens
  misc_RNA (1)...(19): siRNA sense strand
gaggugacaucugccaaca

SEQ ID NO: 1721798 - RNA, 19 nt, Homo sapiens
  misc_RNA (1)...(19): siRNA sense strand
accaaacacuugagcaaug

SEQ ID NO: 1721799 - RNA, 19 nt, Homo sapiens
  misc_RNA (1)...(19): siRNA sense strand
gacaagcgucagcaacaaa

SEQ ID NO: 1721800 - RNA, 19 nt, Homo sapiens
  misc_RNA (1)...(19): siRNA sense strand
agacaagcgucagcaacaa

SEQ ID NO: 1721801 - RNA, 19 nt, Homo sapiens
  misc_RNA (1)...(19): siRNA sense strand
cgucagacuuguccacauc

SEQ ID NO: 1721802 - RNA, 19 nt, Homo sapiens
  misc_RNA (1)...(19): siRNA sense strand
gcacuacagaaauauaugg

SEQ ID NO: 1721803 - RNA, 19 nt, Homo sapiens
  misc_RNA (1)...(19): siRNA sense strand
uuagacauccaucucuuaa

SEQ ID NO: 1721804 - RNA, 19 nt, Homo sapiens
  misc_RNA (1)...(19): siRNA sense strand
caacaauuuacccgagaaa

SEQ ID NO: 1721805 - RNA, 19 nt, Homo sapiens
  misc_RNA (1)...(19): siRNA sense strand
aagaaaggcaaaccauuga

SEQ ID NO: 1721806 - RNA, 19 nt, Homo sapiens
  misc_RNA (1)...(19): siRNA sense strand
gaaccugaguaaggaguac

SEQ ID NO: 1721807 - RNA, 19 nt, Homo sapiens
  misc_RNA (1)...(19): siRNA sense strand
gaugaacaccuuaaaucag

SEQ ID NO: 1721808 - RNA, 19 nt, Homo sapiens
  misc_RNA (1)...(19): siRNA sense strand
ugaaguucgugauauuaag

SEQ ID NO: 1721809 - RNA, 19 nt, Homo sapiens
  misc_RNA (1)...(19): siRNA sense strand
acaggaacgaugucgguua

SEQ ID NO: 1721810 - RNA, 19 nt, Homo sapiens
  misc_RNA (1)...(19): siRNA sense strand
gacauguaccagaauuauu

SEQ ID NO: 1721811 - RNA, 19 nt, Homo sapiens
  misc_RNA (1)...(19): siRNA sense strand
ugacauguaccagaauuau

SEQ ID NO: 1721812 - RNA, 19 nt, Homo sapiens
  misc_RNA (1)...(19): siRNA sense strand
gaauugguccaggagauau

SEQ ID NO: 1721813 - RNA, 19 nt, Homo sapiens
  misc_RNA (1)...(19): siRNA sense strand
gcacuggaagaaaggcaaa

SEQ ID NO: 1721814 - RNA, 19 nt, Homo sapiens
  misc_RNA (1)...(19): siRNA sense strand
acagaaggcaugcugaguu

SEQ ID NO: 1721815 - RNA, 19 nt, Homo sapiens
  misc_RNA (1)...(19): siRNA sense strand
gaguaaggaguaccaaaca

SEQ ID NO: 1721816 - RNA, 19 nt, Homo sapiens
  misc_RNA (1)...(19): siRNA sense strand
acauccagcuccauucuca

SEQ ID NO: 1721817 - RNA, 19 nt, Homo sapiens
  misc_RNA (1)...(19): siRNA sense strand
ggcaaaccauugaucaaaa

SEQ ID NO: 1721818 - RNA, 19 nt, Homo sapiens
  misc_RNA (1)...(19): siRNA sense strand
gaagggccuggaucagcua

SEQ ID NO: 1721819 - RNA, 19 nt, Homo sapiens
  misc_RNA (1)...(19): siRNA sense strand
uugcagccauuuaccaaga

SEQ ID NO: 1721820 - RNA, 19 nt, Homo sapiens
  misc_RNA (1)...(19): siRNA sense strand
ccagcagauuauugagaaa

SEQ ID NO: 1721821 - RNA, 19 nt, Homo sapiens
  misc_RNA (1)...(19): siRNA sense strand
gaagaagccauugcugaac

SEQ ID NO: 1721822 - RNA, 19 nt, Homo sapiens
  misc_RNA (1)...(19): siRNA sense strand
ggagggcgcuacaaaguuu

SEQ ID NO: 1721823 - RNA, 19 nt, Homo sapiens
  misc_RNA (1)...(19): siRNA sense strand
ggaaggacauugagcuuga

SEQ ID NO: 1721824 - RNA, 19 nt, Homo sapiens
  misc_RNA (1)...(19): siRNA sense strand
gaugaaagcuggugggaau

SEQ ID NO: 1721825 - RNA, 19 nt, Homo sapiens
  misc_RNA (1)...(19): siRNA sense strand
acauugagcuugagaagau

SEQ ID NO: 1721826 - RNA, 19 nt, Homo sapiens
  misc_RNA (1)...(19): siRNA sense strand
aagacuggcugaaugauga

SEQ ID NO: 1721827 - RNA, 19 nt, Homo sapiens
  misc_RNA (1)...(19): siRNA sense strand
ggacaaggcuuuugaagac

SEQ ID NO: 1721828 - RNA, 19 nt, Homo sapiens
  misc_RNA (1)...(19): siRNA sense strand
ccaaggagggcgcuacaaa

SEQ ID NO: 1721829 - RNA, 19 nt, Homo sapiens
  misc_RNA (1)...(19): siRNA sense strand
gaagacuggcugaaugaug

SEQ ID NO: 1721830 - RNA, 19 nt, Homo sapiens
  misc_RNA (1)...(19): siRNA sense strand
gaacgagaacguccucaag

SEQ ID NO: 1721831 - RNA, 19 nt, Homo sapiens
  misc_RNA (1)...(19): siRNA sense strand
gaccucggcuccuaucaag

SEQ ID NO: 1721832 - RNA, 19 nt, Homo sapiens
  misc_RNA (1)...(19): siRNA sense strand
ggugaaggagggaaagauu

SEQ ID NO: 1721833 - RNA, 19 nt, Homo sapiens
  misc_RNA (1)...(19): siRNA sense strand
aagaugacuuccucaacaa

SEQ ID NO: 1721834 - RNA, 19 nt, Homo sapiens
  misc_RNA (1)...(19): siRNA sense strand
ggacauugagcuugagaag

SEQ ID NO: 1721835 - RNA, 19 nt, Homo sapiens
  misc_RNA (1)...(19): siRNA sense strand
gugaaggagggaaagauuu

SEQ ID NO: 1721836 - RNA, 19 nt, Homo sapiens
  misc_RNA (1)...(19): siRNA sense strand
gccacagccugaacgagaa

SEQ ID NO: 1721837 - RNA, 19 nt, Homo sapiens
  misc_RNA (1)...(19): siRNA sense strand
uggagucucaggaggauua

SEQ ID NO: 1721838 - RNA, 19 nt, Homo sapiens
  misc_RNA (1)...(19): siRNA sense strand
ugggagaccuuuggaagug

SEQ ID NO: 1721839 - RNA, 19 nt, Homo sapiens
  misc_RNA (1)...(19): siRNA sense strand
ggacaaguggaaggacauu

SEQ ID NO: 1721840 - RNA, 19 nt, Homo sapiens
  misc_RNA (1)...(19): siRNA sense strand
uuugaagacuggcugaaug

SEQ ID NO: 1721841 - RNA, 19 nt, Homo sapiens
  misc_RNA (1)...(19): siRNA sense strand
acaaguggaaggacauuga

SEQ ID NO: 1721842 - RNA, 19 nt, Homo sapiens
  misc_RNA (1)...(19): siRNA sense strand
ggccacaguuaucagaaca

SEQ ID NO: 1721843 - RNA, 19 nt, Homo sapiens
  misc_RNA (1)...(19): siRNA sense strand
uuugugcgcucuguuacua

SEQ ID NO: 1721844 - RNA, 19 nt, Homo sapiens
  misc_RNA (1)...(19): siRNA sense strand
gaagugcugagcccaccaa

SEQ ID NO: 1721845 - RNA, 19 nt, Homo sapiens
  misc_RNA (1)...(19): siRNA sense strand
gaaggacauugagcuugag

SEQ ID NO: 1721846 - RNA, 19 nt, Homo sapiens
  misc_RNA (1)...(19): siRNA sense strand
caaggagggcgcuacaaag

SEQ ID NO: 1721847 - RNA, 19 nt, Homo sapiens
  misc_RNA (1)...(19): siRNA sense strand
gugcugagcccaccaagac

SEQ ID NO: 1721848 - RNA, 19 nt, Homo sapiens
  misc_RNA (1)...(19): siRNA sense strand
ggguucaccucagcuuugu

SEQ ID NO: 1721849 - RNA, 19 nt, Homo sapiens
  misc_RNA (1)...(19): siRNA sense strand
caacguuuguuuugagugu

SEQ ID NO: 1721850 - RNA, 19 nt, Homo sapiens
  misc_RNA (1)...(19): siRNA sense strand
cgccaccgccucagaagaa

SEQ ID NO: 1721851 - RNA, 19 nt, Homo sapiens
  misc_RNA (1)...(19): siRNA sense strand
gagggccacaguuaucaga

SEQ ID NO: 1721852 - RNA, 19 nt, Homo sapiens
  misc_RNA (1)...(19): siRNA sense strand
gagcuucugggagaccuuu

SEQ ID NO: 1721853 - RNA, 19 nt, Homo sapiens
  misc_RNA (1)...(19): siRNA sense strand
gaguguggcgcguucaauc

SEQ ID NO: 1721854 - RNA, 19 nt, Homo sapiens
  misc_RNA (1)...(19): siRNA sense strand
gggccacaguuaucagaac

SEQ ID NO: 1721855 - RNA, 19 nt, Homo sapiens
  misc_RNA (1)...(19): siRNA sense strand
gcaggaugagaacaacguu

SEQ ID NO: 1721856 - RNA, 19 nt, Homo sapiens
  misc_RNA (1)...(19): siRNA sense strand
agucaucaccugcccagaa

SEQ ID NO: 1721857 - RNA, 19 nt, Homo sapiens
  misc_RNA (1)...(19): siRNA sense strand
gaaagcuggugggaaugcu

SEQ ID NO: 1721858 - RNA, 19 nt, Homo sapiens
  misc_RNA (1)...(19): siRNA sense strand
gacauugagcuugagaaga

SEQ ID NO: 1721859 - RNA, 19 nt, Homo sapiens
  misc_RNA (1)...(19): siRNA sense strand
augaugaccucggcuccua

SEQ ID NO: 1721860 - RNA, 19 nt, Homo sapiens
  misc_RNA (1)...(19): siRNA sense strand
gccaccgccucagaagaaa

SEQ ID NO: 1721861 - RNA, 19 nt, Homo sapiens
  misc_RNA (1)...(19): siRNA sense strand
ccaguggggucucucaguu

SEQ ID NO: 1721862 - RNA, 19 nt, Homo sapiens
  misc_RNA (1)...(19): siRNA sense strand
gucaucaccugcccagaac

SEQ ID NO: 1721863 - RNA, 19 nt, Homo sapiens
  misc_RNA (1)...(19): siRNA sense strand
ccaccaacaggaacagcaa

SEQ ID NO: 1721864 - RNA, 19 nt, Homo sapiens
  misc_RNA (1)...(19): siRNA sense strand
ggagggcgcuacaaaguuu

SEQ ID NO: 1721865 - RNA, 19 nt, Homo sapiens
  misc_RNA (1)...(19): siRNA sense strand
ggaaggacauugagcuuga

SEQ ID NO: 1721866 - RNA, 19 nt, Homo sapiens
  misc_RNA (1)...(19): siRNA sense strand
gaugaaagcuggugggaau

SEQ ID NO: 1721867 - RNA, 19 nt, Homo sapiens
  misc_RNA (1)...(19): siRNA sense strand
acauugagcuugagaagau

SEQ ID NO: 1721868 - RNA, 19 nt, Homo sapiens
  misc_RNA (1)...(19): siRNA sense strand
aagacuggcugaaugauga

SEQ ID NO: 1721869 - RNA, 19 nt, Homo sapiens
  misc_RNA (1)...(19): siRNA sense strand
ggacaaggcuuuugaagac

SEQ ID NO: 1721870 - RNA, 19 nt, Homo sapiens
  misc_RNA (1)...(19): siRNA sense strand
ccaaggagggcgcuacaaa

SEQ ID NO: 1721871 - RNA, 19 nt, Homo sapiens
  misc_RNA (1)...(19): siRNA sense strand
gaagacuggcugaaugaug

SEQ ID NO: 1721872 - RNA, 19 nt, Homo sapiens
  misc_RNA (1)...(19): siRNA sense strand
gaacgagaacguccucaag

SEQ ID NO: 1721873 - RNA, 19 nt, Homo sapiens
  misc_RNA (1)...(19): siRNA sense strand
gaccucggcuccuaucaag

SEQ ID NO: 1721874 - RNA, 19 nt, Homo sapiens
  misc_RNA (1)...(19): siRNA sense strand
ggugaaggagggaaagauu

SEQ ID NO: 1721875 - RNA, 19 nt, Homo sapiens
  misc_RNA (1)...(19): siRNA sense strand
aagaugacuuccucaacaa

SEQ ID NO: 1721876 - RNA, 19 nt, Homo sapiens
  misc_RNA (1)...(19): siRNA sense strand
ggacauugagcuugagaag

SEQ ID NO: 1721877 - RNA, 19 nt, Homo sapiens
  misc_RNA (1)...(19): siRNA sense strand
gugaaggagggaaagauuu

SEQ ID NO: 1721878 - RNA, 19 nt, Homo sapiens
  misc_RNA (1)...(19): siRNA sense strand
gccacagccugaacgagaa

SEQ ID NO: 1721879 - RNA, 19 nt, Homo sapiens
  misc_RNA (1)...(19): siRNA sense strand
uggagucucaggaggauua

SEQ ID NO: 1721880 - RNA, 19 nt, Homo sapiens
  misc_RNA (1)...(19): siRNA sense strand
ugggagaccuuuggaagug

SEQ ID NO: 1721881 - RNA, 19 nt, Homo sapiens
  misc_RNA (1)...(19): siRNA sense strand
ggacaaguggaaggacauu

SEQ ID NO: 1721882 - RNA, 19 nt, Homo sapiens
  misc_RNA (1)...(19): siRNA sense strand
uuugaagacuggcugaaug

SEQ ID NO: 1721883 - RNA, 19 nt, Homo sapiens
  misc_RNA (1)...(19): siRNA sense strand
acaaguggaaggacauuga

SEQ ID NO: 1721884 - RNA, 19 nt, Homo sapiens
  misc_RNA (1)...(19): siRNA sense strand
ggccacaguuaucagaaca

SEQ ID NO: 1721885 - RNA, 19 nt, Homo sapiens
  misc_RNA (1)...(19): siRNA sense strand
uuugugcgcucuguuacua

SEQ ID NO: 1721886 - RNA, 19 nt, Homo sapiens
  misc_RNA (1)...(19): siRNA sense strand
gaagugcugagcccaccaa

SEQ ID NO: 1721887 - RNA, 19 nt, Homo sapiens
  misc_RNA (1)...(19): siRNA sense strand
gaaggacauugagcuugag

SEQ ID NO: 1721888 - RNA, 19 nt, Homo sapiens
  misc_RNA (1)...(19): siRNA sense strand
caaggagggcgcuacaaag

SEQ ID NO: 1721889 - RNA, 19 nt, Homo sapiens
  misc_RNA (1)...(19): siRNA sense strand
gugcugagcccaccaagac

SEQ ID NO: 1721890 - RNA, 19 nt, Homo sapiens
  misc_RNA (1)...(19): siRNA sense strand
ggguucaccucagcuuugu

SEQ ID NO: 1721891 - RNA, 19 nt, Homo sapiens
  misc_RNA (1)...(19): siRNA sense strand
caacguuuguuuugagugu

SEQ ID NO: 1721892 - RNA, 19 nt, Homo sapiens
  misc_RNA (1)...(19): siRNA sense strand
cgccaccgccucagaagaa

SEQ ID NO: 1721893 - RNA, 19 nt, Homo sapiens
  misc_RNA (1)...(19): siRNA sense strand
gagggccacaguuaucaga

SEQ ID NO: 1721894 - RNA, 19 nt, Homo sapiens
  misc_RNA (1)...(19): siRNA sense strand
gagcuucugggagaccuuu

SEQ ID NO: 1721895 - RNA, 19 nt, Homo sapiens
  misc_RNA (1)...(19): siRNA sense strand
gaguguggcgcguucaauc

SEQ ID NO: 1721896 - RNA, 19 nt, Homo sapiens
  misc_RNA (1)...(19): siRNA sense strand
gggccacaguuaucagaac

SEQ ID NO: 1721897 - RNA, 19 nt, Homo sapiens
  misc_RNA (1)...(19): siRNA sense strand
gcaggaugagaacaacguu

SEQ ID NO: 1721898 - RNA, 19 nt, Homo sapiens
  misc_RNA (1)...(19): siRNA sense strand
agucaucaccugcccagaa

SEQ ID NO: 1721899 - RNA, 19 nt, Homo sapiens
  misc_RNA (1)...(19): siRNA sense strand
gaaagcuggugggaaugcu

SEQ ID NO: 1721900 - RNA, 19 nt, Homo sapiens
  misc_RNA (1)...(19): siRNA sense strand
gacauugagcuugagaaga

SEQ ID NO: 1721901 - RNA, 19 nt, Homo sapiens
  misc_RNA (1)...(19): siRNA sense strand
augaugaccucggcuccua

SEQ ID NO: 1721902 - RNA, 19 nt, Homo sapiens
  misc_RNA (1)...(19): siRNA sense strand
gccaccgccucagaagaaa

SEQ ID NO: 1721903 - RNA, 19 nt, Homo sapiens
  misc_RNA (1)...(19): siRNA sense strand
ccaguggggucucucaguu

SEQ ID NO: 1721904 - RNA, 19 nt, Homo sapiens
  misc_RNA (1)...(19): siRNA sense strand
gucaucaccugcccagaac

SEQ ID NO: 1721905 - RNA, 19 nt, Homo sapiens
  misc_RNA (1)...(19): siRNA sense strand
ccaccaacaggaacagcaa

SEQ ID NO: 1721906 - RNA, 19 nt, Homo sapiens
  misc_RNA (1)...(19): siRNA sense strand
gcaaagacauugauagaaa

SEQ ID NO: 1721907 - RNA, 19 nt, Homo sapiens
  misc_RNA (1)...(19): siRNA sense strand
caacguagcucuggcauua

SEQ ID NO: 1721908 - RNA, 19 nt, Homo sapiens
  misc_RNA (1)...(19): siRNA sense strand
ggaaauacaugauccaaga

SEQ ID NO: 1721909 - RNA, 19 nt, Homo sapiens
  misc_RNA (1)...(19): siRNA sense strand
gagaagaaccagauauuua

SEQ ID NO: 1721910 - RNA, 19 nt, Homo sapiens
  misc_RNA (1)...(19): siRNA sense strand
gagaagaagugaccauauu

SEQ ID NO: 1721911 - RNA, 19 nt, Homo sapiens
  misc_RNA (1)...(19): siRNA sense strand
gaagaacaguggucauauu

SEQ ID NO: 1721912 - RNA, 19 nt, Homo sapiens
  misc_RNA (1)...(19): siRNA sense strand
caaaagaucugcauccuua

SEQ ID NO: 1721913 - RNA, 19 nt, Homo sapiens
  misc_RNA (1)...(19): siRNA sense strand
ucaagaaggugauguugua

SEQ ID NO: 1721914 - RNA, 19 nt, Homo sapiens
  misc_RNA (1)...(19): siRNA sense strand
gaagaaaguucaaauacca

SEQ ID NO: 1721915 - RNA, 19 nt, Homo sapiens
  misc_RNA (1)...(19): siRNA sense strand
ggaagaggaugaagaugaa

SEQ ID NO: 1721916 - RNA, 19 nt, Homo sapiens
  misc_RNA (1)...(19): siRNA sense strand
gcaaccagauguggauuua

SEQ ID NO: 1721917 - RNA, 19 nt, Homo sapiens
  misc_RNA (1)...(19): siRNA sense strand
gaaaacagcugucauacuu

SEQ ID NO: 1721918 - RNA, 19 nt, Homo sapiens
  misc_RNA (1)...(19): siRNA sense strand
gaagccaccugaagauauu

SEQ ID NO: 1721919 - RNA, 19 nt, Homo sapiens
  misc_RNA (1)...(19): siRNA sense strand
ggaagaaguuacaguugaa

SEQ ID NO: 1721920 - RNA, 19 nt, Homo sapiens
  misc_RNA (1)...(19): siRNA sense strand
gaguagagaugaagagaga

SEQ ID NO: 1721921 - RNA, 19 nt, Homo sapiens
  misc_RNA (1)...(19): siRNA sense strand
agaggaaggugaucaaauu

SEQ ID NO: 1721922 - RNA, 19 nt, Homo sapiens
  misc_RNA (1)...(19): siRNA sense strand
ggagagguguuccguguug

SEQ ID NO: 1721923 - RNA, 19 nt, Homo sapiens
  misc_RNA (1)...(19): siRNA sense strand
gaaacugguguuaguauaa

SEQ ID NO: 1721924 - RNA, 19 nt, Homo sapiens
  misc_RNA (1)...(19): siRNA sense strand
gaagaaggauguuuaucgu

SEQ ID NO: 1721925 - RNA, 19 nt, Homo sapiens
  misc_RNA (1)...(19): siRNA sense strand
gaaguagcaucuaaaccuu

SEQ ID NO: 1721926 - RNA, 19 nt, Homo sapiens
  misc_RNA (1)...(19): siRNA sense strand
gagaaaagcuggcaagaga

SEQ ID NO: 1721927 - RNA, 19 nt, Homo sapiens
  misc_RNA (1)...(19): siRNA sense strand
ggauagaagugcaaguaga

SEQ ID NO: 1721928 - RNA, 19 nt, Homo sapiens
  misc_RNA (1)...(19): siRNA sense strand
cagagaagccuaaauauca

SEQ ID NO: 1721929 - RNA, 19 nt, Homo sapiens
  misc_RNA (1)...(19): siRNA sense strand
ggauuuggauuuggaauug

SEQ ID NO: 1721930 - RNA, 19 nt, Homo sapiens
  misc_RNA (1)...(19): siRNA sense strand
caagugaaacugcacauaa

SEQ ID NO: 1721931 - RNA, 19 nt, Homo sapiens
  misc_RNA (1)...(19): siRNA sense strand
ccaagaaggauguaaauga

SEQ ID NO: 1721932 - RNA, 19 nt, Homo sapiens
  misc_RNA (1)...(19): siRNA sense strand
gggcuacgcuauugaaugu

SEQ ID NO: 1721933 - RNA, 19 nt, Homo sapiens
  misc_RNA (1)...(19): siRNA sense strand
gaacuagaugaaacucuua

SEQ ID NO: 1721934 - RNA, 19 nt, Homo sapiens
  misc_RNA (1)...(19): siRNA sense strand
guggauaccuuguacaaug

SEQ ID NO: 1721935 - RNA, 19 nt, Homo sapiens
  misc_RNA (1)...(19): siRNA sense strand
gaucaaauucucaggguaa

SEQ ID NO: 1721936 - RNA, 19 nt, Homo sapiens
  misc_RNA (1)...(19): siRNA sense strand
aaacagcugucauacuuug

SEQ ID NO: 1721937 - RNA, 19 nt, Homo sapiens
  misc_RNA (1)...(19): siRNA sense strand
gaaucucccuauggacuua

SEQ ID NO: 1721938 - RNA, 19 nt, Homo sapiens
  misc_RNA (1)...(19): siRNA sense strand
uaacggaguuucaauggau

SEQ ID NO: 1721939 - RNA, 19 nt, Homo sapiens
  misc_RNA (1)...(19): siRNA sense strand
agaauaagccagcaacuuu

SEQ ID NO: 1721940 - RNA, 19 nt, Homo sapiens
  misc_RNA (1)...(19): siRNA sense strand
ccaccuccaucucagaaua

SEQ ID NO: 1721941 - RNA, 19 nt, Homo sapiens
  misc_RNA (1)...(19): siRNA sense strand
gaagaagaaggauguuuau

SEQ ID NO: 1721942 - RNA, 19 nt, Homo sapiens
  misc_RNA (1)...(19): siRNA sense strand
gaaugucccugaucuuucu

SEQ ID NO: 1721943 - RNA, 19 nt, Homo sapiens
  misc_RNA (1)...(19): siRNA sense strand
cagcauccuuccaccuuua

SEQ ID NO: 1721944 - RNA, 19 nt, Homo sapiens
  misc_RNA (1)...(19): siRNA sense strand
cauagaaacugguguuagu

SEQ ID NO: 1721945 - RNA, 19 nt, Homo sapiens
  misc_RNA (1)...(19): siRNA sense strand
gugcugaguuccauagaaa

SEQ ID NO: 1721946 - RNA, 19 nt, Homo sapiens
  misc_RNA (1)...(19): siRNA sense strand
guaggagauucuuucuaua

SEQ ID NO: 1721947 - RNA, 19 nt, Homo sapiens
  misc_RNA (1)...(19): siRNA sense strand
uguaggagauucuuucuau

SEQ ID NO: 1721948 - RNA, 19 nt, Homo sapiens
  misc_RNA (1)...(19): siRNA sense strand
uggaaaugauguuggaaua

SEQ ID NO: 1721949 - RNA, 19 nt, Homo sapiens
  misc_RNA (1)...(19): siRNA sense strand
gaaaggaggaccagcugaa

SEQ ID NO: 1721950 - RNA, 19 nt, Homo sapiens
  misc_RNA (1)...(19): siRNA sense strand
gaacgcaaguuugaaaguc

SEQ ID NO: 1721951 - RNA, 19 nt, Homo sapiens
  misc_RNA (1)...(19): siRNA sense strand
gaggguacuuuccacguuu

SEQ ID NO: 1721952 - RNA, 19 nt, Homo sapiens
  misc_RNA (1)...(19): siRNA sense strand
ggccuacacugaucaagaa

SEQ ID NO: 1721953 - RNA, 19 nt, Homo sapiens
  misc_RNA (1)...(19): siRNA sense strand
cgagcgaucucauaaacuu

SEQ ID NO: 1721954 - RNA, 19 nt, Homo sapiens
  misc_RNA (1)...(19): siRNA sense strand
aaaggaaucucccuaugga

SEQ ID NO: 1721955 - RNA, 19 nt, Homo sapiens
  misc_RNA (1)...(19): siRNA sense strand
gaaggaagaagaaaguuca

SEQ ID NO: 1721956 - RNA, 19 nt, Homo sapiens
  misc_RNA (1)...(19): siRNA sense strand
guaauucagugucauugga

SEQ ID NO: 1721957 - RNA, 19 nt, Homo sapiens
  misc_RNA (1)...(19): siRNA sense strand
gagguuauguccagaaucu

SEQ ID NO: 1721958 - RNA, 19 nt, Homo sapiens
  misc_RNA (1)...(19): siRNA sense strand
agaagaagaaggauguuua

SEQ ID NO: 1721959 - RNA, 19 nt, Homo sapiens
  misc_RNA (1)...(19): siRNA sense strand
gaugguguccuaccuaauu

SEQ ID NO: 1721960 - RNA, 19 nt, Homo sapiens
  misc_RNA (1)...(19): siRNA sense strand
gcacagcaauggaggaaac

SEQ ID NO: 1721961 - RNA, 19 nt, Homo sapiens
  misc_RNA (1)...(19): siRNA sense strand
agaaaggucuaaaggcaaa

SEQ ID NO: 1721962 - RNA, 19 nt, Homo sapiens
  misc_RNA (1)...(19): siRNA sense strand
agaaggugauguuguauug

SEQ ID NO: 1721963 - RNA, 19 nt, Homo sapiens
  misc_RNA (1)...(19): siRNA sense strand
cagcgcgucucuccacaua

SEQ ID NO: 1721964 - RNA, 19 nt, Homo sapiens
  misc_RNA (1)...(19): siRNA sense strand
ggaugaagaugaagauggu

SEQ ID NO: 1721965 - RNA, 19 nt, Homo sapiens
  misc_RNA (1)...(19): siRNA sense strand
caauagugauuucagaugu

SEQ ID NO: 1721966 - RNA, 19 nt, Homo sapiens
  misc_RNA (1)...(19): siRNA sense strand
agaaacugguguuaguaua

SEQ ID NO: 1721967 - RNA, 19 nt, Homo sapiens
  misc_RNA (1)...(19): siRNA sense strand
gcagagaagccuaaauauc

SEQ ID NO: 1721968 - RNA, 19 nt, Homo sapiens
  misc_RNA (1)...(19): siRNA sense strand
caaggaaggcuuagaggaa

SEQ ID NO: 1721969 - RNA, 19 nt, Homo sapiens
  misc_RNA (1)...(19): siRNA sense strand
caagauaguuuggcagcaa

SEQ ID NO: 1721970 - RNA, 19 nt, Homo sapiens
  misc_RNA (1)...(19): siRNA sense strand
gcaagccauauauuuguua

SEQ ID NO: 1721971 - RNA, 19 nt, Homo sapiens
  misc_RNA (1)...(19): siRNA sense strand
ggaagaagaaaguucaaau

SEQ ID NO: 1721972 - RNA, 19 nt, Homo sapiens
  misc_RNA (1)...(19): siRNA sense strand
uggaagaaguuacaguuga

SEQ ID NO: 1721973 - RNA, 19 nt, Homo sapiens
  misc_RNA (1)...(19): siRNA sense strand
gagcugcgcuuaccacacu

SEQ ID NO: 1721974 - RNA, 19 nt, Homo sapiens
  misc_RNA (1)...(19): siRNA sense strand
cuacacugaucaagaacua

SEQ ID NO: 1721975 - RNA, 19 nt, Homo sapiens
  misc_RNA (1)...(19): siRNA sense strand
aaacaaacaccuucucuuc

SEQ ID NO: 1721976 - RNA, 19 nt, Homo sapiens
  misc_RNA (1)...(19): siRNA sense strand
gaaguuacaguugaaagaa

SEQ ID NO: 1721977 - RNA, 19 nt, Homo sapiens
  misc_RNA (1)...(19): siRNA sense strand
gaguuucaauggauaaugu

SEQ ID NO: 1721978 - RNA, 19 nt, Homo sapiens
  misc_RNA (1)...(19): siRNA sense strand
caagaaggauguaaaugac

SEQ ID NO: 1721979 - RNA, 19 nt, Homo sapiens
  misc_RNA (1)...(19): siRNA sense strand
gauaaaugguacugugaca

SEQ ID NO: 1721980 - RNA, 19 nt, Homo sapiens
  misc_RNA (1)...(19): siRNA sense strand
agaggaagauccagcaaug

SEQ ID NO: 1721981 - RNA, 19 nt, Homo sapiens
  misc_RNA (1)...(19): siRNA sense strand
gcagaaccauguuuugaaa

SEQ ID NO: 1721982 - RNA, 19 nt, Homo sapiens
  misc_RNA (1)...(19): siRNA sense strand
gcaagagaagaaccagaua

SEQ ID NO: 1721983 - RNA, 19 nt, Homo sapiens
  misc_RNA (1)...(19): siRNA sense strand
caaaguuuccagcuuauga

SEQ ID NO: 1721984 - RNA, 19 nt, Homo sapiens
  misc_RNA (1)...(19): siRNA sense strand
gaggcaucaucccuaauaa

SEQ ID NO: 1721985 - RNA, 19 nt, Homo sapiens
  misc_RNA (1)...(19): siRNA sense strand
cgaggcaucaucccuaaua

SEQ ID NO: 1721986 - RNA, 19 nt, Homo sapiens
  misc_RNA (1)...(19): siRNA sense strand
ggaaacgucaauagugauu

SEQ ID NO: 1721987 - RNA, 19 nt, Homo sapiens
  misc_RNA (1)...(19): siRNA sense strand
gaaacaaacaccuucucuu

SEQ ID NO: 1721988 - RNA, 19 nt, Homo sapiens
  misc_RNA (1)...(19): siRNA sense strand
caaagacauugauagaaag

SEQ ID NO: 1721989 - RNA, 19 nt, Homo sapiens
  misc_RNA (1)...(19): siRNA sense strand
agaauauggucuucgauug

SEQ ID NO: 1721990 - RNA, 19 nt, Homo sapiens
  misc_RNA (1)...(19): siRNA sense strand
aaacacugcugaguccuuu

SEQ ID NO: 1721991 - RNA, 19 nt, Homo sapiens
  misc_RNA (1)...(19): siRNA sense strand
aagaacaguggucauauua

SEQ ID NO: 1721992 - RNA, 19 nt, Homo sapiens
  misc_RNA (1)...(19): siRNA sense strand
agccuaaucugaccuauga

SEQ ID NO: 1721993 - RNA, 19 nt, Homo sapiens
  misc_RNA (1)...(19): siRNA sense strand
aaacauauccuccuuacuc

SEQ ID NO: 1721994 - RNA, 19 nt, Homo sapiens
  misc_RNA (1)...(19): siRNA sense strand
gaaggacagcuacaggaaa

SEQ ID NO: 1721995 - RNA, 19 nt, Homo sapiens
  misc_RNA (1)...(19): siRNA sense strand
ggaggaaacagcuauaugg

SEQ ID NO: 1721996 - RNA, 19 nt, Homo sapiens
  misc_RNA (1)...(19): siRNA sense strand
gaaaaggaaucucccuaug

SEQ ID NO: 1721997 - RNA, 19 nt, Homo sapiens
  misc_RNA (1)...(19): siRNA sense strand
gaacccauuuugaauauga

SEQ ID NO: 1721998 - RNA, 19 nt, Homo sapiens
  misc_RNA (1)...(19): siRNA sense strand
agcaagagauggcaauauu

SEQ ID NO: 1721999 - RNA, 19 nt, Homo sapiens
  misc_RNA (1)...(19): siRNA sense strand
gaaggagugagaagauuug

SEQ ID NO: 1722000 - RNA, 19 nt, Homo sapiens
  misc_RNA (1)...(19): siRNA sense strand
ggacuccucuggaaugcau

SEQ ID NO: 1722001 - RNA, 19 nt, Homo sapiens
  misc_RNA (1)...(19): siRNA sense strand
gaugaaacucuuaaugaug

SEQ ID NO: 1722002 - RNA, 19 nt, Homo sapiens
  misc_RNA (1)...(19): siRNA sense strand
gaucaagaacuagaugaaa

SEQ ID NO: 1722003 - RNA, 19 nt, Homo sapiens
  misc_RNA (1)...(19): siRNA sense strand
gguagugaauacucaaugu

SEQ ID NO: 1722004 - RNA, 19 nt, Homo sapiens
  misc_RNA (1)...(19): siRNA sense strand
gacgagauaauccucauuu

SEQ ID NO: 1722005 - RNA, 19 nt, Homo sapiens
  misc_RNA (1)...(19): siRNA sense strand
gaguugagcaggaaaucua

SEQ ID NO: 1722006 - RNA, 19 nt, Homo sapiens
  misc_RNA (1)...(19): siRNA sense strand
gcaaagacauugauagaaa

SEQ ID NO: 1722007 - RNA, 19 nt, Homo sapiens
  misc_RNA (1)...(19): siRNA sense strand
caacguagcucuggcauua

SEQ ID NO: 1722008 - RNA, 19 nt, Homo sapiens
  misc_RNA (1)...(19): siRNA sense strand
ggaaauacaugauccaaga

SEQ ID NO: 1722009 - RNA, 19 nt, Homo sapiens
  misc_RNA (1)...(19): siRNA sense strand
gagaagaaccagauauuua

SEQ ID NO: 1722010 - RNA, 19 nt, Homo sapiens
  misc_RNA (1)...(19): siRNA sense strand
gagaagaagugaccauauu

SEQ ID NO: 1722011 - RNA, 19 nt, Homo sapiens
  misc_RNA (1)...(19): siRNA sense strand
gaagaacaguggucauauu

SEQ ID NO: 1722012 - RNA, 19 nt, Homo sapiens
  misc_RNA (1)...(19): siRNA sense strand
caaaagaucugcauccuua

SEQ ID NO: 1722013 - RNA, 19 nt, Homo sapiens
  misc_RNA (1)...(19): siRNA sense strand
ucaagaaggugauguugua

SEQ ID NO: 1722014 - RNA, 19 nt, Homo sapiens
  misc_RNA (1)...(19): siRNA sense strand
gaagaaaguucaaauacca

SEQ ID NO: 1722015 - RNA, 19 nt, Homo sapiens
  misc_RNA (1)...(19): siRNA sense strand
ggaagaggaugaagaugaa

SEQ ID NO: 1722016 - RNA, 19 nt, Homo sapiens
  misc_RNA (1)...(19): siRNA sense strand
gcaaccagauguggauuua

SEQ ID NO: 1722017 - RNA, 19 nt, Homo sapiens
  misc_RNA (1)...(19): siRNA sense strand
gaaaacagcugucauacuu

SEQ ID NO: 1722018 - RNA, 19 nt, Homo sapiens
  misc_RNA (1)...(19): siRNA sense strand
gaagccaccugaagauauu

SEQ ID NO: 1722019 - RNA, 19 nt, Homo sapiens
  misc_RNA (1)...(19): siRNA sense strand
ggaagaaguuacaguugaa

SEQ ID NO: 1722020 - RNA, 19 nt, Homo sapiens
  misc_RNA (1)...(19): siRNA sense strand
gaguagagaugaagagaga

SEQ ID NO: 1722021 - RNA, 19 nt, Homo sapiens
  misc_RNA (1)...(19): siRNA sense strand
agaggaaggugaucaaauu

SEQ ID NO: 1722022 - RNA, 19 nt, Homo sapiens
  misc_RNA (1)...(19): siRNA sense strand
ggagagguguuccguguug

SEQ ID NO: 1722023 - RNA, 19 nt, Homo sapiens
  misc_RNA (1)...(19): siRNA sense strand
gaaacugguguuaguauaa

SEQ ID NO: 1722024 - RNA, 19 nt, Homo sapiens
  misc_RNA (1)...(19): siRNA sense strand
gaagaaggauguuuaucgu

SEQ ID NO: 1722025 - RNA, 19 nt, Homo sapiens
  misc_RNA (1)...(19): siRNA sense strand
gaaguagcaucuaaaccuu

SEQ ID NO: 1722026 - RNA, 19 nt, Homo sapiens
  misc_RNA (1)...(19): siRNA sense strand
gagaaaagcuggcaagaga

SEQ ID NO: 1722027 - RNA, 19 nt, Homo sapiens
  misc_RNA (1)...(19): siRNA sense strand
ggauagaagugcaaguaga

SEQ ID NO: 1722028 - RNA, 19 nt, Homo sapiens
  misc_RNA (1)...(19): siRNA sense strand
cagagaagccuaaauauca

SEQ ID NO: 1722029 - RNA, 19 nt, Homo sapiens
  misc_RNA (1)...(19): siRNA sense strand
ggauuuggauuuggaauug

SEQ ID NO: 1722030 - RNA, 19 nt, Homo sapiens
  misc_RNA (1)...(19): siRNA sense strand
caagugaaacugcacauaa

SEQ ID NO: 1722031 - RNA, 19 nt, Homo sapiens
  misc_RNA (1)...(19): siRNA sense strand
ccaagaaggauguaaauga

SEQ ID NO: 1722032 - RNA, 19 nt, Homo sapiens
  misc_RNA (1)...(19): siRNA sense strand
gggcuacgcuauugaaugu

SEQ ID NO: 1722033 - RNA, 19 nt, Homo sapiens
  misc_RNA (1)...(19): siRNA sense strand
gaacuagaugaaacucuua

SEQ ID NO: 1722034 - RNA, 19 nt, Homo sapiens
  misc_RNA (1)...(19): siRNA sense strand
guggauaccuuguacaaug

SEQ ID NO: 1722035 - RNA, 19 nt, Homo sapiens
  misc_RNA (1)...(19): siRNA sense strand
gaucaaauucucaggguaa

SEQ ID NO: 1722036 - RNA, 19 nt, Homo sapiens
  misc_RNA (1)...(19): siRNA sense strand
aaacagcugucauacuuug

SEQ ID NO: 1722037 - RNA, 19 nt, Homo sapiens
  misc_RNA (1)...(19): siRNA sense strand
gaaucucccuauggacuua

SEQ ID NO: 1722038 - RNA, 19 nt, Homo sapiens
  misc_RNA (1)...(19): siRNA sense strand
uaacggaguuucaauggau

SEQ ID NO: 1722039 - RNA, 19 nt, Homo sapiens
  misc_RNA (1)...(19): siRNA sense strand
agaauaagccagcaacuuu

SEQ ID NO: 1722040 - RNA, 19 nt, Homo sapiens
  misc_RNA (1)...(19): siRNA sense strand
ccaccuccaucucagaaua

SEQ ID NO: 1722041 - RNA, 19 nt, Homo sapiens
  misc_RNA (1)...(19): siRNA sense strand
gaagaagaaggauguuuau

SEQ ID NO: 1722042 - RNA, 19 nt, Homo sapiens
  misc_RNA (1)...(19): siRNA sense strand
gaaugucccugaucuuucu

SEQ ID NO: 1722043 - RNA, 19 nt, Homo sapiens
  misc_RNA (1)...(19): siRNA sense strand
cagcauccuuccaccuuua

SEQ ID NO: 1722044 - RNA, 19 nt, Homo sapiens
  misc_RNA (1)...(19): siRNA sense strand
cauagaaacugguguuagu

SEQ ID NO: 1722045 - RNA, 19 nt, Homo sapiens
  misc_RNA (1)...(19): siRNA sense strand
gugcugaguuccauagaaa

SEQ ID NO: 1722046 - RNA, 19 nt, Homo sapiens
  misc_RNA (1)...(19): siRNA sense strand
guaggagauucuuucuaua

SEQ ID NO: 1722047 - RNA, 19 nt, Homo sapiens
  misc_RNA (1)...(19): siRNA sense strand
uguaggagauucuuucuau

SEQ ID NO: 1722048 - RNA, 19 nt, Homo sapiens
  misc_RNA (1)...(19): siRNA sense strand
uggaaaugauguuggaaua

SEQ ID NO: 1722049 - RNA, 19 nt, Homo sapiens
  misc_RNA (1)...(19): siRNA sense strand
gaaaggaggaccagcugaa

SEQ ID NO: 1722050 - RNA, 19 nt, Homo sapiens
  misc_RNA (1)...(19): siRNA sense strand
gaacgcaaguuugaaaguc

SEQ ID NO: 1722051 - RNA, 19 nt, Homo sapiens
  misc_RNA (1)...(19): siRNA sense strand
gaggguacuuuccacguuu

SEQ ID NO: 1722052 - RNA, 19 nt, Homo sapiens
  misc_RNA (1)...(19): siRNA sense strand
ggccuacacugaucaagaa

SEQ ID NO: 1722053 - RNA, 19 nt, Homo sapiens
  misc_RNA (1)...(19): siRNA sense strand
cgagcgaucucauaaacuu

SEQ ID NO: 1722054 - RNA, 19 nt, Homo sapiens
  misc_RNA (1)...(19): siRNA sense strand
aaaggaaucucccuaugga

SEQ ID NO: 1722055 - RNA, 19 nt, Homo sapiens
  misc_RNA (1)...(19): siRNA sense strand
gaaggaagaagaaaguuca

SEQ ID NO: 1722056 - RNA, 19 nt, Homo sapiens
  misc_RNA (1)...(19): siRNA sense strand
guaauucagugucauugga

SEQ ID NO: 1722057 - RNA, 19 nt, Homo sapiens
  misc_RNA (1)...(19): siRNA sense strand
gagguuauguccagaaucu

SEQ ID NO: 1722058 - RNA, 19 nt, Homo sapiens
  misc_RNA (1)...(19): siRNA sense strand
agaagaagaaggauguuua

SEQ ID NO: 1722059 - RNA, 19 nt, Homo sapiens
  misc_RNA (1)...(19): siRNA sense strand
gaugguguccuaccuaauu

SEQ ID NO: 1722060 - RNA, 19 nt, Homo sapiens
  misc_RNA (1)...(19): siRNA sense strand
gcacagcaauggaggaaac

SEQ ID NO: 1722061 - RNA, 19 nt, Homo sapiens
  misc_RNA (1)...(19): siRNA sense strand
agaaaggucuaaaggcaaa

SEQ ID NO: 1722062 - RNA, 19 nt, Homo sapiens
  misc_RNA (1)...(19): siRNA sense strand
agaaggugauguuguauug

SEQ ID NO: 1722063 - RNA, 19 nt, Homo sapiens
  misc_RNA (1)...(19): siRNA sense strand
cagcgcgucucuccacaua

SEQ ID NO: 1722064 - RNA, 19 nt, Homo sapiens
  misc_RNA (1)...(19): siRNA sense strand
ggaugaagaugaagauggu

SEQ ID NO: 1722065 - RNA, 19 nt, Homo sapiens
  misc_RNA (1)...(19): siRNA sense strand
caauagugauuucagaugu

SEQ ID NO: 1722066 - RNA, 19 nt, Homo sapiens
  misc_RNA (1)...(19): siRNA sense strand
agaaacugguguuaguaua

SEQ ID NO: 1722067 - RNA, 19 nt, Homo sapiens
  misc_RNA (1)...(19): siRNA sense strand
gcagagaagccuaaauauc

SEQ ID NO: 1722068 - RNA, 19 nt, Homo sapiens
  misc_RNA (1)...(19): siRNA sense strand
caaggaaggcuuagaggaa

SEQ ID NO: 1722069 - RNA, 19 nt, Homo sapiens
  misc_RNA (1)...(19): siRNA sense strand
caagauaguuuggcagcaa

SEQ ID NO: 1722070 - RNA, 19 nt, Homo sapiens
  misc_RNA (1)...(19): siRNA sense strand
gcaagccauauauuuguua

SEQ ID NO: 1722071 - RNA, 19 nt, Homo sapiens
  misc_RNA (1)...(19): siRNA sense strand
ggaagaagaaaguucaaau

SEQ ID NO: 1722072 - RNA, 19 nt, Homo sapiens
  misc_RNA (1)...(19): siRNA sense strand
uggaagaaguuacaguuga

SEQ ID NO: 1722073 - RNA, 19 nt, Homo sapiens
  misc_RNA (1)...(19): siRNA sense strand
gagcugcgcuuaccacacu

SEQ ID NO: 1722074 - RNA, 19 nt, Homo sapiens
  misc_RNA (1)...(19): siRNA sense strand
cuacacugaucaagaacua

SEQ ID NO: 1722075 - RNA, 19 nt, Homo sapiens
  misc_RNA (1)...(19): siRNA sense strand
aaacaaacaccuucucuuc

SEQ ID NO: 1722076 - RNA, 19 nt, Homo sapiens
  misc_RNA (1)...(19): siRNA sense strand
gaaguuacaguugaaagaa

SEQ ID NO: 1722077 - RNA, 19 nt, Homo sapiens
  misc_RNA (1)...(19): siRNA sense strand
gaguuucaauggauaaugu

SEQ ID NO: 1722078 - RNA, 19 nt, Homo sapiens
  misc_RNA (1)...(19): siRNA sense strand
caagaaggauguaaaugac

SEQ ID NO: 1722079 - RNA, 19 nt, Homo sapiens
  misc_RNA (1)...(19): siRNA sense strand
gauaaaugguacugugaca

SEQ ID NO: 1722080 - RNA, 19 nt, Homo sapiens
  misc_RNA (1)...(19): siRNA sense strand
agaggaagauccagcaaug

SEQ ID NO: 1722081 - RNA, 19 nt, Homo sapiens
  misc_RNA (1)...(19): siRNA sense strand
gcagaaccauguuuugaaa

SEQ ID NO: 1722082 - RNA, 19 nt, Homo sapiens
  misc_RNA (1)...(19): siRNA sense strand
gcaagagaagaaccagaua

SEQ ID NO: 1722083 - RNA, 19 nt, Homo sapiens
  misc_RNA (1)...(19): siRNA sense strand
caaaguuuccagcuuauga

SEQ ID NO: 1722084 - RNA, 19 nt, Homo sapiens
  misc_RNA (1)...(19): siRNA sense strand
gaggcaucaucccuaauaa

SEQ ID NO: 1722085 - RNA, 19 nt, Homo sapiens
  misc_RNA (1)...(19): siRNA sense strand
cgaggcaucaucccuaaua

SEQ ID NO: 1722086 - RNA, 19 nt, Homo sapiens
  misc_RNA (1)...(19): siRNA sense strand
ggaaacgucaauagugauu

SEQ ID NO: 1722087 - RNA, 19 nt, Homo sapiens
  misc_RNA (1)...(19): siRNA sense strand
gaaacaaacaccuucucuu

SEQ ID NO: 1722088 - RNA, 19 nt, Homo sapiens
  misc_RNA (1)...(19): siRNA sense strand
caaagacauugauagaaag

SEQ ID NO: 1722089 - RNA, 19 nt, Homo sapiens
  misc_RNA (1)...(19): siRNA sense strand
agaauauggucuucgauug

SEQ ID NO: 1722090 - RNA, 19 nt, Homo sapiens
  misc_RNA (1)...(19): siRNA sense strand
aaacacugcugaguccuuu

SEQ ID NO: 1722091 - RNA, 19 nt, Homo sapiens
  misc_RNA (1)...(19): siRNA sense strand
aagaacaguggucauauua

SEQ ID NO: 1722092 - RNA, 19 nt, Homo sapiens
  misc_RNA (1)...(19): siRNA sense strand
agccuaaucugaccuauga

SEQ ID NO: 1722093 - RNA, 19 nt, Homo sapiens
  misc_RNA (1)...(19): siRNA sense strand
aaacauauccuccuuacuc

SEQ ID NO: 1722094 - RNA, 19 nt, Homo sapiens
  misc_RNA (1)...(19): siRNA sense strand
gaaggacagcuacaggaaa

SEQ ID NO: 1722095 - RNA, 19 nt, Homo sapiens
  misc_RNA (1)...(19): siRNA sense strand
ggaggaaacagcuauaugg

SEQ ID NO: 1722096 - RNA, 19 nt, Homo sapiens
  misc_RNA (1)...(19): siRNA sense strand
gaaaaggaaucucccuaug

SEQ ID NO: 1722097 - RNA, 19 nt, Homo sapiens
  misc_RNA (1)...(19): siRNA sense strand
gaacccauuuugaauauga

SEQ ID NO: 1722098 - RNA, 19 nt, Homo sapiens
  misc_RNA (1)...(19): siRNA sense strand
agcaagagauggcaauauu

SEQ ID NO: 1722099 - RNA, 19 nt, Homo sapiens
  misc_RNA (1)...(19): siRNA sense strand
gaaggagugagaagauuug

SEQ ID NO: 1722100 - RNA, 19 nt, Homo sapiens
  misc_RNA (1)...(19): siRNA sense strand
ggacuccucuggaaugcau

SEQ ID NO: 1722101 - RNA, 19 nt, Homo sapiens
  misc_RNA (1)...(19): siRNA sense strand
gaugaaacucuuaaugaug

SEQ ID NO: 1722102 - RNA, 19 nt, Homo sapiens
  misc_RNA (1)...(19): siRNA sense strand
gaucaagaacuagaugaaa

SEQ ID NO: 1722103 - RNA, 19 nt, Homo sapiens
  misc_RNA (1)...(19): siRNA sense strand
gguagugaauacucaaugu

SEQ ID NO: 1722104 - RNA, 19 nt, Homo sapiens
  misc_RNA (1)...(19): siRNA sense strand
gacgagauaauccucauuu

SEQ ID NO: 1722105 - RNA, 19 nt, Homo sapiens
  misc_RNA (1)...(19): siRNA sense strand
gaguugagcaggaaaucua

SEQ ID NO: 1722106 - RNA, 19 nt, Homo sapiens
  misc_RNA (1)...(19): siRNA sense strand
ggugaaagcuucucaauau

SEQ ID NO: 1722107 - RNA, 19 nt, Homo sapiens
  misc_RNA (1)...(19): siRNA sense strand
gcacagaucuuggauuaaa

SEQ ID NO: 1722108 - RNA, 19 nt, Homo sapiens
  misc_RNA (1)...(19): siRNA sense strand
ccaaugaucuggaaauaaa

SEQ ID NO: 1722109 - RNA, 19 nt, Homo sapiens
  misc_RNA (1)...(19): siRNA sense strand
cagcagcucuuacuaauaa

SEQ ID NO: 1722110 - RNA, 19 nt, Homo sapiens
  misc_RNA (1)...(19): siRNA sense strand
gaaagcuucucaauaugua

SEQ ID NO: 1722111 - RNA, 19 nt, Homo sapiens
  misc_RNA (1)...(19): siRNA sense strand
ggaaguaaaugaguuggua

SEQ ID NO: 1722112 - RNA, 19 nt, Homo sapiens
  misc_RNA (1)...(19): siRNA sense strand
gaaggccgcugaauucuau

SEQ ID NO: 1722113 - RNA, 19 nt, Homo sapiens
  misc_RNA (1)...(19): siRNA sense strand
ccgaagcacuuaacacuua

SEQ ID NO: 1722114 - RNA, 19 nt, Homo sapiens
  misc_RNA (1)...(19): siRNA sense strand
uaaaugaguugguagaaga

SEQ ID NO: 1722115 - RNA, 19 nt, Homo sapiens
  misc_RNA (1)...(19): siRNA sense strand
gaaaguagcaguaacaaag

SEQ ID NO: 1722116 - RNA, 19 nt, Homo sapiens
  misc_RNA (1)...(19): siRNA sense strand
ccaaagccauuaaauucua

SEQ ID NO: 1722117 - RNA, 19 nt, Homo sapiens
  misc_RNA (1)...(19): siRNA sense strand
uaaccaagcuguagagauc

SEQ ID NO: 1722118 - RNA, 19 nt, Homo sapiens
  misc_RNA (1)...(19): siRNA sense strand
cagcagcuaugcagauaua

SEQ ID NO: 1722119 - RNA, 19 nt, Homo sapiens
  misc_RNA (1)...(19): siRNA sense strand
caauaguuguggagacuua

SEQ ID NO: 1722120 - RNA, 19 nt, Homo sapiens
  misc_RNA (1)...(19): siRNA sense strand
cugcacagaucuuggauua

SEQ ID NO: 1722121 - RNA, 19 nt, Homo sapiens
  misc_RNA (1)...(19): siRNA sense strand
ggacaaaugaaccuuauga

SEQ ID NO: 1722122 - RNA, 19 nt, Homo sapiens
  misc_RNA (1)...(19): siRNA sense strand
guacugaagcacuuuauaa

SEQ ID NO: 1722123 - RNA, 19 nt, Homo sapiens
  misc_RNA (1)...(19): siRNA sense strand
ggaaauaaacaaagcaguu

SEQ ID NO: 1722124 - RNA, 19 nt, Homo sapiens
  misc_RNA (1)...(19): siRNA sense strand
gaugguagcuaguuguuuc

SEQ ID NO: 1722125 - RNA, 19 nt, Homo sapiens
  misc_RNA (1)...(19): siRNA sense strand
cuuaguaacugaagcuaua

SEQ ID NO: 1722126 - RNA, 19 nt, Homo sapiens
  misc_RNA (1)...(19): siRNA sense strand
gaaacuaaaucggcuagau

SEQ ID NO: 1722127 - RNA, 19 nt, Homo sapiens
  misc_RNA (1)...(19): siRNA sense strand
caaagcaguuacauacuug

SEQ ID NO: 1722128 - RNA, 19 nt, Homo sapiens
  misc_RNA (1)...(19): siRNA sense strand
gcaggaauauugaaaauga

SEQ ID NO: 1722129 - RNA, 19 nt, Homo sapiens
  misc_RNA (1)...(19): siRNA sense strand
cagaagaccuccaauaacu

SEQ ID NO: 1722130 - RNA, 19 nt, Homo sapiens
  misc_RNA (1)...(19): siRNA sense strand
caaaugaaccuuaugaaag

SEQ ID NO: 1722131 - RNA, 19 nt, Homo sapiens
  misc_RNA (1)...(19): siRNA sense strand
uuacaaagauacucacaga

SEQ ID NO: 1722132 - RNA, 19 nt, Homo sapiens
  misc_RNA (1)...(19): siRNA sense strand
ucucagcccuguauuauau

SEQ ID NO: 1722133 - RNA, 19 nt, Homo sapiens
  misc_RNA (1)...(19): siRNA sense strand
ggcagaagaccuccaauaa

SEQ ID NO: 1722134 - RNA, 19 nt, Homo sapiens
  misc_RNA (1)...(19): siRNA sense strand
gcaauuagagaaggaagua

SEQ ID NO: 1722135 - RNA, 19 nt, Homo sapiens
  misc_RNA (1)...(19): siRNA sense strand
gaaggcaggcuacaaccua

SEQ ID NO: 1722136 - RNA, 19 nt, Homo sapiens
  misc_RNA (1)...(19): siRNA sense strand
ugacuacaauccaaucuau

SEQ ID NO: 1722137 - RNA, 19 nt, Homo sapiens
  misc_RNA (1)...(19): siRNA sense strand
caagacaucucuggcauca

SEQ ID NO: 1722138 - RNA, 19 nt, Homo sapiens
  misc_RNA (1)...(19): siRNA sense strand
uaucuaagcuaggagaauu

SEQ ID NO: 1722139 - RNA, 19 nt, Homo sapiens
  misc_RNA (1)...(19): siRNA sense strand
gaaaugauucuucuuguac

SEQ ID NO: 1722140 - RNA, 19 nt, Homo sapiens
  misc_RNA (1)...(19): siRNA sense strand
aaacaaagcaguuacauac

SEQ ID NO: 1722141 - RNA, 19 nt, Homo sapiens
  misc_RNA (1)...(19): siRNA sense strand
gcacuuaacacuuaucaag

SEQ ID NO: 1722142 - RNA, 19 nt, Homo sapiens
  misc_RNA (1)...(19): siRNA sense strand
gccagucaguauucaguua

SEQ ID NO: 1722143 - RNA, 19 nt, Homo sapiens
  misc_RNA (1)...(19): siRNA sense strand
acucauugcuccuguaauu

SEQ ID NO: 1722144 - RNA, 19 nt, Homo sapiens
  misc_RNA (1)...(19): siRNA sense strand
guagcuaguuguuucagaa

SEQ ID NO: 1722145 - RNA, 19 nt, Homo sapiens
  misc_RNA (1)...(19): siRNA sense strand
acaaagcaguuacauacuu

SEQ ID NO: 1722146 - RNA, 19 nt, Homo sapiens
  misc_RNA (1)...(19): siRNA sense strand
cgaaguucuuuaccagaua

SEQ ID NO: 1722147 - RNA, 19 nt, Homo sapiens
  misc_RNA (1)...(19): siRNA sense strand
acaaagauacucacagaaa

SEQ ID NO: 1722148 - RNA, 19 nt, Homo sapiens
  misc_RNA (1)...(19): siRNA sense strand
guagagaucuuaaaagugu

SEQ ID NO: 1722149 - RNA, 19 nt, Homo sapiens
  misc_RNA (1)...(19): siRNA sense strand
ccacuuggcccucaaauag

SEQ ID NO: 1722150 - RNA, 19 nt, Homo sapiens
  misc_RNA (1)...(19): siRNA sense strand
cagaagaagugguaacuac

SEQ ID NO: 1722151 - RNA, 19 nt, Homo sapiens
  misc_RNA (1)...(19): siRNA sense strand
gaaggaaguaaaugaguug

SEQ ID NO: 1722152 - RNA, 19 nt, Homo sapiens
  misc_RNA (1)...(19): siRNA sense strand
ucuaugauaucgaggaauu

SEQ ID NO: 1722153 - RNA, 19 nt, Homo sapiens
  misc_RNA (1)...(19): siRNA sense strand
ggaaagccauggcagaaaa

SEQ ID NO: 1722154 - RNA, 19 nt, Homo sapiens
  misc_RNA (1)...(19): siRNA sense strand
agacaucucuggcaucauc

SEQ ID NO: 1722155 - RNA, 19 nt, Homo sapiens
  misc_RNA (1)...(19): siRNA sense strand
gcuuggagccuauuacauu

SEQ ID NO: 1722156 - RNA, 19 nt, Homo sapiens
  misc_RNA (1)...(19): siRNA sense strand
gaaguucuuuaccagauag

SEQ ID NO: 1722157 - RNA, 19 nt, Homo sapiens
  misc_RNA (1)...(19): siRNA sense strand
guuuagcaaugcaggaaua

SEQ ID NO: 1722158 - RNA, 19 nt, Homo sapiens
  misc_RNA (1)...(19): siRNA sense strand
ugugaacucugauagauau

SEQ ID NO: 1722159 - RNA, 19 nt, Homo sapiens
  misc_RNA (1)...(19): siRNA sense strand
gcuaguuguuucagaagaa

SEQ ID NO: 1722160 - RNA, 19 nt, Homo sapiens
  misc_RNA (1)...(19): siRNA sense strand
ggauauggguccaagacau

SEQ ID NO: 1722161 - RNA, 19 nt, Homo sapiens
  misc_RNA (1)...(19): siRNA sense strand
gaugaagaauuaggagaug

SEQ ID NO: 1722162 - RNA, 19 nt, Homo sapiens
  misc_RNA (1)...(19): siRNA sense strand
ugagaaggccgcugaauuc

SEQ ID NO: 1722163 - RNA, 19 nt, Homo sapiens
  misc_RNA (1)...(19): siRNA sense strand
gccagcagcuaugcagaua

SEQ ID NO: 1722164 - RNA, 19 nt, Homo sapiens
  misc_RNA (1)...(19): siRNA sense strand
aaagauagcccagaggaaa

SEQ ID NO: 1722165 - RNA, 19 nt, Homo sapiens
  misc_RNA (1)...(19): siRNA sense strand
ccgcugaauucuauaaaga

SEQ ID NO: 1722166 - RNA, 19 nt, Homo sapiens
  misc_RNA (1)...(19): siRNA sense strand
ugaaauguaugccgaagca

SEQ ID NO: 1722167 - RNA, 19 nt, Homo sapiens
  misc_RNA (1)...(19): siRNA sense strand
agaaggaaguaaaugaguu

SEQ ID NO: 1722168 - RNA, 19 nt, Homo sapiens
  misc_RNA (1)...(19): siRNA sense strand
guagaagaaagcuguauug

SEQ ID NO: 1722169 - RNA, 19 nt, Homo sapiens
  misc_RNA (1)...(19): siRNA sense strand
ugauuugcuuccagaauaa

SEQ ID NO: 1722170 - RNA, 19 nt, Homo sapiens
  misc_RNA (1)...(19): siRNA sense strand
gcugugaacucugauagau

SEQ ID NO: 1722171 - RNA, 19 nt, Homo sapiens
  misc_RNA (1)...(19): siRNA sense strand
ucaauaggaagaccaauga

SEQ ID NO: 1722172 - RNA, 19 nt, Homo sapiens
  misc_RNA (1)...(19): siRNA sense strand
ccagaaaacugaagagguu

SEQ ID NO: 1722173 - RNA, 19 nt, Homo sapiens
  misc_RNA (1)...(19): siRNA sense strand
gcaaauggaacgugaaagg

SEQ ID NO: 1722174 - RNA, 19 nt, Homo sapiens
  misc_RNA (1)...(19): siRNA sense strand
agacagcgagaacaaguua

SEQ ID NO: 1722175 - RNA, 19 nt, Homo sapiens
  misc_RNA (1)...(19): siRNA sense strand
guaaaugaguugguagaag

SEQ ID NO: 1722176 - RNA, 19 nt, Homo sapiens
  misc_RNA (1)...(19): siRNA sense strand
ucgaggaauuggagaauga

SEQ ID NO: 1722177 - RNA, 19 nt, Homo sapiens
  misc_RNA (1)...(19): siRNA sense strand
agaauuaggagaugauuug

SEQ ID NO: 1722178 - RNA, 19 nt, Homo sapiens
  misc_RNA (1)...(19): siRNA sense strand
caaagauacucacagaaaa

SEQ ID NO: 1722179 - RNA, 19 nt, Homo sapiens
  misc_RNA (1)...(19): siRNA sense strand
gaaauggcagcugauggua

SEQ ID NO: 1722180 - RNA, 19 nt, Homo sapiens
  misc_RNA (1)...(19): siRNA sense strand
gcaaauggugauuaugaga

SEQ ID NO: 1722181 - RNA, 19 nt, Homo sapiens
  misc_RNA (1)...(19): siRNA sense strand
gcacaagccagcagcuaug

SEQ ID NO: 1722182 - RNA, 19 nt, Homo sapiens
  misc_RNA (1)...(19): siRNA sense strand
uaaagcaauuagagaagga

SEQ ID NO: 1722183 - RNA, 19 nt, Homo sapiens
  misc_RNA (1)...(19): siRNA sense strand
augauuugcuuccagaaua

SEQ ID NO: 1722184 - RNA, 19 nt, Homo sapiens
  misc_RNA (1)...(19): siRNA sense strand
agagacagaugaagaugau

SEQ ID NO: 1722185 - RNA, 19 nt, Homo sapiens
  misc_RNA (1)...(19): siRNA sense strand
gaaaaucccagucaagcua

SEQ ID NO: 1722186 - RNA, 19 nt, Homo sapiens
  misc_RNA (1)...(19): siRNA sense strand
ggagaaugaugcagcuuuu

SEQ ID NO: 1722187 - RNA, 19 nt, Homo sapiens
  misc_RNA (1)...(19): siRNA sense strand
guuacauacuugagacaaa

SEQ ID NO: 1722188 - RNA, 19 nt, Homo sapiens
  misc_RNA (1)...(19): siRNA sense strand
gcagaauauuggaguuaca

SEQ ID NO: 1722189 - RNA, 19 nt, Homo sapiens
  misc_RNA (1)...(19): siRNA sense strand
gugaaagcuucucaauaug

SEQ ID NO: 1722190 - RNA, 19 nt, Homo sapiens
  misc_RNA (1)...(19): siRNA sense strand
gcuauugaauggcuaaugc

SEQ ID NO: 1722191 - RNA, 19 nt, Homo sapiens
  misc_RNA (1)...(19): siRNA sense strand
caaauggugauuaugagaa

SEQ ID NO: 1722192 - RNA, 19 nt, Homo sapiens
  misc_RNA (1)...(19): siRNA sense strand
aaaggacaguagagugaaa

SEQ ID NO: 1722193 - RNA, 19 nt, Homo sapiens
  misc_RNA (1)...(19): siRNA sense strand
ggcaguuacuagaccuaua

SEQ ID NO: 1722194 - RNA, 19 nt, Homo sapiens
  misc_RNA (1)...(19): siRNA sense strand
ucaagaauaugccagaaaa

SEQ ID NO: 1722195 - RNA, 19 nt, Homo sapiens
  misc_RNA (1)...(19): siRNA sense strand
uaaugcagguggucagugu

SEQ ID NO: 1722196 - RNA, 19 nt, Homo sapiens
  misc_RNA (1)...(19): siRNA sense strand
gaaacuucacgcaauccua

SEQ ID NO: 1722197 - RNA, 19 nt, Homo sapiens
  misc_RNA (1)...(19): siRNA sense strand
auauuggccuuaccuauga

SEQ ID NO: 1722198 - RNA, 19 nt, Homo sapiens
  misc_RNA (1)...(19): siRNA sense strand
gauuacuguuccauuagaa

SEQ ID NO: 1722199 - RNA, 19 nt, Homo sapiens
  misc_RNA (1)...(19): siRNA sense strand
gcagaagaccuccaauaac

SEQ ID NO: 1722200 - RNA, 19 nt, Homo sapiens
  misc_RNA (1)...(19): siRNA sense strand
ggaguuacuagacccauga

SEQ ID NO: 1722201 - RNA, 19 nt, Homo sapiens
  misc_RNA (1)...(19): siRNA sense strand
gcaguaacaaagaaauaga

SEQ ID NO: 1722202 - RNA, 19 nt, Homo sapiens
  misc_RNA (1)...(19): siRNA sense strand
gggaacagcgcauaaaguc

SEQ ID NO: 1722203 - RNA, 19 nt, Homo sapiens
  misc_RNA (1)...(19): siRNA sense strand
ugaaagaaauaagggaaca

SEQ ID NO: 1722204 - RNA, 19 nt, Homo sapiens
  misc_RNA (1)...(19): siRNA sense strand
gcuagccaaugaucuggaa

SEQ ID NO: 1722205 - RNA, 19 nt, Homo sapiens
  misc_RNA (1)...(19): siRNA sense strand
gagcauggcaccaaaucug

SEQ ID NO: 1722206 - RNA, 19 nt, Homo sapiens
  misc_RNA (1)...(19): siRNA sense strand
ggugaaagcuucucaauau

SEQ ID NO: 1722207 - RNA, 19 nt, Homo sapiens
  misc_RNA (1)...(19): siRNA sense strand
gcacagaucuuggauuaaa

SEQ ID NO: 1722208 - RNA, 19 nt, Homo sapiens
  misc_RNA (1)...(19): siRNA sense strand
ccaaugaucuggaaauaaa

SEQ ID NO: 1722209 - RNA, 19 nt, Homo sapiens
  misc_RNA (1)...(19): siRNA sense strand
cagcagcucuuacuaauaa

SEQ ID NO: 1722210 - RNA, 19 nt, Homo sapiens
  misc_RNA (1)...(19): siRNA sense strand
gaaagcuucucaauaugua

SEQ ID NO: 1722211 - RNA, 19 nt, Homo sapiens
  misc_RNA (1)...(19): siRNA sense strand
ggaaguaaaugaguuggua

SEQ ID NO: 1722212 - RNA, 19 nt, Homo sapiens
  misc_RNA (1)...(19): siRNA sense strand
gaaggccgcugaauucuau

SEQ ID NO: 1722213 - RNA, 19 nt, Homo sapiens
  misc_RNA (1)...(19): siRNA sense strand
ccgaagcacuuaacacuua

SEQ ID NO: 1722214 - RNA, 19 nt, Homo sapiens
  misc_RNA (1)...(19): siRNA sense strand
uaaaugaguugguagaaga

SEQ ID NO: 1722215 - RNA, 19 nt, Homo sapiens
  misc_RNA (1)...(19): siRNA sense strand
gaaaguagcaguaacaaag

SEQ ID NO: 1722216 - RNA, 19 nt, Homo sapiens
  misc_RNA (1)...(19): siRNA sense strand
ccaaagccauuaaauucua

SEQ ID NO: 1722217 - RNA, 19 nt, Homo sapiens
  misc_RNA (1)...(19): siRNA sense strand
uaaccaagcuguagagauc

SEQ ID NO: 1722218 - RNA, 19 nt, Homo sapiens
  misc_RNA (1)...(19): siRNA sense strand
cagcagcuaugcagauaua

SEQ ID NO: 1722219 - RNA, 19 nt, Homo sapiens
  misc_RNA (1)...(19): siRNA sense strand
caauaguuguggagacuua

SEQ ID NO: 1722220 - RNA, 19 nt, Homo sapiens
  misc_RNA (1)...(19): siRNA sense strand
cugcacagaucuuggauua

SEQ ID NO: 1722221 - RNA, 19 nt, Homo sapiens
  misc_RNA (1)...(19): siRNA sense strand
ggacaaaugaaccuuauga

SEQ ID NO: 1722222 - RNA, 19 nt, Homo sapiens
  misc_RNA (1)...(19): siRNA sense strand
guacugaagcacuuuauaa

SEQ ID NO: 1722223 - RNA, 19 nt, Homo sapiens
  misc_RNA (1)...(19): siRNA sense strand
ggaaauaaacaaagcaguu

SEQ ID NO: 1722224 - RNA, 19 nt, Homo sapiens
  misc_RNA (1)...(19): siRNA sense strand
gaugguagcuaguuguuuc

SEQ ID NO: 1722225 - RNA, 19 nt, Homo sapiens
  misc_RNA (1)...(19): siRNA sense strand
cuuaguaacugaagcuaua

SEQ ID NO: 1722226 - RNA, 19 nt, Homo sapiens
  misc_RNA (1)...(19): siRNA sense strand
gaaacuaaaucggcuagau

SEQ ID NO: 1722227 - RNA, 19 nt, Homo sapiens
  misc_RNA (1)...(19): siRNA sense strand
caaagcaguuacauacuug

SEQ ID NO: 1722228 - RNA, 19 nt, Homo sapiens
  misc_RNA (1)...(19): siRNA sense strand
gcaggaauauugaaaauga

SEQ ID NO: 1722229 - RNA, 19 nt, Homo sapiens
  misc_RNA (1)...(19): siRNA sense strand
cagaagaccuccaauaacu

SEQ ID NO: 1722230 - RNA, 19 nt, Homo sapiens
  misc_RNA (1)...(19): siRNA sense strand
caaaugaaccuuaugaaag

SEQ ID NO: 1722231 - RNA, 19 nt, Homo sapiens
  misc_RNA (1)...(19): siRNA sense strand
uuacaaagauacucacaga

SEQ ID NO: 1722232 - RNA, 19 nt, Homo sapiens
  misc_RNA (1)...(19): siRNA sense strand
ucucagcccuguauuauau

SEQ ID NO: 1722233 - RNA, 19 nt, Homo sapiens
  misc_RNA (1)...(19): siRNA sense strand
ggcagaagaccuccaauaa

SEQ ID NO: 1722234 - RNA, 19 nt, Homo sapiens
  misc_RNA (1)...(19): siRNA sense strand
gcaauuagagaaggaagua

SEQ ID NO: 1722235 - RNA, 19 nt, Homo sapiens
  misc_RNA (1)...(19): siRNA sense strand
gaaggcaggcuacaaccua

SEQ ID NO: 1722236 - RNA, 19 nt, Homo sapiens
  misc_RNA (1)...(19): siRNA sense strand
ugacuacaauccaaucuau

SEQ ID NO: 1722237 - RNA, 19 nt, Homo sapiens
  misc_RNA (1)...(19): siRNA sense strand
caagacaucucuggcauca

SEQ ID NO: 1722238 - RNA, 19 nt, Homo sapiens
  misc_RNA (1)...(19): siRNA sense strand
uaucuaagcuaggagaauu

SEQ ID NO: 1722239 - RNA, 19 nt, Homo sapiens
  misc_RNA (1)...(19): siRNA sense strand
gaaaugauucuucuuguac

SEQ ID NO: 1722240 - RNA, 19 nt, Homo sapiens
  misc_RNA (1)...(19): siRNA sense strand
aaacaaagcaguuacauac

SEQ ID NO: 1722241 - RNA, 19 nt, Homo sapiens
  misc_RNA (1)...(19): siRNA sense strand
gcacuuaacacuuaucaag

SEQ ID NO: 1722242 - RNA, 19 nt, Homo sapiens
  misc_RNA (1)...(19): siRNA sense strand
gccagucaguauucaguua

SEQ ID NO: 1722243 - RNA, 19 nt, Homo sapiens
  misc_RNA (1)...(19): siRNA sense strand
acucauugcuccuguaauu

SEQ ID NO: 1722244 - RNA, 19 nt, Homo sapiens
  misc_RNA (1)...(19): siRNA sense strand
guagcuaguuguuucagaa

SEQ ID NO: 1722245 - RNA, 19 nt, Homo sapiens
  misc_RNA (1)...(19): siRNA sense strand
acaaagcaguuacauacuu

SEQ ID NO: 1722246 - RNA, 19 nt, Homo sapiens
  misc_RNA (1)...(19): siRNA sense strand
cgaaguucuuuaccagaua

SEQ ID NO: 1722247 - RNA, 19 nt, Homo sapiens
  misc_RNA (1)...(19): siRNA sense strand
acaaagauacucacagaaa

SEQ ID NO: 1722248 - RNA, 19 nt, Homo sapiens
  misc_RNA (1)...(19): siRNA sense strand
guagagaucuuaaaagugu

SEQ ID NO: 1722249 - RNA, 19 nt, Homo sapiens
  misc_RNA (1)...(19): siRNA sense strand
ccacuuggcccucaaauag

SEQ ID NO: 1722250 - RNA, 19 nt, Homo sapiens
  misc_RNA (1)...(19): siRNA sense strand
cagaagaagugguaacuac

SEQ ID NO: 1722251 - RNA, 19 nt, Homo sapiens
  misc_RNA (1)...(19): siRNA sense strand
ucuaugauaucgaggaauu

SEQ ID NO: 1722252 - RNA, 19 nt, Homo sapiens
  misc_RNA (1)...(19): siRNA sense strand
ggaaagccauggcagaaaa

SEQ ID NO: 1722253 - RNA, 19 nt, Homo sapiens
  misc_RNA (1)...(19): siRNA sense strand
gaaggaaguaaaugaguug

SEQ ID NO: 1722254 - RNA, 19 nt, Homo sapiens
  misc_RNA (1)...(19): siRNA sense strand
agacaucucuggcaucauc

SEQ ID NO: 1722255 - RNA, 19 nt, Homo sapiens
  misc_RNA (1)...(19): siRNA sense strand
gcuuggagccuauuacauu

SEQ ID NO: 1722256 - RNA, 19 nt, Homo sapiens
  misc_RNA (1)...(19): siRNA sense strand
gaaguucuuuaccagauag

SEQ ID NO: 1722257 - RNA, 19 nt, Homo sapiens
  misc_RNA (1)...(19): siRNA sense strand
guuuagcaaugcaggaaua

SEQ ID NO: 1722258 - RNA, 19 nt, Homo sapiens
  misc_RNA (1)...(19): siRNA sense strand
ugugaacucugauagauau

SEQ ID NO: 1722259 - RNA, 19 nt, Homo sapiens
  misc_RNA (1)...(19): siRNA sense strand
gcuaguuguuucagaagaa

SEQ ID NO: 1722260 - RNA, 19 nt, Homo sapiens
  misc_RNA (1)...(19): siRNA sense strand
ggauauggguccaagacau

SEQ ID NO: 1722261 - RNA, 19 nt, Homo sapiens
  misc_RNA (1)...(19): siRNA sense strand
gaugaagaauuaggagaug

SEQ ID NO: 1722262 - RNA, 19 nt, Homo sapiens
  misc_RNA (1)...(19): siRNA sense strand
ugagaaggccgcugaauuc

SEQ ID NO: 1722263 - RNA, 19 nt, Homo sapiens
  misc_RNA (1)...(19): siRNA sense strand
gccagcagcuaugcagaua

SEQ ID NO: 1722264 - RNA, 19 nt, Homo sapiens
  misc_RNA (1)...(19): siRNA sense strand
aaagauagcccagaggaaa

SEQ ID NO: 1722265 - RNA, 19 nt, Homo sapiens
  misc_RNA (1)...(19): siRNA sense strand
ccgcugaauucuauaaaga

SEQ ID NO: 1722266 - RNA, 19 nt, Homo sapiens
  misc_RNA (1)...(19): siRNA sense strand
ugaaauguaugccgaagca

SEQ ID NO: 1722267 - RNA, 19 nt, Homo sapiens
  misc_RNA (1)...(19): siRNA sense strand
agaaggaaguaaaugaguu

SEQ ID NO: 1722268 - RNA, 19 nt, Homo sapiens
  misc_RNA (1)...(19): siRNA sense strand
guagaagaaagcuguauug

SEQ ID NO: 1722269 - RNA, 19 nt, Homo sapiens
  misc_RNA (1)...(19): siRNA sense strand
ugauuugcuuccagaauaa

SEQ ID NO: 1722270 - RNA, 19 nt, Homo sapiens
  misc_RNA (1)...(19): siRNA sense strand
gcugugaacucugauagau

SEQ ID NO: 1722271 - RNA, 19 nt, Homo sapiens
  misc_RNA (1)...(19): siRNA sense strand
ucaauaggaagaccaauga

SEQ ID NO: 1722272 - RNA, 19 nt, Homo sapiens
  misc_RNA (1)...(19): siRNA sense strand
ccagaaaacugaagagguu

SEQ ID NO: 1722273 - RNA, 19 nt, Homo sapiens
  misc_RNA (1)...(19): siRNA sense strand
gcaaauggaacgugaaagg

SEQ ID NO: 1722274 - RNA, 19 nt, Homo sapiens
  misc_RNA (1)...(19): siRNA sense strand
agacagcgagaacaaguua

SEQ ID NO: 1722275 - RNA, 19 nt, Homo sapiens
  misc_RNA (1)...(19): siRNA sense strand
guaaaugaguugguagaag

SEQ ID NO: 1722276 - RNA, 19 nt, Homo sapiens
  misc_RNA (1)...(19): siRNA sense strand
gcacaagccagcagcuaug

SEQ ID NO: 1722277 - RNA, 19 nt, Homo sapiens
  misc_RNA (1)...(19): siRNA sense strand
agaauuaggagaugauuug

SEQ ID NO: 1722278 - RNA, 19 nt, Homo sapiens
  misc_RNA (1)...(19): siRNA sense strand
caaagauacucacagaaaa

SEQ ID NO: 1722279 - RNA, 19 nt, Homo sapiens
  misc_RNA (1)...(19): siRNA sense strand
ucgaggaauuggagaauga

SEQ ID NO: 1722280 - RNA, 19 nt, Homo sapiens
  misc_RNA (1)...(19): siRNA sense strand
gaaauggcagcugauggua

SEQ ID NO: 1722281 - RNA, 19 nt, Homo sapiens
  misc_RNA (1)...(19): siRNA sense strand
gcaaauggugauuaugaga

SEQ ID NO: 1722282 - RNA, 19 nt, Homo sapiens
  misc_RNA (1)...(19): siRNA sense strand
uaaagcaauuagagaagga

SEQ ID NO: 1722283 - RNA, 19 nt, Homo sapiens
  misc_RNA (1)...(19): siRNA sense strand
augauuugcuuccagaaua

SEQ ID NO: 1722284 - RNA, 19 nt, Homo sapiens
  misc_RNA (1)...(19): siRNA sense strand
gcagaauauuggaguuaca

SEQ ID NO: 1722285 - RNA, 19 nt, Homo sapiens
  misc_RNA (1)...(19): siRNA sense strand
gaaaaucccagucaagcua

SEQ ID NO: 1722286 - RNA, 19 nt, Homo sapiens
  misc_RNA (1)...(19): siRNA sense strand
ggagaaugaugcagcuuuu

SEQ ID NO: 1722287 - RNA, 19 nt, Homo sapiens
  misc_RNA (1)...(19): siRNA sense strand
agagacagaugaagaugau

SEQ ID NO: 1722288 - RNA, 19 nt, Homo sapiens
  misc_RNA (1)...(19): siRNA sense strand
guuacauacuugagacaaa

SEQ ID NO: 1722289 - RNA, 19 nt, Homo sapiens
  misc_RNA (1)...(19): siRNA sense strand
gugaaagcuucucaauaug

SEQ ID NO: 1722290 - RNA, 19 nt, Homo sapiens
  misc_RNA (1)...(19): siRNA sense strand
gcuauugaauggcuaaugc

SEQ ID NO: 1722291 - RNA, 19 nt, Homo sapiens
  misc_RNA (1)...(19): siRNA sense strand
caaauggugauuaugagaa

SEQ ID NO: 1722292 - RNA, 19 nt, Homo sapiens
  misc_RNA (1)...(19): siRNA sense strand
aaaggacaguagagugaaa

SEQ ID NO: 1722293 - RNA, 19 nt, Homo sapiens
  misc_RNA (1)...(19): siRNA sense strand
gcagaagaccuccaauaac

SEQ ID NO: 1722294 - RNA, 19 nt, Homo sapiens
  misc_RNA (1)...(19): siRNA sense strand
ucaagaauaugccagaaaa

SEQ ID NO: 1722295 - RNA, 19 nt, Homo sapiens
  misc_RNA (1)...(19): siRNA sense strand
uaaugcagguggucagugu

SEQ ID NO: 1722296 - RNA, 19 nt, Homo sapiens
  misc_RNA (1)...(19): siRNA sense strand
gaaacuucacgcaauccua

SEQ ID NO: 1722297 - RNA, 19 nt, Homo sapiens
  misc_RNA (1)...(19): siRNA sense strand
auauuggccuuaccuauga

SEQ ID NO: 1722298 - RNA, 19 nt, Homo sapiens
  misc_RNA (1)...(19): siRNA sense strand
ggcaguuacuagaccuaua

SEQ ID NO: 1722299 - RNA, 19 nt, Homo sapiens
  misc_RNA (1)...(19): siRNA sense strand
gauuacuguuccauuagaa

SEQ ID NO: 1722300 - RNA, 19 nt, Homo sapiens
  misc_RNA (1)...(19): siRNA sense strand
ggaguuacuagacccauga

SEQ ID NO: 1722301 - RNA, 19 nt, Homo sapiens
  misc_RNA (1)...(19): siRNA sense strand
gcaguaacaaagaaauaga

SEQ ID NO: 1722302 - RNA, 19 nt, Homo sapiens
  misc_RNA (1)...(19): siRNA sense strand
gggaacagcgcauaaaguc

SEQ ID NO: 1722303 - RNA, 19 nt, Homo sapiens
  misc_RNA (1)...(19): siRNA sense strand
ugaaagaaauaagggaaca

SEQ ID NO: 1722304 - RNA, 19 nt, Homo sapiens
  misc_RNA (1)...(19): siRNA sense strand
gcuagccaaugaucuggaa

SEQ ID NO: 1722305 - RNA, 19 nt, Homo sapiens
  misc_RNA (1)...(19): siRNA sense strand
gagcauggcaccaaaucug

SEQ ID NO: 1722306 - RNA, 19 nt, Homo sapiens
  misc_RNA (1)...(19): siRNA sense strand
ggaaacaucauauggaauu

SEQ ID NO: 1722307 - RNA, 19 nt, Homo sapiens
  misc_RNA (1)...(19): siRNA sense strand
gaaaucagacaucaacaaa

SEQ ID NO: 1722308 - RNA, 19 nt, Homo sapiens
  misc_RNA (1)...(19): siRNA sense strand
gauaaugagucggaaguaa

SEQ ID NO: 1722309 - RNA, 19 nt, Homo sapiens
  misc_RNA (1)...(19): siRNA sense strand
ugaaggcccuggauaauga

SEQ ID NO: 1722310 - RNA, 19 nt, Homo sapiens
  misc_RNA (1)...(19): siRNA sense strand
cagcagcagugaacaaauu

SEQ ID NO: 1722311 - RNA, 19 nt, Homo sapiens
  misc_RNA (1)...(19): siRNA sense strand
cagcacaucugucauugaa

SEQ ID NO: 1722312 - RNA, 19 nt, Homo sapiens
  misc_RNA (1)...(19): siRNA sense strand
gacggucccugaggaauua

SEQ ID NO: 1722313 - RNA, 19 nt, Homo sapiens
  misc_RNA (1)...(19): siRNA sense strand
gaauagaggacgaauacaa

SEQ ID NO: 1722314 - RNA, 19 nt, Homo sapiens
  misc_RNA (1)...(19): siRNA sense strand
uaaaguaggugucuucaac

SEQ ID NO: 1722315 - RNA, 19 nt, Homo sapiens
  misc_RNA (1)...(19): siRNA sense strand
gcacaucugucauugaaac

SEQ ID NO: 1722316 - RNA, 19 nt, Homo sapiens
  misc_RNA (1)...(19): siRNA sense strand
gaauugggaucaagugaag

SEQ ID NO: 1722317 - RNA, 19 nt, Homo sapiens
  misc_RNA (1)...(19): siRNA sense strand
gaagaauagaggacgaaua

SEQ ID NO: 1722318 - RNA, 19 nt, Homo sapiens
  misc_RNA (1)...(19): siRNA sense strand
gaggacgaauacaagguua

SEQ ID NO: 1722319 - RNA, 19 nt, Homo sapiens
  misc_RNA (1)...(19): siRNA sense strand
aaacaucgguggagcuuuc

SEQ ID NO: 1722320 - RNA, 19 nt, Homo sapiens
  misc_RNA (1)...(19): siRNA sense strand
cuagauacguguucaggaa

SEQ ID NO: 1722321 - RNA, 19 nt, Homo sapiens
  misc_RNA (1)...(19): siRNA sense strand
ccacagauauugaaguuuu

SEQ ID NO: 1722322 - RNA, 19 nt, Homo sapiens
  misc_RNA (1)...(19): siRNA sense strand
guaggugucuucaacaaca

SEQ ID NO: 1722323 - RNA, 19 nt, Homo sapiens
  misc_RNA (1)...(19): siRNA sense strand
ggaaaucagacaucaacaa

SEQ ID NO: 1722324 - RNA, 19 nt, Homo sapiens
  misc_RNA (1)...(19): siRNA sense strand
ggucgaggcuuugguuaug

SEQ ID NO: 1722325 - RNA, 19 nt, Homo sapiens
  misc_RNA (1)...(19): siRNA sense strand
caaagcagcacaucuguca

SEQ ID NO: 1722326 - RNA, 19 nt, Homo sapiens
  misc_RNA (1)...(19): siRNA sense strand
ccggaaacaucauauggaa

SEQ ID NO: 1722327 - RNA, 19 nt, Homo sapiens
  misc_RNA (1)...(19): siRNA sense strand
gccaguaucuuugccagaa

SEQ ID NO: 1722328 - RNA, 19 nt, Homo sapiens
  misc_RNA (1)...(19): siRNA sense strand
gaauucaucagacuccaaa

SEQ ID NO: 1722329 - RNA, 19 nt, Homo sapiens
  misc_RNA (1)...(19): siRNA sense strand
aauacaagguuaugagguu

SEQ ID NO: 1722330 - RNA, 19 nt, Homo sapiens
  misc_RNA (1)...(19): siRNA sense strand
caucugucauugaaacaaa

SEQ ID NO: 1722331 - RNA, 19 nt, Homo sapiens
  misc_RNA (1)...(19): siRNA sense strand
acagcuagguccaguuuau

SEQ ID NO: 1722332 - RNA, 19 nt, Homo sapiens
  misc_RNA (1)...(19): siRNA sense strand
gaaacaucauauggaauuc

SEQ ID NO: 1722333 - RNA, 19 nt, Homo sapiens
  misc_RNA (1)...(19): siRNA sense strand
acagaauggucgaggcuuu

SEQ ID NO: 1722334 - RNA, 19 nt, Homo sapiens
  misc_RNA (1)...(19): siRNA sense strand
caagugaaggcccuggaua

SEQ ID NO: 1722335 - RNA, 19 nt, Homo sapiens
  misc_RNA (1)...(19): siRNA sense strand
gaaagccaccaccaaguca

SEQ ID NO: 1722336 - RNA, 19 nt, Homo sapiens
  misc_RNA (1)...(19): siRNA sense strand
gaagaagaacccaccaaac

SEQ ID NO: 1722337 - RNA, 19 nt, Homo sapiens
  misc_RNA (1)...(19): siRNA sense strand
ucacagcuagguccaguuu

SEQ ID NO: 1722338 - RNA, 19 nt, Homo sapiens
  misc_RNA (1)...(19): siRNA sense strand
ggagacaugaagacaaaga

SEQ ID NO: 1722339 - RNA, 19 nt, Homo sapiens
  misc_RNA (1)...(19): siRNA sense strand
uuggagacaugaagacaaa

SEQ ID NO: 1722340 - RNA, 19 nt, Homo sapiens
  misc_RNA (1)...(19): siRNA sense strand
auacaagguuaugagguua

SEQ ID NO: 1722341 - RNA, 19 nt, Homo sapiens
  misc_RNA (1)...(19): siRNA sense strand
gccuuucgaugaagauuau

SEQ ID NO: 1722342 - RNA, 19 nt, Homo sapiens
  misc_RNA (1)...(19): siRNA sense strand
gcagugaacaaauucgaau

SEQ ID NO: 1722343 - RNA, 19 nt, Homo sapiens
  misc_RNA (1)...(19): siRNA sense strand
gauacguguucaggaauga

SEQ ID NO: 1722344 - RNA, 19 nt, Homo sapiens
  misc_RNA (1)...(19): siRNA sense strand
ucaucagacuccaaaauua

SEQ ID NO: 1722345 - RNA, 19 nt, Homo sapiens
  misc_RNA (1)...(19): siRNA sense strand
ccugaggaauuacagaaug

SEQ ID NO: 1722346 - RNA, 19 nt, Homo sapiens
  misc_RNA (1)...(19): siRNA sense strand
ugccacagauauugaaguu

SEQ ID NO: 1722347 - RNA, 19 nt, Homo sapiens
  misc_RNA (1)...(19): siRNA sense strand
ucagccaucaguacaauaa

SEQ ID NO: 1722348 - RNA, 19 nt, Homo sapiens
  misc_RNA (1)...(19): siRNA sense strand
gacaugaagacaaagaaga

SEQ ID NO: 1722349 - RNA, 19 nt, Homo sapiens
  misc_RNA (1)...(19): siRNA sense strand
ggacgaauacaagguuaug

SEQ ID NO: 1722350 - RNA, 19 nt, Homo sapiens
  misc_RNA (1)...(19): siRNA sense strand
ggaaguaaaaggauacaaa

SEQ ID NO: 1722351 - RNA, 19 nt, Homo sapiens
  misc_RNA (1)...(19): siRNA sense strand
agacaaagcagcacaucug

SEQ ID NO: 1722352 - RNA, 19 nt, Homo sapiens
  misc_RNA (1)...(19): siRNA sense strand
agaagaagaacccaccaaa

SEQ ID NO: 1722353 - RNA, 19 nt, Homo sapiens
  misc_RNA (1)...(19): siRNA sense strand
guacagauggaacagacaa

SEQ ID NO: 1722354 - RNA, 19 nt, Homo sapiens
  misc_RNA (1)...(19): siRNA sense strand
guuaaauauuggagacaug

SEQ ID NO: 1722355 - RNA, 19 nt, Homo sapiens
  misc_RNA (1)...(19): siRNA sense strand
ggauaaugagucggaagua

SEQ ID NO: 1722356 - RNA, 19 nt, Homo sapiens
  misc_RNA (1)...(19): siRNA sense strand
ccaaaccaccagccaguau

SEQ ID NO: 1722357 - RNA, 19 nt, Homo sapiens
  misc_RNA (1)...(19): siRNA sense strand
gaaugcauguacgcuguca

SEQ ID NO: 1722358 - RNA, 19 nt, Homo sapiens
  misc_RNA (1)...(19): siRNA sense strand
gcugucaaggcauauaauu

SEQ ID NO: 1722359 - RNA, 19 nt, Homo sapiens
  misc_RNA (1)...(19): siRNA sense strand
aagaauagaggacgaauac

SEQ ID NO: 1722360 - RNA, 19 nt, Homo sapiens
  misc_RNA (1)...(19): siRNA sense strand
gccaucaguacaauaauga

SEQ ID NO: 1722361 - RNA, 19 nt, Homo sapiens
  misc_RNA (1)...(19): siRNA sense strand
caucauauggaauucauca

SEQ ID NO: 1722362 - RNA, 19 nt, Homo sapiens
  misc_RNA (1)...(19): siRNA sense strand
guaaaaggauacaaagucu

SEQ ID NO: 1722363 - RNA, 19 nt, Homo sapiens
  misc_RNA (1)...(19): siRNA sense strand
gagacaugaagacaaagaa

SEQ ID NO: 1722364 - RNA, 19 nt, Homo sapiens
  misc_RNA (1)...(19): siRNA sense strand
aauaaugauuucccucaca

SEQ ID NO: 1722365 - RNA, 19 nt, Homo sapiens
  misc_RNA (1)...(19): siRNA sense strand
aagcagcacaucugucauu

SEQ ID NO: 1722366 - RNA, 19 nt, Homo sapiens
  misc_RNA (1)...(19): siRNA sense strand
gagaagaauagaggacgaa

SEQ ID NO: 1722367 - RNA, 19 nt, Homo sapiens
  misc_RNA (1)...(19): siRNA sense strand
gcagcacaucugucauuga

SEQ ID NO: 1722368 - RNA, 19 nt, Homo sapiens
  misc_RNA (1)...(19): siRNA sense strand
auaaugagucggaaguaaa

SEQ ID NO: 1722369 - RNA, 19 nt, Homo sapiens
  misc_RNA (1)...(19): siRNA sense strand
cgaaagccaccaccaaguc

SEQ ID NO: 1722370 - RNA, 19 nt, Homo sapiens
  misc_RNA (1)...(19): siRNA sense strand
acaagguuaugagguuaaa

SEQ ID NO: 1722371 - RNA, 19 nt, Homo sapiens
  misc_RNA (1)...(19): siRNA sense strand
gguuaaauauuggagacau

SEQ ID NO: 1722372 - RNA, 19 nt, Homo sapiens
  misc_RNA (1)...(19): siRNA sense strand
ggagcuuucuuugccuuuc

SEQ ID NO: 1722373 - RNA, 19 nt, Homo sapiens
  misc_RNA (1)...(19): siRNA sense strand
gugaaggcccuggauaaug

SEQ ID NO: 1722374 - RNA, 19 nt, Homo sapiens
  misc_RNA (1)...(19): siRNA sense strand
acaugaagacaaagaagaa

SEQ ID NO: 1722375 - RNA, 19 nt, Homo sapiens
  misc_RNA (1)...(19): siRNA sense strand
ucauauggaauucaucaga

SEQ ID NO: 1722376 - RNA, 19 nt, Homo sapiens
  misc_RNA (1)...(19): siRNA sense strand
ugaauugggaucaagugaa

SEQ ID NO: 1722377 - RNA, 19 nt, Homo sapiens
  misc_RNA (1)...(19): siRNA sense strand
ggaauucaucagacuccaa

SEQ ID NO: 1722378 - RNA, 19 nt, Homo sapiens
  misc_RNA (1)...(19): siRNA sense strand
acuuagcugucaaggcaua

SEQ ID NO: 1722379 - RNA, 19 nt, Homo sapiens
  misc_RNA (1)...(19): siRNA sense strand
gacaaagcagcacaucugu

SEQ ID NO: 1722380 - RNA, 19 nt, Homo sapiens
  misc_RNA (1)...(19): siRNA sense strand
aaguaggugucuucaacaa

SEQ ID NO: 1722381 - RNA, 19 nt, Homo sapiens
  misc_RNA (1)...(19): siRNA sense strand
aagugaaggcccuggauaa

SEQ ID NO: 1722382 - RNA, 19 nt, Homo sapiens
  misc_RNA (1)...(19): siRNA sense strand
gguuaaaguaggugucuuc

SEQ ID NO: 1722383 - RNA, 19 nt, Homo sapiens
  misc_RNA (1)...(19): siRNA sense strand
caucgguggagcuuucuuu

SEQ ID NO: 1722384 - RNA, 19 nt, Homo sapiens
  misc_RNA (1)...(19): siRNA sense strand
ugucaaggcauauaauucu

SEQ ID NO: 1722385 - RNA, 19 nt, Homo sapiens
  misc_RNA (1)...(19): siRNA sense strand
ccacuucgaaugcauguac

SEQ ID NO: 1722386 - RNA, 19 nt, Homo sapiens
  misc_RNA (1)...(19): siRNA sense strand
agauacguguucaggaaug

SEQ ID NO: 1722387 - RNA, 19 nt, Homo sapiens
  misc_RNA (1)...(19): siRNA sense strand
uuccaaagauaucaaaugc

SEQ ID NO: 1722388 - RNA, 19 nt, Homo sapiens
  misc_RNA (1)...(19): siRNA sense strand
agacggucccugaggaauu

SEQ ID NO: 1722389 - RNA, 19 nt, Homo sapiens
  misc_RNA (1)...(19): siRNA sense strand
ccaccagccaguaucuuug

SEQ ID NO: 1722390 - RNA, 19 nt, Homo sapiens
  misc_RNA (1)...(19): siRNA sense strand
uacgaacaguuggaaauca

SEQ ID NO: 1722391 - RNA, 19 nt, Homo sapiens
  misc_RNA (1)...(19): siRNA sense strand
uagcugucaaggcauauaa

SEQ ID NO: 1722392 - RNA, 19 nt, Homo sapiens
  misc_RNA (1)...(19): siRNA sense strand
agccaucaguacaauaaug

SEQ ID NO: 1722393 - RNA, 19 nt, Homo sapiens
  misc_RNA (1)...(19): siRNA sense strand
ggcagcagcagugaacaaa

SEQ ID NO: 1722394 - RNA, 19 nt, Homo sapiens
  misc_RNA (1)...(19): siRNA sense strand
ugucagccaucaguacaau

SEQ ID NO: 1722395 - RNA, 19 nt, Homo sapiens
  misc_RNA (1)...(19): siRNA sense strand
gaaguaaaaggauacaaag

SEQ ID NO: 1722396 - RNA, 19 nt, Homo sapiens
  misc_RNA (1)...(19): siRNA sense strand
uuucuuugccuuucgauga

SEQ ID NO: 1722397 - RNA, 19 nt, Homo sapiens
  misc_RNA (1)...(19): siRNA sense strand
ucucucccuuugagguuaa

SEQ ID NO: 1722398 - RNA, 19 nt, Homo sapiens
  misc_RNA (1)...(19): siRNA sense strand
gcagcagcagugaacaaau

SEQ ID NO: 1722399 - RNA, 19 nt, Homo sapiens
  misc_RNA (1)...(19): siRNA sense strand
gauggcagcagcagugaac

SEQ ID NO: 1722400 - RNA, 19 nt, Homo sapiens
  misc_RNA (1)...(19): siRNA sense strand
gagauggcagcagcaguga

SEQ ID NO: 1722401 - RNA, 19 nt, Homo sapiens
  misc_RNA (1)...(19): siRNA sense strand
gucaaggcauauaauucug

SEQ ID NO: 1722402 - RNA, 19 nt, Homo sapiens
  misc_RNA (1)...(19): siRNA sense strand
caugaagacaaagaagaaa

SEQ ID NO: 1722403 - RNA, 19 nt, Homo sapiens
  misc_RNA (1)...(19): siRNA sense strand
gagcuuucuuugccuuucg

SEQ ID NO: 1722404 - RNA, 19 nt, Homo sapiens
  misc_RNA (1)...(19): siRNA sense strand
ucaaugugacaacccgaaa

SEQ ID NO: 1722405 - RNA, 19 nt, Homo sapiens
  misc_RNA (1)...(19): siRNA sense strand
aauacgaacaguuggaaau

SEQ ID NO: 1722406 - RNA, 19 nt, Homo sapiens
  misc_RNA (1)...(19): siRNA sense strand
ggaaacaucauauggaauu

SEQ ID NO: 1722407 - RNA, 19 nt, Homo sapiens
  misc_RNA (1)...(19): siRNA sense strand
gaaaucagacaucaacaaa

SEQ ID NO: 1722408 - RNA, 19 nt, Homo sapiens
  misc_RNA (1)...(19): siRNA sense strand
gauaaugagucggaaguaa

SEQ ID NO: 1722409 - RNA, 19 nt, Homo sapiens
  misc_RNA (1)...(19): siRNA sense strand
ugaaggcccuggauaauga

SEQ ID NO: 1722410 - RNA, 19 nt, Homo sapiens
  misc_RNA (1)...(19): siRNA sense strand
cagcagcagugaacaaauu

SEQ ID NO: 1722411 - RNA, 19 nt, Homo sapiens
  misc_RNA (1)...(19): siRNA sense strand
cagcacaucugucauugaa

SEQ ID NO: 1722412 - RNA, 19 nt, Homo sapiens
  misc_RNA (1)...(19): siRNA sense strand
gaauagaggacgaauacaa

SEQ ID NO: 1722413 - RNA, 19 nt, Homo sapiens
  misc_RNA (1)...(19): siRNA sense strand
uaaaguaggugucuucaac

SEQ ID NO: 1722414 - RNA, 19 nt, Homo sapiens
  misc_RNA (1)...(19): siRNA sense strand
gcacaucugucauugaaac

SEQ ID NO: 1722415 - RNA, 19 nt, Homo sapiens
  misc_RNA (1)...(19): siRNA sense strand
gaauugggaucaagugaag

SEQ ID NO: 1722416 - RNA, 19 nt, Homo sapiens
  misc_RNA (1)...(19): siRNA sense strand
gaagaauagaggacgaaua

SEQ ID NO: 1722417 - RNA, 19 nt, Homo sapiens
  misc_RNA (1)...(19): siRNA sense strand
gaggacgaauacaagguua

SEQ ID NO: 1722418 - RNA, 19 nt, Homo sapiens
  misc_RNA (1)...(19): siRNA sense strand
aaacaucgguggagcuuuc

SEQ ID NO: 1722419 - RNA, 19 nt, Homo sapiens
  misc_RNA (1)...(19): siRNA sense strand
ccacagauauugaaguuuu

SEQ ID NO: 1722420 - RNA, 19 nt, Homo sapiens
  misc_RNA (1)...(19): siRNA sense strand
cuagauacguguucaggaa

SEQ ID NO: 1722421 - RNA, 19 nt, Homo sapiens
  misc_RNA (1)...(19): siRNA sense strand
guaggugucuucaacaaca

SEQ ID NO: 1722422 - RNA, 19 nt, Homo sapiens
  misc_RNA (1)...(19): siRNA sense strand
ggaaaucagacaucaacaa

SEQ ID NO: 1722423 - RNA, 19 nt, Homo sapiens
  misc_RNA (1)...(19): siRNA sense strand
caaagcagcacaucuguca

SEQ ID NO: 1722424 - RNA, 19 nt, Homo sapiens
  misc_RNA (1)...(19): siRNA sense strand
ccggaaacaucauauggaa

SEQ ID NO: 1722425 - RNA, 19 nt, Homo sapiens
  misc_RNA (1)...(19): siRNA sense strand
gccaguaucuuugccagaa

SEQ ID NO: 1722426 - RNA, 19 nt, Homo sapiens
  misc_RNA (1)...(19): siRNA sense strand
gaauucaucagacuccaaa

SEQ ID NO: 1722427 - RNA, 19 nt, Homo sapiens
  misc_RNA (1)...(19): siRNA sense strand
aauacaagguuaugagguu

SEQ ID NO: 1722428 - RNA, 19 nt, Homo sapiens
  misc_RNA (1)...(19): siRNA sense strand
caucugucauugaaacaaa

SEQ ID NO: 1722429 - RNA, 19 nt, Homo sapiens
  misc_RNA (1)...(19): siRNA sense strand
acagcuagguccaguuuau

SEQ ID NO: 1722430 - RNA, 19 nt, Homo sapiens
  misc_RNA (1)...(19): siRNA sense strand
gaaacaucauauggaauuc

SEQ ID NO: 1722431 - RNA, 19 nt, Homo sapiens
  misc_RNA (1)...(19): siRNA sense strand
gaaagccaccaccaaguca

SEQ ID NO: 1722432 - RNA, 19 nt, Homo sapiens
  misc_RNA (1)...(19): siRNA sense strand
caagugaaggcccuggaua

SEQ ID NO: 1722433 - RNA, 19 nt, Homo sapiens
  misc_RNA (1)...(19): siRNA sense strand
gaagaagaacccaccaaac

SEQ ID NO: 1722434 - RNA, 19 nt, Homo sapiens
  misc_RNA (1)...(19): siRNA sense strand
ucacagcuagguccaguuu

SEQ ID NO: 1722435 - RNA, 19 nt, Homo sapiens
  misc_RNA (1)...(19): siRNA sense strand
ggagacaugaagacaaaga

SEQ ID NO: 1722436 - RNA, 19 nt, Homo sapiens
  misc_RNA (1)...(19): siRNA sense strand
uuggagacaugaagacaaa

SEQ ID NO: 1722437 - RNA, 19 nt, Homo sapiens
  misc_RNA (1)...(19): siRNA sense strand
auacaagguuaugagguua

SEQ ID NO: 1722438 - RNA, 19 nt, Homo sapiens
  misc_RNA (1)...(19): siRNA sense strand
gauacguguucaggaauga

SEQ ID NO: 1722439 - RNA, 19 nt, Homo sapiens
  misc_RNA (1)...(19): siRNA sense strand
gcagugaacaaauucgaau

SEQ ID NO: 1722440 - RNA, 19 nt, Homo sapiens
  misc_RNA (1)...(19): siRNA sense strand
gccuuucgaugaagauuau

SEQ ID NO: 1722441 - RNA, 19 nt, Homo sapiens
  misc_RNA (1)...(19): siRNA sense strand
ucaucagacuccaaaauua

SEQ ID NO: 1722442 - RNA, 19 nt, Homo sapiens
  misc_RNA (1)...(19): siRNA sense strand
ugccacagauauugaaguu

SEQ ID NO: 1722443 - RNA, 19 nt, Homo sapiens
  misc_RNA (1)...(19): siRNA sense strand
ucagccaucaguacaauaa

SEQ ID NO: 1722444 - RNA, 19 nt, Homo sapiens
  misc_RNA (1)...(19): siRNA sense strand
gacaugaagacaaagaaga

SEQ ID NO: 1722445 - RNA, 19 nt, Homo sapiens
  misc_RNA (1)...(19): siRNA sense strand
ggacgaauacaagguuaug

SEQ ID NO: 1722446 - RNA, 19 nt, Homo sapiens
  misc_RNA (1)...(19): siRNA sense strand
ggaaguaaaaggauacaaa

SEQ ID NO: 1722447 - RNA, 19 nt, Homo sapiens
  misc_RNA (1)...(19): siRNA sense strand
agacaaagcagcacaucug

SEQ ID NO: 1722448 - RNA, 19 nt, Homo sapiens
  misc_RNA (1)...(19): siRNA sense strand
guuaaauauuggagacaug

SEQ ID NO: 1722449 - RNA, 19 nt, Homo sapiens
  misc_RNA (1)...(19): siRNA sense strand
guacagauggaacagacaa

SEQ ID NO: 1722450 - RNA, 19 nt, Homo sapiens
  misc_RNA (1)...(19): siRNA sense strand
agaagaagaacccaccaaa

SEQ ID NO: 1722451 - RNA, 19 nt, Homo sapiens
  misc_RNA (1)...(19): siRNA sense strand
ggauaaugagucggaagua

SEQ ID NO: 1722452 - RNA, 19 nt, Homo sapiens
  misc_RNA (1)...(19): siRNA sense strand
gcugucaaggcauauaauu

SEQ ID NO: 1722453 - RNA, 19 nt, Homo sapiens
  misc_RNA (1)...(19): siRNA sense strand
gaaugcauguacgcuguca

SEQ ID NO: 1722454 - RNA, 19 nt, Homo sapiens
  misc_RNA (1)...(19): siRNA sense strand
ccaaaccaccagccaguau

SEQ ID NO: 1722455 - RNA, 19 nt, Homo sapiens
  misc_RNA (1)...(19): siRNA sense strand
aagaauagaggacgaauac

SEQ ID NO: 1722456 - RNA, 19 nt, Homo sapiens
  misc_RNA (1)...(19): siRNA sense strand
gccaucaguacaauaauga

SEQ ID NO: 1722457 - RNA, 19 nt, Homo sapiens
  misc_RNA (1)...(19): siRNA sense strand
caucauauggaauucauca

SEQ ID NO: 1722458 - RNA, 19 nt, Homo sapiens
  misc_RNA (1)...(19): siRNA sense strand
guaaaaggauacaaagucu

SEQ ID NO: 1722459 - RNA, 19 nt, Homo sapiens
  misc_RNA (1)...(19): siRNA sense strand
gagacaugaagacaaagaa

SEQ ID NO: 1722460 - RNA, 19 nt, Homo sapiens
  misc_RNA (1)...(19): siRNA sense strand
aauaaugauuucccucaca

SEQ ID NO: 1722461 - RNA, 19 nt, Homo sapiens
  misc_RNA (1)...(19): siRNA sense strand
aagcagcacaucugucauu

SEQ ID NO: 1722462 - RNA, 19 nt, Homo sapiens
  misc_RNA (1)...(19): siRNA sense strand
gagaagaauagaggacgaa

SEQ ID NO: 1722463 - RNA, 19 nt, Homo sapiens
  misc_RNA (1)...(19): siRNA sense strand
gcagcacaucugucauuga

SEQ ID NO: 1722464 - RNA, 19 nt, Homo sapiens
  misc_RNA (1)...(19): siRNA sense strand
auaaugagucggaaguaaa

SEQ ID NO: 1722465 - RNA, 19 nt, Homo sapiens
  misc_RNA (1)...(19): siRNA sense strand
cgaaagccaccaccaaguc

SEQ ID NO: 1722466 - RNA, 19 nt, Homo sapiens
  misc_RNA (1)...(19): siRNA sense strand
acaagguuaugagguuaaa

SEQ ID NO: 1722467 - RNA, 19 nt, Homo sapiens
  misc_RNA (1)...(19): siRNA sense strand
gguuaaauauuggagacau

SEQ ID NO: 1722468 - RNA, 19 nt, Homo sapiens
  misc_RNA (1)...(19): siRNA sense strand
ggagcuuucuuugccuuuc

SEQ ID NO: 1722469 - RNA, 19 nt, Homo sapiens
  misc_RNA (1)...(19): siRNA sense strand
gugaaggcccuggauaaug

SEQ ID NO: 1722470 - RNA, 19 nt, Homo sapiens
  misc_RNA (1)...(19): siRNA sense strand
acaugaagacaaagaagaa

SEQ ID NO: 1722471 - RNA, 19 nt, Homo sapiens
  misc_RNA (1)...(19): siRNA sense strand
ucauauggaauucaucaga

SEQ ID NO: 1722472 - RNA, 19 nt, Homo sapiens
  misc_RNA (1)...(19): siRNA sense strand
ugaauugggaucaagugaa

SEQ ID NO: 1722473 - RNA, 19 nt, Homo sapiens
  misc_RNA (1)...(19): siRNA sense strand
ggaauucaucagacuccaa

SEQ ID NO: 1722474 - RNA, 19 nt, Homo sapiens
  misc_RNA (1)...(19): siRNA sense strand
acuuagcugucaaggcaua

SEQ ID NO: 1722475 - RNA, 19 nt, Homo sapiens
  misc_RNA (1)...(19): siRNA sense strand
gacaaagcagcacaucugu

SEQ ID NO: 1722476 - RNA, 19 nt, Homo sapiens
  misc_RNA (1)...(19): siRNA sense strand
aagugaaggcccuggauaa

SEQ ID NO: 1722477 - RNA, 19 nt, Homo sapiens
  misc_RNA (1)...(19): siRNA sense strand
aaguaggugucuucaacaa

SEQ ID NO: 1722478 - RNA, 19 nt, Homo sapiens
  misc_RNA (1)...(19): siRNA sense strand
caucgguggagcuuucuuu

SEQ ID NO: 1722479 - RNA, 19 nt, Homo sapiens
  misc_RNA (1)...(19): siRNA sense strand
gguuaaaguaggugucuuc

SEQ ID NO: 1722480 - RNA, 19 nt, Homo sapiens
  misc_RNA (1)...(19): siRNA sense strand
ugucaaggcauauaauucu

SEQ ID NO: 1722481 - RNA, 19 nt, Homo sapiens
  misc_RNA (1)...(19): siRNA sense strand
ccacuucgaaugcauguac

SEQ ID NO: 1722482 - RNA, 19 nt, Homo sapiens
  misc_RNA (1)...(19): siRNA sense strand
uacgaacaguuggaaauca

SEQ ID NO: 1722483 - RNA, 19 nt, Homo sapiens
  misc_RNA (1)...(19): siRNA sense strand
uuccaaagauaucaaaugc

SEQ ID NO: 1722484 - RNA, 19 nt, Homo sapiens
  misc_RNA (1)...(19): siRNA sense strand
agauacguguucaggaaug

SEQ ID NO: 1722485 - RNA, 19 nt, Homo sapiens
  misc_RNA (1)...(19): siRNA sense strand
ccaccagccaguaucuuug

SEQ ID NO: 1722486 - RNA, 19 nt, Homo sapiens
  misc_RNA (1)...(19): siRNA sense strand
uagcugucaaggcauauaa

SEQ ID NO: 1722487 - RNA, 19 nt, Homo sapiens
  misc_RNA (1)...(19): siRNA sense strand
agccaucaguacaauaaug

SEQ ID NO: 1722488 - RNA, 19 nt, Homo sapiens
  misc_RNA (1)...(19): siRNA sense strand
ggcagcagcagugaacaaa

SEQ ID NO: 1722489 - RNA, 19 nt, Homo sapiens
  misc_RNA (1)...(19): siRNA sense strand
ugucagccaucaguacaau

SEQ ID NO: 1722490 - RNA, 19 nt, Homo sapiens
  misc_RNA (1)...(19): siRNA sense strand
gaaguaaaaggauacaaag

SEQ ID NO: 1722491 - RNA, 19 nt, Homo sapiens
  misc_RNA (1)...(19): siRNA sense strand
uuucuuugccuuucgauga

SEQ ID NO: 1722492 - RNA, 19 nt, Homo sapiens
  misc_RNA (1)...(19): siRNA sense strand
gucaaggcauauaauucug

SEQ ID NO: 1722493 - RNA, 19 nt, Homo sapiens
  misc_RNA (1)...(19): siRNA sense strand
gcagcagcagugaacaaau

SEQ ID NO: 1722494 - RNA, 19 nt, Homo sapiens
  misc_RNA (1)...(19): siRNA sense strand
gauggcagcagcagugaac

SEQ ID NO: 1722495 - RNA, 19 nt, Homo sapiens
  misc_RNA (1)...(19): siRNA sense strand
gagauggcagcagcaguga

SEQ ID NO: 1722496 - RNA, 19 nt, Homo sapiens
  misc_RNA (1)...(19): siRNA sense strand
ucucucccuuugagguuaa

SEQ ID NO: 1722497 - RNA, 19 nt, Homo sapiens
  misc_RNA (1)...(19): siRNA sense strand
caugaagacaaagaagaaa

SEQ ID NO: 1722498 - RNA, 19 nt, Homo sapiens
  misc_RNA (1)...(19): siRNA sense strand
gagcuuucuuugccuuucg

SEQ ID NO: 1722499 - RNA, 19 nt, Homo sapiens
  misc_RNA (1)...(19): siRNA sense strand
ucaaugugacaacccgaaa

SEQ ID NO: 1722500 - RNA, 19 nt, Homo sapiens
  misc_RNA (1)...(19): siRNA sense strand
aauacgaacaguuggaaau

SEQ ID NO: 1722501 - RNA, 19 nt, Homo sapiens
  misc_RNA (1)...(19): siRNA sense strand
caaaccaccagccaguauc

SEQ ID NO: 1722502 - RNA, 19 nt, Homo sapiens
  misc_RNA (1)...(19): siRNA sense strand
cagaagaagaacccaccaa

SEQ ID NO: 1722503 - RNA, 19 nt, Homo sapiens
  misc_RNA (1)...(19): siRNA sense strand
cgaauuccaaagauaucaa

SEQ ID NO: 1722504 - RNA, 19 nt, Homo sapiens
  misc_RNA (1)...(19): siRNA sense strand
agaagaacccaccaaacca

SEQ ID NO: 1722505 - RNA, 19 nt, Homo sapiens
  misc_RNA (1)...(19): siRNA sense strand
caguaucuuugccagaagu

SEQ ID NO: 1722506 - RNA, 19 nt, Homo sapiens
  misc_RNA (1)...(19): siRNA sense strand
ggaaacaucauauggaauu

SEQ ID NO: 1722507 - RNA, 19 nt, Homo sapiens
  misc_RNA (1)...(19): siRNA sense strand
gaaaucagacaucaacaaa

SEQ ID NO: 1722508 - RNA, 19 nt, Homo sapiens
  misc_RNA (1)...(19): siRNA sense strand
gauaaugagucggaaguaa

SEQ ID NO: 1722509 - RNA, 19 nt, Homo sapiens
  misc_RNA (1)...(19): siRNA sense strand
ugaaggcccuggauaauga

SEQ ID NO: 1722510 - RNA, 19 nt, Homo sapiens
  misc_RNA (1)...(19): siRNA sense strand
cagcagcagugaacaaauu

SEQ ID NO: 1722511 - RNA, 19 nt, Homo sapiens
  misc_RNA (1)...(19): siRNA sense strand
cagcacaucugucauugaa

SEQ ID NO: 1722512 - RNA, 19 nt, Homo sapiens
  misc_RNA (1)...(19): siRNA sense strand
gacggucccugaggaauua

SEQ ID NO: 1722513 - RNA, 19 nt, Homo sapiens
  misc_RNA (1)...(19): siRNA sense strand
gaauagaggacgaauacaa

SEQ ID NO: 1722514 - RNA, 19 nt, Homo sapiens
  misc_RNA (1)...(19): siRNA sense strand
uaaaguaggugucuucaac

SEQ ID NO: 1722515 - RNA, 19 nt, Homo sapiens
  misc_RNA (1)...(19): siRNA sense strand
gcacaucugucauugaaac

SEQ ID NO: 1722516 - RNA, 19 nt, Homo sapiens
  misc_RNA (1)...(19): siRNA sense strand
gaauugggaucaagugaag

SEQ ID NO: 1722517 - RNA, 19 nt, Homo sapiens
  misc_RNA (1)...(19): siRNA sense strand
gaagaauagaggacgaaua

SEQ ID NO: 1722518 - RNA, 19 nt, Homo sapiens
  misc_RNA (1)...(19): siRNA sense strand
gaggacgaauacaagguua

SEQ ID NO: 1722519 - RNA, 19 nt, Homo sapiens
  misc_RNA (1)...(19): siRNA sense strand
aaacaucgguggagcuuuc

SEQ ID NO: 1722520 - RNA, 19 nt, Homo sapiens
  misc_RNA (1)...(19): siRNA sense strand
cuagauacguguucaggaa

SEQ ID NO: 1722521 - RNA, 19 nt, Homo sapiens
  misc_RNA (1)...(19): siRNA sense strand
ccacagauauugaaguuuu

SEQ ID NO: 1722522 - RNA, 19 nt, Homo sapiens
  misc_RNA (1)...(19): siRNA sense strand
guaggugucuucaacaaca

SEQ ID NO: 1722523 - RNA, 19 nt, Homo sapiens
  misc_RNA (1)...(19): siRNA sense strand
ggaaaucagacaucaacaa

SEQ ID NO: 1722524 - RNA, 19 nt, Homo sapiens
  misc_RNA (1)...(19): siRNA sense strand
ggucgaggcuuugguuaug

SEQ ID NO: 1722525 - RNA, 19 nt, Homo sapiens
  misc_RNA (1)...(19): siRNA sense strand
caaagcagcacaucuguca

SEQ ID NO: 1722526 - RNA, 19 nt, Homo sapiens
  misc_RNA (1)...(19): siRNA sense strand
ccggaaacaucauauggaa

SEQ ID NO: 1722527 - RNA, 19 nt, Homo sapiens
  misc_RNA (1)...(19): siRNA sense strand
gccaguaucuuugccagaa

SEQ ID NO: 1722528 - RNA, 19 nt, Homo sapiens
  misc_RNA (1)...(19): siRNA sense strand
gaauucaucagacuccaaa

SEQ ID NO: 1722529 - RNA, 19 nt, Homo sapiens
  misc_RNA (1)...(19): siRNA sense strand
aauacaagguuaugagguu

SEQ ID NO: 1722530 - RNA, 19 nt, Homo sapiens
  misc_RNA (1)...(19): siRNA sense strand
caucugucauugaaacaaa

SEQ ID NO: 1722531 - RNA, 19 nt, Homo sapiens
  misc_RNA (1)...(19): siRNA sense strand
acagcuagguccaguuuau

SEQ ID NO: 1722532 - RNA, 19 nt, Homo sapiens
  misc_RNA (1)...(19): siRNA sense strand
gaaacaucauauggaauuc

SEQ ID NO: 1722533 - RNA, 19 nt, Homo sapiens
  misc_RNA (1)...(19): siRNA sense strand
acagaauggucgaggcuuu

SEQ ID NO: 1722534 - RNA, 19 nt, Homo sapiens
  misc_RNA (1)...(19): siRNA sense strand
caagugaaggcccuggaua

SEQ ID NO: 1722535 - RNA, 19 nt, Homo sapiens
  misc_RNA (1)...(19): siRNA sense strand
gaaagccaccaccaaguca

SEQ ID NO: 1722536 - RNA, 19 nt, Homo sapiens
  misc_RNA (1)...(19): siRNA sense strand
gaagaagaacccaccaaac

SEQ ID NO: 1722537 - RNA, 19 nt, Homo sapiens
  misc_RNA (1)...(19): siRNA sense strand
ucacagcuagguccaguuu

SEQ ID NO: 1722538 - RNA, 19 nt, Homo sapiens
  misc_RNA (1)...(19): siRNA sense strand
ggagacaugaagacaaaga

SEQ ID NO: 1722539 - RNA, 19 nt, Homo sapiens
  misc_RNA (1)...(19): siRNA sense strand
uuggagacaugaagacaaa

SEQ ID NO: 1722540 - RNA, 19 nt, Homo sapiens
  misc_RNA (1)...(19): siRNA sense strand
auacaagguuaugagguua

SEQ ID NO: 1722541 - RNA, 19 nt, Homo sapiens
  misc_RNA (1)...(19): siRNA sense strand
gccuuucgaugaagauuau

SEQ ID NO: 1722542 - RNA, 19 nt, Homo sapiens
  misc_RNA (1)...(19): siRNA sense strand
gcagugaacaaauucgaau

SEQ ID NO: 1722543 - RNA, 19 nt, Homo sapiens
  misc_RNA (1)...(19): siRNA sense strand
gauacguguucaggaauga

SEQ ID NO: 1722544 - RNA, 19 nt, Homo sapiens
  misc_RNA (1)...(19): siRNA sense strand
ucaucagacuccaaaauua

SEQ ID NO: 1722545 - RNA, 19 nt, Homo sapiens
  misc_RNA (1)...(19): siRNA sense strand
ccugaggaauuacagaaug

SEQ ID NO: 1722546 - RNA, 19 nt, Homo sapiens
  misc_RNA (1)...(19): siRNA sense strand
ugccacagauauugaaguu

SEQ ID NO: 1722547 - RNA, 19 nt, Homo sapiens
  misc_RNA (1)...(19): siRNA sense strand
ucagccaucaguacaauaa

SEQ ID NO: 1722548 - RNA, 19 nt, Homo sapiens
  misc_RNA (1)...(19): siRNA sense strand
gacaugaagacaaagaaga

SEQ ID NO: 1722549 - RNA, 19 nt, Homo sapiens
  misc_RNA (1)...(19): siRNA sense strand
ggacgaauacaagguuaug

SEQ ID NO: 1722550 - RNA, 19 nt, Homo sapiens
  misc_RNA (1)...(19): siRNA sense strand
ggaaguaaaaggauacaaa

SEQ ID NO: 1722551 - RNA, 19 nt, Homo sapiens
  misc_RNA (1)...(19): siRNA sense strand
agacaaagcagcacaucug

SEQ ID NO: 1722552 - RNA, 19 nt, Homo sapiens
  misc_RNA (1)...(19): siRNA sense strand
agaagaagaacccaccaaa

SEQ ID NO: 1722553 - RNA, 19 nt, Homo sapiens
  misc_RNA (1)...(19): siRNA sense strand
guacagauggaacagacaa

SEQ ID NO: 1722554 - RNA, 19 nt, Homo sapiens
  misc_RNA (1)...(19): siRNA sense strand
guuaaauauuggagacaug

SEQ ID NO: 1722555 - RNA, 19 nt, Homo sapiens
  misc_RNA (1)...(19): siRNA sense strand
ggauaaugagucggaagua

SEQ ID NO: 1722556 - RNA, 19 nt, Homo sapiens
  misc_RNA (1)...(19): siRNA sense strand
ccaaaccaccagccaguau

SEQ ID NO: 1722557 - RNA, 19 nt, Homo sapiens
  misc_RNA (1)...(19): siRNA sense strand
gaaugcauguacgcuguca

SEQ ID NO: 1722558 - RNA, 19 nt, Homo sapiens
  misc_RNA (1)...(19): siRNA sense strand
gcugucaaggcauauaauu

SEQ ID NO: 1722559 - RNA, 19 nt, Homo sapiens
  misc_RNA (1)...(19): siRNA sense strand
aagaauagaggacgaauac

SEQ ID NO: 1722560 - RNA, 19 nt, Homo sapiens
  misc_RNA (1)...(19): siRNA sense strand
gccaucaguacaauaauga

SEQ ID NO: 1722561 - RNA, 19 nt, Homo sapiens
  misc_RNA (1)...(19): siRNA sense strand
caucauauggaauucauca

SEQ ID NO: 1722562 - RNA, 19 nt, Homo sapiens
  misc_RNA (1)...(19): siRNA sense strand
guaaaaggauacaaagucu

SEQ ID NO: 1722563 - RNA, 19 nt, Homo sapiens
  misc_RNA (1)...(19): siRNA sense strand
gagacaugaagacaaagaa

SEQ ID NO: 1722564 - RNA, 19 nt, Homo sapiens
  misc_RNA (1)...(19): siRNA sense strand
aauaaugauuucccucaca

SEQ ID NO: 1722565 - RNA, 19 nt, Homo sapiens
  misc_RNA (1)...(19): siRNA sense strand
aagcagcacaucugucauu

SEQ ID NO: 1722566 - RNA, 19 nt, Homo sapiens
  misc_RNA (1)...(19): siRNA sense strand
gagaagaauagaggacgaa

SEQ ID NO: 1722567 - RNA, 19 nt, Homo sapiens
  misc_RNA (1)...(19): siRNA sense strand
gcagcacaucugucauuga

SEQ ID NO: 1722568 - RNA, 19 nt, Homo sapiens
  misc_RNA (1)...(19): siRNA sense strand
auaaugagucggaaguaaa

SEQ ID NO: 1722569 - RNA, 19 nt, Homo sapiens
  misc_RNA (1)...(19): siRNA sense strand
cgaaagccaccaccaaguc

SEQ ID NO: 1722570 - RNA, 19 nt, Homo sapiens
  misc_RNA (1)...(19): siRNA sense strand
acaagguuaugagguuaaa

SEQ ID NO: 1722571 - RNA, 19 nt, Homo sapiens
  misc_RNA (1)...(19): siRNA sense strand
gguuaaauauuggagacau

SEQ ID NO: 1722572 - RNA, 19 nt, Homo sapiens
  misc_RNA (1)...(19): siRNA sense strand
ggagcuuucuuugccuuuc

SEQ ID NO: 1722573 - RNA, 19 nt, Homo sapiens
  misc_RNA (1)...(19): siRNA sense strand
gugaaggcccuggauaaug

SEQ ID NO: 1722574 - RNA, 19 nt, Homo sapiens
  misc_RNA (1)...(19): siRNA sense strand
acaugaagacaaagaagaa

SEQ ID NO: 1722575 - RNA, 19 nt, Homo sapiens
  misc_RNA (1)...(19): siRNA sense strand
ucauauggaauucaucaga

SEQ ID NO: 1722576 - RNA, 19 nt, Homo sapiens
  misc_RNA (1)...(19): siRNA sense strand
ugaauugggaucaagugaa

SEQ ID NO: 1722577 - RNA, 19 nt, Homo sapiens
  misc_RNA (1)...(19): siRNA sense strand
ggaauucaucagacuccaa

SEQ ID NO: 1722578 - RNA, 19 nt, Homo sapiens
  misc_RNA (1)...(19): siRNA sense strand
acuuagcugucaaggcaua

SEQ ID NO: 1722579 - RNA, 19 nt, Homo sapiens
  misc_RNA (1)...(19): siRNA sense strand
gacaaagcagcacaucugu

SEQ ID NO: 1722580 - RNA, 19 nt, Homo sapiens
  misc_RNA (1)...(19): siRNA sense strand
aaguaggugucuucaacaa

SEQ ID NO: 1722581 - RNA, 19 nt, Homo sapiens
  misc_RNA (1)...(19): siRNA sense strand
aagugaaggcccuggauaa

SEQ ID NO: 1722582 - RNA, 19 nt, Homo sapiens
  misc_RNA (1)...(19): siRNA sense strand
gguuaaaguaggugucuuc

SEQ ID NO: 1722583 - RNA, 19 nt, Homo sapiens
  misc_RNA (1)...(19): siRNA sense strand
caucgguggagcuuucuuu

SEQ ID NO: 1722584 - RNA, 19 nt, Homo sapiens
  misc_RNA (1)...(19): siRNA sense strand
ugucaaggcauauaauucu

SEQ ID NO: 1722585 - RNA, 19 nt, Homo sapiens
  misc_RNA (1)...(19): siRNA sense strand
ccacuucgaaugcauguac

SEQ ID NO: 1722586 - RNA, 19 nt, Homo sapiens
  misc_RNA (1)...(19): siRNA sense strand
agauacguguucaggaaug

SEQ ID NO: 1722587 - RNA, 19 nt, Homo sapiens
  misc_RNA (1)...(19): siRNA sense strand
uuccaaagauaucaaaugc

SEQ ID NO: 1722588 - RNA, 19 nt, Homo sapiens
  misc_RNA (1)...(19): siRNA sense strand
agacggucccugaggaauu

SEQ ID NO: 1722589 - RNA, 19 nt, Homo sapiens
  misc_RNA (1)...(19): siRNA sense strand
ccaccagccaguaucuuug

SEQ ID NO: 1722590 - RNA, 19 nt, Homo sapiens
  misc_RNA (1)...(19): siRNA sense strand
uacgaacaguuggaaauca

SEQ ID NO: 1722591 - RNA, 19 nt, Homo sapiens
  misc_RNA (1)...(19): siRNA sense strand
uagcugucaaggcauauaa

SEQ ID NO: 1722592 - RNA, 19 nt, Homo sapiens
  misc_RNA (1)...(19): siRNA sense strand
agccaucaguacaauaaug

SEQ ID NO: 1722593 - RNA, 19 nt, Homo sapiens
  misc_RNA (1)...(19): siRNA sense strand
ggcagcagcagugaacaaa

SEQ ID NO: 1722594 - RNA, 19 nt, Homo sapiens
  misc_RNA (1)...(19): siRNA sense strand
ugucagccaucaguacaau

SEQ ID NO: 1722595 - RNA, 19 nt, Homo sapiens
  misc_RNA (1)...(19): siRNA sense strand
gaaguaaaaggauacaaag

SEQ ID NO: 1722596 - RNA, 19 nt, Homo sapiens
  misc_RNA (1)...(19): siRNA sense strand
uuucuuugccuuucgauga

SEQ ID NO: 1722597 - RNA, 19 nt, Homo sapiens
  misc_RNA (1)...(19): siRNA sense strand
ucucucccuuugagguuaa

SEQ ID NO: 1722598 - RNA, 19 nt, Homo sapiens
  misc_RNA (1)...(19): siRNA sense strand
gcagcagcagugaacaaau

SEQ ID NO: 1722599 - RNA, 19 nt, Homo sapiens
  misc_RNA (1)...(19): siRNA sense strand
gauggcagcagcagugaac

SEQ ID NO: 1722600 - RNA, 19 nt, Homo sapiens
  misc_RNA (1)...(19): siRNA sense strand
gagauggcagcagcaguga

SEQ ID NO: 1722601 - RNA, 19 nt, Homo sapiens
  misc_RNA (1)...(19): siRNA sense strand
gucaaggcauauaauucug

SEQ ID NO: 1722602 - RNA, 19 nt, Homo sapiens
  misc_RNA (1)...(19): siRNA sense strand
caugaagacaaagaagaaa

SEQ ID NO: 1722603 - RNA, 19 nt, Homo sapiens
  misc_RNA (1)...(19): siRNA sense strand
gagcuuucuuugccuuucg

SEQ ID NO: 1722604 - RNA, 19 nt, Homo sapiens
  misc_RNA (1)...(19): siRNA sense strand
ucaaugugacaacccgaaa

SEQ ID NO: 1722605 - RNA, 19 nt, Homo sapiens
  misc_RNA (1)...(19): siRNA sense strand
aauacgaacaguuggaaau

SEQ ID NO: 1722606 - RNA, 19 nt, Homo sapiens
  misc_RNA (1)...(19): siRNA sense strand
ggaaaccuguccuguauaa

SEQ ID NO: 1722607 - RNA, 19 nt, Homo sapiens
  misc_RNA (1)...(19): siRNA sense strand
gggauucgcugcuuucuuu

SEQ ID NO: 1722608 - RNA, 19 nt, Homo sapiens
  misc_RNA (1)...(19): siRNA sense strand
ggaagacaaugaucccuuu

SEQ ID NO: 1722609 - RNA, 19 nt, Homo sapiens
  misc_RNA (1)...(19): siRNA sense strand
cggaagagcugaccuuuga

SEQ ID NO: 1722610 - RNA, 19 nt, Homo sapiens
  misc_RNA (1)...(19): siRNA sense strand
gaaggaaagaguaaagaua

SEQ ID NO: 1722611 - RNA, 19 nt, Homo sapiens
  misc_RNA (1)...(19): siRNA sense strand
gaaacuccguuccuacaaa

SEQ ID NO: 1722612 - RNA, 19 nt, Homo sapiens
  misc_RNA (1)...(19): siRNA sense strand
ggacacaucugguauucga

SEQ ID NO: 1722613 - RNA, 19 nt, Homo sapiens
  misc_RNA (1)...(19): siRNA sense strand
gaugagaccuacuuuggaa

SEQ ID NO: 1722614 - RNA, 19 nt, Homo sapiens
  misc_RNA (1)...(19): siRNA sense strand
gagauugcguccucgauaa

SEQ ID NO: 1722615 - RNA, 19 nt, Homo sapiens
  misc_RNA (1)...(19): siRNA sense strand
ugaagaaucugucggagaa

SEQ ID NO: 1722616 - RNA, 19 nt, Homo sapiens
  misc_RNA (1)...(19): siRNA sense strand
caucagaaaugaaagagaa

SEQ ID NO: 1722617 - RNA, 19 nt, Homo sapiens
  misc_RNA (1)...(19): siRNA sense strand
ggacgcaccuuccgugaug

SEQ ID NO: 1722618 - RNA, 19 nt, Homo sapiens
  misc_RNA (1)...(19): siRNA sense strand
ggaaagcucuugcccucuu

SEQ ID NO: 1722619 - RNA, 19 nt, Homo sapiens
  misc_RNA (1)...(19): siRNA sense strand
ucagagaaauccuggcaua

SEQ ID NO: 1722620 - RNA, 19 nt, Homo sapiens
  misc_RNA (1)...(19): siRNA sense strand
gguggaagaugucauuuau

SEQ ID NO: 1722621 - RNA, 19 nt, Homo sapiens
  misc_RNA (1)...(19): siRNA sense strand
cggcagagcucaucuacuu

SEQ ID NO: 1722622 - RNA, 19 nt, Homo sapiens
  misc_RNA (1)...(19): siRNA sense strand
ggacaggaccuauugauca

SEQ ID NO: 1722623 - RNA, 19 nt, Homo sapiens
  misc_RNA (1)...(19): siRNA sense strand
gagaaauccuggcauacuu

SEQ ID NO: 1722624 - RNA, 19 nt, Homo sapiens
  misc_RNA (1)...(19): siRNA sense strand
gagaaggggucuacuauuu

SEQ ID NO: 1722625 - RNA, 19 nt, Homo sapiens
  misc_RNA (1)...(19): siRNA sense strand
ggagagccauuugggauuu

SEQ ID NO: 1722626 - RNA, 19 nt, Homo sapiens
  misc_RNA (1)...(19): siRNA sense strand
ggacagagaaacccagaaa

SEQ ID NO: 1722627 - RNA, 19 nt, Homo sapiens
  misc_RNA (1)...(19): siRNA sense strand
ccaaggaugugucaagaau

SEQ ID NO: 1722628 - RNA, 19 nt, Homo sapiens
  misc_RNA (1)...(19): siRNA sense strand
gaccagagcuguguuugug

SEQ ID NO: 1722629 - RNA, 19 nt, Homo sapiens
  misc_RNA (1)...(19): siRNA sense strand
ggaccaacgucaaggguau

SEQ ID NO: 1722630 - RNA, 19 nt, Homo sapiens
  misc_RNA (1)...(19): siRNA sense strand
gcaaccaccucacuuucuu

SEQ ID NO: 1722631 - RNA, 19 nt, Homo sapiens
  misc_RNA (1)...(19): siRNA sense strand
gaacaggagugacuuacac

SEQ ID NO: 1722632 - RNA, 19 nt, Homo sapiens
  misc_RNA (1)...(19): siRNA sense strand
gaaagcauuugcccucauc

SEQ ID NO: 1722633 - RNA, 19 nt, Homo sapiens
  misc_RNA (1)...(19): siRNA sense strand
ggauuggacucacguggaa

SEQ ID NO: 1722634 - RNA, 19 nt, Homo sapiens
  misc_RNA (1)...(19): siRNA sense strand
gaucaugaguuucccaaag

SEQ ID NO: 1722635 - RNA, 19 nt, Homo sapiens
  misc_RNA (1)...(19): siRNA sense strand
gaugaaugcugaaggaaag

SEQ ID NO: 1722636 - RNA, 19 nt, Homo sapiens
  misc_RNA (1)...(19): siRNA sense strand
aaccuguccuguauaauua

SEQ ID NO: 1722637 - RNA, 19 nt, Homo sapiens
  misc_RNA (1)...(19): siRNA sense strand
ggcaucagcuucagugaga

SEQ ID NO: 1722638 - RNA, 19 nt, Homo sapiens
  misc_RNA (1)...(19): siRNA sense strand
ggauucagguggagcuuga

SEQ ID NO: 1722639 - RNA, 19 nt, Homo sapiens
  misc_RNA (1)...(19): siRNA sense strand
ggagauugcguccucgaua

SEQ ID NO: 1722640 - RNA, 19 nt, Homo sapiens
  misc_RNA (1)...(19): siRNA sense strand
cauccaaccugguccauau

SEQ ID NO: 1722641 - RNA, 19 nt, Homo sapiens
  misc_RNA (1)...(19): siRNA sense strand
ucacagugcuggaagacaa

SEQ ID NO: 1722642 - RNA, 19 nt, Homo sapiens
  misc_RNA (1)...(19): siRNA sense strand
ccacggagcaggacagaaa

SEQ ID NO: 1722643 - RNA, 19 nt, Homo sapiens
  misc_RNA (1)...(19): siRNA sense strand
gccaagagcuggagaacag

SEQ ID NO: 1722644 - RNA, 19 nt, Homo sapiens
  misc_RNA (1)...(19): siRNA sense strand
gaaggcagcuuuugcucua

SEQ ID NO: 1722645 - RNA, 19 nt, Homo sapiens
  misc_RNA (1)...(19): siRNA sense strand
gcauagacgucagacagaa

SEQ ID NO: 1722646 - RNA, 19 nt, Homo sapiens
  misc_RNA (1)...(19): siRNA sense strand
gccaggagcuacagucaug

SEQ ID NO: 1722647 - RNA, 19 nt, Homo sapiens
  misc_RNA (1)...(19): siRNA sense strand
gcccuuggcuacaucauug

SEQ ID NO: 1722648 - RNA, 19 nt, Homo sapiens
  misc_RNA (1)...(19): siRNA sense strand
ugaagagaguggacgauga

SEQ ID NO: 1722649 - RNA, 19 nt, Homo sapiens
  misc_RNA (1)...(19): siRNA sense strand
cagagaugcuugcuaugaa

SEQ ID NO: 1722650 - RNA, 19 nt, Homo sapiens
  misc_RNA (1)...(19): siRNA sense strand
ggagaggucauccgaauca

SEQ ID NO: 1722651 - RNA, 19 nt, Homo sapiens
  misc_RNA (1)...(19): siRNA sense strand
gacagggaaugguggauug

SEQ ID NO: 1722652 - RNA, 19 nt, Homo sapiens
  misc_RNA (1)...(19): siRNA sense strand
acaccacccucgugaguaa

SEQ ID NO: 1722653 - RNA, 19 nt, Homo sapiens
  misc_RNA (1)...(19): siRNA sense strand
gaccaaggaugugucaaga

SEQ ID NO: 1722654 - RNA, 19 nt, Homo sapiens
  misc_RNA (1)...(19): siRNA sense strand
ggaaggacgcucaggauca

SEQ ID NO: 1722655 - RNA, 19 nt, Homo sapiens
  misc_RNA (1)...(19): siRNA sense strand
aaacucaccucguaccaau

SEQ ID NO: 1722656 - RNA, 19 nt, Homo sapiens
  misc_RNA (1)...(19): siRNA sense strand
gaccaguccugaagcuuug

SEQ ID NO: 1722657 - RNA, 19 nt, Homo sapiens
  misc_RNA (1)...(19): siRNA sense strand
gcgccuggcuguucugaga

SEQ ID NO: 1722658 - RNA, 19 nt, Homo sapiens
  misc_RNA (1)...(19): siRNA sense strand
aaaccuguccuguauaauu

SEQ ID NO: 1722659 - RNA, 19 nt, Homo sapiens
  misc_RNA (1)...(19): siRNA sense strand
uuaccaugcuccuggcuua

SEQ ID NO: 1722660 - RNA, 19 nt, Homo sapiens
  misc_RNA (1)...(19): siRNA sense strand
caucauugccuuccuggua

SEQ ID NO: 1722661 - RNA, 19 nt, Homo sapiens
  misc_RNA (1)...(19): siRNA sense strand
gcaagcgcaugaguaaaga

SEQ ID NO: 1722662 - RNA, 19 nt, Homo sapiens
  misc_RNA (1)...(19): siRNA sense strand
gaaagagaaaucacagugu

SEQ ID NO: 1722663 - RNA, 19 nt, Homo sapiens
  misc_RNA (1)...(19): siRNA sense strand
cuucagagaugcuugcuau

SEQ ID NO: 1722664 - RNA, 19 nt, Homo sapiens
  misc_RNA (1)...(19): siRNA sense strand
uagauuugcugcugaugaa

SEQ ID NO: 1722665 - RNA, 19 nt, Homo sapiens
  misc_RNA (1)...(19): siRNA sense strand
ggucaacucauaccuguga

SEQ ID NO: 1722666 - RNA, 19 nt, Homo sapiens
  misc_RNA (1)...(19): siRNA sense strand
gaaagcucuugcccucuug

SEQ ID NO: 1722667 - RNA, 19 nt, Homo sapiens
  misc_RNA (1)...(19): siRNA sense strand
gaaggggucuacuauuuga

SEQ ID NO: 1722668 - RNA, 19 nt, Homo sapiens
  misc_RNA (1)...(19): siRNA sense strand
gcauuaagucuaagagaga

SEQ ID NO: 1722669 - RNA, 19 nt, Homo sapiens
  misc_RNA (1)...(19): siRNA sense strand
aagaaucugucggagaaua

SEQ ID NO: 1722670 - RNA, 19 nt, Homo sapiens
  misc_RNA (1)...(19): siRNA sense strand
ccagacugcugagcucuuu

SEQ ID NO: 1722671 - RNA, 19 nt, Homo sapiens
  misc_RNA (1)...(19): siRNA sense strand
gcacguuccuggugauguc

SEQ ID NO: 1722672 - RNA, 19 nt, Homo sapiens
  misc_RNA (1)...(19): siRNA sense strand
gacauugcacucacgcuua

SEQ ID NO: 1722673 - RNA, 19 nt, Homo sapiens
  misc_RNA (1)...(19): siRNA sense strand
gcagaacacuggaaaaugg

SEQ ID NO: 1722674 - RNA, 19 nt, Homo sapiens
  misc_RNA (1)...(19): siRNA sense strand
cugaagacauggcagacua

SEQ ID NO: 1722675 - RNA, 19 nt, Homo sapiens
  misc_RNA (1)...(19): siRNA sense strand
gaggaacaggagugacuua

SEQ ID NO: 1722676 - RNA, 19 nt, Homo sapiens
  misc_RNA (1)...(19): siRNA sense strand
gggcgacauuucaggcuuu

SEQ ID NO: 1722677 - RNA, 19 nt, Homo sapiens
  misc_RNA (1)...(19): siRNA sense strand
caaggaacagaaagcauuu

SEQ ID NO: 1722678 - RNA, 19 nt, Homo sapiens
  misc_RNA (1)...(19): siRNA sense strand
ucaaggaacagaaagcauu

SEQ ID NO: 1722679 - RNA, 19 nt, Homo sapiens
  misc_RNA (1)...(19): siRNA sense strand
gccgggugcuggucuauga

SEQ ID NO: 1722680 - RNA, 19 nt, Homo sapiens
  misc_RNA (1)...(19): siRNA sense strand
gccaggagcccguggauau

SEQ ID NO: 1722681 - RNA, 19 nt, Homo sapiens
  misc_RNA (1)...(19): siRNA sense strand
guacacaaacagaauacaa

SEQ ID NO: 1722682 - RNA, 19 nt, Homo sapiens
  misc_RNA (1)...(19): siRNA sense strand
gagaggagaacaaugacuu

SEQ ID NO: 1722683 - RNA, 19 nt, Homo sapiens
  misc_RNA (1)...(19): siRNA sense strand
ggaguuacgcuuccaaugg

SEQ ID NO: 1722684 - RNA, 19 nt, Homo sapiens
  misc_RNA (1)...(19): siRNA sense strand
ggaugaaugcugaaggaaa

SEQ ID NO: 1722685 - RNA, 19 nt, Homo sapiens
  misc_RNA (1)...(19): siRNA sense strand
gaacuuggcacggaaugga

SEQ ID NO: 1722686 - RNA, 19 nt, Homo sapiens
  misc_RNA (1)...(19): siRNA sense strand
ccucuacaaucuccagaaa

SEQ ID NO: 1722687 - RNA, 19 nt, Homo sapiens
  misc_RNA (1)...(19): siRNA sense strand
cagugagaguuucaucuuu

SEQ ID NO: 1722688 - RNA, 19 nt, Homo sapiens
  misc_RNA (1)...(19): siRNA sense strand
aaagagagaggacccugua

SEQ ID NO: 1722689 - RNA, 19 nt, Homo sapiens
  misc_RNA (1)...(19): siRNA sense strand
gaaggacgcucaggaucag

SEQ ID NO: 1722690 - RNA, 19 nt, Homo sapiens
  misc_RNA (1)...(19): siRNA sense strand
gcaccguucugacgagcuu

SEQ ID NO: 1722691 - RNA, 19 nt, Homo sapiens
  misc_RNA (1)...(19): siRNA sense strand
gaggacaccuaugugauca

SEQ ID NO: 1722692 - RNA, 19 nt, Homo sapiens
  misc_RNA (1)...(19): siRNA sense strand
gaaaucgggaacaucacua

SEQ ID NO: 1722693 - RNA, 19 nt, Homo sapiens
  misc_RNA (1)...(19): siRNA sense strand
gggaagcccugcagcugau

SEQ ID NO: 1722694 - RNA, 19 nt, Homo sapiens
  misc_RNA (1)...(19): siRNA sense strand
caagugaggguccaggaaa

SEQ ID NO: 1722695 - RNA, 19 nt, Homo sapiens
  misc_RNA (1)...(19): siRNA sense strand
gagagaggacccuguaaca

SEQ ID NO: 1722696 - RNA, 19 nt, Homo sapiens
  misc_RNA (1)...(19): siRNA sense strand
ggcaggaggugaugauugg

SEQ ID NO: 1722697 - RNA, 19 nt, Homo sapiens
  misc_RNA (1)...(19): siRNA sense strand
ggacuuggguaaaauugaa

SEQ ID NO: 1722698 - RNA, 19 nt, Homo sapiens
  misc_RNA (1)...(19): siRNA sense strand
ucuaugaccuggugaugga

SEQ ID NO: 1722699 - RNA, 19 nt, Homo sapiens
  misc_RNA (1)...(19): siRNA sense strand
gcagccagauugccacagu

SEQ ID NO: 1722700 - RNA, 19 nt, Homo sapiens
  misc_RNA (1)...(19): siRNA sense strand
cagcuuggcucuacagcau

SEQ ID NO: 1722701 - RNA, 19 nt, Homo sapiens
  misc_RNA (1)...(19): siRNA sense strand
gaguuacgcuuccaauggu

SEQ ID NO: 1722702 - RNA, 19 nt, Homo sapiens
  misc_RNA (1)...(19): siRNA sense strand
ucuacaaucuccagaaaca

SEQ ID NO: 1722703 - RNA, 19 nt, Homo sapiens
  misc_RNA (1)...(19): siRNA sense strand
agagaaacccagaaacuga

SEQ ID NO: 1722704 - RNA, 19 nt, Homo sapiens
  misc_RNA (1)...(19): siRNA sense strand
gcaaugugacccaccaguu

SEQ ID NO: 1722705 - RNA, 19 nt, Homo sapiens
  misc_RNA (1)...(19): siRNA sense strand
gugagaguuucaucuuuga

SEQ ID NO: 1722706 - RNA, 19 nt, Homo sapiens
  misc_RNA (1)...(19): siRNA sense strand
ggaaaccuguccuguauaa

SEQ ID NO: 1722707 - RNA, 19 nt, Homo sapiens
  misc_RNA (1)...(19): siRNA sense strand
gggauucgcugcuuucuuu

SEQ ID NO: 1722708 - RNA, 19 nt, Homo sapiens
  misc_RNA (1)...(19): siRNA sense strand
ggaagacaaugaucccuuu

SEQ ID NO: 1722709 - RNA, 19 nt, Homo sapiens
  misc_RNA (1)...(19): siRNA sense strand
cggaagagcugaccuuuga

SEQ ID NO: 1722710 - RNA, 19 nt, Homo sapiens
  misc_RNA (1)...(19): siRNA sense strand
gaaggaaagaguaaagaua

SEQ ID NO: 1722711 - RNA, 19 nt, Homo sapiens
  misc_RNA (1)...(19): siRNA sense strand
ggacacaucugguauucga

SEQ ID NO: 1722712 - RNA, 19 nt, Homo sapiens
  misc_RNA (1)...(19): siRNA sense strand
gaugagaccuacuuuggaa

SEQ ID NO: 1722713 - RNA, 19 nt, Homo sapiens
  misc_RNA (1)...(19): siRNA sense strand
gagauugcguccucgauaa

SEQ ID NO: 1722714 - RNA, 19 nt, Homo sapiens
  misc_RNA (1)...(19): siRNA sense strand
ugaagaaucugucggagaa

SEQ ID NO: 1722715 - RNA, 19 nt, Homo sapiens
  misc_RNA (1)...(19): siRNA sense strand
caucagaaaugaaagagaa

SEQ ID NO: 1722716 - RNA, 19 nt, Homo sapiens
  misc_RNA (1)...(19): siRNA sense strand
ggacgcaccuuccgugaug

SEQ ID NO: 1722717 - RNA, 19 nt, Homo sapiens
  misc_RNA (1)...(19): siRNA sense strand
gguggaagaugucauuuau

SEQ ID NO: 1722718 - RNA, 19 nt, Homo sapiens
  misc_RNA (1)...(19): siRNA sense strand
ggacaggaccuauugauca

SEQ ID NO: 1722719 - RNA, 19 nt, Homo sapiens
  misc_RNA (1)...(19): siRNA sense strand
gagaaggggucuacuauuu

SEQ ID NO: 1722720 - RNA, 19 nt, Homo sapiens
  misc_RNA (1)...(19): siRNA sense strand
ggagagccauuugggauuu

SEQ ID NO: 1722721 - RNA, 19 nt, Homo sapiens
  misc_RNA (1)...(19): siRNA sense strand
ggacagagaaacccagaaa

SEQ ID NO: 1722722 - RNA, 19 nt, Homo sapiens
  misc_RNA (1)...(19): siRNA sense strand
ccaaggaugugucaagaau

SEQ ID NO: 1722723 - RNA, 19 nt, Homo sapiens
  misc_RNA (1)...(19): siRNA sense strand
gcaaccaccucacuuucuu

SEQ ID NO: 1722724 - RNA, 19 nt, Homo sapiens
  misc_RNA (1)...(19): siRNA sense strand
gaacaggagugacuuacac

SEQ ID NO: 1722725 - RNA, 19 nt, Homo sapiens
  misc_RNA (1)...(19): siRNA sense strand
ggauuggacucacguggaa

SEQ ID NO: 1722726 - RNA, 19 nt, Homo sapiens
  misc_RNA (1)...(19): siRNA sense strand
gaucaugaguuucccaaag

SEQ ID NO: 1722727 - RNA, 19 nt, Homo sapiens
  misc_RNA (1)...(19): siRNA sense strand
gaugaaugcugaaggaaag

SEQ ID NO: 1722728 - RNA, 19 nt, Homo sapiens
  misc_RNA (1)...(19): siRNA sense strand
aaccuguccuguauaauua

SEQ ID NO: 1722729 - RNA, 19 nt, Homo sapiens
  misc_RNA (1)...(19): siRNA sense strand
ggauucagguggagcuuga

SEQ ID NO: 1722730 - RNA, 19 nt, Homo sapiens
  misc_RNA (1)...(19): siRNA sense strand
ggagauugcguccucgaua

SEQ ID NO: 1722731 - RNA, 19 nt, Homo sapiens
  misc_RNA (1)...(19): siRNA sense strand
cauccaaccugguccauau

SEQ ID NO: 1722732 - RNA, 19 nt, Homo sapiens
  misc_RNA (1)...(19): siRNA sense strand
ucacagugcuggaagacaa

SEQ ID NO: 1722733 - RNA, 19 nt, Homo sapiens
  misc_RNA (1)...(19): siRNA sense strand
ccacggagcaggacagaaa

SEQ ID NO: 1722734 - RNA, 19 nt, Homo sapiens
  misc_RNA (1)...(19): siRNA sense strand
gaaggcagcuuuugcucua

SEQ ID NO: 1722735 - RNA, 19 nt, Homo sapiens
  misc_RNA (1)...(19): siRNA sense strand
gcauagacgucagacagaa

SEQ ID NO: 1722736 - RNA, 19 nt, Homo sapiens
  misc_RNA (1)...(19): siRNA sense strand
gccaagagcuggagaacag

SEQ ID NO: 1722737 - RNA, 19 nt, Homo sapiens
  misc_RNA (1)...(19): siRNA sense strand
cagagaugcuugcuaugaa

SEQ ID NO: 1722738 - RNA, 19 nt, Homo sapiens
  misc_RNA (1)...(19): siRNA sense strand
gccaggagcuacagucaug

SEQ ID NO: 1722739 - RNA, 19 nt, Homo sapiens
  misc_RNA (1)...(19): siRNA sense strand
ggagaggucauccgaauca

SEQ ID NO: 1722740 - RNA, 19 nt, Homo sapiens
  misc_RNA (1)...(19): siRNA sense strand
gacagggaaugguggauug

SEQ ID NO: 1722741 - RNA, 19 nt, Homo sapiens
  misc_RNA (1)...(19): siRNA sense strand
gaccaaggaugugucaaga

SEQ ID NO: 1722742 - RNA, 19 nt, Homo sapiens
  misc_RNA (1)...(19): siRNA sense strand
ggaaggacgcucaggauca

SEQ ID NO: 1722743 - RNA, 19 nt, Homo sapiens
  misc_RNA (1)...(19): siRNA sense strand
aaacucaccucguaccaau

SEQ ID NO: 1722744 - RNA, 19 nt, Homo sapiens
  misc_RNA (1)...(19): siRNA sense strand
gaccaguccugaagcuuug

SEQ ID NO: 1722745 - RNA, 19 nt, Homo sapiens
  misc_RNA (1)...(19): siRNA sense strand
gcgccuggcuguucugaga

SEQ ID NO: 1722746 - RNA, 19 nt, Homo sapiens
  misc_RNA (1)...(19): siRNA sense strand
aaaccuguccuguauaauu

SEQ ID NO: 1722747 - RNA, 19 nt, Homo sapiens
  misc_RNA (1)...(19): siRNA sense strand
gaaagagaaaucacagugu

SEQ ID NO: 1722748 - RNA, 19 nt, Homo sapiens
  misc_RNA (1)...(19): siRNA sense strand
cuucagagaugcuugcuau

SEQ ID NO: 1722749 - RNA, 19 nt, Homo sapiens
  misc_RNA (1)...(19): siRNA sense strand
ggucaacucauaccuguga

SEQ ID NO: 1722750 - RNA, 19 nt, Homo sapiens
  misc_RNA (1)...(19): siRNA sense strand
gaaggggucuacuauuuga

SEQ ID NO: 1722751 - RNA, 19 nt, Homo sapiens
  misc_RNA (1)...(19): siRNA sense strand
aagaaucugucggagaaua

SEQ ID NO: 1722752 - RNA, 19 nt, Homo sapiens
  misc_RNA (1)...(19): siRNA sense strand
ccagacugcugagcucuuu

SEQ ID NO: 1722753 - RNA, 19 nt, Homo sapiens
  misc_RNA (1)...(19): siRNA sense strand
gcacguuccuggugauguc

SEQ ID NO: 1722754 - RNA, 19 nt, Homo sapiens
  misc_RNA (1)...(19): siRNA sense strand
gacauugcacucacgcuua

SEQ ID NO: 1722755 - RNA, 19 nt, Homo sapiens
  misc_RNA (1)...(19): siRNA sense strand
gcagaacacuggaaaaugg

SEQ ID NO: 1722756 - RNA, 19 nt, Homo sapiens
  misc_RNA (1)...(19): siRNA sense strand
gaacuuggcacggaaugga

SEQ ID NO: 1722757 - RNA, 19 nt, Homo sapiens
  misc_RNA (1)...(19): siRNA sense strand
gccgggugcuggucuauga

SEQ ID NO: 1722758 - RNA, 19 nt, Homo sapiens
  misc_RNA (1)...(19): siRNA sense strand
gccaggagcccguggauau

SEQ ID NO: 1722759 - RNA, 19 nt, Homo sapiens
  misc_RNA (1)...(19): siRNA sense strand
guacacaaacagaauacaa

SEQ ID NO: 1722760 - RNA, 19 nt, Homo sapiens
  misc_RNA (1)...(19): siRNA sense strand
gagaggagaacaaugacuu

SEQ ID NO: 1722761 - RNA, 19 nt, Homo sapiens
  misc_RNA (1)...(19): siRNA sense strand
ggaguuacgcuuccaaugg

SEQ ID NO: 1722762 - RNA, 19 nt, Homo sapiens
  misc_RNA (1)...(19): siRNA sense strand
ggaugaaugcugaaggaaa

SEQ ID NO: 1722763 - RNA, 19 nt, Homo sapiens
  misc_RNA (1)...(19): siRNA sense strand
ccucuacaaucuccagaaa

SEQ ID NO: 1722764 - RNA, 19 nt, Homo sapiens
  misc_RNA (1)...(19): siRNA sense strand
gaggaacaggagugacuua

SEQ ID NO: 1722765 - RNA, 19 nt, Homo sapiens
  misc_RNA (1)...(19): siRNA sense strand
cagugagaguuucaucuuu

SEQ ID NO: 1722766 - RNA, 19 nt, Homo sapiens
  misc_RNA (1)...(19): siRNA sense strand
aaagagagaggacccugua

SEQ ID NO: 1722767 - RNA, 19 nt, Homo sapiens
  misc_RNA (1)...(19): siRNA sense strand
gaaggacgcucaggaucag

SEQ ID NO: 1722768 - RNA, 19 nt, Homo sapiens
  misc_RNA (1)...(19): siRNA sense strand
gcaccguucugacgagcuu

SEQ ID NO: 1722769 - RNA, 19 nt, Homo sapiens
  misc_RNA (1)...(19): siRNA sense strand
gaggacaccuaugugauca

SEQ ID NO: 1722770 - RNA, 19 nt, Homo sapiens
  misc_RNA (1)...(19): siRNA sense strand
gaaaucgggaacaucacua

SEQ ID NO: 1722771 - RNA, 19 nt, Homo sapiens
  misc_RNA (1)...(19): siRNA sense strand
gggaagcccugcagcugau

SEQ ID NO: 1722772 - RNA, 19 nt, Homo sapiens
  misc_RNA (1)...(19): siRNA sense strand
gagagaggacccuguaaca

SEQ ID NO: 1722773 - RNA, 19 nt, Homo sapiens
  misc_RNA (1)...(19): siRNA sense strand
ggcaggaggugaugauugg

SEQ ID NO: 1722774 - RNA, 19 nt, Homo sapiens
  misc_RNA (1)...(19): siRNA sense strand
ggacuuggguaaaauugaa

SEQ ID NO: 1722775 - RNA, 19 nt, Homo sapiens
  misc_RNA (1)...(19): siRNA sense strand
ucuaugaccuggugaugga

SEQ ID NO: 1722776 - RNA, 19 nt, Homo sapiens
  misc_RNA (1)...(19): siRNA sense strand
gcagccagauugccacagu

SEQ ID NO: 1722777 - RNA, 19 nt, Homo sapiens
  misc_RNA (1)...(19): siRNA sense strand
cagcuuggcucuacagcau

SEQ ID NO: 1722778 - RNA, 19 nt, Homo sapiens
  misc_RNA (1)...(19): siRNA sense strand
gaguuacgcuuccaauggu

SEQ ID NO: 1722779 - RNA, 19 nt, Homo sapiens
  misc_RNA (1)...(19): siRNA sense strand
ucuacaaucuccagaaaca

SEQ ID NO: 1722780 - RNA, 19 nt, Homo sapiens
  misc_RNA (1)...(19): siRNA sense strand
agagaaacccagaaacuga

SEQ ID NO: 1722781 - RNA, 19 nt, Homo sapiens
  misc_RNA (1)...(19): siRNA sense strand
gcaaugugacccaccaguu

SEQ ID NO: 1722782 - RNA, 19 nt, Homo sapiens
  misc_RNA (1)...(19): siRNA sense strand
gugagaguuucaucuuuga

SEQ ID NO: 1722783 - RNA, 19 nt, Homo sapiens
  misc_RNA (1)...(19): siRNA sense strand
ggaggacaccuaugugauc

SEQ ID NO: 1722784 - RNA, 19 nt, Homo sapiens
  misc_RNA (1)...(19): siRNA sense strand
gaaccaagagcaugaaagc

SEQ ID NO: 1722785 - RNA, 19 nt, Homo sapiens
  misc_RNA (1)...(19): siRNA sense strand
gcagaugagaccuacuuug

SEQ ID NO: 1722786 - RNA, 19 nt, Homo sapiens
  misc_RNA (1)...(19): siRNA sense strand
ggcagugucuguaccuuca

SEQ ID NO: 1722787 - RNA, 19 nt, Homo sapiens
  misc_RNA (1)...(19): siRNA sense strand
ggacagggaaugguggauu

SEQ ID NO: 1722788 - RNA, 19 nt, Homo sapiens
  misc_RNA (1)...(19): siRNA sense strand
ucagagaugcuugcuauga

SEQ ID NO: 1722789 - RNA, 19 nt, Homo sapiens
  misc_RNA (1)...(19): siRNA sense strand
cagguggccuucagagaug

SEQ ID NO: 1722790 - RNA, 19 nt, Homo sapiens
  misc_RNA (1)...(19): siRNA sense strand
aaacauuacaguccacuug

SEQ ID NO: 1722791 - RNA, 19 nt, Homo sapiens
  misc_RNA (1)...(19): siRNA sense strand
caaccugaguuuggaaauc

SEQ ID NO: 1722792 - RNA, 19 nt, Homo sapiens
  misc_RNA (1)...(19): siRNA sense strand
cgucagcucccucuucaaa

SEQ ID NO: 1722793 - RNA, 19 nt, Homo sapiens
  misc_RNA (1)...(19): siRNA sense strand
gaaccugaccaguccugaa

SEQ ID NO: 1722794 - RNA, 19 nt, Homo sapiens
  misc_RNA (1)...(19): siRNA sense strand
acucauaccugugaagaau

SEQ ID NO: 1722795 - RNA, 19 nt, Homo sapiens
  misc_RNA (1)...(19): siRNA sense strand
cgaagccacuuugauguca

SEQ ID NO: 1722796 - RNA, 19 nt, Homo sapiens
  misc_RNA (1)...(19): siRNA sense strand
ggaaagaguaaagauaaag

SEQ ID NO: 1722797 - RNA, 19 nt, Homo sapiens
  misc_RNA (1)...(19): siRNA sense strand
agugagaguuucaucuuug

SEQ ID NO: 1722798 - RNA, 19 nt, Homo sapiens
  misc_RNA (1)...(19): siRNA sense strand
gagaggacccuguaacacu

SEQ ID NO: 1722799 - RNA, 19 nt, Homo sapiens
  misc_RNA (1)...(19): siRNA sense strand
gaugucauuuauccacaga

SEQ ID NO: 1722800 - RNA, 19 nt, Homo sapiens
  misc_RNA (1)...(19): siRNA sense strand
gcuguggcaugacaacuca

SEQ ID NO: 1722801 - RNA, 19 nt, Homo sapiens
  misc_RNA (1)...(19): siRNA sense strand
gaagcacguuccuggugau

SEQ ID NO: 1722802 - RNA, 19 nt, Homo sapiens
  misc_RNA (1)...(19): siRNA sense strand
gcccagaccuucgccuuca

SEQ ID NO: 1722803 - RNA, 19 nt, Homo sapiens
  misc_RNA (1)...(19): siRNA sense strand
gccauuuggucuucauuca

SEQ ID NO: 1722804 - RNA, 19 nt, Homo sapiens
  misc_RNA (1)...(19): siRNA sense strand
gggcagccacguccucaaa

SEQ ID NO: 1722805 - RNA, 19 nt, Homo sapiens
  misc_RNA (1)...(19): siRNA sense strand
acaauucagccaccuguuu

SEQ ID NO: 1722806 - RNA, 19 nt, Homo sapiens
  misc_RNA (1)...(19): siRNA sense strand
gaacauggcaucaaguuua

SEQ ID NO: 1722807 - RNA, 19 nt, Homo sapiens
  misc_RNA (1)...(19): siRNA sense strand
gauagaagcuguacagaau

SEQ ID NO: 1722808 - RNA, 19 nt, Homo sapiens
  misc_RNA (1)...(19): siRNA sense strand
gcaagacucucgaaauuau

SEQ ID NO: 1722809 - RNA, 19 nt, Homo sapiens
  misc_RNA (1)...(19): siRNA sense strand
gaacggcccugaagaucuu

SEQ ID NO: 1722810 - RNA, 19 nt, Homo sapiens
  misc_RNA (1)...(19): siRNA sense strand
ggaaaucauugaaggagaa

SEQ ID NO: 1722811 - RNA, 19 nt, Homo sapiens
  misc_RNA (1)...(19): siRNA sense strand
ggagaaagcuguggagaag

SEQ ID NO: 1722812 - RNA, 19 nt, Homo sapiens
  misc_RNA (1)...(19): siRNA sense strand
gggcaucccuggugacaaa

SEQ ID NO: 1722813 - RNA, 19 nt, Homo sapiens
  misc_RNA (1)...(19): siRNA sense strand
ggauuaaggcaacaaauaa

SEQ ID NO: 1722814 - RNA, 19 nt, Homo sapiens
  misc_RNA (1)...(19): siRNA sense strand
ggagugcgcuggauuucuu

SEQ ID NO: 1722815 - RNA, 19 nt, Homo sapiens
  misc_RNA (1)...(19): siRNA sense strand
ggaagaacauggcaucaag

SEQ ID NO: 1722816 - RNA, 19 nt, Homo sapiens
  misc_RNA (1)...(19): siRNA sense strand
cacauuggcucuuugaauu

SEQ ID NO: 1722817 - RNA, 19 nt, Homo sapiens
  misc_RNA (1)...(19): siRNA sense strand
gucaagagauaacaacaaa

SEQ ID NO: 1722818 - RNA, 19 nt, Homo sapiens
  misc_RNA (1)...(19): siRNA sense strand
gcagagguauucacaacau

SEQ ID NO: 1722819 - RNA, 19 nt, Homo sapiens
  misc_RNA (1)...(19): siRNA sense strand
cugcaagacucucgaaauu

SEQ ID NO: 1722820 - RNA, 19 nt, Homo sapiens
  misc_RNA (1)...(19): siRNA sense strand
caagagauaacaacaaaug

SEQ ID NO: 1722821 - RNA, 19 nt, Homo sapiens
  misc_RNA (1)...(19): siRNA sense strand
ugaaagaccacguuacuug

SEQ ID NO: 1722822 - RNA, 19 nt, Homo sapiens
  misc_RNA (1)...(19): siRNA sense strand
agaaagcuguggagaaguu

SEQ ID NO: 1722823 - RNA, 19 nt, Homo sapiens
  misc_RNA (1)...(19): siRNA sense strand
ggaggaacaugugugaaug

SEQ ID NO: 1722824 - RNA, 19 nt, Homo sapiens
  misc_RNA (1)...(19): siRNA sense strand
uaaagacaaugaacguguu

SEQ ID NO: 1722825 - RNA, 19 nt, Homo sapiens
  misc_RNA (1)...(19): siRNA sense strand
guagcucaguccaccaaua

SEQ ID NO: 1722826 - RNA, 19 nt, Homo sapiens
  misc_RNA (1)...(19): siRNA sense strand
agacaguucguaccaauua

SEQ ID NO: 1722827 - RNA, 19 nt, Homo sapiens
  misc_RNA (1)...(19): siRNA sense strand
ggacauggccaacaaaauu

SEQ ID NO: 1722828 - RNA, 19 nt, Homo sapiens
  misc_RNA (1)...(19): siRNA sense strand
gacaaagaauacugcauca

SEQ ID NO: 1722829 - RNA, 19 nt, Homo sapiens
  misc_RNA (1)...(19): siRNA sense strand
gcaucaaguuuauaagaca

SEQ ID NO: 1722830 - RNA, 19 nt, Homo sapiens
  misc_RNA (1)...(19): siRNA sense strand
gguaagacccugguuguug

SEQ ID NO: 1722831 - RNA, 19 nt, Homo sapiens
  misc_RNA (1)...(19): siRNA sense strand
ggcgauauauuggaggaua

SEQ ID NO: 1722832 - RNA, 19 nt, Homo sapiens
  misc_RNA (1)...(19): siRNA sense strand
uaagacaguucguaccaau

SEQ ID NO: 1722833 - RNA, 19 nt, Homo sapiens
  misc_RNA (1)...(19): siRNA sense strand
gcgauauauuggaggauaa

SEQ ID NO: 1722834 - RNA, 19 nt, Homo sapiens
  misc_RNA (1)...(19): siRNA sense strand
gaaugcuuaugggcaauuu

SEQ ID NO: 1722835 - RNA, 19 nt, Homo sapiens
  misc_RNA (1)...(19): siRNA sense strand
ggaagaaaauauugagguu

SEQ ID NO: 1722836 - RNA, 19 nt, Homo sapiens
  misc_RNA (1)...(19): siRNA sense strand
uaaggaggcagcccaauau

SEQ ID NO: 1722837 - RNA, 19 nt, Homo sapiens
  misc_RNA (1)...(19): siRNA sense strand
cuaaggaggcagcccaaua

SEQ ID NO: 1722838 - RNA, 19 nt, Homo sapiens
  misc_RNA (1)...(19): siRNA sense strand
uagaagcuguacagaauca

SEQ ID NO: 1722839 - RNA, 19 nt, Homo sapiens
  misc_RNA (1)...(19): siRNA sense strand
ccacuguauuuacuccuuu

SEQ ID NO: 1722840 - RNA, 19 nt, Homo sapiens
  misc_RNA (1)...(19): siRNA sense strand
gacaguucguaccaauuaa

SEQ ID NO: 1722841 - RNA, 19 nt, Homo sapiens
  misc_RNA (1)...(19): siRNA sense strand
agaaucacauuggcucuuu

SEQ ID NO: 1722842 - RNA, 19 nt, Homo sapiens
  misc_RNA (1)...(19): siRNA sense strand
gaaagucgaggagacaguu

SEQ ID NO: 1722843 - RNA, 19 nt, Homo sapiens
  misc_RNA (1)...(19): siRNA sense strand
gguuuaccauaguuacuuu

SEQ ID NO: 1722844 - RNA, 19 nt, Homo sapiens
  misc_RNA (1)...(19): siRNA sense strand
ggacaagcccugcaagacu

SEQ ID NO: 1722845 - RNA, 19 nt, Homo sapiens
  misc_RNA (1)...(19): siRNA sense strand
gaaucacauuggcucuuug

SEQ ID NO: 1722846 - RNA, 19 nt, Homo sapiens
  misc_RNA (1)...(19): siRNA sense strand
ggacagcacaauuggaauc

SEQ ID NO: 1722847 - RNA, 19 nt, Homo sapiens
  misc_RNA (1)...(19): siRNA sense strand
acgauuccgucaagagaua

SEQ ID NO: 1722848 - RNA, 19 nt, Homo sapiens
  misc_RNA (1)...(19): siRNA sense strand
gugaacacauggaagaaca

SEQ ID NO: 1722849 - RNA, 19 nt, Homo sapiens
  misc_RNA (1)...(19): siRNA sense strand
caaaauuggugaacacaug

SEQ ID NO: 1722850 - RNA, 19 nt, Homo sapiens
  misc_RNA (1)...(19): siRNA sense strand
gaauguggguugcauaccu

SEQ ID NO: 1722851 - RNA, 19 nt, Homo sapiens
  misc_RNA (1)...(19): siRNA sense strand
gcgcucaaauguggacuga

SEQ ID NO: 1722852 - RNA, 19 nt, Homo sapiens
  misc_RNA (1)...(19): siRNA sense strand
gaaauuauggauggaaagu

SEQ ID NO: 1722853 - RNA, 19 nt, Homo sapiens
  misc_RNA (1)...(19): siRNA sense strand
gagaauauaauacggugau

SEQ ID NO: 1722854 - RNA, 19 nt, Homo sapiens
  misc_RNA (1)...(19): siRNA sense strand
guuagguccauucuucuua

SEQ ID NO: 1722855 - RNA, 19 nt, Homo sapiens
  misc_RNA (1)...(19): siRNA sense strand
gaguagcucugcgggagaa

SEQ ID NO: 1722856 - RNA, 19 nt, Homo sapiens
  misc_RNA (1)...(19): siRNA sense strand
gugcagagguauucacaac

SEQ ID NO: 1722857 - RNA, 19 nt, Homo sapiens
  misc_RNA (1)...(19): siRNA sense strand
ccaaaugcuggagaaguua

SEQ ID NO: 1722858 - RNA, 19 nt, Homo sapiens
  misc_RNA (1)...(19): siRNA sense strand
gaaguuacacaaggcuuug

SEQ ID NO: 1722859 - RNA, 19 nt, Homo sapiens
  misc_RNA (1)...(19): siRNA sense strand
aggauuaaggcaacaaaua

SEQ ID NO: 1722860 - RNA, 19 nt, Homo sapiens
  misc_RNA (1)...(19): siRNA sense strand
uguauuuacuccuuuggaa

SEQ ID NO: 1722861 - RNA, 19 nt, Homo sapiens
  misc_RNA (1)...(19): siRNA sense strand
guuccaaccacuguauuua

SEQ ID NO: 1722862 - RNA, 19 nt, Homo sapiens
  misc_RNA (1)...(19): siRNA sense strand
guucguaccaauuaaaguu

SEQ ID NO: 1722863 - RNA, 19 nt, Homo sapiens
  misc_RNA (1)...(19): siRNA sense strand
cauggcaucaaguuuauaa

SEQ ID NO: 1722864 - RNA, 19 nt, Homo sapiens
  misc_RNA (1)...(19): siRNA sense strand
cauccuaugucgcuuugga

SEQ ID NO: 1722865 - RNA, 19 nt, Homo sapiens
  misc_RNA (1)...(19): siRNA sense strand
ggagacaguuaagcaugau

SEQ ID NO: 1722866 - RNA, 19 nt, Homo sapiens
  misc_RNA (1)...(19): siRNA sense strand
caggcuggcugcugagguu

SEQ ID NO: 1722867 - RNA, 19 nt, Homo sapiens
  misc_RNA (1)...(19): siRNA sense strand
auauugagguuuaccauag

SEQ ID NO: 1722868 - RNA, 19 nt, Homo sapiens
  misc_RNA (1)...(19): siRNA sense strand
caauagugaggaaaucauu

SEQ ID NO: 1722869 - RNA, 19 nt, Homo sapiens
  misc_RNA (1)...(19): siRNA sense strand
gagcauccuaugucgcuuu

SEQ ID NO: 1722870 - RNA, 19 nt, Homo sapiens
  misc_RNA (1)...(19): siRNA sense strand
caacauugucugugaccaa

SEQ ID NO: 1722871 - RNA, 19 nt, Homo sapiens
  misc_RNA (1)...(19): siRNA sense strand
ucgaaauuauggauggaaa

SEQ ID NO: 1722872 - RNA, 19 nt, Homo sapiens
  misc_RNA (1)...(19): siRNA sense strand
cagagguauucacaacauu

SEQ ID NO: 1722873 - RNA, 19 nt, Homo sapiens
  misc_RNA (1)...(19): siRNA sense strand
ucacauuggcucuuugaau

SEQ ID NO: 1722874 - RNA, 19 nt, Homo sapiens
  misc_RNA (1)...(19): siRNA sense strand
ugauagaagcuguacagaa

SEQ ID NO: 1722875 - RNA, 19 nt, Homo sapiens
  misc_RNA (1)...(19): siRNA sense strand
aggagacaguuaagcauga

SEQ ID NO: 1722876 - RNA, 19 nt, Homo sapiens
  misc_RNA (1)...(19): siRNA sense strand
gaagaacauggcaucaagu

SEQ ID NO: 1722877 - RNA, 19 nt, Homo sapiens
  misc_RNA (1)...(19): siRNA sense strand
cauugccacuggugaaaga

SEQ ID NO: 1722878 - RNA, 19 nt, Homo sapiens
  misc_RNA (1)...(19): siRNA sense strand
gaugaagaacagaccaaug

SEQ ID NO: 1722879 - RNA, 19 nt, Homo sapiens
  misc_RNA (1)...(19): siRNA sense strand
ugauugggacagaaugaua

SEQ ID NO: 1722880 - RNA, 19 nt, Homo sapiens
  misc_RNA (1)...(19): siRNA sense strand
ugucacagaugaagaacag

SEQ ID NO: 1722881 - RNA, 19 nt, Homo sapiens
  misc_RNA (1)...(19): siRNA sense strand
gcaauaggaagagaugcuu

SEQ ID NO: 1722882 - RNA, 19 nt, Homo sapiens
  misc_RNA (1)...(19): siRNA sense strand
aacauggcaucaaguuuau

SEQ ID NO: 1722883 - RNA, 19 nt, Homo sapiens
  misc_RNA (1)...(19): siRNA sense strand
ggugaaagaccacguuacu

SEQ ID NO: 1722884 - RNA, 19 nt, Homo sapiens
  misc_RNA (1)...(19): siRNA sense strand
ugcaagacucucgaaauua

SEQ ID NO: 1722885 - RNA, 19 nt, Homo sapiens
  misc_RNA (1)...(19): siRNA sense strand
gugaugaucuuuucuccuu

SEQ ID NO: 1722886 - RNA, 19 nt, Homo sapiens
  misc_RNA (1)...(19): siRNA sense strand
gaaagcuguggagaaguuu

SEQ ID NO: 1722887 - RNA, 19 nt, Homo sapiens
  misc_RNA (1)...(19): siRNA sense strand
ggcaucaaguuuauaagac

SEQ ID NO: 1722888 - RNA, 19 nt, Homo sapiens
  misc_RNA (1)...(19): siRNA sense strand
aauguggguugcauaccua

SEQ ID NO: 1722889 - RNA, 19 nt, Homo sapiens
  misc_RNA (1)...(19): siRNA sense strand
caucccuggugacaaagaa

SEQ ID NO: 1722890 - RNA, 19 nt, Homo sapiens
  misc_RNA (1)...(19): siRNA sense strand
gggugaagauaaaugaaaa

SEQ ID NO: 1722891 - RNA, 19 nt, Homo sapiens
  misc_RNA (1)...(19): siRNA sense strand
gaauuggggcuaccgagua

SEQ ID NO: 1722892 - RNA, 19 nt, Homo sapiens
  misc_RNA (1)...(19): siRNA sense strand
ggaagagaugcuugcacaa

SEQ ID NO: 1722893 - RNA, 19 nt, Homo sapiens
  misc_RNA (1)...(19): siRNA sense strand
gcucaguccaccaauagug

SEQ ID NO: 1722894 - RNA, 19 nt, Homo sapiens
  misc_RNA (1)...(19): siRNA sense strand
gagaaugcuuaugggcaau

SEQ ID NO: 1722895 - RNA, 19 nt, Homo sapiens
  misc_RNA (1)...(19): siRNA sense strand
uggcaucaaguuuauaaga

SEQ ID NO: 1722896 - RNA, 19 nt, Homo sapiens
  misc_RNA (1)...(19): siRNA sense strand
ccaccaauagugaggaaau

SEQ ID NO: 1722897 - RNA, 19 nt, Homo sapiens
  misc_RNA (1)...(19): siRNA sense strand
ggacagaaugauagaagcu

SEQ ID NO: 1722898 - RNA, 19 nt, Homo sapiens
  misc_RNA (1)...(19): siRNA sense strand
agaaguuacacaaggcuuu

SEQ ID NO: 1722899 - RNA, 19 nt, Homo sapiens
  misc_RNA (1)...(19): siRNA sense strand
gaucuucccaaguccuaug

SEQ ID NO: 1722900 - RNA, 19 nt, Homo sapiens
  misc_RNA (1)...(19): siRNA sense strand
cggaggaacaugugugaau

SEQ ID NO: 1722901 - RNA, 19 nt, Homo sapiens
  misc_RNA (1)...(19): siRNA sense strand
gaagcuguacagaaucaca

SEQ ID NO: 1722902 - RNA, 19 nt, Homo sapiens
  misc_RNA (1)...(19): siRNA sense strand
cagaaugauagaagcugua

SEQ ID NO: 1722903 - RNA, 19 nt, Homo sapiens
  misc_RNA (1)...(19): siRNA sense strand
uuagguccauucuucuuag

SEQ ID NO: 1722904 - RNA, 19 nt, Homo sapiens
  misc_RNA (1)...(19): siRNA sense strand
gaugcuggcaauaggaaga

SEQ ID NO: 1722905 - RNA, 19 nt, Homo sapiens
  misc_RNA (1)...(19): siRNA sense strand
aagaacauggcaucaaguu

SEQ ID NO: 1722906 - RNA, 19 nt, Homo sapiens
  misc_RNA (1)...(19): siRNA sense strand
gaacauggcaucaaguuua

SEQ ID NO: 1722907 - RNA, 19 nt, Homo sapiens
  misc_RNA (1)...(19): siRNA sense strand
gauagaagcuguacagaau

SEQ ID NO: 1722908 - RNA, 19 nt, Homo sapiens
  misc_RNA (1)...(19): siRNA sense strand
gcaagacucucgaaauuau

SEQ ID NO: 1722909 - RNA, 19 nt, Homo sapiens
  misc_RNA (1)...(19): siRNA sense strand
gaacggcccugaagaucuu

SEQ ID NO: 1722910 - RNA, 19 nt, Homo sapiens
  misc_RNA (1)...(19): siRNA sense strand
ggaaaucauugaaggagaa

SEQ ID NO: 1722911 - RNA, 19 nt, Homo sapiens
  misc_RNA (1)...(19): siRNA sense strand
ggagaaagcuguggagaag

SEQ ID NO: 1722912 - RNA, 19 nt, Homo sapiens
  misc_RNA (1)...(19): siRNA sense strand
gggcaucccuggugacaaa

SEQ ID NO: 1722913 - RNA, 19 nt, Homo sapiens
  misc_RNA (1)...(19): siRNA sense strand
ggauuaaggcaacaaauaa

SEQ ID NO: 1722914 - RNA, 19 nt, Homo sapiens
  misc_RNA (1)...(19): siRNA sense strand
ggagugcgcuggauuucuu

SEQ ID NO: 1722915 - RNA, 19 nt, Homo sapiens
  misc_RNA (1)...(19): siRNA sense strand
ggaagaacauggcaucaag

SEQ ID NO: 1722916 - RNA, 19 nt, Homo sapiens
  misc_RNA (1)...(19): siRNA sense strand
cacauuggcucuuugaauu

SEQ ID NO: 1722917 - RNA, 19 nt, Homo sapiens
  misc_RNA (1)...(19): siRNA sense strand
gucaagagauaacaacaaa

SEQ ID NO: 1722918 - RNA, 19 nt, Homo sapiens
  misc_RNA (1)...(19): siRNA sense strand
gcagagguauucacaacau

SEQ ID NO: 1722919 - RNA, 19 nt, Homo sapiens
  misc_RNA (1)...(19): siRNA sense strand
cugcaagacucucgaaauu

SEQ ID NO: 1722920 - RNA, 19 nt, Homo sapiens
  misc_RNA (1)...(19): siRNA sense strand
caagagauaacaacaaaug

SEQ ID NO: 1722921 - RNA, 19 nt, Homo sapiens
  misc_RNA (1)...(19): siRNA sense strand
ugaaagaccacguuacuug

SEQ ID NO: 1722922 - RNA, 19 nt, Homo sapiens
  misc_RNA (1)...(19): siRNA sense strand
agaaagcuguggagaaguu

SEQ ID NO: 1722923 - RNA, 19 nt, Homo sapiens
  misc_RNA (1)...(19): siRNA sense strand
ggaggaacaugugugaaug

SEQ ID NO: 1722924 - RNA, 19 nt, Homo sapiens
  misc_RNA (1)...(19): siRNA sense strand
uaaagacaaugaacguguu

SEQ ID NO: 1722925 - RNA, 19 nt, Homo sapiens
  misc_RNA (1)...(19): siRNA sense strand
guagcucaguccaccaaua

SEQ ID NO: 1722926 - RNA, 19 nt, Homo sapiens
  misc_RNA (1)...(19): siRNA sense strand
agacaguucguaccaauua

SEQ ID NO: 1722927 - RNA, 19 nt, Homo sapiens
  misc_RNA (1)...(19): siRNA sense strand
ggacauggccaacaaaauu

SEQ ID NO: 1722928 - RNA, 19 nt, Homo sapiens
  misc_RNA (1)...(19): siRNA sense strand
gacaaagaauacugcauca

SEQ ID NO: 1722929 - RNA, 19 nt, Homo sapiens
  misc_RNA (1)...(19): siRNA sense strand
gcaucaaguuuauaagaca

SEQ ID NO: 1722930 - RNA, 19 nt, Homo sapiens
  misc_RNA (1)...(19): siRNA sense strand
gguaagacccugguuguug

SEQ ID NO: 1722931 - RNA, 19 nt, Homo sapiens
  misc_RNA (1)...(19): siRNA sense strand
ggcgauauauuggaggaua

SEQ ID NO: 1722932 - RNA, 19 nt, Homo sapiens
  misc_RNA (1)...(19): siRNA sense strand
uaagacaguucguaccaau

SEQ ID NO: 1722933 - RNA, 19 nt, Homo sapiens
  misc_RNA (1)...(19): siRNA sense strand
gcgauauauuggaggauaa

SEQ ID NO: 1722934 - RNA, 19 nt, Homo sapiens
  misc_RNA (1)...(19): siRNA sense strand
gaaugcuuaugggcaauuu

SEQ ID NO: 1722935 - RNA, 19 nt, Homo sapiens
  misc_RNA (1)...(19): siRNA sense strand
ggaagaaaauauugagguu

SEQ ID NO: 1722936 - RNA, 19 nt, Homo sapiens
  misc_RNA (1)...(19): siRNA sense strand
uaaggaggcagcccaauau

SEQ ID NO: 1722937 - RNA, 19 nt, Homo sapiens
  misc_RNA (1)...(19): siRNA sense strand
cuaaggaggcagcccaaua

SEQ ID NO: 1722938 - RNA, 19 nt, Homo sapiens
  misc_RNA (1)...(19): siRNA sense strand
uagaagcuguacagaauca

SEQ ID NO: 1722939 - RNA, 19 nt, Homo sapiens
  misc_RNA (1)...(19): siRNA sense strand
ccacuguauuuacuccuuu

SEQ ID NO: 1722940 - RNA, 19 nt, Homo sapiens
  misc_RNA (1)...(19): siRNA sense strand
gacaguucguaccaauuaa

SEQ ID NO: 1722941 - RNA, 19 nt, Homo sapiens
  misc_RNA (1)...(19): siRNA sense strand
agaaucacauuggcucuuu

SEQ ID NO: 1722942 - RNA, 19 nt, Homo sapiens
  misc_RNA (1)...(19): siRNA sense strand
gaaagucgaggagacaguu

SEQ ID NO: 1722943 - RNA, 19 nt, Homo sapiens
  misc_RNA (1)...(19): siRNA sense strand
gguuuaccauaguuacuuu

SEQ ID NO: 1722944 - RNA, 19 nt, Homo sapiens
  misc_RNA (1)...(19): siRNA sense strand
ggacaagcccugcaagacu

SEQ ID NO: 1722945 - RNA, 19 nt, Homo sapiens
  misc_RNA (1)...(19): siRNA sense strand
gaaucacauuggcucuuug

SEQ ID NO: 1722946 - RNA, 19 nt, Homo sapiens
  misc_RNA (1)...(19): siRNA sense strand
ggacagcacaauuggaauc

SEQ ID NO: 1722947 - RNA, 19 nt, Homo sapiens
  misc_RNA (1)...(19): siRNA sense strand
acgauuccgucaagagaua

SEQ ID NO: 1722948 - RNA, 19 nt, Homo sapiens
  misc_RNA (1)...(19): siRNA sense strand
gugaacacauggaagaaca

SEQ ID NO: 1722949 - RNA, 19 nt, Homo sapiens
  misc_RNA (1)...(19): siRNA sense strand
caaaauuggugaacacaug

SEQ ID NO: 1722950 - RNA, 19 nt, Homo sapiens
  misc_RNA (1)...(19): siRNA sense strand
gaauguggguugcauaccu

SEQ ID NO: 1722951 - RNA, 19 nt, Homo sapiens
  misc_RNA (1)...(19): siRNA sense strand
gcgcucaaauguggacuga

SEQ ID NO: 1722952 - RNA, 19 nt, Homo sapiens
  misc_RNA (1)...(19): siRNA sense strand
gaaauuauggauggaaagu

SEQ ID NO: 1722953 - RNA, 19 nt, Homo sapiens
  misc_RNA (1)...(19): siRNA sense strand
gagaauauaauacggugau

SEQ ID NO: 1722954 - RNA, 19 nt, Homo sapiens
  misc_RNA (1)...(19): siRNA sense strand
guuagguccauucuucuua

SEQ ID NO: 1722955 - RNA, 19 nt, Homo sapiens
  misc_RNA (1)...(19): siRNA sense strand
gaguagcucugcgggagaa

SEQ ID NO: 1722956 - RNA, 19 nt, Homo sapiens
  misc_RNA (1)...(19): siRNA sense strand
gugcagagguauucacaac

SEQ ID NO: 1722957 - RNA, 19 nt, Homo sapiens
  misc_RNA (1)...(19): siRNA sense strand
ccaaaugcuggagaaguua

SEQ ID NO: 1722958 - RNA, 19 nt, Homo sapiens
  misc_RNA (1)...(19): siRNA sense strand
gaaguuacacaaggcuuug

SEQ ID NO: 1722959 - RNA, 19 nt, Homo sapiens
  misc_RNA (1)...(19): siRNA sense strand
aggauuaaggcaacaaaua

SEQ ID NO: 1722960 - RNA, 19 nt, Homo sapiens
  misc_RNA (1)...(19): siRNA sense strand
uguauuuacuccuuuggaa

SEQ ID NO: 1722961 - RNA, 19 nt, Homo sapiens
  misc_RNA (1)...(19): siRNA sense strand
guuccaaccacuguauuua

SEQ ID NO: 1722962 - RNA, 19 nt, Homo sapiens
  misc_RNA (1)...(19): siRNA sense strand
guucguaccaauuaaaguu

SEQ ID NO: 1722963 - RNA, 19 nt, Homo sapiens
  misc_RNA (1)...(19): siRNA sense strand
cauggcaucaaguuuauaa

SEQ ID NO: 1722964 - RNA, 19 nt, Homo sapiens
  misc_RNA (1)...(19): siRNA sense strand
cauccuaugucgcuuugga

SEQ ID NO: 1722965 - RNA, 19 nt, Homo sapiens
  misc_RNA (1)...(19): siRNA sense strand
ggagacaguuaagcaugau

SEQ ID NO: 1722966 - RNA, 19 nt, Homo sapiens
  misc_RNA (1)...(19): siRNA sense strand
caggcuggcugcugagguu

SEQ ID NO: 1722967 - RNA, 19 nt, Homo sapiens
  misc_RNA (1)...(19): siRNA sense strand
auauugagguuuaccauag

SEQ ID NO: 1722968 - RNA, 19 nt, Homo sapiens
  misc_RNA (1)...(19): siRNA sense strand
caauagugaggaaaucauu

SEQ ID NO: 1722969 - RNA, 19 nt, Homo sapiens
  misc_RNA (1)...(19): siRNA sense strand
gagcauccuaugucgcuuu

SEQ ID NO: 1722970 - RNA, 19 nt, Homo sapiens
  misc_RNA (1)...(19): siRNA sense strand
caacauugucugugaccaa

SEQ ID NO: 1722971 - RNA, 19 nt, Homo sapiens
  misc_RNA (1)...(19): siRNA sense strand
ucgaaauuauggauggaaa

SEQ ID NO: 1722972 - RNA, 19 nt, Homo sapiens
  misc_RNA (1)...(19): siRNA sense strand
cagagguauucacaacauu

SEQ ID NO: 1722973 - RNA, 19 nt, Homo sapiens
  misc_RNA (1)...(19): siRNA sense strand
ucacauuggcucuuugaau

SEQ ID NO: 1722974 - RNA, 19 nt, Homo sapiens
  misc_RNA (1)...(19): siRNA sense strand
ugauagaagcuguacagaa

SEQ ID NO: 1722975 - RNA, 19 nt, Homo sapiens
  misc_RNA (1)...(19): siRNA sense strand
aggagacaguuaagcauga

SEQ ID NO: 1722976 - RNA, 19 nt, Homo sapiens
  misc_RNA (1)...(19): siRNA sense strand
gaagaacauggcaucaagu

SEQ ID NO: 1722977 - RNA, 19 nt, Homo sapiens
  misc_RNA (1)...(19): siRNA sense strand
cauugccacuggugaaaga

SEQ ID NO: 1722978 - RNA, 19 nt, Homo sapiens
  misc_RNA (1)...(19): siRNA sense strand
gaugaagaacagaccaaug

SEQ ID NO: 1722979 - RNA, 19 nt, Homo sapiens
  misc_RNA (1)...(19): siRNA sense strand
ugauugggacagaaugaua

SEQ ID NO: 1722980 - RNA, 19 nt, Homo sapiens
  misc_RNA (1)...(19): siRNA sense strand
ugucacagaugaagaacag

SEQ ID NO: 1722981 - RNA, 19 nt, Homo sapiens
  misc_RNA (1)...(19): siRNA sense strand
gcaauaggaagagaugcuu

SEQ ID NO: 1722982 - RNA, 19 nt, Homo sapiens
  misc_RNA (1)...(19): siRNA sense strand
aacauggcaucaaguuuau

SEQ ID NO: 1722983 - RNA, 19 nt, Homo sapiens
  misc_RNA (1)...(19): siRNA sense strand
ggugaaagaccacguuacu

SEQ ID NO: 1722984 - RNA, 19 nt, Homo sapiens
  misc_RNA (1)...(19): siRNA sense strand
ugcaagacucucgaaauua

SEQ ID NO: 1722985 - RNA, 19 nt, Homo sapiens
  misc_RNA (1)...(19): siRNA sense strand
gugaugaucuuuucuccuu

SEQ ID NO: 1722986 - RNA, 19 nt, Homo sapiens
  misc_RNA (1)...(19): siRNA sense strand
gaaagcuguggagaaguuu

SEQ ID NO: 1722987 - RNA, 19 nt, Homo sapiens
  misc_RNA (1)...(19): siRNA sense strand
ggcaucaaguuuauaagac

SEQ ID NO: 1722988 - RNA, 19 nt, Homo sapiens
  misc_RNA (1)...(19): siRNA sense strand
aauguggguugcauaccua

SEQ ID NO: 1722989 - RNA, 19 nt, Homo sapiens
  misc_RNA (1)...(19): siRNA sense strand
caucccuggugacaaagaa

SEQ ID NO: 1722990 - RNA, 19 nt, Homo sapiens
  misc_RNA (1)...(19): siRNA sense strand
gggugaagauaaaugaaaa

SEQ ID NO: 1722991 - RNA, 19 nt, Homo sapiens
  misc_RNA (1)...(19): siRNA sense strand
gaauuggggcuaccgagua

SEQ ID NO: 1722992 - RNA, 19 nt, Homo sapiens
  misc_RNA (1)...(19): siRNA sense strand
ggaagagaugcuugcacaa

SEQ ID NO: 1722993 - RNA, 19 nt, Homo sapiens
  misc_RNA (1)...(19): siRNA sense strand
gcucaguccaccaauagug

SEQ ID NO: 1722994 - RNA, 19 nt, Homo sapiens
  misc_RNA (1)...(19): siRNA sense strand
gagaaugcuuaugggcaau

SEQ ID NO: 1722995 - RNA, 19 nt, Homo sapiens
  misc_RNA (1)...(19): siRNA sense strand
uggcaucaaguuuauaaga

SEQ ID NO: 1722996 - RNA, 19 nt, Homo sapiens
  misc_RNA (1)...(19): siRNA sense strand
ccaccaauagugaggaaau

SEQ ID NO: 1722997 - RNA, 19 nt, Homo sapiens
  misc_RNA (1)...(19): siRNA sense strand
ggacagaaugauagaagcu

SEQ ID NO: 1722998 - RNA, 19 nt, Homo sapiens
  misc_RNA (1)...(19): siRNA sense strand
agaaguuacacaaggcuuu

SEQ ID NO: 1722999 - RNA, 19 nt, Homo sapiens
  misc_RNA (1)...(19): siRNA sense strand
gaucuucccaaguccuaug

SEQ ID NO: 1723000 - RNA, 19 nt, Homo sapiens
  misc_RNA (1)...(19): siRNA sense strand
cggaggaacaugugugaau

SEQ ID NO: 1723001 - RNA, 19 nt, Homo sapiens
  misc_RNA (1)...(19): siRNA sense strand
gaagcuguacagaaucaca

SEQ ID NO: 1723002 - RNA, 19 nt, Homo sapiens
  misc_RNA (1)...(19): siRNA sense strand
cagaaugauagaagcugua

SEQ ID NO: 1723003 - RNA, 19 nt, Homo sapiens
  misc_RNA (1)...(19): siRNA sense strand
uuagguccauucuucuuag

SEQ ID NO: 1723004 - RNA, 19 nt, Homo sapiens
  misc_RNA (1)...(19): siRNA sense strand
gaugcuggcaauaggaaga

SEQ ID NO: 1723005 - RNA, 19 nt, Homo sapiens
  misc_RNA (1)...(19): siRNA sense strand
aagaacauggcaucaaguu

SEQ ID NO: 1723006 - RNA, 19 nt, Homo sapiens
  misc_RNA (1)...(19): siRNA sense strand
gaacauggcaucaaguuua

SEQ ID NO: 1723007 - RNA, 19 nt, Homo sapiens
  misc_RNA (1)...(19): siRNA sense strand
gauagaagcuguacagaau

SEQ ID NO: 1723008 - RNA, 19 nt, Homo sapiens
  misc_RNA (1)...(19): siRNA sense strand
gcaagacucucgaaauuau

SEQ ID NO: 1723009 - RNA, 19 nt, Homo sapiens
  misc_RNA (1)...(19): siRNA sense strand
gaacggcccugaagaucuu

SEQ ID NO: 1723010 - RNA, 19 nt, Homo sapiens
  misc_RNA (1)...(19): siRNA sense strand
ggaaaucauugaaggagaa

SEQ ID NO: 1723011 - RNA, 19 nt, Homo sapiens
  misc_RNA (1)...(19): siRNA sense strand
ggagaaagcuguggagaag

SEQ ID NO: 1723012 - RNA, 19 nt, Homo sapiens
  misc_RNA (1)...(19): siRNA sense strand
gggcaucccuggugacaaa

SEQ ID NO: 1723013 - RNA, 19 nt, Homo sapiens
  misc_RNA (1)...(19): siRNA sense strand
ggauuaaggcaacaaauaa

SEQ ID NO: 1723014 - RNA, 19 nt, Homo sapiens
  misc_RNA (1)...(19): siRNA sense strand
ggagugcgcuggauuucuu

SEQ ID NO: 1723015 - RNA, 19 nt, Homo sapiens
  misc_RNA (1)...(19): siRNA sense strand
ggaagaacauggcaucaag

SEQ ID NO: 1723016 - RNA, 19 nt, Homo sapiens
  misc_RNA (1)...(19): siRNA sense strand
cacauuggcucuuugaauu

SEQ ID NO: 1723017 - RNA, 19 nt, Homo sapiens
  misc_RNA (1)...(19): siRNA sense strand
gucaagagauaacaacaaa

SEQ ID NO: 1723018 - RNA, 19 nt, Homo sapiens
  misc_RNA (1)...(19): siRNA sense strand
gcagagguauucacaacau

SEQ ID NO: 1723019 - RNA, 19 nt, Homo sapiens
  misc_RNA (1)...(19): siRNA sense strand
cugcaagacucucgaaauu

SEQ ID NO: 1723020 - RNA, 19 nt, Homo sapiens
  misc_RNA (1)...(19): siRNA sense strand
caagagauaacaacaaaug

SEQ ID NO: 1723021 - RNA, 19 nt, Homo sapiens
  misc_RNA (1)...(19): siRNA sense strand
ugaaagaccacguuacuug

SEQ ID NO: 1723022 - RNA, 19 nt, Homo sapiens
  misc_RNA (1)...(19): siRNA sense strand
agaaagcuguggagaaguu

SEQ ID NO: 1723023 - RNA, 19 nt, Homo sapiens
  misc_RNA (1)...(19): siRNA sense strand
ggaggaacaugugugaaug

SEQ ID NO: 1723024 - RNA, 19 nt, Homo sapiens
  misc_RNA (1)...(19): siRNA sense strand
uaaagacaaugaacguguu

SEQ ID NO: 1723025 - RNA, 19 nt, Homo sapiens
  misc_RNA (1)...(19): siRNA sense strand
guagcucaguccaccaaua

SEQ ID NO: 1723026 - RNA, 19 nt, Homo sapiens
  misc_RNA (1)...(19): siRNA sense strand
agacaguucguaccaauua

SEQ ID NO: 1723027 - RNA, 19 nt, Homo sapiens
  misc_RNA (1)...(19): siRNA sense strand
ggacauggccaacaaaauu

SEQ ID NO: 1723028 - RNA, 19 nt, Homo sapiens
  misc_RNA (1)...(19): siRNA sense strand
gacaaagaauacugcauca

SEQ ID NO: 1723029 - RNA, 19 nt, Homo sapiens
  misc_RNA (1)...(19): siRNA sense strand
gcaucaaguuuauaagaca

SEQ ID NO: 1723030 - RNA, 19 nt, Homo sapiens
  misc_RNA (1)...(19): siRNA sense strand
gguaagacccugguuguug

SEQ ID NO: 1723031 - RNA, 19 nt, Homo sapiens
  misc_RNA (1)...(19): siRNA sense strand
ggcgauauauuggaggaua

SEQ ID NO: 1723032 - RNA, 19 nt, Homo sapiens
  misc_RNA (1)...(19): siRNA sense strand
uaagacaguucguaccaau

SEQ ID NO: 1723033 - RNA, 19 nt, Homo sapiens
  misc_RNA (1)...(19): siRNA sense strand
gcgauauauuggaggauaa

SEQ ID NO: 1723034 - RNA, 19 nt, Homo sapiens
  misc_RNA (1)...(19): siRNA sense strand
gaaugcuuaugggcaauuu

SEQ ID NO: 1723035 - RNA, 19 nt, Homo sapiens
  misc_RNA (1)...(19): siRNA sense strand
ggaagaaaauauugagguu

SEQ ID NO: 1723036 - RNA, 19 nt, Homo sapiens
  misc_RNA (1)...(19): siRNA sense strand
uaaggaggcagcccaauau

SEQ ID NO: 1723037 - RNA, 19 nt, Homo sapiens
  misc_RNA (1)...(19): siRNA sense strand
cuaaggaggcagcccaaua

SEQ ID NO: 1723038 - RNA, 19 nt, Homo sapiens
  misc_RNA (1)...(19): siRNA sense strand
uagaagcuguacagaauca

SEQ ID NO: 1723039 - RNA, 19 nt, Homo sapiens
  misc_RNA (1)...(19): siRNA sense strand
ccacuguauuuacuccuuu

SEQ ID NO: 1723040 - RNA, 19 nt, Homo sapiens
  misc_RNA (1)...(19): siRNA sense strand
gacaguucguaccaauuaa

SEQ ID NO: 1723041 - RNA, 19 nt, Homo sapiens
  misc_RNA (1)...(19): siRNA sense strand
agaaucacauuggcucuuu

SEQ ID NO: 1723042 - RNA, 19 nt, Homo sapiens
  misc_RNA (1)...(19): siRNA sense strand
gaaagucgaggagacaguu

SEQ ID NO: 1723043 - RNA, 19 nt, Homo sapiens
  misc_RNA (1)...(19): siRNA sense strand
gguuuaccauaguuacuuu

SEQ ID NO: 1723044 - RNA, 19 nt, Homo sapiens
  misc_RNA (1)...(19): siRNA sense strand
ggacaagcccugcaagacu

SEQ ID NO: 1723045 - RNA, 19 nt, Homo sapiens
  misc_RNA (1)...(19): siRNA sense strand
gaaucacauuggcucuuug

SEQ ID NO: 1723046 - RNA, 19 nt, Homo sapiens
  misc_RNA (1)...(19): siRNA sense strand
ggacagcacaauuggaauc

SEQ ID NO: 1723047 - RNA, 19 nt, Homo sapiens
  misc_RNA (1)...(19): siRNA sense strand
acgauuccgucaagagaua

SEQ ID NO: 1723048 - RNA, 19 nt, Homo sapiens
  misc_RNA (1)...(19): siRNA sense strand
gugaacacauggaagaaca

SEQ ID NO: 1723049 - RNA, 19 nt, Homo sapiens
  misc_RNA (1)...(19): siRNA sense strand
caaaauuggugaacacaug

SEQ ID NO: 1723050 - RNA, 19 nt, Homo sapiens
  misc_RNA (1)...(19): siRNA sense strand
gaauguggguugcauaccu

SEQ ID NO: 1723051 - RNA, 19 nt, Homo sapiens
  misc_RNA (1)...(19): siRNA sense strand
gcgcucaaauguggacuga

SEQ ID NO: 1723052 - RNA, 19 nt, Homo sapiens
  misc_RNA (1)...(19): siRNA sense strand
gaaauuauggauggaaagu

SEQ ID NO: 1723053 - RNA, 19 nt, Homo sapiens
  misc_RNA (1)...(19): siRNA sense strand
gagaauauaauacggugau

SEQ ID NO: 1723054 - RNA, 19 nt, Homo sapiens
  misc_RNA (1)...(19): siRNA sense strand
guuagguccauucuucuua

SEQ ID NO: 1723055 - RNA, 19 nt, Homo sapiens
  misc_RNA (1)...(19): siRNA sense strand
gaguagcucugcgggagaa

SEQ ID NO: 1723056 - RNA, 19 nt, Homo sapiens
  misc_RNA (1)...(19): siRNA sense strand
gugcagagguauucacaac

SEQ ID NO: 1723057 - RNA, 19 nt, Homo sapiens
  misc_RNA (1)...(19): siRNA sense strand
ccaaaugcuggagaaguua

SEQ ID NO: 1723058 - RNA, 19 nt, Homo sapiens
  misc_RNA (1)...(19): siRNA sense strand
gaaguuacacaaggcuuug

SEQ ID NO: 1723059 - RNA, 19 nt, Homo sapiens
  misc_RNA (1)...(19): siRNA sense strand
aggauuaaggcaacaaaua

SEQ ID NO: 1723060 - RNA, 19 nt, Homo sapiens
  misc_RNA (1)...(19): siRNA sense strand
uguauuuacuccuuuggaa

SEQ ID NO: 1723061 - RNA, 19 nt, Homo sapiens
  misc_RNA (1)...(19): siRNA sense strand
guuccaaccacuguauuua

SEQ ID NO: 1723062 - RNA, 19 nt, Homo sapiens
  misc_RNA (1)...(19): siRNA sense strand
guucguaccaauuaaaguu

SEQ ID NO: 1723063 - RNA, 19 nt, Homo sapiens
  misc_RNA (1)...(19): siRNA sense strand
cauggcaucaaguuuauaa

SEQ ID NO: 1723064 - RNA, 19 nt, Homo sapiens
  misc_RNA (1)...(19): siRNA sense strand
cauccuaugucgcuuugga

SEQ ID NO: 1723065 - RNA, 19 nt, Homo sapiens
  misc_RNA (1)...(19): siRNA sense strand
ggagacaguuaagcaugau

SEQ ID NO: 1723066 - RNA, 19 nt, Homo sapiens
  misc_RNA (1)...(19): siRNA sense strand
caggcuggcugcugagguu

SEQ ID NO: 1723067 - RNA, 19 nt, Homo sapiens
  misc_RNA (1)...(19): siRNA sense strand
auauugagguuuaccauag

SEQ ID NO: 1723068 - RNA, 19 nt, Homo sapiens
  misc_RNA (1)...(19): siRNA sense strand
caauagugaggaaaucauu

SEQ ID NO: 1723069 - RNA, 19 nt, Homo sapiens
  misc_RNA (1)...(19): siRNA sense strand
gagcauccuaugucgcuuu

SEQ ID NO: 1723070 - RNA, 19 nt, Homo sapiens
  misc_RNA (1)...(19): siRNA sense strand
caacauugucugugaccaa

SEQ ID NO: 1723071 - RNA, 19 nt, Homo sapiens
  misc_RNA (1)...(19): siRNA sense strand
ucgaaauuauggauggaaa

SEQ ID NO: 1723072 - RNA, 19 nt, Homo sapiens
  misc_RNA (1)...(19): siRNA sense strand
cagagguauucacaacauu

SEQ ID NO: 1723073 - RNA, 19 nt, Homo sapiens
  misc_RNA (1)...(19): siRNA sense strand
ucacauuggcucuuugaau

SEQ ID NO: 1723074 - RNA, 19 nt, Homo sapiens
  misc_RNA (1)...(19): siRNA sense strand
ugauagaagcuguacagaa

SEQ ID NO: 1723075 - RNA, 19 nt, Homo sapiens
  misc_RNA (1)...(19): siRNA sense strand
aggagacaguuaagcauga

SEQ ID NO: 1723076 - RNA, 19 nt, Homo sapiens
  misc_RNA (1)...(19): siRNA sense strand
gaagaacauggcaucaagu

SEQ ID NO: 1723077 - RNA, 19 nt, Homo sapiens
  misc_RNA (1)...(19): siRNA sense strand
cauugccacuggugaaaga

SEQ ID NO: 1723078 - RNA, 19 nt, Homo sapiens
  misc_RNA (1)...(19): siRNA sense strand
gaugaagaacagaccaaug

SEQ ID NO: 1723079 - RNA, 19 nt, Homo sapiens
  misc_RNA (1)...(19): siRNA sense strand
ugauugggacagaaugaua

SEQ ID NO: 1723080 - RNA, 19 nt, Homo sapiens
  misc_RNA (1)...(19): siRNA sense strand
ugucacagaugaagaacag

SEQ ID NO: 1723081 - RNA, 19 nt, Homo sapiens
  misc_RNA (1)...(19): siRNA sense strand
gcaauaggaagagaugcuu

SEQ ID NO: 1723082 - RNA, 19 nt, Homo sapiens
  misc_RNA (1)...(19): siRNA sense strand
aacauggcaucaaguuuau

SEQ ID NO: 1723083 - RNA, 19 nt, Homo sapiens
  misc_RNA (1)...(19): siRNA sense strand
ggugaaagaccacguuacu

SEQ ID NO: 1723084 - RNA, 19 nt, Homo sapiens
  misc_RNA (1)...(19): siRNA sense strand
ugcaagacucucgaaauua

SEQ ID NO: 1723085 - RNA, 19 nt, Homo sapiens
  misc_RNA (1)...(19): siRNA sense strand
gugaugaucuuuucuccuu

SEQ ID NO: 1723086 - RNA, 19 nt, Homo sapiens
  misc_RNA (1)...(19): siRNA sense strand
gaaagcuguggagaaguuu

SEQ ID NO: 1723087 - RNA, 19 nt, Homo sapiens
  misc_RNA (1)...(19): siRNA sense strand
ggcaucaaguuuauaagac

SEQ ID NO: 1723088 - RNA, 19 nt, Homo sapiens
  misc_RNA (1)...(19): siRNA sense strand
aauguggguugcauaccua

SEQ ID NO: 1723089 - RNA, 19 nt, Homo sapiens
  misc_RNA (1)...(19): siRNA sense strand
caucccuggugacaaagaa

SEQ ID NO: 1723090 - RNA, 19 nt, Homo sapiens
  misc_RNA (1)...(19): siRNA sense strand
gggugaagauaaaugaaaa

SEQ ID NO: 1723091 - RNA, 19 nt, Homo sapiens
  misc_RNA (1)...(19): siRNA sense strand
gaauuggggcuaccgagua

SEQ ID NO: 1723092 - RNA, 19 nt, Homo sapiens
  misc_RNA (1)...(19): siRNA sense strand
ggaagagaugcuugcacaa

SEQ ID NO: 1723093 - RNA, 19 nt, Homo sapiens
  misc_RNA (1)...(19): siRNA sense strand
gcucaguccaccaauagug

SEQ ID NO: 1723094 - RNA, 19 nt, Homo sapiens
  misc_RNA (1)...(19): siRNA sense strand
gagaaugcuuaugggcaau

SEQ ID NO: 1723095 - RNA, 19 nt, Homo sapiens
  misc_RNA (1)...(19): siRNA sense strand
uggcaucaaguuuauaaga

SEQ ID NO: 1723096 - RNA, 19 nt, Homo sapiens
  misc_RNA (1)...(19): siRNA sense strand
ccaccaauagugaggaaau

SEQ ID NO: 1723097 - RNA, 19 nt, Homo sapiens
  misc_RNA (1)...(19): siRNA sense strand
ggacagaaugauagaagcu

SEQ ID NO: 1723098 - RNA, 19 nt, Homo sapiens
  misc_RNA (1)...(19): siRNA sense strand
agaaguuacacaaggcuuu

SEQ ID NO: 1723099 - RNA, 19 nt, Homo sapiens
  misc_RNA (1)...(19): siRNA sense strand
gaucuucccaaguccuaug

SEQ ID NO: 1723100 - RNA, 19 nt, Homo sapiens
  misc_RNA (1)...(19): siRNA sense strand
cggaggaacaugugugaau

SEQ ID NO: 1723101 - RNA, 19 nt, Homo sapiens
  misc_RNA (1)...(19): siRNA sense strand
gaagcuguacagaaucaca

SEQ ID NO: 1723102 - RNA, 19 nt, Homo sapiens
  misc_RNA (1)...(19): siRNA sense strand
cagaaugauagaagcugua

SEQ ID NO: 1723103 - RNA, 19 nt, Homo sapiens
  misc_RNA (1)...(19): siRNA sense strand
uuagguccauucuucuuag

SEQ ID NO: 1723104 - RNA, 19 nt, Homo sapiens
  misc_RNA (1)...(19): siRNA sense strand
gaugcuggcaauaggaaga

SEQ ID NO: 1723105 - RNA, 19 nt, Homo sapiens
  misc_RNA (1)...(19): siRNA sense strand
aagaacauggcaucaaguu

SEQ ID NO: 1723106 - RNA, 19 nt, Homo sapiens
  misc_RNA (1)...(19): siRNA sense strand
gaacauggcaucaaguuua

SEQ ID NO: 1723107 - RNA, 19 nt, Homo sapiens
  misc_RNA (1)...(19): siRNA sense strand
gauagaagcuguacagaau

SEQ ID NO: 1723108 - RNA, 19 nt, Homo sapiens
  misc_RNA (1)...(19): siRNA sense strand
gcaagacucucgaaauuau

SEQ ID NO: 1723109 - RNA, 19 nt, Homo sapiens
  misc_RNA (1)...(19): siRNA sense strand
gaacggcccugaagaucuu

SEQ ID NO: 1723110 - RNA, 19 nt, Homo sapiens
  misc_RNA (1)...(19): siRNA sense strand
ggaaaucauugaaggagaa

SEQ ID NO: 1723111 - RNA, 19 nt, Homo sapiens
  misc_RNA (1)...(19): siRNA sense strand
ggagaaagcuguggagaag

SEQ ID NO: 1723112 - RNA, 19 nt, Homo sapiens
  misc_RNA (1)...(19): siRNA sense strand
gggcaucccuggugacaaa

SEQ ID NO: 1723113 - RNA, 19 nt, Homo sapiens
  misc_RNA (1)...(19): siRNA sense strand
ggauuaaggcaacaaauaa

SEQ ID NO: 1723114 - RNA, 19 nt, Homo sapiens
  misc_RNA (1)...(19): siRNA sense strand
ggagugcgcuggauuucuu

SEQ ID NO: 1723115 - RNA, 19 nt, Homo sapiens
  misc_RNA (1)...(19): siRNA sense strand
ggaagaacauggcaucaag

SEQ ID NO: 1723116 - RNA, 19 nt, Homo sapiens
  misc_RNA (1)...(19): siRNA sense strand
cacauuggcucuuugaauu

SEQ ID NO: 1723117 - RNA, 19 nt, Homo sapiens
  misc_RNA (1)...(19): siRNA sense strand
gucaagagauaacaacaaa

SEQ ID NO: 1723118 - RNA, 19 nt, Homo sapiens
  misc_RNA (1)...(19): siRNA sense strand
gcagagguauucacaacau

SEQ ID NO: 1723119 - RNA, 19 nt, Homo sapiens
  misc_RNA (1)...(19): siRNA sense strand
cugcaagacucucgaaauu

SEQ ID NO: 1723120 - RNA, 19 nt, Homo sapiens
  misc_RNA (1)...(19): siRNA sense strand
caagagauaacaacaaaug

SEQ ID NO: 1723121 - RNA, 19 nt, Homo sapiens
  misc_RNA (1)...(19): siRNA sense strand
ugaaagaccacguuacuug

SEQ ID NO: 1723122 - RNA, 19 nt, Homo sapiens
  misc_RNA (1)...(19): siRNA sense strand
agaaagcuguggagaaguu

SEQ ID NO: 1723123 - RNA, 19 nt, Homo sapiens
  misc_RNA (1)...(19): siRNA sense strand
ggaggaacaugugugaaug

SEQ ID NO: 1723124 - RNA, 19 nt, Homo sapiens
  misc_RNA (1)...(19): siRNA sense strand
uaaagacaaugaacguguu

SEQ ID NO: 1723125 - RNA, 19 nt, Homo sapiens
  misc_RNA (1)...(19): siRNA sense strand
guagcucaguccaccaaua

SEQ ID NO: 1723126 - RNA, 19 nt, Homo sapiens
  misc_RNA (1)...(19): siRNA sense strand
agacaguucguaccaauua

SEQ ID NO: 1723127 - RNA, 19 nt, Homo sapiens
  misc_RNA (1)...(19): siRNA sense strand
ggacauggccaacaaaauu

SEQ ID NO: 1723128 - RNA, 19 nt, Homo sapiens
  misc_RNA (1)...(19): siRNA sense strand
gacaaagaauacugcauca

SEQ ID NO: 1723129 - RNA, 19 nt, Homo sapiens
  misc_RNA (1)...(19): siRNA sense strand
gcaucaaguuuauaagaca

SEQ ID NO: 1723130 - RNA, 19 nt, Homo sapiens
  misc_RNA (1)...(19): siRNA sense strand
gguaagacccugguuguug

SEQ ID NO: 1723131 - RNA, 19 nt, Homo sapiens
  misc_RNA (1)...(19): siRNA sense strand
ggcgauauauuggaggaua

SEQ ID NO: 1723132 - RNA, 19 nt, Homo sapiens
  misc_RNA (1)...(19): siRNA sense strand
uaagacaguucguaccaau

SEQ ID NO: 1723133 - RNA, 19 nt, Homo sapiens
  misc_RNA (1)...(19): siRNA sense strand
gcgauauauuggaggauaa

SEQ ID NO: 1723134 - RNA, 19 nt, Homo sapiens
  misc_RNA (1)...(19): siRNA sense strand
gaaugcuuaugggcaauuu

SEQ ID NO: 1723135 - RNA, 19 nt, Homo sapiens
  misc_RNA (1)...(19): siRNA sense strand
ggaagaaaauauugagguu

SEQ ID NO: 1723136 - RNA, 19 nt, Homo sapiens
  misc_RNA (1)...(19): siRNA sense strand
uaaggaggcagcccaauau

SEQ ID NO: 1723137 - RNA, 19 nt, Homo sapiens
  misc_RNA (1)...(19): siRNA sense strand
cuaaggaggcagcccaaua

SEQ ID NO: 1723138 - RNA, 19 nt, Homo sapiens
  misc_RNA (1)...(19): siRNA sense strand
uagaagcuguacagaauca

SEQ ID NO: 1723139 - RNA, 19 nt, Homo sapiens
  misc_RNA (1)...(19): siRNA sense strand
ccacuguauuuacuccuuu

SEQ ID NO: 1723140 - RNA, 19 nt, Homo sapiens
  misc_RNA (1)...(19): siRNA sense strand
gacaguucguaccaauuaa

SEQ ID NO: 1723141 - RNA, 19 nt, Homo sapiens
  misc_RNA (1)...(19): siRNA sense strand
agaaucacauuggcucuuu

SEQ ID NO: 1723142 - RNA, 19 nt, Homo sapiens
  misc_RNA (1)...(19): siRNA sense strand
gaaagucgaggagacaguu

SEQ ID NO: 1723143 - RNA, 19 nt, Homo sapiens
  misc_RNA (1)...(19): siRNA sense strand
gguuuaccauaguuacuuu

SEQ ID NO: 1723144 - RNA, 19 nt, Homo sapiens
  misc_RNA (1)...(19): siRNA sense strand
ggacaagcccugcaagacu

SEQ ID NO: 1723145 - RNA, 19 nt, Homo sapiens
  misc_RNA (1)...(19): siRNA sense strand
gaaucacauuggcucuuug

SEQ ID NO: 1723146 - RNA, 19 nt, Homo sapiens
  misc_RNA (1)...(19): siRNA sense strand
ggacagcacaauuggaauc

SEQ ID NO: 1723147 - RNA, 19 nt, Homo sapiens
  misc_RNA (1)...(19): siRNA sense strand
acgauuccgucaagagaua

SEQ ID NO: 1723148 - RNA, 19 nt, Homo sapiens
  misc_RNA (1)...(19): siRNA sense strand
gugaacacauggaagaaca

SEQ ID NO: 1723149 - RNA, 19 nt, Homo sapiens
  misc_RNA (1)...(19): siRNA sense strand
caaaauuggugaacacaug

SEQ ID NO: 1723150 - RNA, 19 nt, Homo sapiens
  misc_RNA (1)...(19): siRNA sense strand
gaauguggguugcauaccu

SEQ ID NO: 1723151 - RNA, 19 nt, Homo sapiens
  misc_RNA (1)...(19): siRNA sense strand
gcgcucaaauguggacuga

SEQ ID NO: 1723152 - RNA, 19 nt, Homo sapiens
  misc_RNA (1)...(19): siRNA sense strand
gaaauuauggauggaaagu

SEQ ID NO: 1723153 - RNA, 19 nt, Homo sapiens
  misc_RNA (1)...(19): siRNA sense strand
gagaauauaauacggugau

SEQ ID NO: 1723154 - RNA, 19 nt, Homo sapiens
  misc_RNA (1)...(19): siRNA sense strand
guuagguccauucuucuua

SEQ ID NO: 1723155 - RNA, 19 nt, Homo sapiens
  misc_RNA (1)...(19): siRNA sense strand
gaguagcucugcgggagaa

SEQ ID NO: 1723156 - RNA, 19 nt, Homo sapiens
  misc_RNA (1)...(19): siRNA sense strand
gugcagagguauucacaac

SEQ ID NO: 1723157 - RNA, 19 nt, Homo sapiens
  misc_RNA (1)...(19): siRNA sense strand
ccaaaugcuggagaaguua

SEQ ID NO: 1723158 - RNA, 19 nt, Homo sapiens
  misc_RNA (1)...(19): siRNA sense strand
gaaguuacacaaggcuuug

SEQ ID NO: 1723159 - RNA, 19 nt, Homo sapiens
  misc_RNA (1)...(19): siRNA sense strand
aggauuaaggcaacaaaua

SEQ ID NO: 1723160 - RNA, 19 nt, Homo sapiens
  misc_RNA (1)...(19): siRNA sense strand
uguauuuacuccuuuggaa

SEQ ID NO: 1723161 - RNA, 19 nt, Homo sapiens
  misc_RNA (1)...(19): siRNA sense strand
guuccaaccacuguauuua

SEQ ID NO: 1723162 - RNA, 19 nt, Homo sapiens
  misc_RNA (1)...(19): siRNA sense strand
guucguaccaauuaaaguu

SEQ ID NO: 1723163 - RNA, 19 nt, Homo sapiens
  misc_RNA (1)...(19): siRNA sense strand
cauggcaucaaguuuauaa

SEQ ID NO: 1723164 - RNA, 19 nt, Homo sapiens
  misc_RNA (1)...(19): siRNA sense strand
cauccuaugucgcuuugga

SEQ ID NO: 1723165 - RNA, 19 nt, Homo sapiens
  misc_RNA (1)...(19): siRNA sense strand
ggagacaguuaagcaugau

SEQ ID NO: 1723166 - RNA, 19 nt, Homo sapiens
  misc_RNA (1)...(19): siRNA sense strand
caggcuggcugcugagguu

SEQ ID NO: 1723167 - RNA, 19 nt, Homo sapiens
  misc_RNA (1)...(19): siRNA sense strand
auauugagguuuaccauag

SEQ ID NO: 1723168 - RNA, 19 nt, Homo sapiens
  misc_RNA (1)...(19): siRNA sense strand
caauagugaggaaaucauu

SEQ ID NO: 1723169 - RNA, 19 nt, Homo sapiens
  misc_RNA (1)...(19): siRNA sense strand
gagcauccuaugucgcuuu

SEQ ID NO: 1723170 - RNA, 19 nt, Homo sapiens
  misc_RNA (1)...(19): siRNA sense strand
caacauugucugugaccaa

SEQ ID NO: 1723171 - RNA, 19 nt, Homo sapiens
  misc_RNA (1)...(19): siRNA sense strand
ucgaaauuauggauggaaa

SEQ ID NO: 1723172 - RNA, 19 nt, Homo sapiens
  misc_RNA (1)...(19): siRNA sense strand
cagagguauucacaacauu

SEQ ID NO: 1723173 - RNA, 19 nt, Homo sapiens
  misc_RNA (1)...(19): siRNA sense strand
ucacauuggcucuuugaau

SEQ ID NO: 1723174 - RNA, 19 nt, Homo sapiens
  misc_RNA (1)...(19): siRNA sense strand
ugauagaagcuguacagaa

SEQ ID NO: 1723175 - RNA, 19 nt, Homo sapiens
  misc_RNA (1)...(19): siRNA sense strand
aggagacaguuaagcauga

SEQ ID NO: 1723176 - RNA, 19 nt, Homo sapiens
  misc_RNA (1)...(19): siRNA sense strand
gaagaacauggcaucaagu

SEQ ID NO: 1723177 - RNA, 19 nt, Homo sapiens
  misc_RNA (1)...(19): siRNA sense strand
cauugccacuggugaaaga

SEQ ID NO: 1723178 - RNA, 19 nt, Homo sapiens
  misc_RNA (1)...(19): siRNA sense strand
gaugaagaacagaccaaug

SEQ ID NO: 1723179 - RNA, 19 nt, Homo sapiens
  misc_RNA (1)...(19): siRNA sense strand
ugauugggacagaaugaua

SEQ ID NO: 1723180 - RNA, 19 nt, Homo sapiens
  misc_RNA (1)...(19): siRNA sense strand
ugucacagaugaagaacag

SEQ ID NO: 1723181 - RNA, 19 nt, Homo sapiens
  misc_RNA (1)...(19): siRNA sense strand
gcaauaggaagagaugcuu

SEQ ID NO: 1723182 - RNA, 19 nt, Homo sapiens
  misc_RNA (1)...(19): siRNA sense strand
aacauggcaucaaguuuau

SEQ ID NO: 1723183 - RNA, 19 nt, Homo sapiens
  misc_RNA (1)...(19): siRNA sense strand
ggugaaagaccacguuacu

SEQ ID NO: 1723184 - RNA, 19 nt, Homo sapiens
  misc_RNA (1)...(19): siRNA sense strand
ugcaagacucucgaaauua

SEQ ID NO: 1723185 - RNA, 19 nt, Homo sapiens
  misc_RNA (1)...(19): siRNA sense strand
gugaugaucuuuucuccuu

SEQ ID NO: 1723186 - RNA, 19 nt, Homo sapiens
  misc_RNA (1)...(19): siRNA sense strand
gaaagcuguggagaaguuu

SEQ ID NO: 1723187 - RNA, 19 nt, Homo sapiens
  misc_RNA (1)...(19): siRNA sense strand
ggcaucaaguuuauaagac

SEQ ID NO: 1723188 - RNA, 19 nt, Homo sapiens
  misc_RNA (1)...(19): siRNA sense strand
aauguggguugcauaccua

SEQ ID NO: 1723189 - RNA, 19 nt, Homo sapiens
  misc_RNA (1)...(19): siRNA sense strand
caucccuggugacaaagaa

SEQ ID NO: 1723190 - RNA, 19 nt, Homo sapiens
  misc_RNA (1)...(19): siRNA sense strand
gggugaagauaaaugaaaa

SEQ ID NO: 1723191 - RNA, 19 nt, Homo sapiens
  misc_RNA (1)...(19): siRNA sense strand
gaauuggggcuaccgagua

SEQ ID NO: 1723192 - RNA, 19 nt, Homo sapiens
  misc_RNA (1)...(19): siRNA sense strand
ggaagagaugcuugcacaa

SEQ ID NO: 1723193 - RNA, 19 nt, Homo sapiens
  misc_RNA (1)...(19): siRNA sense strand
gcucaguccaccaauagug

SEQ ID NO: 1723194 - RNA, 19 nt, Homo sapiens
  misc_RNA (1)...(19): siRNA sense strand
gagaaugcuuaugggcaau

SEQ ID NO: 1723195 - RNA, 19 nt, Homo sapiens
  misc_RNA (1)...(19): siRNA sense strand
uggcaucaaguuuauaaga

SEQ ID NO: 1723196 - RNA, 19 nt, Homo sapiens
  misc_RNA (1)...(19): siRNA sense strand
ccaccaauagugaggaaau

SEQ ID NO: 1723197 - RNA, 19 nt, Homo sapiens
  misc_RNA (1)...(19): siRNA sense strand
ggacagaaugauagaagcu

SEQ ID NO: 1723198 - RNA, 19 nt, Homo sapiens
  misc_RNA (1)...(19): siRNA sense strand
agaaguuacacaaggcuuu

SEQ ID NO: 1723199 - RNA, 19 nt, Homo sapiens
  misc_RNA (1)...(19): siRNA sense strand
gaucuucccaaguccuaug

SEQ ID NO: 1723200 - RNA, 19 nt, Homo sapiens
  misc_RNA (1)...(19): siRNA sense strand
cggaggaacaugugugaau

SEQ ID NO: 1723201 - RNA, 19 nt, Homo sapiens
  misc_RNA (1)...(19): siRNA sense strand
gaagcuguacagaaucaca

SEQ ID NO: 1723202 - RNA, 19 nt, Homo sapiens
  misc_RNA (1)...(19): siRNA sense strand
cagaaugauagaagcugua

SEQ ID NO: 1723203 - RNA, 19 nt, Homo sapiens
  misc_RNA (1)...(19): siRNA sense strand
uuagguccauucuucuuag

SEQ ID NO: 1723204 - RNA, 19 nt, Homo sapiens
  misc_RNA (1)...(19): siRNA sense strand
gaugcuggcaauaggaaga

SEQ ID NO: 1723205 - RNA, 19 nt, Homo sapiens
  misc_RNA (1)...(19): siRNA sense strand
aagaacauggcaucaaguu

SEQ ID NO: 1723206 - RNA, 19 nt, Homo sapiens
  misc_RNA (1)...(19): siRNA sense strand
ucgcagaacugaagaauuu

SEQ ID NO: 1723207 - RNA, 19 nt, Homo sapiens
  misc_RNA (1)...(19): siRNA sense strand
uuaaagagcuccacauuca

SEQ ID NO: 1723208 - RNA, 19 nt, Homo sapiens
  misc_RNA (1)...(19): siRNA sense strand
ugaacaggcugaacacuuu

SEQ ID NO: 1723209 - RNA, 19 nt, Homo sapiens
  misc_RNA (1)...(19): siRNA sense strand
gaacaucgcagaacugaag

SEQ ID NO: 1723210 - RNA, 19 nt, Homo sapiens
  misc_RNA (1)...(19): siRNA sense strand
cuaggaaacuuggauuuaa

SEQ ID NO: 1723211 - RNA, 19 nt, Homo sapiens
  misc_RNA (1)...(19): siRNA sense strand
gaaauccugccgccagaua

SEQ ID NO: 1723212 - RNA, 19 nt, Homo sapiens
  misc_RNA (1)...(19): siRNA sense strand
gaagaauaaugacaaaucg

SEQ ID NO: 1723213 - RNA, 19 nt, Homo sapiens
  misc_RNA (1)...(19): siRNA sense strand
guucugagacauacaaaua

SEQ ID NO: 1723214 - RNA, 19 nt, Homo sapiens
  misc_RNA (1)...(19): siRNA sense strand
ggauuuaacuggccagaag

SEQ ID NO: 1723215 - RNA, 19 nt, Homo sapiens
  misc_RNA (1)...(19): siRNA sense strand
caacugguccucagccaua

SEQ ID NO: 1723216 - RNA, 19 nt, Homo sapiens
  misc_RNA (1)...(19): siRNA sense strand
gaguauauccguucugaga

SEQ ID NO: 1723217 - RNA, 19 nt, Homo sapiens
  misc_RNA (1)...(19): siRNA sense strand
gaacuaggaaacuuggauu

SEQ ID NO: 1723218 - RNA, 19 nt, Homo sapiens
  misc_RNA (1)...(19): siRNA sense strand
uacaacaacuugagcgaaa

SEQ ID NO: 1723219 - RNA, 19 nt, Homo sapiens
  misc_RNA (1)...(19): siRNA sense strand
ucacaaaguugcagauacu

SEQ ID NO: 1723220 - RNA, 19 nt, Homo sapiens
  misc_RNA (1)...(19): siRNA sense strand
uugggaagcucacaaaguu

SEQ ID NO: 1723221 - RNA, 19 nt, Homo sapiens
  misc_RNA (1)...(19): siRNA sense strand
gaaccaccgaagaagaaua

SEQ ID NO: 1723222 - RNA, 19 nt, Homo sapiens
  misc_RNA (1)...(19): siRNA sense strand
cgaagaagaauaaugacaa

SEQ ID NO: 1723223 - RNA, 19 nt, Homo sapiens
  misc_RNA (1)...(19): siRNA sense strand
gaucaguagccuucagaaa

SEQ ID NO: 1723224 - RNA, 19 nt, Homo sapiens
  misc_RNA (1)...(19): siRNA sense strand
auacucagccuuagggaua

SEQ ID NO: 1723225 - RNA, 19 nt, Homo sapiens
  misc_RNA (1)...(19): siRNA sense strand
caccgaagaagaauaauga

SEQ ID NO: 1723226 - RNA, 19 nt, Homo sapiens
  misc_RNA (1)...(19): siRNA sense strand
guauauccguucugagaca

SEQ ID NO: 1723227 - RNA, 19 nt, Homo sapiens
  misc_RNA (1)...(19): siRNA sense strand
ucgaggagcugcccacaca

SEQ ID NO: 1723228 - RNA, 19 nt, Homo sapiens
  misc_RNA (1)...(19): siRNA sense strand
gcuuaaagagcuccacauu

SEQ ID NO: 1723229 - RNA, 19 nt, Homo sapiens
  misc_RNA (1)...(19): siRNA sense strand
cagaaccaccgaagaagaa

SEQ ID NO: 1723230 - RNA, 19 nt, Homo sapiens
  misc_RNA (1)...(19): siRNA sense strand
ucaguagccuucagaaacu

SEQ ID NO: 1723231 - RNA, 19 nt, Homo sapiens
  misc_RNA (1)...(19): siRNA sense strand
gaacaggcugaacacuuug

SEQ ID NO: 1723232 - RNA, 19 nt, Homo sapiens
  misc_RNA (1)...(19): siRNA sense strand
gcucacaaaguugcagaua

SEQ ID NO: 1723233 - RNA, 19 nt, Homo sapiens
  misc_RNA (1)...(19): siRNA sense strand
ccucagccauaacaagcua

SEQ ID NO: 1723234 - RNA, 19 nt, Homo sapiens
  misc_RNA (1)...(19): siRNA sense strand
uugcagauacucagccuua

SEQ ID NO: 1723235 - RNA, 19 nt, Homo sapiens
  misc_RNA (1)...(19): siRNA sense strand
ccagaagcagguauucaaa

SEQ ID NO: 1723236 - RNA, 19 nt, Homo sapiens
  misc_RNA (1)...(19): siRNA sense strand
guucuggacuugacguaca

SEQ ID NO: 1723237 - RNA, 19 nt, Homo sapiens
  misc_RNA (1)...(19): siRNA sense strand
gccagaagcagguauucaa

SEQ ID NO: 1723238 - RNA, 19 nt, Homo sapiens
  misc_RNA (1)...(19): siRNA sense strand
cauaacaagcuaacaaugg

SEQ ID NO: 1723239 - RNA, 19 nt, Homo sapiens
  misc_RNA (1)...(19): siRNA sense strand
ggacuugacguacaacaac

SEQ ID NO: 1723240 - RNA, 19 nt, Homo sapiens
  misc_RNA (1)...(19): siRNA sense strand
gagcugcccacacagauca

SEQ ID NO: 1723241 - RNA, 19 nt, Homo sapiens
  misc_RNA (1)...(19): siRNA sense strand
ccagaaccaccgaagaaga

SEQ ID NO: 1723242 - RNA, 19 nt, Homo sapiens
  misc_RNA (1)...(19): siRNA sense strand
auaacaagcuaacaauggu

SEQ ID NO: 1723243 - RNA, 19 nt, Homo sapiens
  misc_RNA (1)...(19): siRNA sense strand
acuaggaaacuuggauuua

SEQ ID NO: 1723244 - RNA, 19 nt, Homo sapiens
  misc_RNA (1)...(19): siRNA sense strand
ccugccagcucuugagguu

SEQ ID NO: 1723245 - RNA, 19 nt, Homo sapiens
  misc_RNA (1)...(19): siRNA sense strand
gaggagcugcccacacaga

SEQ ID NO: 1723246 - RNA, 19 nt, Homo sapiens
  misc_RNA (1)...(19): siRNA sense strand
uaggaaacuuggauuuaac

SEQ ID NO: 1723247 - RNA, 19 nt, Homo sapiens
  misc_RNA (1)...(19): siRNA sense strand
uugaguauauccguucuga

SEQ ID NO: 1723248 - RNA, 19 nt, Homo sapiens
  misc_RNA (1)...(19): siRNA sense strand
caccugaaccuuggcauga

SEQ ID NO: 1723249 - RNA, 19 nt, Homo sapiens
  misc_RNA (1)...(19): siRNA sense strand
agacauacaaauaccucua

SEQ ID NO: 1723250 - RNA, 19 nt, Homo sapiens
  misc_RNA (1)...(19): siRNA sense strand
uaccuuaucccauaucaca

SEQ ID NO: 1723251 - RNA, 19 nt, Homo sapiens
  misc_RNA (1)...(19): siRNA sense strand
gauauugggaagcucacaa

SEQ ID NO: 1723252 - RNA, 19 nt, Homo sapiens
  misc_RNA (1)...(19): siRNA sense strand
agaagcagguauucaaagc

SEQ ID NO: 1723253 - RNA, 19 nt, Homo sapiens
  misc_RNA (1)...(19): siRNA sense strand
aaccaccgaagaagaauaa

SEQ ID NO: 1723254 - RNA, 19 nt, Homo sapiens
  misc_RNA (1)...(19): siRNA sense strand
gaagcagguauucaaagca

SEQ ID NO: 1723255 - RNA, 19 nt, Homo sapiens
  misc_RNA (1)...(19): siRNA sense strand
gaaacucaaacaccugaac

SEQ ID NO: 1723256 - RNA, 19 nt, Homo sapiens
  misc_RNA (1)...(19): siRNA sense strand
ccaccgaagaagaauaaug

SEQ ID NO: 1723257 - RNA, 19 nt, Homo sapiens
  misc_RNA (1)...(19): siRNA sense strand
gccauaacaagcuaacaau

SEQ ID NO: 1723258 - RNA, 19 nt, Homo sapiens
  misc_RNA (1)...(19): siRNA sense strand
gcagaacugaagaauuugg

SEQ ID NO: 1723259 - RNA, 19 nt, Homo sapiens
  misc_RNA (1)...(19): siRNA sense strand
ggcaugaacaggcugaaca

SEQ ID NO: 1723260 - RNA, 19 nt, Homo sapiens
  misc_RNA (1)...(19): siRNA sense strand
ccauaacaagcuaacaaug

SEQ ID NO: 1723261 - RNA, 19 nt, Homo sapiens
  misc_RNA (1)...(19): siRNA sense strand
caccgaacaucgcagaacu

SEQ ID NO: 1723262 - RNA, 19 nt, Homo sapiens
  misc_RNA (1)...(19): siRNA sense strand
cacccugcgugcacucuau

SEQ ID NO: 1723263 - RNA, 19 nt, Homo sapiens
  misc_RNA (1)...(19): siRNA sense strand
gcagauacucagccuuagg

SEQ ID NO: 1723264 - RNA, 19 nt, Homo sapiens
  misc_RNA (1)...(19): siRNA sense strand
cuaucuaagugacaacgau

SEQ ID NO: 1723265 - RNA, 19 nt, Homo sapiens
  misc_RNA (1)...(19): siRNA sense strand
cugcgugcacucuaucuaa

SEQ ID NO: 1723266 - RNA, 19 nt, Homo sapiens
  misc_RNA (1)...(19): siRNA sense strand
uaucuaagugacaacgauu

SEQ ID NO: 1723267 - RNA, 19 nt, Homo sapiens
  misc_RNA (1)...(19): siRNA sense strand
ccgaacaucgcagaacuga

SEQ ID NO: 1723268 - RNA, 19 nt, Homo sapiens
  misc_RNA (1)...(19): siRNA sense strand
cagaagcagguauucaaag

SEQ ID NO: 1723269 - RNA, 19 nt, Homo sapiens
  misc_RNA (1)...(19): siRNA sense strand
ucgcagaacugaagaauuu

SEQ ID NO: 1723270 - RNA, 19 nt, Homo sapiens
  misc_RNA (1)...(19): siRNA sense strand
uuaaagagcuccacauuca

SEQ ID NO: 1723271 - RNA, 19 nt, Homo sapiens
  misc_RNA (1)...(19): siRNA sense strand
ugaacaggcugaacacuuu

SEQ ID NO: 1723272 - RNA, 19 nt, Homo sapiens
  misc_RNA (1)...(19): siRNA sense strand
gaacaucgcagaacugaag

SEQ ID NO: 1723273 - RNA, 19 nt, Homo sapiens
  misc_RNA (1)...(19): siRNA sense strand
cuaggaaacuuggauuuaa

SEQ ID NO: 1723274 - RNA, 19 nt, Homo sapiens
  misc_RNA (1)...(19): siRNA sense strand
gaaauccugccgccagaua

SEQ ID NO: 1723275 - RNA, 19 nt, Homo sapiens
  misc_RNA (1)...(19): siRNA sense strand
gaagaauaaugacaaaucg

SEQ ID NO: 1723276 - RNA, 19 nt, Homo sapiens
  misc_RNA (1)...(19): siRNA sense strand
guucugagacauacaaaua

SEQ ID NO: 1723277 - RNA, 19 nt, Homo sapiens
  misc_RNA (1)...(19): siRNA sense strand
ggauuuaacuggccagaag

SEQ ID NO: 1723278 - RNA, 19 nt, Homo sapiens
  misc_RNA (1)...(19): siRNA sense strand
gaguauauccguucugaga

SEQ ID NO: 1723279 - RNA, 19 nt, Homo sapiens
  misc_RNA (1)...(19): siRNA sense strand
gaacuaggaaacuuggauu

SEQ ID NO: 1723280 - RNA, 19 nt, Homo sapiens
  misc_RNA (1)...(19): siRNA sense strand
uacaacaacuugagcgaaa

SEQ ID NO: 1723281 - RNA, 19 nt, Homo sapiens
  misc_RNA (1)...(19): siRNA sense strand
ucacaaaguugcagauacu

SEQ ID NO: 1723282 - RNA, 19 nt, Homo sapiens
  misc_RNA (1)...(19): siRNA sense strand
uugggaagcucacaaaguu

SEQ ID NO: 1723283 - RNA, 19 nt, Homo sapiens
  misc_RNA (1)...(19): siRNA sense strand
gaaccaccgaagaagaaua

SEQ ID NO: 1723284 - RNA, 19 nt, Homo sapiens
  misc_RNA (1)...(19): siRNA sense strand
cgaagaagaauaaugacaa

SEQ ID NO: 1723285 - RNA, 19 nt, Homo sapiens
  misc_RNA (1)...(19): siRNA sense strand
gaucaguagccuucagaaa

SEQ ID NO: 1723286 - RNA, 19 nt, Homo sapiens
  misc_RNA (1)...(19): siRNA sense strand
auacucagccuuagggaua

SEQ ID NO: 1723287 - RNA, 19 nt, Homo sapiens
  misc_RNA (1)...(19): siRNA sense strand
caccgaagaagaauaauga

SEQ ID NO: 1723288 - RNA, 19 nt, Homo sapiens
  misc_RNA (1)...(19): siRNA sense strand
guauauccguucugagaca

SEQ ID NO: 1723289 - RNA, 19 nt, Homo sapiens
  misc_RNA (1)...(19): siRNA sense strand
ucgaggagcugcccacaca

SEQ ID NO: 1723290 - RNA, 19 nt, Homo sapiens
  misc_RNA (1)...(19): siRNA sense strand
gcuuaaagagcuccacauu

SEQ ID NO: 1723291 - RNA, 19 nt, Homo sapiens
  misc_RNA (1)...(19): siRNA sense strand
cagaaccaccgaagaagaa

SEQ ID NO: 1723292 - RNA, 19 nt, Homo sapiens
  misc_RNA (1)...(19): siRNA sense strand
ucaguagccuucagaaacu

SEQ ID NO: 1723293 - RNA, 19 nt, Homo sapiens
  misc_RNA (1)...(19): siRNA sense strand
gaacaggcugaacacuuug

SEQ ID NO: 1723294 - RNA, 19 nt, Homo sapiens
  misc_RNA (1)...(19): siRNA sense strand
gcucacaaaguugcagaua

SEQ ID NO: 1723295 - RNA, 19 nt, Homo sapiens
  misc_RNA (1)...(19): siRNA sense strand
uugcagauacucagccuua

SEQ ID NO: 1723296 - RNA, 19 nt, Homo sapiens
  misc_RNA (1)...(19): siRNA sense strand
ccagaagcagguauucaaa

SEQ ID NO: 1723297 - RNA, 19 nt, Homo sapiens
  misc_RNA (1)...(19): siRNA sense strand
guucuggacuugacguaca

SEQ ID NO: 1723298 - RNA, 19 nt, Homo sapiens
  misc_RNA (1)...(19): siRNA sense strand
gccagaagcagguauucaa

SEQ ID NO: 1723299 - RNA, 19 nt, Homo sapiens
  misc_RNA (1)...(19): siRNA sense strand
ggacuugacguacaacaac

SEQ ID NO: 1723300 - RNA, 19 nt, Homo sapiens
  misc_RNA (1)...(19): siRNA sense strand
gagcugcccacacagauca

SEQ ID NO: 1723301 - RNA, 19 nt, Homo sapiens
  misc_RNA (1)...(19): siRNA sense strand
ccagaaccaccgaagaaga

SEQ ID NO: 1723302 - RNA, 19 nt, Homo sapiens
  misc_RNA (1)...(19): siRNA sense strand
ccugccagcucuugagguu

SEQ ID NO: 1723303 - RNA, 19 nt, Homo sapiens
  misc_RNA (1)...(19): siRNA sense strand
gaggagcugcccacacaga

SEQ ID NO: 1723304 - RNA, 19 nt, Homo sapiens
  misc_RNA (1)...(19): siRNA sense strand
acuaggaaacuuggauuua

SEQ ID NO: 1723305 - RNA, 19 nt, Homo sapiens
  misc_RNA (1)...(19): siRNA sense strand
uaggaaacuuggauuuaac

SEQ ID NO: 1723306 - RNA, 19 nt, Homo sapiens
  misc_RNA (1)...(19): siRNA sense strand
uugaguauauccguucuga

SEQ ID NO: 1723307 - RNA, 19 nt, Homo sapiens
  misc_RNA (1)...(19): siRNA sense strand
caccugaaccuuggcauga

SEQ ID NO: 1723308 - RNA, 19 nt, Homo sapiens
  misc_RNA (1)...(19): siRNA sense strand
agacauacaaauaccucua

SEQ ID NO: 1723309 - RNA, 19 nt, Homo sapiens
  misc_RNA (1)...(19): siRNA sense strand
gauauugggaagcucacaa

SEQ ID NO: 1723310 - RNA, 19 nt, Homo sapiens
  misc_RNA (1)...(19): siRNA sense strand
agaagcagguauucaaagc

SEQ ID NO: 1723311 - RNA, 19 nt, Homo sapiens
  misc_RNA (1)...(19): siRNA sense strand
aaccaccgaagaagaauaa

SEQ ID NO: 1723312 - RNA, 19 nt, Homo sapiens
  misc_RNA (1)...(19): siRNA sense strand
gaagcagguauucaaagca

SEQ ID NO: 1723313 - RNA, 19 nt, Homo sapiens
  misc_RNA (1)...(19): siRNA sense strand
gaaacucaaacaccugaac

SEQ ID NO: 1723314 - RNA, 19 nt, Homo sapiens
  misc_RNA (1)...(19): siRNA sense strand
ccaccgaagaagaauaaug

SEQ ID NO: 1723315 - RNA, 19 nt, Homo sapiens
  misc_RNA (1)...(19): siRNA sense strand
gcagaacugaagaauuugg

SEQ ID NO: 1723316 - RNA, 19 nt, Homo sapiens
  misc_RNA (1)...(19): siRNA sense strand
ggcaugaacaggcugaaca

SEQ ID NO: 1723317 - RNA, 19 nt, Homo sapiens
  misc_RNA (1)...(19): siRNA sense strand
caccgaacaucgcagaacu

SEQ ID NO: 1723318 - RNA, 19 nt, Homo sapiens
  misc_RNA (1)...(19): siRNA sense strand
cacccugcgugcacucuau

SEQ ID NO: 1723319 - RNA, 19 nt, Homo sapiens
  misc_RNA (1)...(19): siRNA sense strand
gcagauacucagccuuagg

SEQ ID NO: 1723320 - RNA, 19 nt, Homo sapiens
  misc_RNA (1)...(19): siRNA sense strand
cuaucuaagugacaacgau

SEQ ID NO: 1723321 - RNA, 19 nt, Homo sapiens
  misc_RNA (1)...(19): siRNA sense strand
cugcgugcacucuaucuaa

SEQ ID NO: 1723322 - RNA, 19 nt, Homo sapiens
  misc_RNA (1)...(19): siRNA sense strand
uaucuaagugacaacgauu

SEQ ID NO: 1723323 - RNA, 19 nt, Homo sapiens
  misc_RNA (1)...(19): siRNA sense strand
ccgaacaucgcagaacuga

SEQ ID NO: 1723324 - RNA, 19 nt, Homo sapiens
  misc_RNA (1)...(19): siRNA sense strand
cagaagcagguauucaaag

SEQ ID NO: 1723325 - RNA, 19 nt, Homo sapiens
  misc_RNA (1)...(19): siRNA sense strand
ucgcagaacugaagaauuu

SEQ ID NO: 1723326 - RNA, 19 nt, Homo sapiens
  misc_RNA (1)...(19): siRNA sense strand
uuaaagagcuccacauuca

SEQ ID NO: 1723327 - RNA, 19 nt, Homo sapiens
  misc_RNA (1)...(19): siRNA sense strand
ugaacaggcugaacacuuu

SEQ ID NO: 1723328 - RNA, 19 nt, Homo sapiens
  misc_RNA (1)...(19): siRNA sense strand
gaacaucgcagaacugaag

SEQ ID NO: 1723329 - RNA, 19 nt, Homo sapiens
  misc_RNA (1)...(19): siRNA sense strand
cuaggaaacuuggauuuaa

SEQ ID NO: 1723330 - RNA, 19 nt, Homo sapiens
  misc_RNA (1)...(19): siRNA sense strand
gaaauccugccgccagaua

SEQ ID NO: 1723331 - RNA, 19 nt, Homo sapiens
  misc_RNA (1)...(19): siRNA sense strand
gaagaauaaugacaaaucg

SEQ ID NO: 1723332 - RNA, 19 nt, Homo sapiens
  misc_RNA (1)...(19): siRNA sense strand
guucugagacauacaaaua

SEQ ID NO: 1723333 - RNA, 19 nt, Homo sapiens
  misc_RNA (1)...(19): siRNA sense strand
ggauuuaacuggccagaag

SEQ ID NO: 1723334 - RNA, 19 nt, Homo sapiens
  misc_RNA (1)...(19): siRNA sense strand
caacugguccucagccaua

SEQ ID NO: 1723335 - RNA, 19 nt, Homo sapiens
  misc_RNA (1)...(19): siRNA sense strand
gaguauauccguucugaga

SEQ ID NO: 1723336 - RNA, 19 nt, Homo sapiens
  misc_RNA (1)...(19): siRNA sense strand
gaacuaggaaacuuggauu

SEQ ID NO: 1723337 - RNA, 19 nt, Homo sapiens
  misc_RNA (1)...(19): siRNA sense strand
uacaacaacuugagcgaaa

SEQ ID NO: 1723338 - RNA, 19 nt, Homo sapiens
  misc_RNA (1)...(19): siRNA sense strand
ucacaaaguugcagauacu

SEQ ID NO: 1723339 - RNA, 19 nt, Homo sapiens
  misc_RNA (1)...(19): siRNA sense strand
uugggaagcucacaaaguu

SEQ ID NO: 1723340 - RNA, 19 nt, Homo sapiens
  misc_RNA (1)...(19): siRNA sense strand
gaaccaccgaagaagaaua

SEQ ID NO: 1723341 - RNA, 19 nt, Homo sapiens
  misc_RNA (1)...(19): siRNA sense strand
cgaagaagaauaaugacaa

SEQ ID NO: 1723342 - RNA, 19 nt, Homo sapiens
  misc_RNA (1)...(19): siRNA sense strand
gaucaguagccuucagaaa

SEQ ID NO: 1723343 - RNA, 19 nt, Homo sapiens
  misc_RNA (1)...(19): siRNA sense strand
auacucagccuuagggaua

SEQ ID NO: 1723344 - RNA, 19 nt, Homo sapiens
  misc_RNA (1)...(19): siRNA sense strand
caccgaagaagaauaauga

SEQ ID NO: 1723345 - RNA, 19 nt, Homo sapiens
  misc_RNA (1)...(19): siRNA sense strand
guauauccguucugagaca

SEQ ID NO: 1723346 - RNA, 19 nt, Homo sapiens
  misc_RNA (1)...(19): siRNA sense strand
ucgaggagcugcccacaca

SEQ ID NO: 1723347 - RNA, 19 nt, Homo sapiens
  misc_RNA (1)...(19): siRNA sense strand
gcuuaaagagcuccacauu

SEQ ID NO: 1723348 - RNA, 19 nt, Homo sapiens
  misc_RNA (1)...(19): siRNA sense strand
cagaaccaccgaagaagaa

SEQ ID NO: 1723349 - RNA, 19 nt, Homo sapiens
  misc_RNA (1)...(19): siRNA sense strand
ucaguagccuucagaaacu

SEQ ID NO: 1723350 - RNA, 19 nt, Homo sapiens
  misc_RNA (1)...(19): siRNA sense strand
gaacaggcugaacacuuug

SEQ ID NO: 1723351 - RNA, 19 nt, Homo sapiens
  misc_RNA (1)...(19): siRNA sense strand
gcucacaaaguugcagaua

SEQ ID NO: 1723352 - RNA, 19 nt, Homo sapiens
  misc_RNA (1)...(19): siRNA sense strand
ccucagccauaacaagcua

SEQ ID NO: 1723353 - RNA, 19 nt, Homo sapiens
  misc_RNA (1)...(19): siRNA sense strand
uugcagauacucagccuua

SEQ ID NO: 1723354 - RNA, 19 nt, Homo sapiens
  misc_RNA (1)...(19): siRNA sense strand
ccagaagcagguauucaaa

SEQ ID NO: 1723355 - RNA, 19 nt, Homo sapiens
  misc_RNA (1)...(19): siRNA sense strand
guucuggacuugacguaca

SEQ ID NO: 1723356 - RNA, 19 nt, Homo sapiens
  misc_RNA (1)...(19): siRNA sense strand
gccagaagcagguauucaa

SEQ ID NO: 1723357 - RNA, 19 nt, Homo sapiens
  misc_RNA (1)...(19): siRNA sense strand
cauaacaagcuaacaaugg

SEQ ID NO: 1723358 - RNA, 19 nt, Homo sapiens
  misc_RNA (1)...(19): siRNA sense strand
ggacuugacguacaacaac

SEQ ID NO: 1723359 - RNA, 19 nt, Homo sapiens
  misc_RNA (1)...(19): siRNA sense strand
gagcugcccacacagauca

SEQ ID NO: 1723360 - RNA, 19 nt, Homo sapiens
  misc_RNA (1)...(19): siRNA sense strand
ccagaaccaccgaagaaga

SEQ ID NO: 1723361 - RNA, 19 nt, Homo sapiens
  misc_RNA (1)...(19): siRNA sense strand
auaacaagcuaacaauggu

SEQ ID NO: 1723362 - RNA, 19 nt, Homo sapiens
  misc_RNA (1)...(19): siRNA sense strand
acuaggaaacuuggauuua

SEQ ID NO: 1723363 - RNA, 19 nt, Homo sapiens
  misc_RNA (1)...(19): siRNA sense strand
ccugccagcucuugagguu

SEQ ID NO: 1723364 - RNA, 19 nt, Homo sapiens
  misc_RNA (1)...(19): siRNA sense strand
gaggagcugcccacacaga

SEQ ID NO: 1723365 - RNA, 19 nt, Homo sapiens
  misc_RNA (1)...(19): siRNA sense strand
uaggaaacuuggauuuaac

SEQ ID NO: 1723366 - RNA, 19 nt, Homo sapiens
  misc_RNA (1)...(19): siRNA sense strand
uugaguauauccguucuga

SEQ ID NO: 1723367 - RNA, 19 nt, Homo sapiens
  misc_RNA (1)...(19): siRNA sense strand
caccugaaccuuggcauga

SEQ ID NO: 1723368 - RNA, 19 nt, Homo sapiens
  misc_RNA (1)...(19): siRNA sense strand
agacauacaaauaccucua

SEQ ID NO: 1723369 - RNA, 19 nt, Homo sapiens
  misc_RNA (1)...(19): siRNA sense strand
uaccuuaucccauaucaca

SEQ ID NO: 1723370 - RNA, 19 nt, Homo sapiens
  misc_RNA (1)...(19): siRNA sense strand
gauauugggaagcucacaa

SEQ ID NO: 1723371 - RNA, 19 nt, Homo sapiens
  misc_RNA (1)...(19): siRNA sense strand
agaagcagguauucaaagc

SEQ ID NO: 1723372 - RNA, 19 nt, Homo sapiens
  misc_RNA (1)...(19): siRNA sense strand
aaccaccgaagaagaauaa

SEQ ID NO: 1723373 - RNA, 19 nt, Homo sapiens
  misc_RNA (1)...(19): siRNA sense strand
gaagcagguauucaaagca

SEQ ID NO: 1723374 - RNA, 19 nt, Homo sapiens
  misc_RNA (1)...(19): siRNA sense strand
gaaacucaaacaccugaac

SEQ ID NO: 1723375 - RNA, 19 nt, Homo sapiens
  misc_RNA (1)...(19): siRNA sense strand
ccaccgaagaagaauaaug

SEQ ID NO: 1723376 - RNA, 19 nt, Homo sapiens
  misc_RNA (1)...(19): siRNA sense strand
gccauaacaagcuaacaau

SEQ ID NO: 1723377 - RNA, 19 nt, Homo sapiens
  misc_RNA (1)...(19): siRNA sense strand
gcagaacugaagaauuugg

SEQ ID NO: 1723378 - RNA, 19 nt, Homo sapiens
  misc_RNA (1)...(19): siRNA sense strand
ggcaugaacaggcugaaca

SEQ ID NO: 1723379 - RNA, 19 nt, Homo sapiens
  misc_RNA (1)...(19): siRNA sense strand
ccauaacaagcuaacaaug

SEQ ID NO: 1723380 - RNA, 19 nt, Homo sapiens
  misc_RNA (1)...(19): siRNA sense strand
caccgaacaucgcagaacu

SEQ ID NO: 1723381 - RNA, 19 nt, Homo sapiens
  misc_RNA (1)...(19): siRNA sense strand
cacccugcgugcacucuau

SEQ ID NO: 1723382 - RNA, 19 nt, Homo sapiens
  misc_RNA (1)...(19): siRNA sense strand
gcagauacucagccuuagg

SEQ ID NO: 1723383 - RNA, 19 nt, Homo sapiens
  misc_RNA (1)...(19): siRNA sense strand
cuaucuaagugacaacgau

SEQ ID NO: 1723384 - RNA, 19 nt, Homo sapiens
  misc_RNA (1)...(19): siRNA sense strand
cugcgugcacucuaucuaa

SEQ ID NO: 1723385 - RNA, 19 nt, Homo sapiens
  misc_RNA (1)...(19): siRNA sense strand
uaucuaagugacaacgauu

SEQ ID NO: 1723386 - RNA, 19 nt, Homo sapiens
  misc_RNA (1)...(19): siRNA sense strand
ccgaacaucgcagaacuga

SEQ ID NO: 1723387 - RNA, 19 nt, Homo sapiens
  misc_RNA (1)...(19): siRNA sense strand
cagaagcagguauucaaag

SEQ ID NO: 1723388 - RNA, 19 nt, Homo sapiens
  misc_RNA (1)...(19): siRNA sense strand
ucgcagaacugaagaauuu

SEQ ID NO: 1723389 - RNA, 19 nt, Homo sapiens
  misc_RNA (1)...(19): siRNA sense strand
uuaaagagcuccacauuca

SEQ ID NO: 1723390 - RNA, 19 nt, Homo sapiens
  misc_RNA (1)...(19): siRNA sense strand
ugaacaggcugaacacuuu

SEQ ID NO: 1723391 - RNA, 19 nt, Homo sapiens
  misc_RNA (1)...(19): siRNA sense strand
gaacaucgcagaacugaag

SEQ ID NO: 1723392 - RNA, 19 nt, Homo sapiens
  misc_RNA (1)...(19): siRNA sense strand
cuaggaaacuuggauuuaa

SEQ ID NO: 1723393 - RNA, 19 nt, Homo sapiens
  misc_RNA (1)...(19): siRNA sense strand
gaaauccugccgccagaua

SEQ ID NO: 1723394 - RNA, 19 nt, Homo sapiens
  misc_RNA (1)...(19): siRNA sense strand
gaagaauaaugacaaaucg

SEQ ID NO: 1723395 - RNA, 19 nt, Homo sapiens
  misc_RNA (1)...(19): siRNA sense strand
guucugagacauacaaaua

SEQ ID NO: 1723396 - RNA, 19 nt, Homo sapiens
  misc_RNA (1)...(19): siRNA sense strand
ggauuuaacuggccagaag

SEQ ID NO: 1723397 - RNA, 19 nt, Homo sapiens
  misc_RNA (1)...(19): siRNA sense strand
gaguauauccguucugaga

SEQ ID NO: 1723398 - RNA, 19 nt, Homo sapiens
  misc_RNA (1)...(19): siRNA sense strand
gaacuaggaaacuuggauu

SEQ ID NO: 1723399 - RNA, 19 nt, Homo sapiens
  misc_RNA (1)...(19): siRNA sense strand
uacaacaacuugagcgaaa

SEQ ID NO: 1723400 - RNA, 19 nt, Homo sapiens
  misc_RNA (1)...(19): siRNA sense strand
ucacaaaguugcagauacu

SEQ ID NO: 1723401 - RNA, 19 nt, Homo sapiens
  misc_RNA (1)...(19): siRNA sense strand
uugggaagcucacaaaguu

SEQ ID NO: 1723402 - RNA, 19 nt, Homo sapiens
  misc_RNA (1)...(19): siRNA sense strand
gaaccaccgaagaagaaua

SEQ ID NO: 1723403 - RNA, 19 nt, Homo sapiens
  misc_RNA (1)...(19): siRNA sense strand
cgaagaagaauaaugacaa

SEQ ID NO: 1723404 - RNA, 19 nt, Homo sapiens
  misc_RNA (1)...(19): siRNA sense strand
gaucaguagccuucagaaa

SEQ ID NO: 1723405 - RNA, 19 nt, Homo sapiens
  misc_RNA (1)...(19): siRNA sense strand
auacucagccuuagggaua

SEQ ID NO: 1723406 - RNA, 19 nt, Homo sapiens
  misc_RNA (1)...(19): siRNA sense strand
caccgaagaagaauaauga

SEQ ID NO: 1723407 - RNA, 19 nt, Homo sapiens
  misc_RNA (1)...(19): siRNA sense strand
guauauccguucugagaca

SEQ ID NO: 1723408 - RNA, 19 nt, Homo sapiens
  misc_RNA (1)...(19): siRNA sense strand
ucgaggagcugcccacaca

SEQ ID NO: 1723409 - RNA, 19 nt, Homo sapiens
  misc_RNA (1)...(19): siRNA sense strand
gcuuaaagagcuccacauu

SEQ ID NO: 1723410 - RNA, 19 nt, Homo sapiens
  misc_RNA (1)...(19): siRNA sense strand
cagaaccaccgaagaagaa

SEQ ID NO: 1723411 - RNA, 19 nt, Homo sapiens
  misc_RNA (1)...(19): siRNA sense strand
ucaguagccuucagaaacu

SEQ ID NO: 1723412 - RNA, 19 nt, Homo sapiens
  misc_RNA (1)...(19): siRNA sense strand
gaacaggcugaacacuuug

SEQ ID NO: 1723413 - RNA, 19 nt, Homo sapiens
  misc_RNA (1)...(19): siRNA sense strand
gcucacaaaguugcagaua

SEQ ID NO: 1723414 - RNA, 19 nt, Homo sapiens
  misc_RNA (1)...(19): siRNA sense strand
uugcagauacucagccuua

SEQ ID NO: 1723415 - RNA, 19 nt, Homo sapiens
  misc_RNA (1)...(19): siRNA sense strand
ccagaagcagguauucaaa

SEQ ID NO: 1723416 - RNA, 19 nt, Homo sapiens
  misc_RNA (1)...(19): siRNA sense strand
guucuggacuugacguaca

SEQ ID NO: 1723417 - RNA, 19 nt, Homo sapiens
  misc_RNA (1)...(19): siRNA sense strand
gccagaagcagguauucaa

SEQ ID NO: 1723418 - RNA, 19 nt, Homo sapiens
  misc_RNA (1)...(19): siRNA sense strand
ggacuugacguacaacaac

SEQ ID NO: 1723419 - RNA, 19 nt, Homo sapiens
  misc_RNA (1)...(19): siRNA sense strand
gagcugcccacacagauca

SEQ ID NO: 1723420 - RNA, 19 nt, Homo sapiens
  misc_RNA (1)...(19): siRNA sense strand
ccagaaccaccgaagaaga

SEQ ID NO: 1723421 - RNA, 19 nt, Homo sapiens
  misc_RNA (1)...(19): siRNA sense strand
ccugccagcucuugagguu

SEQ ID NO: 1723422 - RNA, 19 nt, Homo sapiens
  misc_RNA (1)...(19): siRNA sense strand
gaggagcugcccacacaga

SEQ ID NO: 1723423 - RNA, 19 nt, Homo sapiens
  misc_RNA (1)...(19): siRNA sense strand
acuaggaaacuuggauuua

SEQ ID NO: 1723424 - RNA, 19 nt, Homo sapiens
  misc_RNA (1)...(19): siRNA sense strand
uaggaaacuuggauuuaac

SEQ ID NO: 1723425 - RNA, 19 nt, Homo sapiens
  misc_RNA (1)...(19): siRNA sense strand
uugaguauauccguucuga

SEQ ID NO: 1723426 - RNA, 19 nt, Homo sapiens
  misc_RNA (1)...(19): siRNA sense strand
caccugaaccuuggcauga

SEQ ID NO: 1723427 - RNA, 19 nt, Homo sapiens
  misc_RNA (1)...(19): siRNA sense strand
agacauacaaauaccucua

SEQ ID NO: 1723428 - RNA, 19 nt, Homo sapiens
  misc_RNA (1)...(19): siRNA sense strand
gauauugggaagcucacaa

SEQ ID NO: 1723429 - RNA, 19 nt, Homo sapiens
  misc_RNA (1)...(19): siRNA sense strand
agaagcagguauucaaagc

SEQ ID NO: 1723430 - RNA, 19 nt, Homo sapiens
  misc_RNA (1)...(19): siRNA sense strand
aaccaccgaagaagaauaa

SEQ ID NO: 1723431 - RNA, 19 nt, Homo sapiens
  misc_RNA (1)...(19): siRNA sense strand
gaagcagguauucaaagca

SEQ ID NO: 1723432 - RNA, 19 nt, Homo sapiens
  misc_RNA (1)...(19): siRNA sense strand
gaaacucaaacaccugaac

SEQ ID NO: 1723433 - RNA, 19 nt, Homo sapiens
  misc_RNA (1)...(19): siRNA sense strand
ccaccgaagaagaauaaug

SEQ ID NO: 1723434 - RNA, 19 nt, Homo sapiens
  misc_RNA (1)...(19): siRNA sense strand
gcagaacugaagaauuugg

SEQ ID NO: 1723435 - RNA, 19 nt, Homo sapiens
  misc_RNA (1)...(19): siRNA sense strand
ggcaugaacaggcugaaca

SEQ ID NO: 1723436 - RNA, 19 nt, Homo sapiens
  misc_RNA (1)...(19): siRNA sense strand
caccgaacaucgcagaacu

SEQ ID NO: 1723437 - RNA, 19 nt, Homo sapiens
  misc_RNA (1)...(19): siRNA sense strand
cacccugcgugcacucuau

SEQ ID NO: 1723438 - RNA, 19 nt, Homo sapiens
  misc_RNA (1)...(19): siRNA sense strand
gcagauacucagccuuagg

SEQ ID NO: 1723439 - RNA, 19 nt, Homo sapiens
  misc_RNA (1)...(19): siRNA sense strand
cuaucuaagugacaacgau

SEQ ID NO: 1723440 - RNA, 19 nt, Homo sapiens
  misc_RNA (1)...(19): siRNA sense strand
cugcgugcacucuaucuaa

SEQ ID NO: 1723441 - RNA, 19 nt, Homo sapiens
  misc_RNA (1)...(19): siRNA sense strand
uaucuaagugacaacgauu

SEQ ID NO: 1723442 - RNA, 19 nt, Homo sapiens
  misc_RNA (1)...(19): siRNA sense strand
ccgaacaucgcagaacuga

SEQ ID NO: 1723443 - RNA, 19 nt, Homo sapiens
  misc_RNA (1)...(19): siRNA sense strand
cagaagcagguauucaaag

SEQ ID NO: 1723444 - RNA, 19 nt, Homo sapiens
  misc_RNA (1)...(19): siRNA sense strand
gagcagacuuuacgaaaua

SEQ ID NO: 1723445 - RNA, 19 nt, Homo sapiens
  misc_RNA (1)...(19): siRNA sense strand
gaaugaagcugcaucucaa

SEQ ID NO: 1723446 - RNA, 19 nt, Homo sapiens
  misc_RNA (1)...(19): siRNA sense strand
uaacaaaggucaaugaucu

SEQ ID NO: 1723447 - RNA, 19 nt, Homo sapiens
  misc_RNA (1)...(19): siRNA sense strand
gaagaacucagauaacaaa

SEQ ID NO: 1723448 - RNA, 19 nt, Homo sapiens
  misc_RNA (1)...(19): siRNA sense strand
uaaagaacauugacucaga

SEQ ID NO: 1723449 - RNA, 19 nt, Homo sapiens
  misc_RNA (1)...(19): siRNA sense strand
gaacauugacucagaaguu

SEQ ID NO: 1723450 - RNA, 19 nt, Homo sapiens
  misc_RNA (1)...(19): siRNA sense strand
caauaaagcucucuauggu

SEQ ID NO: 1723451 - RNA, 19 nt, Homo sapiens
  misc_RNA (1)...(19): siRNA sense strand
ggaagguugugguaauuga

SEQ ID NO: 1723452 - RNA, 19 nt, Homo sapiens
  misc_RNA (1)...(19): siRNA sense strand
ggaggacccuaucauguga

SEQ ID NO: 1723453 - RNA, 19 nt, Homo sapiens
  misc_RNA (1)...(19): siRNA sense strand
gcaguugguucaagacuau

SEQ ID NO: 1723454 - RNA, 19 nt, Homo sapiens
  misc_RNA (1)...(19): siRNA sense strand
ggaucuagauacguucuua

SEQ ID NO: 1723455 - RNA, 19 nt, Homo sapiens
  misc_RNA (1)...(19): siRNA sense strand
gaacgucagcaaacuaauu

SEQ ID NO: 1723456 - RNA, 19 nt, Homo sapiens
  misc_RNA (1)...(19): siRNA sense strand
gcacaucauuauugucuuc

SEQ ID NO: 1723457 - RNA, 19 nt, Homo sapiens
  misc_RNA (1)...(19): siRNA sense strand
aaagaaacccugaacauug

SEQ ID NO: 1723458 - RNA, 19 nt, Homo sapiens
  misc_RNA (1)...(19): siRNA sense strand
ccggacaucucaucuuuaa

SEQ ID NO: 1723459 - RNA, 19 nt, Homo sapiens
  misc_RNA (1)...(19): siRNA sense strand
ggacaucucaucuuuaaag

SEQ ID NO: 1723460 - RNA, 19 nt, Homo sapiens
  misc_RNA (1)...(19): siRNA sense strand
gaaacuggaggccaucuuu

SEQ ID NO: 1723461 - RNA, 19 nt, Homo sapiens
  misc_RNA (1)...(19): siRNA sense strand
gcucugcucuugguaauug

SEQ ID NO: 1723462 - RNA, 19 nt, Homo sapiens
  misc_RNA (1)...(19): siRNA sense strand
ggagcagacuuuacgaaau

SEQ ID NO: 1723463 - RNA, 19 nt, Homo sapiens
  misc_RNA (1)...(19): siRNA sense strand
ggaggcacaucauuauugu

SEQ ID NO: 1723464 - RNA, 19 nt, Homo sapiens
  misc_RNA (1)...(19): siRNA sense strand
gcaauaaagcucucuaugg

SEQ ID NO: 1723465 - RNA, 19 nt, Homo sapiens
  misc_RNA (1)...(19): siRNA sense strand
gcagcagguuucaagauug

SEQ ID NO: 1723466 - RNA, 19 nt, Homo sapiens
  misc_RNA (1)...(19): siRNA sense strand
gaaaggaagguugugguaa

SEQ ID NO: 1723467 - RNA, 19 nt, Homo sapiens
  misc_RNA (1)...(19): siRNA sense strand
gagaacgucagcaaacuaa

SEQ ID NO: 1723468 - RNA, 19 nt, Homo sapiens
  misc_RNA (1)...(19): siRNA sense strand
gaacaagcauugcguuuuc

SEQ ID NO: 1723469 - RNA, 19 nt, Homo sapiens
  misc_RNA (1)...(19): siRNA sense strand
ggcagcagguuucaagauu

SEQ ID NO: 1723470 - RNA, 19 nt, Homo sapiens
  misc_RNA (1)...(19): siRNA sense strand
ggaaaugccgcucgggaaa

SEQ ID NO: 1723471 - RNA, 19 nt, Homo sapiens
  misc_RNA (1)...(19): siRNA sense strand
aaaggaagguugugguaau

SEQ ID NO: 1723472 - RNA, 19 nt, Homo sapiens
  misc_RNA (1)...(19): siRNA sense strand
ccacagggcccaagggaaa

SEQ ID NO: 1723473 - RNA, 19 nt, Homo sapiens
  misc_RNA (1)...(19): siRNA sense strand
acaacaagaccaauaguaa

SEQ ID NO: 1723474 - RNA, 19 nt, Homo sapiens
  misc_RNA (1)...(19): siRNA sense strand
acaaaccucucaagcaguu

SEQ ID NO: 1723475 - RNA, 19 nt, Homo sapiens
  misc_RNA (1)...(19): siRNA sense strand
gccaggaggcacaucauua

SEQ ID NO: 1723476 - RNA, 19 nt, Homo sapiens
  misc_RNA (1)...(19): siRNA sense strand
gacaggagguggugguugu

SEQ ID NO: 1723477 - RNA, 19 nt, Homo sapiens
  misc_RNA (1)...(19): siRNA sense strand
aagaaacccugaacauugu

SEQ ID NO: 1723478 - RNA, 19 nt, Homo sapiens
  misc_RNA (1)...(19): siRNA sense strand
ucaagcaguugguucaaga

SEQ ID NO: 1723479 - RNA, 19 nt, Homo sapiens
  misc_RNA (1)...(19): siRNA sense strand
aacauugacucagaaguua

SEQ ID NO: 1723480 - RNA, 19 nt, Homo sapiens
  misc_RNA (1)...(19): siRNA sense strand
cucaauagcuugugcugaa

SEQ ID NO: 1723481 - RNA, 19 nt, Homo sapiens
  misc_RNA (1)...(19): siRNA sense strand
ggagaacgucagcaaacua

SEQ ID NO: 1723482 - RNA, 19 nt, Homo sapiens
  misc_RNA (1)...(19): siRNA sense strand
aaagaacauugacucagaa

SEQ ID NO: 1723483 - RNA, 19 nt, Homo sapiens
  misc_RNA (1)...(19): siRNA sense strand
gaaacgcggugcuggaaaa

SEQ ID NO: 1723484 - RNA, 19 nt, Homo sapiens
  misc_RNA (1)...(19): siRNA sense strand
gagggccgauacugcauuu

SEQ ID NO: 1723485 - RNA, 19 nt, Homo sapiens
  misc_RNA (1)...(19): siRNA sense strand
caaguucagugaucagaca

SEQ ID NO: 1723486 - RNA, 19 nt, Homo sapiens
  misc_RNA (1)...(19): siRNA sense strand
gaaggcagcagguuucaag

SEQ ID NO: 1723487 - RNA, 19 nt, Homo sapiens
  misc_RNA (1)...(19): siRNA sense strand
aaaggucaaugaucugaga

SEQ ID NO: 1723488 - RNA, 19 nt, Homo sapiens
  misc_RNA (1)...(19): siRNA sense strand
ccacugggcuuuuacacua

SEQ ID NO: 1723489 - RNA, 19 nt, Homo sapiens
  misc_RNA (1)...(19): siRNA sense strand
gaacggaggacccuaucau

SEQ ID NO: 1723490 - RNA, 19 nt, Homo sapiens
  misc_RNA (1)...(19): siRNA sense strand
caaaacagcuguggcgaaa

SEQ ID NO: 1723491 - RNA, 19 nt, Homo sapiens
  misc_RNA (1)...(19): siRNA sense strand
ccacaggacccgagcagaa

SEQ ID NO: 1723492 - RNA, 19 nt, Homo sapiens
  misc_RNA (1)...(19): siRNA sense strand
ggacacuccuuccuucaac

SEQ ID NO: 1723493 - RNA, 19 nt, Homo sapiens
  misc_RNA (1)...(19): siRNA sense strand
ucuauggucucauccagaa

SEQ ID NO: 1723494 - RNA, 19 nt, Homo sapiens
  misc_RNA (1)...(19): siRNA sense strand
aaacagcuguggcgaaacu

SEQ ID NO: 1723495 - RNA, 19 nt, Homo sapiens
  misc_RNA (1)...(19): siRNA sense strand
ucaugaagaacucagauaa

SEQ ID NO: 1723496 - RNA, 19 nt, Homo sapiens
  misc_RNA (1)...(19): siRNA sense strand
cagcagguuucaagauugu

SEQ ID NO: 1723497 - RNA, 19 nt, Homo sapiens
  misc_RNA (1)...(19): siRNA sense strand
ccaagggcauccaacaagu

SEQ ID NO: 1723498 - RNA, 19 nt, Homo sapiens
  misc_RNA (1)...(19): siRNA sense strand
caacaagaccaauaguaag

SEQ ID NO: 1723499 - RNA, 19 nt, Homo sapiens
  misc_RNA (1)...(19): siRNA sense strand
gaagacaagcaacgcaaca

SEQ ID NO: 1723500 - RNA, 19 nt, Homo sapiens
  misc_RNA (1)...(19): siRNA sense strand
ucaaugaucugagaaaaga

SEQ ID NO: 1723501 - RNA, 19 nt, Homo sapiens
  misc_RNA (1)...(19): siRNA sense strand
ugaaugaagcugcaucuca

SEQ ID NO: 1723502 - RNA, 19 nt, Homo sapiens
  misc_RNA (1)...(19): siRNA sense strand
agaguuggguccugagaga

SEQ ID NO: 1723503 - RNA, 19 nt, Homo sapiens
  misc_RNA (1)...(19): siRNA sense strand
ccaggaggcacaucauuau

SEQ ID NO: 1723504 - RNA, 19 nt, Homo sapiens
  misc_RNA (1)...(19): siRNA sense strand
uaauugccaucggccauuu

SEQ ID NO: 1723505 - RNA, 19 nt, Homo sapiens
  misc_RNA (1)...(19): siRNA sense strand
aaaggacccaucccgguua

SEQ ID NO: 1723506 - RNA, 19 nt, Homo sapiens
  misc_RNA (1)...(19): siRNA sense strand
uaccaggaaagaagauuua

SEQ ID NO: 1723507 - RNA, 19 nt, Homo sapiens
  misc_RNA (1)...(19): siRNA sense strand
caagaccaauaguaaggau

SEQ ID NO: 1723508 - RNA, 19 nt, Homo sapiens
  misc_RNA (1)...(19): siRNA sense strand
ccaggaaacccaggugaaa

SEQ ID NO: 1723509 - RNA, 19 nt, Homo sapiens
  misc_RNA (1)...(19): siRNA sense strand
ggacccaucccgguuagaa

SEQ ID NO: 1723510 - RNA, 19 nt, Homo sapiens
  misc_RNA (1)...(19): siRNA sense strand
gaucuagauacguucuuaa

SEQ ID NO: 1723511 - RNA, 19 nt, Homo sapiens
  misc_RNA (1)...(19): siRNA sense strand
cuccggacaucucaucuuu

SEQ ID NO: 1723512 - RNA, 19 nt, Homo sapiens
  misc_RNA (1)...(19): siRNA sense strand
gagagcagaagcuggagaa

SEQ ID NO: 1723513 - RNA, 19 nt, Homo sapiens
  misc_RNA (1)...(19): siRNA sense strand
ggucucauccagaagugua

SEQ ID NO: 1723514 - RNA, 19 nt, Homo sapiens
  misc_RNA (1)...(19): siRNA sense strand
gggaacaagcauugcguuu

SEQ ID NO: 1723515 - RNA, 19 nt, Homo sapiens
  misc_RNA (1)...(19): siRNA sense strand
gagcauggugcaucagaau

SEQ ID NO: 1723516 - RNA, 19 nt, Homo sapiens
  misc_RNA (1)...(19): siRNA sense strand
agaaaggaagguuguggua

SEQ ID NO: 1723517 - RNA, 19 nt, Homo sapiens
  misc_RNA (1)...(19): siRNA sense strand
ggaaacgcggugcuggaaa

SEQ ID NO: 1723518 - RNA, 19 nt, Homo sapiens
  misc_RNA (1)...(19): siRNA sense strand
aaggaagguugugguaauu

SEQ ID NO: 1723519 - RNA, 19 nt, Homo sapiens
  misc_RNA (1)...(19): siRNA sense strand
ugacaccacugggcuuuua

SEQ ID NO: 1723520 - RNA, 19 nt, Homo sapiens
  misc_RNA (1)...(19): siRNA sense strand
ucacucggaaggaugauuu

SEQ ID NO: 1723521 - RNA, 19 nt, Homo sapiens
  misc_RNA (1)...(19): siRNA sense strand
gaaaugucccaagccgaaa

SEQ ID NO: 1723522 - RNA, 19 nt, Homo sapiens
  misc_RNA (1)...(19): siRNA sense strand
aacgucagcaaacuaauua

SEQ ID NO: 1723523 - RNA, 19 nt, Homo sapiens
  misc_RNA (1)...(19): siRNA sense strand
augaagaacucagauaaca

SEQ ID NO: 1723524 - RNA, 19 nt, Homo sapiens
  misc_RNA (1)...(19): siRNA sense strand
gacccuaucaugugaacuu

SEQ ID NO: 1723525 - RNA, 19 nt, Homo sapiens
  misc_RNA (1)...(19): siRNA sense strand
gaagccaggaggcacauca

SEQ ID NO: 1723526 - RNA, 19 nt, Homo sapiens
  misc_RNA (1)...(19): siRNA sense strand
ucauacuucuuaccaggaa

SEQ ID NO: 1723527 - RNA, 19 nt, Homo sapiens
  misc_RNA (1)...(19): siRNA sense strand
cgucagcaaacuaauuaaa

SEQ ID NO: 1723528 - RNA, 19 nt, Homo sapiens
  misc_RNA (1)...(19): siRNA sense strand
ucaaguccaaguucaguga

SEQ ID NO: 1723529 - RNA, 19 nt, Homo sapiens
  misc_RNA (1)...(19): siRNA sense strand
cgaaauacgcgauuaugcu

SEQ ID NO: 1723530 - RNA, 19 nt, Homo sapiens
  misc_RNA (1)...(19): siRNA sense strand
gagagcauggugcaucaga

SEQ ID NO: 1723531 - RNA, 19 nt, Homo sapiens
  misc_RNA (1)...(19): siRNA sense strand
uaagaaacagcaauaaagc

SEQ ID NO: 1723532 - RNA, 19 nt, Homo sapiens
  misc_RNA (1)...(19): siRNA sense strand
gggaaacgcggugcuggaa

SEQ ID NO: 1723533 - RNA, 19 nt, Homo sapiens
  misc_RNA (1)...(19): siRNA sense strand
ucaagauugugugaaugaa

SEQ ID NO: 1723534 - RNA, 19 nt, Homo sapiens
  misc_RNA (1)...(19): siRNA sense strand
acaaguguuuggagcugaa

SEQ ID NO: 1723535 - RNA, 19 nt, Homo sapiens
  misc_RNA (1)...(19): siRNA sense strand
aauacgcgauuaugcuguu

SEQ ID NO: 1723536 - RNA, 19 nt, Homo sapiens
  misc_RNA (1)...(19): siRNA sense strand
caucuuuggagcagacuuu

SEQ ID NO: 1723537 - RNA, 19 nt, Homo sapiens
  misc_RNA (1)...(19): siRNA sense strand
guacaugaucauacuucuu

SEQ ID NO: 1723538 - RNA, 19 nt, Homo sapiens
  misc_RNA (1)...(19): siRNA sense strand
gguugagucuuuggugaau

SEQ ID NO: 1723539 - RNA, 19 nt, Homo sapiens
  misc_RNA (1)...(19): siRNA sense strand
caacaacaagaccaauagu

SEQ ID NO: 1723540 - RNA, 19 nt, Homo sapiens
  misc_RNA (1)...(19): siRNA sense strand
ugaagaacucagauaacaa

SEQ ID NO: 1723541 - RNA, 19 nt, Homo sapiens
  misc_RNA (1)...(19): siRNA sense strand
ggaggucaagcgcuguuug

SEQ ID NO: 1723542 - RNA, 19 nt, Homo sapiens
  misc_RNA (1)...(19): siRNA sense strand
guugagucuuuggugaaua

SEQ ID NO: 1723543 - RNA, 19 nt, Homo sapiens
  misc_RNA (1)...(19): siRNA sense strand
agaccaauaguaaggauga

SEQ ID NO: 1723544 - RNA, 19 nt, Homo sapiens
  misc_RNA (1)...(19): siRNA sense strand
ggaaagggcugguguacau

SEQ ID NO: 1723545 - RNA, 19 nt, Homo sapiens
  misc_RNA (1)...(19): siRNA sense strand
gaagacgacuugaucaucu

SEQ ID NO: 1723546 - RNA, 19 nt, Homo sapiens
  misc_RNA (1)...(19): siRNA sense strand
gaacguggaagacgacuug

SEQ ID NO: 1723547 - RNA, 19 nt, Homo sapiens
  misc_RNA (1)...(19): siRNA sense strand
ccaaagccaugcagaacaa

SEQ ID NO: 1723548 - RNA, 19 nt, Homo sapiens
  misc_RNA (1)...(19): siRNA sense strand
gagcauugccggaaaguca

SEQ ID NO: 1723549 - RNA, 19 nt, Homo sapiens
  misc_RNA (1)...(19): siRNA sense strand
gccggaaagucaacgagua

SEQ ID NO: 1723550 - RNA, 19 nt, Homo sapiens
  misc_RNA (1)...(19): siRNA sense strand
caucuucccugacgacugu

SEQ ID NO: 1723551 - RNA, 19 nt, Homo sapiens
  misc_RNA (1)...(19): siRNA sense strand
ggacaugagccuggacuga

SEQ ID NO: 1723552 - RNA, 19 nt, Homo sapiens
  misc_RNA (1)...(19): siRNA sense strand
ggacgaagaggaggacaug

SEQ ID NO: 1723553 - RNA, 19 nt, Homo sapiens
  misc_RNA (1)...(19): siRNA sense strand
agaaagagggcgacacgaa

SEQ ID NO: 1723554 - RNA, 19 nt, Homo sapiens
  misc_RNA (1)...(19): siRNA sense strand
ggaagacgacuugaucauc

SEQ ID NO: 1723555 - RNA, 19 nt, Homo sapiens
  misc_RNA (1)...(19): siRNA sense strand
ugaggagcauugccggaaa

SEQ ID NO: 1723556 - RNA, 19 nt, Homo sapiens
  misc_RNA (1)...(19): siRNA sense strand
ggacaagaaggacgaagag

SEQ ID NO: 1723557 - RNA, 19 nt, Homo sapiens
  misc_RNA (1)...(19): siRNA sense strand
gggucuacgugcugaaguu

SEQ ID NO: 1723558 - RNA, 19 nt, Homo sapiens
  misc_RNA (1)...(19): siRNA sense strand
gcagaccgcggaugagauc

SEQ ID NO: 1723559 - RNA, 19 nt, Homo sapiens
  misc_RNA (1)...(19): siRNA sense strand
gaggagcauugccggaaag

SEQ ID NO: 1723560 - RNA, 19 nt, Homo sapiens
  misc_RNA (1)...(19): siRNA sense strand
caacgaguaucugaacaac

SEQ ID NO: 1723561 - RNA, 19 nt, Homo sapiens
  misc_RNA (1)...(19): siRNA sense strand
ggaaagucaacgaguaucu

SEQ ID NO: 1723562 - RNA, 19 nt, Homo sapiens
  misc_RNA (1)...(19): siRNA sense strand
gaaagucaacgaguaucug

SEQ ID NO: 1723563 - RNA, 19 nt, Homo sapiens
  misc_RNA (1)...(19): siRNA sense strand
acacgaaggacaagaagga

SEQ ID NO: 1723564 - RNA, 19 nt, Homo sapiens
  misc_RNA (1)...(19): siRNA sense strand
gaaagggcugguguacauu

SEQ ID NO: 1723565 - RNA, 19 nt, Homo sapiens
  misc_RNA (1)...(19): siRNA sense strand
ccaagacagaccaggauga

SEQ ID NO: 1723566 - RNA, 19 nt, Homo sapiens
  misc_RNA (1)...(19): siRNA sense strand
ccaccgugacuccggauaa

SEQ ID NO: 1723567 - RNA, 19 nt, Homo sapiens
  misc_RNA (1)...(19): siRNA sense strand
gcgccugcuucccuacuug

SEQ ID NO: 1723568 - RNA, 19 nt, Homo sapiens
  misc_RNA (1)...(19): siRNA sense strand
acgacucgcuuauucacuu

SEQ ID NO: 1723569 - RNA, 19 nt, Homo sapiens
  misc_RNA (1)...(19): siRNA sense strand
aaagucaacgaguaucuga

SEQ ID NO: 1723570 - RNA, 19 nt, Homo sapiens
  misc_RNA (1)...(19): siRNA sense strand
acggacgacucgcuuauuc

SEQ ID NO: 1723571 - RNA, 19 nt, Homo sapiens
  misc_RNA (1)...(19): siRNA sense strand
ugagcgaccuccagagcau

SEQ ID NO: 1723572 - RNA, 19 nt, Homo sapiens
  misc_RNA (1)...(19): siRNA sense strand
gcgacacgaaggacaagaa

SEQ ID NO: 1723573 - RNA, 19 nt, Homo sapiens
  misc_RNA (1)...(19): siRNA sense strand
cgacucgcuuauucacuuc

SEQ ID NO: 1723574 - RNA, 19 nt, Homo sapiens
  misc_RNA (1)...(19): siRNA sense strand
gugcugacgccggagauaa

SEQ ID NO: 1723575 - RNA, 19 nt, Homo sapiens
  misc_RNA (1)...(19): siRNA sense strand
aaguggaccuggccagugu

SEQ ID NO: 1723576 - RNA, 19 nt, Homo sapiens
  misc_RNA (1)...(19): siRNA sense strand
ucaacgaguaucugaacaa

SEQ ID NO: 1723577 - RNA, 19 nt, Homo sapiens
  misc_RNA (1)...(19): siRNA sense strand
ugacgacugugaguucaag

SEQ ID NO: 1723578 - RNA, 19 nt, Homo sapiens
  misc_RNA (1)...(19): siRNA sense strand
gccaaagccaugcagaaca

SEQ ID NO: 1723579 - RNA, 19 nt, Homo sapiens
  misc_RNA (1)...(19): siRNA sense strand
cagacggacgacucgcuua

SEQ ID NO: 1723580 - RNA, 19 nt, Homo sapiens
  misc_RNA (1)...(19): siRNA sense strand
ccggaaagucaacgaguau

SEQ ID NO: 1723581 - RNA, 19 nt, Homo sapiens
  misc_RNA (1)...(19): siRNA sense strand
ugcaggaacccaagacaga

SEQ ID NO: 1723582 - RNA, 19 nt, Homo sapiens
  misc_RNA (1)...(19): siRNA sense strand
gaaggacaagaaggacgaa

SEQ ID NO: 1723583 - RNA, 19 nt, Homo sapiens
  misc_RNA (1)...(19): siRNA sense strand
gacggacgacucgcuuauu

SEQ ID NO: 1723584 - RNA, 19 nt, Homo sapiens
  misc_RNA (1)...(19): siRNA sense strand
ggacgacucgcuuauucac

SEQ ID NO: 1723585 - RNA, 19 nt, Homo sapiens
  misc_RNA (1)...(19): siRNA sense strand
cgucauccaccaccucuuc

SEQ ID NO: 1723586 - RNA, 19 nt, Homo sapiens
  misc_RNA (1)...(19): siRNA sense strand
caagacagaccaggaugag

SEQ ID NO: 1723587 - RNA, 19 nt, Homo sapiens
  misc_RNA (1)...(19): siRNA sense strand
cguggaagacgacuugauc

SEQ ID NO: 1723588 - RNA, 19 nt, Homo sapiens
  misc_RNA (1)...(19): siRNA sense strand
ggaaagggcugguguacau

SEQ ID NO: 1723589 - RNA, 19 nt, Homo sapiens
  misc_RNA (1)...(19): siRNA sense strand
gaagacgacuugaucaucu

SEQ ID NO: 1723590 - RNA, 19 nt, Homo sapiens
  misc_RNA (1)...(19): siRNA sense strand
gaacguggaagacgacuug

SEQ ID NO: 1723591 - RNA, 19 nt, Homo sapiens
  misc_RNA (1)...(19): siRNA sense strand
ccaaagccaugcagaacaa

SEQ ID NO: 1723592 - RNA, 19 nt, Homo sapiens
  misc_RNA (1)...(19): siRNA sense strand
gagcauugccggaaaguca

SEQ ID NO: 1723593 - RNA, 19 nt, Homo sapiens
  misc_RNA (1)...(19): siRNA sense strand
gccggaaagucaacgagua

SEQ ID NO: 1723594 - RNA, 19 nt, Homo sapiens
  misc_RNA (1)...(19): siRNA sense strand
caucuucccugacgacugu

SEQ ID NO: 1723595 - RNA, 19 nt, Homo sapiens
  misc_RNA (1)...(19): siRNA sense strand
ggacaugagccuggacuga

SEQ ID NO: 1723596 - RNA, 19 nt, Homo sapiens
  misc_RNA (1)...(19): siRNA sense strand
ggacgaagaggaggacaug

SEQ ID NO: 1723597 - RNA, 19 nt, Homo sapiens
  misc_RNA (1)...(19): siRNA sense strand
agaaagagggcgacacgaa

SEQ ID NO: 1723598 - RNA, 19 nt, Homo sapiens
  misc_RNA (1)...(19): siRNA sense strand
ggaagacgacuugaucauc

SEQ ID NO: 1723599 - RNA, 19 nt, Homo sapiens
  misc_RNA (1)...(19): siRNA sense strand
ugaggagcauugccggaaa

SEQ ID NO: 1723600 - RNA, 19 nt, Homo sapiens
  misc_RNA (1)...(19): siRNA sense strand
ggacaagaaggacgaagag

SEQ ID NO: 1723601 - RNA, 19 nt, Homo sapiens
  misc_RNA (1)...(19): siRNA sense strand
gggucuacgugcugaaguu

SEQ ID NO: 1723602 - RNA, 19 nt, Homo sapiens
  misc_RNA (1)...(19): siRNA sense strand
gcagaccgcggaugagauc

SEQ ID NO: 1723603 - RNA, 19 nt, Homo sapiens
  misc_RNA (1)...(19): siRNA sense strand
gaggagcauugccggaaag

SEQ ID NO: 1723604 - RNA, 19 nt, Homo sapiens
  misc_RNA (1)...(19): siRNA sense strand
caacgaguaucugaacaac

SEQ ID NO: 1723605 - RNA, 19 nt, Homo sapiens
  misc_RNA (1)...(19): siRNA sense strand
ggaaagucaacgaguaucu

SEQ ID NO: 1723606 - RNA, 19 nt, Homo sapiens
  misc_RNA (1)...(19): siRNA sense strand
gaaagucaacgaguaucug

SEQ ID NO: 1723607 - RNA, 19 nt, Homo sapiens
  misc_RNA (1)...(19): siRNA sense strand
acacgaaggacaagaagga

SEQ ID NO: 1723608 - RNA, 19 nt, Homo sapiens
  misc_RNA (1)...(19): siRNA sense strand
gaaagggcugguguacauu

SEQ ID NO: 1723609 - RNA, 19 nt, Homo sapiens
  misc_RNA (1)...(19): siRNA sense strand
ccaagacagaccaggauga

SEQ ID NO: 1723610 - RNA, 19 nt, Homo sapiens
  misc_RNA (1)...(19): siRNA sense strand
ccaccgugacuccggauaa

SEQ ID NO: 1723611 - RNA, 19 nt, Homo sapiens
  misc_RNA (1)...(19): siRNA sense strand
gcgccugcuucccuacuug

SEQ ID NO: 1723612 - RNA, 19 nt, Homo sapiens
  misc_RNA (1)...(19): siRNA sense strand
acgacucgcuuauucacuu

SEQ ID NO: 1723613 - RNA, 19 nt, Homo sapiens
  misc_RNA (1)...(19): siRNA sense strand
aaagucaacgaguaucuga

SEQ ID NO: 1723614 - RNA, 19 nt, Homo sapiens
  misc_RNA (1)...(19): siRNA sense strand
acggacgacucgcuuauuc

SEQ ID NO: 1723615 - RNA, 19 nt, Homo sapiens
  misc_RNA (1)...(19): siRNA sense strand
ugagcgaccuccagagcau

SEQ ID NO: 1723616 - RNA, 19 nt, Homo sapiens
  misc_RNA (1)...(19): siRNA sense strand
gcgacacgaaggacaagaa

SEQ ID NO: 1723617 - RNA, 19 nt, Homo sapiens
  misc_RNA (1)...(19): siRNA sense strand
cgacucgcuuauucacuuc

SEQ ID NO: 1723618 - RNA, 19 nt, Homo sapiens
  misc_RNA (1)...(19): siRNA sense strand
gugcugacgccggagauaa

SEQ ID NO: 1723619 - RNA, 19 nt, Homo sapiens
  misc_RNA (1)...(19): siRNA sense strand
aaguggaccuggccagugu

SEQ ID NO: 1723620 - RNA, 19 nt, Homo sapiens
  misc_RNA (1)...(19): siRNA sense strand
ucaacgaguaucugaacaa

SEQ ID NO: 1723621 - RNA, 19 nt, Homo sapiens
  misc_RNA (1)...(19): siRNA sense strand
ugacgacugugaguucaag

SEQ ID NO: 1723622 - RNA, 19 nt, Homo sapiens
  misc_RNA (1)...(19): siRNA sense strand
gccaaagccaugcagaaca

SEQ ID NO: 1723623 - RNA, 19 nt, Homo sapiens
  misc_RNA (1)...(19): siRNA sense strand
cagacggacgacucgcuua

SEQ ID NO: 1723624 - RNA, 19 nt, Homo sapiens
  misc_RNA (1)...(19): siRNA sense strand
ccggaaagucaacgaguau

SEQ ID NO: 1723625 - RNA, 19 nt, Homo sapiens
  misc_RNA (1)...(19): siRNA sense strand
ugcaggaacccaagacaga

SEQ ID NO: 1723626 - RNA, 19 nt, Homo sapiens
  misc_RNA (1)...(19): siRNA sense strand
gaaggacaagaaggacgaa

SEQ ID NO: 1723627 - RNA, 19 nt, Homo sapiens
  misc_RNA (1)...(19): siRNA sense strand
gacggacgacucgcuuauu

SEQ ID NO: 1723628 - RNA, 19 nt, Homo sapiens
  misc_RNA (1)...(19): siRNA sense strand
ggacgacucgcuuauucac

SEQ ID NO: 1723629 - RNA, 19 nt, Homo sapiens
  misc_RNA (1)...(19): siRNA sense strand
cgucauccaccaccucuuc

SEQ ID NO: 1723630 - RNA, 19 nt, Homo sapiens
  misc_RNA (1)...(19): siRNA sense strand
caagacagaccaggaugag

SEQ ID NO: 1723631 - RNA, 19 nt, Homo sapiens
  misc_RNA (1)...(19): siRNA sense strand
cguggaagacgacuugauc

SEQ ID NO: 1723632 - RNA, 19 nt, Homo sapiens
  misc_RNA (1)...(19): siRNA sense strand
gaacauggcaucaaguuua

SEQ ID NO: 1723633 - RNA, 19 nt, Homo sapiens
  misc_RNA (1)...(19): siRNA sense strand
gauagaagcuguacagaau

SEQ ID NO: 1723634 - RNA, 19 nt, Homo sapiens
  misc_RNA (1)...(19): siRNA sense strand
gcaagacucucgaaauuau

SEQ ID NO: 1723635 - RNA, 19 nt, Homo sapiens
  misc_RNA (1)...(19): siRNA sense strand
gaacggcccugaagaucuu

SEQ ID NO: 1723636 - RNA, 19 nt, Homo sapiens
  misc_RNA (1)...(19): siRNA sense strand
ggaaaucauugaaggagaa

SEQ ID NO: 1723637 - RNA, 19 nt, Homo sapiens
  misc_RNA (1)...(19): siRNA sense strand
ggagaaagcuguggagaag

SEQ ID NO: 1723638 - RNA, 19 nt, Homo sapiens
  misc_RNA (1)...(19): siRNA sense strand
gggcaucccuggugacaaa

SEQ ID NO: 1723639 - RNA, 19 nt, Homo sapiens
  misc_RNA (1)...(19): siRNA sense strand
ggauuaaggcaacaaauaa

SEQ ID NO: 1723640 - RNA, 19 nt, Homo sapiens
  misc_RNA (1)...(19): siRNA sense strand
ggagugcgcuggauuucuu

SEQ ID NO: 1723641 - RNA, 19 nt, Homo sapiens
  misc_RNA (1)...(19): siRNA sense strand
ggaagaacauggcaucaag

SEQ ID NO: 1723642 - RNA, 19 nt, Homo sapiens
  misc_RNA (1)...(19): siRNA sense strand
cacauuggcucuuugaauu

SEQ ID NO: 1723643 - RNA, 19 nt, Homo sapiens
  misc_RNA (1)...(19): siRNA sense strand
gucaagagauaacaacaaa

SEQ ID NO: 1723644 - RNA, 19 nt, Homo sapiens
  misc_RNA (1)...(19): siRNA sense strand
gcagagguauucacaacau

SEQ ID NO: 1723645 - RNA, 19 nt, Homo sapiens
  misc_RNA (1)...(19): siRNA sense strand
cugcaagacucucgaaauu

SEQ ID NO: 1723646 - RNA, 19 nt, Homo sapiens
  misc_RNA (1)...(19): siRNA sense strand
caagagauaacaacaaaug

SEQ ID NO: 1723647 - RNA, 19 nt, Homo sapiens
  misc_RNA (1)...(19): siRNA sense strand
ugaaagaccacguuacuug

SEQ ID NO: 1723648 - RNA, 19 nt, Homo sapiens
  misc_RNA (1)...(19): siRNA sense strand
agaaagcuguggagaaguu

SEQ ID NO: 1723649 - RNA, 19 nt, Homo sapiens
  misc_RNA (1)...(19): siRNA sense strand
ggaggaacaugugugaaug

SEQ ID NO: 1723650 - RNA, 19 nt, Homo sapiens
  misc_RNA (1)...(19): siRNA sense strand
uaaagacaaugaacguguu

SEQ ID NO: 1723651 - RNA, 19 nt, Homo sapiens
  misc_RNA (1)...(19): siRNA sense strand
guagcucaguccaccaaua

SEQ ID NO: 1723652 - RNA, 19 nt, Homo sapiens
  misc_RNA (1)...(19): siRNA sense strand
agacaguucguaccaauua

SEQ ID NO: 1723653 - RNA, 19 nt, Homo sapiens
  misc_RNA (1)...(19): siRNA sense strand
ggacauggccaacaaaauu

SEQ ID NO: 1723654 - RNA, 19 nt, Homo sapiens
  misc_RNA (1)...(19): siRNA sense strand
gacaaagaauacugcauca

SEQ ID NO: 1723655 - RNA, 19 nt, Homo sapiens
  misc_RNA (1)...(19): siRNA sense strand
gcaucaaguuuauaagaca

SEQ ID NO: 1723656 - RNA, 19 nt, Homo sapiens
  misc_RNA (1)...(19): siRNA sense strand
gguaagacccugguuguug

SEQ ID NO: 1723657 - RNA, 19 nt, Homo sapiens
  misc_RNA (1)...(19): siRNA sense strand
ggcgauauauuggaggaua

SEQ ID NO: 1723658 - RNA, 19 nt, Homo sapiens
  misc_RNA (1)...(19): siRNA sense strand
uaagacaguucguaccaau

SEQ ID NO: 1723659 - RNA, 19 nt, Homo sapiens
  misc_RNA (1)...(19): siRNA sense strand
gcgauauauuggaggauaa

SEQ ID NO: 1723660 - RNA, 19 nt, Homo sapiens
  misc_RNA (1)...(19): siRNA sense strand
gaaugcuuaugggcaauuu

SEQ ID NO: 1723661 - RNA, 19 nt, Homo sapiens
  misc_RNA (1)...(19): siRNA sense strand
ggaagaaaauauugagguu

SEQ ID NO: 1723662 - RNA, 19 nt, Homo sapiens
  misc_RNA (1)...(19): siRNA sense strand
uaaggaggcagcccaauau

SEQ ID NO: 1723663 - RNA, 19 nt, Homo sapiens
  misc_RNA (1)...(19): siRNA sense strand
cuaaggaggcagcccaaua

SEQ ID NO: 1723664 - RNA, 19 nt, Homo sapiens
  misc_RNA (1)...(19): siRNA sense strand
uagaagcuguacagaauca

SEQ ID NO: 1723665 - RNA, 19 nt, Homo sapiens
  misc_RNA (1)...(19): siRNA sense strand
ccacuguauuuacuccuuu

SEQ ID NO: 1723666 - RNA, 19 nt, Homo sapiens
  misc_RNA (1)...(19): siRNA sense strand
gacaguucguaccaauuaa

SEQ ID NO: 1723667 - RNA, 19 nt, Homo sapiens
  misc_RNA (1)...(19): siRNA sense strand
agaaucacauuggcucuuu

SEQ ID NO: 1723668 - RNA, 19 nt, Homo sapiens
  misc_RNA (1)...(19): siRNA sense strand
gaaagucgaggagacaguu

SEQ ID NO: 1723669 - RNA, 19 nt, Homo sapiens
  misc_RNA (1)...(19): siRNA sense strand
gguuuaccauaguuacuuu

SEQ ID NO: 1723670 - RNA, 19 nt, Homo sapiens
  misc_RNA (1)...(19): siRNA sense strand
ggacaagcccugcaagacu

SEQ ID NO: 1723671 - RNA, 19 nt, Homo sapiens
  misc_RNA (1)...(19): siRNA sense strand
gaaucacauuggcucuuug

SEQ ID NO: 1723672 - RNA, 19 nt, Homo sapiens
  misc_RNA (1)...(19): siRNA sense strand
ggacagcacaauuggaauc

SEQ ID NO: 1723673 - RNA, 19 nt, Homo sapiens
  misc_RNA (1)...(19): siRNA sense strand
acgauuccgucaagagaua

SEQ ID NO: 1723674 - RNA, 19 nt, Homo sapiens
  misc_RNA (1)...(19): siRNA sense strand
gugaacacauggaagaaca

SEQ ID NO: 1723675 - RNA, 19 nt, Homo sapiens
  misc_RNA (1)...(19): siRNA sense strand
caaaauuggugaacacaug

SEQ ID NO: 1723676 - RNA, 19 nt, Homo sapiens
  misc_RNA (1)...(19): siRNA sense strand
gaauguggguugcauaccu

SEQ ID NO: 1723677 - RNA, 19 nt, Homo sapiens
  misc_RNA (1)...(19): siRNA sense strand
gcgcucaaauguggacuga

SEQ ID NO: 1723678 - RNA, 19 nt, Homo sapiens
  misc_RNA (1)...(19): siRNA sense strand
gaaauuauggauggaaagu

SEQ ID NO: 1723679 - RNA, 19 nt, Homo sapiens
  misc_RNA (1)...(19): siRNA sense strand
gagaauauaauacggugau

SEQ ID NO: 1723680 - RNA, 19 nt, Homo sapiens
  misc_RNA (1)...(19): siRNA sense strand
guuagguccauucuucuua

SEQ ID NO: 1723681 - RNA, 19 nt, Homo sapiens
  misc_RNA (1)...(19): siRNA sense strand
gaguagcucugcgggagaa

SEQ ID NO: 1723682 - RNA, 19 nt, Homo sapiens
  misc_RNA (1)...(19): siRNA sense strand
gugcagagguauucacaac

SEQ ID NO: 1723683 - RNA, 19 nt, Homo sapiens
  misc_RNA (1)...(19): siRNA sense strand
ccaaaugcuggagaaguua

SEQ ID NO: 1723684 - RNA, 19 nt, Homo sapiens
  misc_RNA (1)...(19): siRNA sense strand
gaaguuacacaaggcuuug

SEQ ID NO: 1723685 - RNA, 19 nt, Homo sapiens
  misc_RNA (1)...(19): siRNA sense strand
aggauuaaggcaacaaaua

SEQ ID NO: 1723686 - RNA, 19 nt, Homo sapiens
  misc_RNA (1)...(19): siRNA sense strand
uguauuuacuccuuuggaa

SEQ ID NO: 1723687 - RNA, 19 nt, Homo sapiens
  misc_RNA (1)...(19): siRNA sense strand
guuccaaccacuguauuua

SEQ ID NO: 1723688 - RNA, 19 nt, Homo sapiens
  misc_RNA (1)...(19): siRNA sense strand
guucguaccaauuaaaguu

SEQ ID NO: 1723689 - RNA, 19 nt, Homo sapiens
  misc_RNA (1)...(19): siRNA sense strand
cauggcaucaaguuuauaa

SEQ ID NO: 1723690 - RNA, 19 nt, Homo sapiens
  misc_RNA (1)...(19): siRNA sense strand
cauccuaugucgcuuugga

SEQ ID NO: 1723691 - RNA, 19 nt, Homo sapiens
  misc_RNA (1)...(19): siRNA sense strand
ggagacaguuaagcaugau

SEQ ID NO: 1723692 - RNA, 19 nt, Homo sapiens
  misc_RNA (1)...(19): siRNA sense strand
caggcuggcugcugagguu

SEQ ID NO: 1723693 - RNA, 19 nt, Homo sapiens
  misc_RNA (1)...(19): siRNA sense strand
auauugagguuuaccauag

SEQ ID NO: 1723694 - RNA, 19 nt, Homo sapiens
  misc_RNA (1)...(19): siRNA sense strand
caauagugaggaaaucauu

SEQ ID NO: 1723695 - RNA, 19 nt, Homo sapiens
  misc_RNA (1)...(19): siRNA sense strand
gagcauccuaugucgcuuu

SEQ ID NO: 1723696 - RNA, 19 nt, Homo sapiens
  misc_RNA (1)...(19): siRNA sense strand
caacauugucugugaccaa

SEQ ID NO: 1723697 - RNA, 19 nt, Homo sapiens
  misc_RNA (1)...(19): siRNA sense strand
ucgaaauuauggauggaaa

SEQ ID NO: 1723698 - RNA, 19 nt, Homo sapiens
  misc_RNA (1)...(19): siRNA sense strand
cagagguauucacaacauu

SEQ ID NO: 1723699 - RNA, 19 nt, Homo sapiens
  misc_RNA (1)...(19): siRNA sense strand
ucacauuggcucuuugaau

SEQ ID NO: 1723700 - RNA, 19 nt, Homo sapiens
  misc_RNA (1)...(19): siRNA sense strand
ugauagaagcuguacagaa

SEQ ID NO: 1723701 - RNA, 19 nt, Homo sapiens
  misc_RNA (1)...(19): siRNA sense strand
aggagacaguuaagcauga

SEQ ID NO: 1723702 - RNA, 19 nt, Homo sapiens
  misc_RNA (1)...(19): siRNA sense strand
gaagaacauggcaucaagu

SEQ ID NO: 1723703 - RNA, 19 nt, Homo sapiens
  misc_RNA (1)...(19): siRNA sense strand
cauugccacuggugaaaga

SEQ ID NO: 1723704 - RNA, 19 nt, Homo sapiens
  misc_RNA (1)...(19): siRNA sense strand
gaugaagaacagaccaaug

SEQ ID NO: 1723705 - RNA, 19 nt, Homo sapiens
  misc_RNA (1)...(19): siRNA sense strand
ugauugggacagaaugaua

SEQ ID NO: 1723706 - RNA, 19 nt, Homo sapiens
  misc_RNA (1)...(19): siRNA sense strand
ugucacagaugaagaacag

SEQ ID NO: 1723707 - RNA, 19 nt, Homo sapiens
  misc_RNA (1)...(19): siRNA sense strand
gcaauaggaagagaugcuu

SEQ ID NO: 1723708 - RNA, 19 nt, Homo sapiens
  misc_RNA (1)...(19): siRNA sense strand
aacauggcaucaaguuuau

SEQ ID NO: 1723709 - RNA, 19 nt, Homo sapiens
  misc_RNA (1)...(19): siRNA sense strand
ggugaaagaccacguuacu

SEQ ID NO: 1723710 - RNA, 19 nt, Homo sapiens
  misc_RNA (1)...(19): siRNA sense strand
ugcaagacucucgaaauua

SEQ ID NO: 1723711 - RNA, 19 nt, Homo sapiens
  misc_RNA (1)...(19): siRNA sense strand
gugaugaucuuuucuccuu

SEQ ID NO: 1723712 - RNA, 19 nt, Homo sapiens
  misc_RNA (1)...(19): siRNA sense strand
gaaagcuguggagaaguuu

SEQ ID NO: 1723713 - RNA, 19 nt, Homo sapiens
  misc_RNA (1)...(19): siRNA sense strand
ggcaucaaguuuauaagac

SEQ ID NO: 1723714 - RNA, 19 nt, Homo sapiens
  misc_RNA (1)...(19): siRNA sense strand
aauguggguugcauaccua

SEQ ID NO: 1723715 - RNA, 19 nt, Homo sapiens
  misc_RNA (1)...(19): siRNA sense strand
caucccuggugacaaagaa

SEQ ID NO: 1723716 - RNA, 19 nt, Homo sapiens
  misc_RNA (1)...(19): siRNA sense strand
gggugaagauaaaugaaaa

SEQ ID NO: 1723717 - RNA, 19 nt, Homo sapiens
  misc_RNA (1)...(19): siRNA sense strand
gaauuggggcuaccgagua

SEQ ID NO: 1723718 - RNA, 19 nt, Homo sapiens
  misc_RNA (1)...(19): siRNA sense strand
ggaagagaugcuugcacaa

SEQ ID NO: 1723719 - RNA, 19 nt, Homo sapiens
  misc_RNA (1)...(19): siRNA sense strand
gcucaguccaccaauagug

SEQ ID NO: 1723720 - RNA, 19 nt, Homo sapiens
  misc_RNA (1)...(19): siRNA sense strand
gagaaugcuuaugggcaau

SEQ ID NO: 1723721 - RNA, 19 nt, Homo sapiens
  misc_RNA (1)...(19): siRNA sense strand
uggcaucaaguuuauaaga

SEQ ID NO: 1723722 - RNA, 19 nt, Homo sapiens
  misc_RNA (1)...(19): siRNA sense strand
ccaccaauagugaggaaau

SEQ ID NO: 1723723 - RNA, 19 nt, Homo sapiens
  misc_RNA (1)...(19): siRNA sense strand
ggacagaaugauagaagcu

SEQ ID NO: 1723724 - RNA, 19 nt, Homo sapiens
  misc_RNA (1)...(19): siRNA sense strand
agaaguuacacaaggcuuu

SEQ ID NO: 1723725 - RNA, 19 nt, Homo sapiens
  misc_RNA (1)...(19): siRNA sense strand
gaucuucccaaguccuaug

SEQ ID NO: 1723726 - RNA, 19 nt, Homo sapiens
  misc_RNA (1)...(19): siRNA sense strand
cggaggaacaugugugaau

SEQ ID NO: 1723727 - RNA, 19 nt, Homo sapiens
  misc_RNA (1)...(19): siRNA sense strand
gaagcuguacagaaucaca

SEQ ID NO: 1723728 - RNA, 19 nt, Homo sapiens
  misc_RNA (1)...(19): siRNA sense strand
cagaaugauagaagcugua

SEQ ID NO: 1723729 - RNA, 19 nt, Homo sapiens
  misc_RNA (1)...(19): siRNA sense strand
uuagguccauucuucuuag

SEQ ID NO: 1723730 - RNA, 19 nt, Homo sapiens
  misc_RNA (1)...(19): siRNA sense strand
gaugcuggcaauaggaaga

SEQ ID NO: 1723731 - RNA, 19 nt, Homo sapiens
  misc_RNA (1)...(19): siRNA sense strand
aagaacauggcaucaaguu

SEQ ID NO: 1723732 - RNA, 19 nt, Homo sapiens
  misc_RNA (1)...(19): siRNA sense strand
gaacauggcaucaaguuua

SEQ ID NO: 1723733 - RNA, 19 nt, Homo sapiens
  misc_RNA (1)...(19): siRNA sense strand
gauagaagcuguacagaau

SEQ ID NO: 1723734 - RNA, 19 nt, Homo sapiens
  misc_RNA (1)...(19): siRNA sense strand
gcaagacucucgaaauuau

SEQ ID NO: 1723735 - RNA, 19 nt, Homo sapiens
  misc_RNA (1)...(19): siRNA sense strand
gaacggcccugaagaucuu

SEQ ID NO: 1723736 - RNA, 19 nt, Homo sapiens
  misc_RNA (1)...(19): siRNA sense strand
ggaaaucauugaaggagaa

SEQ ID NO: 1723737 - RNA, 19 nt, Homo sapiens
  misc_RNA (1)...(19): siRNA sense strand
ggagaaagcuguggagaag

SEQ ID NO: 1723738 - RNA, 19 nt, Homo sapiens
  misc_RNA (1)...(19): siRNA sense strand
gggcaucccuggugacaaa

SEQ ID NO: 1723739 - RNA, 19 nt, Homo sapiens
  misc_RNA (1)...(19): siRNA sense strand
ggauuaaggcaacaaauaa

SEQ ID NO: 1723740 - RNA, 19 nt, Homo sapiens
  misc_RNA (1)...(19): siRNA sense strand
ggagugcgcuggauuucuu

SEQ ID NO: 1723741 - RNA, 19 nt, Homo sapiens
  misc_RNA (1)...(19): siRNA sense strand
ggaagaacauggcaucaag

SEQ ID NO: 1723742 - RNA, 19 nt, Homo sapiens
  misc_RNA (1)...(19): siRNA sense strand
cacauuggcucuuugaauu

SEQ ID NO: 1723743 - RNA, 19 nt, Homo sapiens
  misc_RNA (1)...(19): siRNA sense strand
gucaagagauaacaacaaa

SEQ ID NO: 1723744 - RNA, 19 nt, Homo sapiens
  misc_RNA (1)...(19): siRNA sense strand
gcagagguauucacaacau

SEQ ID NO: 1723745 - RNA, 19 nt, Homo sapiens
  misc_RNA (1)...(19): siRNA sense strand
cugcaagacucucgaaauu

SEQ ID NO: 1723746 - RNA, 19 nt, Homo sapiens
  misc_RNA (1)...(19): siRNA sense strand
caagagauaacaacaaaug

SEQ ID NO: 1723747 - RNA, 19 nt, Homo sapiens
  misc_RNA (1)...(19): siRNA sense strand
ugaaagaccacguuacuug

SEQ ID NO: 1723748 - RNA, 19 nt, Homo sapiens
  misc_RNA (1)...(19): siRNA sense strand
agaaagcuguggagaaguu

SEQ ID NO: 1723749 - RNA, 19 nt, Homo sapiens
  misc_RNA (1)...(19): siRNA sense strand
ggaggaacaugugugaaug

SEQ ID NO: 1723750 - RNA, 19 nt, Homo sapiens
  misc_RNA (1)...(19): siRNA sense strand
uaaagacaaugaacguguu

SEQ ID NO: 1723751 - RNA, 19 nt, Homo sapiens
  misc_RNA (1)...(19): siRNA sense strand
guagcucaguccaccaaua

SEQ ID NO: 1723752 - RNA, 19 nt, Homo sapiens
  misc_RNA (1)...(19): siRNA sense strand
agacaguucguaccaauua

SEQ ID NO: 1723753 - RNA, 19 nt, Homo sapiens
  misc_RNA (1)...(19): siRNA sense strand
ggacauggccaacaaaauu

SEQ ID NO: 1723754 - RNA, 19 nt, Homo sapiens
  misc_RNA (1)...(19): siRNA sense strand
gacaaagaauacugcauca

SEQ ID NO: 1723755 - RNA, 19 nt, Homo sapiens
  misc_RNA (1)...(19): siRNA sense strand
gcaucaaguuuauaagaca

SEQ ID NO: 1723756 - RNA, 19 nt, Homo sapiens
  misc_RNA (1)...(19): siRNA sense strand
gguaagacccugguuguug

SEQ ID NO: 1723757 - RNA, 19 nt, Homo sapiens
  misc_RNA (1)...(19): siRNA sense strand
ggcgauauauuggaggaua

SEQ ID NO: 1723758 - RNA, 19 nt, Homo sapiens
  misc_RNA (1)...(19): siRNA sense strand
uaagacaguucguaccaau

SEQ ID NO: 1723759 - RNA, 19 nt, Homo sapiens
  misc_RNA (1)...(19): siRNA sense strand
gcgauauauuggaggauaa

SEQ ID NO: 1723760 - RNA, 19 nt, Homo sapiens
  misc_RNA (1)...(19): siRNA sense strand
gaaugcuuaugggcaauuu

SEQ ID NO: 1723761 - RNA, 19 nt, Homo sapiens
  misc_RNA (1)...(19): siRNA sense strand
ggaagaaaauauugagguu

SEQ ID NO: 1723762 - RNA, 19 nt, Homo sapiens
  misc_RNA (1)...(19): siRNA sense strand
uaaggaggcagcccaauau

SEQ ID NO: 1723763 - RNA, 19 nt, Homo sapiens
  misc_RNA (1)...(19): siRNA sense strand
cuaaggaggcagcccaaua

SEQ ID NO: 1723764 - RNA, 19 nt, Homo sapiens
  misc_RNA (1)...(19): siRNA sense strand
uagaagcuguacagaauca

SEQ ID NO: 1723765 - RNA, 19 nt, Homo sapiens
  misc_RNA (1)...(19): siRNA sense strand
ccacuguauuuacuccuuu

SEQ ID NO: 1723766 - RNA, 19 nt, Homo sapiens
  misc_RNA (1)...(19): siRNA sense strand
gacaguucguaccaauuaa

SEQ ID NO: 1723767 - RNA, 19 nt, Homo sapiens
  misc_RNA (1)...(19): siRNA sense strand
agaaucacauuggcucuuu

SEQ ID NO: 1723768 - RNA, 19 nt, Homo sapiens
  misc_RNA (1)...(19): siRNA sense strand
gaaagucgaggagacaguu

SEQ ID NO: 1723769 - RNA, 19 nt, Homo sapiens
  misc_RNA (1)...(19): siRNA sense strand
gguuuaccauaguuacuuu

SEQ ID NO: 1723770 - RNA, 19 nt, Homo sapiens
  misc_RNA (1)...(19): siRNA sense strand
ggacaagcccugcaagacu

SEQ ID NO: 1723771 - RNA, 19 nt, Homo sapiens
  misc_RNA (1)...(19): siRNA sense strand
gaaucacauuggcucuuug

SEQ ID NO: 1723772 - RNA, 19 nt, Homo sapiens
  misc_RNA (1)...(19): siRNA sense strand
ggacagcacaauuggaauc

SEQ ID NO: 1723773 - RNA, 19 nt, Homo sapiens
  misc_RNA (1)...(19): siRNA sense strand
acgauuccgucaagagaua

SEQ ID NO: 1723774 - RNA, 19 nt, Homo sapiens
  misc_RNA (1)...(19): siRNA sense strand
gugaacacauggaagaaca

SEQ ID NO: 1723775 - RNA, 19 nt, Homo sapiens
  misc_RNA (1)...(19): siRNA sense strand
caaaauuggugaacacaug

SEQ ID NO: 1723776 - RNA, 19 nt, Homo sapiens
  misc_RNA (1)...(19): siRNA sense strand
gaauguggguugcauaccu

SEQ ID NO: 1723777 - RNA, 19 nt, Homo sapiens
  misc_RNA (1)...(19): siRNA sense strand
gcgcucaaauguggacuga

SEQ ID NO: 1723778 - RNA, 19 nt, Homo sapiens
  misc_RNA (1)...(19): siRNA sense strand
gaaauuauggauggaaagu

SEQ ID NO: 1723779 - RNA, 19 nt, Homo sapiens
  misc_RNA (1)...(19): siRNA sense strand
gagaauauaauacggugau

SEQ ID NO: 1723780 - RNA, 19 nt, Homo sapiens
  misc_RNA (1)...(19): siRNA sense strand
guuagguccauucuucuua

SEQ ID NO: 1723781 - RNA, 19 nt, Homo sapiens
  misc_RNA (1)...(19): siRNA sense strand
gaguagcucugcgggagaa

SEQ ID NO: 1723782 - RNA, 19 nt, Homo sapiens
  misc_RNA (1)...(19): siRNA sense strand
gugcagagguauucacaac

SEQ ID NO: 1723783 - RNA, 19 nt, Homo sapiens
  misc_RNA (1)...(19): siRNA sense strand
ccaaaugcuggagaaguua

SEQ ID NO: 1723784 - RNA, 19 nt, Homo sapiens
  misc_RNA (1)...(19): siRNA sense strand
gaaguuacacaaggcuuug

SEQ ID NO: 1723785 - RNA, 19 nt, Homo sapiens
  misc_RNA (1)...(19): siRNA sense strand
aggauuaaggcaacaaaua

SEQ ID NO: 1723786 - RNA, 19 nt, Homo sapiens
  misc_RNA (1)...(19): siRNA sense strand
uguauuuacuccuuuggaa

SEQ ID NO: 1723787 - RNA, 19 nt, Homo sapiens
  misc_RNA (1)...(19): siRNA sense strand
guuccaaccacuguauuua

SEQ ID NO: 1723788 - RNA, 19 nt, Homo sapiens
  misc_RNA (1)...(19): siRNA sense strand
guucguaccaauuaaaguu

SEQ ID NO: 1723789 - RNA, 19 nt, Homo sapiens
  misc_RNA (1)...(19): siRNA sense strand
cauggcaucaaguuuauaa

SEQ ID NO: 1723790 - RNA, 19 nt, Homo sapiens
  misc_RNA (1)...(19): siRNA sense strand
cauccuaugucgcuuugga

SEQ ID NO: 1723791 - RNA, 19 nt, Homo sapiens
  misc_RNA (1)...(19): siRNA sense strand
ggagacaguuaagcaugau

SEQ ID NO: 1723792 - RNA, 19 nt, Homo sapiens
  misc_RNA (1)...(19): siRNA sense strand
caggcuggcugcugagguu

SEQ ID NO: 1723793 - RNA, 19 nt, Homo sapiens
  misc_RNA (1)...(19): siRNA sense strand
auauugagguuuaccauag

SEQ ID NO: 1723794 - RNA, 19 nt, Homo sapiens
  misc_RNA (1)...(19): siRNA sense strand
caauagugaggaaaucauu

SEQ ID NO: 1723795 - RNA, 19 nt, Homo sapiens
  misc_RNA (1)...(19): siRNA sense strand
gagcauccuaugucgcuuu

SEQ ID NO: 1723796 - RNA, 19 nt, Homo sapiens
  misc_RNA (1)...(19): siRNA sense strand
caacauugucugugaccaa

SEQ ID NO: 1723797 - RNA, 19 nt, Homo sapiens
  misc_RNA (1)...(19): siRNA sense strand
ucgaaauuauggauggaaa

SEQ ID NO: 1723798 - RNA, 19 nt, Homo sapiens
  misc_RNA (1)...(19): siRNA sense strand
cagagguauucacaacauu

SEQ ID NO: 1723799 - RNA, 19 nt, Homo sapiens
  misc_RNA (1)...(19): siRNA sense strand
ucacauuggcucuuugaau

SEQ ID NO: 1723800 - RNA, 19 nt, Homo sapiens
  misc_RNA (1)...(19): siRNA sense strand
ugauagaagcuguacagaa

SEQ ID NO: 1723801 - RNA, 19 nt, Homo sapiens
  misc_RNA (1)...(19): siRNA sense strand
aggagacaguuaagcauga

SEQ ID NO: 1723802 - RNA, 19 nt, Homo sapiens
  misc_RNA (1)...(19): siRNA sense strand
gaagaacauggcaucaagu

SEQ ID NO: 1723803 - RNA, 19 nt, Homo sapiens
  misc_RNA (1)...(19): siRNA sense strand
cauugccacuggugaaaga

SEQ ID NO: 1723804 - RNA, 19 nt, Homo sapiens
  misc_RNA (1)...(19): siRNA sense strand
gaugaagaacagaccaaug

SEQ ID NO: 1723805 - RNA, 19 nt, Homo sapiens
  misc_RNA (1)...(19): siRNA sense strand
ugauugggacagaaugaua

SEQ ID NO: 1723806 - RNA, 19 nt, Homo sapiens
  misc_RNA (1)...(19): siRNA sense strand
ugucacagaugaagaacag

SEQ ID NO: 1723807 - RNA, 19 nt, Homo sapiens
  misc_RNA (1)...(19): siRNA sense strand
gcaauaggaagagaugcuu

SEQ ID NO: 1723808 - RNA, 19 nt, Homo sapiens
  misc_RNA (1)...(19): siRNA sense strand
aacauggcaucaaguuuau

SEQ ID NO: 1723809 - RNA, 19 nt, Homo sapiens
  misc_RNA (1)...(19): siRNA sense strand
ggugaaagaccacguuacu

SEQ ID NO: 1723810 - RNA, 19 nt, Homo sapiens
  misc_RNA (1)...(19): siRNA sense strand
ugcaagacucucgaaauua

SEQ ID NO: 1723811 - RNA, 19 nt, Homo sapiens
  misc_RNA (1)...(19): siRNA sense strand
gugaugaucuuuucuccuu

SEQ ID NO: 1723812 - RNA, 19 nt, Homo sapiens
  misc_RNA (1)...(19): siRNA sense strand
gaaagcuguggagaaguuu

SEQ ID NO: 1723813 - RNA, 19 nt, Homo sapiens
  misc_RNA (1)...(19): siRNA sense strand
ggcaucaaguuuauaagac

SEQ ID NO: 1723814 - RNA, 19 nt, Homo sapiens
  misc_RNA (1)...(19): siRNA sense strand
aauguggguugcauaccua

SEQ ID NO: 1723815 - RNA, 19 nt, Homo sapiens
  misc_RNA (1)...(19): siRNA sense strand
caucccuggugacaaagaa

SEQ ID NO: 1723816 - RNA, 19 nt, Homo sapiens
  misc_RNA (1)...(19): siRNA sense strand
gggugaagauaaaugaaaa

SEQ ID NO: 1723817 - RNA, 19 nt, Homo sapiens
  misc_RNA (1)...(19): siRNA sense strand
gaauuggggcuaccgagua

SEQ ID NO: 1723818 - RNA, 19 nt, Homo sapiens
  misc_RNA (1)...(19): siRNA sense strand
ggaagagaugcuugcacaa

SEQ ID NO: 1723819 - RNA, 19 nt, Homo sapiens
  misc_RNA (1)...(19): siRNA sense strand
gcucaguccaccaauagug

SEQ ID NO: 1723820 - RNA, 19 nt, Homo sapiens
  misc_RNA (1)...(19): siRNA sense strand
gagaaugcuuaugggcaau

SEQ ID NO: 1723821 - RNA, 19 nt, Homo sapiens
  misc_RNA (1)...(19): siRNA sense strand
uggcaucaaguuuauaaga

SEQ ID NO: 1723822 - RNA, 19 nt, Homo sapiens
  misc_RNA (1)...(19): siRNA sense strand
ccaccaauagugaggaaau

SEQ ID NO: 1723823 - RNA, 19 nt, Homo sapiens
  misc_RNA (1)...(19): siRNA sense strand
ggacagaaugauagaagcu

SEQ ID NO: 1723824 - RNA, 19 nt, Homo sapiens
  misc_RNA (1)...(19): siRNA sense strand
agaaguuacacaaggcuuu

SEQ ID NO: 1723825 - RNA, 19 nt, Homo sapiens
  misc_RNA (1)...(19): siRNA sense strand
gaucuucccaaguccuaug

SEQ ID NO: 1723826 - RNA, 19 nt, Homo sapiens
  misc_RNA (1)...(19): siRNA sense strand
cggaggaacaugugugaau

SEQ ID NO: 1723827 - RNA, 19 nt, Homo sapiens
  misc_RNA (1)...(19): siRNA sense strand
gaagcuguacagaaucaca

SEQ ID NO: 1723828 - RNA, 19 nt, Homo sapiens
  misc_RNA (1)...(19): siRNA sense strand
cagaaugauagaagcugua

SEQ ID NO: 1723829 - RNA, 19 nt, Homo sapiens
  misc_RNA (1)...(19): siRNA sense strand
uuagguccauucuucuuag

SEQ ID NO: 1723830 - RNA, 19 nt, Homo sapiens
  misc_RNA (1)...(19): siRNA sense strand
gaugcuggcaauaggaaga

SEQ ID NO: 1723831 - RNA, 19 nt, Homo sapiens
  misc_RNA (1)...(19): siRNA sense strand
aagaacauggcaucaaguu

SEQ ID NO: 1723832 - RNA, 19 nt, Homo sapiens
  misc_RNA (1)...(19): siRNA sense strand
gaacauggcaucaaguuua

SEQ ID NO: 1723833 - RNA, 19 nt, Homo sapiens
  misc_RNA (1)...(19): siRNA sense strand
gauagaagcuguacagaau

SEQ ID NO: 1723834 - RNA, 19 nt, Homo sapiens
  misc_RNA (1)...(19): siRNA sense strand
gcaagacucucgaaauuau

SEQ ID NO: 1723835 - RNA, 19 nt, Homo sapiens
  misc_RNA (1)...(19): siRNA sense strand
gaacggcccugaagaucuu

SEQ ID NO: 1723836 - RNA, 19 nt, Homo sapiens
  misc_RNA (1)...(19): siRNA sense strand
ggaaaucauugaaggagaa

SEQ ID NO: 1723837 - RNA, 19 nt, Homo sapiens
  misc_RNA (1)...(19): siRNA sense strand
ggagaaagcuguggagaag

SEQ ID NO: 1723838 - RNA, 19 nt, Homo sapiens
  misc_RNA (1)...(19): siRNA sense strand
gggcaucccuggugacaaa

SEQ ID NO: 1723839 - RNA, 19 nt, Homo sapiens
  misc_RNA (1)...(19): siRNA sense strand
ggauuaaggcaacaaauaa

SEQ ID NO: 1723840 - RNA, 19 nt, Homo sapiens
  misc_RNA (1)...(19): siRNA sense strand
ggagugcgcuggauuucuu

SEQ ID NO: 1723841 - RNA, 19 nt, Homo sapiens
  misc_RNA (1)...(19): siRNA sense strand
ggaagaacauggcaucaag

SEQ ID NO: 1723842 - RNA, 19 nt, Homo sapiens
  misc_RNA (1)...(19): siRNA sense strand
cacauuggcucuuugaauu

SEQ ID NO: 1723843 - RNA, 19 nt, Homo sapiens
  misc_RNA (1)...(19): siRNA sense strand
gucaagagauaacaacaaa

SEQ ID NO: 1723844 - RNA, 19 nt, Homo sapiens
  misc_RNA (1)...(19): siRNA sense strand
gcagagguauucacaacau

SEQ ID NO: 1723845 - RNA, 19 nt, Homo sapiens
  misc_RNA (1)...(19): siRNA sense strand
cugcaagacucucgaaauu

SEQ ID NO: 1723846 - RNA, 19 nt, Homo sapiens
  misc_RNA (1)...(19): siRNA sense strand
caagagauaacaacaaaug

SEQ ID NO: 1723847 - RNA, 19 nt, Homo sapiens
  misc_RNA (1)...(19): siRNA sense strand
ugaaagaccacguuacuug

SEQ ID NO: 1723848 - RNA, 19 nt, Homo sapiens
  misc_RNA (1)...(19): siRNA sense strand
agaaagcuguggagaaguu

SEQ ID NO: 1723849 - RNA, 19 nt, Homo sapiens
  misc_RNA (1)...(19): siRNA sense strand
ggaggaacaugugugaaug

SEQ ID NO: 1723850 - RNA, 19 nt, Homo sapiens
  misc_RNA (1)...(19): siRNA sense strand
uaaagacaaugaacguguu

SEQ ID NO: 1723851 - RNA, 19 nt, Homo sapiens
  misc_RNA (1)...(19): siRNA sense strand
guagcucaguccaccaaua

SEQ ID NO: 1723852 - RNA, 19 nt, Homo sapiens
  misc_RNA (1)...(19): siRNA sense strand
agacaguucguaccaauua

SEQ ID NO: 1723853 - RNA, 19 nt, Homo sapiens
  misc_RNA (1)...(19): siRNA sense strand
ggacauggccaacaaaauu

SEQ ID NO: 1723854 - RNA, 19 nt, Homo sapiens
  misc_RNA (1)...(19): siRNA sense strand
gacaaagaauacugcauca

SEQ ID NO: 1723855 - RNA, 19 nt, Homo sapiens
  misc_RNA (1)...(19): siRNA sense strand
gcaucaaguuuauaagaca

SEQ ID NO: 1723856 - RNA, 19 nt, Homo sapiens
  misc_RNA (1)...(19): siRNA sense strand
gguaagacccugguuguug

SEQ ID NO: 1723857 - RNA, 19 nt, Homo sapiens
  misc_RNA (1)...(19): siRNA sense strand
ggcgauauauuggaggaua

SEQ ID NO: 1723858 - RNA, 19 nt, Homo sapiens
  misc_RNA (1)...(19): siRNA sense strand
uaagacaguucguaccaau

SEQ ID NO: 1723859 - RNA, 19 nt, Homo sapiens
  misc_RNA (1)...(19): siRNA sense strand
gcgauauauuggaggauaa

SEQ ID NO: 1723860 - RNA, 19 nt, Homo sapiens
  misc_RNA (1)...(19): siRNA sense strand
gaaugcuuaugggcaauuu

SEQ ID NO: 1723861 - RNA, 19 nt, Homo sapiens
  misc_RNA (1)...(19): siRNA sense strand
ggaagaaaauauugagguu

SEQ ID NO: 1723862 - RNA, 19 nt, Homo sapiens
  misc_RNA (1)...(19): siRNA sense strand
uaaggaggcagcccaauau

SEQ ID NO: 1723863 - RNA, 19 nt, Homo sapiens
  misc_RNA (1)...(19): siRNA sense strand
cuaaggaggcagcccaaua

SEQ ID NO: 1723864 - RNA, 19 nt, Homo sapiens
  misc_RNA (1)...(19): siRNA sense strand
uagaagcuguacagaauca

SEQ ID NO: 1723865 - RNA, 19 nt, Homo sapiens
  misc_RNA (1)...(19): siRNA sense strand
ccacuguauuuacuccuuu

SEQ ID NO: 1723866 - RNA, 19 nt, Homo sapiens
  misc_RNA (1)...(19): siRNA sense strand
gacaguucguaccaauuaa

SEQ ID NO: 1723867 - RNA, 19 nt, Homo sapiens
  misc_RNA (1)...(19): siRNA sense strand
agaaucacauuggcucuuu

SEQ ID NO: 1723868 - RNA, 19 nt, Homo sapiens
  misc_RNA (1)...(19): siRNA sense strand
gaaagucgaggagacaguu

SEQ ID NO: 1723869 - RNA, 19 nt, Homo sapiens
  misc_RNA (1)...(19): siRNA sense strand
gguuuaccauaguuacuuu

SEQ ID NO: 1723870 - RNA, 19 nt, Homo sapiens
  misc_RNA (1)...(19): siRNA sense strand
ggacaagcccugcaagacu

SEQ ID NO: 1723871 - RNA, 19 nt, Homo sapiens
  misc_RNA (1)...(19): siRNA sense strand
gaaucacauuggcucuuug

SEQ ID NO: 1723872 - RNA, 19 nt, Homo sapiens
  misc_RNA (1)...(19): siRNA sense strand
ggacagcacaauuggaauc

SEQ ID NO: 1723873 - RNA, 19 nt, Homo sapiens
  misc_RNA (1)...(19): siRNA sense strand
acgauuccgucaagagaua

SEQ ID NO: 1723874 - RNA, 19 nt, Homo sapiens
  misc_RNA (1)...(19): siRNA sense strand
gugaacacauggaagaaca

SEQ ID NO: 1723875 - RNA, 19 nt, Homo sapiens
  misc_RNA (1)...(19): siRNA sense strand
caaaauuggugaacacaug

SEQ ID NO: 1723876 - RNA, 19 nt, Homo sapiens
  misc_RNA (1)...(19): siRNA sense strand
gaauguggguugcauaccu

SEQ ID NO: 1723877 - RNA, 19 nt, Homo sapiens
  misc_RNA (1)...(19): siRNA sense strand
gcgcucaaauguggacuga

SEQ ID NO: 1723878 - RNA, 19 nt, Homo sapiens
  misc_RNA (1)...(19): siRNA sense strand
gaaauuauggauggaaagu

SEQ ID NO: 1723879 - RNA, 19 nt, Homo sapiens
  misc_RNA (1)...(19): siRNA sense strand
gagaauauaauacggugau

SEQ ID NO: 1723880 - RNA, 19 nt, Homo sapiens
  misc_RNA (1)...(19): siRNA sense strand
guuagguccauucuucuua

SEQ ID NO: 1723881 - RNA, 19 nt, Homo sapiens
  misc_RNA (1)...(19): siRNA sense strand
gaguagcucugcgggagaa

SEQ ID NO: 1723882 - RNA, 19 nt, Homo sapiens
  misc_RNA (1)...(19): siRNA sense strand
gugcagagguauucacaac

SEQ ID NO: 1723883 - RNA, 19 nt, Homo sapiens
  misc_RNA (1)...(19): siRNA sense strand
ccaaaugcuggagaaguua

SEQ ID NO: 1723884 - RNA, 19 nt, Homo sapiens
  misc_RNA (1)...(19): siRNA sense strand
gaaguuacacaaggcuuug

SEQ ID NO: 1723885 - RNA, 19 nt, Homo sapiens
  misc_RNA (1)...(19): siRNA sense strand
aggauuaaggcaacaaaua

SEQ ID NO: 1723886 - RNA, 19 nt, Homo sapiens
  misc_RNA (1)...(19): siRNA sense strand
uguauuuacuccuuuggaa

SEQ ID NO: 1723887 - RNA, 19 nt, Homo sapiens
  misc_RNA (1)...(19): siRNA sense strand
guuccaaccacuguauuua

SEQ ID NO: 1723888 - RNA, 19 nt, Homo sapiens
  misc_RNA (1)...(19): siRNA sense strand
guucguaccaauuaaaguu

SEQ ID NO: 1723889 - RNA, 19 nt, Homo sapiens
  misc_RNA (1)...(19): siRNA sense strand
cauggcaucaaguuuauaa

SEQ ID NO: 1723890 - RNA, 19 nt, Homo sapiens
  misc_RNA (1)...(19): siRNA sense strand
cauccuaugucgcuuugga

SEQ ID NO: 1723891 - RNA, 19 nt, Homo sapiens
  misc_RNA (1)...(19): siRNA sense strand
ggagacaguuaagcaugau

SEQ ID NO: 1723892 - RNA, 19 nt, Homo sapiens
  misc_RNA (1)...(19): siRNA sense strand
caggcuggcugcugagguu

SEQ ID NO: 1723893 - RNA, 19 nt, Homo sapiens
  misc_RNA (1)...(19): siRNA sense strand
auauugagguuuaccauag

SEQ ID NO: 1723894 - RNA, 19 nt, Homo sapiens
  misc_RNA (1)...(19): siRNA sense strand
caauagugaggaaaucauu

SEQ ID NO: 1723895 - RNA, 19 nt, Homo sapiens
  misc_RNA (1)...(19): siRNA sense strand
gagcauccuaugucgcuuu

SEQ ID NO: 1723896 - RNA, 19 nt, Homo sapiens
  misc_RNA (1)...(19): siRNA sense strand
caacauugucugugaccaa

SEQ ID NO: 1723897 - RNA, 19 nt, Homo sapiens
  misc_RNA (1)...(19): siRNA sense strand
ucgaaauuauggauggaaa

SEQ ID NO: 1723898 - RNA, 19 nt, Homo sapiens
  misc_RNA (1)...(19): siRNA sense strand
cagagguauucacaacauu

SEQ ID NO: 1723899 - RNA, 19 nt, Homo sapiens
  misc_RNA (1)...(19): siRNA sense strand
ucacauuggcucuuugaau

SEQ ID NO: 1723900 - RNA, 19 nt, Homo sapiens
  misc_RNA (1)...(19): siRNA sense strand
ugauagaagcuguacagaa

SEQ ID NO: 1723901 - RNA, 19 nt, Homo sapiens
  misc_RNA (1)...(19): siRNA sense strand
aggagacaguuaagcauga

SEQ ID NO: 1723902 - RNA, 19 nt, Homo sapiens
  misc_RNA (1)...(19): siRNA sense strand
gaagaacauggcaucaagu

SEQ ID NO: 1723903 - RNA, 19 nt, Homo sapiens
  misc_RNA (1)...(19): siRNA sense strand
cauugccacuggugaaaga

SEQ ID NO: 1723904 - RNA, 19 nt, Homo sapiens
  misc_RNA (1)...(19): siRNA sense strand
gaugaagaacagaccaaug

SEQ ID NO: 1723905 - RNA, 19 nt, Homo sapiens
  misc_RNA (1)...(19): siRNA sense strand
ugauugggacagaaugaua

SEQ ID NO: 1723906 - RNA, 19 nt, Homo sapiens
  misc_RNA (1)...(19): siRNA sense strand
ugucacagaugaagaacag

SEQ ID NO: 1723907 - RNA, 19 nt, Homo sapiens
  misc_RNA (1)...(19): siRNA sense strand
gcaauaggaagagaugcuu

SEQ ID NO: 1723908 - RNA, 19 nt, Homo sapiens
  misc_RNA (1)...(19): siRNA sense strand
aacauggcaucaaguuuau

SEQ ID NO: 1723909 - RNA, 19 nt, Homo sapiens
  misc_RNA (1)...(19): siRNA sense strand
ggugaaagaccacguuacu

SEQ ID NO: 1723910 - RNA, 19 nt, Homo sapiens
  misc_RNA (1)...(19): siRNA sense strand
ugcaagacucucgaaauua

SEQ ID NO: 1723911 - RNA, 19 nt, Homo sapiens
  misc_RNA (1)...(19): siRNA sense strand
gugaugaucuuuucuccuu

SEQ ID NO: 1723912 - RNA, 19 nt, Homo sapiens
  misc_RNA (1)...(19): siRNA sense strand
gaaagcuguggagaaguuu

SEQ ID NO: 1723913 - RNA, 19 nt, Homo sapiens
  misc_RNA (1)...(19): siRNA sense strand
ggcaucaaguuuauaagac

SEQ ID NO: 1723914 - RNA, 19 nt, Homo sapiens
  misc_RNA (1)...(19): siRNA sense strand
aauguggguugcauaccua

SEQ ID NO: 1723915 - RNA, 19 nt, Homo sapiens
  misc_RNA (1)...(19): siRNA sense strand
caucccuggugacaaagaa

SEQ ID NO: 1723916 - RNA, 19 nt, Homo sapiens
  misc_RNA (1)...(19): siRNA sense strand
gggugaagauaaaugaaaa

SEQ ID NO: 1723917 - RNA, 19 nt, Homo sapiens
  misc_RNA (1)...(19): siRNA sense strand
gaauuggggcuaccgagua

SEQ ID NO: 1723918 - RNA, 19 nt, Homo sapiens
  misc_RNA (1)...(19): siRNA sense strand
ggaagagaugcuugcacaa

SEQ ID NO: 1723919 - RNA, 19 nt, Homo sapiens
  misc_RNA (1)...(19): siRNA sense strand
gcucaguccaccaauagug

SEQ ID NO: 1723920 - RNA, 19 nt, Homo sapiens
  misc_RNA (1)...(19): siRNA sense strand
gagaaugcuuaugggcaau

SEQ ID NO: 1723921 - RNA, 19 nt, Homo sapiens
  misc_RNA (1)...(19): siRNA sense strand
uggcaucaaguuuauaaga

SEQ ID NO: 1723922 - RNA, 19 nt, Homo sapiens
  misc_RNA (1)...(19): siRNA sense strand
ccaccaauagugaggaaau

SEQ ID NO: 1723923 - RNA, 19 nt, Homo sapiens
  misc_RNA (1)...(19): siRNA sense strand
ggacagaaugauagaagcu

SEQ ID NO: 1723924 - RNA, 19 nt, Homo sapiens
  misc_RNA (1)...(19): siRNA sense strand
agaaguuacacaaggcuuu

SEQ ID NO: 1723925 - RNA, 19 nt, Homo sapiens
  misc_RNA (1)...(19): siRNA sense strand
gaucuucccaaguccuaug

SEQ ID NO: 1723926 - RNA, 19 nt, Homo sapiens
  misc_RNA (1)...(19): siRNA sense strand
cggaggaacaugugugaau

SEQ ID NO: 1723927 - RNA, 19 nt, Homo sapiens
  misc_RNA (1)...(19): siRNA sense strand
gaagcuguacagaaucaca

SEQ ID NO: 1723928 - RNA, 19 nt, Homo sapiens
  misc_RNA (1)...(19): siRNA sense strand
cagaaugauagaagcugua

SEQ ID NO: 1723929 - RNA, 19 nt, Homo sapiens
  misc_RNA (1)...(19): siRNA sense strand
uuagguccauucuucuuag

SEQ ID NO: 1723930 - RNA, 19 nt, Homo sapiens
  misc_RNA (1)...(19): siRNA sense strand
gaugcuggcaauaggaaga

SEQ ID NO: 1723931 - RNA, 19 nt, Homo sapiens
  misc_RNA (1)...(19): siRNA sense strand
aagaacauggcaucaaguu

SEQ ID NO: 1723932 - RNA, 19 nt, Homo sapiens
  misc_RNA (1)...(19): siRNA sense strand
gaacauggcaucaaguuua

SEQ ID NO: 1723933 - RNA, 19 nt, Homo sapiens
  misc_RNA (1)...(19): siRNA sense strand
gauagaagcuguacagaau

SEQ ID NO: 1723934 - RNA, 19 nt, Homo sapiens
  misc_RNA (1)...(19): siRNA sense strand
gcaagacucucgaaauuau

SEQ ID NO: 1723935 - RNA, 19 nt, Homo sapiens
  misc_RNA (1)...(19): siRNA sense strand
gaacggcccugaagaucuu

SEQ ID NO: 1723936 - RNA, 19 nt, Homo sapiens
  misc_RNA (1)...(19): siRNA sense strand
ggaaaucauugaaggagaa

SEQ ID NO: 1723937 - RNA, 19 nt, Homo sapiens
  misc_RNA (1)...(19): siRNA sense strand
ggagaaagcuguggagaag

SEQ ID NO: 1723938 - RNA, 19 nt, Homo sapiens
  misc_RNA (1)...(19): siRNA sense strand
gggcaucccuggugacaaa

SEQ ID NO: 1723939 - RNA, 19 nt, Homo sapiens
  misc_RNA (1)...(19): siRNA sense strand
ggauuaaggcaacaaauaa

SEQ ID NO: 1723940 - RNA, 19 nt, Homo sapiens
  misc_RNA (1)...(19): siRNA sense strand
ggagugcgcuggauuucuu

SEQ ID NO: 1723941 - RNA, 19 nt, Homo sapiens
  misc_RNA (1)...(19): siRNA sense strand
ggaagaacauggcaucaag

SEQ ID NO: 1723942 - RNA, 19 nt, Homo sapiens
  misc_RNA (1)...(19): siRNA sense strand
cacauuggcucuuugaauu

SEQ ID NO: 1723943 - RNA, 19 nt, Homo sapiens
  misc_RNA (1)...(19): siRNA sense strand
gucaagagauaacaacaaa

SEQ ID NO: 1723944 - RNA, 19 nt, Homo sapiens
  misc_RNA (1)...(19): siRNA sense strand
gcagagguauucacaacau

SEQ ID NO: 1723945 - RNA, 19 nt, Homo sapiens
  misc_RNA (1)...(19): siRNA sense strand
cugcaagacucucgaaauu

SEQ ID NO: 1723946 - RNA, 19 nt, Homo sapiens
  misc_RNA (1)...(19): siRNA sense strand
caagagauaacaacaaaug

SEQ ID NO: 1723947 - RNA, 19 nt, Homo sapiens
  misc_RNA (1)...(19): siRNA sense strand
ugaaagaccacguuacuug

SEQ ID NO: 1723948 - RNA, 19 nt, Homo sapiens
  misc_RNA (1)...(19): siRNA sense strand
agaaagcuguggagaaguu

SEQ ID NO: 1723949 - RNA, 19 nt, Homo sapiens
  misc_RNA (1)...(19): siRNA sense strand
ggaggaacaugugugaaug

SEQ ID NO: 1723950 - RNA, 19 nt, Homo sapiens
  misc_RNA (1)...(19): siRNA sense strand
uaaagacaaugaacguguu

SEQ ID NO: 1723951 - RNA, 19 nt, Homo sapiens
  misc_RNA (1)...(19): siRNA sense strand
guagcucaguccaccaaua

SEQ ID NO: 1723952 - RNA, 19 nt, Homo sapiens
  misc_RNA (1)...(19): siRNA sense strand
agacaguucguaccaauua

SEQ ID NO: 1723953 - RNA, 19 nt, Homo sapiens
  misc_RNA (1)...(19): siRNA sense strand
ggacauggccaacaaaauu

SEQ ID NO: 1723954 - RNA, 19 nt, Homo sapiens
  misc_RNA (1)...(19): siRNA sense strand
gacaaagaauacugcauca

SEQ ID NO: 1723955 - RNA, 19 nt, Homo sapiens
  misc_RNA (1)...(19): siRNA sense strand
gcaucaaguuuauaagaca

SEQ ID NO: 1723956 - RNA, 19 nt, Homo sapiens
  misc_RNA (1)...(19): siRNA sense strand
gguaagacccugguuguug

SEQ ID NO: 1723957 - RNA, 19 nt, Homo sapiens
  misc_RNA (1)...(19): siRNA sense strand
ggcgauauauuggaggaua

SEQ ID NO: 1723958 - RNA, 19 nt, Homo sapiens
  misc_RNA (1)...(19): siRNA sense strand
uaagacaguucguaccaau

SEQ ID NO: 1723959 - RNA, 19 nt, Homo sapiens
  misc_RNA (1)...(19): siRNA sense strand
gcgauauauuggaggauaa

SEQ ID NO: 1723960 - RNA, 19 nt, Homo sapiens
  misc_RNA (1)...(19): siRNA sense strand
gaaugcuuaugggcaauuu

SEQ ID NO: 1723961 - RNA, 19 nt, Homo sapiens
  misc_RNA (1)...(19): siRNA sense strand
ggaagaaaauauugagguu

SEQ ID NO: 1723962 - RNA, 19 nt, Homo sapiens
  misc_RNA (1)...(19): siRNA sense strand
uaaggaggcagcccaauau

SEQ ID NO: 1723963 - RNA, 19 nt, Homo sapiens
  misc_RNA (1)...(19): siRNA sense strand
cuaaggaggcagcccaaua

SEQ ID NO: 1723964 - RNA, 19 nt, Homo sapiens
  misc_RNA (1)...(19): siRNA sense strand
uagaagcuguacagaauca

SEQ ID NO: 1723965 - RNA, 19 nt, Homo sapiens
  misc_RNA (1)...(19): siRNA sense strand
ccacuguauuuacuccuuu

SEQ ID NO: 1723966 - RNA, 19 nt, Homo sapiens
  misc_RNA (1)...(19): siRNA sense strand
gacaguucguaccaauuaa

SEQ ID NO: 1723967 - RNA, 19 nt, Homo sapiens
  misc_RNA (1)...(19): siRNA sense strand
agaaucacauuggcucuuu

SEQ ID NO: 1723968 - RNA, 19 nt, Homo sapiens
  misc_RNA (1)...(19): siRNA sense strand
gaaagucgaggagacaguu

SEQ ID NO: 1723969 - RNA, 19 nt, Homo sapiens
  misc_RNA (1)...(19): siRNA sense strand
gguuuaccauaguuacuuu

SEQ ID NO: 1723970 - RNA, 19 nt, Homo sapiens
  misc_RNA (1)...(19): siRNA sense strand
ggacaagcccugcaagacu

SEQ ID NO: 1723971 - RNA, 19 nt, Homo sapiens
  misc_RNA (1)...(19): siRNA sense strand
gaaucacauuggcucuuug

SEQ ID NO: 1723972 - RNA, 19 nt, Homo sapiens
  misc_RNA (1)...(19): siRNA sense strand
ggacagcacaauuggaauc

SEQ ID NO: 1723973 - RNA, 19 nt, Homo sapiens
  misc_RNA (1)...(19): siRNA sense strand
acgauuccgucaagagaua

SEQ ID NO: 1723974 - RNA, 19 nt, Homo sapiens
  misc_RNA (1)...(19): siRNA sense strand
gugaacacauggaagaaca

SEQ ID NO: 1723975 - RNA, 19 nt, Homo sapiens
  misc_RNA (1)...(19): siRNA sense strand
caaaauuggugaacacaug

SEQ ID NO: 1723976 - RNA, 19 nt, Homo sapiens
  misc_RNA (1)...(19): siRNA sense strand
gaauguggguugcauaccu

SEQ ID NO: 1723977 - RNA, 19 nt, Homo sapiens
  misc_RNA (1)...(19): siRNA sense strand
gcgcucaaauguggacuga

SEQ ID NO: 1723978 - RNA, 19 nt, Homo sapiens
  misc_RNA (1)...(19): siRNA sense strand
gaaauuauggauggaaagu

SEQ ID NO: 1723979 - RNA, 19 nt, Homo sapiens
  misc_RNA (1)...(19): siRNA sense strand
gagaauauaauacggugau

SEQ ID NO: 1723980 - RNA, 19 nt, Homo sapiens
  misc_RNA (1)...(19): siRNA sense strand
guuagguccauucuucuua

SEQ ID NO: 1723981 - RNA, 19 nt, Homo sapiens
  misc_RNA (1)...(19): siRNA sense strand
gaguagcucugcgggagaa

SEQ ID NO: 1723982 - RNA, 19 nt, Homo sapiens
  misc_RNA (1)...(19): siRNA sense strand
gugcagagguauucacaac

SEQ ID NO: 1723983 - RNA, 19 nt, Homo sapiens
  misc_RNA (1)...(19): siRNA sense strand
ccaaaugcuggagaaguua

SEQ ID NO: 1723984 - RNA, 19 nt, Homo sapiens
  misc_RNA (1)...(19): siRNA sense strand
gaaguuacacaaggcuuug

SEQ ID NO: 1723985 - RNA, 19 nt, Homo sapiens
  misc_RNA (1)...(19): siRNA sense strand
aggauuaaggcaacaaaua

SEQ ID NO: 1723986 - RNA, 19 nt, Homo sapiens
  misc_RNA (1)...(19): siRNA sense strand
uguauuuacuccuuuggaa

SEQ ID NO: 1723987 - RNA, 19 nt, Homo sapiens
  misc_RNA (1)...(19): siRNA sense strand
guuccaaccacuguauuua

SEQ ID NO: 1723988 - RNA, 19 nt, Homo sapiens
  misc_RNA (1)...(19): siRNA sense strand
guucguaccaauuaaaguu

SEQ ID NO: 1723989 - RNA, 19 nt, Homo sapiens
  misc_RNA (1)...(19): siRNA sense strand
cauggcaucaaguuuauaa

SEQ ID NO: 1723990 - RNA, 19 nt, Homo sapiens
  misc_RNA (1)...(19): siRNA sense strand
cauccuaugucgcuuugga

SEQ ID NO: 1723991 - RNA, 19 nt, Homo sapiens
  misc_RNA (1)...(19): siRNA sense strand
ggagacaguuaagcaugau

SEQ ID NO: 1723992 - RNA, 19 nt, Homo sapiens
  misc_RNA (1)...(19): siRNA sense strand
caggcuggcugcugagguu

SEQ ID NO: 1723993 - RNA, 19 nt, Homo sapiens
  misc_RNA (1)...(19): siRNA sense strand
auauugagguuuaccauag

SEQ ID NO: 1723994 - RNA, 19 nt, Homo sapiens
  misc_RNA (1)...(19): siRNA sense strand
caauagugaggaaaucauu

SEQ ID NO: 1723995 - RNA, 19 nt, Homo sapiens
  misc_RNA (1)...(19): siRNA sense strand
gagcauccuaugucgcuuu

SEQ ID NO: 1723996 - RNA, 19 nt, Homo sapiens
  misc_RNA (1)...(19): siRNA sense strand
caacauugucugugaccaa

SEQ ID NO: 1723997 - RNA, 19 nt, Homo sapiens
  misc_RNA (1)...(19): siRNA sense strand
ucgaaauuauggauggaaa

SEQ ID NO: 1723998 - RNA, 19 nt, Homo sapiens
  misc_RNA (1)...(19): siRNA sense strand
cagagguauucacaacauu

SEQ ID NO: 1723999 - RNA, 19 nt, Homo sapiens
  misc_RNA (1)...(19): siRNA sense strand
ucacauuggcucuuugaau

SEQ ID NO: 1724000 - RNA, 19 nt, Homo sapiens
  misc_RNA (1)...(19): siRNA sense strand
ugauagaagcuguacagaa

SEQ ID NO: 1724001 - RNA, 19 nt, Homo sapiens
  misc_RNA (1)...(19): siRNA sense strand
aggagacaguuaagcauga

SEQ ID NO: 1724002 - RNA, 19 nt, Homo sapiens
  misc_RNA (1)...(19): siRNA sense strand
gaagaacauggcaucaagu

SEQ ID NO: 1724003 - RNA, 19 nt, Homo sapiens
  misc_RNA (1)...(19): siRNA sense strand
cauugccacuggugaaaga

SEQ ID NO: 1724004 - RNA, 19 nt, Homo sapiens
  misc_RNA (1)...(19): siRNA sense strand
gaugaagaacagaccaaug

SEQ ID NO: 1724005 - RNA, 19 nt, Homo sapiens
  misc_RNA (1)...(19): siRNA sense strand
ugauugggacagaaugaua

SEQ ID NO: 1724006 - RNA, 19 nt, Homo sapiens
  misc_RNA (1)...(19): siRNA sense strand
ugucacagaugaagaacag

SEQ ID NO: 1724007 - RNA, 19 nt, Homo sapiens
  misc_RNA (1)...(19): siRNA sense strand
gcaauaggaagagaugcuu

SEQ ID NO: 1724008 - RNA, 19 nt, Homo sapiens
  misc_RNA (1)...(19): siRNA sense strand
aacauggcaucaaguuuau

SEQ ID NO: 1724009 - RNA, 19 nt, Homo sapiens
  misc_RNA (1)...(19): siRNA sense strand
ggugaaagaccacguuacu

SEQ ID NO: 1724010 - RNA, 19 nt, Homo sapiens
  misc_RNA (1)...(19): siRNA sense strand
ugcaagacucucgaaauua

SEQ ID NO: 1724011 - RNA, 19 nt, Homo sapiens
  misc_RNA (1)...(19): siRNA sense strand
gugaugaucuuuucuccuu

SEQ ID NO: 1724012 - RNA, 19 nt, Homo sapiens
  misc_RNA (1)...(19): siRNA sense strand
gaaagcuguggagaaguuu

SEQ ID NO: 1724013 - RNA, 19 nt, Homo sapiens
  misc_RNA (1)...(19): siRNA sense strand
ggcaucaaguuuauaagac

SEQ ID NO: 1724014 - RNA, 19 nt, Homo sapiens
  misc_RNA (1)...(19): siRNA sense strand
aauguggguugcauaccua

SEQ ID NO: 1724015 - RNA, 19 nt, Homo sapiens
  misc_RNA (1)...(19): siRNA sense strand
caucccuggugacaaagaa

SEQ ID NO: 1724016 - RNA, 19 nt, Homo sapiens
  misc_RNA (1)...(19): siRNA sense strand
gggugaagauaaaugaaaa

SEQ ID NO: 1724017 - RNA, 19 nt, Homo sapiens
  misc_RNA (1)...(19): siRNA sense strand
gaauuggggcuaccgagua

SEQ ID NO: 1724018 - RNA, 19 nt, Homo sapiens
  misc_RNA (1)...(19): siRNA sense strand
ggaagagaugcuugcacaa

SEQ ID NO: 1724019 - RNA, 19 nt, Homo sapiens
  misc_RNA (1)...(19): siRNA sense strand
gcucaguccaccaauagug

SEQ ID NO: 1724020 - RNA, 19 nt, Homo sapiens
  misc_RNA (1)...(19): siRNA sense strand
gagaaugcuuaugggcaau

SEQ ID NO: 1724021 - RNA, 19 nt, Homo sapiens
  misc_RNA (1)...(19): siRNA sense strand
uggcaucaaguuuauaaga

SEQ ID NO: 1724022 - RNA, 19 nt, Homo sapiens
  misc_RNA (1)...(19): siRNA sense strand
ccaccaauagugaggaaau

SEQ ID NO: 1724023 - RNA, 19 nt, Homo sapiens
  misc_RNA (1)...(19): siRNA sense strand
ggacagaaugauagaagcu

SEQ ID NO: 1724024 - RNA, 19 nt, Homo sapiens
  misc_RNA (1)...(19): siRNA sense strand
agaaguuacacaaggcuuu

SEQ ID NO: 1724025 - RNA, 19 nt, Homo sapiens
  misc_RNA (1)...(19): siRNA sense strand
gaucuucccaaguccuaug

SEQ ID NO: 1724026 - RNA, 19 nt, Homo sapiens
  misc_RNA (1)...(19): siRNA sense strand
cggaggaacaugugugaau

SEQ ID NO: 1724027 - RNA, 19 nt, Homo sapiens
  misc_RNA (1)...(19): siRNA sense strand
gaagcuguacagaaucaca

SEQ ID NO: 1724028 - RNA, 19 nt, Homo sapiens
  misc_RNA (1)...(19): siRNA sense strand
cagaaugauagaagcugua

SEQ ID NO: 1724029 - RNA, 19 nt, Homo sapiens
  misc_RNA (1)...(19): siRNA sense strand
uuagguccauucuucuuag

SEQ ID NO: 1724030 - RNA, 19 nt, Homo sapiens
  misc_RNA (1)...(19): siRNA sense strand
gaugcuggcaauaggaaga

SEQ ID NO: 1724031 - RNA, 19 nt, Homo sapiens
  misc_RNA (1)...(19): siRNA sense strand
aagaacauggcaucaaguu

SEQ ID NO: 1724032 - RNA, 19 nt, Homo sapiens
  misc_RNA (1)...(19): siRNA sense strand
gagaagauccugcacugua

SEQ ID NO: 1724033 - RNA, 19 nt, Homo sapiens
  misc_RNA (1)...(19): siRNA sense strand
gaacagggcgugccuagga

SEQ ID NO: 1724034 - RNA, 19 nt, Homo sapiens
  misc_RNA (1)...(19): siRNA sense strand
ggacagugcuucagcuaca

SEQ ID NO: 1724035 - RNA, 19 nt, Homo sapiens
  misc_RNA (1)...(19): siRNA sense strand
ccaagaacaucacccagau

SEQ ID NO: 1724036 - RNA, 19 nt, Homo sapiens
  misc_RNA (1)...(19): siRNA sense strand
uggacaagcugguggagaa

SEQ ID NO: 1724037 - RNA, 19 nt, Homo sapiens
  misc_RNA (1)...(19): siRNA sense strand
gcacuguucccagauaaga

SEQ ID NO: 1724038 - RNA, 19 nt, Homo sapiens
  misc_RNA (1)...(19): siRNA sense strand
ccacagagucccugguuca

SEQ ID NO: 1724039 - RNA, 19 nt, Homo sapiens
  misc_RNA (1)...(19): siRNA sense strand
agaagauccugcacuguag

SEQ ID NO: 1724040 - RNA, 19 nt, Homo sapiens
  misc_RNA (1)...(19): siRNA sense strand
ccaaguccauccagaacag

SEQ ID NO: 1724041 - RNA, 19 nt, Homo sapiens
  misc_RNA (1)...(19): siRNA sense strand
uggcacuguucccagauaa

SEQ ID NO: 1724042 - RNA, 19 nt, Homo sapiens
  misc_RNA (1)...(19): siRNA sense strand
cccaacaccuucccacagu

SEQ ID NO: 1724043 - RNA, 19 nt, Homo sapiens
  misc_RNA (1)...(19): siRNA sense strand
uguccucccugccaugcua

SEQ ID NO: 1724044 - RNA, 19 nt, Homo sapiens
  misc_RNA (1)...(19): siRNA sense strand
acaagcugguggagaagau

SEQ ID NO: 1724045 - RNA, 19 nt, Homo sapiens
  misc_RNA (1)...(19): siRNA sense strand
ggagaagauccugcacugu

SEQ ID NO: 1724046 - RNA, 19 nt, Homo sapiens
  misc_RNA (1)...(19): siRNA sense strand
gcugugaggccaaguccau

SEQ ID NO: 1724047 - RNA, 19 nt, Homo sapiens
  misc_RNA (1)...(19): siRNA sense strand
gagaagauccugcacugua

SEQ ID NO: 1724048 - RNA, 19 nt, Homo sapiens
  misc_RNA (1)...(19): siRNA sense strand
gaacagggcgugccuagga

SEQ ID NO: 1724049 - RNA, 19 nt, Homo sapiens
  misc_RNA (1)...(19): siRNA sense strand
ggacagugcuucagcuaca

SEQ ID NO: 1724050 - RNA, 19 nt, Homo sapiens
  misc_RNA (1)...(19): siRNA sense strand
ccaagaacaucacccagau

SEQ ID NO: 1724051 - RNA, 19 nt, Homo sapiens
  misc_RNA (1)...(19): siRNA sense strand
uggacaagcugguggagaa

SEQ ID NO: 1724052 - RNA, 19 nt, Homo sapiens
  misc_RNA (1)...(19): siRNA sense strand
gcacuguucccagauaaga

SEQ ID NO: 1724053 - RNA, 19 nt, Homo sapiens
  misc_RNA (1)...(19): siRNA sense strand
ccacagagucccugguuca

SEQ ID NO: 1724054 - RNA, 19 nt, Homo sapiens
  misc_RNA (1)...(19): siRNA sense strand
agaagauccugcacuguag

SEQ ID NO: 1724055 - RNA, 19 nt, Homo sapiens
  misc_RNA (1)...(19): siRNA sense strand
ccaaguccauccagaacag

SEQ ID NO: 1724056 - RNA, 19 nt, Homo sapiens
  misc_RNA (1)...(19): siRNA sense strand
uggcacuguucccagauaa

SEQ ID NO: 1724057 - RNA, 19 nt, Homo sapiens
  misc_RNA (1)...(19): siRNA sense strand
cccaacaccuucccacagu

SEQ ID NO: 1724058 - RNA, 19 nt, Homo sapiens
  misc_RNA (1)...(19): siRNA sense strand
uguccucccugccaugcua

SEQ ID NO: 1724059 - RNA, 19 nt, Homo sapiens
  misc_RNA (1)...(19): siRNA sense strand
acaagcugguggagaagau

SEQ ID NO: 1724060 - RNA, 19 nt, Homo sapiens
  misc_RNA (1)...(19): siRNA sense strand
ggagaagauccugcacugu

SEQ ID NO: 1724061 - RNA, 19 nt, Homo sapiens
  misc_RNA (1)...(19): siRNA sense strand
gcugugaggccaaguccau

SEQ ID NO: 1724062 - RNA, 19 nt, Homo sapiens
  misc_RNA (1)...(19): siRNA sense strand
ggauacagcuggacaagaa

SEQ ID NO: 1724063 - RNA, 19 nt, Homo sapiens
  misc_RNA (1)...(19): siRNA sense strand
guagguaaaucgaguauug

SEQ ID NO: 1724064 - RNA, 19 nt, Homo sapiens
  misc_RNA (1)...(19): siRNA sense strand
cagcauggcccaccuaaua

SEQ ID NO: 1724065 - RNA, 19 nt, Homo sapiens
  misc_RNA (1)...(19): siRNA sense strand
ggacuacgccgacucuauu

SEQ ID NO: 1724066 - RNA, 19 nt, Homo sapiens
  misc_RNA (1)...(19): siRNA sense strand
aaacaucaacccaacaaua

SEQ ID NO: 1724067 - RNA, 19 nt, Homo sapiens
  misc_RNA (1)...(19): siRNA sense strand
gaagaauuccauccacuga

SEQ ID NO: 1724068 - RNA, 19 nt, Homo sapiens
  misc_RNA (1)...(19): siRNA sense strand
gagaagucauggagagaga

SEQ ID NO: 1724069 - RNA, 19 nt, Homo sapiens
  misc_RNA (1)...(19): siRNA sense strand
gaagagacauuuucaacau

SEQ ID NO: 1724070 - RNA, 19 nt, Homo sapiens
  misc_RNA (1)...(19): siRNA sense strand
gaaagagcuucgacagcau

SEQ ID NO: 1724071 - RNA, 19 nt, Homo sapiens
  misc_RNA (1)...(19): siRNA sense strand
aaugugaucuuaucgaugu

SEQ ID NO: 1724072 - RNA, 19 nt, Homo sapiens
  misc_RNA (1)...(19): siRNA sense strand
cugcagcuauaaucguuua

SEQ ID NO: 1724073 - RNA, 19 nt, Homo sapiens
  misc_RNA (1)...(19): siRNA sense strand
uaaagaauugggugaaaga

SEQ ID NO: 1724074 - RNA, 19 nt, Homo sapiens
  misc_RNA (1)...(19): siRNA sense strand
ugagcuacauaaauuccua

SEQ ID NO: 1724075 - RNA, 19 nt, Homo sapiens
  misc_RNA (1)...(19): siRNA sense strand
gcauggcccaccuaauauu

SEQ ID NO: 1724076 - RNA, 19 nt, Homo sapiens
  misc_RNA (1)...(19): siRNA sense strand
ccaaacaucaacccaacaa

SEQ ID NO: 1724077 - RNA, 19 nt, Homo sapiens
  misc_RNA (1)...(19): siRNA sense strand
gcgauaaacauaaaugaac

SEQ ID NO: 1724078 - RNA, 19 nt, Homo sapiens
  misc_RNA (1)...(19): siRNA sense strand
cgacucuauucaugcaauu

SEQ ID NO: 1724079 - RNA, 19 nt, Homo sapiens
  misc_RNA (1)...(19): siRNA sense strand
gaagacaguuuugauccaa

SEQ ID NO: 1724080 - RNA, 19 nt, Homo sapiens
  misc_RNA (1)...(19): siRNA sense strand
uggcccaccuaauauugua

SEQ ID NO: 1724081 - RNA, 19 nt, Homo sapiens
  misc_RNA (1)...(19): siRNA sense strand
ggcugcagcuauaaucguu

SEQ ID NO: 1724082 - RNA, 19 nt, Homo sapiens
  misc_RNA (1)...(19): siRNA sense strand
gaagucauggagagagaug

SEQ ID NO: 1724083 - RNA, 19 nt, Homo sapiens
  misc_RNA (1)...(19): siRNA sense strand
uuaaagaauugggugaaag

SEQ ID NO: 1724084 - RNA, 19 nt, Homo sapiens
  misc_RNA (1)...(19): siRNA sense strand
gagcuacauaaauuccuaa

SEQ ID NO: 1724085 - RNA, 19 nt, Homo sapiens
  misc_RNA (1)...(19): siRNA sense strand
agagagaugcaaaggacua

SEQ ID NO: 1724086 - RNA, 19 nt, Homo sapiens
  misc_RNA (1)...(19): siRNA sense strand
agggucggcugcagcuaua

SEQ ID NO: 1724087 - RNA, 19 nt, Homo sapiens
  misc_RNA (1)...(19): siRNA sense strand
gagggucggcugcagcuau

SEQ ID NO: 1724088 - RNA, 19 nt, Homo sapiens
  misc_RNA (1)...(19): siRNA sense strand
uagcaccaauguacuaucg

SEQ ID NO: 1724089 - RNA, 19 nt, Homo sapiens
  misc_RNA (1)...(19): siRNA sense strand
gacagcauggcccaccuaa

SEQ ID NO: 1724090 - RNA, 19 nt, Homo sapiens
  misc_RNA (1)...(19): siRNA sense strand
uaguugccauugcaggaaa

SEQ ID NO: 1724091 - RNA, 19 nt, Homo sapiens
  misc_RNA (1)...(19): siRNA sense strand
aguauuguguggcgguuug

SEQ ID NO: 1724092 - RNA, 19 nt, Homo sapiens
  misc_RNA (1)...(19): siRNA sense strand
gcaggaaauaaaugugauc

SEQ ID NO: 1724093 - RNA, 19 nt, Homo sapiens
  misc_RNA (1)...(19): siRNA sense strand
aacaucaacccaacaauag

SEQ ID NO: 1724094 - RNA, 19 nt, Homo sapiens
  misc_RNA (1)...(19): siRNA sense strand
gccauugcaggaaauaaau

SEQ ID NO: 1724095 - RNA, 19 nt, Homo sapiens
  misc_RNA (1)...(19): siRNA sense strand
gguaaaucgaguauugugu

SEQ ID NO: 1724096 - RNA, 19 nt, Homo sapiens
  misc_RNA (1)...(19): siRNA sense strand
acaauaggggcaucuuuua

SEQ ID NO: 1724097 - RNA, 19 nt, Homo sapiens
  misc_RNA (1)...(19): siRNA sense strand
ccuuagcaccaauguacua

SEQ ID NO: 1724098 - RNA, 19 nt, Homo sapiens
  misc_RNA (1)...(19): siRNA sense strand
cgauguaagagaagucaug

SEQ ID NO: 1724099 - RNA, 19 nt, Homo sapiens
  misc_RNA (1)...(19): siRNA sense strand
cgacagcauggcccaccua

SEQ ID NO: 1724100 - RNA, 19 nt, Homo sapiens
  misc_RNA (1)...(19): siRNA sense strand
cauggcccaccuaauauug

SEQ ID NO: 1724101 - RNA, 19 nt, Homo sapiens
  misc_RNA (1)...(19): siRNA sense strand
ggaagacaguuuugaucca

SEQ ID NO: 1724102 - RNA, 19 nt, Homo sapiens
  misc_RNA (1)...(19): siRNA sense strand
guaguugccauugcaggaa

SEQ ID NO: 1724103 - RNA, 19 nt, Homo sapiens
  misc_RNA (1)...(19): siRNA sense strand
uauuguaguugccauugca

SEQ ID NO: 1724104 - RNA, 19 nt, Homo sapiens
  misc_RNA (1)...(19): siRNA sense strand
gguguagguaaaucgagua

SEQ ID NO: 1724105 - RNA, 19 nt, Homo sapiens
  misc_RNA (1)...(19): siRNA sense strand
gcgguaagggcuucaaacu

SEQ ID NO: 1724106 - RNA, 19 nt, Homo sapiens
  misc_RNA (1)...(19): siRNA sense strand
ccgacucuauucaugcaau

SEQ ID NO: 1724107 - RNA, 19 nt, Homo sapiens
  misc_RNA (1)...(19): siRNA sense strand
ugccauugcaggaaauaaa

SEQ ID NO: 1724108 - RNA, 19 nt, Homo sapiens
  misc_RNA (1)...(19): siRNA sense strand
gaauugggugaaagagcuu

SEQ ID NO: 1724109 - RNA, 19 nt, Homo sapiens
  misc_RNA (1)...(19): siRNA sense strand
gcagguauuugacauauua

SEQ ID NO: 1724110 - RNA, 19 nt, Homo sapiens
  misc_RNA (1)...(19): siRNA sense strand
gcaccuagcugccaaagaa

SEQ ID NO: 1724111 - RNA, 19 nt, Homo sapiens
  misc_RNA (1)...(19): siRNA sense strand
gcaauagccugccauguuu

SEQ ID NO: 1724112 - RNA, 19 nt, Homo sapiens
  misc_RNA (1)...(19): siRNA sense strand
gaugggaucugcacuguaa

SEQ ID NO: 1724113 - RNA, 19 nt, Homo sapiens
  misc_RNA (1)...(19): siRNA sense strand
gaggaaaucugacuuggaa

SEQ ID NO: 1724114 - RNA, 19 nt, Homo sapiens
  misc_RNA (1)...(19): siRNA sense strand
gcccauaccuucaaauauu

SEQ ID NO: 1724115 - RNA, 19 nt, Homo sapiens
  misc_RNA (1)...(19): siRNA sense strand
gggaaggccugaacaaaug

SEQ ID NO: 1724116 - RNA, 19 nt, Homo sapiens
  misc_RNA (1)...(19): siRNA sense strand
gaaccacgccucuagauau

SEQ ID NO: 1724117 - RNA, 19 nt, Homo sapiens
  misc_RNA (1)...(19): siRNA sense strand
cagcaaagguuauuguuca

SEQ ID NO: 1724118 - RNA, 19 nt, Homo sapiens
  misc_RNA (1)...(19): siRNA sense strand
caaagaaggacaugauaaa

SEQ ID NO: 1724119 - RNA, 19 nt, Homo sapiens
  misc_RNA (1)...(19): siRNA sense strand
ccacagauguucauagaca

SEQ ID NO: 1724120 - RNA, 19 nt, Homo sapiens
  misc_RNA (1)...(19): siRNA sense strand
agaaggacaugauaaaguu

SEQ ID NO: 1724121 - RNA, 19 nt, Homo sapiens
  misc_RNA (1)...(19): siRNA sense strand
gaaauuaggucuggggaua

SEQ ID NO: 1724122 - RNA, 19 nt, Homo sapiens
  misc_RNA (1)...(19): siRNA sense strand
ggcagaagaugauccauau

SEQ ID NO: 1724123 - RNA, 19 nt, Homo sapiens
  misc_RNA (1)...(19): siRNA sense strand
gaagucacaucugguuuga

SEQ ID NO: 1724124 - RNA, 19 nt, Homo sapiens
  misc_RNA (1)...(19): siRNA sense strand
ggaggaaauuuaucuucuu

SEQ ID NO: 1724125 - RNA, 19 nt, Homo sapiens
  misc_RNA (1)...(19): siRNA sense strand
cagaagaugauccauauuu

SEQ ID NO: 1724126 - RNA, 19 nt, Homo sapiens
  misc_RNA (1)...(19): siRNA sense strand
gcaaucauccaccuucauu

SEQ ID NO: 1724127 - RNA, 19 nt, Homo sapiens
  misc_RNA (1)...(19): siRNA sense strand
caaagguuauuguucaguu

SEQ ID NO: 1724128 - RNA, 19 nt, Homo sapiens
  misc_RNA (1)...(19): siRNA sense strand
ggagacauccuuccgcaaa

SEQ ID NO: 1724129 - RNA, 19 nt, Homo sapiens
  misc_RNA (1)...(19): siRNA sense strand
ggaaggauuuggagauuuu

SEQ ID NO: 1724130 - RNA, 19 nt, Homo sapiens
  misc_RNA (1)...(19): siRNA sense strand
cuacuauccugaaaucaaa

SEQ ID NO: 1724131 - RNA, 19 nt, Homo sapiens
  misc_RNA (1)...(19): siRNA sense strand
cccauaccuucaaauauua

SEQ ID NO: 1724132 - RNA, 19 nt, Homo sapiens
  misc_RNA (1)...(19): siRNA sense strand
gcaggaaggaccucuagaa

SEQ ID NO: 1724133 - RNA, 19 nt, Homo sapiens
  misc_RNA (1)...(19): siRNA sense strand
ggacaguacuaccuacgau

SEQ ID NO: 1724134 - RNA, 19 nt, Homo sapiens
  misc_RNA (1)...(19): siRNA sense strand
ugacaaaguucagaaagau

SEQ ID NO: 1724135 - RNA, 19 nt, Homo sapiens
  misc_RNA (1)...(19): siRNA sense strand
aaacagagaggauuucguu

SEQ ID NO: 1724136 - RNA, 19 nt, Homo sapiens
  misc_RNA (1)...(19): siRNA sense strand
ccaaagaaggacaugauaa

SEQ ID NO: 1724137 - RNA, 19 nt, Homo sapiens
  misc_RNA (1)...(19): siRNA sense strand
gugcuggaguucaggauaa

SEQ ID NO: 1724138 - RNA, 19 nt, Homo sapiens
  misc_RNA (1)...(19): siRNA sense strand
ccacaaggcagcaaauaga

SEQ ID NO: 1724139 - RNA, 19 nt, Homo sapiens
  misc_RNA (1)...(19): siRNA sense strand
aaacacuuauggacaacua

SEQ ID NO: 1724140 - RNA, 19 nt, Homo sapiens
  misc_RNA (1)...(19): siRNA sense strand
ggaaccacgccucuagaua

SEQ ID NO: 1724141 - RNA, 19 nt, Homo sapiens
  misc_RNA (1)...(19): siRNA sense strand
agucacaucugguuugauu

SEQ ID NO: 1724142 - RNA, 19 nt, Homo sapiens
  misc_RNA (1)...(19): siRNA sense strand
ggauuucguuuccguuaug

SEQ ID NO: 1724143 - RNA, 19 nt, Homo sapiens
  misc_RNA (1)...(19): siRNA sense strand
gaacuuugagccucucuau

SEQ ID NO: 1724144 - RNA, 19 nt, Homo sapiens
  misc_RNA (1)...(19): siRNA sense strand
cauggacacugaaucuaaa

SEQ ID NO: 1724145 - RNA, 19 nt, Homo sapiens
  misc_RNA (1)...(19): siRNA sense strand
aagaagaagugcagaggaa

SEQ ID NO: 1724146 - RNA, 19 nt, Homo sapiens
  misc_RNA (1)...(19): siRNA sense strand
gugacaaaguucagaaaga

SEQ ID NO: 1724147 - RNA, 19 nt, Homo sapiens
  misc_RNA (1)...(19): siRNA sense strand
uaucagacgccaucuauga

SEQ ID NO: 1724148 - RNA, 19 nt, Homo sapiens
  misc_RNA (1)...(19): siRNA sense strand
acccugaccuugccuauuu

SEQ ID NO: 1724149 - RNA, 19 nt, Homo sapiens
  misc_RNA (1)...(19): siRNA sense strand
agaagaugauccauauuug

SEQ ID NO: 1724150 - RNA, 19 nt, Homo sapiens
  misc_RNA (1)...(19): siRNA sense strand
gaggauuucguuuccguua

SEQ ID NO: 1724151 - RNA, 19 nt, Homo sapiens
  misc_RNA (1)...(19): siRNA sense strand
gggaaggauuuggagauuu

SEQ ID NO: 1724152 - RNA, 19 nt, Homo sapiens
  misc_RNA (1)...(19): siRNA sense strand
ggacaggacagcuggaugu

SEQ ID NO: 1724153 - RNA, 19 nt, Homo sapiens
  misc_RNA (1)...(19): siRNA sense strand
ggacaacuaugaggucucu

SEQ ID NO: 1724154 - RNA, 19 nt, Homo sapiens
  misc_RNA (1)...(19): siRNA sense strand
gauccuucuuugacucaua

SEQ ID NO: 1724155 - RNA, 19 nt, Homo sapiens
  misc_RNA (1)...(19): siRNA sense strand
ugacaaaagugaugacaaa

SEQ ID NO: 1724156 - RNA, 19 nt, Homo sapiens
  misc_RNA (1)...(19): siRNA sense strand
ugaggucacucuaacguau

SEQ ID NO: 1724157 - RNA, 19 nt, Homo sapiens
  misc_RNA (1)...(19): siRNA sense strand
caugagaaaugaucuguac

SEQ ID NO: 1724158 - RNA, 19 nt, Homo sapiens
  misc_RNA (1)...(19): siRNA sense strand
gcaaagaggcaugccaaug

SEQ ID NO: 1724159 - RNA, 19 nt, Homo sapiens
  misc_RNA (1)...(19): siRNA sense strand
ggguauagcuucccacacu

SEQ ID NO: 1724160 - RNA, 19 nt, Homo sapiens
  misc_RNA (1)...(19): siRNA sense strand
ucacuaagcaggaagaugu

SEQ ID NO: 1724161 - RNA, 19 nt, Homo sapiens
  misc_RNA (1)...(19): siRNA sense strand
caucugguuugauuucuga

SEQ ID NO: 1724162 - RNA, 19 nt, Homo sapiens
  misc_RNA (1)...(19): siRNA sense strand
gggaggaaauuuaucuucu

SEQ ID NO: 1724163 - RNA, 19 nt, Homo sapiens
  misc_RNA (1)...(19): siRNA sense strand
acuauggauuuccuacuua

SEQ ID NO: 1724164 - RNA, 19 nt, Homo sapiens
  misc_RNA (1)...(19): siRNA sense strand
gcacgacaacaucucauug

SEQ ID NO: 1724165 - RNA, 19 nt, Homo sapiens
  misc_RNA (1)...(19): siRNA sense strand
caugauaaaguucucagua

SEQ ID NO: 1724166 - RNA, 19 nt, Homo sapiens
  misc_RNA (1)...(19): siRNA sense strand
gguauagcuucccacacua

SEQ ID NO: 1724167 - RNA, 19 nt, Homo sapiens
  misc_RNA (1)...(19): siRNA sense strand
gggcuacaccgaagcaauu

SEQ ID NO: 1724168 - RNA, 19 nt, Homo sapiens
  misc_RNA (1)...(19): siRNA sense strand
caggauaaccucuuucuag

SEQ ID NO: 1724169 - RNA, 19 nt, Homo sapiens
  misc_RNA (1)...(19): siRNA sense strand
gaagaugauccauauuugg

SEQ ID NO: 1724170 - RNA, 19 nt, Homo sapiens
  misc_RNA (1)...(19): siRNA sense strand
gguaucagacgccaucuau

SEQ ID NO: 1724171 - RNA, 19 nt, Homo sapiens
  misc_RNA (1)...(19): siRNA sense strand
aagaugugguggaggauuu

SEQ ID NO: 1724172 - RNA, 19 nt, Homo sapiens
  misc_RNA (1)...(19): siRNA sense strand
ucauuuggauccuucuuug

SEQ ID NO: 1724173 - RNA, 19 nt, Homo sapiens
  misc_RNA (1)...(19): siRNA sense strand
aggauaaccucuuucuaga

SEQ ID NO: 1724174 - RNA, 19 nt, Homo sapiens
  misc_RNA (1)...(19): siRNA sense strand
ccauggacacugaaucuaa

SEQ ID NO: 1724175 - RNA, 19 nt, Homo sapiens
  misc_RNA (1)...(19): siRNA sense strand
ggaggcauguuugguagug

SEQ ID NO: 1724176 - RNA, 19 nt, Homo sapiens
  misc_RNA (1)...(19): siRNA sense strand
ccuggugccucuagugaaa

SEQ ID NO: 1724177 - RNA, 19 nt, Homo sapiens
  misc_RNA (1)...(19): siRNA sense strand
ccaaaacacuuauggacaa

SEQ ID NO: 1724178 - RNA, 19 nt, Homo sapiens
  misc_RNA (1)...(19): siRNA sense strand
gcagcuguauaaguuacua

SEQ ID NO: 1724179 - RNA, 19 nt, Homo sapiens
  misc_RNA (1)...(19): siRNA sense strand
gaagagagugcuggaguuc

SEQ ID NO: 1724180 - RNA, 19 nt, Homo sapiens
  misc_RNA (1)...(19): siRNA sense strand
cuauaauccuggacucuug

SEQ ID NO: 1724181 - RNA, 19 nt, Homo sapiens
  misc_RNA (1)...(19): siRNA sense strand
ggagggugaugcccaugug

SEQ ID NO: 1724182 - RNA, 19 nt, Homo sapiens
  misc_RNA (1)...(19): siRNA sense strand
gccaaagaaggacaugaua

SEQ ID NO: 1724183 - RNA, 19 nt, Homo sapiens
  misc_RNA (1)...(19): siRNA sense strand
gacauuaucaacaugagaa

SEQ ID NO: 1724184 - RNA, 19 nt, Homo sapiens
  misc_RNA (1)...(19): siRNA sense strand
aaaggacccugaagguugu

SEQ ID NO: 1724185 - RNA, 19 nt, Homo sapiens
  misc_RNA (1)...(19): siRNA sense strand
gcauccaacuugaaaauug

SEQ ID NO: 1724186 - RNA, 19 nt, Homo sapiens
  misc_RNA (1)...(19): siRNA sense strand
cgaagcaauugaagugauc

SEQ ID NO: 1724187 - RNA, 19 nt, Homo sapiens
  misc_RNA (1)...(19): siRNA sense strand
caaagcagcaggagcagau

SEQ ID NO: 1724188 - RNA, 19 nt, Homo sapiens
  misc_RNA (1)...(19): siRNA sense strand
agaagagagugcuggaguu

SEQ ID NO: 1724189 - RNA, 19 nt, Homo sapiens
  misc_RNA (1)...(19): siRNA sense strand
agaagcucaugcccaauuu

SEQ ID NO: 1724190 - RNA, 19 nt, Homo sapiens
  misc_RNA (1)...(19): siRNA sense strand
cagaagcucaugcccaauu

SEQ ID NO: 1724191 - RNA, 19 nt, Homo sapiens
  misc_RNA (1)...(19): siRNA sense strand
gcaaaccuggguauacuuc

SEQ ID NO: 1724192 - RNA, 19 nt, Homo sapiens
  misc_RNA (1)...(19): siRNA sense strand
caaaaugccccaugauuau

SEQ ID NO: 1724193 - RNA, 19 nt, Homo sapiens
  misc_RNA (1)...(19): siRNA sense strand
caaugcauccaacuugaaa

SEQ ID NO: 1724194 - RNA, 19 nt, Homo sapiens
  misc_RNA (1)...(19): siRNA sense strand
acugcuaacucucaacaaa

SEQ ID NO: 1724195 - RNA, 19 nt, Homo sapiens
  misc_RNA (1)...(19): siRNA sense strand
gaugacauuaucaacauga

SEQ ID NO: 1724196 - RNA, 19 nt, Homo sapiens
  misc_RNA (1)...(19): siRNA sense strand
ccaaugcccuuuucgacua

SEQ ID NO: 1724197 - RNA, 19 nt, Homo sapiens
  misc_RNA (1)...(19): siRNA sense strand
agagcaaccuaaacagaga

SEQ ID NO: 1724198 - RNA, 19 nt, Homo sapiens
  misc_RNA (1)...(19): siRNA sense strand
acaaaaugccccaugauua

SEQ ID NO: 1724199 - RNA, 19 nt, Homo sapiens
  misc_RNA (1)...(19): siRNA sense strand
gaacuacuaaaucuaaugc

SEQ ID NO: 1724200 - RNA, 19 nt, Homo sapiens
  misc_RNA (1)...(19): siRNA sense strand
cacuauggauuuccuacuu

SEQ ID NO: 1724201 - RNA, 19 nt, Homo sapiens
  misc_RNA (1)...(19): siRNA sense strand
ccucuacuauccugaaauc

SEQ ID NO: 1724202 - RNA, 19 nt, Homo sapiens
  misc_RNA (1)...(19): siRNA sense strand
ggaaacuagugaaccaaaa

SEQ ID NO: 1724203 - RNA, 19 nt, Homo sapiens
  misc_RNA (1)...(19): siRNA sense strand
ggaggaaaucugacuugga

SEQ ID NO: 1724204 - RNA, 19 nt, Homo sapiens
  misc_RNA (1)...(19): siRNA sense strand
cauaugagccagaguuuac

SEQ ID NO: 1724205 - RNA, 19 nt, Homo sapiens
  misc_RNA (1)...(19): siRNA sense strand
cuggaugacucuugggaaa

SEQ ID NO: 1724206 - RNA, 19 nt, Homo sapiens
  misc_RNA (1)...(19): siRNA sense strand
ggaacuacuaaaucuaaug

SEQ ID NO: 1724207 - RNA, 19 nt, Homo sapiens
  misc_RNA (1)...(19): siRNA sense strand
caaaaccuuuccucuacua

SEQ ID NO: 1724208 - RNA, 19 nt, Homo sapiens
  misc_RNA (1)...(19): siRNA sense strand
aaaucugacuuggaaacua

SEQ ID NO: 1724209 - RNA, 19 nt, Homo sapiens
  misc_RNA (1)...(19): siRNA sense strand
gcagaaaacuucacucuuu

SEQ ID NO: 1724210 - RNA, 19 nt, Homo sapiens
  misc_RNA (1)...(19): siRNA sense strand
caucugguaucccaaauuu

SEQ ID NO: 1724211 - RNA, 19 nt, Homo sapiens
  misc_RNA (1)...(19): siRNA sense strand
gcagggaaauuugacauca

SEQ ID NO: 1724212 - RNA, 19 nt, Homo sapiens
  misc_RNA (1)...(19): siRNA sense strand
gaauauccuucccaacauc

SEQ ID NO: 1724213 - RNA, 19 nt, Homo sapiens
  misc_RNA (1)...(19): siRNA sense strand
ggaaggcagggaaauuuga

SEQ ID NO: 1724214 - RNA, 19 nt, Homo sapiens
  misc_RNA (1)...(19): siRNA sense strand
cauauuccgucuuggcaaa

SEQ ID NO: 1724215 - RNA, 19 nt, Homo sapiens
  misc_RNA (1)...(19): siRNA sense strand
caacaucugguaucccaaa

SEQ ID NO: 1724216 - RNA, 19 nt, Homo sapiens
  misc_RNA (1)...(19): siRNA sense strand
ucugguaucccaaauuuaa

SEQ ID NO: 1724217 - RNA, 19 nt, Homo sapiens
  misc_RNA (1)...(19): siRNA sense strand
uaccucaagucgugcauuu

SEQ ID NO: 1724218 - RNA, 19 nt, Homo sapiens
  misc_RNA (1)...(19): siRNA sense strand
uggcuacaauuucagguuu

SEQ ID NO: 1724219 - RNA, 19 nt, Homo sapiens
  misc_RNA (1)...(19): siRNA sense strand
gaagaaaagacucuacuau

SEQ ID NO: 1724220 - RNA, 19 nt, Homo sapiens
  misc_RNA (1)...(19): siRNA sense strand
ccaacaucaccacuacuua

SEQ ID NO: 1724221 - RNA, 19 nt, Homo sapiens
  misc_RNA (1)...(19): siRNA sense strand
ucaagucgugcauuuauga

SEQ ID NO: 1724222 - RNA, 19 nt, Homo sapiens
  misc_RNA (1)...(19): siRNA sense strand
aaacuucacucuuuugguu

SEQ ID NO: 1724223 - RNA, 19 nt, Homo sapiens
  misc_RNA (1)...(19): siRNA sense strand
uuaagaacaacaucuggua

SEQ ID NO: 1724224 - RNA, 19 nt, Homo sapiens
  misc_RNA (1)...(19): siRNA sense strand
caacaucaccacuacuuac

SEQ ID NO: 1724225 - RNA, 19 nt, Homo sapiens
  misc_RNA (1)...(19): siRNA sense strand
gggaaggcagggaaauuug

SEQ ID NO: 1724226 - RNA, 19 nt, Homo sapiens
  misc_RNA (1)...(19): siRNA sense strand
cgugcugugugacaucaua

SEQ ID NO: 1724227 - RNA, 19 nt, Homo sapiens
  misc_RNA (1)...(19): siRNA sense strand
ccucaagucgugcauuuau

SEQ ID NO: 1724228 - RNA, 19 nt, Homo sapiens
  misc_RNA (1)...(19): siRNA sense strand
uaagaacaacaucugguau

SEQ ID NO: 1724229 - RNA, 19 nt, Homo sapiens
  misc_RNA (1)...(19): siRNA sense strand
ggacugcaaccuggacaga

SEQ ID NO: 1724230 - RNA, 19 nt, Homo sapiens
  misc_RNA (1)...(19): siRNA sense strand
cggccuuccuguucgagua

SEQ ID NO: 1724231 - RNA, 19 nt, Homo sapiens
  misc_RNA (1)...(19): siRNA sense strand
ggcauccgcuucgacauca

SEQ ID NO: 1724232 - RNA, 19 nt, Homo sapiens
  misc_RNA (1)...(19): siRNA sense strand
ucuccuggcuacaauuuca

SEQ ID NO: 1724233 - RNA, 19 nt, Homo sapiens
  misc_RNA (1)...(19): siRNA sense strand
gcuucgacaucauuguguu

SEQ ID NO: 1724234 - RNA, 19 nt, Homo sapiens
  misc_RNA (1)...(19): siRNA sense strand
uggcgaccgugcuguguga

SEQ ID NO: 1724235 - RNA, 19 nt, Homo sapiens
  misc_RNA (1)...(19): siRNA sense strand
ugggaaggcagggaaauuu

SEQ ID NO: 1724236 - RNA, 19 nt, Homo sapiens
  misc_RNA (1)...(19): siRNA sense strand
uaucuccuggcuacaauuu

SEQ ID NO: 1724237 - RNA, 19 nt, Homo sapiens
  misc_RNA (1)...(19): siRNA sense strand
cagggaaauuugacaucau

SEQ ID NO: 1724238 - RNA, 19 nt, Homo sapiens
  misc_RNA (1)...(19): siRNA sense strand
ggcuacaauuucagguuug

SEQ ID NO: 1724239 - RNA, 19 nt, Homo sapiens
  misc_RNA (1)...(19): siRNA sense strand
cacgggacguugagcacaa

SEQ ID NO: 1724240 - RNA, 19 nt, Homo sapiens
  misc_RNA (1)...(19): siRNA sense strand
uaucgggagaagaaauaua

SEQ ID NO: 1724241 - RNA, 19 nt, Homo sapiens
  misc_RNA (1)...(19): siRNA sense strand
agaaaagacucuacuaucg

SEQ ID NO: 1724242 - RNA, 19 nt, Homo sapiens
  misc_RNA (1)...(19): siRNA sense strand
auaguccucuacugcauga

SEQ ID NO: 1724243 - RNA, 19 nt, Homo sapiens
  misc_RNA (1)...(19): siRNA sense strand
agggaaauuugacaucauc

SEQ ID NO: 1724244 - RNA, 19 nt, Homo sapiens
  misc_RNA (1)...(19): siRNA sense strand
acuaucgggagaagaaaua

SEQ ID NO: 1724245 - RNA, 19 nt, Homo sapiens
  misc_RNA (1)...(19): siRNA sense strand
ucuacuaucgggagaagaa

SEQ ID NO: 1724246 - RNA, 19 nt, Homo sapiens
  misc_RNA (1)...(19): siRNA sense strand
gcucauccgcagccgcaaa

SEQ ID NO: 1724247 - RNA, 19 nt, Homo sapiens
  misc_RNA (1)...(19): siRNA sense strand
ucauaguccucuacugcau

SEQ ID NO: 1724248 - RNA, 19 nt, Homo sapiens
  misc_RNA (1)...(19): siRNA sense strand
cauccuggccuacgucauc

SEQ ID NO: 1724249 - RNA, 19 nt, Homo sapiens
  misc_RNA (1)...(19): siRNA sense strand
aauuucagcaagaggaaua

SEQ ID NO: 1724250 - RNA, 19 nt, Homo sapiens
  misc_RNA (1)...(19): siRNA sense strand
ucagguuugccaaguacua

SEQ ID NO: 1724251 - RNA, 19 nt, Homo sapiens
  misc_RNA (1)...(19): siRNA sense strand
cguaucuccuggcuacaau

SEQ ID NO: 1724252 - RNA, 19 nt, Homo sapiens
  misc_RNA (1)...(19): siRNA sense strand
caccacuacuuaccucaag

SEQ ID NO: 1724253 - RNA, 19 nt, Homo sapiens
  misc_RNA (1)...(19): siRNA sense strand
ucagaugccagcuguacug

SEQ ID NO: 1724254 - RNA, 19 nt, Homo sapiens
  misc_RNA (1)...(19): siRNA sense strand
guccucuacugcaugaaga

SEQ ID NO: 1724255 - RNA, 19 nt, Homo sapiens
  misc_RNA (1)...(19): siRNA sense strand
cgggagaagaaauauaaau

SEQ ID NO: 1724256 - RNA, 19 nt, Homo sapiens
  misc_RNA (1)...(19): siRNA sense strand
cggccuuccuguucgagua

SEQ ID NO: 1724257 - RNA, 19 nt, Homo sapiens
  misc_RNA (1)...(19): siRNA sense strand
gcucauccgcagccgcaaa

SEQ ID NO: 1724258 - RNA, 19 nt, Homo sapiens
  misc_RNA (1)...(19): siRNA sense strand
cauccuggccuacgucauc

SEQ ID NO: 1724259 - RNA, 19 nt, Homo sapiens
  misc_RNA (1)...(19): siRNA sense strand
cggccuuccuguucgagua

SEQ ID NO: 1724260 - RNA, 19 nt, Homo sapiens
  misc_RNA (1)...(19): siRNA sense strand
cgaccacuguguguaaauc

SEQ ID NO: 1724261 - RNA, 19 nt, Homo sapiens
  misc_RNA (1)...(19): siRNA sense strand
gcucauccgcagccgcaaa

SEQ ID NO: 1724262 - RNA, 19 nt, Homo sapiens
  misc_RNA (1)...(19): siRNA sense strand
cauccuggccuacgucauc

SEQ ID NO: 1724263 - RNA, 19 nt, Homo sapiens
  misc_RNA (1)...(19): siRNA sense strand
gaugcgaccacugugugua

SEQ ID NO: 1724264 - RNA, 19 nt, Homo sapiens
  misc_RNA (1)...(19): siRNA sense strand
ucagaugccagcuguacug

SEQ ID NO: 1724265 - RNA, 19 nt, Homo sapiens
  misc_RNA (1)...(19): siRNA sense strand
ccacuguguguaaaucaga

SEQ ID NO: 1724266 - RNA, 19 nt, Homo sapiens
  misc_RNA (1)...(19): siRNA sense strand
gcagaaaacuucacucuuu

SEQ ID NO: 1724267 - RNA, 19 nt, Homo sapiens
  misc_RNA (1)...(19): siRNA sense strand
caucugguaucccaaauuu

SEQ ID NO: 1724268 - RNA, 19 nt, Homo sapiens
  misc_RNA (1)...(19): siRNA sense strand
gcagggaaauuugacauca

SEQ ID NO: 1724269 - RNA, 19 nt, Homo sapiens
  misc_RNA (1)...(19): siRNA sense strand
gaauauccuucccaacauc

SEQ ID NO: 1724270 - RNA, 19 nt, Homo sapiens
  misc_RNA (1)...(19): siRNA sense strand
ggaaggcagggaaauuuga

SEQ ID NO: 1724271 - RNA, 19 nt, Homo sapiens
  misc_RNA (1)...(19): siRNA sense strand
cauauuccgucuuggcaaa

SEQ ID NO: 1724272 - RNA, 19 nt, Homo sapiens
  misc_RNA (1)...(19): siRNA sense strand
caacaucugguaucccaaa

SEQ ID NO: 1724273 - RNA, 19 nt, Homo sapiens
  misc_RNA (1)...(19): siRNA sense strand
ucugguaucccaaauuuaa

SEQ ID NO: 1724274 - RNA, 19 nt, Homo sapiens
  misc_RNA (1)...(19): siRNA sense strand
uaccucaagucgugcauuu

SEQ ID NO: 1724275 - RNA, 19 nt, Homo sapiens
  misc_RNA (1)...(19): siRNA sense strand
uggcuacaauuucagguuu

SEQ ID NO: 1724276 - RNA, 19 nt, Homo sapiens
  misc_RNA (1)...(19): siRNA sense strand
gaagaaaagacucuacuau

SEQ ID NO: 1724277 - RNA, 19 nt, Homo sapiens
  misc_RNA (1)...(19): siRNA sense strand
ccaacaucaccacuacuua

SEQ ID NO: 1724278 - RNA, 19 nt, Homo sapiens
  misc_RNA (1)...(19): siRNA sense strand
ucaagucgugcauuuauga

SEQ ID NO: 1724279 - RNA, 19 nt, Homo sapiens
  misc_RNA (1)...(19): siRNA sense strand
aaacuucacucuuuugguu

SEQ ID NO: 1724280 - RNA, 19 nt, Homo sapiens
  misc_RNA (1)...(19): siRNA sense strand
uuaagaacaacaucuggua

SEQ ID NO: 1724281 - RNA, 19 nt, Homo sapiens
  misc_RNA (1)...(19): siRNA sense strand
caacaucaccacuacuuac

SEQ ID NO: 1724282 - RNA, 19 nt, Homo sapiens
  misc_RNA (1)...(19): siRNA sense strand
gggaaggcagggaaauuug

SEQ ID NO: 1724283 - RNA, 19 nt, Homo sapiens
  misc_RNA (1)...(19): siRNA sense strand
cgugcugugugacaucaua

SEQ ID NO: 1724284 - RNA, 19 nt, Homo sapiens
  misc_RNA (1)...(19): siRNA sense strand
ccucaagucgugcauuuau

SEQ ID NO: 1724285 - RNA, 19 nt, Homo sapiens
  misc_RNA (1)...(19): siRNA sense strand
uaagaacaacaucugguau

SEQ ID NO: 1724286 - RNA, 19 nt, Homo sapiens
  misc_RNA (1)...(19): siRNA sense strand
ggacugcaaccuggacaga

SEQ ID NO: 1724287 - RNA, 19 nt, Homo sapiens
  misc_RNA (1)...(19): siRNA sense strand
cggccuuccuguucgagua

SEQ ID NO: 1724288 - RNA, 19 nt, Homo sapiens
  misc_RNA (1)...(19): siRNA sense strand
ggcauccgcuucgacauca

SEQ ID NO: 1724289 - RNA, 19 nt, Homo sapiens
  misc_RNA (1)...(19): siRNA sense strand
ucuccuggcuacaauuuca

SEQ ID NO: 1724290 - RNA, 19 nt, Homo sapiens
  misc_RNA (1)...(19): siRNA sense strand
gcuucgacaucauuguguu

SEQ ID NO: 1724291 - RNA, 19 nt, Homo sapiens
  misc_RNA (1)...(19): siRNA sense strand
uggcgaccgugcuguguga

SEQ ID NO: 1724292 - RNA, 19 nt, Homo sapiens
  misc_RNA (1)...(19): siRNA sense strand
ugggaaggcagggaaauuu

SEQ ID NO: 1724293 - RNA, 19 nt, Homo sapiens
  misc_RNA (1)...(19): siRNA sense strand
uaucuccuggcuacaauuu

SEQ ID NO: 1724294 - RNA, 19 nt, Homo sapiens
  misc_RNA (1)...(19): siRNA sense strand
cagggaaauuugacaucau

SEQ ID NO: 1724295 - RNA, 19 nt, Homo sapiens
  misc_RNA (1)...(19): siRNA sense strand
ggcuacaauuucagguuug

SEQ ID NO: 1724296 - RNA, 19 nt, Homo sapiens
  misc_RNA (1)...(19): siRNA sense strand
cacgggacguugagcacaa

SEQ ID NO: 1724297 - RNA, 19 nt, Homo sapiens
  misc_RNA (1)...(19): siRNA sense strand
uaucgggagaagaaauaua

SEQ ID NO: 1724298 - RNA, 19 nt, Homo sapiens
  misc_RNA (1)...(19): siRNA sense strand
agaaaagacucuacuaucg

SEQ ID NO: 1724299 - RNA, 19 nt, Homo sapiens
  misc_RNA (1)...(19): siRNA sense strand
auaguccucuacugcauga

SEQ ID NO: 1724300 - RNA, 19 nt, Homo sapiens
  misc_RNA (1)...(19): siRNA sense strand
agggaaauuugacaucauc

SEQ ID NO: 1724301 - RNA, 19 nt, Homo sapiens
  misc_RNA (1)...(19): siRNA sense strand
acuaucgggagaagaaaua

SEQ ID NO: 1724302 - RNA, 19 nt, Homo sapiens
  misc_RNA (1)...(19): siRNA sense strand
ucuacuaucgggagaagaa

SEQ ID NO: 1724303 - RNA, 19 nt, Homo sapiens
  misc_RNA (1)...(19): siRNA sense strand
gcucauccgcagccgcaaa

SEQ ID NO: 1724304 - RNA, 19 nt, Homo sapiens
  misc_RNA (1)...(19): siRNA sense strand
ucauaguccucuacugcau

SEQ ID NO: 1724305 - RNA, 19 nt, Homo sapiens
  misc_RNA (1)...(19): siRNA sense strand
cauccuggccuacgucauc

SEQ ID NO: 1724306 - RNA, 19 nt, Homo sapiens
  misc_RNA (1)...(19): siRNA sense strand
aauuucagcaagaggaaua

SEQ ID NO: 1724307 - RNA, 19 nt, Homo sapiens
  misc_RNA (1)...(19): siRNA sense strand
ucagguuugccaaguacua

SEQ ID NO: 1724308 - RNA, 19 nt, Homo sapiens
  misc_RNA (1)...(19): siRNA sense strand
cguaucuccuggcuacaau

SEQ ID NO: 1724309 - RNA, 19 nt, Homo sapiens
  misc_RNA (1)...(19): siRNA sense strand
caccacuacuuaccucaag

SEQ ID NO: 1724310 - RNA, 19 nt, Homo sapiens
  misc_RNA (1)...(19): siRNA sense strand
ucagaugccagcuguacug

SEQ ID NO: 1724311 - RNA, 19 nt, Homo sapiens
  misc_RNA (1)...(19): siRNA sense strand
guccucuacugcaugaaga

SEQ ID NO: 1724312 - RNA, 19 nt, Homo sapiens
  misc_RNA (1)...(19): siRNA sense strand
cgggagaagaaauauaaau

SEQ ID NO: 1724313 - RNA, 19 nt, Homo sapiens
  misc_RNA (1)...(19): siRNA sense strand
cggccuuccuguucgagua

SEQ ID NO: 1724314 - RNA, 19 nt, Homo sapiens
  misc_RNA (1)...(19): siRNA sense strand
gcucauccgcagccgcaaa

SEQ ID NO: 1724315 - RNA, 19 nt, Homo sapiens
  misc_RNA (1)...(19): siRNA sense strand
cauccuggccuacgucauc

SEQ ID NO: 1724316 - RNA, 19 nt, Homo sapiens
  misc_RNA (1)...(19): siRNA sense strand
cggccuuccuguucgagua

SEQ ID NO: 1724317 - RNA, 19 nt, Homo sapiens
  misc_RNA (1)...(19): siRNA sense strand
cgaccacuguguguaaauc

SEQ ID NO: 1724318 - RNA, 19 nt, Homo sapiens
  misc_RNA (1)...(19): siRNA sense strand
gcucauccgcagccgcaaa

SEQ ID NO: 1724319 - RNA, 19 nt, Homo sapiens
  misc_RNA (1)...(19): siRNA sense strand
cauccuggccuacgucauc

SEQ ID NO: 1724320 - RNA, 19 nt, Homo sapiens
  misc_RNA (1)...(19): siRNA sense strand
gaugcgaccacugugugua

SEQ ID NO: 1724321 - RNA, 19 nt, Homo sapiens
  misc_RNA (1)...(19): siRNA sense strand
ucagaugccagcuguacug

SEQ ID NO: 1724322 - RNA, 19 nt, Homo sapiens
  misc_RNA (1)...(19): siRNA sense strand
ccacuguguguaaaucaga

SEQ ID NO: 1724323 - RNA, 19 nt, Homo sapiens
  misc_RNA (1)...(19): siRNA sense strand
gcagauaccucccuuguua

SEQ ID NO: 1724324 - RNA, 19 nt, Homo sapiens
  misc_RNA (1)...(19): siRNA sense strand
gaacucaacugcacugauc

SEQ ID NO: 1724325 - RNA, 19 nt, Homo sapiens
  misc_RNA (1)...(19): siRNA sense strand
gaacaaaacuugccggauu

SEQ ID NO: 1724326 - RNA, 19 nt, Homo sapiens
  misc_RNA (1)...(19): siRNA sense strand
gagcaccucuuucugauga

SEQ ID NO: 1724327 - RNA, 19 nt, Homo sapiens
  misc_RNA (1)...(19): siRNA sense strand
gcaaagagaaggacaguga

SEQ ID NO: 1724328 - RNA, 19 nt, Homo sapiens
  misc_RNA (1)...(19): siRNA sense strand
gaaagggagagcagauuua

SEQ ID NO: 1724329 - RNA, 19 nt, Homo sapiens
  misc_RNA (1)...(19): siRNA sense strand
caaaggauguuguucucua

SEQ ID NO: 1724330 - RNA, 19 nt, Homo sapiens
  misc_RNA (1)...(19): siRNA sense strand
gaacaggaaccuucucuug

SEQ ID NO: 1724331 - RNA, 19 nt, Homo sapiens
  misc_RNA (1)...(19): siRNA sense strand
gaaagacagugaagaugug

SEQ ID NO: 1724332 - RNA, 19 nt, Homo sapiens
  misc_RNA (1)...(19): siRNA sense strand
gagcucagaucaagaagga

SEQ ID NO: 1724333 - RNA, 19 nt, Homo sapiens
  misc_RNA (1)...(19): siRNA sense strand
ccaaggaacucucuuugug

SEQ ID NO: 1724334 - RNA, 19 nt, Homo sapiens
  misc_RNA (1)...(19): siRNA sense strand
gaagguggauggugaugug

SEQ ID NO: 1724335 - RNA, 19 nt, Homo sapiens
  misc_RNA (1)...(19): siRNA sense strand
ugacagcacuccuaagaug

SEQ ID NO: 1724336 - RNA, 19 nt, Homo sapiens
  misc_RNA (1)...(19): siRNA sense strand
gagcccaucuccaucauug

SEQ ID NO: 1724337 - RNA, 19 nt, Homo sapiens
  misc_RNA (1)...(19): siRNA sense strand
gauguggucuucaauuuag

SEQ ID NO: 1724338 - RNA, 19 nt, Homo sapiens
  misc_RNA (1)...(19): siRNA sense strand
ccugugaccuccuacauaa

SEQ ID NO: 1724339 - RNA, 19 nt, Homo sapiens
  misc_RNA (1)...(19): siRNA sense strand
gugauguggucuucaauuu

SEQ ID NO: 1724340 - RNA, 19 nt, Homo sapiens
  misc_RNA (1)...(19): siRNA sense strand
gcacgaggccaguucauga

SEQ ID NO: 1724341 - RNA, 19 nt, Homo sapiens
  misc_RNA (1)...(19): siRNA sense strand
ggaaagggagagcagauuu

SEQ ID NO: 1724342 - RNA, 19 nt, Homo sapiens
  misc_RNA (1)...(19): siRNA sense strand
gagccagccugccuugaaa

SEQ ID NO: 1724343 - RNA, 19 nt, Homo sapiens
  misc_RNA (1)...(19): siRNA sense strand
ggaacucucuuuguggaaa

SEQ ID NO: 1724344 - RNA, 19 nt, Homo sapiens
  misc_RNA (1)...(19): siRNA sense strand
ugaagaggcugaagcuuuc

SEQ ID NO: 1724345 - RNA, 19 nt, Homo sapiens
  misc_RNA (1)...(19): siRNA sense strand
gcacugaucagcaccauuc

SEQ ID NO: 1724346 - RNA, 19 nt, Homo sapiens
  misc_RNA (1)...(19): siRNA sense strand
caagcacagugaaacgaua

SEQ ID NO: 1724347 - RNA, 19 nt, Homo sapiens
  misc_RNA (1)...(19): siRNA sense strand
gcaccgagcagcaaacaga

SEQ ID NO: 1724348 - RNA, 19 nt, Homo sapiens
  misc_RNA (1)...(19): siRNA sense strand
ugacaaugcuggcuacaca

SEQ ID NO: 1724349 - RNA, 19 nt, Homo sapiens
  misc_RNA (1)...(19): siRNA sense strand
ggaccgacauccugaacau

SEQ ID NO: 1724350 - RNA, 19 nt, Homo sapiens
  misc_RNA (1)...(19): siRNA sense strand
gaccaguucugaccggauu

SEQ ID NO: 1724351 - RNA, 19 nt, Homo sapiens
  misc_RNA (1)...(19): siRNA sense strand
gaggagggccugcugaaga

SEQ ID NO: 1724352 - RNA, 19 nt, Homo sapiens
  misc_RNA (1)...(19): siRNA sense strand
gcacauggcaaccgucuca

SEQ ID NO: 1724353 - RNA, 19 nt, Homo sapiens
  misc_RNA (1)...(19): siRNA sense strand
ccacucaacacccaaauga

SEQ ID NO: 1724354 - RNA, 19 nt, Homo sapiens
  misc_RNA (1)...(19): siRNA sense strand
gaagaugaagugcggcaaa

SEQ ID NO: 1724355 - RNA, 19 nt, Homo sapiens
  misc_RNA (1)...(19): siRNA sense strand
ggacagccaagcacaguga

SEQ ID NO: 1724356 - RNA, 19 nt, Homo sapiens
  misc_RNA (1)...(19): siRNA sense strand
gcacaagucagaagacaag

SEQ ID NO: 1724357 - RNA, 19 nt, Homo sapiens
  misc_RNA (1)...(19): siRNA sense strand
aaacgaagacggcagaaga

SEQ ID NO: 1724358 - RNA, 19 nt, Homo sapiens
  misc_RNA (1)...(19): siRNA sense strand
ugccaagccuuaugaagaa

SEQ ID NO: 1724359 - RNA, 19 nt, Homo sapiens
  misc_RNA (1)...(19): siRNA sense strand
ggauugcugccaagccuua

SEQ ID NO: 1724360 - RNA, 19 nt, Homo sapiens
  misc_RNA (1)...(19): siRNA sense strand
cagaugaugugacggaauc

SEQ ID NO: 1724361 - RNA, 19 nt, Homo sapiens
  misc_RNA (1)...(19): siRNA sense strand
guuaccuucucuccucuua

SEQ ID NO: 1724362 - RNA, 19 nt, Homo sapiens
  misc_RNA (1)...(19): siRNA sense strand
ggagagaagaauacuuuca

SEQ ID NO: 1724363 - RNA, 19 nt, Homo sapiens
  misc_RNA (1)...(19): siRNA sense strand
ccaggaauccaccaagaaa

SEQ ID NO: 1724364 - RNA, 19 nt, Homo sapiens
  misc_RNA (1)...(19): siRNA sense strand
ggacuuccguuaccuucuc

SEQ ID NO: 1724365 - RNA, 19 nt, Homo sapiens
  misc_RNA (1)...(19): siRNA sense strand
guucuuacccguaugcauu

SEQ ID NO: 1724366 - RNA, 19 nt, Homo sapiens
  misc_RNA (1)...(19): siRNA sense strand
gcaagguguuggagagaag

SEQ ID NO: 1724367 - RNA, 19 nt, Homo sapiens
  misc_RNA (1)...(19): siRNA sense strand
gaauuccagucuugcaaca

SEQ ID NO: 1724368 - RNA, 19 nt, Homo sapiens
  misc_RNA (1)...(19): siRNA sense strand
gaagaggaagaaacgaaga

SEQ ID NO: 1724369 - RNA, 19 nt, Homo sapiens
  misc_RNA (1)...(19): siRNA sense strand
guauauaucccgccuccaa

SEQ ID NO: 1724370 - RNA, 19 nt, Homo sapiens
  misc_RNA (1)...(19): siRNA sense strand
caccaggcgucucugcuuu

SEQ ID NO: 1724371 - RNA, 19 nt, Homo sapiens
  misc_RNA (1)...(19): siRNA sense strand
ccagaaagacagugaagau

SEQ ID NO: 1724372 - RNA, 19 nt, Homo sapiens
  misc_RNA (1)...(19): siRNA sense strand
ugauguggucuucaauuua

SEQ ID NO: 1724373 - RNA, 19 nt, Homo sapiens
  misc_RNA (1)...(19): siRNA sense strand
gagagaagaauacuuucau

SEQ ID NO: 1724374 - RNA, 19 nt, Homo sapiens
  misc_RNA (1)...(19): siRNA sense strand
gaaagugcaagaccaagca

SEQ ID NO: 1724375 - RNA, 19 nt, Homo sapiens
  misc_RNA (1)...(19): siRNA sense strand
gaucucggauucaccaaac

SEQ ID NO: 1724376 - RNA, 19 nt, Homo sapiens
  misc_RNA (1)...(19): siRNA sense strand
gagcaccgccucaggaaca

SEQ ID NO: 1724377 - RNA, 19 nt, Homo sapiens
  misc_RNA (1)...(19): siRNA sense strand
caggagacacgaagccuaa

SEQ ID NO: 1724378 - RNA, 19 nt, Homo sapiens
  misc_RNA (1)...(19): siRNA sense strand
cgauggaggaggaugauuu

SEQ ID NO: 1724379 - RNA, 19 nt, Homo sapiens
  misc_RNA (1)...(19): siRNA sense strand
uaaaggcccguaagcagaa

SEQ ID NO: 1724380 - RNA, 19 nt, Homo sapiens
  misc_RNA (1)...(19): siRNA sense strand
gcaaaugugggacaccaau

SEQ ID NO: 1724381 - RNA, 19 nt, Homo sapiens
  misc_RNA (1)...(19): siRNA sense strand
gagcaguuuccgugacuuu

SEQ ID NO: 1724382 - RNA, 19 nt, Homo sapiens
  misc_RNA (1)...(19): siRNA sense strand
cccagaaccugccuaagau

SEQ ID NO: 1724383 - RNA, 19 nt, Homo sapiens
  misc_RNA (1)...(19): siRNA sense strand
aaaccaaggaacucucuuu

SEQ ID NO: 1724384 - RNA, 19 nt, Homo sapiens
  misc_RNA (1)...(19): siRNA sense strand
cagaagaggcaaaggaugu

SEQ ID NO: 1724385 - RNA, 19 nt, Homo sapiens
  misc_RNA (1)...(19): siRNA sense strand
aagcaucuguagcuccuuu

SEQ ID NO: 1724386 - RNA, 19 nt, Homo sapiens
  misc_RNA (1)...(19): siRNA sense strand
gcucugacagcacuccuaa

SEQ ID NO: 1724387 - RNA, 19 nt, Homo sapiens
  misc_RNA (1)...(19): siRNA sense strand
gcaguuuccgugacuuuau

SEQ ID NO: 1724388 - RNA, 19 nt, Homo sapiens
  misc_RNA (1)...(19): siRNA sense strand
aaagggagagcagauuuaa

SEQ ID NO: 1724389 - RNA, 19 nt, Homo sapiens
  misc_RNA (1)...(19): siRNA sense strand
agucaauccuguccucuug

SEQ ID NO: 1724390 - RNA, 19 nt, Homo sapiens
  misc_RNA (1)...(19): siRNA sense strand
guacgagccagaccuacuu

SEQ ID NO: 1724391 - RNA, 19 nt, Homo sapiens
  misc_RNA (1)...(19): siRNA sense strand
ucuacugccuccagaaaga

SEQ ID NO: 1724392 - RNA, 19 nt, Homo sapiens
  misc_RNA (1)...(19): siRNA sense strand
ggcaaaggauguuguucuc

SEQ ID NO: 1724393 - RNA, 19 nt, Homo sapiens
  misc_RNA (1)...(19): siRNA sense strand
acgguuuccucccaaauaa

SEQ ID NO: 1724394 - RNA, 19 nt, Homo sapiens
  misc_RNA (1)...(19): siRNA sense strand
gaagaagaagaggagguaa

SEQ ID NO: 1724395 - RNA, 19 nt, Homo sapiens
  misc_RNA (1)...(19): siRNA sense strand
caguuuccgugacuuuauu

SEQ ID NO: 1724396 - RNA, 19 nt, Homo sapiens
  misc_RNA (1)...(19): siRNA sense strand
acacgaagccuaagaacca

SEQ ID NO: 1724397 - RNA, 19 nt, Homo sapiens
  misc_RNA (1)...(19): siRNA sense strand
gagacacgaagccuaagaa

SEQ ID NO: 1724398 - RNA, 19 nt, Homo sapiens
  misc_RNA (1)...(19): siRNA sense strand
ccaaaugagcaaacagguu

SEQ ID NO: 1724399 - RNA, 19 nt, Homo sapiens
  misc_RNA (1)...(19): siRNA sense strand
uugaagaggcugaagcuuu

SEQ ID NO: 1724400 - RNA, 19 nt, Homo sapiens
  misc_RNA (1)...(19): siRNA sense strand
ugaagcgcuuucucaguga

SEQ ID NO: 1724401 - RNA, 19 nt, Homo sapiens
  misc_RNA (1)...(19): siRNA sense strand
gaagugcggcaaagagaag

SEQ ID NO: 1724402 - RNA, 19 nt, Homo sapiens
  misc_RNA (1)...(19): siRNA sense strand
cgggcaggcucgagugaaa

SEQ ID NO: 1724403 - RNA, 19 nt, Homo sapiens
  misc_RNA (1)...(19): siRNA sense strand
gguguuggagagaagaaua

SEQ ID NO: 1724404 - RNA, 19 nt, Homo sapiens
  misc_RNA (1)...(19): siRNA sense strand
augaugcgguggucaauga

SEQ ID NO: 1724405 - RNA, 19 nt, Homo sapiens
  misc_RNA (1)...(19): siRNA sense strand
agaaagacagugaagaugu

SEQ ID NO: 1724406 - RNA, 19 nt, Homo sapiens
  misc_RNA (1)...(19): siRNA sense strand
uggcaaccgucucagaaga

SEQ ID NO: 1724407 - RNA, 19 nt, Homo sapiens
  misc_RNA (1)...(19): siRNA sense strand
aagcugaaguucgggcuaa

SEQ ID NO: 1724408 - RNA, 19 nt, Homo sapiens
  misc_RNA (1)...(19): siRNA sense strand
ggagacacgaagccuaaga

SEQ ID NO: 1724409 - RNA, 19 nt, Homo sapiens
  misc_RNA (1)...(19): siRNA sense strand
gcuccguucuuacccguau

SEQ ID NO: 1724410 - RNA, 19 nt, Homo sapiens
  misc_RNA (1)...(19): siRNA sense strand
gggcacaagucagaagaca

SEQ ID NO: 1724411 - RNA, 19 nt, Homo sapiens
  misc_RNA (1)...(19): siRNA sense strand
ggcaagguguuggagagaa

SEQ ID NO: 1724412 - RNA, 19 nt, Homo sapiens
  misc_RNA (1)...(19): siRNA sense strand
gaagcgcuuucucagugau

SEQ ID NO: 1724413 - RNA, 19 nt, Homo sapiens
  misc_RNA (1)...(19): siRNA sense strand
gaaaagccaucaggaaaac

SEQ ID NO: 1724414 - RNA, 19 nt, Homo sapiens
  misc_RNA (1)...(19): siRNA sense strand
gguccggaguucccacaga

SEQ ID NO: 1724415 - RNA, 19 nt, Homo sapiens
  misc_RNA (1)...(19): siRNA sense strand
ggugauguggucuucaauu

SEQ ID NO: 1724416 - RNA, 19 nt, Homo sapiens
  misc_RNA (1)...(19): siRNA sense strand
gggguuuccuccacucuua

SEQ ID NO: 1724417 - RNA, 19 nt, Homo sapiens
  misc_RNA (1)...(19): siRNA sense strand
agaagaagaagaggaggua

SEQ ID NO: 1724418 - RNA, 19 nt, Homo sapiens
  misc_RNA (1)...(19): siRNA sense strand
uguuugaacucucagacaa

SEQ ID NO: 1724419 - RNA, 19 nt, Homo sapiens
  misc_RNA (1)...(19): siRNA sense strand
gauggaggaggaugauuuc

SEQ ID NO: 1724420 - RNA, 19 nt, Homo sapiens
  misc_RNA (1)...(19): siRNA sense strand
gcucaagcuucccgcaucu

SEQ ID NO: 1724421 - RNA, 19 nt, Homo sapiens
  misc_RNA (1)...(19): siRNA sense strand
gaagaggcaaaggauguug

SEQ ID NO: 1724422 - RNA, 19 nt, Homo sapiens
  misc_RNA (1)...(19): siRNA sense strand
gcagaagagccgaaaauau

SEQ ID NO: 1724423 - RNA, 19 nt, Homo sapiens
  misc_RNA (1)...(19): siRNA sense strand
gaugaucggcugaauguaa

SEQ ID NO: 1724424 - RNA, 19 nt, Homo sapiens
  misc_RNA (1)...(19): siRNA sense strand
ggaaagaugagguauuaau

SEQ ID NO: 1724425 - RNA, 19 nt, Homo sapiens
  misc_RNA (1)...(19): siRNA sense strand
uuggaaagaugagguauua

SEQ ID NO: 1724426 - RNA, 19 nt, Homo sapiens
  misc_RNA (1)...(19): siRNA sense strand
gauuauccuuguacuuuga

SEQ ID NO: 1724427 - RNA, 19 nt, Homo sapiens
  misc_RNA (1)...(19): siRNA sense strand
guuguaaucgugcaaauaa

SEQ ID NO: 1724428 - RNA, 19 nt, Homo sapiens
  misc_RNA (1)...(19): siRNA sense strand
gaaagaugagguauuaauc

SEQ ID NO: 1724429 - RNA, 19 nt, Homo sapiens
  misc_RNA (1)...(19): siRNA sense strand
gaauguaacagaggaacua

SEQ ID NO: 1724430 - RNA, 19 nt, Homo sapiens
  misc_RNA (1)...(19): siRNA sense strand
cagauuauccuuguacuuu

SEQ ID NO: 1724431 - RNA, 19 nt, Homo sapiens
  misc_RNA (1)...(19): siRNA sense strand
gguuuaagaugauucagau

SEQ ID NO: 1724432 - RNA, 19 nt, Homo sapiens
  misc_RNA (1)...(19): siRNA sense strand
cagaggaacuaacguccaa

SEQ ID NO: 1724433 - RNA, 19 nt, Homo sapiens
  misc_RNA (1)...(19): siRNA sense strand
gcuccgaaccuucagcuuu

SEQ ID NO: 1724434 - RNA, 19 nt, Homo sapiens
  misc_RNA (1)...(19): siRNA sense strand
gaccaugucuucauuugcu

SEQ ID NO: 1724435 - RNA, 19 nt, Homo sapiens
  misc_RNA (1)...(19): siRNA sense strand
cgaauuagcgguguauuuc

SEQ ID NO: 1724436 - RNA, 19 nt, Homo sapiens
  misc_RNA (1)...(19): siRNA sense strand
ggacagcuuugcaguucuc

SEQ ID NO: 1724437 - RNA, 19 nt, Homo sapiens
  misc_RNA (1)...(19): siRNA sense strand
gcucaucucgccuggguuu

SEQ ID NO: 1724438 - RNA, 19 nt, Homo sapiens
  misc_RNA (1)...(19): siRNA sense strand
aaacgcucacuccgaauua

SEQ ID NO: 1724439 - RNA, 19 nt, Homo sapiens
  misc_RNA (1)...(19): siRNA sense strand
caaucuuucagcuaacuua

SEQ ID NO: 1724440 - RNA, 19 nt, Homo sapiens
  misc_RNA (1)...(19): siRNA sense strand
gacaagacgaggauucuca

SEQ ID NO: 1724441 - RNA, 19 nt, Homo sapiens
  misc_RNA (1)...(19): siRNA sense strand
aaggacagcuuugcaguuc

SEQ ID NO: 1724442 - RNA, 19 nt, Homo sapiens
  misc_RNA (1)...(19): siRNA sense strand
ugauucagauuauccuugu

SEQ ID NO: 1724443 - RNA, 19 nt, Homo sapiens
  misc_RNA (1)...(19): siRNA sense strand
uaaacgcucacuccgaauu

SEQ ID NO: 1724444 - RNA, 19 nt, Homo sapiens
  misc_RNA (1)...(19): siRNA sense strand
ucuuucagcuaacuuauuc

SEQ ID NO: 1724445 - RNA, 19 nt, Homo sapiens
  misc_RNA (1)...(19): siRNA sense strand
caaggacagcuuugcaguu

SEQ ID NO: 1724446 - RNA, 19 nt, Homo sapiens
  misc_RNA (1)...(19): siRNA sense strand
ccgaauuagcgguguauuu

SEQ ID NO: 1724447 - RNA, 19 nt, Homo sapiens
  misc_RNA (1)...(19): siRNA sense strand
ucagcuaacuuauucuacu

SEQ ID NO: 1724448 - RNA, 19 nt, Homo sapiens
  misc_RNA (1)...(19): siRNA sense strand
ucauuugcuuccacaagaa

SEQ ID NO: 1724449 - RNA, 19 nt, Homo sapiens
  misc_RNA (1)...(19): siRNA sense strand
agacgaggauucucaacgu

SEQ ID NO: 1724450 - RNA, 19 nt, Homo sapiens
  misc_RNA (1)...(19): siRNA sense strand
ccgaccaugucuucauuug

SEQ ID NO: 1724451 - RNA, 19 nt, Homo sapiens
  misc_RNA (1)...(19): siRNA sense strand
aauuagcgguguauuucuu

SEQ ID NO: 1724452 - RNA, 19 nt, Homo sapiens
  misc_RNA (1)...(19): siRNA sense strand
agauuauccuuguacuuug

SEQ ID NO: 1724453 - RNA, 19 nt, Homo sapiens
  misc_RNA (1)...(19): siRNA sense strand
gauucagauuauccuugua

SEQ ID NO: 1724454 - RNA, 19 nt, Homo sapiens
  misc_RNA (1)...(19): siRNA sense strand
cgguguauuucuugaaguu

SEQ ID NO: 1724455 - RNA, 19 nt, Homo sapiens
  misc_RNA (1)...(19): siRNA sense strand
ccaggugggcgagggaaua

SEQ ID NO: 1724456 - RNA, 19 nt, Homo sapiens
  misc_RNA (1)...(19): siRNA sense strand
gagagacgcagcggagguu

SEQ ID NO: 1724457 - RNA, 19 nt, Homo sapiens
  misc_RNA (1)...(19): siRNA sense strand
cugcagcggauccucaaua

SEQ ID NO: 1724458 - RNA, 19 nt, Homo sapiens
  misc_RNA (1)...(19): siRNA sense strand
acagacgccaaacgcauua

SEQ ID NO: 1724459 - RNA, 19 nt, Homo sapiens
  misc_RNA (1)...(19): siRNA sense strand
cagcuaacuuauucuacuc

SEQ ID NO: 1724460 - RNA, 19 nt, Homo sapiens
  misc_RNA (1)...(19): siRNA sense strand
acccgacgcuugcuucaug

SEQ ID NO: 1724461 - RNA, 19 nt, Homo sapiens
  misc_RNA (1)...(19): siRNA sense strand
cgcauuaacuggcgaacag

SEQ ID NO: 1724462 - RNA, 19 nt, Homo sapiens
  misc_RNA (1)...(19): siRNA sense strand
gaauuagcgguguauuucu

SEQ ID NO: 1724463 - RNA, 19 nt, Homo sapiens
  misc_RNA (1)...(19): siRNA sense strand
caagaaccgcgaggacaga

SEQ ID NO: 1724464 - RNA, 19 nt, Homo sapiens
  misc_RNA (1)...(19): siRNA sense strand
uucauuugcuuccacaaga

SEQ ID NO: 1724465 - RNA, 19 nt, Homo sapiens
  misc_RNA (1)...(19): siRNA sense strand
ccuuguacuuugaggagaa

SEQ ID NO: 1724466 - RNA, 19 nt, Homo sapiens
  misc_RNA (1)...(19): siRNA sense strand
uauugcugguuuaagauga

SEQ ID NO: 1724467 - RNA, 19 nt, Homo sapiens
  misc_RNA (1)...(19): siRNA sense strand
cacagacgccaaacgcauu

SEQ ID NO: 1724468 - RNA, 19 nt, Homo sapiens
  misc_RNA (1)...(19): siRNA sense strand
guauuaauccccuccauug

SEQ ID NO: 1724469 - RNA, 19 nt, Homo sapiens
  misc_RNA (1)...(19): siRNA sense strand
gcgagccgaccaugucuuc

SEQ ID NO: 1724470 - RNA, 19 nt, Homo sapiens
  misc_RNA (1)...(19): siRNA sense strand
gcggcagccucuacaucga

SEQ ID NO: 1724471 - RNA, 19 nt, Homo sapiens
  misc_RNA (1)...(19): siRNA sense strand
gagccgaccaugucuucau

SEQ ID NO: 1724472 - RNA, 19 nt, Homo sapiens
  misc_RNA (1)...(19): siRNA sense strand
agccgaccaugucuucauu

SEQ ID NO: 1724473 - RNA, 19 nt, Homo sapiens
  misc_RNA (1)...(19): siRNA sense strand
ccaaaagccaauaaaguga

SEQ ID NO: 1724474 - RNA, 19 nt, Homo sapiens
  misc_RNA (1)...(19): siRNA sense strand
ugcagcggauccucaauag

SEQ ID NO: 1724475 - RNA, 19 nt, Homo sapiens
  misc_RNA (1)...(19): siRNA sense strand
gcagcagcagugagaguuc

SEQ ID NO: 1724476 - RNA, 19 nt, Homo sapiens
  misc_RNA (1)...(19): siRNA sense strand
gcaagaagcugaaagaaaa

SEQ ID NO: 1724477 - RNA, 19 nt, Homo sapiens
  misc_RNA (1)...(19): siRNA sense strand
gaacagaugaccaaacuga

SEQ ID NO: 1724478 - RNA, 19 nt, Homo sapiens
  misc_RNA (1)...(19): siRNA sense strand
agaaggagaugagaaauuu

SEQ ID NO: 1724479 - RNA, 19 nt, Homo sapiens
  misc_RNA (1)...(19): siRNA sense strand
uaaaggagaaguucaagua

SEQ ID NO: 1724480 - RNA, 19 nt, Homo sapiens
  misc_RNA (1)...(19): siRNA sense strand
cgaaaucgccugcuacaaa

SEQ ID NO: 1724481 - RNA, 19 nt, Homo sapiens
  misc_RNA (1)...(19): siRNA sense strand
gauagaacgugcucacaug

SEQ ID NO: 1724482 - RNA, 19 nt, Homo sapiens
  misc_RNA (1)...(19): siRNA sense strand
ugaaggacauccacuauuc

SEQ ID NO: 1724483 - RNA, 19 nt, Homo sapiens
  misc_RNA (1)...(19): siRNA sense strand
ucugaaagauguagaagaa

SEQ ID NO: 1724484 - RNA, 19 nt, Homo sapiens
  misc_RNA (1)...(19): siRNA sense strand
aaaggaaacuaaaggcaaa

SEQ ID NO: 1724485 - RNA, 19 nt, Homo sapiens
  misc_RNA (1)...(19): siRNA sense strand
ugaccaaacugaaaucugu

SEQ ID NO: 1724486 - RNA, 19 nt, Homo sapiens
  misc_RNA (1)...(19): siRNA sense strand
guaagcagauuuugacuaa

SEQ ID NO: 1724487 - RNA, 19 nt, Homo sapiens
  misc_RNA (1)...(19): siRNA sense strand
gaaaucgccugcuacaaaa

SEQ ID NO: 1724488 - RNA, 19 nt, Homo sapiens
  misc_RNA (1)...(19): siRNA sense strand
gaagugauaaagcaguuaa

SEQ ID NO: 1724489 - RNA, 19 nt, Homo sapiens
  misc_RNA (1)...(19): siRNA sense strand
gaaacuaaaggcaaagguu

SEQ ID NO: 1724490 - RNA, 19 nt, Homo sapiens
  misc_RNA (1)...(19): siRNA sense strand
ggaaguacucaaucugaaa

SEQ ID NO: 1724491 - RNA, 19 nt, Homo sapiens
  misc_RNA (1)...(19): siRNA sense strand
caacuggagcagauguuua

SEQ ID NO: 1724492 - RNA, 19 nt, Homo sapiens
  misc_RNA (1)...(19): siRNA sense strand
gcagacaaaugugugaauc

SEQ ID NO: 1724493 - RNA, 19 nt, Homo sapiens
  misc_RNA (1)...(19): siRNA sense strand
acacacaacuggagcagau

SEQ ID NO: 1724494 - RNA, 19 nt, Homo sapiens
  misc_RNA (1)...(19): siRNA sense strand
ggcaagaagcugaaagaaa

SEQ ID NO: 1724495 - RNA, 19 nt, Homo sapiens
  misc_RNA (1)...(19): siRNA sense strand
gagaugagaaauuugaaug

SEQ ID NO: 1724496 - RNA, 19 nt, Homo sapiens
  misc_RNA (1)...(19): siRNA sense strand
uuagggacauugcaacuau

SEQ ID NO: 1724497 - RNA, 19 nt, Homo sapiens
  misc_RNA (1)...(19): siRNA sense strand
uuagaaaucguaugucuga

SEQ ID NO: 1724498 - RNA, 19 nt, Homo sapiens
  misc_RNA (1)...(19): siRNA sense strand
aaacugaaaucuguaagca

SEQ ID NO: 1724499 - RNA, 19 nt, Homo sapiens
  misc_RNA (1)...(19): siRNA sense strand
ccauacaccgugauccuua

SEQ ID NO: 1724500 - RNA, 19 nt, Homo sapiens
  misc_RNA (1)...(19): siRNA sense strand
gaaacaaagagaccauaca

SEQ ID NO: 1724501 - RNA, 19 nt, Homo sapiens
  misc_RNA (1)...(19): siRNA sense strand
agaagaaggagaugagaaa

SEQ ID NO: 1724502 - RNA, 19 nt, Homo sapiens
  misc_RNA (1)...(19): siRNA sense strand
aggagaaguucaaguauca

SEQ ID NO: 1724503 - RNA, 19 nt, Homo sapiens
  misc_RNA (1)...(19): siRNA sense strand
gaaagauguagaagaagga

SEQ ID NO: 1724504 - RNA, 19 nt, Homo sapiens
  misc_RNA (1)...(19): siRNA sense strand
ccgagaaauugaugagcua

SEQ ID NO: 1724505 - RNA, 19 nt, Homo sapiens
  misc_RNA (1)...(19): siRNA sense strand
ggacauugcaacuauugug

SEQ ID NO: 1724506 - RNA, 19 nt, Homo sapiens
  misc_RNA (1)...(19): siRNA sense strand
ggucauagaaagugaagau

SEQ ID NO: 1724507 - RNA, 19 nt, Homo sapiens
  misc_RNA (1)...(19): siRNA sense strand
uaaagaaagacacacacaa

SEQ ID NO: 1724508 - RNA, 19 nt, Homo sapiens
  misc_RNA (1)...(19): siRNA sense strand
gaucaaggucauagaaagu

SEQ ID NO: 1724509 - RNA, 19 nt, Homo sapiens
  misc_RNA (1)...(19): siRNA sense strand
guacaaaacagcaggcuuu

SEQ ID NO: 1724510 - RNA, 19 nt, Homo sapiens
  misc_RNA (1)...(19): siRNA sense strand
ucaaggucauagaaaguga

SEQ ID NO: 1724511 - RNA, 19 nt, Homo sapiens
  misc_RNA (1)...(19): siRNA sense strand
acaccgugauccuuauuga

SEQ ID NO: 1724512 - RNA, 19 nt, Homo sapiens
  misc_RNA (1)...(19): siRNA sense strand
gaaguacucaaucugaaag

SEQ ID NO: 1724513 - RNA, 19 nt, Homo sapiens
  misc_RNA (1)...(19): siRNA sense strand
ucaagccacugaucaaggu

SEQ ID NO: 1724514 - RNA, 19 nt, Homo sapiens
  misc_RNA (1)...(19): siRNA sense strand
guucauccuuccagucaau

SEQ ID NO: 1724515 - RNA, 19 nt, Homo sapiens
  misc_RNA (1)...(19): siRNA sense strand
ggaagugauaaagcaguua

SEQ ID NO: 1724516 - RNA, 19 nt, Homo sapiens
  misc_RNA (1)...(19): siRNA sense strand
gugugaauccugaaacaaa

SEQ ID NO: 1724517 - RNA, 19 nt, Homo sapiens
  misc_RNA (1)...(19): siRNA sense strand
gaagaaggagaugagaaau

SEQ ID NO: 1724518 - RNA, 19 nt, Homo sapiens
  misc_RNA (1)...(19): siRNA sense strand
gaaaagcucaagccacuga

SEQ ID NO: 1724519 - RNA, 19 nt, Homo sapiens
  misc_RNA (1)...(19): siRNA sense strand
ggagaugagaaauuugaau

SEQ ID NO: 1724520 - RNA, 19 nt, Homo sapiens
  misc_RNA (1)...(19): siRNA sense strand
acagaugaccaaacugaaa

SEQ ID NO: 1724521 - RNA, 19 nt, Homo sapiens
  misc_RNA (1)...(19): siRNA sense strand
uggaaguacucaaucugaa

SEQ ID NO: 1724522 - RNA, 19 nt, Homo sapiens
  misc_RNA (1)...(19): siRNA sense strand
uggaacagaugaccaaacu

SEQ ID NO: 1724523 - RNA, 19 nt, Homo sapiens
  misc_RNA (1)...(19): siRNA sense strand
gagaaguucaaguaucaga

SEQ ID NO: 1724524 - RNA, 19 nt, Homo sapiens
  misc_RNA (1)...(19): siRNA sense strand
gaaggagaugagaaauuug

SEQ ID NO: 1724525 - RNA, 19 nt, Homo sapiens
  misc_RNA (1)...(19): siRNA sense strand
cagcaggcuuuggaaguga

SEQ ID NO: 1724526 - RNA, 19 nt, Homo sapiens
  misc_RNA (1)...(19): siRNA sense strand
ugaucaaggucauagaaag

SEQ ID NO: 1724527 - RNA, 19 nt, Homo sapiens
  misc_RNA (1)...(19): siRNA sense strand
gcuucgaaaucgccugcua

SEQ ID NO: 1724528 - RNA, 19 nt, Homo sapiens
  misc_RNA (1)...(19): siRNA sense strand
aaggagaaguucaaguauc

SEQ ID NO: 1724529 - RNA, 19 nt, Homo sapiens
  misc_RNA (1)...(19): siRNA sense strand
gauuauggccaacaguuag

SEQ ID NO: 1724530 - RNA, 19 nt, Homo sapiens
  misc_RNA (1)...(19): siRNA sense strand
cauacaccgugauccuuau

SEQ ID NO: 1724531 - RNA, 19 nt, Homo sapiens
  misc_RNA (1)...(19): siRNA sense strand
cagauccgccuaaccaaug

SEQ ID NO: 1724532 - RNA, 19 nt, Homo sapiens
  misc_RNA (1)...(19): siRNA sense strand
aagaaggagaugagaaauu

SEQ ID NO: 1724533 - RNA, 19 nt, Homo sapiens
  misc_RNA (1)...(19): siRNA sense strand
gggcugcuuccgagaaauu

SEQ ID NO: 1724534 - RNA, 19 nt, Homo sapiens
  misc_RNA (1)...(19): siRNA sense strand
ccaugaaggacauccacua

SEQ ID NO: 1724535 - RNA, 19 nt, Homo sapiens
  misc_RNA (1)...(19): siRNA sense strand
acucaguguuuguaaaugu

SEQ ID NO: 1724536 - RNA, 19 nt, Homo sapiens
  misc_RNA (1)...(19): siRNA sense strand
agauuauggccaacaguua

SEQ ID NO: 1724537 - RNA, 19 nt, Homo sapiens
  misc_RNA (1)...(19): siRNA sense strand
gaccaaacugaaaucugua

SEQ ID NO: 1724538 - RNA, 19 nt, Homo sapiens
  misc_RNA (1)...(19): siRNA sense strand
caugaaggacauccacuau

SEQ ID NO: 1724539 - RNA, 19 nt, Homo sapiens
  misc_RNA (1)...(19): siRNA sense strand
uggaagugauaaagcaguu

SEQ ID NO: 1724540 - RNA, 19 nt, Homo sapiens
  misc_RNA (1)...(19): siRNA sense strand
cauccacuauucggugaaa

SEQ ID NO: 1724541 - RNA, 19 nt, Homo sapiens
  misc_RNA (1)...(19): siRNA sense strand
cagaugaccaaacugaaau

SEQ ID NO: 1724542 - RNA, 19 nt, Homo sapiens
  misc_RNA (1)...(19): siRNA sense strand
aaggagaugagaaauuuga

SEQ ID NO: 1724543 - RNA, 19 nt, Homo sapiens
  misc_RNA (1)...(19): siRNA sense strand
gacuaaaggagaaguucaa

SEQ ID NO: 1724544 - RNA, 19 nt, Homo sapiens
  misc_RNA (1)...(19): siRNA sense strand
aaagaaagacacacacaac

SEQ ID NO: 1724545 - RNA, 19 nt, Homo sapiens
  misc_RNA (1)...(19): siRNA sense strand
gaucucaucagugcguuug

SEQ ID NO: 1724546 - RNA, 19 nt, Homo sapiens
  misc_RNA (1)...(19): siRNA sense strand
caacaguuagaaaucguau

SEQ ID NO: 1724547 - RNA, 19 nt, Homo sapiens
  misc_RNA (1)...(19): siRNA sense strand
agaaagacacacacaacug

SEQ ID NO: 1724548 - RNA, 19 nt, Homo sapiens
  misc_RNA (1)...(19): siRNA sense strand
acaguuagaaaucguaugu

SEQ ID NO: 1724549 - RNA, 19 nt, Homo sapiens
  misc_RNA (1)...(19): siRNA sense strand
ucagugcguuuggaacaga

SEQ ID NO: 1724550 - RNA, 19 nt, Homo sapiens
  misc_RNA (1)...(19): siRNA sense strand
agaccucgaugaaguucug

SEQ ID NO: 1724551 - RNA, 19 nt, Homo sapiens
  misc_RNA (1)...(19): siRNA sense strand
acagcaggcuuuggaagug

SEQ ID NO: 1724552 - RNA, 19 nt, Homo sapiens
  misc_RNA (1)...(19): siRNA sense strand
aaaggagaaguucaaguau

SEQ ID NO: 1724553 - RNA, 19 nt, Homo sapiens
  misc_RNA (1)...(19): siRNA sense strand
uagggacauugcaacuauu

SEQ ID NO: 1724554 - RNA, 19 nt, Homo sapiens
  misc_RNA (1)...(19): siRNA sense strand
uagaagaaggagaugagaa

SEQ ID NO: 1724555 - RNA, 19 nt, Homo sapiens
  misc_RNA (1)...(19): siRNA sense strand
gagaaauugaugagcuaau

SEQ ID NO: 1724556 - RNA, 19 nt, Homo sapiens
  misc_RNA (1)...(19): siRNA sense strand
caucagugcguuuggaaca

SEQ ID NO: 1724557 - RNA, 19 nt, Homo sapiens
  misc_RNA (1)...(19): siRNA sense strand
ugugaauccugaaacaaag

SEQ ID NO: 1724558 - RNA, 19 nt, Homo sapiens
  misc_RNA (1)...(19): siRNA sense strand
ccgggcugcuuccgagaaa

SEQ ID NO: 1724559 - RNA, 19 nt, Homo sapiens
  misc_RNA (1)...(19): siRNA sense strand
ccaacaguuagaaaucgua

SEQ ID NO: 1724560 - RNA, 19 nt, Homo sapiens
  misc_RNA (1)...(19): siRNA sense strand
agagagccaugaaggacau

SEQ ID NO: 1724561 - RNA, 19 nt, Homo sapiens
  misc_RNA (1)...(19): siRNA sense strand
aaaccaacaagaguacaaa

SEQ ID NO: 1724562 - RNA, 19 nt, Homo sapiens
  misc_RNA (1)...(19): siRNA sense strand
ggccaacaguuagaaaucg

SEQ ID NO: 1724563 - RNA, 19 nt, Homo sapiens
  misc_RNA (1)...(19): siRNA sense strand
cacaugaggcuucgguuca

SEQ ID NO: 1724564 - RNA, 19 nt, Homo sapiens
  misc_RNA (1)...(19): siRNA sense strand
gauuuugacuaaaggagaa

SEQ ID NO: 1724565 - RNA, 19 nt, Homo sapiens
  misc_RNA (1)...(19): siRNA sense strand
gaagauuauggccaacagu

SEQ ID NO: 1724566 - RNA, 19 nt, Homo sapiens
  misc_RNA (1)...(19): siRNA sense strand
ccagauccgccuaaccaau

SEQ ID NO: 1724567 - RNA, 19 nt, Homo sapiens
  misc_RNA (1)...(19): siRNA sense strand
gaaggacauccacuauucg

SEQ ID NO: 1724568 - RNA, 19 nt, Homo sapiens
  misc_RNA (1)...(19): siRNA sense strand
aaacaaagagaccauacac

SEQ ID NO: 1724569 - RNA, 19 nt, Homo sapiens
  misc_RNA (1)...(19): siRNA sense strand
guagaagaaggagaugaga

SEQ ID NO: 1724570 - RNA, 19 nt, Homo sapiens
  misc_RNA (1)...(19): siRNA sense strand
ugaagauuauggccaacag

SEQ ID NO: 1724571 - RNA, 19 nt, Homo sapiens
  misc_RNA (1)...(19): siRNA sense strand
ucagauaaagaaagacaca

SEQ ID NO: 1724572 - RNA, 19 nt, Homo sapiens
  misc_RNA (1)...(19): siRNA sense strand
gaaggcaagaagcugaaag

SEQ ID NO: 1724573 - RNA, 19 nt, Homo sapiens
  misc_RNA (1)...(19): siRNA sense strand
cgugauccuuauugagaga

SEQ ID NO: 1724574 - RNA, 19 nt, Homo sapiens
  misc_RNA (1)...(19): siRNA sense strand
aguuagaaaucguaugucu

SEQ ID NO: 1724575 - RNA, 19 nt, Homo sapiens
  misc_RNA (1)...(19): siRNA sense strand
ggaaacuaaaggcaaaggu

SEQ ID NO: 1724576 - RNA, 19 nt, Homo sapiens
  misc_RNA (1)...(19): siRNA sense strand
ggaugaagguuaaugguua

SEQ ID NO: 1724577 - RNA, 19 nt, Homo sapiens
  misc_RNA (1)...(19): siRNA sense strand
ggauagaacuuacuccuaa

SEQ ID NO: 1724578 - RNA, 19 nt, Homo sapiens
  misc_RNA (1)...(19): siRNA sense strand
gaaagugucccuccucuua

SEQ ID NO: 1724579 - RNA, 19 nt, Homo sapiens
  misc_RNA (1)...(19): siRNA sense strand
gauggcaccuucauuauaa

SEQ ID NO: 1724580 - RNA, 19 nt, Homo sapiens
  misc_RNA (1)...(19): siRNA sense strand
gcaauccaguucccaguua

SEQ ID NO: 1724581 - RNA, 19 nt, Homo sapiens
  misc_RNA (1)...(19): siRNA sense strand
gagaaagcauuguccuuaa

SEQ ID NO: 1724582 - RNA, 19 nt, Homo sapiens
  misc_RNA (1)...(19): siRNA sense strand
ggagaaagcauuguccuua

SEQ ID NO: 1724583 - RNA, 19 nt, Homo sapiens
  misc_RNA (1)...(19): siRNA sense strand
gccaguaucugaagaguuu

SEQ ID NO: 1724584 - RNA, 19 nt, Homo sapiens
  misc_RNA (1)...(19): siRNA sense strand
aaauagaucuggaaaguga

SEQ ID NO: 1724585 - RNA, 19 nt, Homo sapiens
  misc_RNA (1)...(19): siRNA sense strand
ggaaauacguuauaucacu

SEQ ID NO: 1724586 - RNA, 19 nt, Homo sapiens
  misc_RNA (1)...(19): siRNA sense strand
ucacauggaugaagguuaa

SEQ ID NO: 1724587 - RNA, 19 nt, Homo sapiens
  misc_RNA (1)...(19): siRNA sense strand
cagcaaggcucucagguuu

SEQ ID NO: 1724588 - RNA, 19 nt, Homo sapiens
  misc_RNA (1)...(19): siRNA sense strand
gcaagaaccagaugauauu

SEQ ID NO: 1724589 - RNA, 19 nt, Homo sapiens
  misc_RNA (1)...(19): siRNA sense strand
gauuaucgcuacaguuuga

SEQ ID NO: 1724590 - RNA, 19 nt, Homo sapiens
  misc_RNA (1)...(19): siRNA sense strand
acagcuaguucucaaauua

SEQ ID NO: 1724591 - RNA, 19 nt, Homo sapiens
  misc_RNA (1)...(19): siRNA sense strand
gauaguaauuguugaggaa

SEQ ID NO: 1724592 - RNA, 19 nt, Homo sapiens
  misc_RNA (1)...(19): siRNA sense strand
gauguuggcagcuauauuu

SEQ ID NO: 1724593 - RNA, 19 nt, Homo sapiens
  misc_RNA (1)...(19): siRNA sense strand
gaaaggagacagagcaguu

SEQ ID NO: 1724594 - RNA, 19 nt, Homo sapiens
  misc_RNA (1)...(19): siRNA sense strand
gauccuaaaugcuuccaaa

SEQ ID NO: 1724595 - RNA, 19 nt, Homo sapiens
  misc_RNA (1)...(19): siRNA sense strand
aaucugaaguuguggguua

SEQ ID NO: 1724596 - RNA, 19 nt, Homo sapiens
  misc_RNA (1)...(19): siRNA sense strand
gcaaaggauucuggucauu

SEQ ID NO: 1724597 - RNA, 19 nt, Homo sapiens
  misc_RNA (1)...(19): siRNA sense strand
gcuggagucuauauuauug

SEQ ID NO: 1724598 - RNA, 19 nt, Homo sapiens
  misc_RNA (1)...(19): siRNA sense strand
ccuaaaugcuuccaaauca

SEQ ID NO: 1724599 - RNA, 19 nt, Homo sapiens
  misc_RNA (1)...(19): siRNA sense strand
gguuacagcugcuaaagga

SEQ ID NO: 1724600 - RNA, 19 nt, Homo sapiens
  misc_RNA (1)...(19): siRNA sense strand
uaaagagagucuaggaaga

SEQ ID NO: 1724601 - RNA, 19 nt, Homo sapiens
  misc_RNA (1)...(19): siRNA sense strand
cgaaugauccgcacaaaug

SEQ ID NO: 1724602 - RNA, 19 nt, Homo sapiens
  misc_RNA (1)...(19): siRNA sense strand
gaaagcauuguccuuaauu

SEQ ID NO: 1724603 - RNA, 19 nt, Homo sapiens
  misc_RNA (1)...(19): siRNA sense strand
gaagaaggcaugaguuagu

SEQ ID NO: 1724604 - RNA, 19 nt, Homo sapiens
  misc_RNA (1)...(19): siRNA sense strand
caaaggauucuggucauua

SEQ ID NO: 1724605 - RNA, 19 nt, Homo sapiens
  misc_RNA (1)...(19): siRNA sense strand
ggaagaggguggacauuuu

SEQ ID NO: 1724606 - RNA, 19 nt, Homo sapiens
  misc_RNA (1)...(19): siRNA sense strand
gaagguagcauugaauugu

SEQ ID NO: 1724607 - RNA, 19 nt, Homo sapiens
  misc_RNA (1)...(19): siRNA sense strand
gaugcuggagucuauauua

SEQ ID NO: 1724608 - RNA, 19 nt, Homo sapiens
  misc_RNA (1)...(19): siRNA sense strand
acagaaacuucaagcagua

SEQ ID NO: 1724609 - RNA, 19 nt, Homo sapiens
  misc_RNA (1)...(19): siRNA sense strand
acacguggcuggaaggaaa

SEQ ID NO: 1724610 - RNA, 19 nt, Homo sapiens
  misc_RNA (1)...(19): siRNA sense strand
guaaagacagucccagaaa

SEQ ID NO: 1724611 - RNA, 19 nt, Homo sapiens
  misc_RNA (1)...(19): siRNA sense strand
gauagaacuuacuccuaaa

SEQ ID NO: 1724612 - RNA, 19 nt, Homo sapiens
  misc_RNA (1)...(19): siRNA sense strand
ucaaucagaugcuggaaug

SEQ ID NO: 1724613 - RNA, 19 nt, Homo sapiens
  misc_RNA (1)...(19): siRNA sense strand
agaaauagaucuggaaagu

SEQ ID NO: 1724614 - RNA, 19 nt, Homo sapiens
  misc_RNA (1)...(19): siRNA sense strand
gaugguuaauggaguauug

SEQ ID NO: 1724615 - RNA, 19 nt, Homo sapiens
  misc_RNA (1)...(19): siRNA sense strand
gaaauggaacagaaauaga

SEQ ID NO: 1724616 - RNA, 19 nt, Homo sapiens
  misc_RNA (1)...(19): siRNA sense strand
uaaagacagucccagaaau

SEQ ID NO: 1724617 - RNA, 19 nt, Homo sapiens
  misc_RNA (1)...(19): siRNA sense strand
ccaagaaguugucauagag

SEQ ID NO: 1724618 - RNA, 19 nt, Homo sapiens
  misc_RNA (1)...(19): siRNA sense strand
gugcugagcugaagauucu

SEQ ID NO: 1724619 - RNA, 19 nt, Homo sapiens
  misc_RNA (1)...(19): siRNA sense strand
gaagacagcacccaccaau

SEQ ID NO: 1724620 - RNA, 19 nt, Homo sapiens
  misc_RNA (1)...(19): siRNA sense strand
aaauuaggguaccaucaua

SEQ ID NO: 1724621 - RNA, 19 nt, Homo sapiens
  misc_RNA (1)...(19): siRNA sense strand
gacaagaagugcagucucu

SEQ ID NO: 1724622 - RNA, 19 nt, Homo sapiens
  misc_RNA (1)...(19): siRNA sense strand
agacagagcaguuagagaa

SEQ ID NO: 1724623 - RNA, 19 nt, Homo sapiens
  misc_RNA (1)...(19): siRNA sense strand
gaugaagguuaaugguuau

SEQ ID NO: 1724624 - RNA, 19 nt, Homo sapiens
  misc_RNA (1)...(19): siRNA sense strand
gaaguucgagcauauagug

SEQ ID NO: 1724625 - RNA, 19 nt, Homo sapiens
  misc_RNA (1)...(19): siRNA sense strand
uaacaggauuagaaggaaa

SEQ ID NO: 1724626 - RNA, 19 nt, Homo sapiens
  misc_RNA (1)...(19): siRNA sense strand
gaaaguacggccacacugu

SEQ ID NO: 1724627 - RNA, 19 nt, Homo sapiens
  misc_RNA (1)...(19): siRNA sense strand
ugagaugguuaauggagua

SEQ ID NO: 1724628 - RNA, 19 nt, Homo sapiens
  misc_RNA (1)...(19): siRNA sense strand
gugauuaucgcuacaguuu

SEQ ID NO: 1724629 - RNA, 19 nt, Homo sapiens
  misc_RNA (1)...(19): siRNA sense strand
acaggcaaccuuuauauuu

SEQ ID NO: 1724630 - RNA, 19 nt, Homo sapiens
  misc_RNA (1)...(19): siRNA sense strand
ggaguauucuuaguagaga

SEQ ID NO: 1724631 - RNA, 19 nt, Homo sapiens
  misc_RNA (1)...(19): siRNA sense strand
auagauggcaccuucauua

SEQ ID NO: 1724632 - RNA, 19 nt, Homo sapiens
  misc_RNA (1)...(19): siRNA sense strand
gacagucccagaaaucaua

SEQ ID NO: 1724633 - RNA, 19 nt, Homo sapiens
  misc_RNA (1)...(19): siRNA sense strand
gaaaggacagccuauugau

SEQ ID NO: 1724634 - RNA, 19 nt, Homo sapiens
  misc_RNA (1)...(19): siRNA sense strand
caggcaaccuuuauauuuc

SEQ ID NO: 1724635 - RNA, 19 nt, Homo sapiens
  misc_RNA (1)...(19): siRNA sense strand
aaaggauucuggucauuau

SEQ ID NO: 1724636 - RNA, 19 nt, Homo sapiens
  misc_RNA (1)...(19): siRNA sense strand
aaggacagccuauugauuu

SEQ ID NO: 1724637 - RNA, 19 nt, Homo sapiens
  misc_RNA (1)...(19): siRNA sense strand
ggagacaggcaaccuuuau

SEQ ID NO: 1724638 - RNA, 19 nt, Homo sapiens
  misc_RNA (1)...(19): siRNA sense strand
gaagcuacacugcaguuug

SEQ ID NO: 1724639 - RNA, 19 nt, Homo sapiens
  misc_RNA (1)...(19): siRNA sense strand
gaaacuucaagcaguagua

SEQ ID NO: 1724640 - RNA, 19 nt, Homo sapiens
  misc_RNA (1)...(19): siRNA sense strand
gcaaggcucucagguuucu

SEQ ID NO: 1724641 - RNA, 19 nt, Homo sapiens
  misc_RNA (1)...(19): siRNA sense strand
caagaaccagaugauauua

SEQ ID NO: 1724642 - RNA, 19 nt, Homo sapiens
  misc_RNA (1)...(19): siRNA sense strand
gaggaaauaaccgaaagua

SEQ ID NO: 1724643 - RNA, 19 nt, Homo sapiens
  misc_RNA (1)...(19): siRNA sense strand
gcauuguccuuaauugcaa

SEQ ID NO: 1724644 - RNA, 19 nt, Homo sapiens
  misc_RNA (1)...(19): siRNA sense strand
aaaagaaccuacaaggaua

SEQ ID NO: 1724645 - RNA, 19 nt, Homo sapiens
  misc_RNA (1)...(19): siRNA sense strand
gagacaggcaaccuuuaua

SEQ ID NO: 1724646 - RNA, 19 nt, Homo sapiens
  misc_RNA (1)...(19): siRNA sense strand
gaaagugauuaucgcuaca

SEQ ID NO: 1724647 - RNA, 19 nt, Homo sapiens
  misc_RNA (1)...(19): siRNA sense strand
ggguugagaugguuaaugg

SEQ ID NO: 1724648 - RNA, 19 nt, Homo sapiens
  misc_RNA (1)...(19): siRNA sense strand
uauaagcaauccaagugaa

SEQ ID NO: 1724649 - RNA, 19 nt, Homo sapiens
  misc_RNA (1)...(19): siRNA sense strand
caacagccaaguuauugaa

SEQ ID NO: 1724650 - RNA, 19 nt, Homo sapiens
  misc_RNA (1)...(19): siRNA sense strand
gaagugaaaguuggcguuu

SEQ ID NO: 1724651 - RNA, 19 nt, Homo sapiens
  misc_RNA (1)...(19): siRNA sense strand
gaaugauccgcacaaauga

SEQ ID NO: 1724652 - RNA, 19 nt, Homo sapiens
  misc_RNA (1)...(19): siRNA sense strand
ugaaaggacagccuauuga

SEQ ID NO: 1724653 - RNA, 19 nt, Homo sapiens
  misc_RNA (1)...(19): siRNA sense strand
ccaacaaucacauggauga

SEQ ID NO: 1724654 - RNA, 19 nt, Homo sapiens
  misc_RNA (1)...(19): siRNA sense strand
gggagaauaugagccgaaa

SEQ ID NO: 1724655 - RNA, 19 nt, Homo sapiens
  misc_RNA (1)...(19): siRNA sense strand
gcaccuucauuauaagcaa

SEQ ID NO: 1724656 - RNA, 19 nt, Homo sapiens
  misc_RNA (1)...(19): siRNA sense strand
gaaacacauuaaagagagu

SEQ ID NO: 1724657 - RNA, 19 nt, Homo sapiens
  misc_RNA (1)...(19): siRNA sense strand
uggaagaaggcaugaguua

SEQ ID NO: 1724658 - RNA, 19 nt, Homo sapiens
  misc_RNA (1)...(19): siRNA sense strand
uaccaaagaccaagaaguu

SEQ ID NO: 1724659 - RNA, 19 nt, Homo sapiens
  misc_RNA (1)...(19): siRNA sense strand
guuaauggaguauugauga

SEQ ID NO: 1724660 - RNA, 19 nt, Homo sapiens
  misc_RNA (1)...(19): siRNA sense strand
ugaaugauacucaguuaga

SEQ ID NO: 1724661 - RNA, 19 nt, Homo sapiens
  misc_RNA (1)...(19): siRNA sense strand
gugcagagcugaaaacuca

SEQ ID NO: 1724662 - RNA, 19 nt, Homo sapiens
  misc_RNA (1)...(19): siRNA sense strand
ggaaauaccgaauguacag

SEQ ID NO: 1724663 - RNA, 19 nt, Homo sapiens
  misc_RNA (1)...(19): siRNA sense strand
gaauguaaggcuacuggaa

SEQ ID NO: 1724664 - RNA, 19 nt, Homo sapiens
  misc_RNA (1)...(19): siRNA sense strand
gggaacccgucauaccauu

SEQ ID NO: 1724665 - RNA, 19 nt, Homo sapiens
  misc_RNA (1)...(19): siRNA sense strand
acaggaagauacagcagaa

SEQ ID NO: 1724666 - RNA, 19 nt, Homo sapiens
  misc_RNA (1)...(19): siRNA sense strand
gguggaauaugaauuucga

SEQ ID NO: 1724667 - RNA, 19 nt, Homo sapiens
  misc_RNA (1)...(19): siRNA sense strand
gaguauugaugauccacaa

SEQ ID NO: 1724668 - RNA, 19 nt, Homo sapiens
  misc_RNA (1)...(19): siRNA sense strand
gcacugaaucaacugaaga

SEQ ID NO: 1724669 - RNA, 19 nt, Homo sapiens
  misc_RNA (1)...(19): siRNA sense strand
ucaccuugcucuuggcauu

SEQ ID NO: 1724670 - RNA, 19 nt, Homo sapiens
  misc_RNA (1)...(19): siRNA sense strand
gcagcaaggcucucagguu

SEQ ID NO: 1724671 - RNA, 19 nt, Homo sapiens
  misc_RNA (1)...(19): siRNA sense strand
gaaagacauggaacaggaa

SEQ ID NO: 1724672 - RNA, 19 nt, Homo sapiens
  misc_RNA (1)...(19): siRNA sense strand
cauggaaacacauuaaaga

SEQ ID NO: 1724673 - RNA, 19 nt, Homo sapiens
  misc_RNA (1)...(19): siRNA sense strand
ugaaaguuggcguuuauaa

SEQ ID NO: 1724674 - RNA, 19 nt, Homo sapiens
  misc_RNA (1)...(19): siRNA sense strand
gaacuuacuccuaaaagaa

SEQ ID NO: 1724675 - RNA, 19 nt, Homo sapiens
  misc_RNA (1)...(19): siRNA sense strand
agaccaagaaguugucaua

SEQ ID NO: 1724676 - RNA, 19 nt, Homo sapiens
  misc_RNA (1)...(19): siRNA sense strand
ggaugaagguuaaugguua

SEQ ID NO: 1724677 - RNA, 19 nt, Homo sapiens
  misc_RNA (1)...(19): siRNA sense strand
ggauagaacuuacuccuaa

SEQ ID NO: 1724678 - RNA, 19 nt, Homo sapiens
  misc_RNA (1)...(19): siRNA sense strand
gaaagugucccuccucuua

SEQ ID NO: 1724679 - RNA, 19 nt, Homo sapiens
  misc_RNA (1)...(19): siRNA sense strand
gauggcaccuucauuauaa

SEQ ID NO: 1724680 - RNA, 19 nt, Homo sapiens
  misc_RNA (1)...(19): siRNA sense strand
gcaauccaguucccaguua

SEQ ID NO: 1724681 - RNA, 19 nt, Homo sapiens
  misc_RNA (1)...(19): siRNA sense strand
gagaaagcauuguccuuaa

SEQ ID NO: 1724682 - RNA, 19 nt, Homo sapiens
  misc_RNA (1)...(19): siRNA sense strand
ggagaaagcauuguccuua

SEQ ID NO: 1724683 - RNA, 19 nt, Homo sapiens
  misc_RNA (1)...(19): siRNA sense strand
gccaguaucugaagaguuu

SEQ ID NO: 1724684 - RNA, 19 nt, Homo sapiens
  misc_RNA (1)...(19): siRNA sense strand
aaauagaucuggaaaguga

SEQ ID NO: 1724685 - RNA, 19 nt, Homo sapiens
  misc_RNA (1)...(19): siRNA sense strand
ggaaauacguuauaucacu

SEQ ID NO: 1724686 - RNA, 19 nt, Homo sapiens
  misc_RNA (1)...(19): siRNA sense strand
ucacauggaugaagguuaa

SEQ ID NO: 1724687 - RNA, 19 nt, Homo sapiens
  misc_RNA (1)...(19): siRNA sense strand
cagcaaggcucucagguuu

SEQ ID NO: 1724688 - RNA, 19 nt, Homo sapiens
  misc_RNA (1)...(19): siRNA sense strand
gcaagaaccagaugauauu

SEQ ID NO: 1724689 - RNA, 19 nt, Homo sapiens
  misc_RNA (1)...(19): siRNA sense strand
gauuaucgcuacaguuuga

SEQ ID NO: 1724690 - RNA, 19 nt, Homo sapiens
  misc_RNA (1)...(19): siRNA sense strand
acagcuaguucucaaauua

SEQ ID NO: 1724691 - RNA, 19 nt, Homo sapiens
  misc_RNA (1)...(19): siRNA sense strand
gauaguaauuguugaggaa

SEQ ID NO: 1724692 - RNA, 19 nt, Homo sapiens
  misc_RNA (1)...(19): siRNA sense strand
gauguuggcagcuauauuu

SEQ ID NO: 1724693 - RNA, 19 nt, Homo sapiens
  misc_RNA (1)...(19): siRNA sense strand
gaaaggagacagagcaguu

SEQ ID NO: 1724694 - RNA, 19 nt, Homo sapiens
  misc_RNA (1)...(19): siRNA sense strand
gauccuaaaugcuuccaaa

SEQ ID NO: 1724695 - RNA, 19 nt, Homo sapiens
  misc_RNA (1)...(19): siRNA sense strand
aaucugaaguuguggguua

SEQ ID NO: 1724696 - RNA, 19 nt, Homo sapiens
  misc_RNA (1)...(19): siRNA sense strand
gcaaaggauucuggucauu

SEQ ID NO: 1724697 - RNA, 19 nt, Homo sapiens
  misc_RNA (1)...(19): siRNA sense strand
gcuggagucuauauuauug

SEQ ID NO: 1724698 - RNA, 19 nt, Homo sapiens
  misc_RNA (1)...(19): siRNA sense strand
ccuaaaugcuuccaaauca

SEQ ID NO: 1724699 - RNA, 19 nt, Homo sapiens
  misc_RNA (1)...(19): siRNA sense strand
gguuacagcugcuaaagga

SEQ ID NO: 1724700 - RNA, 19 nt, Homo sapiens
  misc_RNA (1)...(19): siRNA sense strand
uaaagagagucuaggaaga

SEQ ID NO: 1724701 - RNA, 19 nt, Homo sapiens
  misc_RNA (1)...(19): siRNA sense strand
cgaaugauccgcacaaaug

SEQ ID NO: 1724702 - RNA, 19 nt, Homo sapiens
  misc_RNA (1)...(19): siRNA sense strand
gaaagcauuguccuuaauu

SEQ ID NO: 1724703 - RNA, 19 nt, Homo sapiens
  misc_RNA (1)...(19): siRNA sense strand
gaagaaggcaugaguuagu

SEQ ID NO: 1724704 - RNA, 19 nt, Homo sapiens
  misc_RNA (1)...(19): siRNA sense strand
caaaggauucuggucauua

SEQ ID NO: 1724705 - RNA, 19 nt, Homo sapiens
  misc_RNA (1)...(19): siRNA sense strand
ggaagaggguggacauuuu

SEQ ID NO: 1724706 - RNA, 19 nt, Homo sapiens
  misc_RNA (1)...(19): siRNA sense strand
gaagguagcauugaauugu

SEQ ID NO: 1724707 - RNA, 19 nt, Homo sapiens
  misc_RNA (1)...(19): siRNA sense strand
gaugcuggagucuauauua

SEQ ID NO: 1724708 - RNA, 19 nt, Homo sapiens
  misc_RNA (1)...(19): siRNA sense strand
acagaaacuucaagcagua

SEQ ID NO: 1724709 - RNA, 19 nt, Homo sapiens
  misc_RNA (1)...(19): siRNA sense strand
acacguggcuggaaggaaa

SEQ ID NO: 1724710 - RNA, 19 nt, Homo sapiens
  misc_RNA (1)...(19): siRNA sense strand
guaaagacagucccagaaa

SEQ ID NO: 1724711 - RNA, 19 nt, Homo sapiens
  misc_RNA (1)...(19): siRNA sense strand
gauagaacuuacuccuaaa

SEQ ID NO: 1724712 - RNA, 19 nt, Homo sapiens
  misc_RNA (1)...(19): siRNA sense strand
ucaaucagaugcuggaaug

SEQ ID NO: 1724713 - RNA, 19 nt, Homo sapiens
  misc_RNA (1)...(19): siRNA sense strand
agaaauagaucuggaaagu

SEQ ID NO: 1724714 - RNA, 19 nt, Homo sapiens
  misc_RNA (1)...(19): siRNA sense strand
gaugguuaauggaguauug

SEQ ID NO: 1724715 - RNA, 19 nt, Homo sapiens
  misc_RNA (1)...(19): siRNA sense strand
gaaauggaacagaaauaga

SEQ ID NO: 1724716 - RNA, 19 nt, Homo sapiens
  misc_RNA (1)...(19): siRNA sense strand
uaaagacagucccagaaau

SEQ ID NO: 1724717 - RNA, 19 nt, Homo sapiens
  misc_RNA (1)...(19): siRNA sense strand
ccaagaaguugucauagag

SEQ ID NO: 1724718 - RNA, 19 nt, Homo sapiens
  misc_RNA (1)...(19): siRNA sense strand
gugcugagcugaagauucu

SEQ ID NO: 1724719 - RNA, 19 nt, Homo sapiens
  misc_RNA (1)...(19): siRNA sense strand
gaagacagcacccaccaau

SEQ ID NO: 1724720 - RNA, 19 nt, Homo sapiens
  misc_RNA (1)...(19): siRNA sense strand
aaauuaggguaccaucaua

SEQ ID NO: 1724721 - RNA, 19 nt, Homo sapiens
  misc_RNA (1)...(19): siRNA sense strand
gacaagaagugcagucucu

SEQ ID NO: 1724722 - RNA, 19 nt, Homo sapiens
  misc_RNA (1)...(19): siRNA sense strand
agacagagcaguuagagaa

SEQ ID NO: 1724723 - RNA, 19 nt, Homo sapiens
  misc_RNA (1)...(19): siRNA sense strand
gaugaagguuaaugguuau

SEQ ID NO: 1724724 - RNA, 19 nt, Homo sapiens
  misc_RNA (1)...(19): siRNA sense strand
gaaguucgagcauauagug

SEQ ID NO: 1724725 - RNA, 19 nt, Homo sapiens
  misc_RNA (1)...(19): siRNA sense strand
uaacaggauuagaaggaaa

SEQ ID NO: 1724726 - RNA, 19 nt, Homo sapiens
  misc_RNA (1)...(19): siRNA sense strand
gaaaguacggccacacugu

SEQ ID NO: 1724727 - RNA, 19 nt, Homo sapiens
  misc_RNA (1)...(19): siRNA sense strand
ugagaugguuaauggagua

SEQ ID NO: 1724728 - RNA, 19 nt, Homo sapiens
  misc_RNA (1)...(19): siRNA sense strand
gugauuaucgcuacaguuu

SEQ ID NO: 1724729 - RNA, 19 nt, Homo sapiens
  misc_RNA (1)...(19): siRNA sense strand
acaggcaaccuuuauauuu

SEQ ID NO: 1724730 - RNA, 19 nt, Homo sapiens
  misc_RNA (1)...(19): siRNA sense strand
ggaguauucuuaguagaga

SEQ ID NO: 1724731 - RNA, 19 nt, Homo sapiens
  misc_RNA (1)...(19): siRNA sense strand
auagauggcaccuucauua

SEQ ID NO: 1724732 - RNA, 19 nt, Homo sapiens
  misc_RNA (1)...(19): siRNA sense strand
gacagucccagaaaucaua

SEQ ID NO: 1724733 - RNA, 19 nt, Homo sapiens
  misc_RNA (1)...(19): siRNA sense strand
gaaaggacagccuauugau

SEQ ID NO: 1724734 - RNA, 19 nt, Homo sapiens
  misc_RNA (1)...(19): siRNA sense strand
caggcaaccuuuauauuuc

SEQ ID NO: 1724735 - RNA, 19 nt, Homo sapiens
  misc_RNA (1)...(19): siRNA sense strand
aaaggauucuggucauuau

SEQ ID NO: 1724736 - RNA, 19 nt, Homo sapiens
  misc_RNA (1)...(19): siRNA sense strand
aaggacagccuauugauuu

SEQ ID NO: 1724737 - RNA, 19 nt, Homo sapiens
  misc_RNA (1)...(19): siRNA sense strand
ggagacaggcaaccuuuau

SEQ ID NO: 1724738 - RNA, 19 nt, Homo sapiens
  misc_RNA (1)...(19): siRNA sense strand
gaagcuacacugcaguuug

SEQ ID NO: 1724739 - RNA, 19 nt, Homo sapiens
  misc_RNA (1)...(19): siRNA sense strand
gaaacuucaagcaguagua

SEQ ID NO: 1724740 - RNA, 19 nt, Homo sapiens
  misc_RNA (1)...(19): siRNA sense strand
gcaaggcucucagguuucu

SEQ ID NO: 1724741 - RNA, 19 nt, Homo sapiens
  misc_RNA (1)...(19): siRNA sense strand
caagaaccagaugauauua

SEQ ID NO: 1724742 - RNA, 19 nt, Homo sapiens
  misc_RNA (1)...(19): siRNA sense strand
gaggaaauaaccgaaagua

SEQ ID NO: 1724743 - RNA, 19 nt, Homo sapiens
  misc_RNA (1)...(19): siRNA sense strand
gcauuguccuuaauugcaa

SEQ ID NO: 1724744 - RNA, 19 nt, Homo sapiens
  misc_RNA (1)...(19): siRNA sense strand
aaaagaaccuacaaggaua

SEQ ID NO: 1724745 - RNA, 19 nt, Homo sapiens
  misc_RNA (1)...(19): siRNA sense strand
gagacaggcaaccuuuaua

SEQ ID NO: 1724746 - RNA, 19 nt, Homo sapiens
  misc_RNA (1)...(19): siRNA sense strand
gaaagugauuaucgcuaca

SEQ ID NO: 1724747 - RNA, 19 nt, Homo sapiens
  misc_RNA (1)...(19): siRNA sense strand
ggguugagaugguuaaugg

SEQ ID NO: 1724748 - RNA, 19 nt, Homo sapiens
  misc_RNA (1)...(19): siRNA sense strand
uauaagcaauccaagugaa

SEQ ID NO: 1724749 - RNA, 19 nt, Homo sapiens
  misc_RNA (1)...(19): siRNA sense strand
caacagccaaguuauugaa

SEQ ID NO: 1724750 - RNA, 19 nt, Homo sapiens
  misc_RNA (1)...(19): siRNA sense strand
gaagugaaaguuggcguuu

SEQ ID NO: 1724751 - RNA, 19 nt, Homo sapiens
  misc_RNA (1)...(19): siRNA sense strand
gaaugauccgcacaaauga

SEQ ID NO: 1724752 - RNA, 19 nt, Homo sapiens
  misc_RNA (1)...(19): siRNA sense strand
ugaaaggacagccuauuga

SEQ ID NO: 1724753 - RNA, 19 nt, Homo sapiens
  misc_RNA (1)...(19): siRNA sense strand
ccaacaaucacauggauga

SEQ ID NO: 1724754 - RNA, 19 nt, Homo sapiens
  misc_RNA (1)...(19): siRNA sense strand
gggagaauaugagccgaaa

SEQ ID NO: 1724755 - RNA, 19 nt, Homo sapiens
  misc_RNA (1)...(19): siRNA sense strand
gcaccuucauuauaagcaa

SEQ ID NO: 1724756 - RNA, 19 nt, Homo sapiens
  misc_RNA (1)...(19): siRNA sense strand
gaaacacauuaaagagagu

SEQ ID NO: 1724757 - RNA, 19 nt, Homo sapiens
  misc_RNA (1)...(19): siRNA sense strand
uggaagaaggcaugaguua

SEQ ID NO: 1724758 - RNA, 19 nt, Homo sapiens
  misc_RNA (1)...(19): siRNA sense strand
uaccaaagaccaagaaguu

SEQ ID NO: 1724759 - RNA, 19 nt, Homo sapiens
  misc_RNA (1)...(19): siRNA sense strand
guuaauggaguauugauga

SEQ ID NO: 1724760 - RNA, 19 nt, Homo sapiens
  misc_RNA (1)...(19): siRNA sense strand
ugaaugauacucaguuaga

SEQ ID NO: 1724761 - RNA, 19 nt, Homo sapiens
  misc_RNA (1)...(19): siRNA sense strand
gugcagagcugaaaacuca

SEQ ID NO: 1724762 - RNA, 19 nt, Homo sapiens
  misc_RNA (1)...(19): siRNA sense strand
ggaaauaccgaauguacag

SEQ ID NO: 1724763 - RNA, 19 nt, Homo sapiens
  misc_RNA (1)...(19): siRNA sense strand
gaauguaaggcuacuggaa

SEQ ID NO: 1724764 - RNA, 19 nt, Homo sapiens
  misc_RNA (1)...(19): siRNA sense strand
gggaacccgucauaccauu

SEQ ID NO: 1724765 - RNA, 19 nt, Homo sapiens
  misc_RNA (1)...(19): siRNA sense strand
acaggaagauacagcagaa

SEQ ID NO: 1724766 - RNA, 19 nt, Homo sapiens
  misc_RNA (1)...(19): siRNA sense strand
gguggaauaugaauuucga

SEQ ID NO: 1724767 - RNA, 19 nt, Homo sapiens
  misc_RNA (1)...(19): siRNA sense strand
gaguauugaugauccacaa

SEQ ID NO: 1724768 - RNA, 19 nt, Homo sapiens
  misc_RNA (1)...(19): siRNA sense strand
gcacugaaucaacugaaga

SEQ ID NO: 1724769 - RNA, 19 nt, Homo sapiens
  misc_RNA (1)...(19): siRNA sense strand
ucaccuugcucuuggcauu

SEQ ID NO: 1724770 - RNA, 19 nt, Homo sapiens
  misc_RNA (1)...(19): siRNA sense strand
gcagcaaggcucucagguu

SEQ ID NO: 1724771 - RNA, 19 nt, Homo sapiens
  misc_RNA (1)...(19): siRNA sense strand
gaaagacauggaacaggaa

SEQ ID NO: 1724772 - RNA, 19 nt, Homo sapiens
  misc_RNA (1)...(19): siRNA sense strand
cauggaaacacauuaaaga

SEQ ID NO: 1724773 - RNA, 19 nt, Homo sapiens
  misc_RNA (1)...(19): siRNA sense strand
ugaaaguuggcguuuauaa

SEQ ID NO: 1724774 - RNA, 19 nt, Homo sapiens
  misc_RNA (1)...(19): siRNA sense strand
gaacuuacuccuaaaagaa

SEQ ID NO: 1724775 - RNA, 19 nt, Homo sapiens
  misc_RNA (1)...(19): siRNA sense strand
agaccaagaaguugucaua

SEQ ID NO: 1724776 - RNA, 19 nt, Homo sapiens
  misc_RNA (1)...(19): siRNA sense strand
gguaggaagucacggaaua

SEQ ID NO: 1724777 - RNA, 19 nt, Homo sapiens
  misc_RNA (1)...(19): siRNA sense strand
ggaaauaugccuggaagua

SEQ ID NO: 1724778 - RNA, 19 nt, Homo sapiens
  misc_RNA (1)...(19): siRNA sense strand
ccaagaggauuauucuauu

SEQ ID NO: 1724779 - RNA, 19 nt, Homo sapiens
  misc_RNA (1)...(19): siRNA sense strand
gaggacacguuucugcuuu

SEQ ID NO: 1724780 - RNA, 19 nt, Homo sapiens
  misc_RNA (1)...(19): siRNA sense strand
guaacaaaguucacauuca

SEQ ID NO: 1724781 - RNA, 19 nt, Homo sapiens
  misc_RNA (1)...(19): siRNA sense strand
aaacaacccagaagaaauu

SEQ ID NO: 1724782 - RNA, 19 nt, Homo sapiens
  misc_RNA (1)...(19): siRNA sense strand
uguaguaucugcauuccua

SEQ ID NO: 1724783 - RNA, 19 nt, Homo sapiens
  misc_RNA (1)...(19): siRNA sense strand
gucagggucugguguagua

SEQ ID NO: 1724784 - RNA, 19 nt, Homo sapiens
  misc_RNA (1)...(19): siRNA sense strand
ccacugcacuuuccagaca

SEQ ID NO: 1724785 - RNA, 19 nt, Homo sapiens
  misc_RNA (1)...(19): siRNA sense strand
gaaauaugccuggaaguag

SEQ ID NO: 1724786 - RNA, 19 nt, Homo sapiens
  misc_RNA (1)...(19): siRNA sense strand
gcaaggaaccacugcacuu

SEQ ID NO: 1724787 - RNA, 19 nt, Homo sapiens
  misc_RNA (1)...(19): siRNA sense strand
gauaggcccucaggcuuug

SEQ ID NO: 1724788 - RNA, 19 nt, Homo sapiens
  misc_RNA (1)...(19): siRNA sense strand
gaaaacaacccagaagaaa

SEQ ID NO: 1724789 - RNA, 19 nt, Homo sapiens
  misc_RNA (1)...(19): siRNA sense strand
ucaaguucaccaagucuua

SEQ ID NO: 1724790 - RNA, 19 nt, Homo sapiens
  misc_RNA (1)...(19): siRNA sense strand
caaggaaccacugcacuuu

SEQ ID NO: 1724791 - RNA, 19 nt, Homo sapiens
  misc_RNA (1)...(19): siRNA sense strand
gggaagucauggacagguu

SEQ ID NO: 1724792 - RNA, 19 nt, Homo sapiens
  misc_RNA (1)...(19): siRNA sense strand
guucacauucaaccaguua

SEQ ID NO: 1724793 - RNA, 19 nt, Homo sapiens
  misc_RNA (1)...(19): siRNA sense strand
cagacaagcaggccaagaa

SEQ ID NO: 1724794 - RNA, 19 nt, Homo sapiens
  misc_RNA (1)...(19): siRNA sense strand
ccagaucuccuuucaccaa

SEQ ID NO: 1724795 - RNA, 19 nt, Homo sapiens
  misc_RNA (1)...(19): siRNA sense strand
ggaagucauggacagguuu

SEQ ID NO: 1724796 - RNA, 19 nt, Homo sapiens
  misc_RNA (1)...(19): siRNA sense strand
cacauucaaccaguuauua

SEQ ID NO: 1724797 - RNA, 19 nt, Homo sapiens
  misc_RNA (1)...(19): siRNA sense strand
gaaauggucgggaagucau

SEQ ID NO: 1724798 - RNA, 19 nt, Homo sapiens
  misc_RNA (1)...(19): siRNA sense strand
auuccuagccucuaugaua

SEQ ID NO: 1724799 - RNA, 19 nt, Homo sapiens
  misc_RNA (1)...(19): siRNA sense strand
uggcaggaguggaaauaug

SEQ ID NO: 1724800 - RNA, 19 nt, Homo sapiens
  misc_RNA (1)...(19): siRNA sense strand
ggaggacacguuucugcuu

SEQ ID NO: 1724801 - RNA, 19 nt, Homo sapiens
  misc_RNA (1)...(19): siRNA sense strand
gaacuggcaggaguggaaa

SEQ ID NO: 1724802 - RNA, 19 nt, Homo sapiens
  misc_RNA (1)...(19): siRNA sense strand
ugauaggcccucaggcuuu

SEQ ID NO: 1724803 - RNA, 19 nt, Homo sapiens
  misc_RNA (1)...(19): siRNA sense strand
gacaaaaggucugcaagga

SEQ ID NO: 1724804 - RNA, 19 nt, Homo sapiens
  misc_RNA (1)...(19): siRNA sense strand
caugugcacugauaucaac

SEQ ID NO: 1724805 - RNA, 19 nt, Homo sapiens
  misc_RNA (1)...(19): siRNA sense strand
ccucaggcuuuguacaugu

SEQ ID NO: 1724806 - RNA, 19 nt, Homo sapiens
  misc_RNA (1)...(19): siRNA sense strand
guacaugugcacugauauc

SEQ ID NO: 1724807 - RNA, 19 nt, Homo sapiens
  misc_RNA (1)...(19): siRNA sense strand
uuguacaugugcacugaua

SEQ ID NO: 1724808 - RNA, 19 nt, Homo sapiens
  misc_RNA (1)...(19): siRNA sense strand
cgaacuggcaggaguggaa

SEQ ID NO: 1724809 - RNA, 19 nt, Homo sapiens
  misc_RNA (1)...(19): siRNA sense strand
caaccaguuauuacagauu

SEQ ID NO: 1724810 - RNA, 19 nt, Homo sapiens
  misc_RNA (1)...(19): siRNA sense strand
gaucuccuuucaccaagag

SEQ ID NO: 1724811 - RNA, 19 nt, Homo sapiens
  misc_RNA (1)...(19): siRNA sense strand
gguuccagaucuccuuuca

SEQ ID NO: 1724812 - RNA, 19 nt, Homo sapiens
  misc_RNA (1)...(19): siRNA sense strand
ucacauucaaccaguuauu

SEQ ID NO: 1724813 - RNA, 19 nt, Homo sapiens
  misc_RNA (1)...(19): siRNA sense strand
agacaagcaggccaagaaa

SEQ ID NO: 1724814 - RNA, 19 nt, Homo sapiens
  misc_RNA (1)...(19): siRNA sense strand
gcauuccuagccucuauga

SEQ ID NO: 1724815 - RNA, 19 nt, Homo sapiens
  misc_RNA (1)...(19): siRNA sense strand
ucaaccaguuauuacagau

SEQ ID NO: 1724816 - RNA, 19 nt, Homo sapiens
  misc_RNA (1)...(19): siRNA sense strand
gcagaaauggucgggaagu

SEQ ID NO: 1724817 - RNA, 19 nt, Homo sapiens
  misc_RNA (1)...(19): siRNA sense strand
cagaaauggucgggaaguc

SEQ ID NO: 1724818 - RNA, 19 nt, Homo sapiens
  misc_RNA (1)...(19): siRNA sense strand
cugcauuccuagccucuau

SEQ ID NO: 1724819 - RNA, 19 nt, Homo sapiens
  misc_RNA (1)...(19): siRNA sense strand
accaagaggauuauucuau

SEQ ID NO: 1724820 - RNA, 19 nt, Homo sapiens
  misc_RNA (1)...(19): siRNA sense strand
ucaccaagaggauuauucu

SEQ ID NO: 1724821 - RNA, 19 nt, Homo sapiens
  misc_RNA (1)...(19): siRNA sense strand
guaggaagucacggaauag

SEQ ID NO: 1724822 - RNA, 19 nt, Homo sapiens
  misc_RNA (1)...(19): siRNA sense strand
guccucaaguucaccaagu

SEQ ID NO: 1724823 - RNA, 19 nt, Homo sapiens
  misc_RNA (1)...(19): siRNA sense strand
ggacacguuucugcuuuug

SEQ ID NO: 1724824 - RNA, 19 nt, Homo sapiens
  misc_RNA (1)...(19): siRNA sense strand
uguaacaaaguucacauuc

SEQ ID NO: 1724825 - RNA, 19 nt, Homo sapiens
  misc_RNA (1)...(19): siRNA sense strand
ccuuucaccaagaggauua

SEQ ID NO: 1724826 - RNA, 19 nt, Homo sapiens
  misc_RNA (1)...(19): siRNA sense strand
acaagcaggccaagaaacu

SEQ ID NO: 1724827 - RNA, 19 nt, Homo sapiens
  misc_RNA (1)...(19): siRNA sense strand
gguaggaagucacggaaua

SEQ ID NO: 1724828 - RNA, 19 nt, Homo sapiens
  misc_RNA (1)...(19): siRNA sense strand
ggaaauaugccuggaagua

SEQ ID NO: 1724829 - RNA, 19 nt, Homo sapiens
  misc_RNA (1)...(19): siRNA sense strand
ccaagaggauuauucuauu

SEQ ID NO: 1724830 - RNA, 19 nt, Homo sapiens
  misc_RNA (1)...(19): siRNA sense strand
gaggacacguuucugcuuu

SEQ ID NO: 1724831 - RNA, 19 nt, Homo sapiens
  misc_RNA (1)...(19): siRNA sense strand
guaacaaaguucacauuca

SEQ ID NO: 1724832 - RNA, 19 nt, Homo sapiens
  misc_RNA (1)...(19): siRNA sense strand
aaacaacccagaagaaauu

SEQ ID NO: 1724833 - RNA, 19 nt, Homo sapiens
  misc_RNA (1)...(19): siRNA sense strand
uguaguaucugcauuccua

SEQ ID NO: 1724834 - RNA, 19 nt, Homo sapiens
  misc_RNA (1)...(19): siRNA sense strand
gucagggucugguguagua

SEQ ID NO: 1724835 - RNA, 19 nt, Homo sapiens
  misc_RNA (1)...(19): siRNA sense strand
ccacugcacuuuccagaca

SEQ ID NO: 1724836 - RNA, 19 nt, Homo sapiens
  misc_RNA (1)...(19): siRNA sense strand
gaaauaugccuggaaguag

SEQ ID NO: 1724837 - RNA, 19 nt, Homo sapiens
  misc_RNA (1)...(19): siRNA sense strand
gcaaggaaccacugcacuu

SEQ ID NO: 1724838 - RNA, 19 nt, Homo sapiens
  misc_RNA (1)...(19): siRNA sense strand
gauaggcccucaggcuuug

SEQ ID NO: 1724839 - RNA, 19 nt, Homo sapiens
  misc_RNA (1)...(19): siRNA sense strand
gaaaacaacccagaagaaa

SEQ ID NO: 1724840 - RNA, 19 nt, Homo sapiens
  misc_RNA (1)...(19): siRNA sense strand
ucaaguucaccaagucuua

SEQ ID NO: 1724841 - RNA, 19 nt, Homo sapiens
  misc_RNA (1)...(19): siRNA sense strand
caaggaaccacugcacuuu

SEQ ID NO: 1724842 - RNA, 19 nt, Homo sapiens
  misc_RNA (1)...(19): siRNA sense strand
gggaagucauggacagguu

SEQ ID NO: 1724843 - RNA, 19 nt, Homo sapiens
  misc_RNA (1)...(19): siRNA sense strand
guucacauucaaccaguua

SEQ ID NO: 1724844 - RNA, 19 nt, Homo sapiens
  misc_RNA (1)...(19): siRNA sense strand
cagacaagcaggccaagaa

SEQ ID NO: 1724845 - RNA, 19 nt, Homo sapiens
  misc_RNA (1)...(19): siRNA sense strand
ccagaucuccuuucaccaa

SEQ ID NO: 1724846 - RNA, 19 nt, Homo sapiens
  misc_RNA (1)...(19): siRNA sense strand
ggaagucauggacagguuu

SEQ ID NO: 1724847 - RNA, 19 nt, Homo sapiens
  misc_RNA (1)...(19): siRNA sense strand
cacauucaaccaguuauua

SEQ ID NO: 1724848 - RNA, 19 nt, Homo sapiens
  misc_RNA (1)...(19): siRNA sense strand
gaaauggucgggaagucau

SEQ ID NO: 1724849 - RNA, 19 nt, Homo sapiens
  misc_RNA (1)...(19): siRNA sense strand
auuccuagccucuaugaua

SEQ ID NO: 1724850 - RNA, 19 nt, Homo sapiens
  misc_RNA (1)...(19): siRNA sense strand
uggcaggaguggaaauaug

SEQ ID NO: 1724851 - RNA, 19 nt, Homo sapiens
  misc_RNA (1)...(19): siRNA sense strand
ggaggacacguuucugcuu

SEQ ID NO: 1724852 - RNA, 19 nt, Homo sapiens
  misc_RNA (1)...(19): siRNA sense strand
gaacuggcaggaguggaaa

SEQ ID NO: 1724853 - RNA, 19 nt, Homo sapiens
  misc_RNA (1)...(19): siRNA sense strand
ugauaggcccucaggcuuu

SEQ ID NO: 1724854 - RNA, 19 nt, Homo sapiens
  misc_RNA (1)...(19): siRNA sense strand
gacaaaaggucugcaagga

SEQ ID NO: 1724855 - RNA, 19 nt, Homo sapiens
  misc_RNA (1)...(19): siRNA sense strand
caugugcacugauaucaac

SEQ ID NO: 1724856 - RNA, 19 nt, Homo sapiens
  misc_RNA (1)...(19): siRNA sense strand
ccucaggcuuuguacaugu

SEQ ID NO: 1724857 - RNA, 19 nt, Homo sapiens
  misc_RNA (1)...(19): siRNA sense strand
guacaugugcacugauauc

SEQ ID NO: 1724858 - RNA, 19 nt, Homo sapiens
  misc_RNA (1)...(19): siRNA sense strand
uuguacaugugcacugaua

SEQ ID NO: 1724859 - RNA, 19 nt, Homo sapiens
  misc_RNA (1)...(19): siRNA sense strand
cgaacuggcaggaguggaa

SEQ ID NO: 1724860 - RNA, 19 nt, Homo sapiens
  misc_RNA (1)...(19): siRNA sense strand
caaccaguuauuacagauu

SEQ ID NO: 1724861 - RNA, 19 nt, Homo sapiens
  misc_RNA (1)...(19): siRNA sense strand
gaucuccuuucaccaagag

SEQ ID NO: 1724862 - RNA, 19 nt, Homo sapiens
  misc_RNA (1)...(19): siRNA sense strand
gguuccagaucuccuuuca

SEQ ID NO: 1724863 - RNA, 19 nt, Homo sapiens
  misc_RNA (1)...(19): siRNA sense strand
ucacauucaaccaguuauu

SEQ ID NO: 1724864 - RNA, 19 nt, Homo sapiens
  misc_RNA (1)...(19): siRNA sense strand
agacaagcaggccaagaaa

SEQ ID NO: 1724865 - RNA, 19 nt, Homo sapiens
  misc_RNA (1)...(19): siRNA sense strand
gcauuccuagccucuauga

SEQ ID NO: 1724866 - RNA, 19 nt, Homo sapiens
  misc_RNA (1)...(19): siRNA sense strand
ucaaccaguuauuacagau

SEQ ID NO: 1724867 - RNA, 19 nt, Homo sapiens
  misc_RNA (1)...(19): siRNA sense strand
gcagaaauggucgggaagu

SEQ ID NO: 1724868 - RNA, 19 nt, Homo sapiens
  misc_RNA (1)...(19): siRNA sense strand
cagaaauggucgggaaguc

SEQ ID NO: 1724869 - RNA, 19 nt, Homo sapiens
  misc_RNA (1)...(19): siRNA sense strand
cugcauuccuagccucuau

SEQ ID NO: 1724870 - RNA, 19 nt, Homo sapiens
  misc_RNA (1)...(19): siRNA sense strand
accaagaggauuauucuau

SEQ ID NO: 1724871 - RNA, 19 nt, Homo sapiens
  misc_RNA (1)...(19): siRNA sense strand
ucaccaagaggauuauucu

SEQ ID NO: 1724872 - RNA, 19 nt, Homo sapiens
  misc_RNA (1)...(19): siRNA sense strand
guaggaagucacggaauag

SEQ ID NO: 1724873 - RNA, 19 nt, Homo sapiens
  misc_RNA (1)...(19): siRNA sense strand
guccucaaguucaccaagu

SEQ ID NO: 1724874 - RNA, 19 nt, Homo sapiens
  misc_RNA (1)...(19): siRNA sense strand
ggacacguuucugcuuuug

SEQ ID NO: 1724875 - RNA, 19 nt, Homo sapiens
  misc_RNA (1)...(19): siRNA sense strand
uguaacaaaguucacauuc

SEQ ID NO: 1724876 - RNA, 19 nt, Homo sapiens
  misc_RNA (1)...(19): siRNA sense strand
ccuuucaccaagaggauua

SEQ ID NO: 1724877 - RNA, 19 nt, Homo sapiens
  misc_RNA (1)...(19): siRNA sense strand
acaagcaggccaagaaacu

SEQ ID NO: 1724878 - RNA, 19 nt, Homo sapiens
  misc_RNA (1)...(19): siRNA sense strand
gaacaaaccuagugggaua

SEQ ID NO: 1724879 - RNA, 19 nt, Homo sapiens
  misc_RNA (1)...(19): siRNA sense strand
gagagaagcuggaagaaau

SEQ ID NO: 1724880 - RNA, 19 nt, Homo sapiens
  misc_RNA (1)...(19): siRNA sense strand
ccacagaaaugaacaagaa

SEQ ID NO: 1724881 - RNA, 19 nt, Homo sapiens
  misc_RNA (1)...(19): siRNA sense strand
gagaagaacaugcuaaauu

SEQ ID NO: 1724882 - RNA, 19 nt, Homo sapiens
  misc_RNA (1)...(19): siRNA sense strand
gcacgcagacugugaauuu

SEQ ID NO: 1724883 - RNA, 19 nt, Homo sapiens
  misc_RNA (1)...(19): siRNA sense strand
ugaguaaucugguuguuaa

SEQ ID NO: 1724884 - RNA, 19 nt, Homo sapiens
  misc_RNA (1)...(19): siRNA sense strand
ggacuuaacagaugaagaa

SEQ ID NO: 1724885 - RNA, 19 nt, Homo sapiens
  misc_RNA (1)...(19): siRNA sense strand
gagaacaacuugccuaucu

SEQ ID NO: 1724886 - RNA, 19 nt, Homo sapiens
  misc_RNA (1)...(19): siRNA sense strand
gaacggcugugccaagaug

SEQ ID NO: 1724887 - RNA, 19 nt, Homo sapiens
  misc_RNA (1)...(19): siRNA sense strand
caaacagcauuaagaagaa

SEQ ID NO: 1724888 - RNA, 19 nt, Homo sapiens
  misc_RNA (1)...(19): siRNA sense strand
cagaaggucuuaauuaugg

SEQ ID NO: 1724889 - RNA, 19 nt, Homo sapiens
  misc_RNA (1)...(19): siRNA sense strand
gaacgggacggaaugcuaa

SEQ ID NO: 1724890 - RNA, 19 nt, Homo sapiens
  misc_RNA (1)...(19): siRNA sense strand
gaggagguguguuuaucua

SEQ ID NO: 1724891 - RNA, 19 nt, Homo sapiens
  misc_RNA (1)...(19): siRNA sense strand
gaggagaguucagagaauu

SEQ ID NO: 1724892 - RNA, 19 nt, Homo sapiens
  misc_RNA (1)...(19): siRNA sense strand
ccucagaaggucuuaauua

SEQ ID NO: 1724893 - RNA, 19 nt, Homo sapiens
  misc_RNA (1)...(19): siRNA sense strand
ccaaacagcauuaagaaga

SEQ ID NO: 1724894 - RNA, 19 nt, Homo sapiens
  misc_RNA (1)...(19): siRNA sense strand
ucagugagcagcaugaaua

SEQ ID NO: 1724895 - RNA, 19 nt, Homo sapiens
  misc_RNA (1)...(19): siRNA sense strand
gaggacgaauuccaaagaa

SEQ ID NO: 1724896 - RNA, 19 nt, Homo sapiens
  misc_RNA (1)...(19): siRNA sense strand
aaagacugguccaaagaua

SEQ ID NO: 1724897 - RNA, 19 nt, Homo sapiens
  misc_RNA (1)...(19): siRNA sense strand
gcacaaacuugaucaucca

SEQ ID NO: 1724898 - RNA, 19 nt, Homo sapiens
  misc_RNA (1)...(19): siRNA sense strand
cuuaacagaugaagaagaa

SEQ ID NO: 1724899 - RNA, 19 nt, Homo sapiens
  misc_RNA (1)...(19): siRNA sense strand
acaagaagcucagcgcaaa

SEQ ID NO: 1724900 - RNA, 19 nt, Homo sapiens
  misc_RNA (1)...(19): siRNA sense strand
gaaaacgaaugaagaguug

SEQ ID NO: 1724901 - RNA, 19 nt, Homo sapiens
  misc_RNA (1)...(19): siRNA sense strand
caacuugccuaucuggaau

SEQ ID NO: 1724902 - RNA, 19 nt, Homo sapiens
  misc_RNA (1)...(19): siRNA sense strand
ggauuguaauucagaagaa

SEQ ID NO: 1724903 - RNA, 19 nt, Homo sapiens
  misc_RNA (1)...(19): siRNA sense strand
gaacaugcuaaauuucuga

SEQ ID NO: 1724904 - RNA, 19 nt, Homo sapiens
  misc_RNA (1)...(19): siRNA sense strand
agaagaggcugaugaugga

SEQ ID NO: 1724905 - RNA, 19 nt, Homo sapiens
  misc_RNA (1)...(19): siRNA sense strand
gcaaaugaaggccuuacaa

SEQ ID NO: 1724906 - RNA, 19 nt, Homo sapiens
  misc_RNA (1)...(19): siRNA sense strand
ucuggaaucugaggaauuu

SEQ ID NO: 1724907 - RNA, 19 nt, Homo sapiens
  misc_RNA (1)...(19): siRNA sense strand
agaaggaaaucagaagaaa

SEQ ID NO: 1724908 - RNA, 19 nt, Homo sapiens
  misc_RNA (1)...(19): siRNA sense strand
gagaggagaguucagagaa

SEQ ID NO: 1724909 - RNA, 19 nt, Homo sapiens
  misc_RNA (1)...(19): siRNA sense strand
gagaaggaaaucagaagaa

SEQ ID NO: 1724910 - RNA, 19 nt, Homo sapiens
  misc_RNA (1)...(19): siRNA sense strand
guucagaggagguguguuu

SEQ ID NO: 1724911 - RNA, 19 nt, Homo sapiens
  misc_RNA (1)...(19): siRNA sense strand
agaaauagauugggugaca

SEQ ID NO: 1724912 - RNA, 19 nt, Homo sapiens
  misc_RNA (1)...(19): siRNA sense strand
cgaguauccuccacagaaa

SEQ ID NO: 1724913 - RNA, 19 nt, Homo sapiens
  misc_RNA (1)...(19): siRNA sense strand
guaaagccaagaagaagaa

SEQ ID NO: 1724914 - RNA, 19 nt, Homo sapiens
  misc_RNA (1)...(19): siRNA sense strand
agaagaaguucccgcauca

SEQ ID NO: 1724915 - RNA, 19 nt, Homo sapiens
  misc_RNA (1)...(19): siRNA sense strand
cugcagagcucaagugaag

SEQ ID NO: 1724916 - RNA, 19 nt, Homo sapiens
  misc_RNA (1)...(19): siRNA sense strand
gaaaucagaagaaauacag

SEQ ID NO: 1724917 - RNA, 19 nt, Homo sapiens
  misc_RNA (1)...(19): siRNA sense strand
ggagguguguuuaucuauc

SEQ ID NO: 1724918 - RNA, 19 nt, Homo sapiens
  misc_RNA (1)...(19): siRNA sense strand
gcauauggaaacugaauga

SEQ ID NO: 1724919 - RNA, 19 nt, Homo sapiens
  misc_RNA (1)...(19): siRNA sense strand
gaaacugaaugaucuucgu

SEQ ID NO: 1724920 - RNA, 19 nt, Homo sapiens
  misc_RNA (1)...(19): siRNA sense strand
gaagaacaugcuaaauuuc

SEQ ID NO: 1724921 - RNA, 19 nt, Homo sapiens
  misc_RNA (1)...(19): siRNA sense strand
gagaugaggagaaggaaau

SEQ ID NO: 1724922 - RNA, 19 nt, Homo sapiens
  misc_RNA (1)...(19): siRNA sense strand
ggaggacgaauuccaaaga

SEQ ID NO: 1724923 - RNA, 19 nt, Homo sapiens
  misc_RNA (1)...(19): siRNA sense strand
gcagagcucaagugaaguu

SEQ ID NO: 1724924 - RNA, 19 nt, Homo sapiens
  misc_RNA (1)...(19): siRNA sense strand
ggagaaacucuguuaccaa

SEQ ID NO: 1724925 - RNA, 19 nt, Homo sapiens
  misc_RNA (1)...(19): siRNA sense strand
ggaaaagacugguccaaag

SEQ ID NO: 1724926 - RNA, 19 nt, Homo sapiens
  misc_RNA (1)...(19): siRNA sense strand
uauggaaacugaaugaucu

SEQ ID NO: 1724927 - RNA, 19 nt, Homo sapiens
  misc_RNA (1)...(19): siRNA sense strand
ggaacgggacggaaugcua

SEQ ID NO: 1724928 - RNA, 19 nt, Homo sapiens
  misc_RNA (1)...(19): siRNA sense strand
cggugaaucuuauacagaa

SEQ ID NO: 1724929 - RNA, 19 nt, Homo sapiens
  misc_RNA (1)...(19): siRNA sense strand
cgaacaagcacugcaguaa

SEQ ID NO: 1724930 - RNA, 19 nt, Homo sapiens
  misc_RNA (1)...(19): siRNA sense strand
gaaggaaaucagaagaaau

SEQ ID NO: 1724931 - RNA, 19 nt, Homo sapiens
  misc_RNA (1)...(19): siRNA sense strand
gcaagaggaauuaaggaau

SEQ ID NO: 1724932 - RNA, 19 nt, Homo sapiens
  misc_RNA (1)...(19): siRNA sense strand
cucagaaggucuuaauuau

SEQ ID NO: 1724933 - RNA, 19 nt, Homo sapiens
  misc_RNA (1)...(19): siRNA sense strand
gcugcuaucaccaaauuaa

SEQ ID NO: 1724934 - RNA, 19 nt, Homo sapiens
  misc_RNA (1)...(19): siRNA sense strand
cagcggauguuggagauga

SEQ ID NO: 1724935 - RNA, 19 nt, Homo sapiens
  misc_RNA (1)...(19): siRNA sense strand
caacagaagcagcggaugu

SEQ ID NO: 1724936 - RNA, 19 nt, Homo sapiens
  misc_RNA (1)...(19): siRNA sense strand
gacgauuucucggaacaaa

SEQ ID NO: 1724937 - RNA, 19 nt, Homo sapiens
  misc_RNA (1)...(19): siRNA sense strand
ggacggaaugcuaaaggaa

SEQ ID NO: 1724938 - RNA, 19 nt, Homo sapiens
  misc_RNA (1)...(19): siRNA sense strand
gaccaaaacugagugcuuu

SEQ ID NO: 1724939 - RNA, 19 nt, Homo sapiens
  misc_RNA (1)...(19): siRNA sense strand
ggagaaggaaaucagaaga

SEQ ID NO: 1724940 - RNA, 19 nt, Homo sapiens
  misc_RNA (1)...(19): siRNA sense strand
ccucagcacucuugaagca

SEQ ID NO: 1724941 - RNA, 19 nt, Homo sapiens
  misc_RNA (1)...(19): siRNA sense strand
guuaagggcacaaacuuga

SEQ ID NO: 1724942 - RNA, 19 nt, Homo sapiens
  misc_RNA (1)...(19): siRNA sense strand
ggacgaauuccaaagaagu

SEQ ID NO: 1724943 - RNA, 19 nt, Homo sapiens
  misc_RNA (1)...(19): siRNA sense strand
gaauucaggagucaacaug

SEQ ID NO: 1724944 - RNA, 19 nt, Homo sapiens
  misc_RNA (1)...(19): siRNA sense strand
uaacuguggccucuacaaa

SEQ ID NO: 1724945 - RNA, 19 nt, Homo sapiens
  misc_RNA (1)...(19): siRNA sense strand
ugaccgcacugcuggaaga

SEQ ID NO: 1724946 - RNA, 19 nt, Homo sapiens
  misc_RNA (1)...(19): siRNA sense strand
gaaauagauugggugacau

SEQ ID NO: 1724947 - RNA, 19 nt, Homo sapiens
  misc_RNA (1)...(19): siRNA sense strand
gaagcuggaagaaauagau

SEQ ID NO: 1724948 - RNA, 19 nt, Homo sapiens
  misc_RNA (1)...(19): siRNA sense strand
gaggagaagaacaugcuaa

SEQ ID NO: 1724949 - RNA, 19 nt, Homo sapiens
  misc_RNA (1)...(19): siRNA sense strand
gaacaagcacugcaguaac

SEQ ID NO: 1724950 - RNA, 19 nt, Homo sapiens
  misc_RNA (1)...(19): siRNA sense strand
cagaggagguguguuuauc

SEQ ID NO: 1724951 - RNA, 19 nt, Homo sapiens
  misc_RNA (1)...(19): siRNA sense strand
ccaaagauaggaggagaaa

SEQ ID NO: 1724952 - RNA, 19 nt, Homo sapiens
  misc_RNA (1)...(19): siRNA sense strand
gagagaacaacuugccuau

SEQ ID NO: 1724953 - RNA, 19 nt, Homo sapiens
  misc_RNA (1)...(19): siRNA sense strand
gauguucucuuuuaugaug

SEQ ID NO: 1724954 - RNA, 19 nt, Homo sapiens
  misc_RNA (1)...(19): siRNA sense strand
gaaguucccgcaucacagu

SEQ ID NO: 1724955 - RNA, 19 nt, Homo sapiens
  misc_RNA (1)...(19): siRNA sense strand
uugccuaucuggaaucuga

SEQ ID NO: 1724956 - RNA, 19 nt, Homo sapiens
  misc_RNA (1)...(19): siRNA sense strand
gcccagcugugccaucuuc

SEQ ID NO: 1724957 - RNA, 19 nt, Homo sapiens
  misc_RNA (1)...(19): siRNA sense strand
gcucugaggaguucaagga

SEQ ID NO: 1724958 - RNA, 19 nt, Homo sapiens
  misc_RNA (1)...(19): siRNA sense strand
cgacucaacccaucugugu

SEQ ID NO: 1724959 - RNA, 19 nt, Homo sapiens
  misc_RNA (1)...(19): siRNA sense strand
cgaaugaagaguugcaaga

SEQ ID NO: 1724960 - RNA, 19 nt, Homo sapiens
  misc_RNA (1)...(19): siRNA sense strand
agucagccuuggauuguaa

SEQ ID NO: 1724961 - RNA, 19 nt, Homo sapiens
  misc_RNA (1)...(19): siRNA sense strand
ucugaacagccuuaaauaa

SEQ ID NO: 1724962 - RNA, 19 nt, Homo sapiens
  misc_RNA (1)...(19): siRNA sense strand
gaaaagacugguccaaaga

SEQ ID NO: 1724963 - RNA, 19 nt, Homo sapiens
  misc_RNA (1)...(19): siRNA sense strand
gggacggaaugcuaaagga

SEQ ID NO: 1724964 - RNA, 19 nt, Homo sapiens
  misc_RNA (1)...(19): siRNA sense strand
ugagaaacaucagagaagu

SEQ ID NO: 1724965 - RNA, 19 nt, Homo sapiens
  misc_RNA (1)...(19): siRNA sense strand
ggugaaggaacguguagaa

SEQ ID NO: 1724966 - RNA, 19 nt, Homo sapiens
  misc_RNA (1)...(19): siRNA sense strand
ggaaaucagaagaaauaca

SEQ ID NO: 1724967 - RNA, 19 nt, Homo sapiens
  misc_RNA (1)...(19): siRNA sense strand
ugaauuugcgugacuguga

SEQ ID NO: 1724968 - RNA, 19 nt, Homo sapiens
  misc_RNA (1)...(19): siRNA sense strand
gaaccuguaaagccaagaa

SEQ ID NO: 1724969 - RNA, 19 nt, Homo sapiens
  misc_RNA (1)...(19): siRNA sense strand
uagauugggugacauuugg

SEQ ID NO: 1724970 - RNA, 19 nt, Homo sapiens
  misc_RNA (1)...(19): siRNA sense strand
gaaaagauggccagagaga

SEQ ID NO: 1724971 - RNA, 19 nt, Homo sapiens
  misc_RNA (1)...(19): siRNA sense strand
ggagaggagaguucagaga

SEQ ID NO: 1724972 - RNA, 19 nt, Homo sapiens
  misc_RNA (1)...(19): siRNA sense strand
caaaugaaggccuuacaag

SEQ ID NO: 1724973 - RNA, 19 nt, Homo sapiens
  misc_RNA (1)...(19): siRNA sense strand
aaacaaacccaaacagcau

SEQ ID NO: 1724974 - RNA, 19 nt, Homo sapiens
  misc_RNA (1)...(19): siRNA sense strand
cggcgacggugaaucuuau

SEQ ID NO: 1724975 - RNA, 19 nt, Homo sapiens
  misc_RNA (1)...(19): siRNA sense strand
agccacagcuucagggauu

SEQ ID NO: 1724976 - RNA, 19 nt, Homo sapiens
  misc_RNA (1)...(19): siRNA sense strand
gauaacuagaggucaaauu

SEQ ID NO: 1724977 - RNA, 19 nt, Homo sapiens
  misc_RNA (1)...(19): siRNA sense strand
aaaugaaggccuuacaaga

SEQ ID NO: 1724978 - RNA, 19 nt, Homo sapiens
  misc_RNA (1)...(19): siRNA sense strand
gaacaaaccuagugggaua

SEQ ID NO: 1724979 - RNA, 19 nt, Homo sapiens
  misc_RNA (1)...(19): siRNA sense strand
gagagaagcuggaagaaau

SEQ ID NO: 1724980 - RNA, 19 nt, Homo sapiens
  misc_RNA (1)...(19): siRNA sense strand
ccacagaaaugaacaagaa

SEQ ID NO: 1724981 - RNA, 19 nt, Homo sapiens
  misc_RNA (1)...(19): siRNA sense strand
gagaagaacaugcuaaauu

SEQ ID NO: 1724982 - RNA, 19 nt, Homo sapiens
  misc_RNA (1)...(19): siRNA sense strand
gcacgcagacugugaauuu

SEQ ID NO: 1724983 - RNA, 19 nt, Homo sapiens
  misc_RNA (1)...(19): siRNA sense strand
ugaguaaucugguuguuaa

SEQ ID NO: 1724984 - RNA, 19 nt, Homo sapiens
  misc_RNA (1)...(19): siRNA sense strand
ggacuuaacagaugaagaa

SEQ ID NO: 1724985 - RNA, 19 nt, Homo sapiens
  misc_RNA (1)...(19): siRNA sense strand
gagaacaacuugccuaucu

SEQ ID NO: 1724986 - RNA, 19 nt, Homo sapiens
  misc_RNA (1)...(19): siRNA sense strand
gaacggcugugccaagaug

SEQ ID NO: 1724987 - RNA, 19 nt, Homo sapiens
  misc_RNA (1)...(19): siRNA sense strand
caaacagcauuaagaagaa

SEQ ID NO: 1724988 - RNA, 19 nt, Homo sapiens
  misc_RNA (1)...(19): siRNA sense strand
cagaaggucuuaauuaugg

SEQ ID NO: 1724989 - RNA, 19 nt, Homo sapiens
  misc_RNA (1)...(19): siRNA sense strand
gaacgggacggaaugcuaa

SEQ ID NO: 1724990 - RNA, 19 nt, Homo sapiens
  misc_RNA (1)...(19): siRNA sense strand
gaggagguguguuuaucua

SEQ ID NO: 1724991 - RNA, 19 nt, Homo sapiens
  misc_RNA (1)...(19): siRNA sense strand
gaggagaguucagagaauu

SEQ ID NO: 1724992 - RNA, 19 nt, Homo sapiens
  misc_RNA (1)...(19): siRNA sense strand
ccucagaaggucuuaauua

SEQ ID NO: 1724993 - RNA, 19 nt, Homo sapiens
  misc_RNA (1)...(19): siRNA sense strand
ccaaacagcauuaagaaga

SEQ ID NO: 1724994 - RNA, 19 nt, Homo sapiens
  misc_RNA (1)...(19): siRNA sense strand
ucagugagcagcaugaaua

SEQ ID NO: 1724995 - RNA, 19 nt, Homo sapiens
  misc_RNA (1)...(19): siRNA sense strand
gaggacgaauuccaaagaa

SEQ ID NO: 1724996 - RNA, 19 nt, Homo sapiens
  misc_RNA (1)...(19): siRNA sense strand
aaagacugguccaaagaua

SEQ ID NO: 1724997 - RNA, 19 nt, Homo sapiens
  misc_RNA (1)...(19): siRNA sense strand
gcacaaacuugaucaucca

SEQ ID NO: 1724998 - RNA, 19 nt, Homo sapiens
  misc_RNA (1)...(19): siRNA sense strand
cuuaacagaugaagaagaa

SEQ ID NO: 1724999 - RNA, 19 nt, Homo sapiens
  misc_RNA (1)...(19): siRNA sense strand
acaagaagcucagcgcaaa

SEQ ID NO: 1725000 - RNA, 19 nt, Homo sapiens
  misc_RNA (1)...(19): siRNA sense strand
gaaaacgaaugaagaguug

SEQ ID NO: 1725001 - RNA, 19 nt, Homo sapiens
  misc_RNA (1)...(19): siRNA sense strand
caacuugccuaucuggaau

SEQ ID NO: 1725002 - RNA, 19 nt, Homo sapiens
  misc_RNA (1)...(19): siRNA sense strand
ggauuguaauucagaagaa

SEQ ID NO: 1725003 - RNA, 19 nt, Homo sapiens
  misc_RNA (1)...(19): siRNA sense strand
gaacaugcuaaauuucuga

SEQ ID NO: 1725004 - RNA, 19 nt, Homo sapiens
  misc_RNA (1)...(19): siRNA sense strand
agaagaggcugaugaugga

SEQ ID NO: 1725005 - RNA, 19 nt, Homo sapiens
  misc_RNA (1)...(19): siRNA sense strand
gcaaaugaaggccuuacaa

SEQ ID NO: 1725006 - RNA, 19 nt, Homo sapiens
  misc_RNA (1)...(19): siRNA sense strand
ucuggaaucugaggaauuu

SEQ ID NO: 1725007 - RNA, 19 nt, Homo sapiens
  misc_RNA (1)...(19): siRNA sense strand
agaaggaaaucagaagaaa

SEQ ID NO: 1725008 - RNA, 19 nt, Homo sapiens
  misc_RNA (1)...(19): siRNA sense strand
gagaggagaguucagagaa

SEQ ID NO: 1725009 - RNA, 19 nt, Homo sapiens
  misc_RNA (1)...(19): siRNA sense strand
gagaaggaaaucagaagaa

SEQ ID NO: 1725010 - RNA, 19 nt, Homo sapiens
  misc_RNA (1)...(19): siRNA sense strand
guucagaggagguguguuu

SEQ ID NO: 1725011 - RNA, 19 nt, Homo sapiens
  misc_RNA (1)...(19): siRNA sense strand
agaaauagauugggugaca

SEQ ID NO: 1725012 - RNA, 19 nt, Homo sapiens
  misc_RNA (1)...(19): siRNA sense strand
cgaguauccuccacagaaa

SEQ ID NO: 1725013 - RNA, 19 nt, Homo sapiens
  misc_RNA (1)...(19): siRNA sense strand
guaaagccaagaagaagaa

SEQ ID NO: 1725014 - RNA, 19 nt, Homo sapiens
  misc_RNA (1)...(19): siRNA sense strand
agaagaaguucccgcauca

SEQ ID NO: 1725015 - RNA, 19 nt, Homo sapiens
  misc_RNA (1)...(19): siRNA sense strand
cugcagagcucaagugaag

SEQ ID NO: 1725016 - RNA, 19 nt, Homo sapiens
  misc_RNA (1)...(19): siRNA sense strand
gaaaucagaagaaauacag

SEQ ID NO: 1725017 - RNA, 19 nt, Homo sapiens
  misc_RNA (1)...(19): siRNA sense strand
ggagguguguuuaucuauc

SEQ ID NO: 1725018 - RNA, 19 nt, Homo sapiens
  misc_RNA (1)...(19): siRNA sense strand
gcauauggaaacugaauga

SEQ ID NO: 1725019 - RNA, 19 nt, Homo sapiens
  misc_RNA (1)...(19): siRNA sense strand
gaaacugaaugaucuucgu

SEQ ID NO: 1725020 - RNA, 19 nt, Homo sapiens
  misc_RNA (1)...(19): siRNA sense strand
gaagaacaugcuaaauuuc

SEQ ID NO: 1725021 - RNA, 19 nt, Homo sapiens
  misc_RNA (1)...(19): siRNA sense strand
gagaugaggagaaggaaau

SEQ ID NO: 1725022 - RNA, 19 nt, Homo sapiens
  misc_RNA (1)...(19): siRNA sense strand
ggaggacgaauuccaaaga

SEQ ID NO: 1725023 - RNA, 19 nt, Homo sapiens
  misc_RNA (1)...(19): siRNA sense strand
gcagagcucaagugaaguu

SEQ ID NO: 1725024 - RNA, 19 nt, Homo sapiens
  misc_RNA (1)...(19): siRNA sense strand
ggagaaacucuguuaccaa

SEQ ID NO: 1725025 - RNA, 19 nt, Homo sapiens
  misc_RNA (1)...(19): siRNA sense strand
ggaaaagacugguccaaag

SEQ ID NO: 1725026 - RNA, 19 nt, Homo sapiens
  misc_RNA (1)...(19): siRNA sense strand
uauggaaacugaaugaucu

SEQ ID NO: 1725027 - RNA, 19 nt, Homo sapiens
  misc_RNA (1)...(19): siRNA sense strand
ggaacgggacggaaugcua

SEQ ID NO: 1725028 - RNA, 19 nt, Homo sapiens
  misc_RNA (1)...(19): siRNA sense strand
cggugaaucuuauacagaa

SEQ ID NO: 1725029 - RNA, 19 nt, Homo sapiens
  misc_RNA (1)...(19): siRNA sense strand
cgaacaagcacugcaguaa

SEQ ID NO: 1725030 - RNA, 19 nt, Homo sapiens
  misc_RNA (1)...(19): siRNA sense strand
gaaggaaaucagaagaaau

SEQ ID NO: 1725031 - RNA, 19 nt, Homo sapiens
  misc_RNA (1)...(19): siRNA sense strand
gcaagaggaauuaaggaau

SEQ ID NO: 1725032 - RNA, 19 nt, Homo sapiens
  misc_RNA (1)...(19): siRNA sense strand
cucagaaggucuuaauuau

SEQ ID NO: 1725033 - RNA, 19 nt, Homo sapiens
  misc_RNA (1)...(19): siRNA sense strand
gcugcuaucaccaaauuaa

SEQ ID NO: 1725034 - RNA, 19 nt, Homo sapiens
  misc_RNA (1)...(19): siRNA sense strand
cagcggauguuggagauga

SEQ ID NO: 1725035 - RNA, 19 nt, Homo sapiens
  misc_RNA (1)...(19): siRNA sense strand
caacagaagcagcggaugu

SEQ ID NO: 1725036 - RNA, 19 nt, Homo sapiens
  misc_RNA (1)...(19): siRNA sense strand
gacgauuucucggaacaaa

SEQ ID NO: 1725037 - RNA, 19 nt, Homo sapiens
  misc_RNA (1)...(19): siRNA sense strand
ggacggaaugcuaaaggaa

SEQ ID NO: 1725038 - RNA, 19 nt, Homo sapiens
  misc_RNA (1)...(19): siRNA sense strand
gaccaaaacugagugcuuu

SEQ ID NO: 1725039 - RNA, 19 nt, Homo sapiens
  misc_RNA (1)...(19): siRNA sense strand
ggagaaggaaaucagaaga

SEQ ID NO: 1725040 - RNA, 19 nt, Homo sapiens
  misc_RNA (1)...(19): siRNA sense strand
ccucagcacucuugaagca

SEQ ID NO: 1725041 - RNA, 19 nt, Homo sapiens
  misc_RNA (1)...(19): siRNA sense strand
guuaagggcacaaacuuga

SEQ ID NO: 1725042 - RNA, 19 nt, Homo sapiens
  misc_RNA (1)...(19): siRNA sense strand
ggacgaauuccaaagaagu

SEQ ID NO: 1725043 - RNA, 19 nt, Homo sapiens
  misc_RNA (1)...(19): siRNA sense strand
gaauucaggagucaacaug

SEQ ID NO: 1725044 - RNA, 19 nt, Homo sapiens
  misc_RNA (1)...(19): siRNA sense strand
uaacuguggccucuacaaa

SEQ ID NO: 1725045 - RNA, 19 nt, Homo sapiens
  misc_RNA (1)...(19): siRNA sense strand
ugaccgcacugcuggaaga

SEQ ID NO: 1725046 - RNA, 19 nt, Homo sapiens
  misc_RNA (1)...(19): siRNA sense strand
gaaauagauugggugacau

SEQ ID NO: 1725047 - RNA, 19 nt, Homo sapiens
  misc_RNA (1)...(19): siRNA sense strand
gaagcuggaagaaauagau

SEQ ID NO: 1725048 - RNA, 19 nt, Homo sapiens
  misc_RNA (1)...(19): siRNA sense strand
gaggagaagaacaugcuaa

SEQ ID NO: 1725049 - RNA, 19 nt, Homo sapiens
  misc_RNA (1)...(19): siRNA sense strand
gaacaagcacugcaguaac

SEQ ID NO: 1725050 - RNA, 19 nt, Homo sapiens
  misc_RNA (1)...(19): siRNA sense strand
cagaggagguguguuuauc

SEQ ID NO: 1725051 - RNA, 19 nt, Homo sapiens
  misc_RNA (1)...(19): siRNA sense strand
ccaaagauaggaggagaaa

SEQ ID NO: 1725052 - RNA, 19 nt, Homo sapiens
  misc_RNA (1)...(19): siRNA sense strand
gagagaacaacuugccuau

SEQ ID NO: 1725053 - RNA, 19 nt, Homo sapiens
  misc_RNA (1)...(19): siRNA sense strand
gauguucucuuuuaugaug

SEQ ID NO: 1725054 - RNA, 19 nt, Homo sapiens
  misc_RNA (1)...(19): siRNA sense strand
gaaguucccgcaucacagu

SEQ ID NO: 1725055 - RNA, 19 nt, Homo sapiens
  misc_RNA (1)...(19): siRNA sense strand
uugccuaucuggaaucuga

SEQ ID NO: 1725056 - RNA, 19 nt, Homo sapiens
  misc_RNA (1)...(19): siRNA sense strand
gcccagcugugccaucuuc

SEQ ID NO: 1725057 - RNA, 19 nt, Homo sapiens
  misc_RNA (1)...(19): siRNA sense strand
gcucugaggaguucaagga

SEQ ID NO: 1725058 - RNA, 19 nt, Homo sapiens
  misc_RNA (1)...(19): siRNA sense strand
cgacucaacccaucugugu

SEQ ID NO: 1725059 - RNA, 19 nt, Homo sapiens
  misc_RNA (1)...(19): siRNA sense strand
cgaaugaagaguugcaaga

SEQ ID NO: 1725060 - RNA, 19 nt, Homo sapiens
  misc_RNA (1)...(19): siRNA sense strand
agucagccuuggauuguaa

SEQ ID NO: 1725061 - RNA, 19 nt, Homo sapiens
  misc_RNA (1)...(19): siRNA sense strand
ucugaacagccuuaaauaa

SEQ ID NO: 1725062 - RNA, 19 nt, Homo sapiens
  misc_RNA (1)...(19): siRNA sense strand
gaaaagacugguccaaaga

SEQ ID NO: 1725063 - RNA, 19 nt, Homo sapiens
  misc_RNA (1)...(19): siRNA sense strand
gggacggaaugcuaaagga

SEQ ID NO: 1725064 - RNA, 19 nt, Homo sapiens
  misc_RNA (1)...(19): siRNA sense strand
ugagaaacaucagagaagu

SEQ ID NO: 1725065 - RNA, 19 nt, Homo sapiens
  misc_RNA (1)...(19): siRNA sense strand
ggugaaggaacguguagaa

SEQ ID NO: 1725066 - RNA, 19 nt, Homo sapiens
  misc_RNA (1)...(19): siRNA sense strand
ggaaaucagaagaaauaca

SEQ ID NO: 1725067 - RNA, 19 nt, Homo sapiens
  misc_RNA (1)...(19): siRNA sense strand
ugaauuugcgugacuguga

SEQ ID NO: 1725068 - RNA, 19 nt, Homo sapiens
  misc_RNA (1)...(19): siRNA sense strand
gaaccuguaaagccaagaa

SEQ ID NO: 1725069 - RNA, 19 nt, Homo sapiens
  misc_RNA (1)...(19): siRNA sense strand
uagauugggugacauuugg

SEQ ID NO: 1725070 - RNA, 19 nt, Homo sapiens
  misc_RNA (1)...(19): siRNA sense strand
gaaaagauggccagagaga

SEQ ID NO: 1725071 - RNA, 19 nt, Homo sapiens
  misc_RNA (1)...(19): siRNA sense strand
ggagaggagaguucagaga

SEQ ID NO: 1725072 - RNA, 19 nt, Homo sapiens
  misc_RNA (1)...(19): siRNA sense strand
caaaugaaggccuuacaag

SEQ ID NO: 1725073 - RNA, 19 nt, Homo sapiens
  misc_RNA (1)...(19): siRNA sense strand
aaacaaacccaaacagcau

SEQ ID NO: 1725074 - RNA, 19 nt, Homo sapiens
  misc_RNA (1)...(19): siRNA sense strand
cggcgacggugaaucuuau

SEQ ID NO: 1725075 - RNA, 19 nt, Homo sapiens
  misc_RNA (1)...(19): siRNA sense strand
agccacagcuucagggauu

SEQ ID NO: 1725076 - RNA, 19 nt, Homo sapiens
  misc_RNA (1)...(19): siRNA sense strand
gauaacuagaggucaaauu

SEQ ID NO: 1725077 - RNA, 19 nt, Homo sapiens
  misc_RNA (1)...(19): siRNA sense strand
aaaugaaggccuuacaaga

SEQ ID NO: 1725078 - RNA, 19 nt, Homo sapiens
  misc_RNA (1)...(19): siRNA sense strand
gaacaggccugauggaauu

SEQ ID NO: 1725079 - RNA, 19 nt, Homo sapiens
  misc_RNA (1)...(19): siRNA sense strand
gaucgaaucuugugucaaa

SEQ ID NO: 1725080 - RNA, 19 nt, Homo sapiens
  misc_RNA (1)...(19): siRNA sense strand
gaaccaggauugcauuuga

SEQ ID NO: 1725081 - RNA, 19 nt, Homo sapiens
  misc_RNA (1)...(19): siRNA sense strand
gagagaaacuacagacuga

SEQ ID NO: 1725082 - RNA, 19 nt, Homo sapiens
  misc_RNA (1)...(19): siRNA sense strand
cuacagagauuuccgauug

SEQ ID NO: 1725083 - RNA, 19 nt, Homo sapiens
  misc_RNA (1)...(19): siRNA sense strand
agacauggaugcagccuua

SEQ ID NO: 1725084 - RNA, 19 nt, Homo sapiens
  misc_RNA (1)...(19): siRNA sense strand
gcaaggagcaacucuauga

SEQ ID NO: 1725085 - RNA, 19 nt, Homo sapiens
  misc_RNA (1)...(19): siRNA sense strand
gaagcauucuggguauuua

SEQ ID NO: 1725086 - RNA, 19 nt, Homo sapiens
  misc_RNA (1)...(19): siRNA sense strand
gaggagauguacauagaaa

SEQ ID NO: 1725087 - RNA, 19 nt, Homo sapiens
  misc_RNA (1)...(19): siRNA sense strand
caaaucgcaucguauauug

SEQ ID NO: 1725088 - RNA, 19 nt, Homo sapiens
  misc_RNA (1)...(19): siRNA sense strand
acaaauggcagaccaaaua

SEQ ID NO: 1725089 - RNA, 19 nt, Homo sapiens
  misc_RNA (1)...(19): siRNA sense strand
gaacgcaaauuucccaagu

SEQ ID NO: 1725090 - RNA, 19 nt, Homo sapiens
  misc_RNA (1)...(19): siRNA sense strand
gagcugaagucaucuguca

SEQ ID NO: 1725091 - RNA, 19 nt, Homo sapiens
  misc_RNA (1)...(19): siRNA sense strand
ggauggacgucuacaaaug

SEQ ID NO: 1725092 - RNA, 19 nt, Homo sapiens
  misc_RNA (1)...(19): siRNA sense strand
gaagaagaaucggaugaga

SEQ ID NO: 1725093 - RNA, 19 nt, Homo sapiens
  misc_RNA (1)...(19): siRNA sense strand
ugaccacgcuucccucuuu

SEQ ID NO: 1725094 - RNA, 19 nt, Homo sapiens
  misc_RNA (1)...(19): siRNA sense strand
gcacuggccugaagaagag

SEQ ID NO: 1725095 - RNA, 19 nt, Homo sapiens
  misc_RNA (1)...(19): siRNA sense strand
ccacaaugcuuccaucauc

SEQ ID NO: 1725096 - RNA, 19 nt, Homo sapiens
  misc_RNA (1)...(19): siRNA sense strand
ggacuuacagcuucauauu

SEQ ID NO: 1725097 - RNA, 19 nt, Homo sapiens
  misc_RNA (1)...(19): siRNA sense strand
guuaaucacuccugccaaa

SEQ ID NO: 1725098 - RNA, 19 nt, Homo sapiens
  misc_RNA (1)...(19): siRNA sense strand
agaagaggcugcagcugua

SEQ ID NO: 1725099 - RNA, 19 nt, Homo sapiens
  misc_RNA (1)...(19): siRNA sense strand
ggagggagacaccgugaua

SEQ ID NO: 1725100 - RNA, 19 nt, Homo sapiens
  misc_RNA (1)...(19): siRNA sense strand
gcaguuaucgggagaagaa

SEQ ID NO: 1725101 - RNA, 19 nt, Homo sapiens
  misc_RNA (1)...(19): siRNA sense strand
ucaagaaguucgaacauca

SEQ ID NO: 1725102 - RNA, 19 nt, Homo sapiens
  misc_RNA (1)...(19): siRNA sense strand
ugaacgcugugcagaguua

SEQ ID NO: 1725103 - RNA, 19 nt, Homo sapiens
  misc_RNA (1)...(19): siRNA sense strand
gaacaucagcuccuuuaca

SEQ ID NO: 1725104 - RNA, 19 nt, Homo sapiens
  misc_RNA (1)...(19): siRNA sense strand
caagugacaugaucgaauc

SEQ ID NO: 1725105 - RNA, 19 nt, Homo sapiens
  misc_RNA (1)...(19): siRNA sense strand
caaacuugcuguccgaaug

SEQ ID NO: 1725106 - RNA, 19 nt, Homo sapiens
  misc_RNA (1)...(19): siRNA sense strand
gcuccuggauggccaaauu

SEQ ID NO: 1725107 - RNA, 19 nt, Homo sapiens
  misc_RNA (1)...(19): siRNA sense strand
gaacugugacuguugaaga

SEQ ID NO: 1725108 - RNA, 19 nt, Homo sapiens
  misc_RNA (1)...(19): siRNA sense strand
ggagacaccgugauauuug

SEQ ID NO: 1725109 - RNA, 19 nt, Homo sapiens
  misc_RNA (1)...(19): siRNA sense strand
ucaggaacuucuacaauug

SEQ ID NO: 1725110 - RNA, 19 nt, Homo sapiens
  misc_RNA (1)...(19): siRNA sense strand
ggauugcauuugaaguuaa

SEQ ID NO: 1725111 - RNA, 19 nt, Homo sapiens
  misc_RNA (1)...(19): siRNA sense strand
ggaaggaggagagaaacua

SEQ ID NO: 1725112 - RNA, 19 nt, Homo sapiens
  misc_RNA (1)...(19): siRNA sense strand
gagcaucaauaccauucaa

SEQ ID NO: 1725113 - RNA, 19 nt, Homo sapiens
  misc_RNA (1)...(19): siRNA sense strand
ucuaugagauguuccagaa

SEQ ID NO: 1725114 - RNA, 19 nt, Homo sapiens
  misc_RNA (1)...(19): siRNA sense strand
ggaggaagccacagcauca

SEQ ID NO: 1725115 - RNA, 19 nt, Homo sapiens
  misc_RNA (1)...(19): siRNA sense strand
caauaugcaccauguuuaa

SEQ ID NO: 1725116 - RNA, 19 nt, Homo sapiens
  misc_RNA (1)...(19): siRNA sense strand
ugaaguugauggcaaguga

SEQ ID NO: 1725117 - RNA, 19 nt, Homo sapiens
  misc_RNA (1)...(19): siRNA sense strand
gagcaacucuaugagaugu

SEQ ID NO: 1725118 - RNA, 19 nt, Homo sapiens
  misc_RNA (1)...(19): siRNA sense strand
uccaaggccucaaaucuuu

SEQ ID NO: 1725119 - RNA, 19 nt, Homo sapiens
  misc_RNA (1)...(19): siRNA sense strand
cauuggaggugguaauuau

SEQ ID NO: 1725120 - RNA, 19 nt, Homo sapiens
  misc_RNA (1)...(19): siRNA sense strand
ucaauaugcaccauguuua

SEQ ID NO: 1725121 - RNA, 19 nt, Homo sapiens
  misc_RNA (1)...(19): siRNA sense strand
gagcaaggagcaacucuau

SEQ ID NO: 1725122 - RNA, 19 nt, Homo sapiens
  misc_RNA (1)...(19): siRNA sense strand
ugccaaagcucaaucaaca

SEQ ID NO: 1725123 - RNA, 19 nt, Homo sapiens
  misc_RNA (1)...(19): siRNA sense strand
gcaccauguuuaauguuau

SEQ ID NO: 1725124 - RNA, 19 nt, Homo sapiens
  misc_RNA (1)...(19): siRNA sense strand
ggaacaggcugcguuaguc

SEQ ID NO: 1725125 - RNA, 19 nt, Homo sapiens
  misc_RNA (1)...(19): siRNA sense strand
gcaagcagcccagaucaga

SEQ ID NO: 1725126 - RNA, 19 nt, Homo sapiens
  misc_RNA (1)...(19): siRNA sense strand
caaaguucguuacuaucuu

SEQ ID NO: 1725127 - RNA, 19 nt, Homo sapiens
  misc_RNA (1)...(19): siRNA sense strand
ggacaguuuuccacuauuu

SEQ ID NO: 1725128 - RNA, 19 nt, Homo sapiens
  misc_RNA (1)...(19): siRNA sense strand
ccaaaucgcaucguauauu

SEQ ID NO: 1725129 - RNA, 19 nt, Homo sapiens
  misc_RNA (1)...(19): siRNA sense strand
acgcaaauuucccaaguuu

SEQ ID NO: 1725130 - RNA, 19 nt, Homo sapiens
  misc_RNA (1)...(19): siRNA sense strand
gaaggagaaggaagaguug

SEQ ID NO: 1725131 - RNA, 19 nt, Homo sapiens
  misc_RNA (1)...(19): siRNA sense strand
ggacagcgaugaggaagac

SEQ ID NO: 1725132 - RNA, 19 nt, Homo sapiens
  misc_RNA (1)...(19): siRNA sense strand
ggacuuuguuuucuucuuu

SEQ ID NO: 1725133 - RNA, 19 nt, Homo sapiens
  misc_RNA (1)...(19): siRNA sense strand
gcaaaguucguuacuaucu

SEQ ID NO: 1725134 - RNA, 19 nt, Homo sapiens
  misc_RNA (1)...(19): siRNA sense strand
gaagaagaguuuggaaagc

SEQ ID NO: 1725135 - RNA, 19 nt, Homo sapiens
  misc_RNA (1)...(19): siRNA sense strand
gacuauaauuugugcaaug

SEQ ID NO: 1725136 - RNA, 19 nt, Homo sapiens
  misc_RNA (1)...(19): siRNA sense strand
gagcaugccgguauccaaa

SEQ ID NO: 1725137 - RNA, 19 nt, Homo sapiens
  misc_RNA (1)...(19): siRNA sense strand
gcaacucuaugagauguuc

SEQ ID NO: 1725138 - RNA, 19 nt, Homo sapiens
  misc_RNA (1)...(19): siRNA sense strand
gaaggacagcgaugaggaa

SEQ ID NO: 1725139 - RNA, 19 nt, Homo sapiens
  misc_RNA (1)...(19): siRNA sense strand
uugcaaaguucguuacuau

SEQ ID NO: 1725140 - RNA, 19 nt, Homo sapiens
  misc_RNA (1)...(19): siRNA sense strand
uagacgaacuaauugaaga

SEQ ID NO: 1725141 - RNA, 19 nt, Homo sapiens
  misc_RNA (1)...(19): siRNA sense strand
ccaaagcucaaucaacaaa

SEQ ID NO: 1725142 - RNA, 19 nt, Homo sapiens
  misc_RNA (1)...(19): siRNA sense strand
gggagacaccgugauauuu

SEQ ID NO: 1725143 - RNA, 19 nt, Homo sapiens
  misc_RNA (1)...(19): siRNA sense strand
cucaggaacuucuacaauu

SEQ ID NO: 1725144 - RNA, 19 nt, Homo sapiens
  misc_RNA (1)...(19): siRNA sense strand
aacaucagcuccuuuacaa

SEQ ID NO: 1725145 - RNA, 19 nt, Homo sapiens
  misc_RNA (1)...(19): siRNA sense strand
aaaguucguuacuaucuug

SEQ ID NO: 1725146 - RNA, 19 nt, Homo sapiens
  misc_RNA (1)...(19): siRNA sense strand
ggaaaugggccaagagcau

SEQ ID NO: 1725147 - RNA, 19 nt, Homo sapiens
  misc_RNA (1)...(19): siRNA sense strand
ggaacaggccugauggaau

SEQ ID NO: 1725148 - RNA, 19 nt, Homo sapiens
  misc_RNA (1)...(19): siRNA sense strand
guaagaaugucuggaagag

SEQ ID NO: 1725149 - RNA, 19 nt, Homo sapiens
  misc_RNA (1)...(19): siRNA sense strand
caucagcuccuuuacaaug

SEQ ID NO: 1725150 - RNA, 19 nt, Homo sapiens
  misc_RNA (1)...(19): siRNA sense strand
aagaaugucuggaagagau

SEQ ID NO: 1725151 - RNA, 19 nt, Homo sapiens
  misc_RNA (1)...(19): siRNA sense strand
caacuauucucggcucuca

SEQ ID NO: 1725152 - RNA, 19 nt, Homo sapiens
  misc_RNA (1)...(19): siRNA sense strand
aaacaguuauccguaaaug

SEQ ID NO: 1725153 - RNA, 19 nt, Homo sapiens
  misc_RNA (1)...(19): siRNA sense strand
ggaaaggguuuugaugaaa

SEQ ID NO: 1725154 - RNA, 19 nt, Homo sapiens
  misc_RNA (1)...(19): siRNA sense strand
aaagagaggcuccgaguuc

SEQ ID NO: 1725155 - RNA, 19 nt, Homo sapiens
  misc_RNA (1)...(19): siRNA sense strand
ggccgagccuucuucaaug

SEQ ID NO: 1725156 - RNA, 19 nt, Homo sapiens
  misc_RNA (1)...(19): siRNA sense strand
cagaugucgugcugucuuu

SEQ ID NO: 1725157 - RNA, 19 nt, Homo sapiens
  misc_RNA (1)...(19): siRNA sense strand
ugacgaagggacuuuguuu

SEQ ID NO: 1725158 - RNA, 19 nt, Homo sapiens
  misc_RNA (1)...(19): siRNA sense strand
gcauggaaaugggccaaga

SEQ ID NO: 1725159 - RNA, 19 nt, Homo sapiens
  misc_RNA (1)...(19): siRNA sense strand
gcaagugacaugaucgaau

SEQ ID NO: 1725160 - RNA, 19 nt, Homo sapiens
  misc_RNA (1)...(19): siRNA sense strand
uacaauacgucuugcugaa

SEQ ID NO: 1725161 - RNA, 19 nt, Homo sapiens
  misc_RNA (1)...(19): siRNA sense strand
gaacaggcugcguuaguca

SEQ ID NO: 1725162 - RNA, 19 nt, Homo sapiens
  misc_RNA (1)...(19): siRNA sense strand
ggaaguccaaggccucaaa

SEQ ID NO: 1725163 - RNA, 19 nt, Homo sapiens
  misc_RNA (1)...(19): siRNA sense strand
caugaagcauucuggguau

SEQ ID NO: 1725164 - RNA, 19 nt, Homo sapiens
  misc_RNA (1)...(19): siRNA sense strand
gauggcaagugacaugauc

SEQ ID NO: 1725165 - RNA, 19 nt, Homo sapiens
  misc_RNA (1)...(19): siRNA sense strand
gaugaaagauauuguuacc

SEQ ID NO: 1725166 - RNA, 19 nt, Homo sapiens
  misc_RNA (1)...(19): siRNA sense strand
uggcauggaugaauuuauc

SEQ ID NO: 1725167 - RNA, 19 nt, Homo sapiens
  misc_RNA (1)...(19): siRNA sense strand
gaaagcggagccucaggaa

SEQ ID NO: 1725168 - RNA, 19 nt, Homo sapiens
  misc_RNA (1)...(19): siRNA sense strand
ggauaagccucaaaacaug

SEQ ID NO: 1725169 - RNA, 19 nt, Homo sapiens
  misc_RNA (1)...(19): siRNA sense strand
uuugaaagcuacucucuca

SEQ ID NO: 1725170 - RNA, 19 nt, Homo sapiens
  misc_RNA (1)...(19): siRNA sense strand
ggacaauccagaugagcaa

SEQ ID NO: 1725171 - RNA, 19 nt, Homo sapiens
  misc_RNA (1)...(19): siRNA sense strand
ugcaccauguuuaauguua

SEQ ID NO: 1725172 - RNA, 19 nt, Homo sapiens
  misc_RNA (1)...(19): siRNA sense strand
aggauugcauuugaaguua

SEQ ID NO: 1725173 - RNA, 19 nt, Homo sapiens
  misc_RNA (1)...(19): siRNA sense strand
uugcugaacuagucauuga

SEQ ID NO: 1725174 - RNA, 19 nt, Homo sapiens
  misc_RNA (1)...(19): siRNA sense strand
gaccugcacuggccugaag

SEQ ID NO: 1725175 - RNA, 19 nt, Homo sapiens
  misc_RNA (1)...(19): siRNA sense strand
gauguacauagaaagguua

SEQ ID NO: 1725176 - RNA, 19 nt, Homo sapiens
  misc_RNA (1)...(19): siRNA sense strand
cgaacuaauugaagaaacu

SEQ ID NO: 1725177 - RNA, 19 nt, Homo sapiens
  misc_RNA (1)...(19): siRNA sense strand
uaugagguguuccugaaga

SEQ ID NO: 1725178 - RNA, 19 nt, Homo sapiens
  misc_RNA (1)...(19): siRNA sense strand
gaacaggccugauggaauu

SEQ ID NO: 1725179 - RNA, 19 nt, Homo sapiens
  misc_RNA (1)...(19): siRNA sense strand
gaucgaaucuugugucaaa

SEQ ID NO: 1725180 - RNA, 19 nt, Homo sapiens
  misc_RNA (1)...(19): siRNA sense strand
gaaccaggauugcauuuga

SEQ ID NO: 1725181 - RNA, 19 nt, Homo sapiens
  misc_RNA (1)...(19): siRNA sense strand
gagagaaacuacagacuga

SEQ ID NO: 1725182 - RNA, 19 nt, Homo sapiens
  misc_RNA (1)...(19): siRNA sense strand
cuacagagauuuccgauug

SEQ ID NO: 1725183 - RNA, 19 nt, Homo sapiens
  misc_RNA (1)...(19): siRNA sense strand
agacauggaugcagccuua

SEQ ID NO: 1725184 - RNA, 19 nt, Homo sapiens
  misc_RNA (1)...(19): siRNA sense strand
gcaaggagcaacucuauga

SEQ ID NO: 1725185 - RNA, 19 nt, Homo sapiens
  misc_RNA (1)...(19): siRNA sense strand
gaagcauucuggguauuua

SEQ ID NO: 1725186 - RNA, 19 nt, Homo sapiens
  misc_RNA (1)...(19): siRNA sense strand
gaggagauguacauagaaa

SEQ ID NO: 1725187 - RNA, 19 nt, Homo sapiens
  misc_RNA (1)...(19): siRNA sense strand
caaaucgcaucguauauug

SEQ ID NO: 1725188 - RNA, 19 nt, Homo sapiens
  misc_RNA (1)...(19): siRNA sense strand
acaaauggcagaccaaaua

SEQ ID NO: 1725189 - RNA, 19 nt, Homo sapiens
  misc_RNA (1)...(19): siRNA sense strand
gaacgcaaauuucccaagu

SEQ ID NO: 1725190 - RNA, 19 nt, Homo sapiens
  misc_RNA (1)...(19): siRNA sense strand
gagcugaagucaucuguca

SEQ ID NO: 1725191 - RNA, 19 nt, Homo sapiens
  misc_RNA (1)...(19): siRNA sense strand
ggauggacgucuacaaaug

SEQ ID NO: 1725192 - RNA, 19 nt, Homo sapiens
  misc_RNA (1)...(19): siRNA sense strand
gaagaagaaucggaugaga

SEQ ID NO: 1725193 - RNA, 19 nt, Homo sapiens
  misc_RNA (1)...(19): siRNA sense strand
ugaccacgcuucccucuuu

SEQ ID NO: 1725194 - RNA, 19 nt, Homo sapiens
  misc_RNA (1)...(19): siRNA sense strand
gcacuggccugaagaagag

SEQ ID NO: 1725195 - RNA, 19 nt, Homo sapiens
  misc_RNA (1)...(19): siRNA sense strand
ccacaaugcuuccaucauc

SEQ ID NO: 1725196 - RNA, 19 nt, Homo sapiens
  misc_RNA (1)...(19): siRNA sense strand
ggacuuacagcuucauauu

SEQ ID NO: 1725197 - RNA, 19 nt, Homo sapiens
  misc_RNA (1)...(19): siRNA sense strand
guuaaucacuccugccaaa

SEQ ID NO: 1725198 - RNA, 19 nt, Homo sapiens
  misc_RNA (1)...(19): siRNA sense strand
agaagaggcugcagcugua

SEQ ID NO: 1725199 - RNA, 19 nt, Homo sapiens
  misc_RNA (1)...(19): siRNA sense strand
ggagggagacaccgugaua

SEQ ID NO: 1725200 - RNA, 19 nt, Homo sapiens
  misc_RNA (1)...(19): siRNA sense strand
gcaguuaucgggagaagaa

SEQ ID NO: 1725201 - RNA, 19 nt, Homo sapiens
  misc_RNA (1)...(19): siRNA sense strand
ucaagaaguucgaacauca

SEQ ID NO: 1725202 - RNA, 19 nt, Homo sapiens
  misc_RNA (1)...(19): siRNA sense strand
ugaacgcugugcagaguua

SEQ ID NO: 1725203 - RNA, 19 nt, Homo sapiens
  misc_RNA (1)...(19): siRNA sense strand
gaacaucagcuccuuuaca

SEQ ID NO: 1725204 - RNA, 19 nt, Homo sapiens
  misc_RNA (1)...(19): siRNA sense strand
caagugacaugaucgaauc

SEQ ID NO: 1725205 - RNA, 19 nt, Homo sapiens
  misc_RNA (1)...(19): siRNA sense strand
caaacuugcuguccgaaug

SEQ ID NO: 1725206 - RNA, 19 nt, Homo sapiens
  misc_RNA (1)...(19): siRNA sense strand
gcuccuggauggccaaauu

SEQ ID NO: 1725207 - RNA, 19 nt, Homo sapiens
  misc_RNA (1)...(19): siRNA sense strand
gaacugugacuguugaaga

SEQ ID NO: 1725208 - RNA, 19 nt, Homo sapiens
  misc_RNA (1)...(19): siRNA sense strand
ggagacaccgugauauuug

SEQ ID NO: 1725209 - RNA, 19 nt, Homo sapiens
  misc_RNA (1)...(19): siRNA sense strand
ucaggaacuucuacaauug

SEQ ID NO: 1725210 - RNA, 19 nt, Homo sapiens
  misc_RNA (1)...(19): siRNA sense strand
ggauugcauuugaaguuaa

SEQ ID NO: 1725211 - RNA, 19 nt, Homo sapiens
  misc_RNA (1)...(19): siRNA sense strand
ggaaggaggagagaaacua

SEQ ID NO: 1725212 - RNA, 19 nt, Homo sapiens
  misc_RNA (1)...(19): siRNA sense strand
gagcaucaauaccauucaa

SEQ ID NO: 1725213 - RNA, 19 nt, Homo sapiens
  misc_RNA (1)...(19): siRNA sense strand
ucuaugagauguuccagaa

SEQ ID NO: 1725214 - RNA, 19 nt, Homo sapiens
  misc_RNA (1)...(19): siRNA sense strand
ggaggaagccacagcauca

SEQ ID NO: 1725215 - RNA, 19 nt, Homo sapiens
  misc_RNA (1)...(19): siRNA sense strand
caauaugcaccauguuuaa

SEQ ID NO: 1725216 - RNA, 19 nt, Homo sapiens
  misc_RNA (1)...(19): siRNA sense strand
ugaaguugauggcaaguga

SEQ ID NO: 1725217 - RNA, 19 nt, Homo sapiens
  misc_RNA (1)...(19): siRNA sense strand
gagcaacucuaugagaugu

SEQ ID NO: 1725218 - RNA, 19 nt, Homo sapiens
  misc_RNA (1)...(19): siRNA sense strand
uccaaggccucaaaucuuu

SEQ ID NO: 1725219 - RNA, 19 nt, Homo sapiens
  misc_RNA (1)...(19): siRNA sense strand
cauuggaggugguaauuau

SEQ ID NO: 1725220 - RNA, 19 nt, Homo sapiens
  misc_RNA (1)...(19): siRNA sense strand
ucaauaugcaccauguuua

SEQ ID NO: 1725221 - RNA, 19 nt, Homo sapiens
  misc_RNA (1)...(19): siRNA sense strand
gagcaaggagcaacucuau

SEQ ID NO: 1725222 - RNA, 19 nt, Homo sapiens
  misc_RNA (1)...(19): siRNA sense strand
ugccaaagcucaaucaaca

SEQ ID NO: 1725223 - RNA, 19 nt, Homo sapiens
  misc_RNA (1)...(19): siRNA sense strand
gcaccauguuuaauguuau

SEQ ID NO: 1725224 - RNA, 19 nt, Homo sapiens
  misc_RNA (1)...(19): siRNA sense strand
ggaacaggcugcguuaguc

SEQ ID NO: 1725225 - RNA, 19 nt, Homo sapiens
  misc_RNA (1)...(19): siRNA sense strand
gcaagcagcccagaucaga

SEQ ID NO: 1725226 - RNA, 19 nt, Homo sapiens
  misc_RNA (1)...(19): siRNA sense strand
caaaguucguuacuaucuu

SEQ ID NO: 1725227 - RNA, 19 nt, Homo sapiens
  misc_RNA (1)...(19): siRNA sense strand
ggacaguuuuccacuauuu

SEQ ID NO: 1725228 - RNA, 19 nt, Homo sapiens
  misc_RNA (1)...(19): siRNA sense strand
ccaaaucgcaucguauauu

SEQ ID NO: 1725229 - RNA, 19 nt, Homo sapiens
  misc_RNA (1)...(19): siRNA sense strand
acgcaaauuucccaaguuu

SEQ ID NO: 1725230 - RNA, 19 nt, Homo sapiens
  misc_RNA (1)...(19): siRNA sense strand
gaaggagaaggaagaguug

SEQ ID NO: 1725231 - RNA, 19 nt, Homo sapiens
  misc_RNA (1)...(19): siRNA sense strand
ggacagcgaugaggaagac

SEQ ID NO: 1725232 - RNA, 19 nt, Homo sapiens
  misc_RNA (1)...(19): siRNA sense strand
ggacuuuguuuucuucuuu

SEQ ID NO: 1725233 - RNA, 19 nt, Homo sapiens
  misc_RNA (1)...(19): siRNA sense strand
gcaaaguucguuacuaucu

SEQ ID NO: 1725234 - RNA, 19 nt, Homo sapiens
  misc_RNA (1)...(19): siRNA sense strand
gaagaagaguuuggaaagc

SEQ ID NO: 1725235 - RNA, 19 nt, Homo sapiens
  misc_RNA (1)...(19): siRNA sense strand
gacuauaauuugugcaaug

SEQ ID NO: 1725236 - RNA, 19 nt, Homo sapiens
  misc_RNA (1)...(19): siRNA sense strand
gagcaugccgguauccaaa

SEQ ID NO: 1725237 - RNA, 19 nt, Homo sapiens
  misc_RNA (1)...(19): siRNA sense strand
gcaacucuaugagauguuc

SEQ ID NO: 1725238 - RNA, 19 nt, Homo sapiens
  misc_RNA (1)...(19): siRNA sense strand
gaaggacagcgaugaggaa

SEQ ID NO: 1725239 - RNA, 19 nt, Homo sapiens
  misc_RNA (1)...(19): siRNA sense strand
uugcaaaguucguuacuau

SEQ ID NO: 1725240 - RNA, 19 nt, Homo sapiens
  misc_RNA (1)...(19): siRNA sense strand
uagacgaacuaauugaaga

SEQ ID NO: 1725241 - RNA, 19 nt, Homo sapiens
  misc_RNA (1)...(19): siRNA sense strand
ccaaagcucaaucaacaaa

SEQ ID NO: 1725242 - RNA, 19 nt, Homo sapiens
  misc_RNA (1)...(19): siRNA sense strand
gggagacaccgugauauuu

SEQ ID NO: 1725243 - RNA, 19 nt, Homo sapiens
  misc_RNA (1)...(19): siRNA sense strand
cucaggaacuucuacaauu

SEQ ID NO: 1725244 - RNA, 19 nt, Homo sapiens
  misc_RNA (1)...(19): siRNA sense strand
aacaucagcuccuuuacaa

SEQ ID NO: 1725245 - RNA, 19 nt, Homo sapiens
  misc_RNA (1)...(19): siRNA sense strand
aaaguucguuacuaucuug

SEQ ID NO: 1725246 - RNA, 19 nt, Homo sapiens
  misc_RNA (1)...(19): siRNA sense strand
ggaaaugggccaagagcau

SEQ ID NO: 1725247 - RNA, 19 nt, Homo sapiens
  misc_RNA (1)...(19): siRNA sense strand
ggaacaggccugauggaau

SEQ ID NO: 1725248 - RNA, 19 nt, Homo sapiens
  misc_RNA (1)...(19): siRNA sense strand
guaagaaugucuggaagag

SEQ ID NO: 1725249 - RNA, 19 nt, Homo sapiens
  misc_RNA (1)...(19): siRNA sense strand
caucagcuccuuuacaaug

SEQ ID NO: 1725250 - RNA, 19 nt, Homo sapiens
  misc_RNA (1)...(19): siRNA sense strand
aagaaugucuggaagagau

SEQ ID NO: 1725251 - RNA, 19 nt, Homo sapiens
  misc_RNA (1)...(19): siRNA sense strand
caacuauucucggcucuca

SEQ ID NO: 1725252 - RNA, 19 nt, Homo sapiens
  misc_RNA (1)...(19): siRNA sense strand
aaacaguuauccguaaaug

SEQ ID NO: 1725253 - RNA, 19 nt, Homo sapiens
  misc_RNA (1)...(19): siRNA sense strand
ggaaaggguuuugaugaaa

SEQ ID NO: 1725254 - RNA, 19 nt, Homo sapiens
  misc_RNA (1)...(19): siRNA sense strand
aaagagaggcuccgaguuc

SEQ ID NO: 1725255 - RNA, 19 nt, Homo sapiens
  misc_RNA (1)...(19): siRNA sense strand
ggccgagccuucuucaaug

SEQ ID NO: 1725256 - RNA, 19 nt, Homo sapiens
  misc_RNA (1)...(19): siRNA sense strand
cagaugucgugcugucuuu

SEQ ID NO: 1725257 - RNA, 19 nt, Homo sapiens
  misc_RNA (1)...(19): siRNA sense strand
ugacgaagggacuuuguuu

SEQ ID NO: 1725258 - RNA, 19 nt, Homo sapiens
  misc_RNA (1)...(19): siRNA sense strand
gcauggaaaugggccaaga

SEQ ID NO: 1725259 - RNA, 19 nt, Homo sapiens
  misc_RNA (1)...(19): siRNA sense strand
gcaagugacaugaucgaau

SEQ ID NO: 1725260 - RNA, 19 nt, Homo sapiens
  misc_RNA (1)...(19): siRNA sense strand
uacaauacgucuugcugaa

SEQ ID NO: 1725261 - RNA, 19 nt, Homo sapiens
  misc_RNA (1)...(19): siRNA sense strand
gaacaggcugcguuaguca

SEQ ID NO: 1725262 - RNA, 19 nt, Homo sapiens
  misc_RNA (1)...(19): siRNA sense strand
ggaaguccaaggccucaaa

SEQ ID NO: 1725263 - RNA, 19 nt, Homo sapiens
  misc_RNA (1)...(19): siRNA sense strand
caugaagcauucuggguau

SEQ ID NO: 1725264 - RNA, 19 nt, Homo sapiens
  misc_RNA (1)...(19): siRNA sense strand
gauggcaagugacaugauc

SEQ ID NO: 1725265 - RNA, 19 nt, Homo sapiens
  misc_RNA (1)...(19): siRNA sense strand
gaugaaagauauuguuacc

SEQ ID NO: 1725266 - RNA, 19 nt, Homo sapiens
  misc_RNA (1)...(19): siRNA sense strand
uggcauggaugaauuuauc

SEQ ID NO: 1725267 - RNA, 19 nt, Homo sapiens
  misc_RNA (1)...(19): siRNA sense strand
gaaagcggagccucaggaa

SEQ ID NO: 1725268 - RNA, 19 nt, Homo sapiens
  misc_RNA (1)...(19): siRNA sense strand
ggauaagccucaaaacaug

SEQ ID NO: 1725269 - RNA, 19 nt, Homo sapiens
  misc_RNA (1)...(19): siRNA sense strand
uuugaaagcuacucucuca

SEQ ID NO: 1725270 - RNA, 19 nt, Homo sapiens
  misc_RNA (1)...(19): siRNA sense strand
ggacaauccagaugagcaa

SEQ ID NO: 1725271 - RNA, 19 nt, Homo sapiens
  misc_RNA (1)...(19): siRNA sense strand
ugcaccauguuuaauguua

SEQ ID NO: 1725272 - RNA, 19 nt, Homo sapiens
  misc_RNA (1)...(19): siRNA sense strand
aggauugcauuugaaguua

SEQ ID NO: 1725273 - RNA, 19 nt, Homo sapiens
  misc_RNA (1)...(19): siRNA sense strand
uugcugaacuagucauuga

SEQ ID NO: 1725274 - RNA, 19 nt, Homo sapiens
  misc_RNA (1)...(19): siRNA sense strand
gaccugcacuggccugaag

SEQ ID NO: 1725275 - RNA, 19 nt, Homo sapiens
  misc_RNA (1)...(19): siRNA sense strand
gauguacauagaaagguua

SEQ ID NO: 1725276 - RNA, 19 nt, Homo sapiens
  misc_RNA (1)...(19): siRNA sense strand
cgaacuaauugaagaaacu

SEQ ID NO: 1725277 - RNA, 19 nt, Homo sapiens
  misc_RNA (1)...(19): siRNA sense strand
uaugagguguuccugaaga

SEQ ID NO: 1725278 - RNA, 19 nt, Homo sapiens
  misc_RNA (1)...(19): siRNA sense strand
gaacaggccugauggaauu

SEQ ID NO: 1725279 - RNA, 19 nt, Homo sapiens
  misc_RNA (1)...(19): siRNA sense strand
gaucgaaucuugugucaaa

SEQ ID NO: 1725280 - RNA, 19 nt, Homo sapiens
  misc_RNA (1)...(19): siRNA sense strand
gaaccaggauugcauuuga

SEQ ID NO: 1725281 - RNA, 19 nt, Homo sapiens
  misc_RNA (1)...(19): siRNA sense strand
gagagaaacuacagacuga

SEQ ID NO: 1725282 - RNA, 19 nt, Homo sapiens
  misc_RNA (1)...(19): siRNA sense strand
cuacagagauuuccgauug

SEQ ID NO: 1725283 - RNA, 19 nt, Homo sapiens
  misc_RNA (1)...(19): siRNA sense strand
agacauggaugcagccuua

SEQ ID NO: 1725284 - RNA, 19 nt, Homo sapiens
  misc_RNA (1)...(19): siRNA sense strand
gcaaggagcaacucuauga

SEQ ID NO: 1725285 - RNA, 19 nt, Homo sapiens
  misc_RNA (1)...(19): siRNA sense strand
gaagcauucuggguauuua

SEQ ID NO: 1725286 - RNA, 19 nt, Homo sapiens
  misc_RNA (1)...(19): siRNA sense strand
gaggagauguacauagaaa

SEQ ID NO: 1725287 - RNA, 19 nt, Homo sapiens
  misc_RNA (1)...(19): siRNA sense strand
caaaucgcaucguauauug

SEQ ID NO: 1725288 - RNA, 19 nt, Homo sapiens
  misc_RNA (1)...(19): siRNA sense strand
acaaauggcagaccaaaua

SEQ ID NO: 1725289 - RNA, 19 nt, Homo sapiens
  misc_RNA (1)...(19): siRNA sense strand
gaacgcaaauuucccaagu

SEQ ID NO: 1725290 - RNA, 19 nt, Homo sapiens
  misc_RNA (1)...(19): siRNA sense strand
gagcugaagucaucuguca

SEQ ID NO: 1725291 - RNA, 19 nt, Homo sapiens
  misc_RNA (1)...(19): siRNA sense strand
ggauggacgucuacaaaug

SEQ ID NO: 1725292 - RNA, 19 nt, Homo sapiens
  misc_RNA (1)...(19): siRNA sense strand
gaagaagaaucggaugaga

SEQ ID NO: 1725293 - RNA, 19 nt, Homo sapiens
  misc_RNA (1)...(19): siRNA sense strand
ugaccacgcuucccucuuu

SEQ ID NO: 1725294 - RNA, 19 nt, Homo sapiens
  misc_RNA (1)...(19): siRNA sense strand
gcacuggccugaagaagag

SEQ ID NO: 1725295 - RNA, 19 nt, Homo sapiens
  misc_RNA (1)...(19): siRNA sense strand
ccacaaugcuuccaucauc

SEQ ID NO: 1725296 - RNA, 19 nt, Homo sapiens
  misc_RNA (1)...(19): siRNA sense strand
ggacuuacagcuucauauu

SEQ ID NO: 1725297 - RNA, 19 nt, Homo sapiens
  misc_RNA (1)...(19): siRNA sense strand
guuaaucacuccugccaaa

SEQ ID NO: 1725298 - RNA, 19 nt, Homo sapiens
  misc_RNA (1)...(19): siRNA sense strand
agaagaggcugcagcugua

SEQ ID NO: 1725299 - RNA, 19 nt, Homo sapiens
  misc_RNA (1)...(19): siRNA sense strand
ggagggagacaccgugaua

SEQ ID NO: 1725300 - RNA, 19 nt, Homo sapiens
  misc_RNA (1)...(19): siRNA sense strand
gcaguuaucgggagaagaa

SEQ ID NO: 1725301 - RNA, 19 nt, Homo sapiens
  misc_RNA (1)...(19): siRNA sense strand
ucaagaaguucgaacauca

SEQ ID NO: 1725302 - RNA, 19 nt, Homo sapiens
  misc_RNA (1)...(19): siRNA sense strand
ugaacgcugugcagaguua

SEQ ID NO: 1725303 - RNA, 19 nt, Homo sapiens
  misc_RNA (1)...(19): siRNA sense strand
gaacaucagcuccuuuaca

SEQ ID NO: 1725304 - RNA, 19 nt, Homo sapiens
  misc_RNA (1)...(19): siRNA sense strand
caagugacaugaucgaauc

SEQ ID NO: 1725305 - RNA, 19 nt, Homo sapiens
  misc_RNA (1)...(19): siRNA sense strand
caaacuugcuguccgaaug

SEQ ID NO: 1725306 - RNA, 19 nt, Homo sapiens
  misc_RNA (1)...(19): siRNA sense strand
gcuccuggauggccaaauu

SEQ ID NO: 1725307 - RNA, 19 nt, Homo sapiens
  misc_RNA (1)...(19): siRNA sense strand
gaacugugacuguugaaga

SEQ ID NO: 1725308 - RNA, 19 nt, Homo sapiens
  misc_RNA (1)...(19): siRNA sense strand
ggagacaccgugauauuug

SEQ ID NO: 1725309 - RNA, 19 nt, Homo sapiens
  misc_RNA (1)...(19): siRNA sense strand
ucaggaacuucuacaauug

SEQ ID NO: 1725310 - RNA, 19 nt, Homo sapiens
  misc_RNA (1)...(19): siRNA sense strand
ggauugcauuugaaguuaa

SEQ ID NO: 1725311 - RNA, 19 nt, Homo sapiens
  misc_RNA (1)...(19): siRNA sense strand
ggaaggaggagagaaacua

SEQ ID NO: 1725312 - RNA, 19 nt, Homo sapiens
  misc_RNA (1)...(19): siRNA sense strand
gagcaucaauaccauucaa

SEQ ID NO: 1725313 - RNA, 19 nt, Homo sapiens
  misc_RNA (1)...(19): siRNA sense strand
ucuaugagauguuccagaa

SEQ ID NO: 1725314 - RNA, 19 nt, Homo sapiens
  misc_RNA (1)...(19): siRNA sense strand
ggaggaagccacagcauca

SEQ ID NO: 1725315 - RNA, 19 nt, Homo sapiens
  misc_RNA (1)...(19): siRNA sense strand
caauaugcaccauguuuaa

SEQ ID NO: 1725316 - RNA, 19 nt, Homo sapiens
  misc_RNA (1)...(19): siRNA sense strand
ugaaguugauggcaaguga

SEQ ID NO: 1725317 - RNA, 19 nt, Homo sapiens
  misc_RNA (1)...(19): siRNA sense strand
gagcaacucuaugagaugu

SEQ ID NO: 1725318 - RNA, 19 nt, Homo sapiens
  misc_RNA (1)...(19): siRNA sense strand
uccaaggccucaaaucuuu

SEQ ID NO: 1725319 - RNA, 19 nt, Homo sapiens
  misc_RNA (1)...(19): siRNA sense strand
cauuggaggugguaauuau

SEQ ID NO: 1725320 - RNA, 19 nt, Homo sapiens
  misc_RNA (1)...(19): siRNA sense strand
ucaauaugcaccauguuua

SEQ ID NO: 1725321 - RNA, 19 nt, Homo sapiens
  misc_RNA (1)...(19): siRNA sense strand
gagcaaggagcaacucuau

SEQ ID NO: 1725322 - RNA, 19 nt, Homo sapiens
  misc_RNA (1)...(19): siRNA sense strand
ugccaaagcucaaucaaca

SEQ ID NO: 1725323 - RNA, 19 nt, Homo sapiens
  misc_RNA (1)...(19): siRNA sense strand
gcaccauguuuaauguuau

SEQ ID NO: 1725324 - RNA, 19 nt, Homo sapiens
  misc_RNA (1)...(19): siRNA sense strand
ggaacaggcugcguuaguc

SEQ ID NO: 1725325 - RNA, 19 nt, Homo sapiens
  misc_RNA (1)...(19): siRNA sense strand
gcaagcagcccagaucaga

SEQ ID NO: 1725326 - RNA, 19 nt, Homo sapiens
  misc_RNA (1)...(19): siRNA sense strand
caaaguucguuacuaucuu

SEQ ID NO: 1725327 - RNA, 19 nt, Homo sapiens
  misc_RNA (1)...(19): siRNA sense strand
ggacaguuuuccacuauuu

SEQ ID NO: 1725328 - RNA, 19 nt, Homo sapiens
  misc_RNA (1)...(19): siRNA sense strand
ccaaaucgcaucguauauu

SEQ ID NO: 1725329 - RNA, 19 nt, Homo sapiens
  misc_RNA (1)...(19): siRNA sense strand
acgcaaauuucccaaguuu

SEQ ID NO: 1725330 - RNA, 19 nt, Homo sapiens
  misc_RNA (1)...(19): siRNA sense strand
gaaggagaaggaagaguug

SEQ ID NO: 1725331 - RNA, 19 nt, Homo sapiens
  misc_RNA (1)...(19): siRNA sense strand
ggacagcgaugaggaagac

SEQ ID NO: 1725332 - RNA, 19 nt, Homo sapiens
  misc_RNA (1)...(19): siRNA sense strand
ggacuuuguuuucuucuuu

SEQ ID NO: 1725333 - RNA, 19 nt, Homo sapiens
  misc_RNA (1)...(19): siRNA sense strand
gcaaaguucguuacuaucu

SEQ ID NO: 1725334 - RNA, 19 nt, Homo sapiens
  misc_RNA (1)...(19): siRNA sense strand
gaagaagaguuuggaaagc

SEQ ID NO: 1725335 - RNA, 19 nt, Homo sapiens
  misc_RNA (1)...(19): siRNA sense strand
gacuauaauuugugcaaug

SEQ ID NO: 1725336 - RNA, 19 nt, Homo sapiens
  misc_RNA (1)...(19): siRNA sense strand
gagcaugccgguauccaaa

SEQ ID NO: 1725337 - RNA, 19 nt, Homo sapiens
  misc_RNA (1)...(19): siRNA sense strand
gcaacucuaugagauguuc

SEQ ID NO: 1725338 - RNA, 19 nt, Homo sapiens
  misc_RNA (1)...(19): siRNA sense strand
gaaggacagcgaugaggaa

SEQ ID NO: 1725339 - RNA, 19 nt, Homo sapiens
  misc_RNA (1)...(19): siRNA sense strand
uugcaaaguucguuacuau

SEQ ID NO: 1725340 - RNA, 19 nt, Homo sapiens
  misc_RNA (1)...(19): siRNA sense strand
uagacgaacuaauugaaga

SEQ ID NO: 1725341 - RNA, 19 nt, Homo sapiens
  misc_RNA (1)...(19): siRNA sense strand
ccaaagcucaaucaacaaa

SEQ ID NO: 1725342 - RNA, 19 nt, Homo sapiens
  misc_RNA (1)...(19): siRNA sense strand
gggagacaccgugauauuu

SEQ ID NO: 1725343 - RNA, 19 nt, Homo sapiens
  misc_RNA (1)...(19): siRNA sense strand
cucaggaacuucuacaauu

SEQ ID NO: 1725344 - RNA, 19 nt, Homo sapiens
  misc_RNA (1)...(19): siRNA sense strand
aacaucagcuccuuuacaa

SEQ ID NO: 1725345 - RNA, 19 nt, Homo sapiens
  misc_RNA (1)...(19): siRNA sense strand
aaaguucguuacuaucuug

SEQ ID NO: 1725346 - RNA, 19 nt, Homo sapiens
  misc_RNA (1)...(19): siRNA sense strand
ggaaaugggccaagagcau

SEQ ID NO: 1725347 - RNA, 19 nt, Homo sapiens
  misc_RNA (1)...(19): siRNA sense strand
ggaacaggccugauggaau

SEQ ID NO: 1725348 - RNA, 19 nt, Homo sapiens
  misc_RNA (1)...(19): siRNA sense strand
guaagaaugucuggaagag

SEQ ID NO: 1725349 - RNA, 19 nt, Homo sapiens
  misc_RNA (1)...(19): siRNA sense strand
caucagcuccuuuacaaug

SEQ ID NO: 1725350 - RNA, 19 nt, Homo sapiens
  misc_RNA (1)...(19): siRNA sense strand
aagaaugucuggaagagau

SEQ ID NO: 1725351 - RNA, 19 nt, Homo sapiens
  misc_RNA (1)...(19): siRNA sense strand
caacuauucucggcucuca

SEQ ID NO: 1725352 - RNA, 19 nt, Homo sapiens
  misc_RNA (1)...(19): siRNA sense strand
aaacaguuauccguaaaug

SEQ ID NO: 1725353 - RNA, 19 nt, Homo sapiens
  misc_RNA (1)...(19): siRNA sense strand
ggaaaggguuuugaugaaa

SEQ ID NO: 1725354 - RNA, 19 nt, Homo sapiens
  misc_RNA (1)...(19): siRNA sense strand
aaagagaggcuccgaguuc

SEQ ID NO: 1725355 - RNA, 19 nt, Homo sapiens
  misc_RNA (1)...(19): siRNA sense strand
ggccgagccuucuucaaug

SEQ ID NO: 1725356 - RNA, 19 nt, Homo sapiens
  misc_RNA (1)...(19): siRNA sense strand
cagaugucgugcugucuuu

SEQ ID NO: 1725357 - RNA, 19 nt, Homo sapiens
  misc_RNA (1)...(19): siRNA sense strand
ugacgaagggacuuuguuu

SEQ ID NO: 1725358 - RNA, 19 nt, Homo sapiens
  misc_RNA (1)...(19): siRNA sense strand
gcauggaaaugggccaaga

SEQ ID NO: 1725359 - RNA, 19 nt, Homo sapiens
  misc_RNA (1)...(19): siRNA sense strand
gcaagugacaugaucgaau

SEQ ID NO: 1725360 - RNA, 19 nt, Homo sapiens
  misc_RNA (1)...(19): siRNA sense strand
uacaauacgucuugcugaa

SEQ ID NO: 1725361 - RNA, 19 nt, Homo sapiens
  misc_RNA (1)...(19): siRNA sense strand
gaacaggcugcguuaguca

SEQ ID NO: 1725362 - RNA, 19 nt, Homo sapiens
  misc_RNA (1)...(19): siRNA sense strand
ggaaguccaaggccucaaa

SEQ ID NO: 1725363 - RNA, 19 nt, Homo sapiens
  misc_RNA (1)...(19): siRNA sense strand
caugaagcauucuggguau

SEQ ID NO: 1725364 - RNA, 19 nt, Homo sapiens
  misc_RNA (1)...(19): siRNA sense strand
gauggcaagugacaugauc

SEQ ID NO: 1725365 - RNA, 19 nt, Homo sapiens
  misc_RNA (1)...(19): siRNA sense strand
gaugaaagauauuguuacc

SEQ ID NO: 1725366 - RNA, 19 nt, Homo sapiens
  misc_RNA (1)...(19): siRNA sense strand
uggcauggaugaauuuauc

SEQ ID NO: 1725367 - RNA, 19 nt, Homo sapiens
  misc_RNA (1)...(19): siRNA sense strand
gaaagcggagccucaggaa

SEQ ID NO: 1725368 - RNA, 19 nt, Homo sapiens
  misc_RNA (1)...(19): siRNA sense strand
ggauaagccucaaaacaug

SEQ ID NO: 1725369 - RNA, 19 nt, Homo sapiens
  misc_RNA (1)...(19): siRNA sense strand
uuugaaagcuacucucuca

SEQ ID NO: 1725370 - RNA, 19 nt, Homo sapiens
  misc_RNA (1)...(19): siRNA sense strand
ggacaauccagaugagcaa

SEQ ID NO: 1725371 - RNA, 19 nt, Homo sapiens
  misc_RNA (1)...(19): siRNA sense strand
ugcaccauguuuaauguua

SEQ ID NO: 1725372 - RNA, 19 nt, Homo sapiens
  misc_RNA (1)...(19): siRNA sense strand
aggauugcauuugaaguua

SEQ ID NO: 1725373 - RNA, 19 nt, Homo sapiens
  misc_RNA (1)...(19): siRNA sense strand
uugcugaacuagucauuga

SEQ ID NO: 1725374 - RNA, 19 nt, Homo sapiens
  misc_RNA (1)...(19): siRNA sense strand
gaccugcacuggccugaag

SEQ ID NO: 1725375 - RNA, 19 nt, Homo sapiens
  misc_RNA (1)...(19): siRNA sense strand
gauguacauagaaagguua

SEQ ID NO: 1725376 - RNA, 19 nt, Homo sapiens
  misc_RNA (1)...(19): siRNA sense strand
cgaacuaauugaagaaacu

SEQ ID NO: 1725377 - RNA, 19 nt, Homo sapiens
  misc_RNA (1)...(19): siRNA sense strand
uaugagguguuccugaaga

SEQ ID NO: 1725378 - RNA, 19 nt, Homo sapiens
  misc_RNA (1)...(19): siRNA sense strand
ggagagaccuuuaugagaa

SEQ ID NO: 1725379 - RNA, 19 nt, Homo sapiens
  misc_RNA (1)...(19): siRNA sense strand
gaaauuaaguugcaagauc

SEQ ID NO: 1725380 - RNA, 19 nt, Homo sapiens
  misc_RNA (1)...(19): siRNA sense strand
gaaauggauugaagugaaa

SEQ ID NO: 1725381 - RNA, 19 nt, Homo sapiens
  misc_RNA (1)...(19): siRNA sense strand
gaaaagggguauuugauuu

SEQ ID NO: 1725382 - RNA, 19 nt, Homo sapiens
  misc_RNA (1)...(19): siRNA sense strand
ccacaugguuucuuccuuu

SEQ ID NO: 1725383 - RNA, 19 nt, Homo sapiens
  misc_RNA (1)...(19): siRNA sense strand
gagaagaaauuaaguugca

SEQ ID NO: 1725384 - RNA, 19 nt, Homo sapiens
  misc_RNA (1)...(19): siRNA sense strand
ugaaauggauugaagugaa

SEQ ID NO: 1725385 - RNA, 19 nt, Homo sapiens
  misc_RNA (1)...(19): siRNA sense strand
gcugcaagcuggccaggua

SEQ ID NO: 1725386 - RNA, 19 nt, Homo sapiens
  misc_RNA (1)...(19): siRNA sense strand
gauguggacuugaagaaau

SEQ ID NO: 1725387 - RNA, 19 nt, Homo sapiens
  misc_RNA (1)...(19): siRNA sense strand
gagagaccuuuaugagaaa

SEQ ID NO: 1725388 - RNA, 19 nt, Homo sapiens
  misc_RNA (1)...(19): siRNA sense strand
ggaucaaacuacucuguga

SEQ ID NO: 1725389 - RNA, 19 nt, Homo sapiens
  misc_RNA (1)...(19): siRNA sense strand
aaagggccauggacuauuu

SEQ ID NO: 1725390 - RNA, 19 nt, Homo sapiens
  misc_RNA (1)...(19): siRNA sense strand
ucaaguacuucucugauga

SEQ ID NO: 1725391 - RNA, 19 nt, Homo sapiens
  misc_RNA (1)...(19): siRNA sense strand
caagaucucucagcaaauc

SEQ ID NO: 1725392 - RNA, 19 nt, Homo sapiens
  misc_RNA (1)...(19): siRNA sense strand
ccaggaagaugauguugga

SEQ ID NO: 1725393 - RNA, 19 nt, Homo sapiens
  misc_RNA (1)...(19): siRNA sense strand
gaagugaaagccaaagcua

SEQ ID NO: 1725394 - RNA, 19 nt, Homo sapiens
  misc_RNA (1)...(19): siRNA sense strand
ggaaaacuauggcaaauuc

SEQ ID NO: 1725395 - RNA, 19 nt, Homo sapiens
  misc_RNA (1)...(19): siRNA sense strand
gaggaggacuucgugcaaa

SEQ ID NO: 1725396 - RNA, 19 nt, Homo sapiens
  misc_RNA (1)...(19): siRNA sense strand
guacucagcacuaaucaga

SEQ ID NO: 1725397 - RNA, 19 nt, Homo sapiens
  misc_RNA (1)...(19): siRNA sense strand
gcaaagggccauggacuau

SEQ ID NO: 1725398 - RNA, 19 nt, Homo sapiens
  misc_RNA (1)...(19): siRNA sense strand
gaaguggacugcgagaagu

SEQ ID NO: 1725399 - RNA, 19 nt, Homo sapiens
  misc_RNA (1)...(19): siRNA sense strand
gcuguggccucucgcauga

SEQ ID NO: 1725400 - RNA, 19 nt, Homo sapiens
  misc_RNA (1)...(19): siRNA sense strand
gaauuguucuacuguuugu

SEQ ID NO: 1725401 - RNA, 19 nt, Homo sapiens
  misc_RNA (1)...(19): siRNA sense strand
ggcuggagcugcugaaaug

SEQ ID NO: 1725402 - RNA, 19 nt, Homo sapiens
  misc_RNA (1)...(19): siRNA sense strand
guaagaaguacagaaagua

SEQ ID NO: 1725403 - RNA, 19 nt, Homo sapiens
  misc_RNA (1)...(19): siRNA sense strand
ugcaagaucucucagcaaa

SEQ ID NO: 1725404 - RNA, 19 nt, Homo sapiens
  misc_RNA (1)...(19): siRNA sense strand
uggaguaccuuucgagaau

SEQ ID NO: 1725405 - RNA, 19 nt, Homo sapiens
  misc_RNA (1)...(19): siRNA sense strand
guuagaaacacuucaagaa

SEQ ID NO: 1725406 - RNA, 19 nt, Homo sapiens
  misc_RNA (1)...(19): siRNA sense strand
caacaggagagaccuuuau

SEQ ID NO: 1725407 - RNA, 19 nt, Homo sapiens
  misc_RNA (1)...(19): siRNA sense strand
ggaauuguucuacuguuug

SEQ ID NO: 1725408 - RNA, 19 nt, Homo sapiens
  misc_RNA (1)...(19): siRNA sense strand
uggaauuguucuacuguuu

SEQ ID NO: 1725409 - RNA, 19 nt, Homo sapiens
  misc_RNA (1)...(19): siRNA sense strand
gaagugggguucagauaau

SEQ ID NO: 1725410 - RNA, 19 nt, Homo sapiens
  misc_RNA (1)...(19): siRNA sense strand
ugaagaagcucugguuggu

SEQ ID NO: 1725411 - RNA, 19 nt, Homo sapiens
  misc_RNA (1)...(19): siRNA sense strand
caagacagguuugacuauc

SEQ ID NO: 1725412 - RNA, 19 nt, Homo sapiens
  misc_RNA (1)...(19): siRNA sense strand
gcaagaccaagacguguga

SEQ ID NO: 1725413 - RNA, 19 nt, Homo sapiens
  misc_RNA (1)...(19): siRNA sense strand
gaaggcagaccauguggau

SEQ ID NO: 1725414 - RNA, 19 nt, Homo sapiens
  misc_RNA (1)...(19): siRNA sense strand
cguaagaaguacagaaagu

SEQ ID NO: 1725415 - RNA, 19 nt, Homo sapiens
  misc_RNA (1)...(19): siRNA sense strand
gcagaaggcggaugugucu

SEQ ID NO: 1725416 - RNA, 19 nt, Homo sapiens
  misc_RNA (1)...(19): siRNA sense strand
agauggaguugcuguuuga

SEQ ID NO: 1725417 - RNA, 19 nt, Homo sapiens
  misc_RNA (1)...(19): siRNA sense strand
ggaaguggacugcgagaag

SEQ ID NO: 1725418 - RNA, 19 nt, Homo sapiens
  misc_RNA (1)...(19): siRNA sense strand
cgugugcacuggacugaaa

SEQ ID NO: 1725419 - RNA, 19 nt, Homo sapiens
  misc_RNA (1)...(19): siRNA sense strand
uggagaaacugcagcacuu

SEQ ID NO: 1725420 - RNA, 19 nt, Homo sapiens
  misc_RNA (1)...(19): siRNA sense strand
uaagauggaguugcuguuu

SEQ ID NO: 1725421 - RNA, 19 nt, Homo sapiens
  misc_RNA (1)...(19): siRNA sense strand
gcugggaucuuuccacacu

SEQ ID NO: 1725422 - RNA, 19 nt, Homo sapiens
  misc_RNA (1)...(19): siRNA sense strand
cagaaucucacgcaccuuu

SEQ ID NO: 1725423 - RNA, 19 nt, Homo sapiens
  misc_RNA (1)...(19): siRNA sense strand
ggaccgcucugcacugacu

SEQ ID NO: 1725424 - RNA, 19 nt, Homo sapiens
  misc_RNA (1)...(19): siRNA sense strand
guguacgucuucuuccuuu

SEQ ID NO: 1725425 - RNA, 19 nt, Homo sapiens
  misc_RNA (1)...(19): siRNA sense strand
gaucuuuccacacuucuga

SEQ ID NO: 1725426 - RNA, 19 nt, Homo sapiens
  misc_RNA (1)...(19): siRNA sense strand
uggaggaccuggaggaugu

SEQ ID NO: 1725427 - RNA, 19 nt, Homo sapiens
  misc_RNA (1)...(19): siRNA sense strand
uguacuaccugcuggaaga

SEQ ID NO: 1725428 - RNA, 19 nt, Homo sapiens
  misc_RNA (1)...(19): siRNA sense strand
ucagauaaugcacguguuu

SEQ ID NO: 1725429 - RNA, 19 nt, Homo sapiens
  misc_RNA (1)...(19): siRNA sense strand
cuacuuggagaagaaauua

SEQ ID NO: 1725430 - RNA, 19 nt, Homo sapiens
  misc_RNA (1)...(19): siRNA sense strand
uguuguacguuuccucuuu

SEQ ID NO: 1725431 - RNA, 19 nt, Homo sapiens
  misc_RNA (1)...(19): siRNA sense strand
ggaggaggacuucgugcaa

SEQ ID NO: 1725432 - RNA, 19 nt, Homo sapiens
  misc_RNA (1)...(19): siRNA sense strand
uggaggauguggacuugaa

SEQ ID NO: 1725433 - RNA, 19 nt, Homo sapiens
  misc_RNA (1)...(19): siRNA sense strand
uccacaagaucgugagaaa

SEQ ID NO: 1725434 - RNA, 19 nt, Homo sapiens
  misc_RNA (1)...(19): siRNA sense strand
aggcggaugugucugcuuu

SEQ ID NO: 1725435 - RNA, 19 nt, Homo sapiens
  misc_RNA (1)...(19): siRNA sense strand
ggacugaagcaccuguugu

SEQ ID NO: 1725436 - RNA, 19 nt, Homo sapiens
  misc_RNA (1)...(19): siRNA sense strand
gagcuggaccugagugaca

SEQ ID NO: 1725437 - RNA, 19 nt, Homo sapiens
  misc_RNA (1)...(19): siRNA sense strand
ggauguggacuugaagaaa

SEQ ID NO: 1725438 - RNA, 19 nt, Homo sapiens
  misc_RNA (1)...(19): siRNA sense strand
ccaggaagacagcauugaa

SEQ ID NO: 1725439 - RNA, 19 nt, Homo sapiens
  misc_RNA (1)...(19): siRNA sense strand
ucuuugagccuucuuggua

SEQ ID NO: 1725440 - RNA, 19 nt, Homo sapiens
  misc_RNA (1)...(19): siRNA sense strand
uaggaccgcucugcacuga

SEQ ID NO: 1725441 - RNA, 19 nt, Homo sapiens
  misc_RNA (1)...(19): siRNA sense strand
guuguacguuuccucuuug

SEQ ID NO: 1725442 - RNA, 19 nt, Homo sapiens
  misc_RNA (1)...(19): siRNA sense strand
aagauggaguugcuguuug

SEQ ID NO: 1725443 - RNA, 19 nt, Homo sapiens
  misc_RNA (1)...(19): siRNA sense strand
acucagcacuaaucagaau

SEQ ID NO: 1725444 - RNA, 19 nt, Homo sapiens
  misc_RNA (1)...(19): siRNA sense strand
ggaggaagaggaggaggaa

SEQ ID NO: 1725445 - RNA, 19 nt, Homo sapiens
  misc_RNA (1)...(19): siRNA sense strand
ugacaguccuucuggaaaa

SEQ ID NO: 1725446 - RNA, 19 nt, Homo sapiens
  misc_RNA (1)...(19): siRNA sense strand
uaaugcacguguuucgaau

SEQ ID NO: 1725447 - RNA, 19 nt, Homo sapiens
  misc_RNA (1)...(19): siRNA sense strand
gagcugaccgucgucuuug

SEQ ID NO: 1725448 - RNA, 19 nt, Homo sapiens
  misc_RNA (1)...(19): siRNA sense strand
gucaugauguucugugaag

SEQ ID NO: 1725449 - RNA, 19 nt, Homo sapiens
  misc_RNA (1)...(19): siRNA sense strand
cuaaugaucgacuucaaug

SEQ ID NO: 1725450 - RNA, 19 nt, Homo sapiens
  misc_RNA (1)...(19): siRNA sense strand
ggaaucauggacugcagaa

SEQ ID NO: 1725451 - RNA, 19 nt, Homo sapiens
  misc_RNA (1)...(19): siRNA sense strand
ggagaaacugcagcacuug

SEQ ID NO: 1725452 - RNA, 19 nt, Homo sapiens
  misc_RNA (1)...(19): siRNA sense strand
ccaagacagguuugacuau

SEQ ID NO: 1725453 - RNA, 19 nt, Homo sapiens
  misc_RNA (1)...(19): siRNA sense strand
gcuaaugaucgacuucaau

SEQ ID NO: 1725454 - RNA, 19 nt, Homo sapiens
  misc_RNA (1)...(19): siRNA sense strand
gcagauuccagugcauuga

SEQ ID NO: 1725455 - RNA, 19 nt, Homo sapiens
  misc_RNA (1)...(19): siRNA sense strand
gaagcagauuccagugcau

SEQ ID NO: 1725456 - RNA, 19 nt, Homo sapiens
  misc_RNA (1)...(19): siRNA sense strand
gagaaaacccuccagaauc

SEQ ID NO: 1725457 - RNA, 19 nt, Homo sapiens
  misc_RNA (1)...(19): siRNA sense strand
ucugugaagugcugaaaca

SEQ ID NO: 1725458 - RNA, 19 nt, Homo sapiens
  misc_RNA (1)...(19): siRNA sense strand
ccucgguacucagcacuaa

SEQ ID NO: 1725459 - RNA, 19 nt, Homo sapiens
  misc_RNA (1)...(19): siRNA sense strand
gccgacaccuugauauggu

SEQ ID NO: 1725460 - RNA, 19 nt, Homo sapiens
  misc_RNA (1)...(19): siRNA sense strand
uaacaugcccaaggaggaa

SEQ ID NO: 1725461 - RNA, 19 nt, Homo sapiens
  misc_RNA (1)...(19): siRNA sense strand
ggaguaccuuucgagaauc

SEQ ID NO: 1725462 - RNA, 19 nt, Homo sapiens
  misc_RNA (1)...(19): siRNA sense strand
aaagagaugagccgaagug

SEQ ID NO: 1725463 - RNA, 19 nt, Homo sapiens
  misc_RNA (1)...(19): siRNA sense strand
ugagcugaccgucgucuuu

SEQ ID NO: 1725464 - RNA, 19 nt, Homo sapiens
  misc_RNA (1)...(19): siRNA sense strand
gggacacucuaccaagaca

SEQ ID NO: 1725465 - RNA, 19 nt, Homo sapiens
  misc_RNA (1)...(19): siRNA sense strand
ggaagacagcauugaagag

SEQ ID NO: 1725466 - RNA, 19 nt, Homo sapiens
  misc_RNA (1)...(19): siRNA sense strand
gggguugucugaaauguau

SEQ ID NO: 1725467 - RNA, 19 nt, Homo sapiens
  misc_RNA (1)...(19): siRNA sense strand
caccuguugugcaaucuga

SEQ ID NO: 1725468 - RNA, 19 nt, Homo sapiens
  misc_RNA (1)...(19): siRNA sense strand
uccauaacaugcccaagga

SEQ ID NO: 1725469 - RNA, 19 nt, Homo sapiens
  misc_RNA (1)...(19): siRNA sense strand
caaagggccauggacuauu

SEQ ID NO: 1725470 - RNA, 19 nt, Homo sapiens
  misc_RNA (1)...(19): siRNA sense strand
ggacuugaagaaauuuaag

SEQ ID NO: 1725471 - RNA, 19 nt, Homo sapiens
  misc_RNA (1)...(19): siRNA sense strand
agugaaagccaaagcuaaa

SEQ ID NO: 1725472 - RNA, 19 nt, Homo sapiens
  misc_RNA (1)...(19): siRNA sense strand
gacugcgucucaucaagga

SEQ ID NO: 1725473 - RNA, 19 nt, Homo sapiens
  misc_RNA (1)...(19): siRNA sense strand
agacagguuugacuaucug

SEQ ID NO: 1725474 - RNA, 19 nt, Homo sapiens
  misc_RNA (1)...(19): siRNA sense strand
cucccaagcuccucucaug

SEQ ID NO: 1725475 - RNA, 19 nt, Homo sapiens
  misc_RNA (1)...(19): siRNA sense strand
ucaacaggagagaccuuua

SEQ ID NO: 1725476 - RNA, 19 nt, Homo sapiens
  misc_RNA (1)...(19): siRNA sense strand
ccagaauccucuuccucau

SEQ ID NO: 1725477 - RNA, 19 nt, Homo sapiens
  misc_RNA (1)...(19): siRNA sense strand
gggucaugauguucuguga

SEQ ID NO: 1725478 - RNA, 19 nt, Homo sapiens
  misc_RNA (1)...(19): siRNA sense strand
ggagagaccuuuaugagaa

SEQ ID NO: 1725479 - RNA, 19 nt, Homo sapiens
  misc_RNA (1)...(19): siRNA sense strand
gaaauuaaguugcaagauc

SEQ ID NO: 1725480 - RNA, 19 nt, Homo sapiens
  misc_RNA (1)...(19): siRNA sense strand
gaaauggauugaagugaaa

SEQ ID NO: 1725481 - RNA, 19 nt, Homo sapiens
  misc_RNA (1)...(19): siRNA sense strand
gaaaagggguauuugauuu

SEQ ID NO: 1725482 - RNA, 19 nt, Homo sapiens
  misc_RNA (1)...(19): siRNA sense strand
ccacaugguuucuuccuuu

SEQ ID NO: 1725483 - RNA, 19 nt, Homo sapiens
  misc_RNA (1)...(19): siRNA sense strand
gagaagaaauuaaguugca

SEQ ID NO: 1725484 - RNA, 19 nt, Homo sapiens
  misc_RNA (1)...(19): siRNA sense strand
ugaaauggauugaagugaa

SEQ ID NO: 1725485 - RNA, 19 nt, Homo sapiens
  misc_RNA (1)...(19): siRNA sense strand
gcugcaagcuggccaggua

SEQ ID NO: 1725486 - RNA, 19 nt, Homo sapiens
  misc_RNA (1)...(19): siRNA sense strand
gauguggacuugaagaaau

SEQ ID NO: 1725487 - RNA, 19 nt, Homo sapiens
  misc_RNA (1)...(19): siRNA sense strand
gagagaccuuuaugagaaa

SEQ ID NO: 1725488 - RNA, 19 nt, Homo sapiens
  misc_RNA (1)...(19): siRNA sense strand
ggaucaaacuacucuguga

SEQ ID NO: 1725489 - RNA, 19 nt, Homo sapiens
  misc_RNA (1)...(19): siRNA sense strand
aaagggccauggacuauuu

SEQ ID NO: 1725490 - RNA, 19 nt, Homo sapiens
  misc_RNA (1)...(19): siRNA sense strand
ucaaguacuucucugauga

SEQ ID NO: 1725491 - RNA, 19 nt, Homo sapiens
  misc_RNA (1)...(19): siRNA sense strand
caagaucucucagcaaauc

SEQ ID NO: 1725492 - RNA, 19 nt, Homo sapiens
  misc_RNA (1)...(19): siRNA sense strand
ccaggaagaugauguugga

SEQ ID NO: 1725493 - RNA, 19 nt, Homo sapiens
  misc_RNA (1)...(19): siRNA sense strand
gaagugaaagccaaagcua

SEQ ID NO: 1725494 - RNA, 19 nt, Homo sapiens
  misc_RNA (1)...(19): siRNA sense strand
ggaaaacuauggcaaauuc

SEQ ID NO: 1725495 - RNA, 19 nt, Homo sapiens
  misc_RNA (1)...(19): siRNA sense strand
gaggaggacuucgugcaaa

SEQ ID NO: 1725496 - RNA, 19 nt, Homo sapiens
  misc_RNA (1)...(19): siRNA sense strand
guacucagcacuaaucaga

SEQ ID NO: 1725497 - RNA, 19 nt, Homo sapiens
  misc_RNA (1)...(19): siRNA sense strand
gcaaagggccauggacuau

SEQ ID NO: 1725498 - RNA, 19 nt, Homo sapiens
  misc_RNA (1)...(19): siRNA sense strand
gaaguggacugcgagaagu

SEQ ID NO: 1725499 - RNA, 19 nt, Homo sapiens
  misc_RNA (1)...(19): siRNA sense strand
gcuguggccucucgcauga

SEQ ID NO: 1725500 - RNA, 19 nt, Homo sapiens
  misc_RNA (1)...(19): siRNA sense strand
gaauuguucuacuguuugu

SEQ ID NO: 1725501 - RNA, 19 nt, Homo sapiens
  misc_RNA (1)...(19): siRNA sense strand
ggcuggagcugcugaaaug

SEQ ID NO: 1725502 - RNA, 19 nt, Homo sapiens
  misc_RNA (1)...(19): siRNA sense strand
guaagaaguacagaaagua

SEQ ID NO: 1725503 - RNA, 19 nt, Homo sapiens
  misc_RNA (1)...(19): siRNA sense strand
ugcaagaucucucagcaaa

SEQ ID NO: 1725504 - RNA, 19 nt, Homo sapiens
  misc_RNA (1)...(19): siRNA sense strand
uggaguaccuuucgagaau

SEQ ID NO: 1725505 - RNA, 19 nt, Homo sapiens
  misc_RNA (1)...(19): siRNA sense strand
guuagaaacacuucaagaa

SEQ ID NO: 1725506 - RNA, 19 nt, Homo sapiens
  misc_RNA (1)...(19): siRNA sense strand
caacaggagagaccuuuau

SEQ ID NO: 1725507 - RNA, 19 nt, Homo sapiens
  misc_RNA (1)...(19): siRNA sense strand
ggaauuguucuacuguuug

SEQ ID NO: 1725508 - RNA, 19 nt, Homo sapiens
  misc_RNA (1)...(19): siRNA sense strand
uggaauuguucuacuguuu

SEQ ID NO: 1725509 - RNA, 19 nt, Homo sapiens
  misc_RNA (1)...(19): siRNA sense strand
gaagugggguucagauaau

SEQ ID NO: 1725510 - RNA, 19 nt, Homo sapiens
  misc_RNA (1)...(19): siRNA sense strand
ugaagaagcucugguuggu

SEQ ID NO: 1725511 - RNA, 19 nt, Homo sapiens
  misc_RNA (1)...(19): siRNA sense strand
caagacagguuugacuauc

SEQ ID NO: 1725512 - RNA, 19 nt, Homo sapiens
  misc_RNA (1)...(19): siRNA sense strand
gcaagaccaagacguguga

SEQ ID NO: 1725513 - RNA, 19 nt, Homo sapiens
  misc_RNA (1)...(19): siRNA sense strand
gaaggcagaccauguggau

SEQ ID NO: 1725514 - RNA, 19 nt, Homo sapiens
  misc_RNA (1)...(19): siRNA sense strand
cguaagaaguacagaaagu

SEQ ID NO: 1725515 - RNA, 19 nt, Homo sapiens
  misc_RNA (1)...(19): siRNA sense strand
gcagaaggcggaugugucu

SEQ ID NO: 1725516 - RNA, 19 nt, Homo sapiens
  misc_RNA (1)...(19): siRNA sense strand
agauggaguugcuguuuga

SEQ ID NO: 1725517 - RNA, 19 nt, Homo sapiens
  misc_RNA (1)...(19): siRNA sense strand
ggaaguggacugcgagaag

SEQ ID NO: 1725518 - RNA, 19 nt, Homo sapiens
  misc_RNA (1)...(19): siRNA sense strand
cgugugcacuggacugaaa

SEQ ID NO: 1725519 - RNA, 19 nt, Homo sapiens
  misc_RNA (1)...(19): siRNA sense strand
uggagaaacugcagcacuu

SEQ ID NO: 1725520 - RNA, 19 nt, Homo sapiens
  misc_RNA (1)...(19): siRNA sense strand
uaagauggaguugcuguuu

SEQ ID NO: 1725521 - RNA, 19 nt, Homo sapiens
  misc_RNA (1)...(19): siRNA sense strand
gcugggaucuuuccacacu

SEQ ID NO: 1725522 - RNA, 19 nt, Homo sapiens
  misc_RNA (1)...(19): siRNA sense strand
cagaaucucacgcaccuuu

SEQ ID NO: 1725523 - RNA, 19 nt, Homo sapiens
  misc_RNA (1)...(19): siRNA sense strand
ggaccgcucugcacugacu

SEQ ID NO: 1725524 - RNA, 19 nt, Homo sapiens
  misc_RNA (1)...(19): siRNA sense strand
guguacgucuucuuccuuu

SEQ ID NO: 1725525 - RNA, 19 nt, Homo sapiens
  misc_RNA (1)...(19): siRNA sense strand
gaucuuuccacacuucuga

SEQ ID NO: 1725526 - RNA, 19 nt, Homo sapiens
  misc_RNA (1)...(19): siRNA sense strand
uggaggaccuggaggaugu

SEQ ID NO: 1725527 - RNA, 19 nt, Homo sapiens
  misc_RNA (1)...(19): siRNA sense strand
uguacuaccugcuggaaga

SEQ ID NO: 1725528 - RNA, 19 nt, Homo sapiens
  misc_RNA (1)...(19): siRNA sense strand
ucagauaaugcacguguuu

SEQ ID NO: 1725529 - RNA, 19 nt, Homo sapiens
  misc_RNA (1)...(19): siRNA sense strand
cuacuuggagaagaaauua

SEQ ID NO: 1725530 - RNA, 19 nt, Homo sapiens
  misc_RNA (1)...(19): siRNA sense strand
uguuguacguuuccucuuu

SEQ ID NO: 1725531 - RNA, 19 nt, Homo sapiens
  misc_RNA (1)...(19): siRNA sense strand
ggaggaggacuucgugcaa

SEQ ID NO: 1725532 - RNA, 19 nt, Homo sapiens
  misc_RNA (1)...(19): siRNA sense strand
uggaggauguggacuugaa

SEQ ID NO: 1725533 - RNA, 19 nt, Homo sapiens
  misc_RNA (1)...(19): siRNA sense strand
uccacaagaucgugagaaa

SEQ ID NO: 1725534 - RNA, 19 nt, Homo sapiens
  misc_RNA (1)...(19): siRNA sense strand
aggcggaugugucugcuuu

SEQ ID NO: 1725535 - RNA, 19 nt, Homo sapiens
  misc_RNA (1)...(19): siRNA sense strand
ggacugaagcaccuguugu

SEQ ID NO: 1725536 - RNA, 19 nt, Homo sapiens
  misc_RNA (1)...(19): siRNA sense strand
gagcuggaccugagugaca

SEQ ID NO: 1725537 - RNA, 19 nt, Homo sapiens
  misc_RNA (1)...(19): siRNA sense strand
ggauguggacuugaagaaa

SEQ ID NO: 1725538 - RNA, 19 nt, Homo sapiens
  misc_RNA (1)...(19): siRNA sense strand
ccaggaagacagcauugaa

SEQ ID NO: 1725539 - RNA, 19 nt, Homo sapiens
  misc_RNA (1)...(19): siRNA sense strand
ucuuugagccuucuuggua

SEQ ID NO: 1725540 - RNA, 19 nt, Homo sapiens
  misc_RNA (1)...(19): siRNA sense strand
uaggaccgcucugcacuga

SEQ ID NO: 1725541 - RNA, 19 nt, Homo sapiens
  misc_RNA (1)...(19): siRNA sense strand
guuguacguuuccucuuug

SEQ ID NO: 1725542 - RNA, 19 nt, Homo sapiens
  misc_RNA (1)...(19): siRNA sense strand
aagauggaguugcuguuug

SEQ ID NO: 1725543 - RNA, 19 nt, Homo sapiens
  misc_RNA (1)...(19): siRNA sense strand
acucagcacuaaucagaau

SEQ ID NO: 1725544 - RNA, 19 nt, Homo sapiens
  misc_RNA (1)...(19): siRNA sense strand
ggaggaagaggaggaggaa

SEQ ID NO: 1725545 - RNA, 19 nt, Homo sapiens
  misc_RNA (1)...(19): siRNA sense strand
ugacaguccuucuggaaaa

SEQ ID NO: 1725546 - RNA, 19 nt, Homo sapiens
  misc_RNA (1)...(19): siRNA sense strand
uaaugcacguguuucgaau

SEQ ID NO: 1725547 - RNA, 19 nt, Homo sapiens
  misc_RNA (1)...(19): siRNA sense strand
gagcugaccgucgucuuug

SEQ ID NO: 1725548 - RNA, 19 nt, Homo sapiens
  misc_RNA (1)...(19): siRNA sense strand
gucaugauguucugugaag

SEQ ID NO: 1725549 - RNA, 19 nt, Homo sapiens
  misc_RNA (1)...(19): siRNA sense strand
cuaaugaucgacuucaaug

SEQ ID NO: 1725550 - RNA, 19 nt, Homo sapiens
  misc_RNA (1)...(19): siRNA sense strand
ggaaucauggacugcagaa

SEQ ID NO: 1725551 - RNA, 19 nt, Homo sapiens
  misc_RNA (1)...(19): siRNA sense strand
ggagaaacugcagcacuug

SEQ ID NO: 1725552 - RNA, 19 nt, Homo sapiens
  misc_RNA (1)...(19): siRNA sense strand
ccaagacagguuugacuau

SEQ ID NO: 1725553 - RNA, 19 nt, Homo sapiens
  misc_RNA (1)...(19): siRNA sense strand
gcuaaugaucgacuucaau

SEQ ID NO: 1725554 - RNA, 19 nt, Homo sapiens
  misc_RNA (1)...(19): siRNA sense strand
gcagauuccagugcauuga

SEQ ID NO: 1725555 - RNA, 19 nt, Homo sapiens
  misc_RNA (1)...(19): siRNA sense strand
gaagcagauuccagugcau

SEQ ID NO: 1725556 - RNA, 19 nt, Homo sapiens
  misc_RNA (1)...(19): siRNA sense strand
gagaaaacccuccagaauc

SEQ ID NO: 1725557 - RNA, 19 nt, Homo sapiens
  misc_RNA (1)...(19): siRNA sense strand
ucugugaagugcugaaaca

SEQ ID NO: 1725558 - RNA, 19 nt, Homo sapiens
  misc_RNA (1)...(19): siRNA sense strand
ccucgguacucagcacuaa

SEQ ID NO: 1725559 - RNA, 19 nt, Homo sapiens
  misc_RNA (1)...(19): siRNA sense strand
gccgacaccuugauauggu

SEQ ID NO: 1725560 - RNA, 19 nt, Homo sapiens
  misc_RNA (1)...(19): siRNA sense strand
uaacaugcccaaggaggaa

SEQ ID NO: 1725561 - RNA, 19 nt, Homo sapiens
  misc_RNA (1)...(19): siRNA sense strand
ggaguaccuuucgagaauc

SEQ ID NO: 1725562 - RNA, 19 nt, Homo sapiens
  misc_RNA (1)...(19): siRNA sense strand
aaagagaugagccgaagug

SEQ ID NO: 1725563 - RNA, 19 nt, Homo sapiens
  misc_RNA (1)...(19): siRNA sense strand
ugagcugaccgucgucuuu

SEQ ID NO: 1725564 - RNA, 19 nt, Homo sapiens
  misc_RNA (1)...(19): siRNA sense strand
gggacacucuaccaagaca

SEQ ID NO: 1725565 - RNA, 19 nt, Homo sapiens
  misc_RNA (1)...(19): siRNA sense strand
ggaagacagcauugaagag

SEQ ID NO: 1725566 - RNA, 19 nt, Homo sapiens
  misc_RNA (1)...(19): siRNA sense strand
gggguugucugaaauguau

SEQ ID NO: 1725567 - RNA, 19 nt, Homo sapiens
  misc_RNA (1)...(19): siRNA sense strand
caccuguugugcaaucuga

SEQ ID NO: 1725568 - RNA, 19 nt, Homo sapiens
  misc_RNA (1)...(19): siRNA sense strand
uccauaacaugcccaagga

SEQ ID NO: 1725569 - RNA, 19 nt, Homo sapiens
  misc_RNA (1)...(19): siRNA sense strand
caaagggccauggacuauu

SEQ ID NO: 1725570 - RNA, 19 nt, Homo sapiens
  misc_RNA (1)...(19): siRNA sense strand
ggacuugaagaaauuuaag

SEQ ID NO: 1725571 - RNA, 19 nt, Homo sapiens
  misc_RNA (1)...(19): siRNA sense strand
agugaaagccaaagcuaaa

SEQ ID NO: 1725572 - RNA, 19 nt, Homo sapiens
  misc_RNA (1)...(19): siRNA sense strand
gacugcgucucaucaagga

SEQ ID NO: 1725573 - RNA, 19 nt, Homo sapiens
  misc_RNA (1)...(19): siRNA sense strand
agacagguuugacuaucug

SEQ ID NO: 1725574 - RNA, 19 nt, Homo sapiens
  misc_RNA (1)...(19): siRNA sense strand
cucccaagcuccucucaug

SEQ ID NO: 1725575 - RNA, 19 nt, Homo sapiens
  misc_RNA (1)...(19): siRNA sense strand
ucaacaggagagaccuuua

SEQ ID NO: 1725576 - RNA, 19 nt, Homo sapiens
  misc_RNA (1)...(19): siRNA sense strand
ccagaauccucuuccucau

SEQ ID NO: 1725577 - RNA, 19 nt, Homo sapiens
  misc_RNA (1)...(19): siRNA sense strand
gggucaugauguucuguga

SEQ ID NO: 1725578 - RNA, 19 nt, Homo sapiens
  misc_RNA (1)...(19): siRNA sense strand
caagaaauuucccaacaua

SEQ ID NO: 1725579 - RNA, 19 nt, Homo sapiens
  misc_RNA (1)...(19): siRNA sense strand
ggaggaaucugccauguug

SEQ ID NO: 1725580 - RNA, 19 nt, Homo sapiens
  misc_RNA (1)...(19): siRNA sense strand
ugaagaagcugacagaaga

SEQ ID NO: 1725581 - RNA, 19 nt, Homo sapiens
  misc_RNA (1)...(19): siRNA sense strand
gaaaggguauggcaagaga

SEQ ID NO: 1725582 - RNA, 19 nt, Homo sapiens
  misc_RNA (1)...(19): siRNA sense strand
ggaaccaucucucaaguau

SEQ ID NO: 1725583 - RNA, 19 nt, Homo sapiens
  misc_RNA (1)...(19): siRNA sense strand
gcgagcagcuucuaccuaa

SEQ ID NO: 1725584 - RNA, 19 nt, Homo sapiens
  misc_RNA (1)...(19): siRNA sense strand
gagaagauguuugccauga

SEQ ID NO: 1725585 - RNA, 19 nt, Homo sapiens
  misc_RNA (1)...(19): siRNA sense strand
ggacauacuuguucagauc

SEQ ID NO: 1725586 - RNA, 19 nt, Homo sapiens
  misc_RNA (1)...(19): siRNA sense strand
gaacuggcacugacaauga

SEQ ID NO: 1725587 - RNA, 19 nt, Homo sapiens
  misc_RNA (1)...(19): siRNA sense strand
aaacucaccucaaggaauu

SEQ ID NO: 1725588 - RNA, 19 nt, Homo sapiens
  misc_RNA (1)...(19): siRNA sense strand
ggaguuaccuggacuugau

SEQ ID NO: 1725589 - RNA, 19 nt, Homo sapiens
  misc_RNA (1)...(19): siRNA sense strand
ugaaggagcuggagacugu

SEQ ID NO: 1725590 - RNA, 19 nt, Homo sapiens
  misc_RNA (1)...(19): siRNA sense strand
aaacagcacgcaacauuua

SEQ ID NO: 1725591 - RNA, 19 nt, Homo sapiens
  misc_RNA (1)...(19): siRNA sense strand
gcaugaaguuccugaguga

SEQ ID NO: 1725592 - RNA, 19 nt, Homo sapiens
  misc_RNA (1)...(19): siRNA sense strand
ucaaagugauacagcaaua

SEQ ID NO: 1725593 - RNA, 19 nt, Homo sapiens
  misc_RNA (1)...(19): siRNA sense strand
gagcaaggaacauguaauu

SEQ ID NO: 1725594 - RNA, 19 nt, Homo sapiens
  misc_RNA (1)...(19): siRNA sense strand
caaacaaguugauaaugga

SEQ ID NO: 1725595 - RNA, 19 nt, Homo sapiens
  misc_RNA (1)...(19): siRNA sense strand
cuucugaucugucuacuuu

SEQ ID NO: 1725596 - RNA, 19 nt, Homo sapiens
  misc_RNA (1)...(19): siRNA sense strand
gaaacagcacgcaacauuu

SEQ ID NO: 1725597 - RNA, 19 nt, Homo sapiens
  misc_RNA (1)...(19): siRNA sense strand
caugugaccucucagauug

SEQ ID NO: 1725598 - RNA, 19 nt, Homo sapiens
  misc_RNA (1)...(19): siRNA sense strand
gaagaucggcggauacuca

SEQ ID NO: 1725599 - RNA, 19 nt, Homo sapiens
  misc_RNA (1)...(19): siRNA sense strand
gcauugagaaggaugguua

SEQ ID NO: 1725600 - RNA, 19 nt, Homo sapiens
  misc_RNA (1)...(19): siRNA sense strand
caagagaguggcagacaua

SEQ ID NO: 1725601 - RNA, 19 nt, Homo sapiens
  misc_RNA (1)...(19): siRNA sense strand
ccacugcacucaugagaug

SEQ ID NO: 1725602 - RNA, 19 nt, Homo sapiens
  misc_RNA (1)...(19): siRNA sense strand
cgaaacagcacgcaacauu

SEQ ID NO: 1725603 - RNA, 19 nt, Homo sapiens
  misc_RNA (1)...(19): siRNA sense strand
ggaguucucugacaucucu

SEQ ID NO: 1725604 - RNA, 19 nt, Homo sapiens
  misc_RNA (1)...(19): siRNA sense strand
gaacuucucaacaccauug

SEQ ID NO: 1725605 - RNA, 19 nt, Homo sapiens
  misc_RNA (1)...(19): siRNA sense strand
gaagcucacuauccugaau

SEQ ID NO: 1725606 - RNA, 19 nt, Homo sapiens
  misc_RNA (1)...(19): siRNA sense strand
acaagaacauugaaacuca

SEQ ID NO: 1725607 - RNA, 19 nt, Homo sapiens
  misc_RNA (1)...(19): siRNA sense strand
gcaaagccaagaacaagaa

SEQ ID NO: 1725608 - RNA, 19 nt, Homo sapiens
  misc_RNA (1)...(19): siRNA sense strand
aaccaucucucaaguauau

SEQ ID NO: 1725609 - RNA, 19 nt, Homo sapiens
  misc_RNA (1)...(19): siRNA sense strand
ucaccacacucuacacaaa

SEQ ID NO: 1725610 - RNA, 19 nt, Homo sapiens
  misc_RNA (1)...(19): siRNA sense strand
gauugaggcuggacugguu

SEQ ID NO: 1725611 - RNA, 19 nt, Homo sapiens
  misc_RNA (1)...(19): siRNA sense strand
caaagacaccugaggacua

SEQ ID NO: 1725612 - RNA, 19 nt, Homo sapiens
  misc_RNA (1)...(19): siRNA sense strand
gaagcugacagaagaguuu

SEQ ID NO: 1725613 - RNA, 19 nt, Homo sapiens
  misc_RNA (1)...(19): siRNA sense strand
uaccuggacuugauuguaa

SEQ ID NO: 1725614 - RNA, 19 nt, Homo sapiens
  misc_RNA (1)...(19): siRNA sense strand
gauugaagaucggcggaua

SEQ ID NO: 1725615 - RNA, 19 nt, Homo sapiens
  misc_RNA (1)...(19): siRNA sense strand
ggaaacuucugaucugucu

SEQ ID NO: 1725616 - RNA, 19 nt, Homo sapiens
  misc_RNA (1)...(19): siRNA sense strand
ucagugacaucauucagaa

SEQ ID NO: 1725617 - RNA, 19 nt, Homo sapiens
  misc_RNA (1)...(19): siRNA sense strand
gcagaugcuuccagaguca

SEQ ID NO: 1725618 - RNA, 19 nt, Homo sapiens
  misc_RNA (1)...(19): siRNA sense strand
gcaauugcguccuggagau

SEQ ID NO: 1725619 - RNA, 19 nt, Homo sapiens
  misc_RNA (1)...(19): siRNA sense strand
gcaugagaacccugacuua

SEQ ID NO: 1725620 - RNA, 19 nt, Homo sapiens
  misc_RNA (1)...(19): siRNA sense strand
caaggaacauguaauugca

SEQ ID NO: 1725621 - RNA, 19 nt, Homo sapiens
  misc_RNA (1)...(19): siRNA sense strand
cagcauaaauuagcagaga

SEQ ID NO: 1725622 - RNA, 19 nt, Homo sapiens
  misc_RNA (1)...(19): siRNA sense strand
gaggaggaguccaucauca

SEQ ID NO: 1725623 - RNA, 19 nt, Homo sapiens
  misc_RNA (1)...(19): siRNA sense strand
gaaauuucccaacauagau

SEQ ID NO: 1725624 - RNA, 19 nt, Homo sapiens
  misc_RNA (1)...(19): siRNA sense strand
gaaacucaccucaaggaau

SEQ ID NO: 1725625 - RNA, 19 nt, Homo sapiens
  misc_RNA (1)...(19): siRNA sense strand
gaaggaugguuacaacaac

SEQ ID NO: 1725626 - RNA, 19 nt, Homo sapiens
  misc_RNA (1)...(19): siRNA sense strand
aaucugccauguugcguua

SEQ ID NO: 1725627 - RNA, 19 nt, Homo sapiens
  misc_RNA (1)...(19): siRNA sense strand
aaagacaccugaggacuau

SEQ ID NO: 1725628 - RNA, 19 nt, Homo sapiens
  misc_RNA (1)...(19): siRNA sense strand
ggagagcaaggaacaugua

SEQ ID NO: 1725629 - RNA, 19 nt, Homo sapiens
  misc_RNA (1)...(19): siRNA sense strand
cagauacaauggccuguga

SEQ ID NO: 1725630 - RNA, 19 nt, Homo sapiens
  misc_RNA (1)...(19): siRNA sense strand
uuagauuccucaccaacua

SEQ ID NO: 1725631 - RNA, 19 nt, Homo sapiens
  misc_RNA (1)...(19): siRNA sense strand
gaacauguaauugcaaaca

SEQ ID NO: 1725632 - RNA, 19 nt, Homo sapiens
  misc_RNA (1)...(19): siRNA sense strand
ggugugggcugugacauug

SEQ ID NO: 1725633 - RNA, 19 nt, Homo sapiens
  misc_RNA (1)...(19): siRNA sense strand
gguggaaacuucugaucug

SEQ ID NO: 1725634 - RNA, 19 nt, Homo sapiens
  misc_RNA (1)...(19): siRNA sense strand
uggacuugauuguaacuua

SEQ ID NO: 1725635 - RNA, 19 nt, Homo sapiens
  misc_RNA (1)...(19): siRNA sense strand
gcaugugaccucucagauu

SEQ ID NO: 1725636 - RNA, 19 nt, Homo sapiens
  misc_RNA (1)...(19): siRNA sense strand
gcaagagaguggcagacau

SEQ ID NO: 1725637 - RNA, 19 nt, Homo sapiens
  misc_RNA (1)...(19): siRNA sense strand
gaggaccuguuuagcaguu

SEQ ID NO: 1725638 - RNA, 19 nt, Homo sapiens
  misc_RNA (1)...(19): siRNA sense strand
caacuacuaccagucauuu

SEQ ID NO: 1725639 - RNA, 19 nt, Homo sapiens
  misc_RNA (1)...(19): siRNA sense strand
gaaagcugauacuucaucu

SEQ ID NO: 1725640 - RNA, 19 nt, Homo sapiens
  misc_RNA (1)...(19): siRNA sense strand
uggcaggagucaaagcaua

SEQ ID NO: 1725641 - RNA, 19 nt, Homo sapiens
  misc_RNA (1)...(19): siRNA sense strand
cgaagacacaucaaaguga

SEQ ID NO: 1725642 - RNA, 19 nt, Homo sapiens
  misc_RNA (1)...(19): siRNA sense strand
guucucauccguauguaua

SEQ ID NO: 1725643 - RNA, 19 nt, Homo sapiens
  misc_RNA (1)...(19): siRNA sense strand
guaucugucuguggaagua

SEQ ID NO: 1725644 - RNA, 19 nt, Homo sapiens
  misc_RNA (1)...(19): siRNA sense strand
ccaggagacugacaagcuu

SEQ ID NO: 1725645 - RNA, 19 nt, Homo sapiens
  misc_RNA (1)...(19): siRNA sense strand
cggaagaaccgcagcauug

SEQ ID NO: 1725646 - RNA, 19 nt, Homo sapiens
  misc_RNA (1)...(19): siRNA sense strand
gagaguggcagacauaaag

SEQ ID NO: 1725647 - RNA, 19 nt, Homo sapiens
  misc_RNA (1)...(19): siRNA sense strand
uuacuucugucacggauug

SEQ ID NO: 1725648 - RNA, 19 nt, Homo sapiens
  misc_RNA (1)...(19): siRNA sense strand
ccacugacccuucuuccuu

SEQ ID NO: 1725649 - RNA, 19 nt, Homo sapiens
  misc_RNA (1)...(19): siRNA sense strand
aagccgagauaauuagauu

SEQ ID NO: 1725650 - RNA, 19 nt, Homo sapiens
  misc_RNA (1)...(19): siRNA sense strand
ugacaucauucagaacuug

SEQ ID NO: 1725651 - RNA, 19 nt, Homo sapiens
  misc_RNA (1)...(19): siRNA sense strand
gcgcagugcccaacuucua

SEQ ID NO: 1725652 - RNA, 19 nt, Homo sapiens
  misc_RNA (1)...(19): siRNA sense strand
gaucggcggauacucauug

SEQ ID NO: 1725653 - RNA, 19 nt, Homo sapiens
  misc_RNA (1)...(19): siRNA sense strand
ggagucaaagcauacauug

SEQ ID NO: 1725654 - RNA, 19 nt, Homo sapiens
  misc_RNA (1)...(19): siRNA sense strand
cauacuaucuucccuucug

SEQ ID NO: 1725655 - RNA, 19 nt, Homo sapiens
  misc_RNA (1)...(19): siRNA sense strand
ccaaaucuaagccaccuuu

SEQ ID NO: 1725656 - RNA, 19 nt, Homo sapiens
  misc_RNA (1)...(19): siRNA sense strand
ggaauuucgggaucaugua

SEQ ID NO: 1725657 - RNA, 19 nt, Homo sapiens
  misc_RNA (1)...(19): siRNA sense strand
gaaccaucucucaaguaua

SEQ ID NO: 1725658 - RNA, 19 nt, Homo sapiens
  misc_RNA (1)...(19): siRNA sense strand
uauaugaacuucucaacac

SEQ ID NO: 1725659 - RNA, 19 nt, Homo sapiens
  misc_RNA (1)...(19): siRNA sense strand
uacaauggccugugaguau

SEQ ID NO: 1725660 - RNA, 19 nt, Homo sapiens
  misc_RNA (1)...(19): siRNA sense strand
ucucgggccuuccaccuaa

SEQ ID NO: 1725661 - RNA, 19 nt, Homo sapiens
  misc_RNA (1)...(19): siRNA sense strand
ugagaaggaugguuacaac

SEQ ID NO: 1725662 - RNA, 19 nt, Homo sapiens
  misc_RNA (1)...(19): siRNA sense strand
uagcagagaagcucacuau

SEQ ID NO: 1725663 - RNA, 19 nt, Homo sapiens
  misc_RNA (1)...(19): siRNA sense strand
cuaaagcgcaugaccauca

SEQ ID NO: 1725664 - RNA, 19 nt, Homo sapiens
  misc_RNA (1)...(19): siRNA sense strand
uggacaagcuacaccuaaa

SEQ ID NO: 1725665 - RNA, 19 nt, Homo sapiens
  misc_RNA (1)...(19): siRNA sense strand
ggaagaaccgcagcauugu

SEQ ID NO: 1725666 - RNA, 19 nt, Homo sapiens
  misc_RNA (1)...(19): siRNA sense strand
uaaaggagagcaaggaaca

SEQ ID NO: 1725667 - RNA, 19 nt, Homo sapiens
  misc_RNA (1)...(19): siRNA sense strand
cagagaagcucacuauccu

SEQ ID NO: 1725668 - RNA, 19 nt, Homo sapiens
  misc_RNA (1)...(19): siRNA sense strand
uaucuucccuucugaguac

SEQ ID NO: 1725669 - RNA, 19 nt, Homo sapiens
  misc_RNA (1)...(19): siRNA sense strand
caccuaaacuugacagaac

SEQ ID NO: 1725670 - RNA, 19 nt, Homo sapiens
  misc_RNA (1)...(19): siRNA sense strand
gauaucaaucucaacuuug

SEQ ID NO: 1725671 - RNA, 19 nt, Homo sapiens
  misc_RNA (1)...(19): siRNA sense strand
ccaagcagaccagcaauug

SEQ ID NO: 1725672 - RNA, 19 nt, Homo sapiens
  misc_RNA (1)...(19): siRNA sense strand
ccugauuugugcucacuuu

SEQ ID NO: 1725673 - RNA, 19 nt, Homo sapiens
  misc_RNA (1)...(19): siRNA sense strand
ggaggaguccaucaucaug

SEQ ID NO: 1725674 - RNA, 19 nt, Homo sapiens
  misc_RNA (1)...(19): siRNA sense strand
gcaauaccaccuucaguac

SEQ ID NO: 1725675 - RNA, 19 nt, Homo sapiens
  misc_RNA (1)...(19): siRNA sense strand
ggaccuguuuagcaguuug

SEQ ID NO: 1725676 - RNA, 19 nt, Homo sapiens
  misc_RNA (1)...(19): siRNA sense strand
aacaagaaauuucccaaca

SEQ ID NO: 1725677 - RNA, 19 nt, Homo sapiens
  misc_RNA (1)...(19): siRNA sense strand
acaagaaauuucccaacau

SEQ ID NO: 1725678 - RNA, 19 nt, Homo sapiens
  misc_RNA (1)...(19): siRNA sense strand
gcuaagggcucugcucgua

SEQ ID NO: 1725679 - RNA, 19 nt, Homo sapiens
  misc_RNA (1)...(19): siRNA sense strand
gaacggggcugucuaugga

SEQ ID NO: 1725680 - RNA, 19 nt, Homo sapiens
  misc_RNA (1)...(19): siRNA sense strand
caagagccgucccuccaau

SEQ ID NO: 1725681 - RNA, 19 nt, Homo sapiens
  misc_RNA (1)...(19): siRNA sense strand
gagccgucccuccaauuaa

SEQ ID NO: 1725682 - RNA, 19 nt, Homo sapiens
  misc_RNA (1)...(19): siRNA sense strand
uaagggcucugcucguagu

SEQ ID NO: 1725683 - RNA, 19 nt, Homo sapiens
  misc_RNA (1)...(19): siRNA sense strand
gcacgacaucucagacuuc

SEQ ID NO: 1725684 - RNA, 19 nt, Homo sapiens
  misc_RNA (1)...(19): siRNA sense strand
ugcuguggcucuuugagua

SEQ ID NO: 1725685 - RNA, 19 nt, Homo sapiens
  misc_RNA (1)...(19): siRNA sense strand
agagccgucccuccaauua

SEQ ID NO: 1725686 - RNA, 19 nt, Homo sapiens
  misc_RNA (1)...(19): siRNA sense strand
ucgcugcaguccuccauga

SEQ ID NO: 1725687 - RNA, 19 nt, Homo sapiens
  misc_RNA (1)...(19): siRNA sense strand
ggcacgacaucucagacuu

SEQ ID NO: 1725688 - RNA, 19 nt, Homo sapiens
  misc_RNA (1)...(19): siRNA sense strand
uaugaggacagcaauguau

SEQ ID NO: 1725689 - RNA, 19 nt, Homo sapiens
  misc_RNA (1)...(19): siRNA sense strand
ccgccuggcuguagagaag

SEQ ID NO: 1725690 - RNA, 19 nt, Homo sapiens
  misc_RNA (1)...(19): siRNA sense strand
guugucacgcguccuguuu

SEQ ID NO: 1725691 - RNA, 19 nt, Homo sapiens
  misc_RNA (1)...(19): siRNA sense strand
uccaugaccuaccucuaug

SEQ ID NO: 1725692 - RNA, 19 nt, Homo sapiens
  misc_RNA (1)...(19): siRNA sense strand
gcuguggcucuuugaguau

SEQ ID NO: 1725693 - RNA, 19 nt, Homo sapiens
  misc_RNA (1)...(19): siRNA sense strand
cuaugaggacagcaaugua

SEQ ID NO: 1725694 - RNA, 19 nt, Homo sapiens
  misc_RNA (1)...(19): siRNA sense strand
cuccaugaccuaccucuau

SEQ ID NO: 1725695 - RNA, 19 nt, Homo sapiens
  misc_RNA (1)...(19): siRNA sense strand
gcuaagggcucugcucgua

SEQ ID NO: 1725696 - RNA, 19 nt, Homo sapiens
  misc_RNA (1)...(19): siRNA sense strand
gaacggggcugucuaugga

SEQ ID NO: 1725697 - RNA, 19 nt, Homo sapiens
  misc_RNA (1)...(19): siRNA sense strand
uaagggcucugcucguagu

SEQ ID NO: 1725698 - RNA, 19 nt, Homo sapiens
  misc_RNA (1)...(19): siRNA sense strand
guugucacgcguccuguuu

SEQ ID NO: 1725699 - RNA, 19 nt, Homo sapiens
  misc_RNA (1)...(19): siRNA sense strand
gagaagaucuuugccauug

SEQ ID NO: 1725700 - RNA, 19 nt, Homo sapiens
  misc_RNA (1)...(19): siRNA sense strand
caacggugcuggagaagua

SEQ ID NO: 1725701 - RNA, 19 nt, Homo sapiens
  misc_RNA (1)...(19): siRNA sense strand
gauaacagcugccaaccaa

SEQ ID NO: 1725702 - RNA, 19 nt, Homo sapiens
  misc_RNA (1)...(19): siRNA sense strand
guacaaaguuggcuucuuc

SEQ ID NO: 1725703 - RNA, 19 nt, Homo sapiens
  misc_RNA (1)...(19): siRNA sense strand
ggacuuugaugcucugaaa

SEQ ID NO: 1725704 - RNA, 19 nt, Homo sapiens
  misc_RNA (1)...(19): siRNA sense strand
ggaggcaaauggacaaauu

SEQ ID NO: 1725705 - RNA, 19 nt, Homo sapiens
  misc_RNA (1)...(19): siRNA sense strand
ggaguaaccuggagcugaa

SEQ ID NO: 1725706 - RNA, 19 nt, Homo sapiens
  misc_RNA (1)...(19): siRNA sense strand
gcgacagccuggauuauaa

SEQ ID NO: 1725707 - RNA, 19 nt, Homo sapiens
  misc_RNA (1)...(19): siRNA sense strand
ggacagcgcuggguuugga

SEQ ID NO: 1725708 - RNA, 19 nt, Homo sapiens
  misc_RNA (1)...(19): siRNA sense strand
cgacaacggugcuggagaa

SEQ ID NO: 1725709 - RNA, 19 nt, Homo sapiens
  misc_RNA (1)...(19): siRNA sense strand
ccaaauaccucaacuucuc

SEQ ID NO: 1725710 - RNA, 19 nt, Homo sapiens
  misc_RNA (1)...(19): siRNA sense strand
ggacaggaggcauuuauga

SEQ ID NO: 1725711 - RNA, 19 nt, Homo sapiens
  misc_RNA (1)...(19): siRNA sense strand
caacaucugccuuuacauu

SEQ ID NO: 1725712 - RNA, 19 nt, Homo sapiens
  misc_RNA (1)...(19): siRNA sense strand
ggacucagaucggcuccua

SEQ ID NO: 1725713 - RNA, 19 nt, Homo sapiens
  misc_RNA (1)...(19): siRNA sense strand
gaaauuacguucgacacau

SEQ ID NO: 1725714 - RNA, 19 nt, Homo sapiens
  misc_RNA (1)...(19): siRNA sense strand
ccuccaggcugcaguauuu

SEQ ID NO: 1725715 - RNA, 19 nt, Homo sapiens
  misc_RNA (1)...(19): siRNA sense strand
gaaguaugcugucuacacu

SEQ ID NO: 1725716 - RNA, 19 nt, Homo sapiens
  misc_RNA (1)...(19): siRNA sense strand
acagauaccaggucaauaa

SEQ ID NO: 1725717 - RNA, 19 nt, Homo sapiens
  misc_RNA (1)...(19): siRNA sense strand
guucauaccugccgagauc

SEQ ID NO: 1725718 - RNA, 19 nt, Homo sapiens
  misc_RNA (1)...(19): siRNA sense strand
acaaagaaccggagucuga

SEQ ID NO: 1725719 - RNA, 19 nt, Homo sapiens
  misc_RNA (1)...(19): siRNA sense strand
gggagcagguggucucuga

SEQ ID NO: 1725720 - RNA, 19 nt, Homo sapiens
  misc_RNA (1)...(19): siRNA sense strand
acacuucacuuucgaggaa

SEQ ID NO: 1725721 - RNA, 19 nt, Homo sapiens
  misc_RNA (1)...(19): siRNA sense strand
gagacagcgugguccagua

SEQ ID NO: 1725722 - RNA, 19 nt, Homo sapiens
  misc_RNA (1)...(19): siRNA sense strand
gggcagcacuccuccuguu

SEQ ID NO: 1725723 - RNA, 19 nt, Homo sapiens
  misc_RNA (1)...(19): siRNA sense strand
gaagggcaaccucagcuuu

SEQ ID NO: 1725724 - RNA, 19 nt, Homo sapiens
  misc_RNA (1)...(19): siRNA sense strand
acgaacaauucaccaaaua

SEQ ID NO: 1725725 - RNA, 19 nt, Homo sapiens
  misc_RNA (1)...(19): siRNA sense strand
gaagaucuuugccauugag

SEQ ID NO: 1725726 - RNA, 19 nt, Homo sapiens
  misc_RNA (1)...(19): siRNA sense strand
gcaguucuccaacaaauuc

SEQ ID NO: 1725727 - RNA, 19 nt, Homo sapiens
  misc_RNA (1)...(19): siRNA sense strand
gaagugaugguguggaaug

SEQ ID NO: 1725728 - RNA, 19 nt, Homo sapiens
  misc_RNA (1)...(19): siRNA sense strand
cccauuaccuugcgucuga

SEQ ID NO: 1725729 - RNA, 19 nt, Homo sapiens
  misc_RNA (1)...(19): siRNA sense strand
cagaagugaugguguggaa

SEQ ID NO: 1725730 - RNA, 19 nt, Homo sapiens
  misc_RNA (1)...(19): siRNA sense strand
gcacagauaccaggucaau

SEQ ID NO: 1725731 - RNA, 19 nt, Homo sapiens
  misc_RNA (1)...(19): siRNA sense strand
caacuucucuagguuucaa

SEQ ID NO: 1725732 - RNA, 19 nt, Homo sapiens
  misc_RNA (1)...(19): siRNA sense strand
ggagaccggcugcuucuga

SEQ ID NO: 1725733 - RNA, 19 nt, Homo sapiens
  misc_RNA (1)...(19): siRNA sense strand
ucagaaaccugcggccuau

SEQ ID NO: 1725734 - RNA, 19 nt, Homo sapiens
  misc_RNA (1)...(19): siRNA sense strand
caaacacacuucacuuucg

SEQ ID NO: 1725735 - RNA, 19 nt, Homo sapiens
  misc_RNA (1)...(19): siRNA sense strand
cgccagauauugcagaaga

SEQ ID NO: 1725736 - RNA, 19 nt, Homo sapiens
  misc_RNA (1)...(19): siRNA sense strand
gacaggagcaggacauugu

SEQ ID NO: 1725737 - RNA, 19 nt, Homo sapiens
  misc_RNA (1)...(19): siRNA sense strand
gcagagggccagaaacaag

SEQ ID NO: 1725738 - RNA, 19 nt, Homo sapiens
  misc_RNA (1)...(19): siRNA sense strand
gagcugaacgcagaaguga

SEQ ID NO: 1725739 - RNA, 19 nt, Homo sapiens
  misc_RNA (1)...(19): siRNA sense strand
ggagaagaucuuugccauu

SEQ ID NO: 1725740 - RNA, 19 nt, Homo sapiens
  misc_RNA (1)...(19): siRNA sense strand
gaugaugaacuucgugaga

SEQ ID NO: 1725741 - RNA, 19 nt, Homo sapiens
  misc_RNA (1)...(19): siRNA sense strand
ccaacaaauuccaaacaca

SEQ ID NO: 1725742 - RNA, 19 nt, Homo sapiens
  misc_RNA (1)...(19): siRNA sense strand
gaaccaccaucaccuucuc

SEQ ID NO: 1725743 - RNA, 19 nt, Homo sapiens
  misc_RNA (1)...(19): siRNA sense strand
caucauccgcuaugcaauu

SEQ ID NO: 1725744 - RNA, 19 nt, Homo sapiens
  misc_RNA (1)...(19): siRNA sense strand
ccaggaacacauauuuaaa

SEQ ID NO: 1725745 - RNA, 19 nt, Homo sapiens
  misc_RNA (1)...(19): siRNA sense strand
ccaaacggguggccucuac

SEQ ID NO: 1725746 - RNA, 19 nt, Homo sapiens
  misc_RNA (1)...(19): siRNA sense strand
gauaagccaguuccagaga

SEQ ID NO: 1725747 - RNA, 19 nt, Homo sapiens
  misc_RNA (1)...(19): siRNA sense strand
ggugaaguaugcugucuac

SEQ ID NO: 1725748 - RNA, 19 nt, Homo sapiens
  misc_RNA (1)...(19): siRNA sense strand
uugaugcucugaaagauau

SEQ ID NO: 1725749 - RNA, 19 nt, Homo sapiens
  misc_RNA (1)...(19): siRNA sense strand
ggcgacagccuggauuaua

SEQ ID NO: 1725750 - RNA, 19 nt, Homo sapiens
  misc_RNA (1)...(19): siRNA sense strand
aaacacacuucacuuucga

SEQ ID NO: 1725751 - RNA, 19 nt, Homo sapiens
  misc_RNA (1)...(19): siRNA sense strand
ucacugaugggaagaaaga

SEQ ID NO: 1725752 - RNA, 19 nt, Homo sapiens
  misc_RNA (1)...(19): siRNA sense strand
ccacgaacaauucaccaaa

SEQ ID NO: 1725753 - RNA, 19 nt, Homo sapiens
  misc_RNA (1)...(19): siRNA sense strand
gcugaacgcagaagugaug

SEQ ID NO: 1725754 - RNA, 19 nt, Homo sapiens
  misc_RNA (1)...(19): siRNA sense strand
ccaaacacacuucacuuuc

SEQ ID NO: 1725755 - RNA, 19 nt, Homo sapiens
  misc_RNA (1)...(19): siRNA sense strand
gagcagacccugguacagu

SEQ ID NO: 1725756 - RNA, 19 nt, Homo sapiens
  misc_RNA (1)...(19): siRNA sense strand
caguagcuccuucgaauug

SEQ ID NO: 1725757 - RNA, 19 nt, Homo sapiens
  misc_RNA (1)...(19): siRNA sense strand
gcaguagcuccuucgaauu

SEQ ID NO: 1725758 - RNA, 19 nt, Homo sapiens
  misc_RNA (1)...(19): siRNA sense strand
cccaggaacacauauuuaa

SEQ ID NO: 1725759 - RNA, 19 nt, Homo sapiens
  misc_RNA (1)...(19): siRNA sense strand
aauaugagcccuaccuuca

SEQ ID NO: 1725760 - RNA, 19 nt, Homo sapiens
  misc_RNA (1)...(19): siRNA sense strand
gaaggugucggucgugagu

SEQ ID NO: 1725761 - RNA, 19 nt, Homo sapiens
  misc_RNA (1)...(19): siRNA sense strand
gaaucaaccaccucaucuu

SEQ ID NO: 1725762 - RNA, 19 nt, Homo sapiens
  misc_RNA (1)...(19): siRNA sense strand
acaucugccuuuacauuga

SEQ ID NO: 1725763 - RNA, 19 nt, Homo sapiens
  misc_RNA (1)...(19): siRNA sense strand
caucuccucccgcaacuuu

SEQ ID NO: 1725764 - RNA, 19 nt, Homo sapiens
  misc_RNA (1)...(19): siRNA sense strand
uggcgcacauucagaagaa

SEQ ID NO: 1725765 - RNA, 19 nt, Homo sapiens
  misc_RNA (1)...(19): siRNA sense strand
caccaaauaccucaacuuc

SEQ ID NO: 1725766 - RNA, 19 nt, Homo sapiens
  misc_RNA (1)...(19): siRNA sense strand
cacgaacaauucaccaaau

SEQ ID NO: 1725767 - RNA, 19 nt, Homo sapiens
  misc_RNA (1)...(19): siRNA sense strand
gcgcccagaucaccuucuu

SEQ ID NO: 1725768 - RNA, 19 nt, Homo sapiens
  misc_RNA (1)...(19): siRNA sense strand
cagccuggauuauaaggau

SEQ ID NO: 1725769 - RNA, 19 nt, Homo sapiens
  misc_RNA (1)...(19): siRNA sense strand
ucacagccuuagcaacuuc

SEQ ID NO: 1725770 - RNA, 19 nt, Homo sapiens
  misc_RNA (1)...(19): siRNA sense strand
cugcaaggguuuacauaca

SEQ ID NO: 1725771 - RNA, 19 nt, Homo sapiens
  misc_RNA (1)...(19): siRNA sense strand
agaaggugguggugugaug

SEQ ID NO: 1725772 - RNA, 19 nt, Homo sapiens
  misc_RNA (1)...(19): siRNA sense strand
gaguguggcugaaauuacg

SEQ ID NO: 1725773 - RNA, 19 nt, Homo sapiens
  misc_RNA (1)...(19): siRNA sense strand
cagccaaugugagcaguga

SEQ ID NO: 1725774 - RNA, 19 nt, Homo sapiens
  misc_RNA (1)...(19): siRNA sense strand
ucagaucggcuccuacuuc

SEQ ID NO: 1725775 - RNA, 19 nt, Homo sapiens
  misc_RNA (1)...(19): siRNA sense strand
ggaggaggcaaauggacaa

SEQ ID NO: 1725776 - RNA, 19 nt, Homo sapiens
  misc_RNA (1)...(19): siRNA sense strand
gaauucaggcgcagcucaa

SEQ ID NO: 1725777 - RNA, 19 nt, Homo sapiens
  misc_RNA (1)...(19): siRNA sense strand
caaaguuggcuucuucaag

SEQ ID NO: 1725778 - RNA, 19 nt, Homo sapiens
  misc_RNA (1)...(19): siRNA sense strand
agcaguagcuccuucgaau

SEQ ID NO: 1725779 - RNA, 19 nt, Homo sapiens
  misc_RNA (1)...(19): siRNA sense strand
agaagaucuuugccauuga

SEQ ID NO: 1725780 - RNA, 19 nt, Homo sapiens
  misc_RNA (1)...(19): siRNA sense strand
cgugagagcugugauaagc

SEQ ID NO: 1725781 - RNA, 19 nt, Homo sapiens
  misc_RNA (1)...(19): siRNA sense strand
gugaguguggcugaaauua

SEQ ID NO: 1725782 - RNA, 19 nt, Homo sapiens
  misc_RNA (1)...(19): siRNA sense strand
uagcagccacgaacaauuc

SEQ ID NO: 1725783 - RNA, 19 nt, Homo sapiens
  misc_RNA (1)...(19): siRNA sense strand
uccaacaucugccuuuaca

SEQ ID NO: 1725784 - RNA, 19 nt, Homo sapiens
  misc_RNA (1)...(19): siRNA sense strand
gagcuggcccucuggaaag

SEQ ID NO: 1725785 - RNA, 19 nt, Homo sapiens
  misc_RNA (1)...(19): siRNA sense strand
caggaacacauauuuaaag

SEQ ID NO: 1725786 - RNA, 19 nt, Homo sapiens
  misc_RNA (1)...(19): siRNA sense strand
gauuguuccaugccucaua

SEQ ID NO: 1725787 - RNA, 19 nt, Homo sapiens
  misc_RNA (1)...(19): siRNA sense strand
ugaugcaguucuccaacaa

SEQ ID NO: 1725788 - RNA, 19 nt, Homo sapiens
  misc_RNA (1)...(19): siRNA sense strand
gagcugugauaagccaguu

SEQ ID NO: 1725789 - RNA, 19 nt, Homo sapiens
  misc_RNA (1)...(19): siRNA sense strand
gcaggcaucauccgcuaug

SEQ ID NO: 1725790 - RNA, 19 nt, Homo sapiens
  misc_RNA (1)...(19): siRNA sense strand
gaggcaaauggacaaauug

SEQ ID NO: 1725791 - RNA, 19 nt, Homo sapiens
  misc_RNA (1)...(19): siRNA sense strand
caucguaggcagcuccauu

SEQ ID NO: 1725792 - RNA, 19 nt, Homo sapiens
  misc_RNA (1)...(19): siRNA sense strand
uaccucaacuucucagagu

SEQ ID NO: 1725793 - RNA, 19 nt, Homo sapiens
  misc_RNA (1)...(19): siRNA sense strand
ggacacagaggagcugaca

SEQ ID NO: 1725794 - RNA, 19 nt, Homo sapiens
  misc_RNA (1)...(19): siRNA sense strand
ggugugaugcuguucucua

SEQ ID NO: 1725795 - RNA, 19 nt, Homo sapiens
  misc_RNA (1)...(19): siRNA sense strand
ggacauuguguuccugauc

SEQ ID NO: 1725796 - RNA, 19 nt, Homo sapiens
  misc_RNA (1)...(19): siRNA sense strand
ggaacacauauuuaaagug

SEQ ID NO: 1725797 - RNA, 19 nt, Homo sapiens
  misc_RNA (1)...(19): siRNA sense strand
gccagauauugcagaagaa

SEQ ID NO: 1725798 - RNA, 19 nt, Homo sapiens
  misc_RNA (1)...(19): siRNA sense strand
aaauuacguucgacacauc

SEQ ID NO: 1725799 - RNA, 19 nt, Homo sapiens
  misc_RNA (1)...(19): siRNA sense strand
ucaaagagcugcccauguu

SEQ ID NO: 1725800 - RNA, 19 nt, Homo sapiens
  misc_RNA (1)...(19): siRNA sense strand
gaucagagauggccagguu

SEQ ID NO: 1725801 - RNA, 19 nt, Homo sapiens
  misc_RNA (1)...(19): siRNA sense strand
uggaagagauggaaaguaa

SEQ ID NO: 1725802 - RNA, 19 nt, Homo sapiens
  misc_RNA (1)...(19): siRNA sense strand
ccacagaauuucaagauau

SEQ ID NO: 1725803 - RNA, 19 nt, Homo sapiens
  misc_RNA (1)...(19): siRNA sense strand
gaacucccauagagaaauu

SEQ ID NO: 1725804 - RNA, 19 nt, Homo sapiens
  misc_RNA (1)...(19): siRNA sense strand
gaucaaagguaugguaaga

SEQ ID NO: 1725805 - RNA, 19 nt, Homo sapiens
  misc_RNA (1)...(19): siRNA sense strand
gagcaaacccuuacaaaca

SEQ ID NO: 1725806 - RNA, 19 nt, Homo sapiens
  misc_RNA (1)...(19): siRNA sense strand
uaaggugacugcagagaaa

SEQ ID NO: 1725807 - RNA, 19 nt, Homo sapiens
  misc_RNA (1)...(19): siRNA sense strand
gagaaaccaggaucuauuu

SEQ ID NO: 1725808 - RNA, 19 nt, Homo sapiens
  misc_RNA (1)...(19): siRNA sense strand
guaagagagugauucagaa

SEQ ID NO: 1725809 - RNA, 19 nt, Homo sapiens
  misc_RNA (1)...(19): siRNA sense strand
ggagaaaccaggaucuauu

SEQ ID NO: 1725810 - RNA, 19 nt, Homo sapiens
  misc_RNA (1)...(19): siRNA sense strand
gaucugauguagaccaaga

SEQ ID NO: 1725811 - RNA, 19 nt, Homo sapiens
  misc_RNA (1)...(19): siRNA sense strand
guaacaagaugacauguac

SEQ ID NO: 1725812 - RNA, 19 nt, Homo sapiens
  misc_RNA (1)...(19): siRNA sense strand
gaaucacugucaaaucuga

SEQ ID NO: 1725813 - RNA, 19 nt, Homo sapiens
  misc_RNA (1)...(19): siRNA sense strand
uuaauggacuuacgaaaug

SEQ ID NO: 1725814 - RNA, 19 nt, Homo sapiens
  misc_RNA (1)...(19): siRNA sense strand
ucaaagguaugguaagaga

SEQ ID NO: 1725815 - RNA, 19 nt, Homo sapiens
  misc_RNA (1)...(19): siRNA sense strand
cgauggagaugaauuuaga

SEQ ID NO: 1725816 - RNA, 19 nt, Homo sapiens
  misc_RNA (1)...(19): siRNA sense strand
gugagaagcuggguaguga

SEQ ID NO: 1725817 - RNA, 19 nt, Homo sapiens
  misc_RNA (1)...(19): siRNA sense strand
gcaaacccuuacaaacauu

SEQ ID NO: 1725818 - RNA, 19 nt, Homo sapiens
  misc_RNA (1)...(19): siRNA sense strand
gaaauuagacggauguaac

SEQ ID NO: 1725819 - RNA, 19 nt, Homo sapiens
  misc_RNA (1)...(19): siRNA sense strand
gcacuuagacaaccuaugg

SEQ ID NO: 1725820 - RNA, 19 nt, Homo sapiens
  misc_RNA (1)...(19): siRNA sense strand
aagaggaaauuguggauga

SEQ ID NO: 1725821 - RNA, 19 nt, Homo sapiens
  misc_RNA (1)...(19): siRNA sense strand
gguaagagagugauucaga

SEQ ID NO: 1725822 - RNA, 19 nt, Homo sapiens
  misc_RNA (1)...(19): siRNA sense strand
gagaagcucaggaggauga

SEQ ID NO: 1725823 - RNA, 19 nt, Homo sapiens
  misc_RNA (1)...(19): siRNA sense strand
ggucaaagaguuaguggaa

SEQ ID NO: 1725824 - RNA, 19 nt, Homo sapiens
  misc_RNA (1)...(19): siRNA sense strand
gaaggacuacuuugaaauc

SEQ ID NO: 1725825 - RNA, 19 nt, Homo sapiens
  misc_RNA (1)...(19): siRNA sense strand
ugaucaagcucagcagaua

SEQ ID NO: 1725826 - RNA, 19 nt, Homo sapiens
  misc_RNA (1)...(19): siRNA sense strand
gccacagaauuucaagaua

SEQ ID NO: 1725827 - RNA, 19 nt, Homo sapiens
  misc_RNA (1)...(19): siRNA sense strand
gaaauuaauggacuuacga

SEQ ID NO: 1725828 - RNA, 19 nt, Homo sapiens
  misc_RNA (1)...(19): siRNA sense strand
caggaaaucuuggacuuug

SEQ ID NO: 1725829 - RNA, 19 nt, Homo sapiens
  misc_RNA (1)...(19): siRNA sense strand
gaugcaauuucuuaaggaa

SEQ ID NO: 1725830 - RNA, 19 nt, Homo sapiens
  misc_RNA (1)...(19): siRNA sense strand
ugaauauugucucuccuuu

SEQ ID NO: 1725831 - RNA, 19 nt, Homo sapiens
  misc_RNA (1)...(19): siRNA sense strand
caaaucugauccaggaaau

SEQ ID NO: 1725832 - RNA, 19 nt, Homo sapiens
  misc_RNA (1)...(19): siRNA sense strand
aagaugagguagaagacua

SEQ ID NO: 1725833 - RNA, 19 nt, Homo sapiens
  misc_RNA (1)...(19): siRNA sense strand
ggaugcaauuucuuaagga

SEQ ID NO: 1725834 - RNA, 19 nt, Homo sapiens
  misc_RNA (1)...(19): siRNA sense strand
aaaccaggaucuauuugga

SEQ ID NO: 1725835 - RNA, 19 nt, Homo sapiens
  misc_RNA (1)...(19): siRNA sense strand
guuaguggaagcagaguua

SEQ ID NO: 1725836 - RNA, 19 nt, Homo sapiens
  misc_RNA (1)...(19): siRNA sense strand
uggaaucacugucaaaucu

SEQ ID NO: 1725837 - RNA, 19 nt, Homo sapiens
  misc_RNA (1)...(19): siRNA sense strand
ggaagagacccuagcauac

SEQ ID NO: 1725838 - RNA, 19 nt, Homo sapiens
  misc_RNA (1)...(19): siRNA sense strand
cugaaggacuacuuugaaa

SEQ ID NO: 1725839 - RNA, 19 nt, Homo sapiens
  misc_RNA (1)...(19): siRNA sense strand
cuagcauacuugaauauug

SEQ ID NO: 1725840 - RNA, 19 nt, Homo sapiens
  misc_RNA (1)...(19): siRNA sense strand
gugaaugcauguacuucuu

SEQ ID NO: 1725841 - RNA, 19 nt, Homo sapiens
  misc_RNA (1)...(19): siRNA sense strand
gaucaagcucagcagauaa

SEQ ID NO: 1725842 - RNA, 19 nt, Homo sapiens
  misc_RNA (1)...(19): siRNA sense strand
gaagagacccuagcauacu

SEQ ID NO: 1725843 - RNA, 19 nt, Homo sapiens
  misc_RNA (1)...(19): siRNA sense strand
gaagcuggguagugaaugc

SEQ ID NO: 1725844 - RNA, 19 nt, Homo sapiens
  misc_RNA (1)...(19): siRNA sense strand
ggagaugaauuuagaaaag

SEQ ID NO: 1725845 - RNA, 19 nt, Homo sapiens
  misc_RNA (1)...(19): siRNA sense strand
agacggauguaacaagaug

SEQ ID NO: 1725846 - RNA, 19 nt, Homo sapiens
  misc_RNA (1)...(19): siRNA sense strand
ggaugaggcuaauaaaaga

SEQ ID NO: 1725847 - RNA, 19 nt, Homo sapiens
  misc_RNA (1)...(19): siRNA sense strand
cagaguuauuugcccguua

SEQ ID NO: 1725848 - RNA, 19 nt, Homo sapiens
  misc_RNA (1)...(19): siRNA sense strand
ggacuuacgaaaugaauac

SEQ ID NO: 1725849 - RNA, 19 nt, Homo sapiens
  misc_RNA (1)...(19): siRNA sense strand
gaagagauggaaaguaagg

SEQ ID NO: 1725850 - RNA, 19 nt, Homo sapiens
  misc_RNA (1)...(19): siRNA sense strand
aggaagagacccuagcaua

SEQ ID NO: 1725851 - RNA, 19 nt, Homo sapiens
  misc_RNA (1)...(19): siRNA sense strand
gggaagaugagguagaaga

SEQ ID NO: 1725852 - RNA, 19 nt, Homo sapiens
  misc_RNA (1)...(19): siRNA sense strand
guacuggcuguaugcaaua

SEQ ID NO: 1725853 - RNA, 19 nt, Homo sapiens
  misc_RNA (1)...(19): siRNA sense strand
uuagacggauguaacaaga

SEQ ID NO: 1725854 - RNA, 19 nt, Homo sapiens
  misc_RNA (1)...(19): siRNA sense strand
guaaggaguggcuagagaa

SEQ ID NO: 1725855 - RNA, 19 nt, Homo sapiens
  misc_RNA (1)...(19): siRNA sense strand
agaaggcacuggaagagau

SEQ ID NO: 1725856 - RNA, 19 nt, Homo sapiens
  misc_RNA (1)...(19): siRNA sense strand
caggaucuauuuggauuug

SEQ ID NO: 1725857 - RNA, 19 nt, Homo sapiens
  misc_RNA (1)...(19): siRNA sense strand
gaaauccagaucagagaug

SEQ ID NO: 1725858 - RNA, 19 nt, Homo sapiens
  misc_RNA (1)...(19): siRNA sense strand
ggaaauuguggaugagaga

SEQ ID NO: 1725859 - RNA, 19 nt, Homo sapiens
  misc_RNA (1)...(19): siRNA sense strand
gaaaccaggaucuauuugg

SEQ ID NO: 1725860 - RNA, 19 nt, Homo sapiens
  misc_RNA (1)...(19): siRNA sense strand
gacauguacuggcuguaug

SEQ ID NO: 1725861 - RNA, 19 nt, Homo sapiens
  misc_RNA (1)...(19): siRNA sense strand
gauguggaaucacugucaa

SEQ ID NO: 1725862 - RNA, 19 nt, Homo sapiens
  misc_RNA (1)...(19): siRNA sense strand
uggaggagcugcuggaucu

SEQ ID NO: 1725863 - RNA, 19 nt, Homo sapiens
  misc_RNA (1)...(19): siRNA sense strand
gacccuagcauacuugaau

SEQ ID NO: 1725864 - RNA, 19 nt, Homo sapiens
  misc_RNA (1)...(19): siRNA sense strand
aggaguggcuagagaagaa

SEQ ID NO: 1725865 - RNA, 19 nt, Homo sapiens
  misc_RNA (1)...(19): siRNA sense strand
gcaagcggaugaggcuaau

SEQ ID NO: 1725866 - RNA, 19 nt, Homo sapiens
  misc_RNA (1)...(19): siRNA sense strand
ggugacugcagagaaauua

SEQ ID NO: 1725867 - RNA, 19 nt, Homo sapiens
  misc_RNA (1)...(19): siRNA sense strand
caacacagagcuagauuuu

SEQ ID NO: 1725868 - RNA, 19 nt, Homo sapiens
  misc_RNA (1)...(19): siRNA sense strand
gcucaagcuucucccaaca

SEQ ID NO: 1725869 - RNA, 19 nt, Homo sapiens
  misc_RNA (1)...(19): siRNA sense strand
gacgauauuugggaagaug

SEQ ID NO: 1725870 - RNA, 19 nt, Homo sapiens
  misc_RNA (1)...(19): siRNA sense strand
gagauggccagguucaaug

SEQ ID NO: 1725871 - RNA, 19 nt, Homo sapiens
  misc_RNA (1)...(19): siRNA sense strand
gcaaagccugucugaagga

SEQ ID NO: 1725872 - RNA, 19 nt, Homo sapiens
  misc_RNA (1)...(19): siRNA sense strand
gcaauauuucuguuggauu

SEQ ID NO: 1725873 - RNA, 19 nt, Homo sapiens
  misc_RNA (1)...(19): siRNA sense strand
uauuuacgauggagaugaa

SEQ ID NO: 1725874 - RNA, 19 nt, Homo sapiens
  misc_RNA (1)...(19): siRNA sense strand
ggauguugacgacgauauu

SEQ ID NO: 1725875 - RNA, 19 nt, Homo sapiens
  misc_RNA (1)...(19): siRNA sense strand
uaauggacuuacgaaauga

SEQ ID NO: 1725876 - RNA, 19 nt, Homo sapiens
  misc_RNA (1)...(19): siRNA sense strand
cagagaaauuaauggacuu

SEQ ID NO: 1725877 - RNA, 19 nt, Homo sapiens
  misc_RNA (1)...(19): siRNA sense strand
guaaggugacugcagagaa

SEQ ID NO: 1725878 - RNA, 19 nt, Homo sapiens
  misc_RNA (1)...(19): siRNA sense strand
uggcagaugugguguacug

SEQ ID NO: 1725879 - RNA, 19 nt, Homo sapiens
  misc_RNA (1)...(19): siRNA sense strand
ggaaaucuuggacuuugau

SEQ ID NO: 1725880 - RNA, 19 nt, Homo sapiens
  misc_RNA (1)...(19): siRNA sense strand
gauguugacgacgauauuu

SEQ ID NO: 1725881 - RNA, 19 nt, Homo sapiens
  misc_RNA (1)...(19): siRNA sense strand
aagcggaugaggcuaauaa

SEQ ID NO: 1725882 - RNA, 19 nt, Homo sapiens
  misc_RNA (1)...(19): siRNA sense strand
agaguuauuugcccguuau

SEQ ID NO: 1725883 - RNA, 19 nt, Homo sapiens
  misc_RNA (1)...(19): siRNA sense strand
aagccugucugaaggacua

SEQ ID NO: 1725884 - RNA, 19 nt, Homo sapiens
  misc_RNA (1)...(19): siRNA sense strand
gagaagcuggguagugaau

SEQ ID NO: 1725885 - RNA, 19 nt, Homo sapiens
  misc_RNA (1)...(19): siRNA sense strand
agagagcagugcaggaugu

SEQ ID NO: 1725886 - RNA, 19 nt, Homo sapiens
  misc_RNA (1)...(19): siRNA sense strand
aagagacccuagcauacuu

SEQ ID NO: 1725887 - RNA, 19 nt, Homo sapiens
  misc_RNA (1)...(19): siRNA sense strand
ucaaaucugauccaggaaa

SEQ ID NO: 1725888 - RNA, 19 nt, Homo sapiens
  misc_RNA (1)...(19): siRNA sense strand
ugauguagaccaagaggaa

SEQ ID NO: 1725889 - RNA, 19 nt, Homo sapiens
  misc_RNA (1)...(19): siRNA sense strand
uggauuugccacagaauuu

SEQ ID NO: 1725890 - RNA, 19 nt, Homo sapiens
  misc_RNA (1)...(19): siRNA sense strand
guggaacucccauagagaa

SEQ ID NO: 1725891 - RNA, 19 nt, Homo sapiens
  misc_RNA (1)...(19): siRNA sense strand
gcacuggaagagauggaaa

SEQ ID NO: 1725892 - RNA, 19 nt, Homo sapiens
  misc_RNA (1)...(19): siRNA sense strand
gauggcagaugugguguac

SEQ ID NO: 1725893 - RNA, 19 nt, Homo sapiens
  misc_RNA (1)...(19): siRNA sense strand
uuacgauggagaugaauuu

SEQ ID NO: 1725894 - RNA, 19 nt, Homo sapiens
  misc_RNA (1)...(19): siRNA sense strand
aguaaggaguggcuagaga

SEQ ID NO: 1725895 - RNA, 19 nt, Homo sapiens
  misc_RNA (1)...(19): siRNA sense strand
cuggcuguaugcaauauuu

SEQ ID NO: 1725896 - RNA, 19 nt, Homo sapiens
  misc_RNA (1)...(19): siRNA sense strand
uguacuggcuguaugcaau

SEQ ID NO: 1725897 - RNA, 19 nt, Homo sapiens
  misc_RNA (1)...(19): siRNA sense strand
ucgagaagcucaggaggau

SEQ ID NO: 1725898 - RNA, 19 nt, Homo sapiens
  misc_RNA (1)...(19): siRNA sense strand
ggcuagagaagaacucaaa

SEQ ID NO: 1725899 - RNA, 19 nt, Homo sapiens
  misc_RNA (1)...(19): siRNA sense strand
ucaaagagcugcccauguu

SEQ ID NO: 1725900 - RNA, 19 nt, Homo sapiens
  misc_RNA (1)...(19): siRNA sense strand
gaucagagauggccagguu

SEQ ID NO: 1725901 - RNA, 19 nt, Homo sapiens
  misc_RNA (1)...(19): siRNA sense strand
uggaagagauggaaaguaa

SEQ ID NO: 1725902 - RNA, 19 nt, Homo sapiens
  misc_RNA (1)...(19): siRNA sense strand
gaucaaagguaugguaaga

SEQ ID NO: 1725903 - RNA, 19 nt, Homo sapiens
  misc_RNA (1)...(19): siRNA sense strand
gaacucccauagagaaauu

SEQ ID NO: 1725904 - RNA, 19 nt, Homo sapiens
  misc_RNA (1)...(19): siRNA sense strand
gagcaaacccuuacaaaca

SEQ ID NO: 1725905 - RNA, 19 nt, Homo sapiens
  misc_RNA (1)...(19): siRNA sense strand
uaaggugacugcagagaaa

SEQ ID NO: 1725906 - RNA, 19 nt, Homo sapiens
  misc_RNA (1)...(19): siRNA sense strand
guaagagagugauucagaa

SEQ ID NO: 1725907 - RNA, 19 nt, Homo sapiens
  misc_RNA (1)...(19): siRNA sense strand
gaucugauguagaccaaga

SEQ ID NO: 1725908 - RNA, 19 nt, Homo sapiens
  misc_RNA (1)...(19): siRNA sense strand
guaacaagaugacauguac

SEQ ID NO: 1725909 - RNA, 19 nt, Homo sapiens
  misc_RNA (1)...(19): siRNA sense strand
gaaucacugucaaaucuga

SEQ ID NO: 1725910 - RNA, 19 nt, Homo sapiens
  misc_RNA (1)...(19): siRNA sense strand
uuaauggacuuacgaaaug

SEQ ID NO: 1725911 - RNA, 19 nt, Homo sapiens
  misc_RNA (1)...(19): siRNA sense strand
ucaaagguaugguaagaga

SEQ ID NO: 1725912 - RNA, 19 nt, Homo sapiens
  misc_RNA (1)...(19): siRNA sense strand
gugagaagcuggguaguga

SEQ ID NO: 1725913 - RNA, 19 nt, Homo sapiens
  misc_RNA (1)...(19): siRNA sense strand
gcaaacccuuacaaacauu

SEQ ID NO: 1725914 - RNA, 19 nt, Homo sapiens
  misc_RNA (1)...(19): siRNA sense strand
gaaauuagacggauguaac

SEQ ID NO: 1725915 - RNA, 19 nt, Homo sapiens
  misc_RNA (1)...(19): siRNA sense strand
aagaggaaauuguggauga

SEQ ID NO: 1725916 - RNA, 19 nt, Homo sapiens
  misc_RNA (1)...(19): siRNA sense strand
gguaagagagugauucaga

SEQ ID NO: 1725917 - RNA, 19 nt, Homo sapiens
  misc_RNA (1)...(19): siRNA sense strand
ggucaaagaguuaguggaa

SEQ ID NO: 1725918 - RNA, 19 nt, Homo sapiens
  misc_RNA (1)...(19): siRNA sense strand
gaaggacuacuuugaaauc

SEQ ID NO: 1725919 - RNA, 19 nt, Homo sapiens
  misc_RNA (1)...(19): siRNA sense strand
ugaucaagcucagcagaua

SEQ ID NO: 1725920 - RNA, 19 nt, Homo sapiens
  misc_RNA (1)...(19): siRNA sense strand
caggaaaucuuggacuuug

SEQ ID NO: 1725921 - RNA, 19 nt, Homo sapiens
  misc_RNA (1)...(19): siRNA sense strand
gaaauuaauggacuuacga

SEQ ID NO: 1725922 - RNA, 19 nt, Homo sapiens
  misc_RNA (1)...(19): siRNA sense strand
caaaucugauccaggaaau

SEQ ID NO: 1725923 - RNA, 19 nt, Homo sapiens
  misc_RNA (1)...(19): siRNA sense strand
ugaauauugucucuccuuu

SEQ ID NO: 1725924 - RNA, 19 nt, Homo sapiens
  misc_RNA (1)...(19): siRNA sense strand
aagaugagguagaagacua

SEQ ID NO: 1725925 - RNA, 19 nt, Homo sapiens
  misc_RNA (1)...(19): siRNA sense strand
uggaaucacugucaaaucu

SEQ ID NO: 1725926 - RNA, 19 nt, Homo sapiens
  misc_RNA (1)...(19): siRNA sense strand
ggaagagacccuagcauac

SEQ ID NO: 1725927 - RNA, 19 nt, Homo sapiens
  misc_RNA (1)...(19): siRNA sense strand
guuaguggaagcagaguua

SEQ ID NO: 1725928 - RNA, 19 nt, Homo sapiens
  misc_RNA (1)...(19): siRNA sense strand
cugaaggacuacuuugaaa

SEQ ID NO: 1725929 - RNA, 19 nt, Homo sapiens
  misc_RNA (1)...(19): siRNA sense strand
gaucaagcucagcagauaa

SEQ ID NO: 1725930 - RNA, 19 nt, Homo sapiens
  misc_RNA (1)...(19): siRNA sense strand
gugaaugcauguacuucuu

SEQ ID NO: 1725931 - RNA, 19 nt, Homo sapiens
  misc_RNA (1)...(19): siRNA sense strand
cuagcauacuugaauauug

SEQ ID NO: 1725932 - RNA, 19 nt, Homo sapiens
  misc_RNA (1)...(19): siRNA sense strand
gaagcuggguagugaaugc

SEQ ID NO: 1725933 - RNA, 19 nt, Homo sapiens
  misc_RNA (1)...(19): siRNA sense strand
gaagagacccuagcauacu

SEQ ID NO: 1725934 - RNA, 19 nt, Homo sapiens
  misc_RNA (1)...(19): siRNA sense strand
cagaguuauuugcccguua

SEQ ID NO: 1725935 - RNA, 19 nt, Homo sapiens
  misc_RNA (1)...(19): siRNA sense strand
agacggauguaacaagaug

SEQ ID NO: 1725936 - RNA, 19 nt, Homo sapiens
  misc_RNA (1)...(19): siRNA sense strand
ggaugaggcuaauaaaaga

SEQ ID NO: 1725937 - RNA, 19 nt, Homo sapiens
  misc_RNA (1)...(19): siRNA sense strand
ggacuuacgaaaugaauac

SEQ ID NO: 1725938 - RNA, 19 nt, Homo sapiens
  misc_RNA (1)...(19): siRNA sense strand
gaagagauggaaaguaagg

SEQ ID NO: 1725939 - RNA, 19 nt, Homo sapiens
  misc_RNA (1)...(19): siRNA sense strand
ggaaauuguggaugagaga

SEQ ID NO: 1725940 - RNA, 19 nt, Homo sapiens
  misc_RNA (1)...(19): siRNA sense strand
gggaagaugagguagaaga

SEQ ID NO: 1725941 - RNA, 19 nt, Homo sapiens
  misc_RNA (1)...(19): siRNA sense strand
guacuggcuguaugcaaua

SEQ ID NO: 1725942 - RNA, 19 nt, Homo sapiens
  misc_RNA (1)...(19): siRNA sense strand
uuagacggauguaacaaga

SEQ ID NO: 1725943 - RNA, 19 nt, Homo sapiens
  misc_RNA (1)...(19): siRNA sense strand
guaaggaguggcuagagaa

SEQ ID NO: 1725944 - RNA, 19 nt, Homo sapiens
  misc_RNA (1)...(19): siRNA sense strand
aggaagagacccuagcaua

SEQ ID NO: 1725945 - RNA, 19 nt, Homo sapiens
  misc_RNA (1)...(19): siRNA sense strand
agaaggcacuggaagagau

SEQ ID NO: 1725946 - RNA, 19 nt, Homo sapiens
  misc_RNA (1)...(19): siRNA sense strand
gaaauccagaucagagaug

SEQ ID NO: 1725947 - RNA, 19 nt, Homo sapiens
  misc_RNA (1)...(19): siRNA sense strand
gauguggaaucacugucaa

SEQ ID NO: 1725948 - RNA, 19 nt, Homo sapiens
  misc_RNA (1)...(19): siRNA sense strand
gacauguacuggcuguaug

SEQ ID NO: 1725949 - RNA, 19 nt, Homo sapiens
  misc_RNA (1)...(19): siRNA sense strand
uggaggagcugcuggaucu

SEQ ID NO: 1725950 - RNA, 19 nt, Homo sapiens
  misc_RNA (1)...(19): siRNA sense strand
gacccuagcauacuugaau

SEQ ID NO: 1725951 - RNA, 19 nt, Homo sapiens
  misc_RNA (1)...(19): siRNA sense strand
aggaguggcuagagaagaa

SEQ ID NO: 1725952 - RNA, 19 nt, Homo sapiens
  misc_RNA (1)...(19): siRNA sense strand
gcaagcggaugaggcuaau

SEQ ID NO: 1725953 - RNA, 19 nt, Homo sapiens
  misc_RNA (1)...(19): siRNA sense strand
ggugacugcagagaaauua

SEQ ID NO: 1725954 - RNA, 19 nt, Homo sapiens
  misc_RNA (1)...(19): siRNA sense strand
caacacagagcuagauuuu

SEQ ID NO: 1725955 - RNA, 19 nt, Homo sapiens
  misc_RNA (1)...(19): siRNA sense strand
gcucaagcuucucccaaca

SEQ ID NO: 1725956 - RNA, 19 nt, Homo sapiens
  misc_RNA (1)...(19): siRNA sense strand
gacgauauuugggaagaug

SEQ ID NO: 1725957 - RNA, 19 nt, Homo sapiens
  misc_RNA (1)...(19): siRNA sense strand
gagauggccagguucaaug

SEQ ID NO: 1725958 - RNA, 19 nt, Homo sapiens
  misc_RNA (1)...(19): siRNA sense strand
gcaaagccugucugaagga

SEQ ID NO: 1725959 - RNA, 19 nt, Homo sapiens
  misc_RNA (1)...(19): siRNA sense strand
gcaauauuucuguuggauu

SEQ ID NO: 1725960 - RNA, 19 nt, Homo sapiens
  misc_RNA (1)...(19): siRNA sense strand
uggcagaugugguguacug

SEQ ID NO: 1725961 - RNA, 19 nt, Homo sapiens
  misc_RNA (1)...(19): siRNA sense strand
ggauguugacgacgauauu

SEQ ID NO: 1725962 - RNA, 19 nt, Homo sapiens
  misc_RNA (1)...(19): siRNA sense strand
uaauggacuuacgaaauga

SEQ ID NO: 1725963 - RNA, 19 nt, Homo sapiens
  misc_RNA (1)...(19): siRNA sense strand
cagagaaauuaauggacuu

SEQ ID NO: 1725964 - RNA, 19 nt, Homo sapiens
  misc_RNA (1)...(19): siRNA sense strand
guaaggugacugcagagaa

SEQ ID NO: 1725965 - RNA, 19 nt, Homo sapiens
  misc_RNA (1)...(19): siRNA sense strand
ggaaaucuuggacuuugau

SEQ ID NO: 1725966 - RNA, 19 nt, Homo sapiens
  misc_RNA (1)...(19): siRNA sense strand
gauguugacgacgauauuu

SEQ ID NO: 1725967 - RNA, 19 nt, Homo sapiens
  misc_RNA (1)...(19): siRNA sense strand
aagcggaugaggcuaauaa

SEQ ID NO: 1725968 - RNA, 19 nt, Homo sapiens
  misc_RNA (1)...(19): siRNA sense strand
agaguuauuugcccguuau

SEQ ID NO: 1725969 - RNA, 19 nt, Homo sapiens
  misc_RNA (1)...(19): siRNA sense strand
aagccugucugaaggacua

SEQ ID NO: 1725970 - RNA, 19 nt, Homo sapiens
  misc_RNA (1)...(19): siRNA sense strand
gagaagcuggguagugaau

SEQ ID NO: 1725971 - RNA, 19 nt, Homo sapiens
  misc_RNA (1)...(19): siRNA sense strand
agagagcagugcaggaugu

SEQ ID NO: 1725972 - RNA, 19 nt, Homo sapiens
  misc_RNA (1)...(19): siRNA sense strand
ucaaaucugauccaggaaa

SEQ ID NO: 1725973 - RNA, 19 nt, Homo sapiens
  misc_RNA (1)...(19): siRNA sense strand
aagagacccuagcauacuu

SEQ ID NO: 1725974 - RNA, 19 nt, Homo sapiens
  misc_RNA (1)...(19): siRNA sense strand
ugauguagaccaagaggaa

SEQ ID NO: 1725975 - RNA, 19 nt, Homo sapiens
  misc_RNA (1)...(19): siRNA sense strand
guggaacucccauagagaa

SEQ ID NO: 1725976 - RNA, 19 nt, Homo sapiens
  misc_RNA (1)...(19): siRNA sense strand
gcacuggaagagauggaaa

SEQ ID NO: 1725977 - RNA, 19 nt, Homo sapiens
  misc_RNA (1)...(19): siRNA sense strand
gauggcagaugugguguac

SEQ ID NO: 1725978 - RNA, 19 nt, Homo sapiens
  misc_RNA (1)...(19): siRNA sense strand
caacugcccagaaccaaag

SEQ ID NO: 1725979 - RNA, 19 nt, Homo sapiens
  misc_RNA (1)...(19): siRNA sense strand
cuggcuguaugcaauauuu

SEQ ID NO: 1725980 - RNA, 19 nt, Homo sapiens
  misc_RNA (1)...(19): siRNA sense strand
uguacuggcuguaugcaau

SEQ ID NO: 1725981 - RNA, 19 nt, Homo sapiens
  misc_RNA (1)...(19): siRNA sense strand
ggcuagagaagaacucaaa

SEQ ID NO: 1725982 - RNA, 19 nt, Homo sapiens
  misc_RNA (1)...(19): siRNA sense strand
aguaaggaguggcuagaga

SEQ ID NO: 1725983 - RNA, 19 nt, Homo sapiens
  misc_RNA (1)...(19): siRNA sense strand
ccaacacagagcuagauuu

SEQ ID NO: 1725984 - RNA, 19 nt, Homo sapiens
  misc_RNA (1)...(19): siRNA sense strand
acacagagcuagauuuugg

SEQ ID NO: 1725985 - RNA, 19 nt, Homo sapiens
  misc_RNA (1)...(19): siRNA sense strand
cugcaaagccugucugaag

SEQ ID NO: 1725986 - RNA, 19 nt, Homo sapiens
  misc_RNA (1)...(19): siRNA sense strand
uagagcaaacccuuacaaa

SEQ ID NO: 1725987 - RNA, 19 nt, Homo sapiens
  misc_RNA (1)...(19): siRNA sense strand
ggauguggaaucacuguca

SEQ ID NO: 1725988 - RNA, 19 nt, Homo sapiens
  misc_RNA (1)...(19): siRNA sense strand
ccaggaaaucuuggacuuu

SEQ ID NO: 1725989 - RNA, 19 nt, Homo sapiens
  misc_RNA (1)...(19): siRNA sense strand
caaagagcugcccauguug

SEQ ID NO: 1725990 - RNA, 19 nt, Homo sapiens
  misc_RNA (1)...(19): siRNA sense strand
gaaggcacuggaagagaug

SEQ ID NO: 1725991 - RNA, 19 nt, Homo sapiens
  misc_RNA (1)...(19): siRNA sense strand
guagugaaugcauguacuu

SEQ ID NO: 1725992 - RNA, 19 nt, Homo sapiens
  misc_RNA (1)...(19): siRNA sense strand
cauggguucucucucuaga

SEQ ID NO: 1725993 - RNA, 19 nt, Homo sapiens
  misc_RNA (1)...(19): siRNA sense strand
ucaagcuucucccaacaca

SEQ ID NO: 1725994 - RNA, 19 nt, Homo sapiens
  misc_RNA (1)...(19): siRNA sense strand
ugacauguacuggcuguau

SEQ ID NO: 1725995 - RNA, 19 nt, Homo sapiens
  misc_RNA (1)...(19): siRNA sense strand
uguaacaagaugacaugua

SEQ ID NO: 1725996 - RNA, 19 nt, Homo sapiens
  misc_RNA (1)...(19): siRNA sense strand
cuagagaagaacucaaaga

SEQ ID NO: 1725997 - RNA, 19 nt, Homo sapiens
  misc_RNA (1)...(19): siRNA sense strand
gaggagcugcuggaucuga

SEQ ID NO: 1725998 - RNA, 19 nt, Homo sapiens
  misc_RNA (1)...(19): siRNA sense strand
aguggaagcagaguuauuu

SEQ ID NO: 1725999 - RNA, 19 nt, Homo sapiens
  misc_RNA (1)...(19): siRNA sense strand
ucaaagagcugcccauguu

SEQ ID NO: 1726000 - RNA, 19 nt, Homo sapiens
  misc_RNA (1)...(19): siRNA sense strand
gaucagagauggccagguu

SEQ ID NO: 1726001 - RNA, 19 nt, Homo sapiens
  misc_RNA (1)...(19): siRNA sense strand
uggaagagauggaaaguaa

SEQ ID NO: 1726002 - RNA, 19 nt, Homo sapiens
  misc_RNA (1)...(19): siRNA sense strand
ccacagaauuucaagauau

SEQ ID NO: 1726003 - RNA, 19 nt, Homo sapiens
  misc_RNA (1)...(19): siRNA sense strand
gaacucccauagagaaauu

SEQ ID NO: 1726004 - RNA, 19 nt, Homo sapiens
  misc_RNA (1)...(19): siRNA sense strand
gaucaaagguaugguaaga

SEQ ID NO: 1726005 - RNA, 19 nt, Homo sapiens
  misc_RNA (1)...(19): siRNA sense strand
gagcaaacccuuacaaaca

SEQ ID NO: 1726006 - RNA, 19 nt, Homo sapiens
  misc_RNA (1)...(19): siRNA sense strand
uaaggugacugcagagaaa

SEQ ID NO: 1726007 - RNA, 19 nt, Homo sapiens
  misc_RNA (1)...(19): siRNA sense strand
gagaaaccaggaucuauuu

SEQ ID NO: 1726008 - RNA, 19 nt, Homo sapiens
  misc_RNA (1)...(19): siRNA sense strand
guaagagagugauucagaa

SEQ ID NO: 1726009 - RNA, 19 nt, Homo sapiens
  misc_RNA (1)...(19): siRNA sense strand
ggagaaaccaggaucuauu

SEQ ID NO: 1726010 - RNA, 19 nt, Homo sapiens
  misc_RNA (1)...(19): siRNA sense strand
gaucugauguagaccaaga

SEQ ID NO: 1726011 - RNA, 19 nt, Homo sapiens
  misc_RNA (1)...(19): siRNA sense strand
guaacaagaugacauguac

SEQ ID NO: 1726012 - RNA, 19 nt, Homo sapiens
  misc_RNA (1)...(19): siRNA sense strand
gaaucacugucaaaucuga

SEQ ID NO: 1726013 - RNA, 19 nt, Homo sapiens
  misc_RNA (1)...(19): siRNA sense strand
uuaauggacuuacgaaaug

SEQ ID NO: 1726014 - RNA, 19 nt, Homo sapiens
  misc_RNA (1)...(19): siRNA sense strand
ucaaagguaugguaagaga

SEQ ID NO: 1726015 - RNA, 19 nt, Homo sapiens
  misc_RNA (1)...(19): siRNA sense strand
cgauggagaugaauuuaga

SEQ ID NO: 1726016 - RNA, 19 nt, Homo sapiens
  misc_RNA (1)...(19): siRNA sense strand
gugagaagcuggguaguga

SEQ ID NO: 1726017 - RNA, 19 nt, Homo sapiens
  misc_RNA (1)...(19): siRNA sense strand
gcaaacccuuacaaacauu

SEQ ID NO: 1726018 - RNA, 19 nt, Homo sapiens
  misc_RNA (1)...(19): siRNA sense strand
gaaauuagacggauguaac

SEQ ID NO: 1726019 - RNA, 19 nt, Homo sapiens
  misc_RNA (1)...(19): siRNA sense strand
gcacuuagacaaccuaugg

SEQ ID NO: 1726020 - RNA, 19 nt, Homo sapiens
  misc_RNA (1)...(19): siRNA sense strand
aagaggaaauuguggauga

SEQ ID NO: 1726021 - RNA, 19 nt, Homo sapiens
  misc_RNA (1)...(19): siRNA sense strand
gguaagagagugauucaga

SEQ ID NO: 1726022 - RNA, 19 nt, Homo sapiens
  misc_RNA (1)...(19): siRNA sense strand
gagaagcucaggaggauga

SEQ ID NO: 1726023 - RNA, 19 nt, Homo sapiens
  misc_RNA (1)...(19): siRNA sense strand
ggucaaagaguuaguggaa

SEQ ID NO: 1726024 - RNA, 19 nt, Homo sapiens
  misc_RNA (1)...(19): siRNA sense strand
gaaggacuacuuugaaauc

SEQ ID NO: 1726025 - RNA, 19 nt, Homo sapiens
  misc_RNA (1)...(19): siRNA sense strand
ugaucaagcucagcagaua

SEQ ID NO: 1726026 - RNA, 19 nt, Homo sapiens
  misc_RNA (1)...(19): siRNA sense strand
gccacagaauuucaagaua

SEQ ID NO: 1726027 - RNA, 19 nt, Homo sapiens
  misc_RNA (1)...(19): siRNA sense strand
gaaauuaauggacuuacga

SEQ ID NO: 1726028 - RNA, 19 nt, Homo sapiens
  misc_RNA (1)...(19): siRNA sense strand
caggaaaucuuggacuuug

SEQ ID NO: 1726029 - RNA, 19 nt, Homo sapiens
  misc_RNA (1)...(19): siRNA sense strand
gaugcaauuucuuaaggaa

SEQ ID NO: 1726030 - RNA, 19 nt, Homo sapiens
  misc_RNA (1)...(19): siRNA sense strand
ugaauauugucucuccuuu

SEQ ID NO: 1726031 - RNA, 19 nt, Homo sapiens
  misc_RNA (1)...(19): siRNA sense strand
caaaucugauccaggaaau

SEQ ID NO: 1726032 - RNA, 19 nt, Homo sapiens
  misc_RNA (1)...(19): siRNA sense strand
aagaugagguagaagacua

SEQ ID NO: 1726033 - RNA, 19 nt, Homo sapiens
  misc_RNA (1)...(19): siRNA sense strand
ggaugcaauuucuuaagga

SEQ ID NO: 1726034 - RNA, 19 nt, Homo sapiens
  misc_RNA (1)...(19): siRNA sense strand
aaaccaggaucuauuugga

SEQ ID NO: 1726035 - RNA, 19 nt, Homo sapiens
  misc_RNA (1)...(19): siRNA sense strand
guuaguggaagcagaguua

SEQ ID NO: 1726036 - RNA, 19 nt, Homo sapiens
  misc_RNA (1)...(19): siRNA sense strand
uggaaucacugucaaaucu

SEQ ID NO: 1726037 - RNA, 19 nt, Homo sapiens
  misc_RNA (1)...(19): siRNA sense strand
ggaagagacccuagcauac

SEQ ID NO: 1726038 - RNA, 19 nt, Homo sapiens
  misc_RNA (1)...(19): siRNA sense strand
cugaaggacuacuuugaaa

SEQ ID NO: 1726039 - RNA, 19 nt, Homo sapiens
  misc_RNA (1)...(19): siRNA sense strand
cuagcauacuugaauauug

SEQ ID NO: 1726040 - RNA, 19 nt, Homo sapiens
  misc_RNA (1)...(19): siRNA sense strand
gugaaugcauguacuucuu

SEQ ID NO: 1726041 - RNA, 19 nt, Homo sapiens
  misc_RNA (1)...(19): siRNA sense strand
gaucaagcucagcagauaa

SEQ ID NO: 1726042 - RNA, 19 nt, Homo sapiens
  misc_RNA (1)...(19): siRNA sense strand
gaagagacccuagcauacu

SEQ ID NO: 1726043 - RNA, 19 nt, Homo sapiens
  misc_RNA (1)...(19): siRNA sense strand
gaagcuggguagugaaugc

SEQ ID NO: 1726044 - RNA, 19 nt, Homo sapiens
  misc_RNA (1)...(19): siRNA sense strand
ggagaugaauuuagaaaag

SEQ ID NO: 1726045 - RNA, 19 nt, Homo sapiens
  misc_RNA (1)...(19): siRNA sense strand
agacggauguaacaagaug

SEQ ID NO: 1726046 - RNA, 19 nt, Homo sapiens
  misc_RNA (1)...(19): siRNA sense strand
ggaugaggcuaauaaaaga

SEQ ID NO: 1726047 - RNA, 19 nt, Homo sapiens
  misc_RNA (1)...(19): siRNA sense strand
cagaguuauuugcccguua

SEQ ID NO: 1726048 - RNA, 19 nt, Homo sapiens
  misc_RNA (1)...(19): siRNA sense strand
ggacuuacgaaaugaauac

SEQ ID NO: 1726049 - RNA, 19 nt, Homo sapiens
  misc_RNA (1)...(19): siRNA sense strand
gaagagauggaaaguaagg

SEQ ID NO: 1726050 - RNA, 19 nt, Homo sapiens
  misc_RNA (1)...(19): siRNA sense strand
aggaagagacccuagcaua

SEQ ID NO: 1726051 - RNA, 19 nt, Homo sapiens
  misc_RNA (1)...(19): siRNA sense strand
gggaagaugagguagaaga

SEQ ID NO: 1726052 - RNA, 19 nt, Homo sapiens
  misc_RNA (1)...(19): siRNA sense strand
guacuggcuguaugcaaua

SEQ ID NO: 1726053 - RNA, 19 nt, Homo sapiens
  misc_RNA (1)...(19): siRNA sense strand
uuagacggauguaacaaga

SEQ ID NO: 1726054 - RNA, 19 nt, Homo sapiens
  misc_RNA (1)...(19): siRNA sense strand
guaaggaguggcuagagaa

SEQ ID NO: 1726055 - RNA, 19 nt, Homo sapiens
  misc_RNA (1)...(19): siRNA sense strand
agaaggcacuggaagagau

SEQ ID NO: 1726056 - RNA, 19 nt, Homo sapiens
  misc_RNA (1)...(19): siRNA sense strand
caggaucuauuuggauuug

SEQ ID NO: 1726057 - RNA, 19 nt, Homo sapiens
  misc_RNA (1)...(19): siRNA sense strand
gaaauccagaucagagaug

SEQ ID NO: 1726058 - RNA, 19 nt, Homo sapiens
  misc_RNA (1)...(19): siRNA sense strand
ggaaauuguggaugagaga

SEQ ID NO: 1726059 - RNA, 19 nt, Homo sapiens
  misc_RNA (1)...(19): siRNA sense strand
gaaaccaggaucuauuugg

SEQ ID NO: 1726060 - RNA, 19 nt, Homo sapiens
  misc_RNA (1)...(19): siRNA sense strand
gacauguacuggcuguaug

SEQ ID NO: 1726061 - RNA, 19 nt, Homo sapiens
  misc_RNA (1)...(19): siRNA sense strand
gauguggaaucacugucaa

SEQ ID NO: 1726062 - RNA, 19 nt, Homo sapiens
  misc_RNA (1)...(19): siRNA sense strand
uggaggagcugcuggaucu

SEQ ID NO: 1726063 - RNA, 19 nt, Homo sapiens
  misc_RNA (1)...(19): siRNA sense strand
gacccuagcauacuugaau

SEQ ID NO: 1726064 - RNA, 19 nt, Homo sapiens
  misc_RNA (1)...(19): siRNA sense strand
aggaguggcuagagaagaa

SEQ ID NO: 1726065 - RNA, 19 nt, Homo sapiens
  misc_RNA (1)...(19): siRNA sense strand
gcaagcggaugaggcuaau

SEQ ID NO: 1726066 - RNA, 19 nt, Homo sapiens
  misc_RNA (1)...(19): siRNA sense strand
ggugacugcagagaaauua

SEQ ID NO: 1726067 - RNA, 19 nt, Homo sapiens
  misc_RNA (1)...(19): siRNA sense strand
caacacagagcuagauuuu

SEQ ID NO: 1726068 - RNA, 19 nt, Homo sapiens
  misc_RNA (1)...(19): siRNA sense strand
gcucaagcuucucccaaca

SEQ ID NO: 1726069 - RNA, 19 nt, Homo sapiens
  misc_RNA (1)...(19): siRNA sense strand
gacgauauuugggaagaug

SEQ ID NO: 1726070 - RNA, 19 nt, Homo sapiens
  misc_RNA (1)...(19): siRNA sense strand
gagauggccagguucaaug

SEQ ID NO: 1726071 - RNA, 19 nt, Homo sapiens
  misc_RNA (1)...(19): siRNA sense strand
gcaaagccugucugaagga

SEQ ID NO: 1726072 - RNA, 19 nt, Homo sapiens
  misc_RNA (1)...(19): siRNA sense strand
gcaauauuucuguuggauu

SEQ ID NO: 1726073 - RNA, 19 nt, Homo sapiens
  misc_RNA (1)...(19): siRNA sense strand
uauuuacgauggagaugaa

SEQ ID NO: 1726074 - RNA, 19 nt, Homo sapiens
  misc_RNA (1)...(19): siRNA sense strand
ggauguugacgacgauauu

SEQ ID NO: 1726075 - RNA, 19 nt, Homo sapiens
  misc_RNA (1)...(19): siRNA sense strand
uaauggacuuacgaaauga

SEQ ID NO: 1726076 - RNA, 19 nt, Homo sapiens
  misc_RNA (1)...(19): siRNA sense strand
cagagaaauuaauggacuu

SEQ ID NO: 1726077 - RNA, 19 nt, Homo sapiens
  misc_RNA (1)...(19): siRNA sense strand
guaaggugacugcagagaa

SEQ ID NO: 1726078 - RNA, 19 nt, Homo sapiens
  misc_RNA (1)...(19): siRNA sense strand
uggcagaugugguguacug

SEQ ID NO: 1726079 - RNA, 19 nt, Homo sapiens
  misc_RNA (1)...(19): siRNA sense strand
ggaaaucuuggacuuugau

SEQ ID NO: 1726080 - RNA, 19 nt, Homo sapiens
  misc_RNA (1)...(19): siRNA sense strand
gauguugacgacgauauuu

SEQ ID NO: 1726081 - RNA, 19 nt, Homo sapiens
  misc_RNA (1)...(19): siRNA sense strand
aagcggaugaggcuaauaa

SEQ ID NO: 1726082 - RNA, 19 nt, Homo sapiens
  misc_RNA (1)...(19): siRNA sense strand
agaguuauuugcccguuau

SEQ ID NO: 1726083 - RNA, 19 nt, Homo sapiens
  misc_RNA (1)...(19): siRNA sense strand
aagccugucugaaggacua

SEQ ID NO: 1726084 - RNA, 19 nt, Homo sapiens
  misc_RNA (1)...(19): siRNA sense strand
gagaagcuggguagugaau

SEQ ID NO: 1726085 - RNA, 19 nt, Homo sapiens
  misc_RNA (1)...(19): siRNA sense strand
agagagcagugcaggaugu

SEQ ID NO: 1726086 - RNA, 19 nt, Homo sapiens
  misc_RNA (1)...(19): siRNA sense strand
aagagacccuagcauacuu

SEQ ID NO: 1726087 - RNA, 19 nt, Homo sapiens
  misc_RNA (1)...(19): siRNA sense strand
ucaaaucugauccaggaaa

SEQ ID NO: 1726088 - RNA, 19 nt, Homo sapiens
  misc_RNA (1)...(19): siRNA sense strand
ugauguagaccaagaggaa

SEQ ID NO: 1726089 - RNA, 19 nt, Homo sapiens
  misc_RNA (1)...(19): siRNA sense strand
uggauuugccacagaauuu

SEQ ID NO: 1726090 - RNA, 19 nt, Homo sapiens
  misc_RNA (1)...(19): siRNA sense strand
guggaacucccauagagaa

SEQ ID NO: 1726091 - RNA, 19 nt, Homo sapiens
  misc_RNA (1)...(19): siRNA sense strand
gcacuggaagagauggaaa

SEQ ID NO: 1726092 - RNA, 19 nt, Homo sapiens
  misc_RNA (1)...(19): siRNA sense strand
gauggcagaugugguguac

SEQ ID NO: 1726093 - RNA, 19 nt, Homo sapiens
  misc_RNA (1)...(19): siRNA sense strand
uuacgauggagaugaauuu

SEQ ID NO: 1726094 - RNA, 19 nt, Homo sapiens
  misc_RNA (1)...(19): siRNA sense strand
aguaaggaguggcuagaga

SEQ ID NO: 1726095 - RNA, 19 nt, Homo sapiens
  misc_RNA (1)...(19): siRNA sense strand
cuggcuguaugcaauauuu

SEQ ID NO: 1726096 - RNA, 19 nt, Homo sapiens
  misc_RNA (1)...(19): siRNA sense strand
uguacuggcuguaugcaau

SEQ ID NO: 1726097 - RNA, 19 nt, Homo sapiens
  misc_RNA (1)...(19): siRNA sense strand
ucgagaagcucaggaggau

SEQ ID NO: 1726098 - RNA, 19 nt, Homo sapiens
  misc_RNA (1)...(19): siRNA sense strand
ggcuagagaagaacucaaa

SEQ ID NO: 1726099 - RNA, 19 nt, Homo sapiens
  misc_RNA (1)...(19): siRNA sense strand
ucaaagagcugcccauguu

SEQ ID NO: 1726100 - RNA, 19 nt, Homo sapiens
  misc_RNA (1)...(19): siRNA sense strand
gaucagagauggccagguu

SEQ ID NO: 1726101 - RNA, 19 nt, Homo sapiens
  misc_RNA (1)...(19): siRNA sense strand
uggaagagauggaaaguaa

SEQ ID NO: 1726102 - RNA, 19 nt, Homo sapiens
  misc_RNA (1)...(19): siRNA sense strand
ccacagaauuucaagauau

SEQ ID NO: 1726103 - RNA, 19 nt, Homo sapiens
  misc_RNA (1)...(19): siRNA sense strand
gaacucccauagagaaauu

SEQ ID NO: 1726104 - RNA, 19 nt, Homo sapiens
  misc_RNA (1)...(19): siRNA sense strand
gaucaaagguaugguaaga

SEQ ID NO: 1726105 - RNA, 19 nt, Homo sapiens
  misc_RNA (1)...(19): siRNA sense strand
gagcaaacccuuacaaaca

SEQ ID NO: 1726106 - RNA, 19 nt, Homo sapiens
  misc_RNA (1)...(19): siRNA sense strand
uaaggugacugcagagaaa

SEQ ID NO: 1726107 - RNA, 19 nt, Homo sapiens
  misc_RNA (1)...(19): siRNA sense strand
gagaaaccaggaucuauuu

SEQ ID NO: 1726108 - RNA, 19 nt, Homo sapiens
  misc_RNA (1)...(19): siRNA sense strand
guaagagagugauucagaa

SEQ ID NO: 1726109 - RNA, 19 nt, Homo sapiens
  misc_RNA (1)...(19): siRNA sense strand
ggagaaaccaggaucuauu

SEQ ID NO: 1726110 - RNA, 19 nt, Homo sapiens
  misc_RNA (1)...(19): siRNA sense strand
gaucugauguagaccaaga

SEQ ID NO: 1726111 - RNA, 19 nt, Homo sapiens
  misc_RNA (1)...(19): siRNA sense strand
guaacaagaugacauguac

SEQ ID NO: 1726112 - RNA, 19 nt, Homo sapiens
  misc_RNA (1)...(19): siRNA sense strand
gaaucacugucaaaucuga

SEQ ID NO: 1726113 - RNA, 19 nt, Homo sapiens
  misc_RNA (1)...(19): siRNA sense strand
uuaauggacuuacgaaaug

SEQ ID NO: 1726114 - RNA, 19 nt, Homo sapiens
  misc_RNA (1)...(19): siRNA sense strand
ucaaagguaugguaagaga

SEQ ID NO: 1726115 - RNA, 19 nt, Homo sapiens
  misc_RNA (1)...(19): siRNA sense strand
cgauggagaugaauuuaga

SEQ ID NO: 1726116 - RNA, 19 nt, Homo sapiens
  misc_RNA (1)...(19): siRNA sense strand
gugagaagcuggguaguga

SEQ ID NO: 1726117 - RNA, 19 nt, Homo sapiens
  misc_RNA (1)...(19): siRNA sense strand
gcaaacccuuacaaacauu

SEQ ID NO: 1726118 - RNA, 19 nt, Homo sapiens
  misc_RNA (1)...(19): siRNA sense strand
gaaauuagacggauguaac

SEQ ID NO: 1726119 - RNA, 19 nt, Homo sapiens
  misc_RNA (1)...(19): siRNA sense strand
gcacuuagacaaccuaugg

SEQ ID NO: 1726120 - RNA, 19 nt, Homo sapiens
  misc_RNA (1)...(19): siRNA sense strand
aagaggaaauuguggauga

SEQ ID NO: 1726121 - RNA, 19 nt, Homo sapiens
  misc_RNA (1)...(19): siRNA sense strand
gguaagagagugauucaga

SEQ ID NO: 1726122 - RNA, 19 nt, Homo sapiens
  misc_RNA (1)...(19): siRNA sense strand
gagaagcucaggaggauga

SEQ ID NO: 1726123 - RNA, 19 nt, Homo sapiens
  misc_RNA (1)...(19): siRNA sense strand
ggucaaagaguuaguggaa

SEQ ID NO: 1726124 - RNA, 19 nt, Homo sapiens
  misc_RNA (1)...(19): siRNA sense strand
gaaggacuacuuugaaauc

SEQ ID NO: 1726125 - RNA, 19 nt, Homo sapiens
  misc_RNA (1)...(19): siRNA sense strand
ugaucaagcucagcagaua

SEQ ID NO: 1726126 - RNA, 19 nt, Homo sapiens
  misc_RNA (1)...(19): siRNA sense strand
gccacagaauuucaagaua

SEQ ID NO: 1726127 - RNA, 19 nt, Homo sapiens
  misc_RNA (1)...(19): siRNA sense strand
gaaauuaauggacuuacga

SEQ ID NO: 1726128 - RNA, 19 nt, Homo sapiens
  misc_RNA (1)...(19): siRNA sense strand
caggaaaucuuggacuuug

SEQ ID NO: 1726129 - RNA, 19 nt, Homo sapiens
  misc_RNA (1)...(19): siRNA sense strand
gaugcaauuucuuaaggaa

SEQ ID NO: 1726130 - RNA, 19 nt, Homo sapiens
  misc_RNA (1)...(19): siRNA sense strand
ugaauauugucucuccuuu

SEQ ID NO: 1726131 - RNA, 19 nt, Homo sapiens
  misc_RNA (1)...(19): siRNA sense strand
caaaucugauccaggaaau

SEQ ID NO: 1726132 - RNA, 19 nt, Homo sapiens
  misc_RNA (1)...(19): siRNA sense strand
aagaugagguagaagacua

SEQ ID NO: 1726133 - RNA, 19 nt, Homo sapiens
  misc_RNA (1)...(19): siRNA sense strand
ggaugcaauuucuuaagga

SEQ ID NO: 1726134 - RNA, 19 nt, Homo sapiens
  misc_RNA (1)...(19): siRNA sense strand
aaaccaggaucuauuugga

SEQ ID NO: 1726135 - RNA, 19 nt, Homo sapiens
  misc_RNA (1)...(19): siRNA sense strand
guuaguggaagcagaguua

SEQ ID NO: 1726136 - RNA, 19 nt, Homo sapiens
  misc_RNA (1)...(19): siRNA sense strand
uggaaucacugucaaaucu

SEQ ID NO: 1726137 - RNA, 19 nt, Homo sapiens
  misc_RNA (1)...(19): siRNA sense strand
ggaagagacccuagcauac

SEQ ID NO: 1726138 - RNA, 19 nt, Homo sapiens
  misc_RNA (1)...(19): siRNA sense strand
cugaaggacuacuuugaaa

SEQ ID NO: 1726139 - RNA, 19 nt, Homo sapiens
  misc_RNA (1)...(19): siRNA sense strand
cuagcauacuugaauauug

SEQ ID NO: 1726140 - RNA, 19 nt, Homo sapiens
  misc_RNA (1)...(19): siRNA sense strand
gugaaugcauguacuucuu

SEQ ID NO: 1726141 - RNA, 19 nt, Homo sapiens
  misc_RNA (1)...(19): siRNA sense strand
gaucaagcucagcagauaa

SEQ ID NO: 1726142 - RNA, 19 nt, Homo sapiens
  misc_RNA (1)...(19): siRNA sense strand
gaagagacccuagcauacu

SEQ ID NO: 1726143 - RNA, 19 nt, Homo sapiens
  misc_RNA (1)...(19): siRNA sense strand
gaagcuggguagugaaugc

SEQ ID NO: 1726144 - RNA, 19 nt, Homo sapiens
  misc_RNA (1)...(19): siRNA sense strand
ggagaugaauuuagaaaag

SEQ ID NO: 1726145 - RNA, 19 nt, Homo sapiens
  misc_RNA (1)...(19): siRNA sense strand
agacggauguaacaagaug

SEQ ID NO: 1726146 - RNA, 19 nt, Homo sapiens
  misc_RNA (1)...(19): siRNA sense strand
ggaugaggcuaauaaaaga

SEQ ID NO: 1726147 - RNA, 19 nt, Homo sapiens
  misc_RNA (1)...(19): siRNA sense strand
cagaguuauuugcccguua

SEQ ID NO: 1726148 - RNA, 19 nt, Homo sapiens
  misc_RNA (1)...(19): siRNA sense strand
ggacuuacgaaaugaauac

SEQ ID NO: 1726149 - RNA, 19 nt, Homo sapiens
  misc_RNA (1)...(19): siRNA sense strand
gaagagauggaaaguaagg

SEQ ID NO: 1726150 - RNA, 19 nt, Homo sapiens
  misc_RNA (1)...(19): siRNA sense strand
aggaagagacccuagcaua

SEQ ID NO: 1726151 - RNA, 19 nt, Homo sapiens
  misc_RNA (1)...(19): siRNA sense strand
gggaagaugagguagaaga

SEQ ID NO: 1726152 - RNA, 19 nt, Homo sapiens
  misc_RNA (1)...(19): siRNA sense strand
guacuggcuguaugcaaua

SEQ ID NO: 1726153 - RNA, 19 nt, Homo sapiens
  misc_RNA (1)...(19): siRNA sense strand
uuagacggauguaacaaga

SEQ ID NO: 1726154 - RNA, 19 nt, Homo sapiens
  misc_RNA (1)...(19): siRNA sense strand
guaaggaguggcuagagaa

SEQ ID NO: 1726155 - RNA, 19 nt, Homo sapiens
  misc_RNA (1)...(19): siRNA sense strand
agaaggcacuggaagagau

SEQ ID NO: 1726156 - RNA, 19 nt, Homo sapiens
  misc_RNA (1)...(19): siRNA sense strand
caggaucuauuuggauuug

SEQ ID NO: 1726157 - RNA, 19 nt, Homo sapiens
  misc_RNA (1)...(19): siRNA sense strand
gaaauccagaucagagaug

SEQ ID NO: 1726158 - RNA, 19 nt, Homo sapiens
  misc_RNA (1)...(19): siRNA sense strand
ggaaauuguggaugagaga

SEQ ID NO: 1726159 - RNA, 19 nt, Homo sapiens
  misc_RNA (1)...(19): siRNA sense strand
gaaaccaggaucuauuugg

SEQ ID NO: 1726160 - RNA, 19 nt, Homo sapiens
  misc_RNA (1)...(19): siRNA sense strand
gacauguacuggcuguaug

SEQ ID NO: 1726161 - RNA, 19 nt, Homo sapiens
  misc_RNA (1)...(19): siRNA sense strand
gauguggaaucacugucaa

SEQ ID NO: 1726162 - RNA, 19 nt, Homo sapiens
  misc_RNA (1)...(19): siRNA sense strand
uggaggagcugcuggaucu

SEQ ID NO: 1726163 - RNA, 19 nt, Homo sapiens
  misc_RNA (1)...(19): siRNA sense strand
gacccuagcauacuugaau

SEQ ID NO: 1726164 - RNA, 19 nt, Homo sapiens
  misc_RNA (1)...(19): siRNA sense strand
aggaguggcuagagaagaa

SEQ ID NO: 1726165 - RNA, 19 nt, Homo sapiens
  misc_RNA (1)...(19): siRNA sense strand
gcaagcggaugaggcuaau

SEQ ID NO: 1726166 - RNA, 19 nt, Homo sapiens
  misc_RNA (1)...(19): siRNA sense strand
ggugacugcagagaaauua

SEQ ID NO: 1726167 - RNA, 19 nt, Homo sapiens
  misc_RNA (1)...(19): siRNA sense strand
caacacagagcuagauuuu

SEQ ID NO: 1726168 - RNA, 19 nt, Homo sapiens
  misc_RNA (1)...(19): siRNA sense strand
gcucaagcuucucccaaca

SEQ ID NO: 1726169 - RNA, 19 nt, Homo sapiens
  misc_RNA (1)...(19): siRNA sense strand
gacgauauuugggaagaug

SEQ ID NO: 1726170 - RNA, 19 nt, Homo sapiens
  misc_RNA (1)...(19): siRNA sense strand
gagauggccagguucaaug

SEQ ID NO: 1726171 - RNA, 19 nt, Homo sapiens
  misc_RNA (1)...(19): siRNA sense strand
gcaaagccugucugaagga

SEQ ID NO: 1726172 - RNA, 19 nt, Homo sapiens
  misc_RNA (1)...(19): siRNA sense strand
gcaauauuucuguuggauu

SEQ ID NO: 1726173 - RNA, 19 nt, Homo sapiens
  misc_RNA (1)...(19): siRNA sense strand
uauuuacgauggagaugaa

SEQ ID NO: 1726174 - RNA, 19 nt, Homo sapiens
  misc_RNA (1)...(19): siRNA sense strand
ggauguugacgacgauauu

SEQ ID NO: 1726175 - RNA, 19 nt, Homo sapiens
  misc_RNA (1)...(19): siRNA sense strand
uaauggacuuacgaaauga

SEQ ID NO: 1726176 - RNA, 19 nt, Homo sapiens
  misc_RNA (1)...(19): siRNA sense strand
cagagaaauuaauggacuu

SEQ ID NO: 1726177 - RNA, 19 nt, Homo sapiens
  misc_RNA (1)...(19): siRNA sense strand
guaaggugacugcagagaa

SEQ ID NO: 1726178 - RNA, 19 nt, Homo sapiens
  misc_RNA (1)...(19): siRNA sense strand
uggcagaugugguguacug

SEQ ID NO: 1726179 - RNA, 19 nt, Homo sapiens
  misc_RNA (1)...(19): siRNA sense strand
ggaaaucuuggacuuugau

SEQ ID NO: 1726180 - RNA, 19 nt, Homo sapiens
  misc_RNA (1)...(19): siRNA sense strand
gauguugacgacgauauuu

SEQ ID NO: 1726181 - RNA, 19 nt, Homo sapiens
  misc_RNA (1)...(19): siRNA sense strand
aagcggaugaggcuaauaa

SEQ ID NO: 1726182 - RNA, 19 nt, Homo sapiens
  misc_RNA (1)...(19): siRNA sense strand
agaguuauuugcccguuau

SEQ ID NO: 1726183 - RNA, 19 nt, Homo sapiens
  misc_RNA (1)...(19): siRNA sense strand
aagccugucugaaggacua

SEQ ID NO: 1726184 - RNA, 19 nt, Homo sapiens
  misc_RNA (1)...(19): siRNA sense strand
gagaagcuggguagugaau

SEQ ID NO: 1726185 - RNA, 19 nt, Homo sapiens
  misc_RNA (1)...(19): siRNA sense strand
agagagcagugcaggaugu

SEQ ID NO: 1726186 - RNA, 19 nt, Homo sapiens
  misc_RNA (1)...(19): siRNA sense strand
aagagacccuagcauacuu

SEQ ID NO: 1726187 - RNA, 19 nt, Homo sapiens
  misc_RNA (1)...(19): siRNA sense strand
ucaaaucugauccaggaaa

SEQ ID NO: 1726188 - RNA, 19 nt, Homo sapiens
  misc_RNA (1)...(19): siRNA sense strand
ugauguagaccaagaggaa

SEQ ID NO: 1726189 - RNA, 19 nt, Homo sapiens
  misc_RNA (1)...(19): siRNA sense strand
uggauuugccacagaauuu

SEQ ID NO: 1726190 - RNA, 19 nt, Homo sapiens
  misc_RNA (1)...(19): siRNA sense strand
guggaacucccauagagaa

SEQ ID NO: 1726191 - RNA, 19 nt, Homo sapiens
  misc_RNA (1)...(19): siRNA sense strand
gcacuggaagagauggaaa

SEQ ID NO: 1726192 - RNA, 19 nt, Homo sapiens
  misc_RNA (1)...(19): siRNA sense strand
gauggcagaugugguguac

SEQ ID NO: 1726193 - RNA, 19 nt, Homo sapiens
  misc_RNA (1)...(19): siRNA sense strand
uuacgauggagaugaauuu

SEQ ID NO: 1726194 - RNA, 19 nt, Homo sapiens
  misc_RNA (1)...(19): siRNA sense strand
aguaaggaguggcuagaga

SEQ ID NO: 1726195 - RNA, 19 nt, Homo sapiens
  misc_RNA (1)...(19): siRNA sense strand
cuggcuguaugcaauauuu

SEQ ID NO: 1726196 - RNA, 19 nt, Homo sapiens
  misc_RNA (1)...(19): siRNA sense strand
uguacuggcuguaugcaau

SEQ ID NO: 1726197 - RNA, 19 nt, Homo sapiens
  misc_RNA (1)...(19): siRNA sense strand
ucgagaagcucaggaggau

SEQ ID NO: 1726198 - RNA, 19 nt, Homo sapiens
  misc_RNA (1)...(19): siRNA sense strand
ggcuagagaagaacucaaa

SEQ ID NO: 1726199 - RNA, 19 nt, Homo sapiens
  misc_RNA (1)...(19): siRNA sense strand
ucaaagagcugcccauguu

SEQ ID NO: 1726200 - RNA, 19 nt, Homo sapiens
  misc_RNA (1)...(19): siRNA sense strand
gaucagagauggccagguu

SEQ ID NO: 1726201 - RNA, 19 nt, Homo sapiens
  misc_RNA (1)...(19): siRNA sense strand
uggaagagauggaaaguaa

SEQ ID NO: 1726202 - RNA, 19 nt, Homo sapiens
  misc_RNA (1)...(19): siRNA sense strand
ccacagaauuucaagauau

SEQ ID NO: 1726203 - RNA, 19 nt, Homo sapiens
  misc_RNA (1)...(19): siRNA sense strand
gaacucccauagagaaauu

SEQ ID NO: 1726204 - RNA, 19 nt, Homo sapiens
  misc_RNA (1)...(19): siRNA sense strand
gaucaaagguaugguaaga

SEQ ID NO: 1726205 - RNA, 19 nt, Homo sapiens
  misc_RNA (1)...(19): siRNA sense strand
gagcaaacccuuacaaaca

SEQ ID NO: 1726206 - RNA, 19 nt, Homo sapiens
  misc_RNA (1)...(19): siRNA sense strand
uaaggugacugcagagaaa

SEQ ID NO: 1726207 - RNA, 19 nt, Homo sapiens
  misc_RNA (1)...(19): siRNA sense strand
gagaaaccaggaucuauuu

SEQ ID NO: 1726208 - RNA, 19 nt, Homo sapiens
  misc_RNA (1)...(19): siRNA sense strand
guaagagagugauucagaa

SEQ ID NO: 1726209 - RNA, 19 nt, Homo sapiens
  misc_RNA (1)...(19): siRNA sense strand
ggagaaaccaggaucuauu

SEQ ID NO: 1726210 - RNA, 19 nt, Homo sapiens
  misc_RNA (1)...(19): siRNA sense strand
gaucugauguagaccaaga

SEQ ID NO: 1726211 - RNA, 19 nt, Homo sapiens
  misc_RNA (1)...(19): siRNA sense strand
guaacaagaugacauguac

SEQ ID NO: 1726212 - RNA, 19 nt, Homo sapiens
  misc_RNA (1)...(19): siRNA sense strand
gaaucacugucaaaucuga

SEQ ID NO: 1726213 - RNA, 19 nt, Homo sapiens
  misc_RNA (1)...(19): siRNA sense strand
uuaauggacuuacgaaaug

SEQ ID NO: 1726214 - RNA, 19 nt, Homo sapiens
  misc_RNA (1)...(19): siRNA sense strand
ucaaagguaugguaagaga

SEQ ID NO: 1726215 - RNA, 19 nt, Homo sapiens
  misc_RNA (1)...(19): siRNA sense strand
cgauggagaugaauuuaga

SEQ ID NO: 1726216 - RNA, 19 nt, Homo sapiens
  misc_RNA (1)...(19): siRNA sense strand
gugagaagcuggguaguga

SEQ ID NO: 1726217 - RNA, 19 nt, Homo sapiens
  misc_RNA (1)...(19): siRNA sense strand
gcaaacccuuacaaacauu

SEQ ID NO: 1726218 - RNA, 19 nt, Homo sapiens
  misc_RNA (1)...(19): siRNA sense strand
gaaauuagacggauguaac

SEQ ID NO: 1726219 - RNA, 19 nt, Homo sapiens
  misc_RNA (1)...(19): siRNA sense strand
gcacuuagacaaccuaugg

SEQ ID NO: 1726220 - RNA, 19 nt, Homo sapiens
  misc_RNA (1)...(19): siRNA sense strand
aagaggaaauuguggauga

SEQ ID NO: 1726221 - RNA, 19 nt, Homo sapiens
  misc_RNA (1)...(19): siRNA sense strand
gguaagagagugauucaga

SEQ ID NO: 1726222 - RNA, 19 nt, Homo sapiens
  misc_RNA (1)...(19): siRNA sense strand
gagaagcucaggaggauga

SEQ ID NO: 1726223 - RNA, 19 nt, Homo sapiens
  misc_RNA (1)...(19): siRNA sense strand
ggucaaagaguuaguggaa

SEQ ID NO: 1726224 - RNA, 19 nt, Homo sapiens
  misc_RNA (1)...(19): siRNA sense strand
gaaggacuacuuugaaauc

SEQ ID NO: 1726225 - RNA, 19 nt, Homo sapiens
  misc_RNA (1)...(19): siRNA sense strand
ugaucaagcucagcagaua

SEQ ID NO: 1726226 - RNA, 19 nt, Homo sapiens
  misc_RNA (1)...(19): siRNA sense strand
gccacagaauuucaagaua

SEQ ID NO: 1726227 - RNA, 19 nt, Homo sapiens
  misc_RNA (1)...(19): siRNA sense strand
gaaauuaauggacuuacga

SEQ ID NO: 1726228 - RNA, 19 nt, Homo sapiens
  misc_RNA (1)...(19): siRNA sense strand
caggaaaucuuggacuuug

SEQ ID NO: 1726229 - RNA, 19 nt, Homo sapiens
  misc_RNA (1)...(19): siRNA sense strand
gaugcaauuucuuaaggaa

SEQ ID NO: 1726230 - RNA, 19 nt, Homo sapiens
  misc_RNA (1)...(19): siRNA sense strand
ugaauauugucucuccuuu

SEQ ID NO: 1726231 - RNA, 19 nt, Homo sapiens
  misc_RNA (1)...(19): siRNA sense strand
caaaucugauccaggaaau

SEQ ID NO: 1726232 - RNA, 19 nt, Homo sapiens
  misc_RNA (1)...(19): siRNA sense strand
aagaugagguagaagacua

SEQ ID NO: 1726233 - RNA, 19 nt, Homo sapiens
  misc_RNA (1)...(19): siRNA sense strand
ggaugcaauuucuuaagga

SEQ ID NO: 1726234 - RNA, 19 nt, Homo sapiens
  misc_RNA (1)...(19): siRNA sense strand
aaaccaggaucuauuugga

SEQ ID NO: 1726235 - RNA, 19 nt, Homo sapiens
  misc_RNA (1)...(19): siRNA sense strand
guuaguggaagcagaguua

SEQ ID NO: 1726236 - RNA, 19 nt, Homo sapiens
  misc_RNA (1)...(19): siRNA sense strand
uggaaucacugucaaaucu

SEQ ID NO: 1726237 - RNA, 19 nt, Homo sapiens
  misc_RNA (1)...(19): siRNA sense strand
ggaagagacccuagcauac

SEQ ID NO: 1726238 - RNA, 19 nt, Homo sapiens
  misc_RNA (1)...(19): siRNA sense strand
cugaaggacuacuuugaaa

SEQ ID NO: 1726239 - RNA, 19 nt, Homo sapiens
  misc_RNA (1)...(19): siRNA sense strand
cuagcauacuugaauauug

SEQ ID NO: 1726240 - RNA, 19 nt, Homo sapiens
  misc_RNA (1)...(19): siRNA sense strand
gugaaugcauguacuucuu

SEQ ID NO: 1726241 - RNA, 19 nt, Homo sapiens
  misc_RNA (1)...(19): siRNA sense strand
gaucaagcucagcagauaa

SEQ ID NO: 1726242 - RNA, 19 nt, Homo sapiens
  misc_RNA (1)...(19): siRNA sense strand
gaagagacccuagcauacu

SEQ ID NO: 1726243 - RNA, 19 nt, Homo sapiens
  misc_RNA (1)...(19): siRNA sense strand
gaagcuggguagugaaugc

SEQ ID NO: 1726244 - RNA, 19 nt, Homo sapiens
  misc_RNA (1)...(19): siRNA sense strand
ggagaugaauuuagaaaag

SEQ ID NO: 1726245 - RNA, 19 nt, Homo sapiens
  misc_RNA (1)...(19): siRNA sense strand
agacggauguaacaagaug

SEQ ID NO: 1726246 - RNA, 19 nt, Homo sapiens
  misc_RNA (1)...(19): siRNA sense strand
ggaugaggcuaauaaaaga

SEQ ID NO: 1726247 - RNA, 19 nt, Homo sapiens
  misc_RNA (1)...(19): siRNA sense strand
cagaguuauuugcccguua

SEQ ID NO: 1726248 - RNA, 19 nt, Homo sapiens
  misc_RNA (1)...(19): siRNA sense strand
ggacuuacgaaaugaauac

SEQ ID NO: 1726249 - RNA, 19 nt, Homo sapiens
  misc_RNA (1)...(19): siRNA sense strand
gaagagauggaaaguaagg

SEQ ID NO: 1726250 - RNA, 19 nt, Homo sapiens
  misc_RNA (1)...(19): siRNA sense strand
aggaagagacccuagcaua

SEQ ID NO: 1726251 - RNA, 19 nt, Homo sapiens
  misc_RNA (1)...(19): siRNA sense strand
gggaagaugagguagaaga

SEQ ID NO: 1726252 - RNA, 19 nt, Homo sapiens
  misc_RNA (1)...(19): siRNA sense strand
guacuggcuguaugcaaua

SEQ ID NO: 1726253 - RNA, 19 nt, Homo sapiens
  misc_RNA (1)...(19): siRNA sense strand
uuagacggauguaacaaga

SEQ ID NO: 1726254 - RNA, 19 nt, Homo sapiens
  misc_RNA (1)...(19): siRNA sense strand
guaaggaguggcuagagaa

SEQ ID NO: 1726255 - RNA, 19 nt, Homo sapiens
  misc_RNA (1)...(19): siRNA sense strand
agaaggcacuggaagagau

SEQ ID NO: 1726256 - RNA, 19 nt, Homo sapiens
  misc_RNA (1)...(19): siRNA sense strand
caggaucuauuuggauuug

SEQ ID NO: 1726257 - RNA, 19 nt, Homo sapiens
  misc_RNA (1)...(19): siRNA sense strand
gaaauccagaucagagaug

SEQ ID NO: 1726258 - RNA, 19 nt, Homo sapiens
  misc_RNA (1)...(19): siRNA sense strand
ggaaauuguggaugagaga

SEQ ID NO: 1726259 - RNA, 19 nt, Homo sapiens
  misc_RNA (1)...(19): siRNA sense strand
gaaaccaggaucuauuugg

SEQ ID NO: 1726260 - RNA, 19 nt, Homo sapiens
  misc_RNA (1)...(19): siRNA sense strand
gacauguacuggcuguaug

SEQ ID NO: 1726261 - RNA, 19 nt, Homo sapiens
  misc_RNA (1)...(19): siRNA sense strand
gauguggaaucacugucaa

SEQ ID NO: 1726262 - RNA, 19 nt, Homo sapiens
  misc_RNA (1)...(19): siRNA sense strand
uggaggagcugcuggaucu

SEQ ID NO: 1726263 - RNA, 19 nt, Homo sapiens
  misc_RNA (1)...(19): siRNA sense strand
gacccuagcauacuugaau

SEQ ID NO: 1726264 - RNA, 19 nt, Homo sapiens
  misc_RNA (1)...(19): siRNA sense strand
aggaguggcuagagaagaa

SEQ ID NO: 1726265 - RNA, 19 nt, Homo sapiens
  misc_RNA (1)...(19): siRNA sense strand
gcaagcggaugaggcuaau

SEQ ID NO: 1726266 - RNA, 19 nt, Homo sapiens
  misc_RNA (1)...(19): siRNA sense strand
ggugacugcagagaaauua

SEQ ID NO: 1726267 - RNA, 19 nt, Homo sapiens
  misc_RNA (1)...(19): siRNA sense strand
caacacagagcuagauuuu

SEQ ID NO: 1726268 - RNA, 19 nt, Homo sapiens
  misc_RNA (1)...(19): siRNA sense strand
gcucaagcuucucccaaca

SEQ ID NO: 1726269 - RNA, 19 nt, Homo sapiens
  misc_RNA (1)...(19): siRNA sense strand
gacgauauuugggaagaug

SEQ ID NO: 1726270 - RNA, 19 nt, Homo sapiens
  misc_RNA (1)...(19): siRNA sense strand
gagauggccagguucaaug

SEQ ID NO: 1726271 - RNA, 19 nt, Homo sapiens
  misc_RNA (1)...(19): siRNA sense strand
gcaaagccugucugaagga

SEQ ID NO: 1726272 - RNA, 19 nt, Homo sapiens
  misc_RNA (1)...(19): siRNA sense strand
gcaauauuucuguuggauu

SEQ ID NO: 1726273 - RNA, 19 nt, Homo sapiens
  misc_RNA (1)...(19): siRNA sense strand
uauuuacgauggagaugaa

SEQ ID NO: 1726274 - RNA, 19 nt, Homo sapiens
  misc_RNA (1)...(19): siRNA sense strand
ggauguugacgacgauauu

SEQ ID NO: 1726275 - RNA, 19 nt, Homo sapiens
  misc_RNA (1)...(19): siRNA sense strand
uaauggacuuacgaaauga

SEQ ID NO: 1726276 - RNA, 19 nt, Homo sapiens
  misc_RNA (1)...(19): siRNA sense strand
cagagaaauuaauggacuu

SEQ ID NO: 1726277 - RNA, 19 nt, Homo sapiens
  misc_RNA (1)...(19): siRNA sense strand
guaaggugacugcagagaa

SEQ ID NO: 1726278 - RNA, 19 nt, Homo sapiens
  misc_RNA (1)...(19): siRNA sense strand
uggcagaugugguguacug

SEQ ID NO: 1726279 - RNA, 19 nt, Homo sapiens
  misc_RNA (1)...(19): siRNA sense strand
ggaaaucuuggacuuugau

SEQ ID NO: 1726280 - RNA, 19 nt, Homo sapiens
  misc_RNA (1)...(19): siRNA sense strand
gauguugacgacgauauuu

SEQ ID NO: 1726281 - RNA, 19 nt, Homo sapiens
  misc_RNA (1)...(19): siRNA sense strand
aagcggaugaggcuaauaa

SEQ ID NO: 1726282 - RNA, 19 nt, Homo sapiens
  misc_RNA (1)...(19): siRNA sense strand
agaguuauuugcccguuau

SEQ ID NO: 1726283 - RNA, 19 nt, Homo sapiens
  misc_RNA (1)...(19): siRNA sense strand
aagccugucugaaggacua

SEQ ID NO: 1726284 - RNA, 19 nt, Homo sapiens
  misc_RNA (1)...(19): siRNA sense strand
gagaagcuggguagugaau

SEQ ID NO: 1726285 - RNA, 19 nt, Homo sapiens
  misc_RNA (1)...(19): siRNA sense strand
agagagcagugcaggaugu

SEQ ID NO: 1726286 - RNA, 19 nt, Homo sapiens
  misc_RNA (1)...(19): siRNA sense strand
aagagacccuagcauacuu

SEQ ID NO: 1726287 - RNA, 19 nt, Homo sapiens
  misc_RNA (1)...(19): siRNA sense strand
ucaaaucugauccaggaaa

SEQ ID NO: 1726288 - RNA, 19 nt, Homo sapiens
  misc_RNA (1)...(19): siRNA sense strand
ugauguagaccaagaggaa

SEQ ID NO: 1726289 - RNA, 19 nt, Homo sapiens
  misc_RNA (1)...(19): siRNA sense strand
uggauuugccacagaauuu

SEQ ID NO: 1726290 - RNA, 19 nt, Homo sapiens
  misc_RNA (1)...(19): siRNA sense strand
guggaacucccauagagaa

SEQ ID NO: 1726291 - RNA, 19 nt, Homo sapiens
  misc_RNA (1)...(19): siRNA sense strand
gcacuggaagagauggaaa

SEQ ID NO: 1726292 - RNA, 19 nt, Homo sapiens
  misc_RNA (1)...(19): siRNA sense strand
gauggcagaugugguguac

SEQ ID NO: 1726293 - RNA, 19 nt, Homo sapiens
  misc_RNA (1)...(19): siRNA sense strand
uuacgauggagaugaauuu

SEQ ID NO: 1726294 - RNA, 19 nt, Homo sapiens
  misc_RNA (1)...(19): siRNA sense strand
aguaaggaguggcuagaga

SEQ ID NO: 1726295 - RNA, 19 nt, Homo sapiens
  misc_RNA (1)...(19): siRNA sense strand
cuggcuguaugcaauauuu

SEQ ID NO: 1726296 - RNA, 19 nt, Homo sapiens
  misc_RNA (1)...(19): siRNA sense strand
uguacuggcuguaugcaau

SEQ ID NO: 1726297 - RNA, 19 nt, Homo sapiens
  misc_RNA (1)...(19): siRNA sense strand
ucgagaagcucaggaggau

SEQ ID NO: 1726298 - RNA, 19 nt, Homo sapiens
  misc_RNA (1)...(19): siRNA sense strand
ggcuagagaagaacucaaa

SEQ ID NO: 1726299 - RNA, 19 nt, Homo sapiens
  misc_RNA (1)...(19): siRNA sense strand
ucaaagagcugcccauguu

SEQ ID NO: 1726300 - RNA, 19 nt, Homo sapiens
  misc_RNA (1)...(19): siRNA sense strand
gaucagagauggccagguu

SEQ ID NO: 1726301 - RNA, 19 nt, Homo sapiens
  misc_RNA (1)...(19): siRNA sense strand
uggaagagauggaaaguaa

SEQ ID NO: 1726302 - RNA, 19 nt, Homo sapiens
  misc_RNA (1)...(19): siRNA sense strand
ccacagaauuucaagauau

SEQ ID NO: 1726303 - RNA, 19 nt, Homo sapiens
  misc_RNA (1)...(19): siRNA sense strand
gaacucccauagagaaauu

SEQ ID NO: 1726304 - RNA, 19 nt, Homo sapiens
  misc_RNA (1)...(19): siRNA sense strand
gaucaaagguaugguaaga

SEQ ID NO: 1726305 - RNA, 19 nt, Homo sapiens
  misc_RNA (1)...(19): siRNA sense strand
gagcaaacccuuacaaaca

SEQ ID NO: 1726306 - RNA, 19 nt, Homo sapiens
  misc_RNA (1)...(19): siRNA sense strand
uaaggugacugcagagaaa

SEQ ID NO: 1726307 - RNA, 19 nt, Homo sapiens
  misc_RNA (1)...(19): siRNA sense strand
gagaaaccaggaucuauuu

SEQ ID NO: 1726308 - RNA, 19 nt, Homo sapiens
  misc_RNA (1)...(19): siRNA sense strand
guaagagagugauucagaa

SEQ ID NO: 1726309 - RNA, 19 nt, Homo sapiens
  misc_RNA (1)...(19): siRNA sense strand
ggagaaaccaggaucuauu

SEQ ID NO: 1726310 - RNA, 19 nt, Homo sapiens
  misc_RNA (1)...(19): siRNA sense strand
gaucugauguagaccaaga

SEQ ID NO: 1726311 - RNA, 19 nt, Homo sapiens
  misc_RNA (1)...(19): siRNA sense strand
guaacaagaugacauguac

SEQ ID NO: 1726312 - RNA, 19 nt, Homo sapiens
  misc_RNA (1)...(19): siRNA sense strand
gaaucacugucaaaucuga

SEQ ID NO: 1726313 - RNA, 19 nt, Homo sapiens
  misc_RNA (1)...(19): siRNA sense strand
uuaauggacuuacgaaaug

SEQ ID NO: 1726314 - RNA, 19 nt, Homo sapiens
  misc_RNA (1)...(19): siRNA sense strand
ucaaagguaugguaagaga

SEQ ID NO: 1726315 - RNA, 19 nt, Homo sapiens
  misc_RNA (1)...(19): siRNA sense strand
cgauggagaugaauuuaga

SEQ ID NO: 1726316 - RNA, 19 nt, Homo sapiens
  misc_RNA (1)...(19): siRNA sense strand
gugagaagcuggguaguga

SEQ ID NO: 1726317 - RNA, 19 nt, Homo sapiens
  misc_RNA (1)...(19): siRNA sense strand
gcaaacccuuacaaacauu

SEQ ID NO: 1726318 - RNA, 19 nt, Homo sapiens
  misc_RNA (1)...(19): siRNA sense strand
gaaauuagacggauguaac

SEQ ID NO: 1726319 - RNA, 19 nt, Homo sapiens
  misc_RNA (1)...(19): siRNA sense strand
gcacuuagacaaccuaugg

SEQ ID NO: 1726320 - RNA, 19 nt, Homo sapiens
  misc_RNA (1)...(19): siRNA sense strand
aagaggaaauuguggauga

SEQ ID NO: 1726321 - RNA, 19 nt, Homo sapiens
  misc_RNA (1)...(19): siRNA sense strand
gguaagagagugauucaga

SEQ ID NO: 1726322 - RNA, 19 nt, Homo sapiens
  misc_RNA (1)...(19): siRNA sense strand
gagaagcucaggaggauga

SEQ ID NO: 1726323 - RNA, 19 nt, Homo sapiens
  misc_RNA (1)...(19): siRNA sense strand
ggucaaagaguuaguggaa

SEQ ID NO: 1726324 - RNA, 19 nt, Homo sapiens
  misc_RNA (1)...(19): siRNA sense strand
gaaggacuacuuugaaauc

SEQ ID NO: 1726325 - RNA, 19 nt, Homo sapiens
  misc_RNA (1)...(19): siRNA sense strand
ugaucaagcucagcagaua

SEQ ID NO: 1726326 - RNA, 19 nt, Homo sapiens
  misc_RNA (1)...(19): siRNA sense strand
gccacagaauuucaagaua

SEQ ID NO: 1726327 - RNA, 19 nt, Homo sapiens
  misc_RNA (1)...(19): siRNA sense strand
gaaauuaauggacuuacga

SEQ ID NO: 1726328 - RNA, 19 nt, Homo sapiens
  misc_RNA (1)...(19): siRNA sense strand
caggaaaucuuggacuuug

SEQ ID NO: 1726329 - RNA, 19 nt, Homo sapiens
  misc_RNA (1)...(19): siRNA sense strand
gaugcaauuucuuaaggaa

SEQ ID NO: 1726330 - RNA, 19 nt, Homo sapiens
  misc_RNA (1)...(19): siRNA sense strand
ugaauauugucucuccuuu

SEQ ID NO: 1726331 - RNA, 19 nt, Homo sapiens
  misc_RNA (1)...(19): siRNA sense strand
caaaucugauccaggaaau

SEQ ID NO: 1726332 - RNA, 19 nt, Homo sapiens
  misc_RNA (1)...(19): siRNA sense strand
aagaugagguagaagacua

SEQ ID NO: 1726333 - RNA, 19 nt, Homo sapiens
  misc_RNA (1)...(19): siRNA sense strand
ggaugcaauuucuuaagga

SEQ ID NO: 1726334 - RNA, 19 nt, Homo sapiens
  misc_RNA (1)...(19): siRNA sense strand
aaaccaggaucuauuugga

SEQ ID NO: 1726335 - RNA, 19 nt, Homo sapiens
  misc_RNA (1)...(19): siRNA sense strand
guuaguggaagcagaguua

SEQ ID NO: 1726336 - RNA, 19 nt, Homo sapiens
  misc_RNA (1)...(19): siRNA sense strand
uggaaucacugucaaaucu

SEQ ID NO: 1726337 - RNA, 19 nt, Homo sapiens
  misc_RNA (1)...(19): siRNA sense strand
ggaagagacccuagcauac

SEQ ID NO: 1726338 - RNA, 19 nt, Homo sapiens
  misc_RNA (1)...(19): siRNA sense strand
cugaaggacuacuuugaaa

SEQ ID NO: 1726339 - RNA, 19 nt, Homo sapiens
  misc_RNA (1)...(19): siRNA sense strand
cuagcauacuugaauauug

SEQ ID NO: 1726340 - RNA, 19 nt, Homo sapiens
  misc_RNA (1)...(19): siRNA sense strand
gugaaugcauguacuucuu

SEQ ID NO: 1726341 - RNA, 19 nt, Homo sapiens
  misc_RNA (1)...(19): siRNA sense strand
gaucaagcucagcagauaa

SEQ ID NO: 1726342 - RNA, 19 nt, Homo sapiens
  misc_RNA (1)...(19): siRNA sense strand
gaagagacccuagcauacu

SEQ ID NO: 1726343 - RNA, 19 nt, Homo sapiens
  misc_RNA (1)...(19): siRNA sense strand
gaagcuggguagugaaugc

SEQ ID NO: 1726344 - RNA, 19 nt, Homo sapiens
  misc_RNA (1)...(19): siRNA sense strand
ggagaugaauuuagaaaag

SEQ ID NO: 1726345 - RNA, 19 nt, Homo sapiens
  misc_RNA (1)...(19): siRNA sense strand
agacggauguaacaagaug

SEQ ID NO: 1726346 - RNA, 19 nt, Homo sapiens
  misc_RNA (1)...(19): siRNA sense strand
ggaugaggcuaauaaaaga

SEQ ID NO: 1726347 - RNA, 19 nt, Homo sapiens
  misc_RNA (1)...(19): siRNA sense strand
cagaguuauuugcccguua

SEQ ID NO: 1726348 - RNA, 19 nt, Homo sapiens
  misc_RNA (1)...(19): siRNA sense strand
ggacuuacgaaaugaauac

SEQ ID NO: 1726349 - RNA, 19 nt, Homo sapiens
  misc_RNA (1)...(19): siRNA sense strand
gaagagauggaaaguaagg

SEQ ID NO: 1726350 - RNA, 19 nt, Homo sapiens
  misc_RNA (1)...(19): siRNA sense strand
aggaagagacccuagcaua

SEQ ID NO: 1726351 - RNA, 19 nt, Homo sapiens
  misc_RNA (1)...(19): siRNA sense strand
gggaagaugagguagaaga

SEQ ID NO: 1726352 - RNA, 19 nt, Homo sapiens
  misc_RNA (1)...(19): siRNA sense strand
guacuggcuguaugcaaua

SEQ ID NO: 1726353 - RNA, 19 nt, Homo sapiens
  misc_RNA (1)...(19): siRNA sense strand
uuagacggauguaacaaga

SEQ ID NO: 1726354 - RNA, 19 nt, Homo sapiens
  misc_RNA (1)...(19): siRNA sense strand
guaaggaguggcuagagaa

SEQ ID NO: 1726355 - RNA, 19 nt, Homo sapiens
  misc_RNA (1)...(19): siRNA sense strand
agaaggcacuggaagagau

SEQ ID NO: 1726356 - RNA, 19 nt, Homo sapiens
  misc_RNA (1)...(19): siRNA sense strand
caggaucuauuuggauuug

SEQ ID NO: 1726357 - RNA, 19 nt, Homo sapiens
  misc_RNA (1)...(19): siRNA sense strand
gaaauccagaucagagaug

SEQ ID NO: 1726358 - RNA, 19 nt, Homo sapiens
  misc_RNA (1)...(19): siRNA sense strand
ggaaauuguggaugagaga

SEQ ID NO: 1726359 - RNA, 19 nt, Homo sapiens
  misc_RNA (1)...(19): siRNA sense strand
gaaaccaggaucuauuugg

SEQ ID NO: 1726360 - RNA, 19 nt, Homo sapiens
  misc_RNA (1)...(19): siRNA sense strand
gacauguacuggcuguaug

SEQ ID NO: 1726361 - RNA, 19 nt, Homo sapiens
  misc_RNA (1)...(19): siRNA sense strand
gauguggaaucacugucaa

SEQ ID NO: 1726362 - RNA, 19 nt, Homo sapiens
  misc_RNA (1)...(19): siRNA sense strand
uggaggagcugcuggaucu

SEQ ID NO: 1726363 - RNA, 19 nt, Homo sapiens
  misc_RNA (1)...(19): siRNA sense strand
gacccuagcauacuugaau

SEQ ID NO: 1726364 - RNA, 19 nt, Homo sapiens
  misc_RNA (1)...(19): siRNA sense strand
aggaguggcuagagaagaa

SEQ ID NO: 1726365 - RNA, 19 nt, Homo sapiens
  misc_RNA (1)...(19): siRNA sense strand
gcaagcggaugaggcuaau

SEQ ID NO: 1726366 - RNA, 19 nt, Homo sapiens
  misc_RNA (1)...(19): siRNA sense strand
ggugacugcagagaaauua

SEQ ID NO: 1726367 - RNA, 19 nt, Homo sapiens
  misc_RNA (1)...(19): siRNA sense strand
caacacagagcuagauuuu

SEQ ID NO: 1726368 - RNA, 19 nt, Homo sapiens
  misc_RNA (1)...(19): siRNA sense strand
gcucaagcuucucccaaca

SEQ ID NO: 1726369 - RNA, 19 nt, Homo sapiens
  misc_RNA (1)...(19): siRNA sense strand
gacgauauuugggaagaug

SEQ ID NO: 1726370 - RNA, 19 nt, Homo sapiens
  misc_RNA (1)...(19): siRNA sense strand
gagauggccagguucaaug

SEQ ID NO: 1726371 - RNA, 19 nt, Homo sapiens
  misc_RNA (1)...(19): siRNA sense strand
gcaaagccugucugaagga

SEQ ID NO: 1726372 - RNA, 19 nt, Homo sapiens
  misc_RNA (1)...(19): siRNA sense strand
gcaauauuucuguuggauu

SEQ ID NO: 1726373 - RNA, 19 nt, Homo sapiens
  misc_RNA (1)...(19): siRNA sense strand
uauuuacgauggagaugaa

SEQ ID NO: 1726374 - RNA, 19 nt, Homo sapiens
  misc_RNA (1)...(19): siRNA sense strand
ggauguugacgacgauauu

SEQ ID NO: 1726375 - RNA, 19 nt, Homo sapiens
  misc_RNA (1)...(19): siRNA sense strand
uaauggacuuacgaaauga

SEQ ID NO: 1726376 - RNA, 19 nt, Homo sapiens
  misc_RNA (1)...(19): siRNA sense strand
cagagaaauuaauggacuu

SEQ ID NO: 1726377 - RNA, 19 nt, Homo sapiens
  misc_RNA (1)...(19): siRNA sense strand
guaaggugacugcagagaa

SEQ ID NO: 1726378 - RNA, 19 nt, Homo sapiens
  misc_RNA (1)...(19): siRNA sense strand
uggcagaugugguguacug

SEQ ID NO: 1726379 - RNA, 19 nt, Homo sapiens
  misc_RNA (1)...(19): siRNA sense strand
ggaaaucuuggacuuugau

SEQ ID NO: 1726380 - RNA, 19 nt, Homo sapiens
  misc_RNA (1)...(19): siRNA sense strand
gauguugacgacgauauuu

SEQ ID NO: 1726381 - RNA, 19 nt, Homo sapiens
  misc_RNA (1)...(19): siRNA sense strand
aagcggaugaggcuaauaa

SEQ ID NO: 1726382 - RNA, 19 nt, Homo sapiens
  misc_RNA (1)...(19): siRNA sense strand
agaguuauuugcccguuau

SEQ ID NO: 1726383 - RNA, 19 nt, Homo sapiens
  misc_RNA (1)...(19): siRNA sense strand
aagccugucugaaggacua

SEQ ID NO: 1726384 - RNA, 19 nt, Homo sapiens
  misc_RNA (1)...(19): siRNA sense strand
gagaagcuggguagugaau

SEQ ID NO: 1726385 - RNA, 19 nt, Homo sapiens
  misc_RNA (1)...(19): siRNA sense strand
agagagcagugcaggaugu

SEQ ID NO: 1726386 - RNA, 19 nt, Homo sapiens
  misc_RNA (1)...(19): siRNA sense strand
aagagacccuagcauacuu

SEQ ID NO: 1726387 - RNA, 19 nt, Homo sapiens
  misc_RNA (1)...(19): siRNA sense strand
ucaaaucugauccaggaaa

SEQ ID NO: 1726388 - RNA, 19 nt, Homo sapiens
  misc_RNA (1)...(19): siRNA sense strand
ugauguagaccaagaggaa

SEQ ID NO: 1726389 - RNA, 19 nt, Homo sapiens
  misc_RNA (1)...(19): siRNA sense strand
uggauuugccacagaauuu

SEQ ID NO: 1726390 - RNA, 19 nt, Homo sapiens
  misc_RNA (1)...(19): siRNA sense strand
guggaacucccauagagaa

SEQ ID NO: 1726391 - RNA, 19 nt, Homo sapiens
  misc_RNA (1)...(19): siRNA sense strand
gcacuggaagagauggaaa

SEQ ID NO: 1726392 - RNA, 19 nt, Homo sapiens
  misc_RNA (1)...(19): siRNA sense strand
gauggcagaugugguguac

SEQ ID NO: 1726393 - RNA, 19 nt, Homo sapiens
  misc_RNA (1)...(19): siRNA sense strand
uuacgauggagaugaauuu

SEQ ID NO: 1726394 - RNA, 19 nt, Homo sapiens
  misc_RNA (1)...(19): siRNA sense strand
aguaaggaguggcuagaga

SEQ ID NO: 1726395 - RNA, 19 nt, Homo sapiens
  misc_RNA (1)...(19): siRNA sense strand
cuggcuguaugcaauauuu

SEQ ID NO: 1726396 - RNA, 19 nt, Homo sapiens
  misc_RNA (1)...(19): siRNA sense strand
uguacuggcuguaugcaau

SEQ ID NO: 1726397 - RNA, 19 nt, Homo sapiens
  misc_RNA (1)...(19): siRNA sense strand
ucgagaagcucaggaggau

SEQ ID NO: 1726398 - RNA, 19 nt, Homo sapiens
  misc_RNA (1)...(19): siRNA sense strand
ggcuagagaagaacucaaa

SEQ ID NO: 1726399 - RNA, 19 nt, Homo sapiens
  misc_RNA (1)...(19): siRNA sense strand
ucaaagagcugcccauguu

SEQ ID NO: 1726400 - RNA, 19 nt, Homo sapiens
  misc_RNA (1)...(19): siRNA sense strand
gaucagagauggccagguu

SEQ ID NO: 1726401 - RNA, 19 nt, Homo sapiens
  misc_RNA (1)...(19): siRNA sense strand
uggaagagauggaaaguaa

SEQ ID NO: 1726402 - RNA, 19 nt, Homo sapiens
  misc_RNA (1)...(19): siRNA sense strand
gaucaaagguaugguaaga

SEQ ID NO: 1726403 - RNA, 19 nt, Homo sapiens
  misc_RNA (1)...(19): siRNA sense strand
gaacucccauagagaaauu

SEQ ID NO: 1726404 - RNA, 19 nt, Homo sapiens
  misc_RNA (1)...(19): siRNA sense strand
gagcaaacccuuacaaaca

SEQ ID NO: 1726405 - RNA, 19 nt, Homo sapiens
  misc_RNA (1)...(19): siRNA sense strand
uaaggugacugcagagaaa

SEQ ID NO: 1726406 - RNA, 19 nt, Homo sapiens
  misc_RNA (1)...(19): siRNA sense strand
guaagagagugauucagaa

SEQ ID NO: 1726407 - RNA, 19 nt, Homo sapiens
  misc_RNA (1)...(19): siRNA sense strand
gaucugauguagaccaaga

SEQ ID NO: 1726408 - RNA, 19 nt, Homo sapiens
  misc_RNA (1)...(19): siRNA sense strand
guaacaagaugacauguac

SEQ ID NO: 1726409 - RNA, 19 nt, Homo sapiens
  misc_RNA (1)...(19): siRNA sense strand
gaaucacugucaaaucuga

SEQ ID NO: 1726410 - RNA, 19 nt, Homo sapiens
  misc_RNA (1)...(19): siRNA sense strand
uuaauggacuuacgaaaug

SEQ ID NO: 1726411 - RNA, 19 nt, Homo sapiens
  misc_RNA (1)...(19): siRNA sense strand
ucaaagguaugguaagaga

SEQ ID NO: 1726412 - RNA, 19 nt, Homo sapiens
  misc_RNA (1)...(19): siRNA sense strand
gugagaagcuggguaguga

SEQ ID NO: 1726413 - RNA, 19 nt, Homo sapiens
  misc_RNA (1)...(19): siRNA sense strand
gcaaacccuuacaaacauu

SEQ ID NO: 1726414 - RNA, 19 nt, Homo sapiens
  misc_RNA (1)...(19): siRNA sense strand
gaaauuagacggauguaac

SEQ ID NO: 1726415 - RNA, 19 nt, Homo sapiens
  misc_RNA (1)...(19): siRNA sense strand
aagaggaaauuguggauga

SEQ ID NO: 1726416 - RNA, 19 nt, Homo sapiens
  misc_RNA (1)...(19): siRNA sense strand
gguaagagagugauucaga

SEQ ID NO: 1726417 - RNA, 19 nt, Homo sapiens
  misc_RNA (1)...(19): siRNA sense strand
ggucaaagaguuaguggaa

SEQ ID NO: 1726418 - RNA, 19 nt, Homo sapiens
  misc_RNA (1)...(19): siRNA sense strand
gaaggacuacuuugaaauc

SEQ ID NO: 1726419 - RNA, 19 nt, Homo sapiens
  misc_RNA (1)...(19): siRNA sense strand
ugaucaagcucagcagaua

SEQ ID NO: 1726420 - RNA, 19 nt, Homo sapiens
  misc_RNA (1)...(19): siRNA sense strand
caggaaaucuuggacuuug

SEQ ID NO: 1726421 - RNA, 19 nt, Homo sapiens
  misc_RNA (1)...(19): siRNA sense strand
gaaauuaauggacuuacga

SEQ ID NO: 1726422 - RNA, 19 nt, Homo sapiens
  misc_RNA (1)...(19): siRNA sense strand
caaaucugauccaggaaau

SEQ ID NO: 1726423 - RNA, 19 nt, Homo sapiens
  misc_RNA (1)...(19): siRNA sense strand
ugaauauugucucuccuuu

SEQ ID NO: 1726424 - RNA, 19 nt, Homo sapiens
  misc_RNA (1)...(19): siRNA sense strand
aagaugagguagaagacua

SEQ ID NO: 1726425 - RNA, 19 nt, Homo sapiens
  misc_RNA (1)...(19): siRNA sense strand
uggaaucacugucaaaucu

SEQ ID NO: 1726426 - RNA, 19 nt, Homo sapiens
  misc_RNA (1)...(19): siRNA sense strand
ggaagagacccuagcauac

SEQ ID NO: 1726427 - RNA, 19 nt, Homo sapiens
  misc_RNA (1)...(19): siRNA sense strand
guuaguggaagcagaguua

SEQ ID NO: 1726428 - RNA, 19 nt, Homo sapiens
  misc_RNA (1)...(19): siRNA sense strand
cugaaggacuacuuugaaa

SEQ ID NO: 1726429 - RNA, 19 nt, Homo sapiens
  misc_RNA (1)...(19): siRNA sense strand
gaucaagcucagcagauaa

SEQ ID NO: 1726430 - RNA, 19 nt, Homo sapiens
  misc_RNA (1)...(19): siRNA sense strand
gugaaugcauguacuucuu

SEQ ID NO: 1726431 - RNA, 19 nt, Homo sapiens
  misc_RNA (1)...(19): siRNA sense strand
cuagcauacuugaauauug

SEQ ID NO: 1726432 - RNA, 19 nt, Homo sapiens
  misc_RNA (1)...(19): siRNA sense strand
gaagcuggguagugaaugc

SEQ ID NO: 1726433 - RNA, 19 nt, Homo sapiens
  misc_RNA (1)...(19): siRNA sense strand
gaagagacccuagcauacu

SEQ ID NO: 1726434 - RNA, 19 nt, Homo sapiens
  misc_RNA (1)...(19): siRNA sense strand
cagaguuauuugcccguua

SEQ ID NO: 1726435 - RNA, 19 nt, Homo sapiens
  misc_RNA (1)...(19): siRNA sense strand
agacggauguaacaagaug

SEQ ID NO: 1726436 - RNA, 19 nt, Homo sapiens
  misc_RNA (1)...(19): siRNA sense strand
ggaugaggcuaauaaaaga

SEQ ID NO: 1726437 - RNA, 19 nt, Homo sapiens
  misc_RNA (1)...(19): siRNA sense strand
ggacuuacgaaaugaauac

SEQ ID NO: 1726438 - RNA, 19 nt, Homo sapiens
  misc_RNA (1)...(19): siRNA sense strand
gaagagauggaaaguaagg

SEQ ID NO: 1726439 - RNA, 19 nt, Homo sapiens
  misc_RNA (1)...(19): siRNA sense strand
ggaaauuguggaugagaga

SEQ ID NO: 1726440 - RNA, 19 nt, Homo sapiens
  misc_RNA (1)...(19): siRNA sense strand
gggaagaugagguagaaga

SEQ ID NO: 1726441 - RNA, 19 nt, Homo sapiens
  misc_RNA (1)...(19): siRNA sense strand
guacuggcuguaugcaaua

SEQ ID NO: 1726442 - RNA, 19 nt, Homo sapiens
  misc_RNA (1)...(19): siRNA sense strand
uuagacggauguaacaaga

SEQ ID NO: 1726443 - RNA, 19 nt, Homo sapiens
  misc_RNA (1)...(19): siRNA sense strand
guaaggaguggcuagagaa

SEQ ID NO: 1726444 - RNA, 19 nt, Homo sapiens
  misc_RNA (1)...(19): siRNA sense strand
aggaagagacccuagcaua

SEQ ID NO: 1726445 - RNA, 19 nt, Homo sapiens
  misc_RNA (1)...(19): siRNA sense strand
agaaggcacuggaagagau

SEQ ID NO: 1726446 - RNA, 19 nt, Homo sapiens
  misc_RNA (1)...(19): siRNA sense strand
gaaauccagaucagagaug

SEQ ID NO: 1726447 - RNA, 19 nt, Homo sapiens
  misc_RNA (1)...(19): siRNA sense strand
gauguggaaucacugucaa

SEQ ID NO: 1726448 - RNA, 19 nt, Homo sapiens
  misc_RNA (1)...(19): siRNA sense strand
gacauguacuggcuguaug

SEQ ID NO: 1726449 - RNA, 19 nt, Homo sapiens
  misc_RNA (1)...(19): siRNA sense strand
uggaggagcugcuggaucu

SEQ ID NO: 1726450 - RNA, 19 nt, Homo sapiens
  misc_RNA (1)...(19): siRNA sense strand
gacccuagcauacuugaau

SEQ ID NO: 1726451 - RNA, 19 nt, Homo sapiens
  misc_RNA (1)...(19): siRNA sense strand
aggaguggcuagagaagaa

SEQ ID NO: 1726452 - RNA, 19 nt, Homo sapiens
  misc_RNA (1)...(19): siRNA sense strand
gcaagcggaugaggcuaau

SEQ ID NO: 1726453 - RNA, 19 nt, Homo sapiens
  misc_RNA (1)...(19): siRNA sense strand
ggugacugcagagaaauua

SEQ ID NO: 1726454 - RNA, 19 nt, Homo sapiens
  misc_RNA (1)...(19): siRNA sense strand
caacacagagcuagauuuu

SEQ ID NO: 1726455 - RNA, 19 nt, Homo sapiens
  misc_RNA (1)...(19): siRNA sense strand
gcucaagcuucucccaaca

SEQ ID NO: 1726456 - RNA, 19 nt, Homo sapiens
  misc_RNA (1)...(19): siRNA sense strand
gacgauauuugggaagaug

SEQ ID NO: 1726457 - RNA, 19 nt, Homo sapiens
  misc_RNA (1)...(19): siRNA sense strand
gagauggccagguucaaug

SEQ ID NO: 1726458 - RNA, 19 nt, Homo sapiens
  misc_RNA (1)...(19): siRNA sense strand
gcaaagccugucugaagga

SEQ ID NO: 1726459 - RNA, 19 nt, Homo sapiens
  misc_RNA (1)...(19): siRNA sense strand
gcaauauuucuguuggauu

SEQ ID NO: 1726460 - RNA, 19 nt, Homo sapiens
  misc_RNA (1)...(19): siRNA sense strand
uggcagaugugguguacug

SEQ ID NO: 1726461 - RNA, 19 nt, Homo sapiens
  misc_RNA (1)...(19): siRNA sense strand
ggauguugacgacgauauu

SEQ ID NO: 1726462 - RNA, 19 nt, Homo sapiens
  misc_RNA (1)...(19): siRNA sense strand
uaauggacuuacgaaauga

SEQ ID NO: 1726463 - RNA, 19 nt, Homo sapiens
  misc_RNA (1)...(19): siRNA sense strand
cagagaaauuaauggacuu

SEQ ID NO: 1726464 - RNA, 19 nt, Homo sapiens
  misc_RNA (1)...(19): siRNA sense strand
guaaggugacugcagagaa

SEQ ID NO: 1726465 - RNA, 19 nt, Homo sapiens
  misc_RNA (1)...(19): siRNA sense strand
ggaaaucuuggacuuugau

SEQ ID NO: 1726466 - RNA, 19 nt, Homo sapiens
  misc_RNA (1)...(19): siRNA sense strand
gauguugacgacgauauuu

SEQ ID NO: 1726467 - RNA, 19 nt, Homo sapiens
  misc_RNA (1)...(19): siRNA sense strand
aagcggaugaggcuaauaa

SEQ ID NO: 1726468 - RNA, 19 nt, Homo sapiens
  misc_RNA (1)...(19): siRNA sense strand
agaguuauuugcccguuau

SEQ ID NO: 1726469 - RNA, 19 nt, Homo sapiens
  misc_RNA (1)...(19): siRNA sense strand
aagccugucugaaggacua

SEQ ID NO: 1726470 - RNA, 19 nt, Homo sapiens
  misc_RNA (1)...(19): siRNA sense strand
gagaagcuggguagugaau

SEQ ID NO: 1726471 - RNA, 19 nt, Homo sapiens
  misc_RNA (1)...(19): siRNA sense strand
agagagcagugcaggaugu

SEQ ID NO: 1726472 - RNA, 19 nt, Homo sapiens
  misc_RNA (1)...(19): siRNA sense strand
ucaaaucugauccaggaaa

SEQ ID NO: 1726473 - RNA, 19 nt, Homo sapiens
  misc_RNA (1)...(19): siRNA sense strand
aagagacccuagcauacuu

SEQ ID NO: 1726474 - RNA, 19 nt, Homo sapiens
  misc_RNA (1)...(19): siRNA sense strand
ugauguagaccaagaggaa

SEQ ID NO: 1726475 - RNA, 19 nt, Homo sapiens
  misc_RNA (1)...(19): siRNA sense strand
guggaacucccauagagaa

SEQ ID NO: 1726476 - RNA, 19 nt, Homo sapiens
  misc_RNA (1)...(19): siRNA sense strand
gcacuggaagagauggaaa

SEQ ID NO: 1726477 - RNA, 19 nt, Homo sapiens
  misc_RNA (1)...(19): siRNA sense strand
gauggcagaugugguguac

SEQ ID NO: 1726478 - RNA, 19 nt, Homo sapiens
  misc_RNA (1)...(19): siRNA sense strand
caacugcccagaaccaaag

SEQ ID NO: 1726479 - RNA, 19 nt, Homo sapiens
  misc_RNA (1)...(19): siRNA sense strand
cuggcuguaugcaauauuu

SEQ ID NO: 1726480 - RNA, 19 nt, Homo sapiens
  misc_RNA (1)...(19): siRNA sense strand
uguacuggcuguaugcaau

SEQ ID NO: 1726481 - RNA, 19 nt, Homo sapiens
  misc_RNA (1)...(19): siRNA sense strand
ggcuagagaagaacucaaa

SEQ ID NO: 1726482 - RNA, 19 nt, Homo sapiens
  misc_RNA (1)...(19): siRNA sense strand
aguaaggaguggcuagaga

SEQ ID NO: 1726483 - RNA, 19 nt, Homo sapiens
  misc_RNA (1)...(19): siRNA sense strand
ccaacacagagcuagauuu

SEQ ID NO: 1726484 - RNA, 19 nt, Homo sapiens
  misc_RNA (1)...(19): siRNA sense strand
acacagagcuagauuuugg

SEQ ID NO: 1726485 - RNA, 19 nt, Homo sapiens
  misc_RNA (1)...(19): siRNA sense strand
cugcaaagccugucugaag

SEQ ID NO: 1726486 - RNA, 19 nt, Homo sapiens
  misc_RNA (1)...(19): siRNA sense strand
uagagcaaacccuuacaaa

SEQ ID NO: 1726487 - RNA, 19 nt, Homo sapiens
  misc_RNA (1)...(19): siRNA sense strand
ggauguggaaucacuguca

SEQ ID NO: 1726488 - RNA, 19 nt, Homo sapiens
  misc_RNA (1)...(19): siRNA sense strand
ccaggaaaucuuggacuuu

SEQ ID NO: 1726489 - RNA, 19 nt, Homo sapiens
  misc_RNA (1)...(19): siRNA sense strand
caaagagcugcccauguug

SEQ ID NO: 1726490 - RNA, 19 nt, Homo sapiens
  misc_RNA (1)...(19): siRNA sense strand
gaaggcacuggaagagaug

SEQ ID NO: 1726491 - RNA, 19 nt, Homo sapiens
  misc_RNA (1)...(19): siRNA sense strand
guagugaaugcauguacuu

SEQ ID NO: 1726492 - RNA, 19 nt, Homo sapiens
  misc_RNA (1)...(19): siRNA sense strand
cauggguucucucucuaga

SEQ ID NO: 1726493 - RNA, 19 nt, Homo sapiens
  misc_RNA (1)...(19): siRNA sense strand
ucaagcuucucccaacaca

SEQ ID NO: 1726494 - RNA, 19 nt, Homo sapiens
  misc_RNA (1)...(19): siRNA sense strand
ugacauguacuggcuguau

SEQ ID NO: 1726495 - RNA, 19 nt, Homo sapiens
  misc_RNA (1)...(19): siRNA sense strand
uguaacaagaugacaugua

SEQ ID NO: 1726496 - RNA, 19 nt, Homo sapiens
  misc_RNA (1)...(19): siRNA sense strand
cuagagaagaacucaaaga

SEQ ID NO: 1726497 - RNA, 19 nt, Homo sapiens
  misc_RNA (1)...(19): siRNA sense strand
gaggagcugcuggaucuga

SEQ ID NO: 1726498 - RNA, 19 nt, Homo sapiens
  misc_RNA (1)...(19): siRNA sense strand
aguggaagcagaguuauuu

SEQ ID NO: 1726499 - RNA, 19 nt, Homo sapiens
  misc_RNA (1)...(19): siRNA sense strand
ucaaagagcugcccauguu

SEQ ID NO: 1726500 - RNA, 19 nt, Homo sapiens
  misc_RNA (1)...(19): siRNA sense strand
gaucagagauggccagguu

SEQ ID NO: 1726501 - RNA, 19 nt, Homo sapiens
  misc_RNA (1)...(19): siRNA sense strand
uggaagagauggaaaguaa

SEQ ID NO: 1726502 - RNA, 19 nt, Homo sapiens
  misc_RNA (1)...(19): siRNA sense strand
ccacagaauuucaagauau

SEQ ID NO: 1726503 - RNA, 19 nt, Homo sapiens
  misc_RNA (1)...(19): siRNA sense strand
gaacucccauagagaaauu

SEQ ID NO: 1726504 - RNA, 19 nt, Homo sapiens
  misc_RNA (1)...(19): siRNA sense strand
gaucaaagguaugguaaga

SEQ ID NO: 1726505 - RNA, 19 nt, Homo sapiens
  misc_RNA (1)...(19): siRNA sense strand
gagcaaacccuuacaaaca

SEQ ID NO: 1726506 - RNA, 19 nt, Homo sapiens
  misc_RNA (1)...(19): siRNA sense strand
uaaggugacugcagagaaa

SEQ ID NO: 1726507 - RNA, 19 nt, Homo sapiens
  misc_RNA (1)...(19): siRNA sense strand
gagaaaccaggaucuauuu

SEQ ID NO: 1726508 - RNA, 19 nt, Homo sapiens
  misc_RNA (1)...(19): siRNA sense strand
guaagagagugauucagaa

SEQ ID NO: 1726509 - RNA, 19 nt, Homo sapiens
  misc_RNA (1)...(19): siRNA sense strand
ggagaaaccaggaucuauu

SEQ ID NO: 1726510 - RNA, 19 nt, Homo sapiens
  misc_RNA (1)...(19): siRNA sense strand
gaucugauguagaccaaga

SEQ ID NO: 1726511 - RNA, 19 nt, Homo sapiens
  misc_RNA (1)...(19): siRNA sense strand
guaacaagaugacauguac

SEQ ID NO: 1726512 - RNA, 19 nt, Homo sapiens
  misc_RNA (1)...(19): siRNA sense strand
gaaucacugucaaaucuga

SEQ ID NO: 1726513 - RNA, 19 nt, Homo sapiens
  misc_RNA (1)...(19): siRNA sense strand
uuaauggacuuacgaaaug

SEQ ID NO: 1726514 - RNA, 19 nt, Homo sapiens
  misc_RNA (1)...(19): siRNA sense strand
ucaaagguaugguaagaga

SEQ ID NO: 1726515 - RNA, 19 nt, Homo sapiens
  misc_RNA (1)...(19): siRNA sense strand
cgauggagaugaauuuaga

SEQ ID NO: 1726516 - RNA, 19 nt, Homo sapiens
  misc_RNA (1)...(19): siRNA sense strand
gugagaagcuggguaguga

SEQ ID NO: 1726517 - RNA, 19 nt, Homo sapiens
  misc_RNA (1)...(19): siRNA sense strand
gcaaacccuuacaaacauu

SEQ ID NO: 1726518 - RNA, 19 nt, Homo sapiens
  misc_RNA (1)...(19): siRNA sense strand
gaaauuagacggauguaac

SEQ ID NO: 1726519 - RNA, 19 nt, Homo sapiens
  misc_RNA (1)...(19): siRNA sense strand
gcacuuagacaaccuaugg

SEQ ID NO: 1726520 - RNA, 19 nt, Homo sapiens
  misc_RNA (1)...(19): siRNA sense strand
aagaggaaauuguggauga

SEQ ID NO: 1726521 - RNA, 19 nt, Homo sapiens
  misc_RNA (1)...(19): siRNA sense strand
gguaagagagugauucaga

SEQ ID NO: 1726522 - RNA, 19 nt, Homo sapiens
  misc_RNA (1)...(19): siRNA sense strand
gagaagcucaggaggauga

SEQ ID NO: 1726523 - RNA, 19 nt, Homo sapiens
  misc_RNA (1)...(19): siRNA sense strand
ggucaaagaguuaguggaa

SEQ ID NO: 1726524 - RNA, 19 nt, Homo sapiens
  misc_RNA (1)...(19): siRNA sense strand
gaaggacuacuuugaaauc

SEQ ID NO: 1726525 - RNA, 19 nt, Homo sapiens
  misc_RNA (1)...(19): siRNA sense strand
ugaucaagcucagcagaua

SEQ ID NO: 1726526 - RNA, 19 nt, Homo sapiens
  misc_RNA (1)...(19): siRNA sense strand
gccacagaauuucaagaua

SEQ ID NO: 1726527 - RNA, 19 nt, Homo sapiens
  misc_RNA (1)...(19): siRNA sense strand
gaaauuaauggacuuacga

SEQ ID NO: 1726528 - RNA, 19 nt, Homo sapiens
  misc_RNA (1)...(19): siRNA sense strand
caggaaaucuuggacuuug

SEQ ID NO: 1726529 - RNA, 19 nt, Homo sapiens
  misc_RNA (1)...(19): siRNA sense strand
gaugcaauuucuuaaggaa

SEQ ID NO: 1726530 - RNA, 19 nt, Homo sapiens
  misc_RNA (1)...(19): siRNA sense strand
ugaauauugucucuccuuu

SEQ ID NO: 1726531 - RNA, 19 nt, Homo sapiens
  misc_RNA (1)...(19): siRNA sense strand
caaaucugauccaggaaau

SEQ ID NO: 1726532 - RNA, 19 nt, Homo sapiens
  misc_RNA (1)...(19): siRNA sense strand
aagaugagguagaagacua

SEQ ID NO: 1726533 - RNA, 19 nt, Homo sapiens
  misc_RNA (1)...(19): siRNA sense strand
ggaugcaauuucuuaagga

SEQ ID NO: 1726534 - RNA, 19 nt, Homo sapiens
  misc_RNA (1)...(19): siRNA sense strand
aaaccaggaucuauuugga

SEQ ID NO: 1726535 - RNA, 19 nt, Homo sapiens
  misc_RNA (1)...(19): siRNA sense strand
guuaguggaagcagaguua

SEQ ID NO: 1726536 - RNA, 19 nt, Homo sapiens
  misc_RNA (1)...(19): siRNA sense strand
uggaaucacugucaaaucu

SEQ ID NO: 1726537 - RNA, 19 nt, Homo sapiens
  misc_RNA (1)...(19): siRNA sense strand
ggaagagacccuagcauac

SEQ ID NO: 1726538 - RNA, 19 nt, Homo sapiens
  misc_RNA (1)...(19): siRNA sense strand
cugaaggacuacuuugaaa

SEQ ID NO: 1726539 - RNA, 19 nt, Homo sapiens
  misc_RNA (1)...(19): siRNA sense strand
cuagcauacuugaauauug

SEQ ID NO: 1726540 - RNA, 19 nt, Homo sapiens
  misc_RNA (1)...(19): siRNA sense strand
gugaaugcauguacuucuu

SEQ ID NO: 1726541 - RNA, 19 nt, Homo sapiens
  misc_RNA (1)...(19): siRNA sense strand
gaucaagcucagcagauaa

SEQ ID NO: 1726542 - RNA, 19 nt, Homo sapiens
  misc_RNA (1)...(19): siRNA sense strand
gaagagacccuagcauacu

SEQ ID NO: 1726543 - RNA, 19 nt, Homo sapiens
  misc_RNA (1)...(19): siRNA sense strand
gaagcuggguagugaaugc

SEQ ID NO: 1726544 - RNA, 19 nt, Homo sapiens
  misc_RNA (1)...(19): siRNA sense strand
ggagaugaauuuagaaaag

SEQ ID NO: 1726545 - RNA, 19 nt, Homo sapiens
  misc_RNA (1)...(19): siRNA sense strand
agacggauguaacaagaug

SEQ ID NO: 1726546 - RNA, 19 nt, Homo sapiens
  misc_RNA (1)...(19): siRNA sense strand
ggaugaggcuaauaaaaga

SEQ ID NO: 1726547 - RNA, 19 nt, Homo sapiens
  misc_RNA (1)...(19): siRNA sense strand
cagaguuauuugcccguua

SEQ ID NO: 1726548 - RNA, 19 nt, Homo sapiens
  misc_RNA (1)...(19): siRNA sense strand
ggacuuacgaaaugaauac

SEQ ID NO: 1726549 - RNA, 19 nt, Homo sapiens
  misc_RNA (1)...(19): siRNA sense strand
gaagagauggaaaguaagg

SEQ ID NO: 1726550 - RNA, 19 nt, Homo sapiens
  misc_RNA (1)...(19): siRNA sense strand
aggaagagacccuagcaua

SEQ ID NO: 1726551 - RNA, 19 nt, Homo sapiens
  misc_RNA (1)...(19): siRNA sense strand
gggaagaugagguagaaga

SEQ ID NO: 1726552 - RNA, 19 nt, Homo sapiens
  misc_RNA (1)...(19): siRNA sense strand
guacuggcuguaugcaaua

SEQ ID NO: 1726553 - RNA, 19 nt, Homo sapiens
  misc_RNA (1)...(19): siRNA sense strand
uuagacggauguaacaaga

SEQ ID NO: 1726554 - RNA, 19 nt, Homo sapiens
  misc_RNA (1)...(19): siRNA sense strand
guaaggaguggcuagagaa

SEQ ID NO: 1726555 - RNA, 19 nt, Homo sapiens
  misc_RNA (1)...(19): siRNA sense strand
agaaggcacuggaagagau

SEQ ID NO: 1726556 - RNA, 19 nt, Homo sapiens
  misc_RNA (1)...(19): siRNA sense strand
caggaucuauuuggauuug

SEQ ID NO: 1726557 - RNA, 19 nt, Homo sapiens
  misc_RNA (1)...(19): siRNA sense strand
gaaauccagaucagagaug

SEQ ID NO: 1726558 - RNA, 19 nt, Homo sapiens
  misc_RNA (1)...(19): siRNA sense strand
ggaaauuguggaugagaga

SEQ ID NO: 1726559 - RNA, 19 nt, Homo sapiens
  misc_RNA (1)...(19): siRNA sense strand
gaaaccaggaucuauuugg

SEQ ID NO: 1726560 - RNA, 19 nt, Homo sapiens
  misc_RNA (1)...(19): siRNA sense strand
gacauguacuggcuguaug

SEQ ID NO: 1726561 - RNA, 19 nt, Homo sapiens
  misc_RNA (1)...(19): siRNA sense strand
gauguggaaucacugucaa

SEQ ID NO: 1726562 - RNA, 19 nt, Homo sapiens
  misc_RNA (1)...(19): siRNA sense strand
uggaggagcugcuggaucu

SEQ ID NO: 1726563 - RNA, 19 nt, Homo sapiens
  misc_RNA (1)...(19): siRNA sense strand
gacccuagcauacuugaau

SEQ ID NO: 1726564 - RNA, 19 nt, Homo sapiens
  misc_RNA (1)...(19): siRNA sense strand
aggaguggcuagagaagaa

SEQ ID NO: 1726565 - RNA, 19 nt, Homo sapiens
  misc_RNA (1)...(19): siRNA sense strand
gcaagcggaugaggcuaau

SEQ ID NO: 1726566 - RNA, 19 nt, Homo sapiens
  misc_RNA (1)...(19): siRNA sense strand
ggugacugcagagaaauua

SEQ ID NO: 1726567 - RNA, 19 nt, Homo sapiens
  misc_RNA (1)...(19): siRNA sense strand
caacacagagcuagauuuu

SEQ ID NO: 1726568 - RNA, 19 nt, Homo sapiens
  misc_RNA (1)...(19): siRNA sense strand
gcucaagcuucucccaaca

SEQ ID NO: 1726569 - RNA, 19 nt, Homo sapiens
  misc_RNA (1)...(19): siRNA sense strand
gacgauauuugggaagaug

SEQ ID NO: 1726570 - RNA, 19 nt, Homo sapiens
  misc_RNA (1)...(19): siRNA sense strand
gagauggccagguucaaug

SEQ ID NO: 1726571 - RNA, 19 nt, Homo sapiens
  misc_RNA (1)...(19): siRNA sense strand
gcaaagccugucugaagga

SEQ ID NO: 1726572 - RNA, 19 nt, Homo sapiens
  misc_RNA (1)...(19): siRNA sense strand
gcaauauuucuguuggauu

SEQ ID NO: 1726573 - RNA, 19 nt, Homo sapiens
  misc_RNA (1)...(19): siRNA sense strand
uauuuacgauggagaugaa

SEQ ID NO: 1726574 - RNA, 19 nt, Homo sapiens
  misc_RNA (1)...(19): siRNA sense strand
ggauguugacgacgauauu

SEQ ID NO: 1726575 - RNA, 19 nt, Homo sapiens
  misc_RNA (1)...(19): siRNA sense strand
uaauggacuuacgaaauga

SEQ ID NO: 1726576 - RNA, 19 nt, Homo sapiens
  misc_RNA (1)...(19): siRNA sense strand
cagagaaauuaauggacuu

SEQ ID NO: 1726577 - RNA, 19 nt, Homo sapiens
  misc_RNA (1)...(19): siRNA sense strand
guaaggugacugcagagaa

SEQ ID NO: 1726578 - RNA, 19 nt, Homo sapiens
  misc_RNA (1)...(19): siRNA sense strand
uggcagaugugguguacug

SEQ ID NO: 1726579 - RNA, 19 nt, Homo sapiens
  misc_RNA (1)...(19): siRNA sense strand
ggaaaucuuggacuuugau

SEQ ID NO: 1726580 - RNA, 19 nt, Homo sapiens
  misc_RNA (1)...(19): siRNA sense strand
gauguugacgacgauauuu

SEQ ID NO: 1726581 - RNA, 19 nt, Homo sapiens
  misc_RNA (1)...(19): siRNA sense strand
aagcggaugaggcuaauaa

SEQ ID NO: 1726582 - RNA, 19 nt, Homo sapiens
  misc_RNA (1)...(19): siRNA sense strand
agaguuauuugcccguuau

SEQ ID NO: 1726583 - RNA, 19 nt, Homo sapiens
  misc_RNA (1)...(19): siRNA sense strand
aagccugucugaaggacua

SEQ ID NO: 1726584 - RNA, 19 nt, Homo sapiens
  misc_RNA (1)...(19): siRNA sense strand
gagaagcuggguagugaau

SEQ ID NO: 1726585 - RNA, 19 nt, Homo sapiens
  misc_RNA (1)...(19): siRNA sense strand
agagagcagugcaggaugu

SEQ ID NO: 1726586 - RNA, 19 nt, Homo sapiens
  misc_RNA (1)...(19): siRNA sense strand
aagagacccuagcauacuu

SEQ ID NO: 1726587 - RNA, 19 nt, Homo sapiens
  misc_RNA (1)...(19): siRNA sense strand
ucaaaucugauccaggaaa

SEQ ID NO: 1726588 - RNA, 19 nt, Homo sapiens
  misc_RNA (1)...(19): siRNA sense strand
ugauguagaccaagaggaa

SEQ ID NO: 1726589 - RNA, 19 nt, Homo sapiens
  misc_RNA (1)...(19): siRNA sense strand
uggauuugccacagaauuu

SEQ ID NO: 1726590 - RNA, 19 nt, Homo sapiens
  misc_RNA (1)...(19): siRNA sense strand
guggaacucccauagagaa

SEQ ID NO: 1726591 - RNA, 19 nt, Homo sapiens
  misc_RNA (1)...(19): siRNA sense strand
gcacuggaagagauggaaa

SEQ ID NO: 1726592 - RNA, 19 nt, Homo sapiens
  misc_RNA (1)...(19): siRNA sense strand
gauggcagaugugguguac

SEQ ID NO: 1726593 - RNA, 19 nt, Homo sapiens
  misc_RNA (1)...(19): siRNA sense strand
uuacgauggagaugaauuu

SEQ ID NO: 1726594 - RNA, 19 nt, Homo sapiens
  misc_RNA (1)...(19): siRNA sense strand
aguaaggaguggcuagaga

SEQ ID NO: 1726595 - RNA, 19 nt, Homo sapiens
  misc_RNA (1)...(19): siRNA sense strand
cuggcuguaugcaauauuu

SEQ ID NO: 1726596 - RNA, 19 nt, Homo sapiens
  misc_RNA (1)...(19): siRNA sense strand
uguacuggcuguaugcaau

SEQ ID NO: 1726597 - RNA, 19 nt, Homo sapiens
  misc_RNA (1)...(19): siRNA sense strand
ucgagaagcucaggaggau

SEQ ID NO: 1726598 - RNA, 19 nt, Homo sapiens
  misc_RNA (1)...(19): siRNA sense strand
ggcuagagaagaacucaaa

SEQ ID NO: 1726599 - RNA, 19 nt, Homo sapiens
  misc_RNA (1)...(19): siRNA sense strand
ucaaagagcugcccauguu

SEQ ID NO: 1726600 - RNA, 19 nt, Homo sapiens
  misc_RNA (1)...(19): siRNA sense strand
gaucagagauggccagguu

SEQ ID NO: 1726601 - RNA, 19 nt, Homo sapiens
  misc_RNA (1)...(19): siRNA sense strand
uggaagagauggaaaguaa

SEQ ID NO: 1726602 - RNA, 19 nt, Homo sapiens
  misc_RNA (1)...(19): siRNA sense strand
ccacagaauuucaagauau

SEQ ID NO: 1726603 - RNA, 19 nt, Homo sapiens
  misc_RNA (1)...(19): siRNA sense strand
gaacucccauagagaaauu

SEQ ID NO: 1726604 - RNA, 19 nt, Homo sapiens
  misc_RNA (1)...(19): siRNA sense strand
gaucaaagguaugguaaga

SEQ ID NO: 1726605 - RNA, 19 nt, Homo sapiens
  misc_RNA (1)...(19): siRNA sense strand
gagcaaacccuuacaaaca

SEQ ID NO: 1726606 - RNA, 19 nt, Homo sapiens
  misc_RNA (1)...(19): siRNA sense strand
uaaggugacugcagagaaa

SEQ ID NO: 1726607 - RNA, 19 nt, Homo sapiens
  misc_RNA (1)...(19): siRNA sense strand
gagaaaccaggaucuauuu

SEQ ID NO: 1726608 - RNA, 19 nt, Homo sapiens
  misc_RNA (1)...(19): siRNA sense strand
guaagagagugauucagaa

SEQ ID NO: 1726609 - RNA, 19 nt, Homo sapiens
  misc_RNA (1)...(19): siRNA sense strand
ggagaaaccaggaucuauu

SEQ ID NO: 1726610 - RNA, 19 nt, Homo sapiens
  misc_RNA (1)...(19): siRNA sense strand
gaucugauguagaccaaga

SEQ ID NO: 1726611 - RNA, 19 nt, Homo sapiens
  misc_RNA (1)...(19): siRNA sense strand
guaacaagaugacauguac

SEQ ID NO: 1726612 - RNA, 19 nt, Homo sapiens
  misc_RNA (1)...(19): siRNA sense strand
gaaucacugucaaaucuga

SEQ ID NO: 1726613 - RNA, 19 nt, Homo sapiens
  misc_RNA (1)...(19): siRNA sense strand
uuaauggacuuacgaaaug

SEQ ID NO: 1726614 - RNA, 19 nt, Homo sapiens
  misc_RNA (1)...(19): siRNA sense strand
ucaaagguaugguaagaga

SEQ ID NO: 1726615 - RNA, 19 nt, Homo sapiens
  misc_RNA (1)...(19): siRNA sense strand
cgauggagaugaauuuaga

SEQ ID NO: 1726616 - RNA, 19 nt, Homo sapiens
  misc_RNA (1)...(19): siRNA sense strand
gugagaagcuggguaguga

SEQ ID NO: 1726617 - RNA, 19 nt, Homo sapiens
  misc_RNA (1)...(19): siRNA sense strand
gcaaacccuuacaaacauu

SEQ ID NO: 1726618 - RNA, 19 nt, Homo sapiens
  misc_RNA (1)...(19): siRNA sense strand
gaaauuagacggauguaac

SEQ ID NO: 1726619 - RNA, 19 nt, Homo sapiens
  misc_RNA (1)...(19): siRNA sense strand
gcacuuagacaaccuaugg

SEQ ID NO: 1726620 - RNA, 19 nt, Homo sapiens
  misc_RNA (1)...(19): siRNA sense strand
aagaggaaauuguggauga

SEQ ID NO: 1726621 - RNA, 19 nt, Homo sapiens
  misc_RNA (1)...(19): siRNA sense strand
gguaagagagugauucaga

SEQ ID NO: 1726622 - RNA, 19 nt, Homo sapiens
  misc_RNA (1)...(19): siRNA sense strand
gagaagcucaggaggauga

SEQ ID NO: 1726623 - RNA, 19 nt, Homo sapiens
  misc_RNA (1)...(19): siRNA sense strand
ggucaaagaguuaguggaa

SEQ ID NO: 1726624 - RNA, 19 nt, Homo sapiens
  misc_RNA (1)...(19): siRNA sense strand
gaaggacuacuuugaaauc

SEQ ID NO: 1726625 - RNA, 19 nt, Homo sapiens
  misc_RNA (1)...(19): siRNA sense strand
ugaucaagcucagcagaua

SEQ ID NO: 1726626 - RNA, 19 nt, Homo sapiens
  misc_RNA (1)...(19): siRNA sense strand
gccacagaauuucaagaua

SEQ ID NO: 1726627 - RNA, 19 nt, Homo sapiens
  misc_RNA (1)...(19): siRNA sense strand
gaaauuaauggacuuacga

SEQ ID NO: 1726628 - RNA, 19 nt, Homo sapiens
  misc_RNA (1)...(19): siRNA sense strand
caggaaaucuuggacuuug

SEQ ID NO: 1726629 - RNA, 19 nt, Homo sapiens
  misc_RNA (1)...(19): siRNA sense strand
gaugcaauuucuuaaggaa

SEQ ID NO: 1726630 - RNA, 19 nt, Homo sapiens
  misc_RNA (1)...(19): siRNA sense strand
ugaauauugucucuccuuu

SEQ ID NO: 1726631 - RNA, 19 nt, Homo sapiens
  misc_RNA (1)...(19): siRNA sense strand
caaaucugauccaggaaau

SEQ ID NO: 1726632 - RNA, 19 nt, Homo sapiens
  misc_RNA (1)...(19): siRNA sense strand
aagaugagguagaagacua

SEQ ID NO: 1726633 - RNA, 19 nt, Homo sapiens
  misc_RNA (1)...(19): siRNA sense strand
ggaugcaauuucuuaagga

SEQ ID NO: 1726634 - RNA, 19 nt, Homo sapiens
  misc_RNA (1)...(19): siRNA sense strand
aaaccaggaucuauuugga

SEQ ID NO: 1726635 - RNA, 19 nt, Homo sapiens
  misc_RNA (1)...(19): siRNA sense strand
guuaguggaagcagaguua

SEQ ID NO: 1726636 - RNA, 19 nt, Homo sapiens
  misc_RNA (1)...(19): siRNA sense strand
uggaaucacugucaaaucu

SEQ ID NO: 1726637 - RNA, 19 nt, Homo sapiens
  misc_RNA (1)...(19): siRNA sense strand
ggaagagacccuagcauac

SEQ ID NO: 1726638 - RNA, 19 nt, Homo sapiens
  misc_RNA (1)...(19): siRNA sense strand
cugaaggacuacuuugaaa

SEQ ID NO: 1726639 - RNA, 19 nt, Homo sapiens
  misc_RNA (1)...(19): siRNA sense strand
cuagcauacuugaauauug

SEQ ID NO: 1726640 - RNA, 19 nt, Homo sapiens
  misc_RNA (1)...(19): siRNA sense strand
gugaaugcauguacuucuu

SEQ ID NO: 1726641 - RNA, 19 nt, Homo sapiens
  misc_RNA (1)...(19): siRNA sense strand
gaucaagcucagcagauaa

SEQ ID NO: 1726642 - RNA, 19 nt, Homo sapiens
  misc_RNA (1)...(19): siRNA sense strand
gaagagacccuagcauacu

SEQ ID NO: 1726643 - RNA, 19 nt, Homo sapiens
  misc_RNA (1)...(19): siRNA sense strand
gaagcuggguagugaaugc

SEQ ID NO: 1726644 - RNA, 19 nt, Homo sapiens
  misc_RNA (1)...(19): siRNA sense strand
ggagaugaauuuagaaaag

SEQ ID NO: 1726645 - RNA, 19 nt, Homo sapiens
  misc_RNA (1)...(19): siRNA sense strand
agacggauguaacaagaug

SEQ ID NO: 1726646 - RNA, 19 nt, Homo sapiens
  misc_RNA (1)...(19): siRNA sense strand
ggaugaggcuaauaaaaga

SEQ ID NO: 1726647 - RNA, 19 nt, Homo sapiens
  misc_RNA (1)...(19): siRNA sense strand
cagaguuauuugcccguua

SEQ ID NO: 1726648 - RNA, 19 nt, Homo sapiens
  misc_RNA (1)...(19): siRNA sense strand
ggacuuacgaaaugaauac

SEQ ID NO: 1726649 - RNA, 19 nt, Homo sapiens
  misc_RNA (1)...(19): siRNA sense strand
gaagagauggaaaguaagg

SEQ ID NO: 1726650 - RNA, 19 nt, Homo sapiens
  misc_RNA (1)...(19): siRNA sense strand
aggaagagacccuagcaua

SEQ ID NO: 1726651 - RNA, 19 nt, Homo sapiens
  misc_RNA (1)...(19): siRNA sense strand
gggaagaugagguagaaga

SEQ ID NO: 1726652 - RNA, 19 nt, Homo sapiens
  misc_RNA (1)...(19): siRNA sense strand
guacuggcuguaugcaaua

SEQ ID NO: 1726653 - RNA, 19 nt, Homo sapiens
  misc_RNA (1)...(19): siRNA sense strand
uuagacggauguaacaaga

SEQ ID NO: 1726654 - RNA, 19 nt, Homo sapiens
  misc_RNA (1)...(19): siRNA sense strand
guaaggaguggcuagagaa

SEQ ID NO: 1726655 - RNA, 19 nt, Homo sapiens
  misc_RNA (1)...(19): siRNA sense strand
agaaggcacuggaagagau

SEQ ID NO: 1726656 - RNA, 19 nt, Homo sapiens
  misc_RNA (1)...(19): siRNA sense strand
caggaucuauuuggauuug

SEQ ID NO: 1726657 - RNA, 19 nt, Homo sapiens
  misc_RNA (1)...(19): siRNA sense strand
gaaauccagaucagagaug

SEQ ID NO: 1726658 - RNA, 19 nt, Homo sapiens
  misc_RNA (1)...(19): siRNA sense strand
ggaaauuguggaugagaga

SEQ ID NO: 1726659 - RNA, 19 nt, Homo sapiens
  misc_RNA (1)...(19): siRNA sense strand
gaaaccaggaucuauuugg

SEQ ID NO: 1726660 - RNA, 19 nt, Homo sapiens
  misc_RNA (1)...(19): siRNA sense strand
gacauguacuggcuguaug

SEQ ID NO: 1726661 - RNA, 19 nt, Homo sapiens
  misc_RNA (1)...(19): siRNA sense strand
gauguggaaucacugucaa

SEQ ID NO: 1726662 - RNA, 19 nt, Homo sapiens
  misc_RNA (1)...(19): siRNA sense strand
uggaggagcugcuggaucu

SEQ ID NO: 1726663 - RNA, 19 nt, Homo sapiens
  misc_RNA (1)...(19): siRNA sense strand
gacccuagcauacuugaau

SEQ ID NO: 1726664 - RNA, 19 nt, Homo sapiens
  misc_RNA (1)...(19): siRNA sense strand
aggaguggcuagagaagaa

SEQ ID NO: 1726665 - RNA, 19 nt, Homo sapiens
  misc_RNA (1)...(19): siRNA sense strand
gcaagcggaugaggcuaau

SEQ ID NO: 1726666 - RNA, 19 nt, Homo sapiens
  misc_RNA (1)...(19): siRNA sense strand
ggugacugcagagaaauua

SEQ ID NO: 1726667 - RNA, 19 nt, Homo sapiens
  misc_RNA (1)...(19): siRNA sense strand
caacacagagcuagauuuu

SEQ ID NO: 1726668 - RNA, 19 nt, Homo sapiens
  misc_RNA (1)...(19): siRNA sense strand
gcucaagcuucucccaaca

SEQ ID NO: 1726669 - RNA, 19 nt, Homo sapiens
  misc_RNA (1)...(19): siRNA sense strand
gacgauauuugggaagaug

SEQ ID NO: 1726670 - RNA, 19 nt, Homo sapiens
  misc_RNA (1)...(19): siRNA sense strand
gagauggccagguucaaug

SEQ ID NO: 1726671 - RNA, 19 nt, Homo sapiens
  misc_RNA (1)...(19): siRNA sense strand
gcaaagccugucugaagga

SEQ ID NO: 1726672 - RNA, 19 nt, Homo sapiens
  misc_RNA (1)...(19): siRNA sense strand
gcaauauuucuguuggauu

SEQ ID NO: 1726673 - RNA, 19 nt, Homo sapiens
  misc_RNA (1)...(19): siRNA sense strand
uauuuacgauggagaugaa

SEQ ID NO: 1726674 - RNA, 19 nt, Homo sapiens
  misc_RNA (1)...(19): siRNA sense strand
ggauguugacgacgauauu

SEQ ID NO: 1726675 - RNA, 19 nt, Homo sapiens
  misc_RNA (1)...(19): siRNA sense strand
uaauggacuuacgaaauga

SEQ ID NO: 1726676 - RNA, 19 nt, Homo sapiens
  misc_RNA (1)...(19): siRNA sense strand
cagagaaauuaauggacuu

SEQ ID NO: 1726677 - RNA, 19 nt, Homo sapiens
  misc_RNA (1)...(19): siRNA sense strand
guaaggugacugcagagaa

SEQ ID NO: 1726678 - RNA, 19 nt, Homo sapiens
  misc_RNA (1)...(19): siRNA sense strand
uggcagaugugguguacug

SEQ ID NO: 1726679 - RNA, 19 nt, Homo sapiens
  misc_RNA (1)...(19): siRNA sense strand
ggaaaucuuggacuuugau

SEQ ID NO: 1726680 - RNA, 19 nt, Homo sapiens
  misc_RNA (1)...(19): siRNA sense strand
gauguugacgacgauauuu

SEQ ID NO: 1726681 - RNA, 19 nt, Homo sapiens
  misc_RNA (1)...(19): siRNA sense strand
aagcggaugaggcuaauaa

SEQ ID NO: 1726682 - RNA, 19 nt, Homo sapiens
  misc_RNA (1)...(19): siRNA sense strand
agaguuauuugcccguuau

SEQ ID NO: 1726683 - RNA, 19 nt, Homo sapiens
  misc_RNA (1)...(19): siRNA sense strand
aagccugucugaaggacua

SEQ ID NO: 1726684 - RNA, 19 nt, Homo sapiens
  misc_RNA (1)...(19): siRNA sense strand
gagaagcuggguagugaau

SEQ ID NO: 1726685 - RNA, 19 nt, Homo sapiens
  misc_RNA (1)...(19): siRNA sense strand
agagagcagugcaggaugu

SEQ ID NO: 1726686 - RNA, 19 nt, Homo sapiens
  misc_RNA (1)...(19): siRNA sense strand
aagagacccuagcauacuu

SEQ ID NO: 1726687 - RNA, 19 nt, Homo sapiens
  misc_RNA (1)...(19): siRNA sense strand
ucaaaucugauccaggaaa

SEQ ID NO: 1726688 - RNA, 19 nt, Homo sapiens
  misc_RNA (1)...(19): siRNA sense strand
ugauguagaccaagaggaa

SEQ ID NO: 1726689 - RNA, 19 nt, Homo sapiens
  misc_RNA (1)...(19): siRNA sense strand
uggauuugccacagaauuu

SEQ ID NO: 1726690 - RNA, 19 nt, Homo sapiens
  misc_RNA (1)...(19): siRNA sense strand
guggaacucccauagagaa

SEQ ID NO: 1726691 - RNA, 19 nt, Homo sapiens
  misc_RNA (1)...(19): siRNA sense strand
gcacuggaagagauggaaa

SEQ ID NO: 1726692 - RNA, 19 nt, Homo sapiens
  misc_RNA (1)...(19): siRNA sense strand
gauggcagaugugguguac

SEQ ID NO: 1726693 - RNA, 19 nt, Homo sapiens
  misc_RNA (1)...(19): siRNA sense strand
uuacgauggagaugaauuu

SEQ ID NO: 1726694 - RNA, 19 nt, Homo sapiens
  misc_RNA (1)...(19): siRNA sense strand
aguaaggaguggcuagaga

SEQ ID NO: 1726695 - RNA, 19 nt, Homo sapiens
  misc_RNA (1)...(19): siRNA sense strand
cuggcuguaugcaauauuu

SEQ ID NO: 1726696 - RNA, 19 nt, Homo sapiens
  misc_RNA (1)...(19): siRNA sense strand
uguacuggcuguaugcaau

SEQ ID NO: 1726697 - RNA, 19 nt, Homo sapiens
  misc_RNA (1)...(19): siRNA sense strand
ucgagaagcucaggaggau

SEQ ID NO: 1726698 - RNA, 19 nt, Homo sapiens
  misc_RNA (1)...(19): siRNA sense strand
ggcuagagaagaacucaaa

SEQ ID NO: 1726699 - RNA, 19 nt, Homo sapiens
  misc_RNA (1)...(19): siRNA sense strand
ucaaagagcugcccauguu

SEQ ID NO: 1726700 - RNA, 19 nt, Homo sapiens
  misc_RNA (1)...(19): siRNA sense strand
gaucagagauggccagguu

SEQ ID NO: 1726701 - RNA, 19 nt, Homo sapiens
  misc_RNA (1)...(19): siRNA sense strand
uggaagagauggaaaguaa

SEQ ID NO: 1726702 - RNA, 19 nt, Homo sapiens
  misc_RNA (1)...(19): siRNA sense strand
ccacagaauuucaagauau

SEQ ID NO: 1726703 - RNA, 19 nt, Homo sapiens
  misc_RNA (1)...(19): siRNA sense strand
gaacucccauagagaaauu

SEQ ID NO: 1726704 - RNA, 19 nt, Homo sapiens
  misc_RNA (1)...(19): siRNA sense strand
gaucaaagguaugguaaga

SEQ ID NO: 1726705 - RNA, 19 nt, Homo sapiens
  misc_RNA (1)...(19): siRNA sense strand
gagcaaacccuuacaaaca

SEQ ID NO: 1726706 - RNA, 19 nt, Homo sapiens
  misc_RNA (1)...(19): siRNA sense strand
uaaggugacugcagagaaa

SEQ ID NO: 1726707 - RNA, 19 nt, Homo sapiens
  misc_RNA (1)...(19): siRNA sense strand
gagaaaccaggaucuauuu

SEQ ID NO: 1726708 - RNA, 19 nt, Homo sapiens
  misc_RNA (1)...(19): siRNA sense strand
guaagagagugauucagaa

SEQ ID NO: 1726709 - RNA, 19 nt, Homo sapiens
  misc_RNA (1)...(19): siRNA sense strand
ggagaaaccaggaucuauu

SEQ ID NO: 1726710 - RNA, 19 nt, Homo sapiens
  misc_RNA (1)...(19): siRNA sense strand
gaucugauguagaccaaga

SEQ ID NO: 1726711 - RNA, 19 nt, Homo sapiens
  misc_RNA (1)...(19): siRNA sense strand
guaacaagaugacauguac

SEQ ID NO: 1726712 - RNA, 19 nt, Homo sapiens
  misc_RNA (1)...(19): siRNA sense strand
gaaucacugucaaaucuga

SEQ ID NO: 1726713 - RNA, 19 nt, Homo sapiens
  misc_RNA (1)...(19): siRNA sense strand
uuaauggacuuacgaaaug

SEQ ID NO: 1726714 - RNA, 19 nt, Homo sapiens
  misc_RNA (1)...(19): siRNA sense strand
ucaaagguaugguaagaga

SEQ ID NO: 1726715 - RNA, 19 nt, Homo sapiens
  misc_RNA (1)...(19): siRNA sense strand
cgauggagaugaauuuaga

SEQ ID NO: 1726716 - RNA, 19 nt, Homo sapiens
  misc_RNA (1)...(19): siRNA sense strand
gugagaagcuggguaguga

SEQ ID NO: 1726717 - RNA, 19 nt, Homo sapiens
  misc_RNA (1)...(19): siRNA sense strand
gcaaacccuuacaaacauu

SEQ ID NO: 1726718 - RNA, 19 nt, Homo sapiens
  misc_RNA (1)...(19): siRNA sense strand
gaaauuagacggauguaac

SEQ ID NO: 1726719 - RNA, 19 nt, Homo sapiens
  misc_RNA (1)...(19): siRNA sense strand
gcacuuagacaaccuaugg

SEQ ID NO: 1726720 - RNA, 19 nt, Homo sapiens
  misc_RNA (1)...(19): siRNA sense strand
aagaggaaauuguggauga

SEQ ID NO: 1726721 - RNA, 19 nt, Homo sapiens
  misc_RNA (1)...(19): siRNA sense strand
gguaagagagugauucaga

SEQ ID NO: 1726722 - RNA, 19 nt, Homo sapiens
  misc_RNA (1)...(19): siRNA sense strand
gagaagcucaggaggauga

SEQ ID NO: 1726723 - RNA, 19 nt, Homo sapiens
  misc_RNA (1)...(19): siRNA sense strand
ggucaaagaguuaguggaa

SEQ ID NO: 1726724 - RNA, 19 nt, Homo sapiens
  misc_RNA (1)...(19): siRNA sense strand
gaaggacuacuuugaaauc

SEQ ID NO: 1726725 - RNA, 19 nt, Homo sapiens
  misc_RNA (1)...(19): siRNA sense strand
ugaucaagcucagcagaua

SEQ ID NO: 1726726 - RNA, 19 nt, Homo sapiens
  misc_RNA (1)...(19): siRNA sense strand
gccacagaauuucaagaua

SEQ ID NO: 1726727 - RNA, 19 nt, Homo sapiens
  misc_RNA (1)...(19): siRNA sense strand
gaaauuaauggacuuacga

SEQ ID NO: 1726728 - RNA, 19 nt, Homo sapiens
  misc_RNA (1)...(19): siRNA sense strand
caggaaaucuuggacuuug

SEQ ID NO: 1726729 - RNA, 19 nt, Homo sapiens
  misc_RNA (1)...(19): siRNA sense strand
gaugcaauuucuuaaggaa

SEQ ID NO: 1726730 - RNA, 19 nt, Homo sapiens
  misc_RNA (1)...(19): siRNA sense strand
ugaauauugucucuccuuu

SEQ ID NO: 1726731 - RNA, 19 nt, Homo sapiens
  misc_RNA (1)...(19): siRNA sense strand
caaaucugauccaggaaau

SEQ ID NO: 1726732 - RNA, 19 nt, Homo sapiens
  misc_RNA (1)...(19): siRNA sense strand
aagaugagguagaagacua

SEQ ID NO: 1726733 - RNA, 19 nt, Homo sapiens
  misc_RNA (1)...(19): siRNA sense strand
ggaugcaauuucuuaagga

SEQ ID NO: 1726734 - RNA, 19 nt, Homo sapiens
  misc_RNA (1)...(19): siRNA sense strand
aaaccaggaucuauuugga

SEQ ID NO: 1726735 - RNA, 19 nt, Homo sapiens
  misc_RNA (1)...(19): siRNA sense strand
guuaguggaagcagaguua

SEQ ID NO: 1726736 - RNA, 19 nt, Homo sapiens
  misc_RNA (1)...(19): siRNA sense strand
uggaaucacugucaaaucu

SEQ ID NO: 1726737 - RNA, 19 nt, Homo sapiens
  misc_RNA (1)...(19): siRNA sense strand
ggaagagacccuagcauac

SEQ ID NO: 1726738 - RNA, 19 nt, Homo sapiens
  misc_RNA (1)...(19): siRNA sense strand
cugaaggacuacuuugaaa

SEQ ID NO: 1726739 - RNA, 19 nt, Homo sapiens
  misc_RNA (1)...(19): siRNA sense strand
cuagcauacuugaauauug

SEQ ID NO: 1726740 - RNA, 19 nt, Homo sapiens
  misc_RNA (1)...(19): siRNA sense strand
gugaaugcauguacuucuu

SEQ ID NO: 1726741 - RNA, 19 nt, Homo sapiens
  misc_RNA (1)...(19): siRNA sense strand
gaucaagcucagcagauaa

SEQ ID NO: 1726742 - RNA, 19 nt, Homo sapiens
  misc_RNA (1)...(19): siRNA sense strand
gaagagacccuagcauacu

SEQ ID NO: 1726743 - RNA, 19 nt, Homo sapiens
  misc_RNA (1)...(19): siRNA sense strand
gaagcuggguagugaaugc

SEQ ID NO: 1726744 - RNA, 19 nt, Homo sapiens
  misc_RNA (1)...(19): siRNA sense strand
ggagaugaauuuagaaaag

SEQ ID NO: 1726745 - RNA, 19 nt, Homo sapiens
  misc_RNA (1)...(19): siRNA sense strand
agacggauguaacaagaug

SEQ ID NO: 1726746 - RNA, 19 nt, Homo sapiens
  misc_RNA (1)...(19): siRNA sense strand
ggaugaggcuaauaaaaga

SEQ ID NO: 1726747 - RNA, 19 nt, Homo sapiens
  misc_RNA (1)...(19): siRNA sense strand
cagaguuauuugcccguua

SEQ ID NO: 1726748 - RNA, 19 nt, Homo sapiens
  misc_RNA (1)...(19): siRNA sense strand
ggacuuacgaaaugaauac

SEQ ID NO: 1726749 - RNA, 19 nt, Homo sapiens
  misc_RNA (1)...(19): siRNA sense strand
gaagagauggaaaguaagg

SEQ ID NO: 1726750 - RNA, 19 nt, Homo sapiens
  misc_RNA (1)...(19): siRNA sense strand
aggaagagacccuagcaua

SEQ ID NO: 1726751 - RNA, 19 nt, Homo sapiens
  misc_RNA (1)...(19): siRNA sense strand
gggaagaugagguagaaga

SEQ ID NO: 1726752 - RNA, 19 nt, Homo sapiens
  misc_RNA (1)...(19): siRNA sense strand
guacuggcuguaugcaaua

SEQ ID NO: 1726753 - RNA, 19 nt, Homo sapiens
  misc_RNA (1)...(19): siRNA sense strand
uuagacggauguaacaaga

SEQ ID NO: 1726754 - RNA, 19 nt, Homo sapiens
  misc_RNA (1)...(19): siRNA sense strand
guaaggaguggcuagagaa

SEQ ID NO: 1726755 - RNA, 19 nt, Homo sapiens
  misc_RNA (1)...(19): siRNA sense strand
agaaggcacuggaagagau

SEQ ID NO: 1726756 - RNA, 19 nt, Homo sapiens
  misc_RNA (1)...(19): siRNA sense strand
caggaucuauuuggauuug

SEQ ID NO: 1726757 - RNA, 19 nt, Homo sapiens
  misc_RNA (1)...(19): siRNA sense strand
gaaauccagaucagagaug

SEQ ID NO: 1726758 - RNA, 19 nt, Homo sapiens
  misc_RNA (1)...(19): siRNA sense strand
ggaaauuguggaugagaga

SEQ ID NO: 1726759 - RNA, 19 nt, Homo sapiens
  misc_RNA (1)...(19): siRNA sense strand
gaaaccaggaucuauuugg

SEQ ID NO: 1726760 - RNA, 19 nt, Homo sapiens
  misc_RNA (1)...(19): siRNA sense strand
gacauguacuggcuguaug

SEQ ID NO: 1726761 - RNA, 19 nt, Homo sapiens
  misc_RNA (1)...(19): siRNA sense strand
gauguggaaucacugucaa

SEQ ID NO: 1726762 - RNA, 19 nt, Homo sapiens
  misc_RNA (1)...(19): siRNA sense strand
uggaggagcugcuggaucu

SEQ ID NO: 1726763 - RNA, 19 nt, Homo sapiens
  misc_RNA (1)...(19): siRNA sense strand
gacccuagcauacuugaau

SEQ ID NO: 1726764 - RNA, 19 nt, Homo sapiens
  misc_RNA (1)...(19): siRNA sense strand
aggaguggcuagagaagaa

SEQ ID NO: 1726765 - RNA, 19 nt, Homo sapiens
  misc_RNA (1)...(19): siRNA sense strand
gcaagcggaugaggcuaau

SEQ ID NO: 1726766 - RNA, 19 nt, Homo sapiens
  misc_RNA (1)...(19): siRNA sense strand
ggugacugcagagaaauua

SEQ ID NO: 1726767 - RNA, 19 nt, Homo sapiens
  misc_RNA (1)...(19): siRNA sense strand
caacacagagcuagauuuu

SEQ ID NO: 1726768 - RNA, 19 nt, Homo sapiens
  misc_RNA (1)...(19): siRNA sense strand
gcucaagcuucucccaaca

SEQ ID NO: 1726769 - RNA, 19 nt, Homo sapiens
  misc_RNA (1)...(19): siRNA sense strand
gacgauauuugggaagaug

SEQ ID NO: 1726770 - RNA, 19 nt, Homo sapiens
  misc_RNA (1)...(19): siRNA sense strand
gagauggccagguucaaug

SEQ ID NO: 1726771 - RNA, 19 nt, Homo sapiens
  misc_RNA (1)...(19): siRNA sense strand
gcaaagccugucugaagga

SEQ ID NO: 1726772 - RNA, 19 nt, Homo sapiens
  misc_RNA (1)...(19): siRNA sense strand
gcaauauuucuguuggauu

SEQ ID NO: 1726773 - RNA, 19 nt, Homo sapiens
  misc_RNA (1)...(19): siRNA sense strand
uauuuacgauggagaugaa

SEQ ID NO: 1726774 - RNA, 19 nt, Homo sapiens
  misc_RNA (1)...(19): siRNA sense strand
ggauguugacgacgauauu

SEQ ID NO: 1726775 - RNA, 19 nt, Homo sapiens
  misc_RNA (1)...(19): siRNA sense strand
uaauggacuuacgaaauga

SEQ ID NO: 1726776 - RNA, 19 nt, Homo sapiens
  misc_RNA (1)...(19): siRNA sense strand
cagagaaauuaauggacuu

SEQ ID NO: 1726777 - RNA, 19 nt, Homo sapiens
  misc_RNA (1)...(19): siRNA sense strand
guaaggugacugcagagaa

SEQ ID NO: 1726778 - RNA, 19 nt, Homo sapiens
  misc_RNA (1)...(19): siRNA sense strand
uggcagaugugguguacug

SEQ ID NO: 1726779 - RNA, 19 nt, Homo sapiens
  misc_RNA (1)...(19): siRNA sense strand
ggaaaucuuggacuuugau

SEQ ID NO: 1726780 - RNA, 19 nt, Homo sapiens
  misc_RNA (1)...(19): siRNA sense strand
gauguugacgacgauauuu

SEQ ID NO: 1726781 - RNA, 19 nt, Homo sapiens
  misc_RNA (1)...(19): siRNA sense strand
aagcggaugaggcuaauaa

SEQ ID NO: 1726782 - RNA, 19 nt, Homo sapiens
  misc_RNA (1)...(19): siRNA sense strand
agaguuauuugcccguuau

SEQ ID NO: 1726783 - RNA, 19 nt, Homo sapiens
  misc_RNA (1)...(19): siRNA sense strand
aagccugucugaaggacua

SEQ ID NO: 1726784 - RNA, 19 nt, Homo sapiens
  misc_RNA (1)...(19): siRNA sense strand
gagaagcuggguagugaau

SEQ ID NO: 1726785 - RNA, 19 nt, Homo sapiens
  misc_RNA (1)...(19): siRNA sense strand
agagagcagugcaggaugu

SEQ ID NO: 1726786 - RNA, 19 nt, Homo sapiens
  misc_RNA (1)...(19): siRNA sense strand
aagagacccuagcauacuu

SEQ ID NO: 1726787 - RNA, 19 nt, Homo sapiens
  misc_RNA (1)...(19): siRNA sense strand
ucaaaucugauccaggaaa

SEQ ID NO: 1726788 - RNA, 19 nt, Homo sapiens
  misc_RNA (1)...(19): siRNA sense strand
ugauguagaccaagaggaa

SEQ ID NO: 1726789 - RNA, 19 nt, Homo sapiens
  misc_RNA (1)...(19): siRNA sense strand
uggauuugccacagaauuu

SEQ ID NO: 1726790 - RNA, 19 nt, Homo sapiens
  misc_RNA (1)...(19): siRNA sense strand
guggaacucccauagagaa

SEQ ID NO: 1726791 - RNA, 19 nt, Homo sapiens
  misc_RNA (1)...(19): siRNA sense strand
gcacuggaagagauggaaa

SEQ ID NO: 1726792 - RNA, 19 nt, Homo sapiens
  misc_RNA (1)...(19): siRNA sense strand
gauggcagaugugguguac

SEQ ID NO: 1726793 - RNA, 19 nt, Homo sapiens
  misc_RNA (1)...(19): siRNA sense strand
uuacgauggagaugaauuu

SEQ ID NO: 1726794 - RNA, 19 nt, Homo sapiens
  misc_RNA (1)...(19): siRNA sense strand
aguaaggaguggcuagaga

SEQ ID NO: 1726795 - RNA, 19 nt, Homo sapiens
  misc_RNA (1)...(19): siRNA sense strand
cuggcuguaugcaauauuu

SEQ ID NO: 1726796 - RNA, 19 nt, Homo sapiens
  misc_RNA (1)...(19): siRNA sense strand
uguacuggcuguaugcaau

SEQ ID NO: 1726797 - RNA, 19 nt, Homo sapiens
  misc_RNA (1)...(19): siRNA sense strand
ucgagaagcucaggaggau

SEQ ID NO: 1726798 - RNA, 19 nt, Homo sapiens
  misc_RNA (1)...(19): siRNA sense strand
ggcuagagaagaacucaaa

SEQ ID NO: 1726799 - RNA, 19 nt, Homo sapiens
  misc_RNA (1)...(19): siRNA sense strand
ucaaagagcugcccauguu

SEQ ID NO: 1726800 - RNA, 19 nt, Homo sapiens
  misc_RNA (1)...(19): siRNA sense strand
gaucagagauggccagguu

SEQ ID NO: 1726801 - RNA, 19 nt, Homo sapiens
  misc_RNA (1)...(19): siRNA sense strand
uggaagagauggaaaguaa

SEQ ID NO: 1726802 - RNA, 19 nt, Homo sapiens
  misc_RNA (1)...(19): siRNA sense strand
ccacagaauuucaagauau

SEQ ID NO: 1726803 - RNA, 19 nt, Homo sapiens
  misc_RNA (1)...(19): siRNA sense strand
gaacucccauagagaaauu

SEQ ID NO: 1726804 - RNA, 19 nt, Homo sapiens
  misc_RNA (1)...(19): siRNA sense strand
gaucaaagguaugguaaga

SEQ ID NO: 1726805 - RNA, 19 nt, Homo sapiens
  misc_RNA (1)...(19): siRNA sense strand
gagcaaacccuuacaaaca

SEQ ID NO: 1726806 - RNA, 19 nt, Homo sapiens
  misc_RNA (1)...(19): siRNA sense strand
uaaggugacugcagagaaa

SEQ ID NO: 1726807 - RNA, 19 nt, Homo sapiens
  misc_RNA (1)...(19): siRNA sense strand
gagaaaccaggaucuauuu

SEQ ID NO: 1726808 - RNA, 19 nt, Homo sapiens
  misc_RNA (1)...(19): siRNA sense strand
guaagagagugauucagaa

SEQ ID NO: 1726809 - RNA, 19 nt, Homo sapiens
  misc_RNA (1)...(19): siRNA sense strand
ggagaaaccaggaucuauu

SEQ ID NO: 1726810 - RNA, 19 nt, Homo sapiens
  misc_RNA (1)...(19): siRNA sense strand
gaucugauguagaccaaga

SEQ ID NO: 1726811 - RNA, 19 nt, Homo sapiens
  misc_RNA (1)...(19): siRNA sense strand
guaacaagaugacauguac

SEQ ID NO: 1726812 - RNA, 19 nt, Homo sapiens
  misc_RNA (1)...(19): siRNA sense strand
gaaucacugucaaaucuga

SEQ ID NO: 1726813 - RNA, 19 nt, Homo sapiens
  misc_RNA (1)...(19): siRNA sense strand
uuaauggacuuacgaaaug

SEQ ID NO: 1726814 - RNA, 19 nt, Homo sapiens
  misc_RNA (1)...(19): siRNA sense strand
ucaaagguaugguaagaga

SEQ ID NO: 1726815 - RNA, 19 nt, Homo sapiens
  misc_RNA (1)...(19): siRNA sense strand
cgauggagaugaauuuaga

SEQ ID NO: 1726816 - RNA, 19 nt, Homo sapiens
  misc_RNA (1)...(19): siRNA sense strand
gugagaagcuggguaguga

SEQ ID NO: 1726817 - RNA, 19 nt, Homo sapiens
  misc_RNA (1)...(19): siRNA sense strand
gcaaacccuuacaaacauu

SEQ ID NO: 1726818 - RNA, 19 nt, Homo sapiens
  misc_RNA (1)...(19): siRNA sense strand
gaaauuagacggauguaac

SEQ ID NO: 1726819 - RNA, 19 nt, Homo sapiens
  misc_RNA (1)...(19): siRNA sense strand
gcacuuagacaaccuaugg

SEQ ID NO: 1726820 - RNA, 19 nt, Homo sapiens
  misc_RNA (1)...(19): siRNA sense strand
aagaggaaauuguggauga

SEQ ID NO: 1726821 - RNA, 19 nt, Homo sapiens
  misc_RNA (1)...(19): siRNA sense strand
gguaagagagugauucaga

SEQ ID NO: 1726822 - RNA, 19 nt, Homo sapiens
  misc_RNA (1)...(19): siRNA sense strand
gagaagcucaggaggauga

SEQ ID NO: 1726823 - RNA, 19 nt, Homo sapiens
  misc_RNA (1)...(19): siRNA sense strand
ggucaaagaguuaguggaa

SEQ ID NO: 1726824 - RNA, 19 nt, Homo sapiens
  misc_RNA (1)...(19): siRNA sense strand
gaaggacuacuuugaaauc

SEQ ID NO: 1726825 - RNA, 19 nt, Homo sapiens
  misc_RNA (1)...(19): siRNA sense strand
ugaucaagcucagcagaua

SEQ ID NO: 1726826 - RNA, 19 nt, Homo sapiens
  misc_RNA (1)...(19): siRNA sense strand
gccacagaauuucaagaua

SEQ ID NO: 1726827 - RNA, 19 nt, Homo sapiens
  misc_RNA (1)...(19): siRNA sense strand
gaaauuaauggacuuacga

SEQ ID NO: 1726828 - RNA, 19 nt, Homo sapiens
  misc_RNA (1)...(19): siRNA sense strand
caggaaaucuuggacuuug

SEQ ID NO: 1726829 - RNA, 19 nt, Homo sapiens
  misc_RNA (1)...(19): siRNA sense strand
gaugcaauuucuuaaggaa

SEQ ID NO: 1726830 - RNA, 19 nt, Homo sapiens
  misc_RNA (1)...(19): siRNA sense strand
ugaauauugucucuccuuu

SEQ ID NO: 1726831 - RNA, 19 nt, Homo sapiens
  misc_RNA (1)...(19): siRNA sense strand
caaaucugauccaggaaau

SEQ ID NO: 1726832 - RNA, 19 nt, Homo sapiens
  misc_RNA (1)...(19): siRNA sense strand
aagaugagguagaagacua

SEQ ID NO: 1726833 - RNA, 19 nt, Homo sapiens
  misc_RNA (1)...(19): siRNA sense strand
ggaugcaauuucuuaagga

SEQ ID NO: 1726834 - RNA, 19 nt, Homo sapiens
  misc_RNA (1)...(19): siRNA sense strand
aaaccaggaucuauuugga

SEQ ID NO: 1726835 - RNA, 19 nt, Homo sapiens
  misc_RNA (1)...(19): siRNA sense strand
guuaguggaagcagaguua

SEQ ID NO: 1726836 - RNA, 19 nt, Homo sapiens
  misc_RNA (1)...(19): siRNA sense strand
uggaaucacugucaaaucu

SEQ ID NO: 1726837 - RNA, 19 nt, Homo sapiens
  misc_RNA (1)...(19): siRNA sense strand
ggaagagacccuagcauac

SEQ ID NO: 1726838 - RNA, 19 nt, Homo sapiens
  misc_RNA (1)...(19): siRNA sense strand
cugaaggacuacuuugaaa

SEQ ID NO: 1726839 - RNA, 19 nt, Homo sapiens
  misc_RNA (1)...(19): siRNA sense strand
cuagcauacuugaauauug

SEQ ID NO: 1726840 - RNA, 19 nt, Homo sapiens
  misc_RNA (1)...(19): siRNA sense strand
gugaaugcauguacuucuu

SEQ ID NO: 1726841 - RNA, 19 nt, Homo sapiens
  misc_RNA (1)...(19): siRNA sense strand
gaucaagcucagcagauaa

SEQ ID NO: 1726842 - RNA, 19 nt, Homo sapiens
  misc_RNA (1)...(19): siRNA sense strand
gaagagacccuagcauacu

SEQ ID NO: 1726843 - RNA, 19 nt, Homo sapiens
  misc_RNA (1)...(19): siRNA sense strand
gaagcuggguagugaaugc

SEQ ID NO: 1726844 - RNA, 19 nt, Homo sapiens
  misc_RNA (1)...(19): siRNA sense strand
ggagaugaauuuagaaaag

SEQ ID NO: 1726845 - RNA, 19 nt, Homo sapiens
  misc_RNA (1)...(19): siRNA sense strand
agacggauguaacaagaug

SEQ ID NO: 1726846 - RNA, 19 nt, Homo sapiens
  misc_RNA (1)...(19): siRNA sense strand
ggaugaggcuaauaaaaga

SEQ ID NO: 1726847 - RNA, 19 nt, Homo sapiens
  misc_RNA (1)...(19): siRNA sense strand
cagaguuauuugcccguua

SEQ ID NO: 1726848 - RNA, 19 nt, Homo sapiens
  misc_RNA (1)...(19): siRNA sense strand
ggacuuacgaaaugaauac

SEQ ID NO: 1726849 - RNA, 19 nt, Homo sapiens
  misc_RNA (1)...(19): siRNA sense strand
gaagagauggaaaguaagg

SEQ ID NO: 1726850 - RNA, 19 nt, Homo sapiens
  misc_RNA (1)...(19): siRNA sense strand
aggaagagacccuagcaua

SEQ ID NO: 1726851 - RNA, 19 nt, Homo sapiens
  misc_RNA (1)...(19): siRNA sense strand
gggaagaugagguagaaga

SEQ ID NO: 1726852 - RNA, 19 nt, Homo sapiens
  misc_RNA (1)...(19): siRNA sense strand
guacuggcuguaugcaaua

SEQ ID NO: 1726853 - RNA, 19 nt, Homo sapiens
  misc_RNA (1)...(19): siRNA sense strand
uuagacggauguaacaaga

SEQ ID NO: 1726854 - RNA, 19 nt, Homo sapiens
  misc_RNA (1)...(19): siRNA sense strand
guaaggaguggcuagagaa

SEQ ID NO: 1726855 - RNA, 19 nt, Homo sapiens
  misc_RNA (1)...(19): siRNA sense strand
agaaggcacuggaagagau

SEQ ID NO: 1726856 - RNA, 19 nt, Homo sapiens
  misc_RNA (1)...(19): siRNA sense strand
caggaucuauuuggauuug

SEQ ID NO: 1726857 - RNA, 19 nt, Homo sapiens
  misc_RNA (1)...(19): siRNA sense strand
gaaauccagaucagagaug

SEQ ID NO: 1726858 - RNA, 19 nt, Homo sapiens
  misc_RNA (1)...(19): siRNA sense strand
ggaaauuguggaugagaga

SEQ ID NO: 1726859 - RNA, 19 nt, Homo sapiens
  misc_RNA (1)...(19): siRNA sense strand
gaaaccaggaucuauuugg

SEQ ID NO: 1726860 - RNA, 19 nt, Homo sapiens
  misc_RNA (1)...(19): siRNA sense strand
gacauguacuggcuguaug

SEQ ID NO: 1726861 - RNA, 19 nt, Homo sapiens
  misc_RNA (1)...(19): siRNA sense strand
gauguggaaucacugucaa

SEQ ID NO: 1726862 - RNA, 19 nt, Homo sapiens
  misc_RNA (1)...(19): siRNA sense strand
uggaggagcugcuggaucu

SEQ ID NO: 1726863 - RNA, 19 nt, Homo sapiens
  misc_RNA (1)...(19): siRNA sense strand
gacccuagcauacuugaau

SEQ ID NO: 1726864 - RNA, 19 nt, Homo sapiens
  misc_RNA (1)...(19): siRNA sense strand
aggaguggcuagagaagaa

SEQ ID NO: 1726865 - RNA, 19 nt, Homo sapiens
  misc_RNA (1)...(19): siRNA sense strand
gcaagcggaugaggcuaau

SEQ ID NO: 1726866 - RNA, 19 nt, Homo sapiens
  misc_RNA (1)...(19): siRNA sense strand
ggugacugcagagaaauua

SEQ ID NO: 1726867 - RNA, 19 nt, Homo sapiens
  misc_RNA (1)...(19): siRNA sense strand
caacacagagcuagauuuu

SEQ ID NO: 1726868 - RNA, 19 nt, Homo sapiens
  misc_RNA (1)...(19): siRNA sense strand
gcucaagcuucucccaaca

SEQ ID NO: 1726869 - RNA, 19 nt, Homo sapiens
  misc_RNA (1)...(19): siRNA sense strand
gacgauauuugggaagaug

SEQ ID NO: 1726870 - RNA, 19 nt, Homo sapiens
  misc_RNA (1)...(19): siRNA sense strand
gagauggccagguucaaug

SEQ ID NO: 1726871 - RNA, 19 nt, Homo sapiens
  misc_RNA (1)...(19): siRNA sense strand
gcaaagccugucugaagga

SEQ ID NO: 1726872 - RNA, 19 nt, Homo sapiens
  misc_RNA (1)...(19): siRNA sense strand
gcaauauuucuguuggauu

SEQ ID NO: 1726873 - RNA, 19 nt, Homo sapiens
  misc_RNA (1)...(19): siRNA sense strand
uauuuacgauggagaugaa

SEQ ID NO: 1726874 - RNA, 19 nt, Homo sapiens
  misc_RNA (1)...(19): siRNA sense strand
ggauguugacgacgauauu

SEQ ID NO: 1726875 - RNA, 19 nt, Homo sapiens
  misc_RNA (1)...(19): siRNA sense strand
uaauggacuuacgaaauga

SEQ ID NO: 1726876 - RNA, 19 nt, Homo sapiens
  misc_RNA (1)...(19): siRNA sense strand
cagagaaauuaauggacuu

SEQ ID NO: 1726877 - RNA, 19 nt, Homo sapiens
  misc_RNA (1)...(19): siRNA sense strand
guaaggugacugcagagaa

SEQ ID NO: 1726878 - RNA, 19 nt, Homo sapiens
  misc_RNA (1)...(19): siRNA sense strand
uggcagaugugguguacug

SEQ ID NO: 1726879 - RNA, 19 nt, Homo sapiens
  misc_RNA (1)...(19): siRNA sense strand
ggaaaucuuggacuuugau

SEQ ID NO: 1726880 - RNA, 19 nt, Homo sapiens
  misc_RNA (1)...(19): siRNA sense strand
gauguugacgacgauauuu

SEQ ID NO: 1726881 - RNA, 19 nt, Homo sapiens
  misc_RNA (1)...(19): siRNA sense strand
aagcggaugaggcuaauaa

SEQ ID NO: 1726882 - RNA, 19 nt, Homo sapiens
  misc_RNA (1)...(19): siRNA sense strand
agaguuauuugcccguuau

SEQ ID NO: 1726883 - RNA, 19 nt, Homo sapiens
  misc_RNA (1)...(19): siRNA sense strand
aagccugucugaaggacua

SEQ ID NO: 1726884 - RNA, 19 nt, Homo sapiens
  misc_RNA (1)...(19): siRNA sense strand
gagaagcuggguagugaau

SEQ ID NO: 1726885 - RNA, 19 nt, Homo sapiens
  misc_RNA (1)...(19): siRNA sense strand
agagagcagugcaggaugu

SEQ ID NO: 1726886 - RNA, 19 nt, Homo sapiens
  misc_RNA (1)...(19): siRNA sense strand
aagagacccuagcauacuu

SEQ ID NO: 1726887 - RNA, 19 nt, Homo sapiens
  misc_RNA (1)...(19): siRNA sense strand
ucaaaucugauccaggaaa

SEQ ID NO: 1726888 - RNA, 19 nt, Homo sapiens
  misc_RNA (1)...(19): siRNA sense strand
ugauguagaccaagaggaa

SEQ ID NO: 1726889 - RNA, 19 nt, Homo sapiens
  misc_RNA (1)...(19): siRNA sense strand
uggauuugccacagaauuu

SEQ ID NO: 1726890 - RNA, 19 nt, Homo sapiens
  misc_RNA (1)...(19): siRNA sense strand
guggaacucccauagagaa

SEQ ID NO: 1726891 - RNA, 19 nt, Homo sapiens
  misc_RNA (1)...(19): siRNA sense strand
gcacuggaagagauggaaa

SEQ ID NO: 1726892 - RNA, 19 nt, Homo sapiens
  misc_RNA (1)...(19): siRNA sense strand
gauggcagaugugguguac

SEQ ID NO: 1726893 - RNA, 19 nt, Homo sapiens
  misc_RNA (1)...(19): siRNA sense strand
uuacgauggagaugaauuu

SEQ ID NO: 1726894 - RNA, 19 nt, Homo sapiens
  misc_RNA (1)...(19): siRNA sense strand
aguaaggaguggcuagaga

SEQ ID NO: 1726895 - RNA, 19 nt, Homo sapiens
  misc_RNA (1)...(19): siRNA sense strand
cuggcuguaugcaauauuu

SEQ ID NO: 1726896 - RNA, 19 nt, Homo sapiens
  misc_RNA (1)...(19): siRNA sense strand
uguacuggcuguaugcaau

SEQ ID NO: 1726897 - RNA, 19 nt, Homo sapiens
  misc_RNA (1)...(19): siRNA sense strand
ucgagaagcucaggaggau

SEQ ID NO: 1726898 - RNA, 19 nt, Homo sapiens
  misc_RNA (1)...(19): siRNA sense strand
ggcuagagaagaacucaaa

SEQ ID NO: 1726899 - RNA, 19 nt, Homo sapiens
  misc_RNA (1)...(19): siRNA sense strand
ucaaagagcugcccauguu

SEQ ID NO: 1726900 - RNA, 19 nt, Homo sapiens
  misc_RNA (1)...(19): siRNA sense strand
gaucagagauggccagguu

SEQ ID NO: 1726901 - RNA, 19 nt, Homo sapiens
  misc_RNA (1)...(19): siRNA sense strand
uggaagagauggaaaguaa

SEQ ID NO: 1726902 - RNA, 19 nt, Homo sapiens
  misc_RNA (1)...(19): siRNA sense strand
gaucaaagguaugguaaga

SEQ ID NO: 1726903 - RNA, 19 nt, Homo sapiens
  misc_RNA (1)...(19): siRNA sense strand
gaacucccauagagaaauu

SEQ ID NO: 1726904 - RNA, 19 nt, Homo sapiens
  misc_RNA (1)...(19): siRNA sense strand
gagcaaacccuuacaaaca

SEQ ID NO: 1726905 - RNA, 19 nt, Homo sapiens
  misc_RNA (1)...(19): siRNA sense strand
uaaggugacugcagagaaa

SEQ ID NO: 1726906 - RNA, 19 nt, Homo sapiens
  misc_RNA (1)...(19): siRNA sense strand
guaagagagugauucagaa

SEQ ID NO: 1726907 - RNA, 19 nt, Homo sapiens
  misc_RNA (1)...(19): siRNA sense strand
gaucugauguagaccaaga

SEQ ID NO: 1726908 - RNA, 19 nt, Homo sapiens
  misc_RNA (1)...(19): siRNA sense strand
guaacaagaugacauguac

SEQ ID NO: 1726909 - RNA, 19 nt, Homo sapiens
  misc_RNA (1)...(19): siRNA sense strand
gaaucacugucaaaucuga

SEQ ID NO: 1726910 - RNA, 19 nt, Homo sapiens
  misc_RNA (1)...(19): siRNA sense strand
uuaauggacuuacgaaaug

SEQ ID NO: 1726911 - RNA, 19 nt, Homo sapiens
  misc_RNA (1)...(19): siRNA sense strand
ucaaagguaugguaagaga

SEQ ID NO: 1726912 - RNA, 19 nt, Homo sapiens
  misc_RNA (1)...(19): siRNA sense strand
gugagaagcuggguaguga

SEQ ID NO: 1726913 - RNA, 19 nt, Homo sapiens
  misc_RNA (1)...(19): siRNA sense strand
gcaaacccuuacaaacauu

SEQ ID NO: 1726914 - RNA, 19 nt, Homo sapiens
  misc_RNA (1)...(19): siRNA sense strand
gaaauuagacggauguaac

SEQ ID NO: 1726915 - RNA, 19 nt, Homo sapiens
  misc_RNA (1)...(19): siRNA sense strand
aagaggaaauuguggauga

SEQ ID NO: 1726916 - RNA, 19 nt, Homo sapiens
  misc_RNA (1)...(19): siRNA sense strand
gguaagagagugauucaga

SEQ ID NO: 1726917 - RNA, 19 nt, Homo sapiens
  misc_RNA (1)...(19): siRNA sense strand
ggucaaagaguuaguggaa

SEQ ID NO: 1726918 - RNA, 19 nt, Homo sapiens
  misc_RNA (1)...(19): siRNA sense strand
gaaggacuacuuugaaauc

SEQ ID NO: 1726919 - RNA, 19 nt, Homo sapiens
  misc_RNA (1)...(19): siRNA sense strand
ugaucaagcucagcagaua

SEQ ID NO: 1726920 - RNA, 19 nt, Homo sapiens
  misc_RNA (1)...(19): siRNA sense strand
caggaaaucuuggacuuug

SEQ ID NO: 1726921 - RNA, 19 nt, Homo sapiens
  misc_RNA (1)...(19): siRNA sense strand
gaaauuaauggacuuacga

SEQ ID NO: 1726922 - RNA, 19 nt, Homo sapiens
  misc_RNA (1)...(19): siRNA sense strand
caaaucugauccaggaaau

SEQ ID NO: 1726923 - RNA, 19 nt, Homo sapiens
  misc_RNA (1)...(19): siRNA sense strand
ugaauauugucucuccuuu

SEQ ID NO: 1726924 - RNA, 19 nt, Homo sapiens
  misc_RNA (1)...(19): siRNA sense strand
aagaugagguagaagacua

SEQ ID NO: 1726925 - RNA, 19 nt, Homo sapiens
  misc_RNA (1)...(19): siRNA sense strand
uggaaucacugucaaaucu

SEQ ID NO: 1726926 - RNA, 19 nt, Homo sapiens
  misc_RNA (1)...(19): siRNA sense strand
ggaagagacccuagcauac

SEQ ID NO: 1726927 - RNA, 19 nt, Homo sapiens
  misc_RNA (1)...(19): siRNA sense strand
guuaguggaagcagaguua

SEQ ID NO: 1726928 - RNA, 19 nt, Homo sapiens
  misc_RNA (1)...(19): siRNA sense strand
cugaaggacuacuuugaaa

SEQ ID NO: 1726929 - RNA, 19 nt, Homo sapiens
  misc_RNA (1)...(19): siRNA sense strand
gaucaagcucagcagauaa

SEQ ID NO: 1726930 - RNA, 19 nt, Homo sapiens
  misc_RNA (1)...(19): siRNA sense strand
gugaaugcauguacuucuu

SEQ ID NO: 1726931 - RNA, 19 nt, Homo sapiens
  misc_RNA (1)...(19): siRNA sense strand
cuagcauacuugaauauug

SEQ ID NO: 1726932 - RNA, 19 nt, Homo sapiens
  misc_RNA (1)...(19): siRNA sense strand
gaagcuggguagugaaugc

SEQ ID NO: 1726933 - RNA, 19 nt, Homo sapiens
  misc_RNA (1)...(19): siRNA sense strand
gaagagacccuagcauacu

SEQ ID NO: 1726934 - RNA, 19 nt, Homo sapiens
  misc_RNA (1)...(19): siRNA sense strand
cagaguuauuugcccguua

SEQ ID NO: 1726935 - RNA, 19 nt, Homo sapiens
  misc_RNA (1)...(19): siRNA sense strand
agacggauguaacaagaug

SEQ ID NO: 1726936 - RNA, 19 nt, Homo sapiens
  misc_RNA (1)...(19): siRNA sense strand
ggaugaggcuaauaaaaga

SEQ ID NO: 1726937 - RNA, 19 nt, Homo sapiens
  misc_RNA (1)...(19): siRNA sense strand
ggacuuacgaaaugaauac

SEQ ID NO: 1726938 - RNA, 19 nt, Homo sapiens
  misc_RNA (1)...(19): siRNA sense strand
gaagagauggaaaguaagg

SEQ ID NO: 1726939 - RNA, 19 nt, Homo sapiens
  misc_RNA (1)...(19): siRNA sense strand
ggaaauuguggaugagaga

SEQ ID NO: 1726940 - RNA, 19 nt, Homo sapiens
  misc_RNA (1)...(19): siRNA sense strand
gggaagaugagguagaaga

SEQ ID NO: 1726941 - RNA, 19 nt, Homo sapiens
  misc_RNA (1)...(19): siRNA sense strand
guacuggcuguaugcaaua

SEQ ID NO: 1726942 - RNA, 19 nt, Homo sapiens
  misc_RNA (1)...(19): siRNA sense strand
uuagacggauguaacaaga

SEQ ID NO: 1726943 - RNA, 19 nt, Homo sapiens
  misc_RNA (1)...(19): siRNA sense strand
guaaggaguggcuagagaa

SEQ ID NO: 1726944 - RNA, 19 nt, Homo sapiens
  misc_RNA (1)...(19): siRNA sense strand
aggaagagacccuagcaua

SEQ ID NO: 1726945 - RNA, 19 nt, Homo sapiens
  misc_RNA (1)...(19): siRNA sense strand
agaaggcacuggaagagau

SEQ ID NO: 1726946 - RNA, 19 nt, Homo sapiens
  misc_RNA (1)...(19): siRNA sense strand
gaaauccagaucagagaug

SEQ ID NO: 1726947 - RNA, 19 nt, Homo sapiens
  misc_RNA (1)...(19): siRNA sense strand
gauguggaaucacugucaa

SEQ ID NO: 1726948 - RNA, 19 nt, Homo sapiens
  misc_RNA (1)...(19): siRNA sense strand
gacauguacuggcuguaug

SEQ ID NO: 1726949 - RNA, 19 nt, Homo sapiens
  misc_RNA (1)...(19): siRNA sense strand
uggaggagcugcuggaucu

SEQ ID NO: 1726950 - RNA, 19 nt, Homo sapiens
  misc_RNA (1)...(19): siRNA sense strand
gacccuagcauacuugaau

SEQ ID NO: 1726951 - RNA, 19 nt, Homo sapiens
  misc_RNA (1)...(19): siRNA sense strand
aggaguggcuagagaagaa

SEQ ID NO: 1726952 - RNA, 19 nt, Homo sapiens
  misc_RNA (1)...(19): siRNA sense strand
gcaagcggaugaggcuaau

SEQ ID NO: 1726953 - RNA, 19 nt, Homo sapiens
  misc_RNA (1)...(19): siRNA sense strand
ggugacugcagagaaauua

SEQ ID NO: 1726954 - RNA, 19 nt, Homo sapiens
  misc_RNA (1)...(19): siRNA sense strand
caacacagagcuagauuuu

SEQ ID NO: 1726955 - RNA, 19 nt, Homo sapiens
  misc_RNA (1)...(19): siRNA sense strand
gcucaagcuucucccaaca

SEQ ID NO: 1726956 - RNA, 19 nt, Homo sapiens
  misc_RNA (1)...(19): siRNA sense strand
gacgauauuugggaagaug

SEQ ID NO: 1726957 - RNA, 19 nt, Homo sapiens
  misc_RNA (1)...(19): siRNA sense strand
gagauggccagguucaaug

SEQ ID NO: 1726958 - RNA, 19 nt, Homo sapiens
  misc_RNA (1)...(19): siRNA sense strand
gcaaagccugucugaagga

SEQ ID NO: 1726959 - RNA, 19 nt, Homo sapiens
  misc_RNA (1)...(19): siRNA sense strand
gcaauauuucuguuggauu

SEQ ID NO: 1726960 - RNA, 19 nt, Homo sapiens
  misc_RNA (1)...(19): siRNA sense strand
uggcagaugugguguacug

SEQ ID NO: 1726961 - RNA, 19 nt, Homo sapiens
  misc_RNA (1)...(19): siRNA sense strand
ggauguugacgacgauauu

SEQ ID NO: 1726962 - RNA, 19 nt, Homo sapiens
  misc_RNA (1)...(19): siRNA sense strand
uaauggacuuacgaaauga

SEQ ID NO: 1726963 - RNA, 19 nt, Homo sapiens
  misc_RNA (1)...(19): siRNA sense strand
cagagaaauuaauggacuu

SEQ ID NO: 1726964 - RNA, 19 nt, Homo sapiens
  misc_RNA (1)...(19): siRNA sense strand
guaaggugacugcagagaa

SEQ ID NO: 1726965 - RNA, 19 nt, Homo sapiens
  misc_RNA (1)...(19): siRNA sense strand
ggaaaucuuggacuuugau

SEQ ID NO: 1726966 - RNA, 19 nt, Homo sapiens
  misc_RNA (1)...(19): siRNA sense strand
gauguugacgacgauauuu

SEQ ID NO: 1726967 - RNA, 19 nt, Homo sapiens
  misc_RNA (1)...(19): siRNA sense strand
aagcggaugaggcuaauaa

SEQ ID NO: 1726968 - RNA, 19 nt, Homo sapiens
  misc_RNA (1)...(19): siRNA sense strand
agaguuauuugcccguuau

SEQ ID NO: 1726969 - RNA, 19 nt, Homo sapiens
  misc_RNA (1)...(19): siRNA sense strand
aagccugucugaaggacua

SEQ ID NO: 1726970 - RNA, 19 nt, Homo sapiens
  misc_RNA (1)...(19): siRNA sense strand
gagaagcuggguagugaau

SEQ ID NO: 1726971 - RNA, 19 nt, Homo sapiens
  misc_RNA (1)...(19): siRNA sense strand
agagagcagugcaggaugu

SEQ ID NO: 1726972 - RNA, 19 nt, Homo sapiens
  misc_RNA (1)...(19): siRNA sense strand
ucaaaucugauccaggaaa

SEQ ID NO: 1726973 - RNA, 19 nt, Homo sapiens
  misc_RNA (1)...(19): siRNA sense strand
aagagacccuagcauacuu

SEQ ID NO: 1726974 - RNA, 19 nt, Homo sapiens
  misc_RNA (1)...(19): siRNA sense strand
ugauguagaccaagaggaa

SEQ ID NO: 1726975 - RNA, 19 nt, Homo sapiens
  misc_RNA (1)...(19): siRNA sense strand
guggaacucccauagagaa

SEQ ID NO: 1726976 - RNA, 19 nt, Homo sapiens
  misc_RNA (1)...(19): siRNA sense strand
gcacuggaagagauggaaa

SEQ ID NO: 1726977 - RNA, 19 nt, Homo sapiens
  misc_RNA (1)...(19): siRNA sense strand
gauggcagaugugguguac

SEQ ID NO: 1726978 - RNA, 19 nt, Homo sapiens
  misc_RNA (1)...(19): siRNA sense strand
caacugcccagaaccaaag

SEQ ID NO: 1726979 - RNA, 19 nt, Homo sapiens
  misc_RNA (1)...(19): siRNA sense strand
cuggcuguaugcaauauuu

SEQ ID NO: 1726980 - RNA, 19 nt, Homo sapiens
  misc_RNA (1)...(19): siRNA sense strand
uguacuggcuguaugcaau

SEQ ID NO: 1726981 - RNA, 19 nt, Homo sapiens
  misc_RNA (1)...(19): siRNA sense strand
ggcuagagaagaacucaaa

SEQ ID NO: 1726982 - RNA, 19 nt, Homo sapiens
  misc_RNA (1)...(19): siRNA sense strand
aguaaggaguggcuagaga

SEQ ID NO: 1726983 - RNA, 19 nt, Homo sapiens
  misc_RNA (1)...(19): siRNA sense strand
ccaacacagagcuagauuu

SEQ ID NO: 1726984 - RNA, 19 nt, Homo sapiens
  misc_RNA (1)...(19): siRNA sense strand
acacagagcuagauuuugg

SEQ ID NO: 1726985 - RNA, 19 nt, Homo sapiens
  misc_RNA (1)...(19): siRNA sense strand
cugcaaagccugucugaag

SEQ ID NO: 1726986 - RNA, 19 nt, Homo sapiens
  misc_RNA (1)...(19): siRNA sense strand
uagagcaaacccuuacaaa

SEQ ID NO: 1726987 - RNA, 19 nt, Homo sapiens
  misc_RNA (1)...(19): siRNA sense strand
ggauguggaaucacuguca

SEQ ID NO: 1726988 - RNA, 19 nt, Homo sapiens
  misc_RNA (1)...(19): siRNA sense strand
ccaggaaaucuuggacuuu

SEQ ID NO: 1726989 - RNA, 19 nt, Homo sapiens
  misc_RNA (1)...(19): siRNA sense strand
caaagagcugcccauguug

SEQ ID NO: 1726990 - RNA, 19 nt, Homo sapiens
  misc_RNA (1)...(19): siRNA sense strand
gaaggcacuggaagagaug

SEQ ID NO: 1726991 - RNA, 19 nt, Homo sapiens
  misc_RNA (1)...(19): siRNA sense strand
guagugaaugcauguacuu

SEQ ID NO: 1726992 - RNA, 19 nt, Homo sapiens
  misc_RNA (1)...(19): siRNA sense strand
cauggguucucucucuaga

SEQ ID NO: 1726993 - RNA, 19 nt, Homo sapiens
  misc_RNA (1)...(19): siRNA sense strand
ucaagcuucucccaacaca

SEQ ID NO: 1726994 - RNA, 19 nt, Homo sapiens
  misc_RNA (1)...(19): siRNA sense strand
ugacauguacuggcuguau

SEQ ID NO: 1726995 - RNA, 19 nt, Homo sapiens
  misc_RNA (1)...(19): siRNA sense strand
uguaacaagaugacaugua

SEQ ID NO: 1726996 - RNA, 19 nt, Homo sapiens
  misc_RNA (1)...(19): siRNA sense strand
cuagagaagaacucaaaga

SEQ ID NO: 1726997 - RNA, 19 nt, Homo sapiens
  misc_RNA (1)...(19): siRNA sense strand
gaggagcugcuggaucuga

SEQ ID NO: 1726998 - RNA, 19 nt, Homo sapiens
  misc_RNA (1)...(19): siRNA sense strand
aguggaagcagaguuauuu

SEQ ID NO: 1726999 - RNA, 19 nt, Homo sapiens
  misc_RNA (1)...(19): siRNA sense strand
ucaaagagcugcccauguu

SEQ ID NO: 1727000 - RNA, 19 nt, Homo sapiens
  misc_RNA (1)...(19): siRNA sense strand
gaucagagauggccagguu

SEQ ID NO: 1727001 - RNA, 19 nt, Homo sapiens
  misc_RNA (1)...(19): siRNA sense strand
uggaagagauggaaaguaa

SEQ ID NO: 1727002 - RNA, 19 nt, Homo sapiens
  misc_RNA (1)...(19): siRNA sense strand
ccacagaauuucaagauau

SEQ ID NO: 1727003 - RNA, 19 nt, Homo sapiens
  misc_RNA (1)...(19): siRNA sense strand
gaacucccauagagaaauu

SEQ ID NO: 1727004 - RNA, 19 nt, Homo sapiens
  misc_RNA (1)...(19): siRNA sense strand
gaucaaagguaugguaaga

SEQ ID NO: 1727005 - RNA, 19 nt, Homo sapiens
  misc_RNA (1)...(19): siRNA sense strand
gagcaaacccuuacaaaca

SEQ ID NO: 1727006 - RNA, 19 nt, Homo sapiens
  misc_RNA (1)...(19): siRNA sense strand
uaaggugacugcagagaaa

SEQ ID NO: 1727007 - RNA, 19 nt, Homo sapiens
  misc_RNA (1)...(19): siRNA sense strand
gagaaaccaggaucuauuu

SEQ ID NO: 1727008 - RNA, 19 nt, Homo sapiens
  misc_RNA (1)...(19): siRNA sense strand
guaagagagugauucagaa

SEQ ID NO: 1727009 - RNA, 19 nt, Homo sapiens
  misc_RNA (1)...(19): siRNA sense strand
ggagaaaccaggaucuauu

SEQ ID NO: 1727010 - RNA, 19 nt, Homo sapiens
  misc_RNA (1)...(19): siRNA sense strand
gaucugauguagaccaaga

SEQ ID NO: 1727011 - RNA, 19 nt, Homo sapiens
  misc_RNA (1)...(19): siRNA sense strand
guaacaagaugacauguac

SEQ ID NO: 1727012 - RNA, 19 nt, Homo sapiens
  misc_RNA (1)...(19): siRNA sense strand
gaaucacugucaaaucuga

SEQ ID NO: 1727013 - RNA, 19 nt, Homo sapiens
  misc_RNA (1)...(19): siRNA sense strand
uuaauggacuuacgaaaug

SEQ ID NO: 1727014 - RNA, 19 nt, Homo sapiens
  misc_RNA (1)...(19): siRNA sense strand
ucaaagguaugguaagaga

SEQ ID NO: 1727015 - RNA, 19 nt, Homo sapiens
  misc_RNA (1)...(19): siRNA sense strand
cgauggagaugaauuuaga

SEQ ID NO: 1727016 - RNA, 19 nt, Homo sapiens
  misc_RNA (1)...(19): siRNA sense strand
gugagaagcuggguaguga

SEQ ID NO: 1727017 - RNA, 19 nt, Homo sapiens
  misc_RNA (1)...(19): siRNA sense strand
gcaaacccuuacaaacauu

SEQ ID NO: 1727018 - RNA, 19 nt, Homo sapiens
  misc_RNA (1)...(19): siRNA sense strand
gaaauuagacggauguaac

SEQ ID NO: 1727019 - RNA, 19 nt, Homo sapiens
  misc_RNA (1)...(19): siRNA sense strand
gcacuuagacaaccuaugg

SEQ ID NO: 1727020 - RNA, 19 nt, Homo sapiens
  misc_RNA (1)...(19): siRNA sense strand
aagaggaaauuguggauga

SEQ ID NO: 1727021 - RNA, 19 nt, Homo sapiens
  misc_RNA (1)...(19): siRNA sense strand
gguaagagagugauucaga

SEQ ID NO: 1727022 - RNA, 19 nt, Homo sapiens
  misc_RNA (1)...(19): siRNA sense strand
gagaagcucaggaggauga

SEQ ID NO: 1727023 - RNA, 19 nt, Homo sapiens
  misc_RNA (1)...(19): siRNA sense strand
ggucaaagaguuaguggaa

SEQ ID NO: 1727024 - RNA, 19 nt, Homo sapiens
  misc_RNA (1)...(19): siRNA sense strand
gaaggacuacuuugaaauc

SEQ ID NO: 1727025 - RNA, 19 nt, Homo sapiens
  misc_RNA (1)...(19): siRNA sense strand
ugaucaagcucagcagaua

SEQ ID NO: 1727026 - RNA, 19 nt, Homo sapiens
  misc_RNA (1)...(19): siRNA sense strand
gccacagaauuucaagaua

SEQ ID NO: 1727027 - RNA, 19 nt, Homo sapiens
  misc_RNA (1)...(19): siRNA sense strand
gaaauuaauggacuuacga

SEQ ID NO: 1727028 - RNA, 19 nt, Homo sapiens
  misc_RNA (1)...(19): siRNA sense strand
caggaaaucuuggacuuug

SEQ ID NO: 1727029 - RNA, 19 nt, Homo sapiens
  misc_RNA (1)...(19): siRNA sense strand
gaugcaauuucuuaaggaa

SEQ ID NO: 1727030 - RNA, 19 nt, Homo sapiens
  misc_RNA (1)...(19): siRNA sense strand
ugaauauugucucuccuuu

SEQ ID NO: 1727031 - RNA, 19 nt, Homo sapiens
  misc_RNA (1)...(19): siRNA sense strand
caaaucugauccaggaaau

SEQ ID NO: 1727032 - RNA, 19 nt, Homo sapiens
  misc_RNA (1)...(19): siRNA sense strand
aagaugagguagaagacua

SEQ ID NO: 1727033 - RNA, 19 nt, Homo sapiens
  misc_RNA (1)...(19): siRNA sense strand
ggaugcaauuucuuaagga

SEQ ID NO: 1727034 - RNA, 19 nt, Homo sapiens
  misc_RNA (1)...(19): siRNA sense strand
aaaccaggaucuauuugga

SEQ ID NO: 1727035 - RNA, 19 nt, Homo sapiens
  misc_RNA (1)...(19): siRNA sense strand
guuaguggaagcagaguua

SEQ ID NO: 1727036 - RNA, 19 nt, Homo sapiens
  misc_RNA (1)...(19): siRNA sense strand
uggaaucacugucaaaucu

SEQ ID NO: 1727037 - RNA, 19 nt, Homo sapiens
  misc_RNA (1)...(19): siRNA sense strand
ggaagagacccuagcauac

SEQ ID NO: 1727038 - RNA, 19 nt, Homo sapiens
  misc_RNA (1)...(19): siRNA sense strand
cugaaggacuacuuugaaa

SEQ ID NO: 1727039 - RNA, 19 nt, Homo sapiens
  misc_RNA (1)...(19): siRNA sense strand
cuagcauacuugaauauug

SEQ ID NO: 1727040 - RNA, 19 nt, Homo sapiens
  misc_RNA (1)...(19): siRNA sense strand
gugaaugcauguacuucuu

SEQ ID NO: 1727041 - RNA, 19 nt, Homo sapiens
  misc_RNA (1)...(19): siRNA sense strand
gaucaagcucagcagauaa

SEQ ID NO: 1727042 - RNA, 19 nt, Homo sapiens
  misc_RNA (1)...(19): siRNA sense strand
gaagagacccuagcauacu

SEQ ID NO: 1727043 - RNA, 19 nt, Homo sapiens
  misc_RNA (1)...(19): siRNA sense strand
gaagcuggguagugaaugc

SEQ ID NO: 1727044 - RNA, 19 nt, Homo sapiens
  misc_RNA (1)...(19): siRNA sense strand
ggagaugaauuuagaaaag

SEQ ID NO: 1727045 - RNA, 19 nt, Homo sapiens
  misc_RNA (1)...(19): siRNA sense strand
agacggauguaacaagaug

SEQ ID NO: 1727046 - RNA, 19 nt, Homo sapiens
  misc_RNA (1)...(19): siRNA sense strand
ggaugaggcuaauaaaaga

SEQ ID NO: 1727047 - RNA, 19 nt, Homo sapiens
  misc_RNA (1)...(19): siRNA sense strand
cagaguuauuugcccguua

SEQ ID NO: 1727048 - RNA, 19 nt, Homo sapiens
  misc_RNA (1)...(19): siRNA sense strand
ggacuuacgaaaugaauac

SEQ ID NO: 1727049 - RNA, 19 nt, Homo sapiens
  misc_RNA (1)...(19): siRNA sense strand
gaagagauggaaaguaagg

SEQ ID NO: 1727050 - RNA, 19 nt, Homo sapiens
  misc_RNA (1)...(19): siRNA sense strand
aggaagagacccuagcaua

SEQ ID NO: 1727051 - RNA, 19 nt, Homo sapiens
  misc_RNA (1)...(19): siRNA sense strand
gggaagaugagguagaaga

SEQ ID NO: 1727052 - RNA, 19 nt, Homo sapiens
  misc_RNA (1)...(19): siRNA sense strand
guacuggcuguaugcaaua

SEQ ID NO: 1727053 - RNA, 19 nt, Homo sapiens
  misc_RNA (1)...(19): siRNA sense strand
uuagacggauguaacaaga

SEQ ID NO: 1727054 - RNA, 19 nt, Homo sapiens
  misc_RNA (1)...(19): siRNA sense strand
guaaggaguggcuagagaa

SEQ ID NO: 1727055 - RNA, 19 nt, Homo sapiens
  misc_RNA (1)...(19): siRNA sense strand
agaaggcacuggaagagau

SEQ ID NO: 1727056 - RNA, 19 nt, Homo sapiens
  misc_RNA (1)...(19): siRNA sense strand
caggaucuauuuggauuug

SEQ ID NO: 1727057 - RNA, 19 nt, Homo sapiens
  misc_RNA (1)...(19): siRNA sense strand
gaaauccagaucagagaug

SEQ ID NO: 1727058 - RNA, 19 nt, Homo sapiens
  misc_RNA (1)...(19): siRNA sense strand
ggaaauuguggaugagaga

SEQ ID NO: 1727059 - RNA, 19 nt, Homo sapiens
  misc_RNA (1)...(19): siRNA sense strand
gaaaccaggaucuauuugg

SEQ ID NO: 1727060 - RNA, 19 nt, Homo sapiens
  misc_RNA (1)...(19): siRNA sense strand
gacauguacuggcuguaug

SEQ ID NO: 1727061 - RNA, 19 nt, Homo sapiens
  misc_RNA (1)...(19): siRNA sense strand
gauguggaaucacugucaa

SEQ ID NO: 1727062 - RNA, 19 nt, Homo sapiens
  misc_RNA (1)...(19): siRNA sense strand
uggaggagcugcuggaucu

SEQ ID NO: 1727063 - RNA, 19 nt, Homo sapiens
  misc_RNA (1)...(19): siRNA sense strand
gacccuagcauacuugaau

SEQ ID NO: 1727064 - RNA, 19 nt, Homo sapiens
  misc_RNA (1)...(19): siRNA sense strand
aggaguggcuagagaagaa

SEQ ID NO: 1727065 - RNA, 19 nt, Homo sapiens
  misc_RNA (1)...(19): siRNA sense strand
gcaagcggaugaggcuaau

SEQ ID NO: 1727066 - RNA, 19 nt, Homo sapiens
  misc_RNA (1)...(19): siRNA sense strand
ggugacugcagagaaauua

SEQ ID NO: 1727067 - RNA, 19 nt, Homo sapiens
  misc_RNA (1)...(19): siRNA sense strand
caacacagagcuagauuuu

SEQ ID NO: 1727068 - RNA, 19 nt, Homo sapiens
  misc_RNA (1)...(19): siRNA sense strand
gcucaagcuucucccaaca

SEQ ID NO: 1727069 - RNA, 19 nt, Homo sapiens
  misc_RNA (1)...(19): siRNA sense strand
gacgauauuugggaagaug

SEQ ID NO: 1727070 - RNA, 19 nt, Homo sapiens
  misc_RNA (1)...(19): siRNA sense strand
gagauggccagguucaaug

SEQ ID NO: 1727071 - RNA, 19 nt, Homo sapiens
  misc_RNA (1)...(19): siRNA sense strand
gcaaagccugucugaagga

SEQ ID NO: 1727072 - RNA, 19 nt, Homo sapiens
  misc_RNA (1)...(19): siRNA sense strand
gcaauauuucuguuggauu

SEQ ID NO: 1727073 - RNA, 19 nt, Homo sapiens
  misc_RNA (1)...(19): siRNA sense strand
uauuuacgauggagaugaa

SEQ ID NO: 1727074 - RNA, 19 nt, Homo sapiens
  misc_RNA (1)...(19): siRNA sense strand
ggauguugacgacgauauu

SEQ ID NO: 1727075 - RNA, 19 nt, Homo sapiens
  misc_RNA (1)...(19): siRNA sense strand
uaauggacuuacgaaauga

SEQ ID NO: 1727076 - RNA, 19 nt, Homo sapiens
  misc_RNA (1)...(19): siRNA sense strand
cagagaaauuaauggacuu

SEQ ID NO: 1727077 - RNA, 19 nt, Homo sapiens
  misc_RNA (1)...(19): siRNA sense strand
guaaggugacugcagagaa

SEQ ID NO: 1727078 - RNA, 19 nt, Homo sapiens
  misc_RNA (1)...(19): siRNA sense strand
uggcagaugugguguacug

SEQ ID NO: 1727079 - RNA, 19 nt, Homo sapiens
  misc_RNA (1)...(19): siRNA sense strand
ggaaaucuuggacuuugau

SEQ ID NO: 1727080 - RNA, 19 nt, Homo sapiens
  misc_RNA (1)...(19): siRNA sense strand
gauguugacgacgauauuu

SEQ ID NO: 1727081 - RNA, 19 nt, Homo sapiens
  misc_RNA (1)...(19): siRNA sense strand
aagcggaugaggcuaauaa

SEQ ID NO: 1727082 - RNA, 19 nt, Homo sapiens
  misc_RNA (1)...(19): siRNA sense strand
agaguuauuugcccguuau

SEQ ID NO: 1727083 - RNA, 19 nt, Homo sapiens
  misc_RNA (1)...(19): siRNA sense strand
aagccugucugaaggacua

SEQ ID NO: 1727084 - RNA, 19 nt, Homo sapiens
  misc_RNA (1)...(19): siRNA sense strand
gagaagcuggguagugaau

SEQ ID NO: 1727085 - RNA, 19 nt, Homo sapiens
  misc_RNA (1)...(19): siRNA sense strand
agagagcagugcaggaugu

SEQ ID NO: 1727086 - RNA, 19 nt, Homo sapiens
  misc_RNA (1)...(19): siRNA sense strand
aagagacccuagcauacuu

SEQ ID NO: 1727087 - RNA, 19 nt, Homo sapiens
  misc_RNA (1)...(19): siRNA sense strand
ucaaaucugauccaggaaa

SEQ ID NO: 1727088 - RNA, 19 nt, Homo sapiens
  misc_RNA (1)...(19): siRNA sense strand
ugauguagaccaagaggaa

SEQ ID NO: 1727089 - RNA, 19 nt, Homo sapiens
  misc_RNA (1)...(19): siRNA sense strand
uggauuugccacagaauuu

SEQ ID NO: 1727090 - RNA, 19 nt, Homo sapiens
  misc_RNA (1)...(19): siRNA sense strand
guggaacucccauagagaa

SEQ ID NO: 1727091 - RNA, 19 nt, Homo sapiens
  misc_RNA (1)...(19): siRNA sense strand
gcacuggaagagauggaaa

SEQ ID NO: 1727092 - RNA, 19 nt, Homo sapiens
  misc_RNA (1)...(19): siRNA sense strand
gauggcagaugugguguac

SEQ ID NO: 1727093 - RNA, 19 nt, Homo sapiens
  misc_RNA (1)...(19): siRNA sense strand
uuacgauggagaugaauuu

SEQ ID NO: 1727094 - RNA, 19 nt, Homo sapiens
  misc_RNA (1)...(19): siRNA sense strand
aguaaggaguggcuagaga

SEQ ID NO: 1727095 - RNA, 19 nt, Homo sapiens
  misc_RNA (1)...(19): siRNA sense strand
cuggcuguaugcaauauuu

SEQ ID NO: 1727096 - RNA, 19 nt, Homo sapiens
  misc_RNA (1)...(19): siRNA sense strand
uguacuggcuguaugcaau

SEQ ID NO: 1727097 - RNA, 19 nt, Homo sapiens
  misc_RNA (1)...(19): siRNA sense strand
ucgagaagcucaggaggau

SEQ ID NO: 1727098 - RNA, 19 nt, Homo sapiens
  misc_RNA (1)...(19): siRNA sense strand
ggcuagagaagaacucaaa

SEQ ID NO: 1727099 - RNA, 19 nt, Homo sapiens
  misc_RNA (1)...(19): siRNA sense strand
ucaaagagcugcccauguu

SEQ ID NO: 1727100 - RNA, 19 nt, Homo sapiens
  misc_RNA (1)...(19): siRNA sense strand
gaucagagauggccagguu

SEQ ID NO: 1727101 - RNA, 19 nt, Homo sapiens
  misc_RNA (1)...(19): siRNA sense strand
uggaagagauggaaaguaa

SEQ ID NO: 1727102 - RNA, 19 nt, Homo sapiens
  misc_RNA (1)...(19): siRNA sense strand
ccacagaauuucaagauau

SEQ ID NO: 1727103 - RNA, 19 nt, Homo sapiens
  misc_RNA (1)...(19): siRNA sense strand
gaacucccauagagaaauu

SEQ ID NO: 1727104 - RNA, 19 nt, Homo sapiens
  misc_RNA (1)...(19): siRNA sense strand
gaucaaagguaugguaaga

SEQ ID NO: 1727105 - RNA, 19 nt, Homo sapiens
  misc_RNA (1)...(19): siRNA sense strand
gagcaaacccuuacaaaca

SEQ ID NO: 1727106 - RNA, 19 nt, Homo sapiens
  misc_RNA (1)...(19): siRNA sense strand
uaaggugacugcagagaaa

SEQ ID NO: 1727107 - RNA, 19 nt, Homo sapiens
  misc_RNA (1)...(19): siRNA sense strand
gagaaaccaggaucuauuu

SEQ ID NO: 1727108 - RNA, 19 nt, Homo sapiens
  misc_RNA (1)...(19): siRNA sense strand
guaagagagugauucagaa

SEQ ID NO: 1727109 - RNA, 19 nt, Homo sapiens
  misc_RNA (1)...(19): siRNA sense strand
ggagaaaccaggaucuauu

SEQ ID NO: 1727110 - RNA, 19 nt, Homo sapiens
  misc_RNA (1)...(19): siRNA sense strand
gaucugauguagaccaaga

SEQ ID NO: 1727111 - RNA, 19 nt, Homo sapiens
  misc_RNA (1)...(19): siRNA sense strand
guaacaagaugacauguac

SEQ ID NO: 1727112 - RNA, 19 nt, Homo sapiens
  misc_RNA (1)...(19): siRNA sense strand
gaaucacugucaaaucuga

SEQ ID NO: 1727113 - RNA, 19 nt, Homo sapiens
  misc_RNA (1)...(19): siRNA sense strand
uuaauggacuuacgaaaug

SEQ ID NO: 1727114 - RNA, 19 nt, Homo sapiens
  misc_RNA (1)...(19): siRNA sense strand
ucaaagguaugguaagaga

SEQ ID NO: 1727115 - RNA, 19 nt, Homo sapiens
  misc_RNA (1)...(19): siRNA sense strand
cgauggagaugaauuuaga

SEQ ID NO: 1727116 - RNA, 19 nt, Homo sapiens
  misc_RNA (1)...(19): siRNA sense strand
gugagaagcuggguaguga

SEQ ID NO: 1727117 - RNA, 19 nt, Homo sapiens
  misc_RNA (1)...(19): siRNA sense strand
gcaaacccuuacaaacauu

SEQ ID NO: 1727118 - RNA, 19 nt, Homo sapiens
  misc_RNA (1)...(19): siRNA sense strand
gaaauuagacggauguaac

SEQ ID NO: 1727119 - RNA, 19 nt, Homo sapiens
  misc_RNA (1)...(19): siRNA sense strand
gcacuuagacaaccuaugg

SEQ ID NO: 1727120 - RNA, 19 nt, Homo sapiens
  misc_RNA (1)...(19): siRNA sense strand
aagaggaaauuguggauga

SEQ ID NO: 1727121 - RNA, 19 nt, Homo sapiens
  misc_RNA (1)...(19): siRNA sense strand
gguaagagagugauucaga

SEQ ID NO: 1727122 - RNA, 19 nt, Homo sapiens
  misc_RNA (1)...(19): siRNA sense strand
gagaagcucaggaggauga

SEQ ID NO: 1727123 - RNA, 19 nt, Homo sapiens
  misc_RNA (1)...(19): siRNA sense strand
ggucaaagaguuaguggaa

SEQ ID NO: 1727124 - RNA, 19 nt, Homo sapiens
  misc_RNA (1)...(19): siRNA sense strand
gaaggacuacuuugaaauc

SEQ ID NO: 1727125 - RNA, 19 nt, Homo sapiens
  misc_RNA (1)...(19): siRNA sense strand
ugaucaagcucagcagaua

SEQ ID NO: 1727126 - RNA, 19 nt, Homo sapiens
  misc_RNA (1)...(19): siRNA sense strand
gccacagaauuucaagaua

SEQ ID NO: 1727127 - RNA, 19 nt, Homo sapiens
  misc_RNA (1)...(19): siRNA sense strand
gaaauuaauggacuuacga

SEQ ID NO: 1727128 - RNA, 19 nt, Homo sapiens
  misc_RNA (1)...(19): siRNA sense strand
caggaaaucuuggacuuug

SEQ ID NO: 1727129 - RNA, 19 nt, Homo sapiens
  misc_RNA (1)...(19): siRNA sense strand
gaugcaauuucuuaaggaa

SEQ ID NO: 1727130 - RNA, 19 nt, Homo sapiens
  misc_RNA (1)...(19): siRNA sense strand
ugaauauugucucuccuuu

SEQ ID NO: 1727131 - RNA, 19 nt, Homo sapiens
  misc_RNA (1)...(19): siRNA sense strand
caaaucugauccaggaaau

SEQ ID NO: 1727132 - RNA, 19 nt, Homo sapiens
  misc_RNA (1)...(19): siRNA sense strand
aagaugagguagaagacua

SEQ ID NO: 1727133 - RNA, 19 nt, Homo sapiens
  misc_RNA (1)...(19): siRNA sense strand
ggaugcaauuucuuaagga

SEQ ID NO: 1727134 - RNA, 19 nt, Homo sapiens
  misc_RNA (1)...(19): siRNA sense strand
aaaccaggaucuauuugga

SEQ ID NO: 1727135 - RNA, 19 nt, Homo sapiens
  misc_RNA (1)...(19): siRNA sense strand
guuaguggaagcagaguua

SEQ ID NO: 1727136 - RNA, 19 nt, Homo sapiens
  misc_RNA (1)...(19): siRNA sense strand
uggaaucacugucaaaucu

SEQ ID NO: 1727137 - RNA, 19 nt, Homo sapiens
  misc_RNA (1)...(19): siRNA sense strand
ggaagagacccuagcauac

SEQ ID NO: 1727138 - RNA, 19 nt, Homo sapiens
  misc_RNA (1)...(19): siRNA sense strand
cugaaggacuacuuugaaa

SEQ ID NO: 1727139 - RNA, 19 nt, Homo sapiens
  misc_RNA (1)...(19): siRNA sense strand
cuagcauacuugaauauug

SEQ ID NO: 1727140 - RNA, 19 nt, Homo sapiens
  misc_RNA (1)...(19): siRNA sense strand
gugaaugcauguacuucuu

SEQ ID NO: 1727141 - RNA, 19 nt, Homo sapiens
  misc_RNA (1)...(19): siRNA sense strand
gaucaagcucagcagauaa

SEQ ID NO: 1727142 - RNA, 19 nt, Homo sapiens
  misc_RNA (1)...(19): siRNA sense strand
gaagagacccuagcauacu

SEQ ID NO: 1727143 - RNA, 19 nt, Homo sapiens
  misc_RNA (1)...(19): siRNA sense strand
gaagcuggguagugaaugc

SEQ ID NO: 1727144 - RNA, 19 nt, Homo sapiens
  misc_RNA (1)...(19): siRNA sense strand
ggagaugaauuuagaaaag

SEQ ID NO: 1727145 - RNA, 19 nt, Homo sapiens
  misc_RNA (1)...(19): siRNA sense strand
agacggauguaacaagaug

SEQ ID NO: 1727146 - RNA, 19 nt, Homo sapiens
  misc_RNA (1)...(19): siRNA sense strand
ggaugaggcuaauaaaaga

SEQ ID NO: 1727147 - RNA, 19 nt, Homo sapiens
  misc_RNA (1)...(19): siRNA sense strand
cagaguuauuugcccguua

SEQ ID NO: 1727148 - RNA, 19 nt, Homo sapiens
  misc_RNA (1)...(19): siRNA sense strand
ggacuuacgaaaugaauac

SEQ ID NO: 1727149 - RNA, 19 nt, Homo sapiens
  misc_RNA (1)...(19): siRNA sense strand
gaagagauggaaaguaagg

SEQ ID NO: 1727150 - RNA, 19 nt, Homo sapiens
  misc_RNA (1)...(19): siRNA sense strand
aggaagagacccuagcaua

SEQ ID NO: 1727151 - RNA, 19 nt, Homo sapiens
  misc_RNA (1)...(19): siRNA sense strand
gggaagaugagguagaaga

SEQ ID NO: 1727152 - RNA, 19 nt, Homo sapiens
  misc_RNA (1)...(19): siRNA sense strand
guacuggcuguaugcaaua

SEQ ID NO: 1727153 - RNA, 19 nt, Homo sapiens
  misc_RNA (1)...(19): siRNA sense strand
uuagacggauguaacaaga

SEQ ID NO: 1727154 - RNA, 19 nt, Homo sapiens
  misc_RNA (1)...(19): siRNA sense strand
guaaggaguggcuagagaa

SEQ ID NO: 1727155 - RNA, 19 nt, Homo sapiens
  misc_RNA (1)...(19): siRNA sense strand
agaaggcacuggaagagau

SEQ ID NO: 1727156 - RNA, 19 nt, Homo sapiens
  misc_RNA (1)...(19): siRNA sense strand
caggaucuauuuggauuug

SEQ ID NO: 1727157 - RNA, 19 nt, Homo sapiens
  misc_RNA (1)...(19): siRNA sense strand
gaaauccagaucagagaug

SEQ ID NO: 1727158 - RNA, 19 nt, Homo sapiens
  misc_RNA (1)...(19): siRNA sense strand
ggaaauuguggaugagaga

SEQ ID NO: 1727159 - RNA, 19 nt, Homo sapiens
  misc_RNA (1)...(19): siRNA sense strand
gaaaccaggaucuauuugg

SEQ ID NO: 1727160 - RNA, 19 nt, Homo sapiens
  misc_RNA (1)...(19): siRNA sense strand
gacauguacuggcuguaug

SEQ ID NO: 1727161 - RNA, 19 nt, Homo sapiens
  misc_RNA (1)...(19): siRNA sense strand
gauguggaaucacugucaa

SEQ ID NO: 1727162 - RNA, 19 nt, Homo sapiens
  misc_RNA (1)...(19): siRNA sense strand
uggaggagcugcuggaucu

SEQ ID NO: 1727163 - RNA, 19 nt, Homo sapiens
  misc_RNA (1)...(19): siRNA sense strand
gacccuagcauacuugaau

SEQ ID NO: 1727164 - RNA, 19 nt, Homo sapiens
  misc_RNA (1)...(19): siRNA sense strand
aggaguggcuagagaagaa

SEQ ID NO: 1727165 - RNA, 19 nt, Homo sapiens
  misc_RNA (1)...(19): siRNA sense strand
gcaagcggaugaggcuaau

SEQ ID NO: 1727166 - RNA, 19 nt, Homo sapiens
  misc_RNA (1)...(19): siRNA sense strand
ggugacugcagagaaauua

SEQ ID NO: 1727167 - RNA, 19 nt, Homo sapiens
  misc_RNA (1)...(19): siRNA sense strand
caacacagagcuagauuuu

SEQ ID NO: 1727168 - RNA, 19 nt, Homo sapiens
  misc_RNA (1)...(19): siRNA sense strand
gcucaagcuucucccaaca

SEQ ID NO: 1727169 - RNA, 19 nt, Homo sapiens
  misc_RNA (1)...(19): siRNA sense strand
gacgauauuugggaagaug

SEQ ID NO: 1727170 - RNA, 19 nt, Homo sapiens
  misc_RNA (1)...(19): siRNA sense strand
gagauggccagguucaaug

SEQ ID NO: 1727171 - RNA, 19 nt, Homo sapiens
  misc_RNA (1)...(19): siRNA sense strand
gcaaagccugucugaagga

SEQ ID NO: 1727172 - RNA, 19 nt, Homo sapiens
  misc_RNA (1)...(19): siRNA sense strand
gcaauauuucuguuggauu

SEQ ID NO: 1727173 - RNA, 19 nt, Homo sapiens
  misc_RNA (1)...(19): siRNA sense strand
uauuuacgauggagaugaa

SEQ ID NO: 1727174 - RNA, 19 nt, Homo sapiens
  misc_RNA (1)...(19): siRNA sense strand
ggauguugacgacgauauu

SEQ ID NO: 1727175 - RNA, 19 nt, Homo sapiens
  misc_RNA (1)...(19): siRNA sense strand
uaauggacuuacgaaauga

SEQ ID NO: 1727176 - RNA, 19 nt, Homo sapiens
  misc_RNA (1)...(19): siRNA sense strand
cagagaaauuaauggacuu

SEQ ID NO: 1727177 - RNA, 19 nt, Homo sapiens
  misc_RNA (1)...(19): siRNA sense strand
guaaggugacugcagagaa

SEQ ID NO: 1727178 - RNA, 19 nt, Homo sapiens
  misc_RNA (1)...(19): siRNA sense strand
uggcagaugugguguacug

SEQ ID NO: 1727179 - RNA, 19 nt, Homo sapiens
  misc_RNA (1)...(19): siRNA sense strand
ggaaaucuuggacuuugau

SEQ ID NO: 1727180 - RNA, 19 nt, Homo sapiens
  misc_RNA (1)...(19): siRNA sense strand
gauguugacgacgauauuu

SEQ ID NO: 1727181 - RNA, 19 nt, Homo sapiens
  misc_RNA (1)...(19): siRNA sense strand
aagcggaugaggcuaauaa

SEQ ID NO: 1727182 - RNA, 19 nt, Homo sapiens
  misc_RNA (1)...(19): siRNA sense strand
agaguuauuugcccguuau

SEQ ID NO: 1727183 - RNA, 19 nt, Homo sapiens
  misc_RNA (1)...(19): siRNA sense strand
aagccugucugaaggacua

SEQ ID NO: 1727184 - RNA, 19 nt, Homo sapiens
  misc_RNA (1)...(19): siRNA sense strand
gagaagcuggguagugaau

SEQ ID NO: 1727185 - RNA, 19 nt, Homo sapiens
  misc_RNA (1)...(19): siRNA sense strand
agagagcagugcaggaugu

SEQ ID NO: 1727186 - RNA, 19 nt, Homo sapiens
  misc_RNA (1)...(19): siRNA sense strand
aagagacccuagcauacuu

SEQ ID NO: 1727187 - RNA, 19 nt, Homo sapiens
  misc_RNA (1)...(19): siRNA sense strand
ucaaaucugauccaggaaa

SEQ ID NO: 1727188 - RNA, 19 nt, Homo sapiens
  misc_RNA (1)...(19): siRNA sense strand
ugauguagaccaagaggaa

SEQ ID NO: 1727189 - RNA, 19 nt, Homo sapiens
  misc_RNA (1)...(19): siRNA sense strand
uggauuugccacagaauuu

SEQ ID NO: 1727190 - RNA, 19 nt, Homo sapiens
  misc_RNA (1)...(19): siRNA sense strand
guggaacucccauagagaa

SEQ ID NO: 1727191 - RNA, 19 nt, Homo sapiens
  misc_RNA (1)...(19): siRNA sense strand
gcacuggaagagauggaaa

SEQ ID NO: 1727192 - RNA, 19 nt, Homo sapiens
  misc_RNA (1)...(19): siRNA sense strand
gauggcagaugugguguac

SEQ ID NO: 1727193 - RNA, 19 nt, Homo sapiens
  misc_RNA (1)...(19): siRNA sense strand
uuacgauggagaugaauuu

SEQ ID NO: 1727194 - RNA, 19 nt, Homo sapiens
  misc_RNA (1)...(19): siRNA sense strand
aguaaggaguggcuagaga

SEQ ID NO: 1727195 - RNA, 19 nt, Homo sapiens
  misc_RNA (1)...(19): siRNA sense strand
cuggcuguaugcaauauuu

SEQ ID NO: 1727196 - RNA, 19 nt, Homo sapiens
  misc_RNA (1)...(19): siRNA sense strand
uguacuggcuguaugcaau

SEQ ID NO: 1727197 - RNA, 19 nt, Homo sapiens
  misc_RNA (1)...(19): siRNA sense strand
ucgagaagcucaggaggau

SEQ ID NO: 1727198 - RNA, 19 nt, Homo sapiens
  misc_RNA (1)...(19): siRNA sense strand
ggcuagagaagaacucaaa

SEQ ID NO: 1727199 - RNA, 19 nt, Homo sapiens
  misc_RNA (1)...(19): siRNA sense strand
ucaaagagcugcccauguu

SEQ ID NO: 1727200 - RNA, 19 nt, Homo sapiens
  misc_RNA (1)...(19): siRNA sense strand
gaucagagauggccagguu

SEQ ID NO: 1727201 - RNA, 19 nt, Homo sapiens
  misc_RNA (1)...(19): siRNA sense strand
uggaagagauggaaaguaa

SEQ ID NO: 1727202 - RNA, 19 nt, Homo sapiens
  misc_RNA (1)...(19): siRNA sense strand
ccacagaauuucaagauau

SEQ ID NO: 1727203 - RNA, 19 nt, Homo sapiens
  misc_RNA (1)...(19): siRNA sense strand
gaacucccauagagaaauu

SEQ ID NO: 1727204 - RNA, 19 nt, Homo sapiens
  misc_RNA (1)...(19): siRNA sense strand
gaucaaagguaugguaaga

SEQ ID NO: 1727205 - RNA, 19 nt, Homo sapiens
  misc_RNA (1)...(19): siRNA sense strand
gagcaaacccuuacaaaca

SEQ ID NO: 1727206 - RNA, 19 nt, Homo sapiens
  misc_RNA (1)...(19): siRNA sense strand
uaaggugacugcagagaaa

SEQ ID NO: 1727207 - RNA, 19 nt, Homo sapiens
  misc_RNA (1)...(19): siRNA sense strand
gagaaaccaggaucuauuu

SEQ ID NO: 1727208 - RNA, 19 nt, Homo sapiens
  misc_RNA (1)...(19): siRNA sense strand
guaagagagugauucagaa

SEQ ID NO: 1727209 - RNA, 19 nt, Homo sapiens
  misc_RNA (1)...(19): siRNA sense strand
ggagaaaccaggaucuauu

SEQ ID NO: 1727210 - RNA, 19 nt, Homo sapiens
  misc_RNA (1)...(19): siRNA sense strand
gaucugauguagaccaaga

SEQ ID NO: 1727211 - RNA, 19 nt, Homo sapiens
  misc_RNA (1)...(19): siRNA sense strand
guaacaagaugacauguac

SEQ ID NO: 1727212 - RNA, 19 nt, Homo sapiens
  misc_RNA (1)...(19): siRNA sense strand
gaaucacugucaaaucuga

SEQ ID NO: 1727213 - RNA, 19 nt, Homo sapiens
  misc_RNA (1)...(19): siRNA sense strand
uuaauggacuuacgaaaug

SEQ ID NO: 1727214 - RNA, 19 nt, Homo sapiens
  misc_RNA (1)...(19): siRNA sense strand
ucaaagguaugguaagaga

SEQ ID NO: 1727215 - RNA, 19 nt, Homo sapiens
  misc_RNA (1)...(19): siRNA sense strand
cgauggagaugaauuuaga

SEQ ID NO: 1727216 - RNA, 19 nt, Homo sapiens
  misc_RNA (1)...(19): siRNA sense strand
gugagaagcuggguaguga

SEQ ID NO: 1727217 - RNA, 19 nt, Homo sapiens
  misc_RNA (1)...(19): siRNA sense strand
gcaaacccuuacaaacauu

SEQ ID NO: 1727218 - RNA, 19 nt, Homo sapiens
  misc_RNA (1)...(19): siRNA sense strand
gaaauuagacggauguaac

SEQ ID NO: 1727219 - RNA, 19 nt, Homo sapiens
  misc_RNA (1)...(19): siRNA sense strand
gcacuuagacaaccuaugg

SEQ ID NO: 1727220 - RNA, 19 nt, Homo sapiens
  misc_RNA (1)...(19): siRNA sense strand
aagaggaaauuguggauga

SEQ ID NO: 1727221 - RNA, 19 nt, Homo sapiens
  misc_RNA (1)...(19): siRNA sense strand
gguaagagagugauucaga

SEQ ID NO: 1727222 - RNA, 19 nt, Homo sapiens
  misc_RNA (1)...(19): siRNA sense strand
gagaagcucaggaggauga

SEQ ID NO: 1727223 - RNA, 19 nt, Homo sapiens
  misc_RNA (1)...(19): siRNA sense strand
ggucaaagaguuaguggaa

SEQ ID NO: 1727224 - RNA, 19 nt, Homo sapiens
  misc_RNA (1)...(19): siRNA sense strand
gaaggacuacuuugaaauc

SEQ ID NO: 1727225 - RNA, 19 nt, Homo sapiens
  misc_RNA (1)...(19): siRNA sense strand
ugaucaagcucagcagaua

SEQ ID NO: 1727226 - RNA, 19 nt, Homo sapiens
  misc_RNA (1)...(19): siRNA sense strand
gccacagaauuucaagaua

SEQ ID NO: 1727227 - RNA, 19 nt, Homo sapiens
  misc_RNA (1)...(19): siRNA sense strand
gaaauuaauggacuuacga

SEQ ID NO: 1727228 - RNA, 19 nt, Homo sapiens
  misc_RNA (1)...(19): siRNA sense strand
caggaaaucuuggacuuug

SEQ ID NO: 1727229 - RNA, 19 nt, Homo sapiens
  misc_RNA (1)...(19): siRNA sense strand
gaugcaauuucuuaaggaa

SEQ ID NO: 1727230 - RNA, 19 nt, Homo sapiens
  misc_RNA (1)...(19): siRNA sense strand
ugaauauugucucuccuuu

SEQ ID NO: 1727231 - RNA, 19 nt, Homo sapiens
  misc_RNA (1)...(19): siRNA sense strand
caaaucugauccaggaaau

SEQ ID NO: 1727232 - RNA, 19 nt, Homo sapiens
  misc_RNA (1)...(19): siRNA sense strand
aagaugagguagaagacua

SEQ ID NO: 1727233 - RNA, 19 nt, Homo sapiens
  misc_RNA (1)...(19): siRNA sense strand
ggaugcaauuucuuaagga

SEQ ID NO: 1727234 - RNA, 19 nt, Homo sapiens
  misc_RNA (1)...(19): siRNA sense strand
aaaccaggaucuauuugga

SEQ ID NO: 1727235 - RNA, 19 nt, Homo sapiens
  misc_RNA (1)...(19): siRNA sense strand
guuaguggaagcagaguua

SEQ ID NO: 1727236 - RNA, 19 nt, Homo sapiens
  misc_RNA (1)...(19): siRNA sense strand
uggaaucacugucaaaucu

SEQ ID NO: 1727237 - RNA, 19 nt, Homo sapiens
  misc_RNA (1)...(19): siRNA sense strand
ggaagagacccuagcauac

SEQ ID NO: 1727238 - RNA, 19 nt, Homo sapiens
  misc_RNA (1)...(19): siRNA sense strand
cugaaggacuacuuugaaa

SEQ ID NO: 1727239 - RNA, 19 nt, Homo sapiens
  misc_RNA (1)...(19): siRNA sense strand
cuagcauacuugaauauug

SEQ ID NO: 1727240 - RNA, 19 nt, Homo sapiens
  misc_RNA (1)...(19): siRNA sense strand
gugaaugcauguacuucuu

SEQ ID NO: 1727241 - RNA, 19 nt, Homo sapiens
  misc_RNA (1)...(19): siRNA sense strand
gaucaagcucagcagauaa

SEQ ID NO: 1727242 - RNA, 19 nt, Homo sapiens
  misc_RNA (1)...(19): siRNA sense strand
gaagagacccuagcauacu

SEQ ID NO: 1727243 - RNA, 19 nt, Homo sapiens
  misc_RNA (1)...(19): siRNA sense strand
gaagcuggguagugaaugc

SEQ ID NO: 1727244 - RNA, 19 nt, Homo sapiens
  misc_RNA (1)...(19): siRNA sense strand
ggagaugaauuuagaaaag

SEQ ID NO: 1727245 - RNA, 19 nt, Homo sapiens
  misc_RNA (1)...(19): siRNA sense strand
agacggauguaacaagaug

SEQ ID NO: 1727246 - RNA, 19 nt, Homo sapiens
  misc_RNA (1)...(19): siRNA sense strand
ggaugaggcuaauaaaaga

SEQ ID NO: 1727247 - RNA, 19 nt, Homo sapiens
  misc_RNA (1)...(19): siRNA sense strand
cagaguuauuugcccguua

SEQ ID NO: 1727248 - RNA, 19 nt, Homo sapiens
  misc_RNA (1)...(19): siRNA sense strand
ggacuuacgaaaugaauac

SEQ ID NO: 1727249 - RNA, 19 nt, Homo sapiens
  misc_RNA (1)...(19): siRNA sense strand
gaagagauggaaaguaagg

SEQ ID NO: 1727250 - RNA, 19 nt, Homo sapiens
  misc_RNA (1)...(19): siRNA sense strand
aggaagagacccuagcaua

SEQ ID NO: 1727251 - RNA, 19 nt, Homo sapiens
  misc_RNA (1)...(19): siRNA sense strand
gggaagaugagguagaaga

SEQ ID NO: 1727252 - RNA, 19 nt, Homo sapiens
  misc_RNA (1)...(19): siRNA sense strand
guacuggcuguaugcaaua

SEQ ID NO: 1727253 - RNA, 19 nt, Homo sapiens
  misc_RNA (1)...(19): siRNA sense strand
uuagacggauguaacaaga

SEQ ID NO: 1727254 - RNA, 19 nt, Homo sapiens
  misc_RNA (1)...(19): siRNA sense strand
guaaggaguggcuagagaa

SEQ ID NO: 1727255 - RNA, 19 nt, Homo sapiens
  misc_RNA (1)...(19): siRNA sense strand
agaaggcacuggaagagau

SEQ ID NO: 1727256 - RNA, 19 nt, Homo sapiens
  misc_RNA (1)...(19): siRNA sense strand
caggaucuauuuggauuug

SEQ ID NO: 1727257 - RNA, 19 nt, Homo sapiens
  misc_RNA (1)...(19): siRNA sense strand
gaaauccagaucagagaug

SEQ ID NO: 1727258 - RNA, 19 nt, Homo sapiens
  misc_RNA (1)...(19): siRNA sense strand
ggaaauuguggaugagaga

SEQ ID NO: 1727259 - RNA, 19 nt, Homo sapiens
  misc_RNA (1)...(19): siRNA sense strand
gaaaccaggaucuauuugg

SEQ ID NO: 1727260 - RNA, 19 nt, Homo sapiens
  misc_RNA (1)...(19): siRNA sense strand
gacauguacuggcuguaug

SEQ ID NO: 1727261 - RNA, 19 nt, Homo sapiens
  misc_RNA (1)...(19): siRNA sense strand
gauguggaaucacugucaa

SEQ ID NO: 1727262 - RNA, 19 nt, Homo sapiens
  misc_RNA (1)...(19): siRNA sense strand
uggaggagcugcuggaucu

SEQ ID NO: 1727263 - RNA, 19 nt, Homo sapiens
  misc_RNA (1)...(19): siRNA sense strand
gacccuagcauacuugaau

SEQ ID NO: 1727264 - RNA, 19 nt, Homo sapiens
  misc_RNA (1)...(19): siRNA sense strand
aggaguggcuagagaagaa

SEQ ID NO: 1727265 - RNA, 19 nt, Homo sapiens
  misc_RNA (1)...(19): siRNA sense strand
gcaagcggaugaggcuaau

SEQ ID NO: 1727266 - RNA, 19 nt, Homo sapiens
  misc_RNA (1)...(19): siRNA sense strand
ggugacugcagagaaauua

SEQ ID NO: 1727267 - RNA, 19 nt, Homo sapiens
  misc_RNA (1)...(19): siRNA sense strand
caacacagagcuagauuuu

SEQ ID NO: 1727268 - RNA, 19 nt, Homo sapiens
  misc_RNA (1)...(19): siRNA sense strand
gcucaagcuucucccaaca

SEQ ID NO: 1727269 - RNA, 19 nt, Homo sapiens
  misc_RNA (1)...(19): siRNA sense strand
gacgauauuugggaagaug

SEQ ID NO: 1727270 - RNA, 19 nt, Homo sapiens
  misc_RNA (1)...(19): siRNA sense strand
gagauggccagguucaaug

SEQ ID NO: 1727271 - RNA, 19 nt, Homo sapiens
  misc_RNA (1)...(19): siRNA sense strand
gcaaagccugucugaagga

SEQ ID NO: 1727272 - RNA, 19 nt, Homo sapiens
  misc_RNA (1)...(19): siRNA sense strand
gcaauauuucuguuggauu

SEQ ID NO: 1727273 - RNA, 19 nt, Homo sapiens
  misc_RNA (1)...(19): siRNA sense strand
uauuuacgauggagaugaa

SEQ ID NO: 1727274 - RNA, 19 nt, Homo sapiens
  misc_RNA (1)...(19): siRNA sense strand
ggauguugacgacgauauu

SEQ ID NO: 1727275 - RNA, 19 nt, Homo sapiens
  misc_RNA (1)...(19): siRNA sense strand
uaauggacuuacgaaauga

SEQ ID NO: 1727276 - RNA, 19 nt, Homo sapiens
  misc_RNA (1)...(19): siRNA sense strand
cagagaaauuaauggacuu

SEQ ID NO: 1727277 - RNA, 19 nt, Homo sapiens
  misc_RNA (1)...(19): siRNA sense strand
guaaggugacugcagagaa

SEQ ID NO: 1727278 - RNA, 19 nt, Homo sapiens
  misc_RNA (1)...(19): siRNA sense strand
uggcagaugugguguacug

SEQ ID NO: 1727279 - RNA, 19 nt, Homo sapiens
  misc_RNA (1)...(19): siRNA sense strand
ggaaaucuuggacuuugau

SEQ ID NO: 1727280 - RNA, 19 nt, Homo sapiens
  misc_RNA (1)...(19): siRNA sense strand
gauguugacgacgauauuu

SEQ ID NO: 1727281 - RNA, 19 nt, Homo sapiens
  misc_RNA (1)...(19): siRNA sense strand
aagcggaugaggcuaauaa

SEQ ID NO: 1727282 - RNA, 19 nt, Homo sapiens
  misc_RNA (1)...(19): siRNA sense strand
agaguuauuugcccguuau

SEQ ID NO: 1727283 - RNA, 19 nt, Homo sapiens
  misc_RNA (1)...(19): siRNA sense strand
aagccugucugaaggacua

SEQ ID NO: 1727284 - RNA, 19 nt, Homo sapiens
  misc_RNA (1)...(19): siRNA sense strand
gagaagcuggguagugaau

SEQ ID NO: 1727285 - RNA, 19 nt, Homo sapiens
  misc_RNA (1)...(19): siRNA sense strand
agagagcagugcaggaugu

SEQ ID NO: 1727286 - RNA, 19 nt, Homo sapiens
  misc_RNA (1)...(19): siRNA sense strand
aagagacccuagcauacuu

SEQ ID NO: 1727287 - RNA, 19 nt, Homo sapiens
  misc_RNA (1)...(19): siRNA sense strand
ucaaaucugauccaggaaa

SEQ ID NO: 1727288 - RNA, 19 nt, Homo sapiens
  misc_RNA (1)...(19): siRNA sense strand
ugauguagaccaagaggaa

SEQ ID NO: 1727289 - RNA, 19 nt, Homo sapiens
  misc_RNA (1)...(19): siRNA sense strand
uggauuugccacagaauuu

SEQ ID NO: 1727290 - RNA, 19 nt, Homo sapiens
  misc_RNA (1)...(19): siRNA sense strand
guggaacucccauagagaa

SEQ ID NO: 1727291 - RNA, 19 nt, Homo sapiens
  misc_RNA (1)...(19): siRNA sense strand
gcacuggaagagauggaaa

SEQ ID NO: 1727292 - RNA, 19 nt, Homo sapiens
  misc_RNA (1)...(19): siRNA sense strand
gauggcagaugugguguac

SEQ ID NO: 1727293 - RNA, 19 nt, Homo sapiens
  misc_RNA (1)...(19): siRNA sense strand
uuacgauggagaugaauuu

SEQ ID NO: 1727294 - RNA, 19 nt, Homo sapiens
  misc_RNA (1)...(19): siRNA sense strand
aguaaggaguggcuagaga

SEQ ID NO: 1727295 - RNA, 19 nt, Homo sapiens
  misc_RNA (1)...(19): siRNA sense strand
cuggcuguaugcaauauuu

SEQ ID NO: 1727296 - RNA, 19 nt, Homo sapiens
  misc_RNA (1)...(19): siRNA sense strand
uguacuggcuguaugcaau

SEQ ID NO: 1727297 - RNA, 19 nt, Homo sapiens
  misc_RNA (1)...(19): siRNA sense strand
ucgagaagcucaggaggau

SEQ ID NO: 1727298 - RNA, 19 nt, Homo sapiens
  misc_RNA (1)...(19): siRNA sense strand
ggcuagagaagaacucaaa

SEQ ID NO: 1727299 - RNA, 19 nt, Homo sapiens
  misc_RNA (1)...(19): siRNA sense strand
ucaaagagcugcccauguu

SEQ ID NO: 1727300 - RNA, 19 nt, Homo sapiens
  misc_RNA (1)...(19): siRNA sense strand
gaucagagauggccagguu

SEQ ID NO: 1727301 - RNA, 19 nt, Homo sapiens
  misc_RNA (1)...(19): siRNA sense strand
uggaagagauggaaaguaa

SEQ ID NO: 1727302 - RNA, 19 nt, Homo sapiens
  misc_RNA (1)...(19): siRNA sense strand
ccacagaauuucaagauau

SEQ ID NO: 1727303 - RNA, 19 nt, Homo sapiens
  misc_RNA (1)...(19): siRNA sense strand
gaacucccauagagaaauu

SEQ ID NO: 1727304 - RNA, 19 nt, Homo sapiens
  misc_RNA (1)...(19): siRNA sense strand
gaucaaagguaugguaaga

SEQ ID NO: 1727305 - RNA, 19 nt, Homo sapiens
  misc_RNA (1)...(19): siRNA sense strand
gagcaaacccuuacaaaca

SEQ ID NO: 1727306 - RNA, 19 nt, Homo sapiens
  misc_RNA (1)...(19): siRNA sense strand
uaaggugacugcagagaaa

SEQ ID NO: 1727307 - RNA, 19 nt, Homo sapiens
  misc_RNA (1)...(19): siRNA sense strand
gagaaaccaggaucuauuu

SEQ ID NO: 1727308 - RNA, 19 nt, Homo sapiens
  misc_RNA (1)...(19): siRNA sense strand
guaagagagugauucagaa

SEQ ID NO: 1727309 - RNA, 19 nt, Homo sapiens
  misc_RNA (1)...(19): siRNA sense strand
ggagaaaccaggaucuauu

SEQ ID NO: 1727310 - RNA, 19 nt, Homo sapiens
  misc_RNA (1)...(19): siRNA sense strand
gaucugauguagaccaaga

SEQ ID NO: 1727311 - RNA, 19 nt, Homo sapiens
  misc_RNA (1)...(19): siRNA sense strand
guaacaagaugacauguac

SEQ ID NO: 1727312 - RNA, 19 nt, Homo sapiens
  misc_RNA (1)...(19): siRNA sense strand
gaaucacugucaaaucuga

SEQ ID NO: 1727313 - RNA, 19 nt, Homo sapiens
  misc_RNA (1)...(19): siRNA sense strand
uuaauggacuuacgaaaug

SEQ ID NO: 1727314 - RNA, 19 nt, Homo sapiens
  misc_RNA (1)...(19): siRNA sense strand
ucaaagguaugguaagaga

SEQ ID NO: 1727315 - RNA, 19 nt, Homo sapiens
  misc_RNA (1)...(19): siRNA sense strand
cgauggagaugaauuuaga

SEQ ID NO: 1727316 - RNA, 19 nt, Homo sapiens
  misc_RNA (1)...(19): siRNA sense strand
gugagaagcuggguaguga

SEQ ID NO: 1727317 - RNA, 19 nt, Homo sapiens
  misc_RNA (1)...(19): siRNA sense strand
gcaaacccuuacaaacauu

SEQ ID NO: 1727318 - RNA, 19 nt, Homo sapiens
  misc_RNA (1)...(19): siRNA sense strand
gaaauuagacggauguaac

SEQ ID NO: 1727319 - RNA, 19 nt, Homo sapiens
  misc_RNA (1)...(19): siRNA sense strand
gcacuuagacaaccuaugg

SEQ ID NO: 1727320 - RNA, 19 nt, Homo sapiens
  misc_RNA (1)...(19): siRNA sense strand
aagaggaaauuguggauga

SEQ ID NO: 1727321 - RNA, 19 nt, Homo sapiens
  misc_RNA (1)...(19): siRNA sense strand
gguaagagagugauucaga

SEQ ID NO: 1727322 - RNA, 19 nt, Homo sapiens
  misc_RNA (1)...(19): siRNA sense strand
gagaagcucaggaggauga

SEQ ID NO: 1727323 - RNA, 19 nt, Homo sapiens
  misc_RNA (1)...(19): siRNA sense strand
ggucaaagaguuaguggaa

SEQ ID NO: 1727324 - RNA, 19 nt, Homo sapiens
  misc_RNA (1)...(19): siRNA sense strand
gaaggacuacuuugaaauc

SEQ ID NO: 1727325 - RNA, 19 nt, Homo sapiens
  misc_RNA (1)...(19): siRNA sense strand
ugaucaagcucagcagaua

SEQ ID NO: 1727326 - RNA, 19 nt, Homo sapiens
  misc_RNA (1)...(19): siRNA sense strand
gccacagaauuucaagaua

SEQ ID NO: 1727327 - RNA, 19 nt, Homo sapiens
  misc_RNA (1)...(19): siRNA sense strand
gaaauuaauggacuuacga

SEQ ID NO: 1727328 - RNA, 19 nt, Homo sapiens
  misc_RNA (1)...(19): siRNA sense strand
caggaaaucuuggacuuug

SEQ ID NO: 1727329 - RNA, 19 nt, Homo sapiens
  misc_RNA (1)...(19): siRNA sense strand
gaugcaauuucuuaaggaa

SEQ ID NO: 1727330 - RNA, 19 nt, Homo sapiens
  misc_RNA (1)...(19): siRNA sense strand
ugaauauugucucuccuuu

SEQ ID NO: 1727331 - RNA, 19 nt, Homo sapiens
  misc_RNA (1)...(19): siRNA sense strand
caaaucugauccaggaaau

SEQ ID NO: 1727332 - RNA, 19 nt, Homo sapiens
  misc_RNA (1)...(19): siRNA sense strand
aagaugagguagaagacua

SEQ ID NO: 1727333 - RNA, 19 nt, Homo sapiens
  misc_RNA (1)...(19): siRNA sense strand
ggaugcaauuucuuaagga

SEQ ID NO: 1727334 - RNA, 19 nt, Homo sapiens
  misc_RNA (1)...(19): siRNA sense strand
aaaccaggaucuauuugga

SEQ ID NO: 1727335 - RNA, 19 nt, Homo sapiens
  misc_RNA (1)...(19): siRNA sense strand
guuaguggaagcagaguua

SEQ ID NO: 1727336 - RNA, 19 nt, Homo sapiens
  misc_RNA (1)...(19): siRNA sense strand
uggaaucacugucaaaucu

SEQ ID NO: 1727337 - RNA, 19 nt, Homo sapiens
  misc_RNA (1)...(19): siRNA sense strand
ggaagagacccuagcauac

SEQ ID NO: 1727338 - RNA, 19 nt, Homo sapiens
  misc_RNA (1)...(19): siRNA sense strand
cugaaggacuacuuugaaa

SEQ ID NO: 1727339 - RNA, 19 nt, Homo sapiens
  misc_RNA (1)...(19): siRNA sense strand
cuagcauacuugaauauug

SEQ ID NO: 1727340 - RNA, 19 nt, Homo sapiens
  misc_RNA (1)...(19): siRNA sense strand
gugaaugcauguacuucuu

SEQ ID NO: 1727341 - RNA, 19 nt, Homo sapiens
  misc_RNA (1)...(19): siRNA sense strand
gaucaagcucagcagauaa

SEQ ID NO: 1727342 - RNA, 19 nt, Homo sapiens
  misc_RNA (1)...(19): siRNA sense strand
gaagagacccuagcauacu

SEQ ID NO: 1727343 - RNA, 19 nt, Homo sapiens
  misc_RNA (1)...(19): siRNA sense strand
gaagcuggguagugaaugc

SEQ ID NO: 1727344 - RNA, 19 nt, Homo sapiens
  misc_RNA (1)...(19): siRNA sense strand
ggagaugaauuuagaaaag

SEQ ID NO: 1727345 - RNA, 19 nt, Homo sapiens
  misc_RNA (1)...(19): siRNA sense strand
agacggauguaacaagaug

SEQ ID NO: 1727346 - RNA, 19 nt, Homo sapiens
  misc_RNA (1)...(19): siRNA sense strand
ggaugaggcuaauaaaaga

SEQ ID NO: 1727347 - RNA, 19 nt, Homo sapiens
  misc_RNA (1)...(19): siRNA sense strand
cagaguuauuugcccguua

SEQ ID NO: 1727348 - RNA, 19 nt, Homo sapiens
  misc_RNA (1)...(19): siRNA sense strand
ggacuuacgaaaugaauac

SEQ ID NO: 1727349 - RNA, 19 nt, Homo sapiens
  misc_RNA (1)...(19): siRNA sense strand
gaagagauggaaaguaagg

SEQ ID NO: 1727350 - RNA, 19 nt, Homo sapiens
  misc_RNA (1)...(19): siRNA sense strand
aggaagagacccuagcaua

SEQ ID NO: 1727351 - RNA, 19 nt, Homo sapiens
  misc_RNA (1)...(19): siRNA sense strand
gggaagaugagguagaaga

SEQ ID NO: 1727352 - RNA, 19 nt, Homo sapiens
  misc_RNA (1)...(19): siRNA sense strand
guacuggcuguaugcaaua

SEQ ID NO: 1727353 - RNA, 19 nt, Homo sapiens
  misc_RNA (1)...(19): siRNA sense strand
uuagacggauguaacaaga

SEQ ID NO: 1727354 - RNA, 19 nt, Homo sapiens
  misc_RNA (1)...(19): siRNA sense strand
guaaggaguggcuagagaa

SEQ ID NO: 1727355 - RNA, 19 nt, Homo sapiens
  misc_RNA (1)...(19): siRNA sense strand
agaaggcacuggaagagau

SEQ ID NO: 1727356 - RNA, 19 nt, Homo sapiens
  misc_RNA (1)...(19): siRNA sense strand
caggaucuauuuggauuug

SEQ ID NO: 1727357 - RNA, 19 nt, Homo sapiens
  misc_RNA (1)...(19): siRNA sense strand
gaaauccagaucagagaug

SEQ ID NO: 1727358 - RNA, 19 nt, Homo sapiens
  misc_RNA (1)...(19): siRNA sense strand
ggaaauuguggaugagaga

SEQ ID NO: 1727359 - RNA, 19 nt, Homo sapiens
  misc_RNA (1)...(19): siRNA sense strand
gaaaccaggaucuauuugg

SEQ ID NO: 1727360 - RNA, 19 nt, Homo sapiens
  misc_RNA (1)...(19): siRNA sense strand
gacauguacuggcuguaug

SEQ ID NO: 1727361 - RNA, 19 nt, Homo sapiens
  misc_RNA (1)...(19): siRNA sense strand
gauguggaaucacugucaa

SEQ ID NO: 1727362 - RNA, 19 nt, Homo sapiens
  misc_RNA (1)...(19): siRNA sense strand
uggaggagcugcuggaucu

SEQ ID NO: 1727363 - RNA, 19 nt, Homo sapiens
  misc_RNA (1)...(19): siRNA sense strand
gacccuagcauacuugaau

SEQ ID NO: 1727364 - RNA, 19 nt, Homo sapiens
  misc_RNA (1)...(19): siRNA sense strand
aggaguggcuagagaagaa

SEQ ID NO: 1727365 - RNA, 19 nt, Homo sapiens
  misc_RNA (1)...(19): siRNA sense strand
gcaagcggaugaggcuaau

SEQ ID NO: 1727366 - RNA, 19 nt, Homo sapiens
  misc_RNA (1)...(19): siRNA sense strand
ggugacugcagagaaauua

SEQ ID NO: 1727367 - RNA, 19 nt, Homo sapiens
  misc_RNA (1)...(19): siRNA sense strand
caacacagagcuagauuuu

SEQ ID NO: 1727368 - RNA, 19 nt, Homo sapiens
  misc_RNA (1)...(19): siRNA sense strand
gcucaagcuucucccaaca

SEQ ID NO: 1727369 - RNA, 19 nt, Homo sapiens
  misc_RNA (1)...(19): siRNA sense strand
gacgauauuugggaagaug

SEQ ID NO: 1727370 - RNA, 19 nt, Homo sapiens
  misc_RNA (1)...(19): siRNA sense strand
gagauggccagguucaaug

SEQ ID NO: 1727371 - RNA, 19 nt, Homo sapiens
  misc_RNA (1)...(19): siRNA sense strand
gcaaagccugucugaagga

SEQ ID NO: 1727372 - RNA, 19 nt, Homo sapiens
  misc_RNA (1)...(19): siRNA sense strand
gcaauauuucuguuggauu

SEQ ID NO: 1727373 - RNA, 19 nt, Homo sapiens
  misc_RNA (1)...(19): siRNA sense strand
uauuuacgauggagaugaa

SEQ ID NO: 1727374 - RNA, 19 nt, Homo sapiens
  misc_RNA (1)...(19): siRNA sense strand
ggauguugacgacgauauu

SEQ ID NO: 1727375 - RNA, 19 nt, Homo sapiens
  misc_RNA (1)...(19): siRNA sense strand
uaauggacuuacgaaauga

SEQ ID NO: 1727376 - RNA, 19 nt, Homo sapiens
  misc_RNA (1)...(19): siRNA sense strand
cagagaaauuaauggacuu

SEQ ID NO: 1727377 - RNA, 19 nt, Homo sapiens
  misc_RNA (1)...(19): siRNA sense strand
guaaggugacugcagagaa

SEQ ID NO: 1727378 - RNA, 19 nt, Homo sapiens
  misc_RNA (1)...(19): siRNA sense strand
uggcagaugugguguacug

SEQ ID NO: 1727379 - RNA, 19 nt, Homo sapiens
  misc_RNA (1)...(19): siRNA sense strand
ggaaaucuuggacuuugau

SEQ ID NO: 1727380 - RNA, 19 nt, Homo sapiens
  misc_RNA (1)...(19): siRNA sense strand
gauguugacgacgauauuu

SEQ ID NO: 1727381 - RNA, 19 nt, Homo sapiens
  misc_RNA (1)...(19): siRNA sense strand
aagcggaugaggcuaauaa

SEQ ID NO: 1727382 - RNA, 19 nt, Homo sapiens
  misc_RNA (1)...(19): siRNA sense strand
agaguuauuugcccguuau

SEQ ID NO: 1727383 - RNA, 19 nt, Homo sapiens
  misc_RNA (1)...(19): siRNA sense strand
aagccugucugaaggacua

SEQ ID NO: 1727384 - RNA, 19 nt, Homo sapiens
  misc_RNA (1)...(19): siRNA sense strand
gagaagcuggguagugaau

SEQ ID NO: 1727385 - RNA, 19 nt, Homo sapiens
  misc_RNA (1)...(19): siRNA sense strand
agagagcagugcaggaugu

SEQ ID NO: 1727386 - RNA, 19 nt, Homo sapiens
  misc_RNA (1)...(19): siRNA sense strand
aagagacccuagcauacuu

SEQ ID NO: 1727387 - RNA, 19 nt, Homo sapiens
  misc_RNA (1)...(19): siRNA sense strand
ucaaaucugauccaggaaa

SEQ ID NO: 1727388 - RNA, 19 nt, Homo sapiens
  misc_RNA (1)...(19): siRNA sense strand
ugauguagaccaagaggaa

SEQ ID NO: 1727389 - RNA, 19 nt, Homo sapiens
  misc_RNA (1)...(19): siRNA sense strand
uggauuugccacagaauuu

SEQ ID NO: 1727390 - RNA, 19 nt, Homo sapiens
  misc_RNA (1)...(19): siRNA sense strand
guggaacucccauagagaa

SEQ ID NO: 1727391 - RNA, 19 nt, Homo sapiens
  misc_RNA (1)...(19): siRNA sense strand
gcacuggaagagauggaaa

SEQ ID NO: 1727392 - RNA, 19 nt, Homo sapiens
  misc_RNA (1)...(19): siRNA sense strand
gauggcagaugugguguac

SEQ ID NO: 1727393 - RNA, 19 nt, Homo sapiens
  misc_RNA (1)...(19): siRNA sense strand
uuacgauggagaugaauuu

SEQ ID NO: 1727394 - RNA, 19 nt, Homo sapiens
  misc_RNA (1)...(19): siRNA sense strand
aguaaggaguggcuagaga

SEQ ID NO: 1727395 - RNA, 19 nt, Homo sapiens
  misc_RNA (1)...(19): siRNA sense strand
cuggcuguaugcaauauuu

SEQ ID NO: 1727396 - RNA, 19 nt, Homo sapiens
  misc_RNA (1)...(19): siRNA sense strand
uguacuggcuguaugcaau

SEQ ID NO: 1727397 - RNA, 19 nt, Homo sapiens
  misc_RNA (1)...(19): siRNA sense strand
ucgagaagcucaggaggau

SEQ ID NO: 1727398 - RNA, 19 nt, Homo sapiens
  misc_RNA (1)...(19): siRNA sense strand
ggcuagagaagaacucaaa

SEQ ID NO: 1727399 - RNA, 19 nt, Homo sapiens
  misc_RNA (1)...(19): siRNA sense strand
ucaaagagcugcccauguu

SEQ ID NO: 1727400 - RNA, 19 nt, Homo sapiens
  misc_RNA (1)...(19): siRNA sense strand
gaucagagauggccagguu

SEQ ID NO: 1727401 - RNA, 19 nt, Homo sapiens
  misc_RNA (1)...(19): siRNA sense strand
uggaagagauggaaaguaa

SEQ ID NO: 1727402 - RNA, 19 nt, Homo sapiens
  misc_RNA (1)...(19): siRNA sense strand
gaucaaagguaugguaaga

SEQ ID NO: 1727403 - RNA, 19 nt, Homo sapiens
  misc_RNA (1)...(19): siRNA sense strand
gaacucccauagagaaauu

SEQ ID NO: 1727404 - RNA, 19 nt, Homo sapiens
  misc_RNA (1)...(19): siRNA sense strand
gagcaaacccuuacaaaca

SEQ ID NO: 1727405 - RNA, 19 nt, Homo sapiens
  misc_RNA (1)...(19): siRNA sense strand
uaaggugacugcagagaaa

SEQ ID NO: 1727406 - RNA, 19 nt, Homo sapiens
  misc_RNA (1)...(19): siRNA sense strand
guaagagagugauucagaa

SEQ ID NO: 1727407 - RNA, 19 nt, Homo sapiens
  misc_RNA (1)...(19): siRNA sense strand
gaucugauguagaccaaga

SEQ ID NO: 1727408 - RNA, 19 nt, Homo sapiens
  misc_RNA (1)...(19): siRNA sense strand
guaacaagaugacauguac

SEQ ID NO: 1727409 - RNA, 19 nt, Homo sapiens
  misc_RNA (1)...(19): siRNA sense strand
gaaucacugucaaaucuga

SEQ ID NO: 1727410 - RNA, 19 nt, Homo sapiens
  misc_RNA (1)...(19): siRNA sense strand
uuaauggacuuacgaaaug

SEQ ID NO: 1727411 - RNA, 19 nt, Homo sapiens
  misc_RNA (1)...(19): siRNA sense strand
ucaaagguaugguaagaga

SEQ ID NO: 1727412 - RNA, 19 nt, Homo sapiens
  misc_RNA (1)...(19): siRNA sense strand
gugagaagcuggguaguga

SEQ ID NO: 1727413 - RNA, 19 nt, Homo sapiens
  misc_RNA (1)...(19): siRNA sense strand
gcaaacccuuacaaacauu

SEQ ID NO: 1727414 - RNA, 19 nt, Homo sapiens
  misc_RNA (1)...(19): siRNA sense strand
gaaauuagacggauguaac

SEQ ID NO: 1727415 - RNA, 19 nt, Homo sapiens
  misc_RNA (1)...(19): siRNA sense strand
aagaggaaauuguggauga

SEQ ID NO: 1727416 - RNA, 19 nt, Homo sapiens
  misc_RNA (1)...(19): siRNA sense strand
gguaagagagugauucaga

SEQ ID NO: 1727417 - RNA, 19 nt, Homo sapiens
  misc_RNA (1)...(19): siRNA sense strand
ggucaaagaguuaguggaa

SEQ ID NO: 1727418 - RNA, 19 nt, Homo sapiens
  misc_RNA (1)...(19): siRNA sense strand
gaaggacuacuuugaaauc

SEQ ID NO: 1727419 - RNA, 19 nt, Homo sapiens
  misc_RNA (1)...(19): siRNA sense strand
ugaucaagcucagcagaua

SEQ ID NO: 1727420 - RNA, 19 nt, Homo sapiens
  misc_RNA (1)...(19): siRNA sense strand
caggaaaucuuggacuuug

SEQ ID NO: 1727421 - RNA, 19 nt, Homo sapiens
  misc_RNA (1)...(19): siRNA sense strand
gaaauuaauggacuuacga

SEQ ID NO: 1727422 - RNA, 19 nt, Homo sapiens
  misc_RNA (1)...(19): siRNA sense strand
caaaucugauccaggaaau

SEQ ID NO: 1727423 - RNA, 19 nt, Homo sapiens
  misc_RNA (1)...(19): siRNA sense strand
ugaauauugucucuccuuu

SEQ ID NO: 1727424 - RNA, 19 nt, Homo sapiens
  misc_RNA (1)...(19): siRNA sense strand
aagaugagguagaagacua

SEQ ID NO: 1727425 - RNA, 19 nt, Homo sapiens
  misc_RNA (1)...(19): siRNA sense strand
uggaaucacugucaaaucu

SEQ ID NO: 1727426 - RNA, 19 nt, Homo sapiens
  misc_RNA (1)...(19): siRNA sense strand
ggaagagacccuagcauac

SEQ ID NO: 1727427 - RNA, 19 nt, Homo sapiens
  misc_RNA (1)...(19): siRNA sense strand
guuaguggaagcagaguua

SEQ ID NO: 1727428 - RNA, 19 nt, Homo sapiens
  misc_RNA (1)...(19): siRNA sense strand
cugaaggacuacuuugaaa

SEQ ID NO: 1727429 - RNA, 19 nt, Homo sapiens
  misc_RNA (1)...(19): siRNA sense strand
gaucaagcucagcagauaa

SEQ ID NO: 1727430 - RNA, 19 nt, Homo sapiens
  misc_RNA (1)...(19): siRNA sense strand
gugaaugcauguacuucuu

SEQ ID NO: 1727431 - RNA, 19 nt, Homo sapiens
  misc_RNA (1)...(19): siRNA sense strand
cuagcauacuugaauauug

SEQ ID NO: 1727432 - RNA, 19 nt, Homo sapiens
  misc_RNA (1)...(19): siRNA sense strand
gaagcuggguagugaaugc

SEQ ID NO: 1727433 - RNA, 19 nt, Homo sapiens
  misc_RNA (1)...(19): siRNA sense strand
gaagagacccuagcauacu

SEQ ID NO: 1727434 - RNA, 19 nt, Homo sapiens
  misc_RNA (1)...(19): siRNA sense strand
cagaguuauuugcccguua

SEQ ID NO: 1727435 - RNA, 19 nt, Homo sapiens
  misc_RNA (1)...(19): siRNA sense strand
agacggauguaacaagaug

SEQ ID NO: 1727436 - RNA, 19 nt, Homo sapiens
  misc_RNA (1)...(19): siRNA sense strand
ggaugaggcuaauaaaaga

SEQ ID NO: 1727437 - RNA, 19 nt, Homo sapiens
  misc_RNA (1)...(19): siRNA sense strand
ggacuuacgaaaugaauac

SEQ ID NO: 1727438 - RNA, 19 nt, Homo sapiens
  misc_RNA (1)...(19): siRNA sense strand
gaagagauggaaaguaagg

SEQ ID NO: 1727439 - RNA, 19 nt, Homo sapiens
  misc_RNA (1)...(19): siRNA sense strand
ggaaauuguggaugagaga

SEQ ID NO: 1727440 - RNA, 19 nt, Homo sapiens
  misc_RNA (1)...(19): siRNA sense strand
gggaagaugagguagaaga

SEQ ID NO: 1727441 - RNA, 19 nt, Homo sapiens
  misc_RNA (1)...(19): siRNA sense strand
guacuggcuguaugcaaua

SEQ ID NO: 1727442 - RNA, 19 nt, Homo sapiens
  misc_RNA (1)...(19): siRNA sense strand
uuagacggauguaacaaga

SEQ ID NO: 1727443 - RNA, 19 nt, Homo sapiens
  misc_RNA (1)...(19): siRNA sense strand
guaaggaguggcuagagaa

SEQ ID NO: 1727444 - RNA, 19 nt, Homo sapiens
  misc_RNA (1)...(19): siRNA sense strand
aggaagagacccuagcaua

SEQ ID NO: 1727445 - RNA, 19 nt, Homo sapiens
  misc_RNA (1)...(19): siRNA sense strand
agaaggcacuggaagagau

SEQ ID NO: 1727446 - RNA, 19 nt, Homo sapiens
  misc_RNA (1)...(19): siRNA sense strand
gaaauccagaucagagaug

SEQ ID NO: 1727447 - RNA, 19 nt, Homo sapiens
  misc_RNA (1)...(19): siRNA sense strand
gauguggaaucacugucaa

SEQ ID NO: 1727448 - RNA, 19 nt, Homo sapiens
  misc_RNA (1)...(19): siRNA sense strand
gacauguacuggcuguaug

SEQ ID NO: 1727449 - RNA, 19 nt, Homo sapiens
  misc_RNA (1)...(19): siRNA sense strand
uggaggagcugcuggaucu

SEQ ID NO: 1727450 - RNA, 19 nt, Homo sapiens
  misc_RNA (1)...(19): siRNA sense strand
gacccuagcauacuugaau

SEQ ID NO: 1727451 - RNA, 19 nt, Homo sapiens
  misc_RNA (1)...(19): siRNA sense strand
aggaguggcuagagaagaa

SEQ ID NO: 1727452 - RNA, 19 nt, Homo sapiens
  misc_RNA (1)...(19): siRNA sense strand
gcaagcggaugaggcuaau

SEQ ID NO: 1727453 - RNA, 19 nt, Homo sapiens
  misc_RNA (1)...(19): siRNA sense strand
ggugacugcagagaaauua

SEQ ID NO: 1727454 - RNA, 19 nt, Homo sapiens
  misc_RNA (1)...(19): siRNA sense strand
caacacagagcuagauuuu

SEQ ID NO: 1727455 - RNA, 19 nt, Homo sapiens
  misc_RNA (1)...(19): siRNA sense strand
gcucaagcuucucccaaca

SEQ ID NO: 1727456 - RNA, 19 nt, Homo sapiens
  misc_RNA (1)...(19): siRNA sense strand
gacgauauuugggaagaug

SEQ ID NO: 1727457 - RNA, 19 nt, Homo sapiens
  misc_RNA (1)...(19): siRNA sense strand
gagauggccagguucaaug

SEQ ID NO: 1727458 - RNA, 19 nt, Homo sapiens
  misc_RNA (1)...(19): siRNA sense strand
gcaaagccugucugaagga

SEQ ID NO: 1727459 - RNA, 19 nt, Homo sapiens
  misc_RNA (1)...(19): siRNA sense strand
gcaauauuucuguuggauu

SEQ ID NO: 1727460 - RNA, 19 nt, Homo sapiens
  misc_RNA (1)...(19): siRNA sense strand
uggcagaugugguguacug

SEQ ID NO: 1727461 - RNA, 19 nt, Homo sapiens
  misc_RNA (1)...(19): siRNA sense strand
ggauguugacgacgauauu

SEQ ID NO: 1727462 - RNA, 19 nt, Homo sapiens
  misc_RNA (1)...(19): siRNA sense strand
uaauggacuuacgaaauga

SEQ ID NO: 1727463 - RNA, 19 nt, Homo sapiens
  misc_RNA (1)...(19): siRNA sense strand
cagagaaauuaauggacuu

SEQ ID NO: 1727464 - RNA, 19 nt, Homo sapiens
  misc_RNA (1)...(19): siRNA sense strand
guaaggugacugcagagaa

SEQ ID NO: 1727465 - RNA, 19 nt, Homo sapiens
  misc_RNA (1)...(19): siRNA sense strand
ggaaaucuuggacuuugau

SEQ ID NO: 1727466 - RNA, 19 nt, Homo sapiens
  misc_RNA (1)...(19): siRNA sense strand
gauguugacgacgauauuu

SEQ ID NO: 1727467 - RNA, 19 nt, Homo sapiens
  misc_RNA (1)...(19): siRNA sense strand
aagcggaugaggcuaauaa

SEQ ID NO: 1727468 - RNA, 19 nt, Homo sapiens
  misc_RNA (1)...(19): siRNA sense strand
agaguuauuugcccguuau

SEQ ID NO: 1727469 - RNA, 19 nt, Homo sapiens
  misc_RNA (1)...(19): siRNA sense strand
aagccugucugaaggacua

SEQ ID NO: 1727470 - RNA, 19 nt, Homo sapiens
  misc_RNA (1)...(19): siRNA sense strand
gagaagcuggguagugaau

SEQ ID NO: 1727471 - RNA, 19 nt, Homo sapiens
  misc_RNA (1)...(19): siRNA sense strand
agagagcagugcaggaugu

SEQ ID NO: 1727472 - RNA, 19 nt, Homo sapiens
  misc_RNA (1)...(19): siRNA sense strand
ucaaaucugauccaggaaa

SEQ ID NO: 1727473 - RNA, 19 nt, Homo sapiens
  misc_RNA (1)...(19): siRNA sense strand
aagagacccuagcauacuu

SEQ ID NO: 1727474 - RNA, 19 nt, Homo sapiens
  misc_RNA (1)...(19): siRNA sense strand
ugauguagaccaagaggaa

SEQ ID NO: 1727475 - RNA, 19 nt, Homo sapiens
  misc_RNA (1)...(19): siRNA sense strand
guggaacucccauagagaa

SEQ ID NO: 1727476 - RNA, 19 nt, Homo sapiens
  misc_RNA (1)...(19): siRNA sense strand
gcacuggaagagauggaaa

SEQ ID NO: 1727477 - RNA, 19 nt, Homo sapiens
  misc_RNA (1)...(19): siRNA sense strand
gauggcagaugugguguac

SEQ ID NO: 1727478 - RNA, 19 nt, Homo sapiens
  misc_RNA (1)...(19): siRNA sense strand
caacugcccagaaccaaag

SEQ ID NO: 1727479 - RNA, 19 nt, Homo sapiens
  misc_RNA (1)...(19): siRNA sense strand
cuggcuguaugcaauauuu

SEQ ID NO: 1727480 - RNA, 19 nt, Homo sapiens
  misc_RNA (1)...(19): siRNA sense strand
uguacuggcuguaugcaau

SEQ ID NO: 1727481 - RNA, 19 nt, Homo sapiens
  misc_RNA (1)...(19): siRNA sense strand
ggcuagagaagaacucaaa

SEQ ID NO: 1727482 - RNA, 19 nt, Homo sapiens
  misc_RNA (1)...(19): siRNA sense strand
aguaaggaguggcuagaga

SEQ ID NO: 1727483 - RNA, 19 nt, Homo sapiens
  misc_RNA (1)...(19): siRNA sense strand
ccaacacagagcuagauuu

SEQ ID NO: 1727484 - RNA, 19 nt, Homo sapiens
  misc_RNA (1)...(19): siRNA sense strand
acacagagcuagauuuugg

SEQ ID NO: 1727485 - RNA, 19 nt, Homo sapiens
  misc_RNA (1)...(19): siRNA sense strand
cugcaaagccugucugaag

SEQ ID NO: 1727486 - RNA, 19 nt, Homo sapiens
  misc_RNA (1)...(19): siRNA sense strand
uagagcaaacccuuacaaa

SEQ ID NO: 1727487 - RNA, 19 nt, Homo sapiens
  misc_RNA (1)...(19): siRNA sense strand
ggauguggaaucacuguca

SEQ ID NO: 1727488 - RNA, 19 nt, Homo sapiens
  misc_RNA (1)...(19): siRNA sense strand
ccaggaaaucuuggacuuu

SEQ ID NO: 1727489 - RNA, 19 nt, Homo sapiens
  misc_RNA (1)...(19): siRNA sense strand
caaagagcugcccauguug

SEQ ID NO: 1727490 - RNA, 19 nt, Homo sapiens
  misc_RNA (1)...(19): siRNA sense strand
gaaggcacuggaagagaug

SEQ ID NO: 1727491 - RNA, 19 nt, Homo sapiens
  misc_RNA (1)...(19): siRNA sense strand
guagugaaugcauguacuu

SEQ ID NO: 1727492 - RNA, 19 nt, Homo sapiens
  misc_RNA (1)...(19): siRNA sense strand
cauggguucucucucuaga

SEQ ID NO: 1727493 - RNA, 19 nt, Homo sapiens
  misc_RNA (1)...(19): siRNA sense strand
ucaagcuucucccaacaca

SEQ ID NO: 1727494 - RNA, 19 nt, Homo sapiens
  misc_RNA (1)...(19): siRNA sense strand
ugacauguacuggcuguau

SEQ ID NO: 1727495 - RNA, 19 nt, Homo sapiens
  misc_RNA (1)...(19): siRNA sense strand
uguaacaagaugacaugua

SEQ ID NO: 1727496 - RNA, 19 nt, Homo sapiens
  misc_RNA (1)...(19): siRNA sense strand
cuagagaagaacucaaaga

SEQ ID NO: 1727497 - RNA, 19 nt, Homo sapiens
  misc_RNA (1)...(19): siRNA sense strand
gaggagcugcuggaucuga

SEQ ID NO: 1727498 - RNA, 19 nt, Homo sapiens
  misc_RNA (1)...(19): siRNA sense strand
aguggaagcagaguuauuu

SEQ ID NO: 1727499 - RNA, 19 nt, Homo sapiens
  misc_RNA (1)...(19): siRNA sense strand
ucaaagagcugcccauguu

SEQ ID NO: 1727500 - RNA, 19 nt, Homo sapiens
  misc_RNA (1)...(19): siRNA sense strand
gaucagagauggccagguu

SEQ ID NO: 1727501 - RNA, 19 nt, Homo sapiens
  misc_RNA (1)...(19): siRNA sense strand
uggaagagauggaaaguaa

SEQ ID NO: 1727502 - RNA, 19 nt, Homo sapiens
  misc_RNA (1)...(19): siRNA sense strand
ccacagaauuucaagauau

SEQ ID NO: 1727503 - RNA, 19 nt, Homo sapiens
  misc_RNA (1)...(19): siRNA sense strand
gaacucccauagagaaauu

SEQ ID NO: 1727504 - RNA, 19 nt, Homo sapiens
  misc_RNA (1)...(19): siRNA sense strand
gaucaaagguaugguaaga

SEQ ID NO: 1727505 - RNA, 19 nt, Homo sapiens
  misc_RNA (1)...(19): siRNA sense strand
gagcaaacccuuacaaaca

SEQ ID NO: 1727506 - RNA, 19 nt, Homo sapiens
  misc_RNA (1)...(19): siRNA sense strand
uaaggugacugcagagaaa

SEQ ID NO: 1727507 - RNA, 19 nt, Homo sapiens
  misc_RNA (1)...(19): siRNA sense strand
gagaaaccaggaucuauuu

SEQ ID NO: 1727508 - RNA, 19 nt, Homo sapiens
  misc_RNA (1)...(19): siRNA sense strand
guaagagagugauucagaa

SEQ ID NO: 1727509 - RNA, 19 nt, Homo sapiens
  misc_RNA (1)...(19): siRNA sense strand
ggagaaaccaggaucuauu

SEQ ID NO: 1727510 - RNA, 19 nt, Homo sapiens
  misc_RNA (1)...(19): siRNA sense strand
gaucugauguagaccaaga

SEQ ID NO: 1727511 - RNA, 19 nt, Homo sapiens
  misc_RNA (1)...(19): siRNA sense strand
guaacaagaugacauguac

SEQ ID NO: 1727512 - RNA, 19 nt, Homo sapiens
  misc_RNA (1)...(19): siRNA sense strand
gaaucacugucaaaucuga

SEQ ID NO: 1727513 - RNA, 19 nt, Homo sapiens
  misc_RNA (1)...(19): siRNA sense strand
uuaauggacuuacgaaaug

SEQ ID NO: 1727514 - RNA, 19 nt, Homo sapiens
  misc_RNA (1)...(19): siRNA sense strand
ucaaagguaugguaagaga

SEQ ID NO: 1727515 - RNA, 19 nt, Homo sapiens
  misc_RNA (1)...(19): siRNA sense strand
cgauggagaugaauuuaga

SEQ ID NO: 1727516 - RNA, 19 nt, Homo sapiens
  misc_RNA (1)...(19): siRNA sense strand
gugagaagcuggguaguga

SEQ ID NO: 1727517 - RNA, 19 nt, Homo sapiens
  misc_RNA (1)...(19): siRNA sense strand
gcaaacccuuacaaacauu

SEQ ID NO: 1727518 - RNA, 19 nt, Homo sapiens
  misc_RNA (1)...(19): siRNA sense strand
gaaauuagacggauguaac

SEQ ID NO: 1727519 - RNA, 19 nt, Homo sapiens
  misc_RNA (1)...(19): siRNA sense strand
gcacuuagacaaccuaugg

SEQ ID NO: 1727520 - RNA, 19 nt, Homo sapiens
  misc_RNA (1)...(19): siRNA sense strand
aagaggaaauuguggauga

SEQ ID NO: 1727521 - RNA, 19 nt, Homo sapiens
  misc_RNA (1)...(19): siRNA sense strand
gguaagagagugauucaga

SEQ ID NO: 1727522 - RNA, 19 nt, Homo sapiens
  misc_RNA (1)...(19): siRNA sense strand
gagaagcucaggaggauga

SEQ ID NO: 1727523 - RNA, 19 nt, Homo sapiens
  misc_RNA (1)...(19): siRNA sense strand
ggucaaagaguuaguggaa

SEQ ID NO: 1727524 - RNA, 19 nt, Homo sapiens
  misc_RNA (1)...(19): siRNA sense strand
gaaggacuacuuugaaauc

SEQ ID NO: 1727525 - RNA, 19 nt, Homo sapiens
  misc_RNA (1)...(19): siRNA sense strand
ugaucaagcucagcagaua

SEQ ID NO: 1727526 - RNA, 19 nt, Homo sapiens
  misc_RNA (1)...(19): siRNA sense strand
gccacagaauuucaagaua

SEQ ID NO: 1727527 - RNA, 19 nt, Homo sapiens
  misc_RNA (1)...(19): siRNA sense strand
gaaauuaauggacuuacga

SEQ ID NO: 1727528 - RNA, 19 nt, Homo sapiens
  misc_RNA (1)...(19): siRNA sense strand
caggaaaucuuggacuuug

SEQ ID NO: 1727529 - RNA, 19 nt, Homo sapiens
  misc_RNA (1)...(19): siRNA sense strand
gaugcaauuucuuaaggaa

SEQ ID NO: 1727530 - RNA, 19 nt, Homo sapiens
  misc_RNA (1)...(19): siRNA sense strand
ugaauauugucucuccuuu

SEQ ID NO: 1727531 - RNA, 19 nt, Homo sapiens
  misc_RNA (1)...(19): siRNA sense strand
caaaucugauccaggaaau

SEQ ID NO: 1727532 - RNA, 19 nt, Homo sapiens
  misc_RNA (1)...(19): siRNA sense strand
aagaugagguagaagacua

SEQ ID NO: 1727533 - RNA, 19 nt, Homo sapiens
  misc_RNA (1)...(19): siRNA sense strand
ggaugcaauuucuuaagga

SEQ ID NO: 1727534 - RNA, 19 nt, Homo sapiens
  misc_RNA (1)...(19): siRNA sense strand
aaaccaggaucuauuugga

SEQ ID NO: 1727535 - RNA, 19 nt, Homo sapiens
  misc_RNA (1)...(19): siRNA sense strand
guuaguggaagcagaguua

SEQ ID NO: 1727536 - RNA, 19 nt, Homo sapiens
  misc_RNA (1)...(19): siRNA sense strand
uggaaucacugucaaaucu

SEQ ID NO: 1727537 - RNA, 19 nt, Homo sapiens
  misc_RNA (1)...(19): siRNA sense strand
ggaagagacccuagcauac

SEQ ID NO: 1727538 - RNA, 19 nt, Homo sapiens
  misc_RNA (1)...(19): siRNA sense strand
cugaaggacuacuuugaaa

SEQ ID NO: 1727539 - RNA, 19 nt, Homo sapiens
  misc_RNA (1)...(19): siRNA sense strand
cuagcauacuugaauauug

SEQ ID NO: 1727540 - RNA, 19 nt, Homo sapiens
  misc_RNA (1)...(19): siRNA sense strand
gugaaugcauguacuucuu

SEQ ID NO: 1727541 - RNA, 19 nt, Homo sapiens
  misc_RNA (1)...(19): siRNA sense strand
gaucaagcucagcagauaa

SEQ ID NO: 1727542 - RNA, 19 nt, Homo sapiens
  misc_RNA (1)...(19): siRNA sense strand
gaagagacccuagcauacu

SEQ ID NO: 1727543 - RNA, 19 nt, Homo sapiens
  misc_RNA (1)...(19): siRNA sense strand
gaagcuggguagugaaugc

SEQ ID NO: 1727544 - RNA, 19 nt, Homo sapiens
  misc_RNA (1)...(19): siRNA sense strand
ggagaugaauuuagaaaag

SEQ ID NO: 1727545 - RNA, 19 nt, Homo sapiens
  misc_RNA (1)...(19): siRNA sense strand
agacggauguaacaagaug

SEQ ID NO: 1727546 - RNA, 19 nt, Homo sapiens
  misc_RNA (1)...(19): siRNA sense strand
ggaugaggcuaauaaaaga

SEQ ID NO: 1727547 - RNA, 19 nt, Homo sapiens
  misc_RNA (1)...(19): siRNA sense strand
cagaguuauuugcccguua

SEQ ID NO: 1727548 - RNA, 19 nt, Homo sapiens
  misc_RNA (1)...(19): siRNA sense strand
ggacuuacgaaaugaauac

SEQ ID NO: 1727549 - RNA, 19 nt, Homo sapiens
  misc_RNA (1)...(19): siRNA sense strand
gaagagauggaaaguaagg

SEQ ID NO: 1727550 - RNA, 19 nt, Homo sapiens
  misc_RNA (1)...(19): siRNA sense strand
aggaagagacccuagcaua

SEQ ID NO: 1727551 - RNA, 19 nt, Homo sapiens
  misc_RNA (1)...(19): siRNA sense strand
gggaagaugagguagaaga

SEQ ID NO: 1727552 - RNA, 19 nt, Homo sapiens
  misc_RNA (1)...(19): siRNA sense strand
guacuggcuguaugcaaua

SEQ ID NO: 1727553 - RNA, 19 nt, Homo sapiens
  misc_RNA (1)...(19): siRNA sense strand
uuagacggauguaacaaga

SEQ ID NO: 1727554 - RNA, 19 nt, Homo sapiens
  misc_RNA (1)...(19): siRNA sense strand
guaaggaguggcuagagaa

SEQ ID NO: 1727555 - RNA, 19 nt, Homo sapiens
  misc_RNA (1)...(19): siRNA sense strand
agaaggcacuggaagagau

SEQ ID NO: 1727556 - RNA, 19 nt, Homo sapiens
  misc_RNA (1)...(19): siRNA sense strand
caggaucuauuuggauuug

SEQ ID NO: 1727557 - RNA, 19 nt, Homo sapiens
  misc_RNA (1)...(19): siRNA sense strand
gaaauccagaucagagaug

SEQ ID NO: 1727558 - RNA, 19 nt, Homo sapiens
  misc_RNA (1)...(19): siRNA sense strand
ggaaauuguggaugagaga

SEQ ID NO: 1727559 - RNA, 19 nt, Homo sapiens
  misc_RNA (1)...(19): siRNA sense strand
gaaaccaggaucuauuugg

SEQ ID NO: 1727560 - RNA, 19 nt, Homo sapiens
  misc_RNA (1)...(19): siRNA sense strand
gacauguacuggcuguaug

SEQ ID NO: 1727561 - RNA, 19 nt, Homo sapiens
  misc_RNA (1)...(19): siRNA sense strand
gauguggaaucacugucaa

SEQ ID NO: 1727562 - RNA, 19 nt, Homo sapiens
  misc_RNA (1)...(19): siRNA sense strand
uggaggagcugcuggaucu

SEQ ID NO: 1727563 - RNA, 19 nt, Homo sapiens
  misc_RNA (1)...(19): siRNA sense strand
gacccuagcauacuugaau

SEQ ID NO: 1727564 - RNA, 19 nt, Homo sapiens
  misc_RNA (1)...(19): siRNA sense strand
aggaguggcuagagaagaa

SEQ ID NO: 1727565 - RNA, 19 nt, Homo sapiens
  misc_RNA (1)...(19): siRNA sense strand
gcaagcggaugaggcuaau

SEQ ID NO: 1727566 - RNA, 19 nt, Homo sapiens
  misc_RNA (1)...(19): siRNA sense strand
ggugacugcagagaaauua

SEQ ID NO: 1727567 - RNA, 19 nt, Homo sapiens
  misc_RNA (1)...(19): siRNA sense strand
caacacagagcuagauuuu

SEQ ID NO: 1727568 - RNA, 19 nt, Homo sapiens
  misc_RNA (1)...(19): siRNA sense strand
gcucaagcuucucccaaca

SEQ ID NO: 1727569 - RNA, 19 nt, Homo sapiens
  misc_RNA (1)...(19): siRNA sense strand
gacgauauuugggaagaug

SEQ ID NO: 1727570 - RNA, 19 nt, Homo sapiens
  misc_RNA (1)...(19): siRNA sense strand
gagauggccagguucaaug

SEQ ID NO: 1727571 - RNA, 19 nt, Homo sapiens
  misc_RNA (1)...(19): siRNA sense strand
gcaaagccugucugaagga

SEQ ID NO: 1727572 - RNA, 19 nt, Homo sapiens
  misc_RNA (1)...(19): siRNA sense strand
gcaauauuucuguuggauu

SEQ ID NO: 1727573 - RNA, 19 nt, Homo sapiens
  misc_RNA (1)...(19): siRNA sense strand
uauuuacgauggagaugaa

SEQ ID NO: 1727574 - RNA, 19 nt, Homo sapiens
  misc_RNA (1)...(19): siRNA sense strand
ggauguugacgacgauauu

SEQ ID NO: 1727575 - RNA, 19 nt, Homo sapiens
  misc_RNA (1)...(19): siRNA sense strand
uaauggacuuacgaaauga

SEQ ID NO: 1727576 - RNA, 19 nt, Homo sapiens
  misc_RNA (1)...(19): siRNA sense strand
cagagaaauuaauggacuu

SEQ ID NO: 1727577 - RNA, 19 nt, Homo sapiens
  misc_RNA (1)...(19): siRNA sense strand
guaaggugacugcagagaa

SEQ ID NO: 1727578 - RNA, 19 nt, Homo sapiens
  misc_RNA (1)...(19): siRNA sense strand
uggcagaugugguguacug

SEQ ID NO: 1727579 - RNA, 19 nt, Homo sapiens
  misc_RNA (1)...(19): siRNA sense strand
ggaaaucuuggacuuugau

SEQ ID NO: 1727580 - RNA, 19 nt, Homo sapiens
  misc_RNA (1)...(19): siRNA sense strand
gauguugacgacgauauuu

SEQ ID NO: 1727581 - RNA, 19 nt, Homo sapiens
  misc_RNA (1)...(19): siRNA sense strand
aagcggaugaggcuaauaa

SEQ ID NO: 1727582 - RNA, 19 nt, Homo sapiens
  misc_RNA (1)...(19): siRNA sense strand
agaguuauuugcccguuau

SEQ ID NO: 1727583 - RNA, 19 nt, Homo sapiens
  misc_RNA (1)...(19): siRNA sense strand
aagccugucugaaggacua

SEQ ID NO: 1727584 - RNA, 19 nt, Homo sapiens
  misc_RNA (1)...(19): siRNA sense strand
gagaagcuggguagugaau

SEQ ID NO: 1727585 - RNA, 19 nt, Homo sapiens
  misc_RNA (1)...(19): siRNA sense strand
agagagcagugcaggaugu

SEQ ID NO: 1727586 - RNA, 19 nt, Homo sapiens
  misc_RNA (1)...(19): siRNA sense strand
aagagacccuagcauacuu

SEQ ID NO: 1727587 - RNA, 19 nt, Homo sapiens
  misc_RNA (1)...(19): siRNA sense strand
ucaaaucugauccaggaaa

SEQ ID NO: 1727588 - RNA, 19 nt, Homo sapiens
  misc_RNA (1)...(19): siRNA sense strand
ugauguagaccaagaggaa

SEQ ID NO: 1727589 - RNA, 19 nt, Homo sapiens
  misc_RNA (1)...(19): siRNA sense strand
uggauuugccacagaauuu

SEQ ID NO: 1727590 - RNA, 19 nt, Homo sapiens
  misc_RNA (1)...(19): siRNA sense strand
guggaacucccauagagaa

SEQ ID NO: 1727591 - RNA, 19 nt, Homo sapiens
  misc_RNA (1)...(19): siRNA sense strand
gcacuggaagagauggaaa

SEQ ID NO: 1727592 - RNA, 19 nt, Homo sapiens
  misc_RNA (1)...(19): siRNA sense strand
gauggcagaugugguguac

SEQ ID NO: 1727593 - RNA, 19 nt, Homo sapiens
  misc_RNA (1)...(19): siRNA sense strand
uuacgauggagaugaauuu

SEQ ID NO: 1727594 - RNA, 19 nt, Homo sapiens
  misc_RNA (1)...(19): siRNA sense strand
aguaaggaguggcuagaga

SEQ ID NO: 1727595 - RNA, 19 nt, Homo sapiens
  misc_RNA (1)...(19): siRNA sense strand
cuggcuguaugcaauauuu

SEQ ID NO: 1727596 - RNA, 19 nt, Homo sapiens
  misc_RNA (1)...(19): siRNA sense strand
uguacuggcuguaugcaau

SEQ ID NO: 1727597 - RNA, 19 nt, Homo sapiens
  misc_RNA (1)...(19): siRNA sense strand
ucgagaagcucaggaggau

SEQ ID NO: 1727598 - RNA, 19 nt, Homo sapiens
  misc_RNA (1)...(19): siRNA sense strand
ggcuagagaagaacucaaa

SEQ ID NO: 1727599 - RNA, 19 nt, Homo sapiens
  misc_RNA (1)...(19): siRNA sense strand
ucaaagagcugcccauguu

SEQ ID NO: 1727600 - RNA, 19 nt, Homo sapiens
  misc_RNA (1)...(19): siRNA sense strand
gaucagagauggccagguu

SEQ ID NO: 1727601 - RNA, 19 nt, Homo sapiens
  misc_RNA (1)...(19): siRNA sense strand
uggaagagauggaaaguaa

SEQ ID NO: 1727602 - RNA, 19 nt, Homo sapiens
  misc_RNA (1)...(19): siRNA sense strand
ccacagaauuucaagauau

SEQ ID NO: 1727603 - RNA, 19 nt, Homo sapiens
  misc_RNA (1)...(19): siRNA sense strand
gaacucccauagagaaauu

SEQ ID NO: 1727604 - RNA, 19 nt, Homo sapiens
  misc_RNA (1)...(19): siRNA sense strand
gaucaaagguaugguaaga

SEQ ID NO: 1727605 - RNA, 19 nt, Homo sapiens
  misc_RNA (1)...(19): siRNA sense strand
gagcaaacccuuacaaaca

SEQ ID NO: 1727606 - RNA, 19 nt, Homo sapiens
  misc_RNA (1)...(19): siRNA sense strand
uaaggugacugcagagaaa

SEQ ID NO: 1727607 - RNA, 19 nt, Homo sapiens
  misc_RNA (1)...(19): siRNA sense strand
gagaaaccaggaucuauuu

SEQ ID NO: 1727608 - RNA, 19 nt, Homo sapiens
  misc_RNA (1)...(19): siRNA sense strand
guaagagagugauucagaa

SEQ ID NO: 1727609 - RNA, 19 nt, Homo sapiens
  misc_RNA (1)...(19): siRNA sense strand
ggagaaaccaggaucuauu

SEQ ID NO: 1727610 - RNA, 19 nt, Homo sapiens
  misc_RNA (1)...(19): siRNA sense strand
gaucugauguagaccaaga

SEQ ID NO: 1727611 - RNA, 19 nt, Homo sapiens
  misc_RNA (1)...(19): siRNA sense strand
guaacaagaugacauguac

SEQ ID NO: 1727612 - RNA, 19 nt, Homo sapiens
  misc_RNA (1)...(19): siRNA sense strand
gaaucacugucaaaucuga

SEQ ID NO: 1727613 - RNA, 19 nt, Homo sapiens
  misc_RNA (1)...(19): siRNA sense strand
uuaauggacuuacgaaaug

SEQ ID NO: 1727614 - RNA, 19 nt, Homo sapiens
  misc_RNA (1)...(19): siRNA sense strand
ucaaagguaugguaagaga

SEQ ID NO: 1727615 - RNA, 19 nt, Homo sapiens
  misc_RNA (1)...(19): siRNA sense strand
cgauggagaugaauuuaga

SEQ ID NO: 1727616 - RNA, 19 nt, Homo sapiens
  misc_RNA (1)...(19): siRNA sense strand
gugagaagcuggguaguga

SEQ ID NO: 1727617 - RNA, 19 nt, Homo sapiens
  misc_RNA (1)...(19): siRNA sense strand
gcaaacccuuacaaacauu

SEQ ID NO: 1727618 - RNA, 19 nt, Homo sapiens
  misc_RNA (1)...(19): siRNA sense strand
gaaauuagacggauguaac

SEQ ID NO: 1727619 - RNA, 19 nt, Homo sapiens
  misc_RNA (1)...(19): siRNA sense strand
gcacuuagacaaccuaugg

SEQ ID NO: 1727620 - RNA, 19 nt, Homo sapiens
  misc_RNA (1)...(19): siRNA sense strand
aagaggaaauuguggauga

SEQ ID NO: 1727621 - RNA, 19 nt, Homo sapiens
  misc_RNA (1)...(19): siRNA sense strand
gguaagagagugauucaga

SEQ ID NO: 1727622 - RNA, 19 nt, Homo sapiens
  misc_RNA (1)...(19): siRNA sense strand
gagaagcucaggaggauga

SEQ ID NO: 1727623 - RNA, 19 nt, Homo sapiens
  misc_RNA (1)...(19): siRNA sense strand
ggucaaagaguuaguggaa

SEQ ID NO: 1727624 - RNA, 19 nt, Homo sapiens
  misc_RNA (1)...(19): siRNA sense strand
gaaggacuacuuugaaauc

SEQ ID NO: 1727625 - RNA, 19 nt, Homo sapiens
  misc_RNA (1)...(19): siRNA sense strand
ugaucaagcucagcagaua

SEQ ID NO: 1727626 - RNA, 19 nt, Homo sapiens
  misc_RNA (1)...(19): siRNA sense strand
gccacagaauuucaagaua

SEQ ID NO: 1727627 - RNA, 19 nt, Homo sapiens
  misc_RNA (1)...(19): siRNA sense strand
gaaauuaauggacuuacga

SEQ ID NO: 1727628 - RNA, 19 nt, Homo sapiens
  misc_RNA (1)...(19): siRNA sense strand
caggaaaucuuggacuuug

SEQ ID NO: 1727629 - RNA, 19 nt, Homo sapiens
  misc_RNA (1)...(19): siRNA sense strand
gaugcaauuucuuaaggaa

SEQ ID NO: 1727630 - RNA, 19 nt, Homo sapiens
  misc_RNA (1)...(19): siRNA sense strand
ugaauauugucucuccuuu

SEQ ID NO: 1727631 - RNA, 19 nt, Homo sapiens
  misc_RNA (1)...(19): siRNA sense strand
caaaucugauccaggaaau

SEQ ID NO: 1727632 - RNA, 19 nt, Homo sapiens
  misc_RNA (1)...(19): siRNA sense strand
aagaugagguagaagacua

SEQ ID NO: 1727633 - RNA, 19 nt, Homo sapiens
  misc_RNA (1)...(19): siRNA sense strand
ggaugcaauuucuuaagga

SEQ ID NO: 1727634 - RNA, 19 nt, Homo sapiens
  misc_RNA (1)...(19): siRNA sense strand
aaaccaggaucuauuugga

SEQ ID NO: 1727635 - RNA, 19 nt, Homo sapiens
  misc_RNA (1)...(19): siRNA sense strand
guuaguggaagcagaguua

SEQ ID NO: 1727636 - RNA, 19 nt, Homo sapiens
  misc_RNA (1)...(19): siRNA sense strand
uggaaucacugucaaaucu

SEQ ID NO: 1727637 - RNA, 19 nt, Homo sapiens
  misc_RNA (1)...(19): siRNA sense strand
ggaagagacccuagcauac

SEQ ID NO: 1727638 - RNA, 19 nt, Homo sapiens
  misc_RNA (1)...(19): siRNA sense strand
cugaaggacuacuuugaaa

SEQ ID NO: 1727639 - RNA, 19 nt, Homo sapiens
  misc_RNA (1)...(19): siRNA sense strand
cuagcauacuugaauauug

SEQ ID NO: 1727640 - RNA, 19 nt, Homo sapiens
  misc_RNA (1)...(19): siRNA sense strand
gugaaugcauguacuucuu

SEQ ID NO: 1727641 - RNA, 19 nt, Homo sapiens
  misc_RNA (1)...(19): siRNA sense strand
gaucaagcucagcagauaa

SEQ ID NO: 1727642 - RNA, 19 nt, Homo sapiens
  misc_RNA (1)...(19): siRNA sense strand
gaagagacccuagcauacu

SEQ ID NO: 1727643 - RNA, 19 nt, Homo sapiens
  misc_RNA (1)...(19): siRNA sense strand
gaagcuggguagugaaugc

SEQ ID NO: 1727644 - RNA, 19 nt, Homo sapiens
  misc_RNA (1)...(19): siRNA sense strand
ggagaugaauuuagaaaag

SEQ ID NO: 1727645 - RNA, 19 nt, Homo sapiens
  misc_RNA (1)...(19): siRNA sense strand
agacggauguaacaagaug

SEQ ID NO: 1727646 - RNA, 19 nt, Homo sapiens
  misc_RNA (1)...(19): siRNA sense strand
ggaugaggcuaauaaaaga

SEQ ID NO: 1727647 - RNA, 19 nt, Homo sapiens
  misc_RNA (1)...(19): siRNA sense strand
cagaguuauuugcccguua

SEQ ID NO: 1727648 - RNA, 19 nt, Homo sapiens
  misc_RNA (1)...(19): siRNA sense strand
ggacuuacgaaaugaauac

SEQ ID NO: 1727649 - RNA, 19 nt, Homo sapiens
  misc_RNA (1)...(19): siRNA sense strand
gaagagauggaaaguaagg

SEQ ID NO: 1727650 - RNA, 19 nt, Homo sapiens
  misc_RNA (1)...(19): siRNA sense strand
aggaagagacccuagcaua

SEQ ID NO: 1727651 - RNA, 19 nt, Homo sapiens
  misc_RNA (1)...(19): siRNA sense strand
gggaagaugagguagaaga

SEQ ID NO: 1727652 - RNA, 19 nt, Homo sapiens
  misc_RNA (1)...(19): siRNA sense strand
guacuggcuguaugcaaua

SEQ ID NO: 1727653 - RNA, 19 nt, Homo sapiens
  misc_RNA (1)...(19): siRNA sense strand
uuagacggauguaacaaga

SEQ ID NO: 1727654 - RNA, 19 nt, Homo sapiens
  misc_RNA (1)...(19): siRNA sense strand
guaaggaguggcuagagaa

SEQ ID NO: 1727655 - RNA, 19 nt, Homo sapiens
  misc_RNA (1)...(19): siRNA sense strand
agaaggcacuggaagagau

SEQ ID NO: 1727656 - RNA, 19 nt, Homo sapiens
  misc_RNA (1)...(19): siRNA sense strand
caggaucuauuuggauuug

SEQ ID NO: 1727657 - RNA, 19 nt, Homo sapiens
  misc_RNA (1)...(19): siRNA sense strand
gaaauccagaucagagaug

SEQ ID NO: 1727658 - RNA, 19 nt, Homo sapiens
  misc_RNA (1)...(19): siRNA sense strand
ggaaauuguggaugagaga

SEQ ID NO: 1727659 - RNA, 19 nt, Homo sapiens
  misc_RNA (1)...(19): siRNA sense strand
gaaaccaggaucuauuugg

SEQ ID NO: 1727660 - RNA, 19 nt, Homo sapiens
  misc_RNA (1)...(19): siRNA sense strand
gacauguacuggcuguaug

SEQ ID NO: 1727661 - RNA, 19 nt, Homo sapiens
  misc_RNA (1)...(19): siRNA sense strand
gauguggaaucacugucaa

SEQ ID NO: 1727662 - RNA, 19 nt, Homo sapiens
  misc_RNA (1)...(19): siRNA sense strand
uggaggagcugcuggaucu

SEQ ID NO: 1727663 - RNA, 19 nt, Homo sapiens
  misc_RNA (1)...(19): siRNA sense strand
gacccuagcauacuugaau

SEQ ID NO: 1727664 - RNA, 19 nt, Homo sapiens
  misc_RNA (1)...(19): siRNA sense strand
aggaguggcuagagaagaa

SEQ ID NO: 1727665 - RNA, 19 nt, Homo sapiens
  misc_RNA (1)...(19): siRNA sense strand
gcaagcggaugaggcuaau

SEQ ID NO: 1727666 - RNA, 19 nt, Homo sapiens
  misc_RNA (1)...(19): siRNA sense strand
ggugacugcagagaaauua

SEQ ID NO: 1727667 - RNA, 19 nt, Homo sapiens
  misc_RNA (1)...(19): siRNA sense strand
caacacagagcuagauuuu

SEQ ID NO: 1727668 - RNA, 19 nt, Homo sapiens
  misc_RNA (1)...(19): siRNA sense strand
gcucaagcuucucccaaca

SEQ ID NO: 1727669 - RNA, 19 nt, Homo sapiens
  misc_RNA (1)...(19): siRNA sense strand
gacgauauuugggaagaug

SEQ ID NO: 1727670 - RNA, 19 nt, Homo sapiens
  misc_RNA (1)...(19): siRNA sense strand
gagauggccagguucaaug

SEQ ID NO: 1727671 - RNA, 19 nt, Homo sapiens
  misc_RNA (1)...(19): siRNA sense strand
gcaaagccugucugaagga

SEQ ID NO: 1727672 - RNA, 19 nt, Homo sapiens
  misc_RNA (1)...(19): siRNA sense strand
gcaauauuucuguuggauu

SEQ ID NO: 1727673 - RNA, 19 nt, Homo sapiens
  misc_RNA (1)...(19): siRNA sense strand
uauuuacgauggagaugaa

SEQ ID NO: 1727674 - RNA, 19 nt, Homo sapiens
  misc_RNA (1)...(19): siRNA sense strand
ggauguugacgacgauauu

SEQ ID NO: 1727675 - RNA, 19 nt, Homo sapiens
  misc_RNA (1)...(19): siRNA sense strand
uaauggacuuacgaaauga

SEQ ID NO: 1727676 - RNA, 19 nt, Homo sapiens
  misc_RNA (1)...(19): siRNA sense strand
cagagaaauuaauggacuu

SEQ ID NO: 1727677 - RNA, 19 nt, Homo sapiens
  misc_RNA (1)...(19): siRNA sense strand
guaaggugacugcagagaa

SEQ ID NO: 1727678 - RNA, 19 nt, Homo sapiens
  misc_RNA (1)...(19): siRNA sense strand
uggcagaugugguguacug

SEQ ID NO: 1727679 - RNA, 19 nt, Homo sapiens
  misc_RNA (1)...(19): siRNA sense strand
ggaaaucuuggacuuugau

SEQ ID NO: 1727680 - RNA, 19 nt, Homo sapiens
  misc_RNA (1)...(19): siRNA sense strand
gauguugacgacgauauuu

SEQ ID NO: 1727681 - RNA, 19 nt, Homo sapiens
  misc_RNA (1)...(19): siRNA sense strand
aagcggaugaggcuaauaa

SEQ ID NO: 1727682 - RNA, 19 nt, Homo sapiens
  misc_RNA (1)...(19): siRNA sense strand
agaguuauuugcccguuau

SEQ ID NO: 1727683 - RNA, 19 nt, Homo sapiens
  misc_RNA (1)...(19): siRNA sense strand
aagccugucugaaggacua

SEQ ID NO: 1727684 - RNA, 19 nt, Homo sapiens
  misc_RNA (1)...(19): siRNA sense strand
gagaagcuggguagugaau

SEQ ID NO: 1727685 - RNA, 19 nt, Homo sapiens
  misc_RNA (1)...(19): siRNA sense strand
agagagcagugcaggaugu

SEQ ID NO: 1727686 - RNA, 19 nt, Homo sapiens
  misc_RNA (1)...(19): siRNA sense strand
aagagacccuagcauacuu

SEQ ID NO: 1727687 - RNA, 19 nt, Homo sapiens
  misc_RNA (1)...(19): siRNA sense strand
ucaaaucugauccaggaaa

SEQ ID NO: 1727688 - RNA, 19 nt, Homo sapiens
  misc_RNA (1)...(19): siRNA sense strand
ugauguagaccaagaggaa

SEQ ID NO: 1727689 - RNA, 19 nt, Homo sapiens
  misc_RNA (1)...(19): siRNA sense strand
uggauuugccacagaauuu

SEQ ID NO: 1727690 - RNA, 19 nt, Homo sapiens
  misc_RNA (1)...(19): siRNA sense strand
guggaacucccauagagaa

SEQ ID NO: 1727691 - RNA, 19 nt, Homo sapiens
  misc_RNA (1)...(19): siRNA sense strand
gcacuggaagagauggaaa

SEQ ID NO: 1727692 - RNA, 19 nt, Homo sapiens
  misc_RNA (1)...(19): siRNA sense strand
gauggcagaugugguguac

SEQ ID NO: 1727693 - RNA, 19 nt, Homo sapiens
  misc_RNA (1)...(19): siRNA sense strand
uuacgauggagaugaauuu

SEQ ID NO: 1727694 - RNA, 19 nt, Homo sapiens
  misc_RNA (1)...(19): siRNA sense strand
aguaaggaguggcuagaga

SEQ ID NO: 1727695 - RNA, 19 nt, Homo sapiens
  misc_RNA (1)...(19): siRNA sense strand
cuggcuguaugcaauauuu

SEQ ID NO: 1727696 - RNA, 19 nt, Homo sapiens
  misc_RNA (1)...(19): siRNA sense strand
uguacuggcuguaugcaau

SEQ ID NO: 1727697 - RNA, 19 nt, Homo sapiens
  misc_RNA (1)...(19): siRNA sense strand
ucgagaagcucaggaggau

SEQ ID NO: 1727698 - RNA, 19 nt, Homo sapiens
  misc_RNA (1)...(19): siRNA sense strand
ggcuagagaagaacucaaa

SEQ ID NO: 1727699 - RNA, 19 nt, Homo sapiens
  misc_RNA (1)...(19): siRNA sense strand
ucaaagagcugcccauguu

SEQ ID NO: 1727700 - RNA, 19 nt, Homo sapiens
  misc_RNA (1)...(19): siRNA sense strand
gaucagagauggccagguu

SEQ ID NO: 1727701 - RNA, 19 nt, Homo sapiens
  misc_RNA (1)...(19): siRNA sense strand
uggaagagauggaaaguaa

SEQ ID NO: 1727702 - RNA, 19 nt, Homo sapiens
  misc_RNA (1)...(19): siRNA sense strand
ccacagaauuucaagauau

SEQ ID NO: 1727703 - RNA, 19 nt, Homo sapiens
  misc_RNA (1)...(19): siRNA sense strand
gaacucccauagagaaauu

SEQ ID NO: 1727704 - RNA, 19 nt, Homo sapiens
  misc_RNA (1)...(19): siRNA sense strand
gaucaaagguaugguaaga

SEQ ID NO: 1727705 - RNA, 19 nt, Homo sapiens
  misc_RNA (1)...(19): siRNA sense strand
gagcaaacccuuacaaaca

SEQ ID NO: 1727706 - RNA, 19 nt, Homo sapiens
  misc_RNA (1)...(19): siRNA sense strand
uaaggugacugcagagaaa

SEQ ID NO: 1727707 - RNA, 19 nt, Homo sapiens
  misc_RNA (1)...(19): siRNA sense strand
gagaaaccaggaucuauuu

SEQ ID NO: 1727708 - RNA, 19 nt, Homo sapiens
  misc_RNA (1)...(19): siRNA sense strand
guaagagagugauucagaa

SEQ ID NO: 1727709 - RNA, 19 nt, Homo sapiens
  misc_RNA (1)...(19): siRNA sense strand
ggagaaaccaggaucuauu

SEQ ID NO: 1727710 - RNA, 19 nt, Homo sapiens
  misc_RNA (1)...(19): siRNA sense strand
gaucugauguagaccaaga

SEQ ID NO: 1727711 - RNA, 19 nt, Homo sapiens
  misc_RNA (1)...(19): siRNA sense strand
guaacaagaugacauguac

SEQ ID NO: 1727712 - RNA, 19 nt, Homo sapiens
  misc_RNA (1)...(19): siRNA sense strand
gaaucacugucaaaucuga

SEQ ID NO: 1727713 - RNA, 19 nt, Homo sapiens
  misc_RNA (1)...(19): siRNA sense strand
uuaauggacuuacgaaaug

SEQ ID NO: 1727714 - RNA, 19 nt, Homo sapiens
  misc_RNA (1)...(19): siRNA sense strand
ucaaagguaugguaagaga

SEQ ID NO: 1727715 - RNA, 19 nt, Homo sapiens
  misc_RNA (1)...(19): siRNA sense strand
cgauggagaugaauuuaga

SEQ ID NO: 1727716 - RNA, 19 nt, Homo sapiens
  misc_RNA (1)...(19): siRNA sense strand
gugagaagcuggguaguga

SEQ ID NO: 1727717 - RNA, 19 nt, Homo sapiens
  misc_RNA (1)...(19): siRNA sense strand
gcaaacccuuacaaacauu

SEQ ID NO: 1727718 - RNA, 19 nt, Homo sapiens
  misc_RNA (1)...(19): siRNA sense strand
gaaauuagacggauguaac

SEQ ID NO: 1727719 - RNA, 19 nt, Homo sapiens
  misc_RNA (1)...(19): siRNA sense strand
gcacuuagacaaccuaugg

SEQ ID NO: 1727720 - RNA, 19 nt, Homo sapiens
  misc_RNA (1)...(19): siRNA sense strand
aagaggaaauuguggauga

SEQ ID NO: 1727721 - RNA, 19 nt, Homo sapiens
  misc_RNA (1)...(19): siRNA sense strand
gguaagagagugauucaga

SEQ ID NO: 1727722 - RNA, 19 nt, Homo sapiens
  misc_RNA (1)...(19): siRNA sense strand
gagaagcucaggaggauga

SEQ ID NO: 1727723 - RNA, 19 nt, Homo sapiens
  misc_RNA (1)...(19): siRNA sense strand
ggucaaagaguuaguggaa

SEQ ID NO: 1727724 - RNA, 19 nt, Homo sapiens
  misc_RNA (1)...(19): siRNA sense strand
gaaggacuacuuugaaauc

SEQ ID NO: 1727725 - RNA, 19 nt, Homo sapiens
  misc_RNA (1)...(19): siRNA sense strand
ugaucaagcucagcagaua

SEQ ID NO: 1727726 - RNA, 19 nt, Homo sapiens
  misc_RNA (1)...(19): siRNA sense strand
gccacagaauuucaagaua

SEQ ID NO: 1727727 - RNA, 19 nt, Homo sapiens
  misc_RNA (1)...(19): siRNA sense strand
gaaauuaauggacuuacga

SEQ ID NO: 1727728 - RNA, 19 nt, Homo sapiens
  misc_RNA (1)...(19): siRNA sense strand
caggaaaucuuggacuuug

SEQ ID NO: 1727729 - RNA, 19 nt, Homo sapiens
  misc_RNA (1)...(19): siRNA sense strand
gaugcaauuucuuaaggaa

SEQ ID NO: 1727730 - RNA, 19 nt, Homo sapiens
  misc_RNA (1)...(19): siRNA sense strand
ugaauauugucucuccuuu

SEQ ID NO: 1727731 - RNA, 19 nt, Homo sapiens
  misc_RNA (1)...(19): siRNA sense strand
caaaucugauccaggaaau

SEQ ID NO: 1727732 - RNA, 19 nt, Homo sapiens
  misc_RNA (1)...(19): siRNA sense strand
aagaugagguagaagacua

SEQ ID NO: 1727733 - RNA, 19 nt, Homo sapiens
  misc_RNA (1)...(19): siRNA sense strand
ggaugcaauuucuuaagga

SEQ ID NO: 1727734 - RNA, 19 nt, Homo sapiens
  misc_RNA (1)...(19): siRNA sense strand
aaaccaggaucuauuugga

SEQ ID NO: 1727735 - RNA, 19 nt, Homo sapiens
  misc_RNA (1)...(19): siRNA sense strand
guuaguggaagcagaguua

SEQ ID NO: 1727736 - RNA, 19 nt, Homo sapiens
  misc_RNA (1)...(19): siRNA sense strand
uggaaucacugucaaaucu

SEQ ID NO: 1727737 - RNA, 19 nt, Homo sapiens
  misc_RNA (1)...(19): siRNA sense strand
ggaagagacccuagcauac

SEQ ID NO: 1727738 - RNA, 19 nt, Homo sapiens
  misc_RNA (1)...(19): siRNA sense strand
cugaaggacuacuuugaaa

SEQ ID NO: 1727739 - RNA, 19 nt, Homo sapiens
  misc_RNA (1)...(19): siRNA sense strand
cuagcauacuugaauauug

SEQ ID NO: 1727740 - RNA, 19 nt, Homo sapiens
  misc_RNA (1)...(19): siRNA sense strand
gugaaugcauguacuucuu

SEQ ID NO: 1727741 - RNA, 19 nt, Homo sapiens
  misc_RNA (1)...(19): siRNA sense strand
gaucaagcucagcagauaa

SEQ ID NO: 1727742 - RNA, 19 nt, Homo sapiens
  misc_RNA (1)...(19): siRNA sense strand
gaagagacccuagcauacu

SEQ ID NO: 1727743 - RNA, 19 nt, Homo sapiens
  misc_RNA (1)...(19): siRNA sense strand
gaagcuggguagugaaugc

SEQ ID NO: 1727744 - RNA, 19 nt, Homo sapiens
  misc_RNA (1)...(19): siRNA sense strand
ggagaugaauuuagaaaag

SEQ ID NO: 1727745 - RNA, 19 nt, Homo sapiens
  misc_RNA (1)...(19): siRNA sense strand
agacggauguaacaagaug

SEQ ID NO: 1727746 - RNA, 19 nt, Homo sapiens
  misc_RNA (1)...(19): siRNA sense strand
ggaugaggcuaauaaaaga

SEQ ID NO: 1727747 - RNA, 19 nt, Homo sapiens
  misc_RNA (1)...(19): siRNA sense strand
cagaguuauuugcccguua

SEQ ID NO: 1727748 - RNA, 19 nt, Homo sapiens
  misc_RNA (1)...(19): siRNA sense strand
ggacuuacgaaaugaauac

SEQ ID NO: 1727749 - RNA, 19 nt, Homo sapiens
  misc_RNA (1)...(19): siRNA sense strand
gaagagauggaaaguaagg

SEQ ID NO: 1727750 - RNA, 19 nt, Homo sapiens
  misc_RNA (1)...(19): siRNA sense strand
aggaagagacccuagcaua

SEQ ID NO: 1727751 - RNA, 19 nt, Homo sapiens
  misc_RNA (1)...(19): siRNA sense strand
gggaagaugagguagaaga

SEQ ID NO: 1727752 - RNA, 19 nt, Homo sapiens
  misc_RNA (1)...(19): siRNA sense strand
guacuggcuguaugcaaua

SEQ ID NO: 1727753 - RNA, 19 nt, Homo sapiens
  misc_RNA (1)...(19): siRNA sense strand
uuagacggauguaacaaga

SEQ ID NO: 1727754 - RNA, 19 nt, Homo sapiens
  misc_RNA (1)...(19): siRNA sense strand
guaaggaguggcuagagaa

SEQ ID NO: 1727755 - RNA, 19 nt, Homo sapiens
  misc_RNA (1)...(19): siRNA sense strand
agaaggcacuggaagagau

SEQ ID NO: 1727756 - RNA, 19 nt, Homo sapiens
  misc_RNA (1)...(19): siRNA sense strand
caggaucuauuuggauuug

SEQ ID NO: 1727757 - RNA, 19 nt, Homo sapiens
  misc_RNA (1)...(19): siRNA sense strand
gaaauccagaucagagaug

SEQ ID NO: 1727758 - RNA, 19 nt, Homo sapiens
  misc_RNA (1)...(19): siRNA sense strand
ggaaauuguggaugagaga

SEQ ID NO: 1727759 - RNA, 19 nt, Homo sapiens
  misc_RNA (1)...(19): siRNA sense strand
gaaaccaggaucuauuugg

SEQ ID NO: 1727760 - RNA, 19 nt, Homo sapiens
  misc_RNA (1)...(19): siRNA sense strand
gacauguacuggcuguaug

SEQ ID NO: 1727761 - RNA, 19 nt, Homo sapiens
  misc_RNA (1)...(19): siRNA sense strand
gauguggaaucacugucaa

SEQ ID NO: 1727762 - RNA, 19 nt, Homo sapiens
  misc_RNA (1)...(19): siRNA sense strand
uggaggagcugcuggaucu

SEQ ID NO: 1727763 - RNA, 19 nt, Homo sapiens
  misc_RNA (1)...(19): siRNA sense strand
gacccuagcauacuugaau

SEQ ID NO: 1727764 - RNA, 19 nt, Homo sapiens
  misc_RNA (1)...(19): siRNA sense strand
aggaguggcuagagaagaa

SEQ ID NO: 1727765 - RNA, 19 nt, Homo sapiens
  misc_RNA (1)...(19): siRNA sense strand
gcaagcggaugaggcuaau

SEQ ID NO: 1727766 - RNA, 19 nt, Homo sapiens
  misc_RNA (1)...(19): siRNA sense strand
ggugacugcagagaaauua

SEQ ID NO: 1727767 - RNA, 19 nt, Homo sapiens
  misc_RNA (1)...(19): siRNA sense strand
caacacagagcuagauuuu

SEQ ID NO: 1727768 - RNA, 19 nt, Homo sapiens
  misc_RNA (1)...(19): siRNA sense strand
gcucaagcuucucccaaca

SEQ ID NO: 1727769 - RNA, 19 nt, Homo sapiens
  misc_RNA (1)...(19): siRNA sense strand
gacgauauuugggaagaug

SEQ ID NO: 1727770 - RNA, 19 nt, Homo sapiens
  misc_RNA (1)...(19): siRNA sense strand
gagauggccagguucaaug

SEQ ID NO: 1727771 - RNA, 19 nt, Homo sapiens
  misc_RNA (1)...(19): siRNA sense strand
gcaaagccugucugaagga

SEQ ID NO: 1727772 - RNA, 19 nt, Homo sapiens
  misc_RNA (1)...(19): siRNA sense strand
gcaauauuucuguuggauu

SEQ ID NO: 1727773 - RNA, 19 nt, Homo sapiens
  misc_RNA (1)...(19): siRNA sense strand
uauuuacgauggagaugaa

SEQ ID NO: 1727774 - RNA, 19 nt, Homo sapiens
  misc_RNA (1)...(19): siRNA sense strand
ggauguugacgacgauauu

SEQ ID NO: 1727775 - RNA, 19 nt, Homo sapiens
  misc_RNA (1)...(19): siRNA sense strand
uaauggacuuacgaaauga

SEQ ID NO: 1727776 - RNA, 19 nt, Homo sapiens
  misc_RNA (1)...(19): siRNA sense strand
cagagaaauuaauggacuu

SEQ ID NO: 1727777 - RNA, 19 nt, Homo sapiens
  misc_RNA (1)...(19): siRNA sense strand
guaaggugacugcagagaa

SEQ ID NO: 1727778 - RNA, 19 nt, Homo sapiens
  misc_RNA (1)...(19): siRNA sense strand
uggcagaugugguguacug

SEQ ID NO: 1727779 - RNA, 19 nt, Homo sapiens
  misc_RNA (1)...(19): siRNA sense strand
ggaaaucuuggacuuugau

SEQ ID NO: 1727780 - RNA, 19 nt, Homo sapiens
  misc_RNA (1)...(19): siRNA sense strand
gauguugacgacgauauuu

SEQ ID NO: 1727781 - RNA, 19 nt, Homo sapiens
  misc_RNA (1)...(19): siRNA sense strand
aagcggaugaggcuaauaa

SEQ ID NO: 1727782 - RNA, 19 nt, Homo sapiens
  misc_RNA (1)...(19): siRNA sense strand
agaguuauuugcccguuau

SEQ ID NO: 1727783 - RNA, 19 nt, Homo sapiens
  misc_RNA (1)...(19): siRNA sense strand
aagccugucugaaggacua

SEQ ID NO: 1727784 - RNA, 19 nt, Homo sapiens
  misc_RNA (1)...(19): siRNA sense strand
gagaagcuggguagugaau

SEQ ID NO: 1727785 - RNA, 19 nt, Homo sapiens
  misc_RNA (1)...(19): siRNA sense strand
agagagcagugcaggaugu

SEQ ID NO: 1727786 - RNA, 19 nt, Homo sapiens
  misc_RNA (1)...(19): siRNA sense strand
aagagacccuagcauacuu

SEQ ID NO: 1727787 - RNA, 19 nt, Homo sapiens
  misc_RNA (1)...(19): siRNA sense strand
ucaaaucugauccaggaaa

SEQ ID NO: 1727788 - RNA, 19 nt, Homo sapiens
  misc_RNA (1)...(19): siRNA sense strand
ugauguagaccaagaggaa

SEQ ID NO: 1727789 - RNA, 19 nt, Homo sapiens
  misc_RNA (1)...(19): siRNA sense strand
uggauuugccacagaauuu

SEQ ID NO: 1727790 - RNA, 19 nt, Homo sapiens
  misc_RNA (1)...(19): siRNA sense strand
guggaacucccauagagaa

SEQ ID NO: 1727791 - RNA, 19 nt, Homo sapiens
  misc_RNA (1)...(19): siRNA sense strand
gcacuggaagagauggaaa

SEQ ID NO: 1727792 - RNA, 19 nt, Homo sapiens
  misc_RNA (1)...(19): siRNA sense strand
gauggcagaugugguguac

SEQ ID NO: 1727793 - RNA, 19 nt, Homo sapiens
  misc_RNA (1)...(19): siRNA sense strand
uuacgauggagaugaauuu

SEQ ID NO: 1727794 - RNA, 19 nt, Homo sapiens
  misc_RNA (1)...(19): siRNA sense strand
aguaaggaguggcuagaga

SEQ ID NO: 1727795 - RNA, 19 nt, Homo sapiens
  misc_RNA (1)...(19): siRNA sense strand
cuggcuguaugcaauauuu

SEQ ID NO: 1727796 - RNA, 19 nt, Homo sapiens
  misc_RNA (1)...(19): siRNA sense strand
uguacuggcuguaugcaau

SEQ ID NO: 1727797 - RNA, 19 nt, Homo sapiens
  misc_RNA (1)...(19): siRNA sense strand
ucgagaagcucaggaggau

SEQ ID NO: 1727798 - RNA, 19 nt, Homo sapiens
  misc_RNA (1)...(19): siRNA sense strand
ggcuagagaagaacucaaa

SEQ ID NO: 1727799 - RNA, 19 nt, Homo sapiens
  misc_RNA (1)...(19): siRNA sense strand
ucaaagagcugcccauguu

SEQ ID NO: 1727800 - RNA, 19 nt, Homo sapiens
  misc_RNA (1)...(19): siRNA sense strand
gaucagagauggccagguu

SEQ ID NO: 1727801 - RNA, 19 nt, Homo sapiens
  misc_RNA (1)...(19): siRNA sense strand
uggaagagauggaaaguaa

SEQ ID NO: 1727802 - RNA, 19 nt, Homo sapiens
  misc_RNA (1)...(19): siRNA sense strand
ccacagaauuucaagauau

SEQ ID NO: 1727803 - RNA, 19 nt, Homo sapiens
  misc_RNA (1)...(19): siRNA sense strand
gaacucccauagagaaauu

SEQ ID NO: 1727804 - RNA, 19 nt, Homo sapiens
  misc_RNA (1)...(19): siRNA sense strand
gaucaaagguaugguaaga

SEQ ID NO: 1727805 - RNA, 19 nt, Homo sapiens
  misc_RNA (1)...(19): siRNA sense strand
gagcaaacccuuacaaaca

SEQ ID NO: 1727806 - RNA, 19 nt, Homo sapiens
  misc_RNA (1)...(19): siRNA sense strand
uaaggugacugcagagaaa

SEQ ID NO: 1727807 - RNA, 19 nt, Homo sapiens
  misc_RNA (1)...(19): siRNA sense strand
gagaaaccaggaucuauuu

SEQ ID NO: 1727808 - RNA, 19 nt, Homo sapiens
  misc_RNA (1)...(19): siRNA sense strand
guaagagagugauucagaa

SEQ ID NO: 1727809 - RNA, 19 nt, Homo sapiens
  misc_RNA (1)...(19): siRNA sense strand
ggagaaaccaggaucuauu

SEQ ID NO: 1727810 - RNA, 19 nt, Homo sapiens
  misc_RNA (1)...(19): siRNA sense strand
gaucugauguagaccaaga

SEQ ID NO: 1727811 - RNA, 19 nt, Homo sapiens
  misc_RNA (1)...(19): siRNA sense strand
guaacaagaugacauguac

SEQ ID NO: 1727812 - RNA, 19 nt, Homo sapiens
  misc_RNA (1)...(19): siRNA sense strand
gaaucacugucaaaucuga

SEQ ID NO: 1727813 - RNA, 19 nt, Homo sapiens
  misc_RNA (1)...(19): siRNA sense strand
uuaauggacuuacgaaaug

SEQ ID NO: 1727814 - RNA, 19 nt, Homo sapiens
  misc_RNA (1)...(19): siRNA sense strand
ucaaagguaugguaagaga

SEQ ID NO: 1727815 - RNA, 19 nt, Homo sapiens
  misc_RNA (1)...(19): siRNA sense strand
cgauggagaugaauuuaga

SEQ ID NO: 1727816 - RNA, 19 nt, Homo sapiens
  misc_RNA (1)...(19): siRNA sense strand
gugagaagcuggguaguga

SEQ ID NO: 1727817 - RNA, 19 nt, Homo sapiens
  misc_RNA (1)...(19): siRNA sense strand
gcaaacccuuacaaacauu

SEQ ID NO: 1727818 - RNA, 19 nt, Homo sapiens
  misc_RNA (1)...(19): siRNA sense strand
gaaauuagacggauguaac

SEQ ID NO: 1727819 - RNA, 19 nt, Homo sapiens
  misc_RNA (1)...(19): siRNA sense strand
gcacuuagacaaccuaugg

SEQ ID NO: 1727820 - RNA, 19 nt, Homo sapiens
  misc_RNA (1)...(19): siRNA sense strand
aagaggaaauuguggauga

SEQ ID NO: 1727821 - RNA, 19 nt, Homo sapiens
  misc_RNA (1)...(19): siRNA sense strand
gguaagagagugauucaga

SEQ ID NO: 1727822 - RNA, 19 nt, Homo sapiens
  misc_RNA (1)...(19): siRNA sense strand
gagaagcucaggaggauga

SEQ ID NO: 1727823 - RNA, 19 nt, Homo sapiens
  misc_RNA (1)...(19): siRNA sense strand
ggucaaagaguuaguggaa

SEQ ID NO: 1727824 - RNA, 19 nt, Homo sapiens
  misc_RNA (1)...(19): siRNA sense strand
gaaggacuacuuugaaauc

SEQ ID NO: 1727825 - RNA, 19 nt, Homo sapiens
  misc_RNA (1)...(19): siRNA sense strand
ugaucaagcucagcagaua

SEQ ID NO: 1727826 - RNA, 19 nt, Homo sapiens
  misc_RNA (1)...(19): siRNA sense strand
gccacagaauuucaagaua

SEQ ID NO: 1727827 - RNA, 19 nt, Homo sapiens
  misc_RNA (1)...(19): siRNA sense strand
gaaauuaauggacuuacga

SEQ ID NO: 1727828 - RNA, 19 nt, Homo sapiens
  misc_RNA (1)...(19): siRNA sense strand
caggaaaucuuggacuuug

SEQ ID NO: 1727829 - RNA, 19 nt, Homo sapiens
  misc_RNA (1)...(19): siRNA sense strand
gaugcaauuucuuaaggaa

SEQ ID NO: 1727830 - RNA, 19 nt, Homo sapiens
  misc_RNA (1)...(19): siRNA sense strand
ugaauauugucucuccuuu

SEQ ID NO: 1727831 - RNA, 19 nt, Homo sapiens
  misc_RNA (1)...(19): siRNA sense strand
caaaucugauccaggaaau

SEQ ID NO: 1727832 - RNA, 19 nt, Homo sapiens
  misc_RNA (1)...(19): siRNA sense strand
aagaugagguagaagacua

SEQ ID NO: 1727833 - RNA, 19 nt, Homo sapiens
  misc_RNA (1)...(19): siRNA sense strand
ggaugcaauuucuuaagga

SEQ ID NO: 1727834 - RNA, 19 nt, Homo sapiens
  misc_RNA (1)...(19): siRNA sense strand
aaaccaggaucuauuugga

SEQ ID NO: 1727835 - RNA, 19 nt, Homo sapiens
  misc_RNA (1)...(19): siRNA sense strand
guuaguggaagcagaguua

SEQ ID NO: 1727836 - RNA, 19 nt, Homo sapiens
  misc_RNA (1)...(19): siRNA sense strand
uggaaucacugucaaaucu

SEQ ID NO: 1727837 - RNA, 19 nt, Homo sapiens
  misc_RNA (1)...(19): siRNA sense strand
ggaagagacccuagcauac

SEQ ID NO: 1727838 - RNA, 19 nt, Homo sapiens
  misc_RNA (1)...(19): siRNA sense strand
cugaaggacuacuuugaaa

SEQ ID NO: 1727839 - RNA, 19 nt, Homo sapiens
  misc_RNA (1)...(19): siRNA sense strand
cuagcauacuugaauauug

SEQ ID NO: 1727840 - RNA, 19 nt, Homo sapiens
  misc_RNA (1)...(19): siRNA sense strand
gugaaugcauguacuucuu

SEQ ID NO: 1727841 - RNA, 19 nt, Homo sapiens
  misc_RNA (1)...(19): siRNA sense strand
gaucaagcucagcagauaa

SEQ ID NO: 1727842 - RNA, 19 nt, Homo sapiens
  misc_RNA (1)...(19): siRNA sense strand
gaagagacccuagcauacu

SEQ ID NO: 1727843 - RNA, 19 nt, Homo sapiens
  misc_RNA (1)...(19): siRNA sense strand
gaagcuggguagugaaugc

SEQ ID NO: 1727844 - RNA, 19 nt, Homo sapiens
  misc_RNA (1)...(19): siRNA sense strand
ggagaugaauuuagaaaag

SEQ ID NO: 1727845 - RNA, 19 nt, Homo sapiens
  misc_RNA (1)...(19): siRNA sense strand
agacggauguaacaagaug

SEQ ID NO: 1727846 - RNA, 19 nt, Homo sapiens
  misc_RNA (1)...(19): siRNA sense strand
ggaugaggcuaauaaaaga

SEQ ID NO: 1727847 - RNA, 19 nt, Homo sapiens
  misc_RNA (1)...(19): siRNA sense strand
cagaguuauuugcccguua

SEQ ID NO: 1727848 - RNA, 19 nt, Homo sapiens
  misc_RNA (1)...(19): siRNA sense strand
ggacuuacgaaaugaauac

SEQ ID NO: 1727849 - RNA, 19 nt, Homo sapiens
  misc_RNA (1)...(19): siRNA sense strand
gaagagauggaaaguaagg

SEQ ID NO: 1727850 - RNA, 19 nt, Homo sapiens
  misc_RNA (1)...(19): siRNA sense strand
aggaagagacccuagcaua

SEQ ID NO: 1727851 - RNA, 19 nt, Homo sapiens
  misc_RNA (1)...(19): siRNA sense strand
gggaagaugagguagaaga

SEQ ID NO: 1727852 - RNA, 19 nt, Homo sapiens
  misc_RNA (1)...(19): siRNA sense strand
guacuggcuguaugcaaua

SEQ ID NO: 1727853 - RNA, 19 nt, Homo sapiens
  misc_RNA (1)...(19): siRNA sense strand
uuagacggauguaacaaga

SEQ ID NO: 1727854 - RNA, 19 nt, Homo sapiens
  misc_RNA (1)...(19): siRNA sense strand
guaaggaguggcuagagaa

SEQ ID NO: 1727855 - RNA, 19 nt, Homo sapiens
  misc_RNA (1)...(19): siRNA sense strand
agaaggcacuggaagagau

SEQ ID NO: 1727856 - RNA, 19 nt, Homo sapiens
  misc_RNA (1)...(19): siRNA sense strand
caggaucuauuuggauuug

SEQ ID NO: 1727857 - RNA, 19 nt, Homo sapiens
  misc_RNA (1)...(19): siRNA sense strand
gaaauccagaucagagaug

SEQ ID NO: 1727858 - RNA, 19 nt, Homo sapiens
  misc_RNA (1)...(19): siRNA sense strand
ggaaauuguggaugagaga

SEQ ID NO: 1727859 - RNA, 19 nt, Homo sapiens
  misc_RNA (1)...(19): siRNA sense strand
gaaaccaggaucuauuugg

SEQ ID NO: 1727860 - RNA, 19 nt, Homo sapiens
  misc_RNA (1)...(19): siRNA sense strand
gacauguacuggcuguaug

SEQ ID NO: 1727861 - RNA, 19 nt, Homo sapiens
  misc_RNA (1)...(19): siRNA sense strand
gauguggaaucacugucaa

SEQ ID NO: 1727862 - RNA, 19 nt, Homo sapiens
  misc_RNA (1)...(19): siRNA sense strand
uggaggagcugcuggaucu

SEQ ID NO: 1727863 - RNA, 19 nt, Homo sapiens
  misc_RNA (1)...(19): siRNA sense strand
gacccuagcauacuugaau

SEQ ID NO: 1727864 - RNA, 19 nt, Homo sapiens
  misc_RNA (1)...(19): siRNA sense strand
aggaguggcuagagaagaa

SEQ ID NO: 1727865 - RNA, 19 nt, Homo sapiens
  misc_RNA (1)...(19): siRNA sense strand
gcaagcggaugaggcuaau

SEQ ID NO: 1727866 - RNA, 19 nt, Homo sapiens
  misc_RNA (1)...(19): siRNA sense strand
ggugacugcagagaaauua

SEQ ID NO: 1727867 - RNA, 19 nt, Homo sapiens
  misc_RNA (1)...(19): siRNA sense strand
caacacagagcuagauuuu

SEQ ID NO: 1727868 - RNA, 19 nt, Homo sapiens
  misc_RNA (1)...(19): siRNA sense strand
gcucaagcuucucccaaca

SEQ ID NO: 1727869 - RNA, 19 nt, Homo sapiens
  misc_RNA (1)...(19): siRNA sense strand
gacgauauuugggaagaug

SEQ ID NO: 1727870 - RNA, 19 nt, Homo sapiens
  misc_RNA (1)...(19): siRNA sense strand
gagauggccagguucaaug

SEQ ID NO: 1727871 - RNA, 19 nt, Homo sapiens
  misc_RNA (1)...(19): siRNA sense strand
gcaaagccugucugaagga

SEQ ID NO: 1727872 - RNA, 19 nt, Homo sapiens
  misc_RNA (1)...(19): siRNA sense strand
gcaauauuucuguuggauu

SEQ ID NO: 1727873 - RNA, 19 nt, Homo sapiens
  misc_RNA (1)...(19): siRNA sense strand
uauuuacgauggagaugaa

SEQ ID NO: 1727874 - RNA, 19 nt, Homo sapiens
  misc_RNA (1)...(19): siRNA sense strand
ggauguugacgacgauauu

SEQ ID NO: 1727875 - RNA, 19 nt, Homo sapiens
  misc_RNA (1)...(19): siRNA sense strand
uaauggacuuacgaaauga

SEQ ID NO: 1727876 - RNA, 19 nt, Homo sapiens
  misc_RNA (1)...(19): siRNA sense strand
cagagaaauuaauggacuu

SEQ ID NO: 1727877 - RNA, 19 nt, Homo sapiens
  misc_RNA (1)...(19): siRNA sense strand
guaaggugacugcagagaa

SEQ ID NO: 1727878 - RNA, 19 nt, Homo sapiens
  misc_RNA (1)...(19): siRNA sense strand
uggcagaugugguguacug

SEQ ID NO: 1727879 - RNA, 19 nt, Homo sapiens
  misc_RNA (1)...(19): siRNA sense strand
ggaaaucuuggacuuugau

SEQ ID NO: 1727880 - RNA, 19 nt, Homo sapiens
  misc_RNA (1)...(19): siRNA sense strand
gauguugacgacgauauuu

SEQ ID NO: 1727881 - RNA, 19 nt, Homo sapiens
  misc_RNA (1)...(19): siRNA sense strand
aagcggaugaggcuaauaa

SEQ ID NO: 1727882 - RNA, 19 nt, Homo sapiens
  misc_RNA (1)...(19): siRNA sense strand
agaguuauuugcccguuau

SEQ ID NO: 1727883 - RNA, 19 nt, Homo sapiens
  misc_RNA (1)...(19): siRNA sense strand
aagccugucugaaggacua

SEQ ID NO: 1727884 - RNA, 19 nt, Homo sapiens
  misc_RNA (1)...(19): siRNA sense strand
gagaagcuggguagugaau

SEQ ID NO: 1727885 - RNA, 19 nt, Homo sapiens
  misc_RNA (1)...(19): siRNA sense strand
agagagcagugcaggaugu

SEQ ID NO: 1727886 - RNA, 19 nt, Homo sapiens
  misc_RNA (1)...(19): siRNA sense strand
aagagacccuagcauacuu

SEQ ID NO: 1727887 - RNA, 19 nt, Homo sapiens
  misc_RNA (1)...(19): siRNA sense strand
ucaaaucugauccaggaaa

SEQ ID NO: 1727888 - RNA, 19 nt, Homo sapiens
  misc_RNA (1)...(19): siRNA sense strand
ugauguagaccaagaggaa

SEQ ID NO: 1727889 - RNA, 19 nt, Homo sapiens
  misc_RNA (1)...(19): siRNA sense strand
uggauuugccacagaauuu

SEQ ID NO: 1727890 - RNA, 19 nt, Homo sapiens
  misc_RNA (1)...(19): siRNA sense strand
guggaacucccauagagaa

SEQ ID NO: 1727891 - RNA, 19 nt, Homo sapiens
  misc_RNA (1)...(19): siRNA sense strand
gcacuggaagagauggaaa

SEQ ID NO: 1727892 - RNA, 19 nt, Homo sapiens
  misc_RNA (1)...(19): siRNA sense strand
gauggcagaugugguguac

SEQ ID NO: 1727893 - RNA, 19 nt, Homo sapiens
  misc_RNA (1)...(19): siRNA sense strand
uuacgauggagaugaauuu

SEQ ID NO: 1727894 - RNA, 19 nt, Homo sapiens
  misc_RNA (1)...(19): siRNA sense strand
aguaaggaguggcuagaga

SEQ ID NO: 1727895 - RNA, 19 nt, Homo sapiens
  misc_RNA (1)...(19): siRNA sense strand
cuggcuguaugcaauauuu

SEQ ID NO: 1727896 - RNA, 19 nt, Homo sapiens
  misc_RNA (1)...(19): siRNA sense strand
uguacuggcuguaugcaau

SEQ ID NO: 1727897 - RNA, 19 nt, Homo sapiens
  misc_RNA (1)...(19): siRNA sense strand
ucgagaagcucaggaggau

SEQ ID NO: 1727898 - RNA, 19 nt, Homo sapiens
  misc_RNA (1)...(19): siRNA sense strand
ggcuagagaagaacucaaa

SEQ ID NO: 1727899 - RNA, 19 nt, Homo sapiens
  misc_RNA (1)...(19): siRNA sense strand
ucaaagagcugcccauguu

SEQ ID NO: 1727900 - RNA, 19 nt, Homo sapiens
  misc_RNA (1)...(19): siRNA sense strand
gaucagagauggccagguu

SEQ ID NO: 1727901 - RNA, 19 nt, Homo sapiens
  misc_RNA (1)...(19): siRNA sense strand
uggaagagauggaaaguaa

SEQ ID NO: 1727902 - RNA, 19 nt, Homo sapiens
  misc_RNA (1)...(19): siRNA sense strand
gaucaaagguaugguaaga

SEQ ID NO: 1727903 - RNA, 19 nt, Homo sapiens
  misc_RNA (1)...(19): siRNA sense strand
gaacucccauagagaaauu

SEQ ID NO: 1727904 - RNA, 19 nt, Homo sapiens
  misc_RNA (1)...(19): siRNA sense strand
gagcaaacccuuacaaaca

SEQ ID NO: 1727905 - RNA, 19 nt, Homo sapiens
  misc_RNA (1)...(19): siRNA sense strand
uaaggugacugcagagaaa

SEQ ID NO: 1727906 - RNA, 19 nt, Homo sapiens
  misc_RNA (1)...(19): siRNA sense strand
guaagagagugauucagaa

SEQ ID NO: 1727907 - RNA, 19 nt, Homo sapiens
  misc_RNA (1)...(19): siRNA sense strand
gaucugauguagaccaaga

SEQ ID NO: 1727908 - RNA, 19 nt, Homo sapiens
  misc_RNA (1)...(19): siRNA sense strand
guaacaagaugacauguac

SEQ ID NO: 1727909 - RNA, 19 nt, Homo sapiens
  misc_RNA (1)...(19): siRNA sense strand
gaaucacugucaaaucuga

SEQ ID NO: 1727910 - RNA, 19 nt, Homo sapiens
  misc_RNA (1)...(19): siRNA sense strand
uuaauggacuuacgaaaug

SEQ ID NO: 1727911 - RNA, 19 nt, Homo sapiens
  misc_RNA (1)...(19): siRNA sense strand
ucaaagguaugguaagaga

SEQ ID NO: 1727912 - RNA, 19 nt, Homo sapiens
  misc_RNA (1)...(19): siRNA sense strand
gugagaagcuggguaguga

SEQ ID NO: 1727913 - RNA, 19 nt, Homo sapiens
  misc_RNA (1)...(19): siRNA sense strand
gcaaacccuuacaaacauu

SEQ ID NO: 1727914 - RNA, 19 nt, Homo sapiens
  misc_RNA (1)...(19): siRNA sense strand
gaaauuagacggauguaac

SEQ ID NO: 1727915 - RNA, 19 nt, Homo sapiens
  misc_RNA (1)...(19): siRNA sense strand
aagaggaaauuguggauga

SEQ ID NO: 1727916 - RNA, 19 nt, Homo sapiens
  misc_RNA (1)...(19): siRNA sense strand
gguaagagagugauucaga

SEQ ID NO: 1727917 - RNA, 19 nt, Homo sapiens
  misc_RNA (1)...(19): siRNA sense strand
ggucaaagaguuaguggaa

SEQ ID NO: 1727918 - RNA, 19 nt, Homo sapiens
  misc_RNA (1)...(19): siRNA sense strand
gaaggacuacuuugaaauc

SEQ ID NO: 1727919 - RNA, 19 nt, Homo sapiens
  misc_RNA (1)...(19): siRNA sense strand
ugaucaagcucagcagaua

SEQ ID NO: 1727920 - RNA, 19 nt, Homo sapiens
  misc_RNA (1)...(19): siRNA sense strand
caggaaaucuuggacuuug

SEQ ID NO: 1727921 - RNA, 19 nt, Homo sapiens
  misc_RNA (1)...(19): siRNA sense strand
gaaauuaauggacuuacga

SEQ ID NO: 1727922 - RNA, 19 nt, Homo sapiens
  misc_RNA (1)...(19): siRNA sense strand
caaaucugauccaggaaau

SEQ ID NO: 1727923 - RNA, 19 nt, Homo sapiens
  misc_RNA (1)...(19): siRNA sense strand
ugaauauugucucuccuuu

SEQ ID NO: 1727924 - RNA, 19 nt, Homo sapiens
  misc_RNA (1)...(19): siRNA sense strand
aagaugagguagaagacua

SEQ ID NO: 1727925 - RNA, 19 nt, Homo sapiens
  misc_RNA (1)...(19): siRNA sense strand
uggaaucacugucaaaucu

SEQ ID NO: 1727926 - RNA, 19 nt, Homo sapiens
  misc_RNA (1)...(19): siRNA sense strand
ggaagagacccuagcauac

SEQ ID NO: 1727927 - RNA, 19 nt, Homo sapiens
  misc_RNA (1)...(19): siRNA sense strand
guuaguggaagcagaguua

SEQ ID NO: 1727928 - RNA, 19 nt, Homo sapiens
  misc_RNA (1)...(19): siRNA sense strand
cugaaggacuacuuugaaa

SEQ ID NO: 1727929 - RNA, 19 nt, Homo sapiens
  misc_RNA (1)...(19): siRNA sense strand
gaucaagcucagcagauaa

SEQ ID NO: 1727930 - RNA, 19 nt, Homo sapiens
  misc_RNA (1)...(19): siRNA sense strand
gugaaugcauguacuucuu

SEQ ID NO: 1727931 - RNA, 19 nt, Homo sapiens
  misc_RNA (1)...(19): siRNA sense strand
cuagcauacuugaauauug

SEQ ID NO: 1727932 - RNA, 19 nt, Homo sapiens
  misc_RNA (1)...(19): siRNA sense strand
gaagcuggguagugaaugc

SEQ ID NO: 1727933 - RNA, 19 nt, Homo sapiens
  misc_RNA (1)...(19): siRNA sense strand
gaagagacccuagcauacu

SEQ ID NO: 1727934 - RNA, 19 nt, Homo sapiens
  misc_RNA (1)...(19): siRNA sense strand
cagaguuauuugcccguua

SEQ ID NO: 1727935 - RNA, 19 nt, Homo sapiens
  misc_RNA (1)...(19): siRNA sense strand
agacggauguaacaagaug

SEQ ID NO: 1727936 - RNA, 19 nt, Homo sapiens
  misc_RNA (1)...(19): siRNA sense strand
ggaugaggcuaauaaaaga

SEQ ID NO: 1727937 - RNA, 19 nt, Homo sapiens
  misc_RNA (1)...(19): siRNA sense strand
ggacuuacgaaaugaauac

SEQ ID NO: 1727938 - RNA, 19 nt, Homo sapiens
  misc_RNA (1)...(19): siRNA sense strand
gaagagauggaaaguaagg

SEQ ID NO: 1727939 - RNA, 19 nt, Homo sapiens
  misc_RNA (1)...(19): siRNA sense strand
ggaaauuguggaugagaga

SEQ ID NO: 1727940 - RNA, 19 nt, Homo sapiens
  misc_RNA (1)...(19): siRNA sense strand
gggaagaugagguagaaga

SEQ ID NO: 1727941 - RNA, 19 nt, Homo sapiens
  misc_RNA (1)...(19): siRNA sense strand
guacuggcuguaugcaaua

SEQ ID NO: 1727942 - RNA, 19 nt, Homo sapiens
  misc_RNA (1)...(19): siRNA sense strand
uuagacggauguaacaaga

SEQ ID NO: 1727943 - RNA, 19 nt, Homo sapiens
  misc_RNA (1)...(19): siRNA sense strand
guaaggaguggcuagagaa

SEQ ID NO: 1727944 - RNA, 19 nt, Homo sapiens
  misc_RNA (1)...(19): siRNA sense strand
aggaagagacccuagcaua

SEQ ID NO: 1727945 - RNA, 19 nt, Homo sapiens
  misc_RNA (1)...(19): siRNA sense strand
agaaggcacuggaagagau

SEQ ID NO: 1727946 - RNA, 19 nt, Homo sapiens
  misc_RNA (1)...(19): siRNA sense strand
gaaauccagaucagagaug

SEQ ID NO: 1727947 - RNA, 19 nt, Homo sapiens
  misc_RNA (1)...(19): siRNA sense strand
gauguggaaucacugucaa

SEQ ID NO: 1727948 - RNA, 19 nt, Homo sapiens
  misc_RNA (1)...(19): siRNA sense strand
gacauguacuggcuguaug

SEQ ID NO: 1727949 - RNA, 19 nt, Homo sapiens
  misc_RNA (1)...(19): siRNA sense strand
uggaggagcugcuggaucu

SEQ ID NO: 1727950 - RNA, 19 nt, Homo sapiens
  misc_RNA (1)...(19): siRNA sense strand
gacccuagcauacuugaau

SEQ ID NO: 1727951 - RNA, 19 nt, Homo sapiens
  misc_RNA (1)...(19): siRNA sense strand
aggaguggcuagagaagaa

SEQ ID NO: 1727952 - RNA, 19 nt, Homo sapiens
  misc_RNA (1)...(19): siRNA sense strand
gcaagcggaugaggcuaau

SEQ ID NO: 1727953 - RNA, 19 nt, Homo sapiens
  misc_RNA (1)...(19): siRNA sense strand
ggugacugcagagaaauua

SEQ ID NO: 1727954 - RNA, 19 nt, Homo sapiens
  misc_RNA (1)...(19): siRNA sense strand
caacacagagcuagauuuu

SEQ ID NO: 1727955 - RNA, 19 nt, Homo sapiens
  misc_RNA (1)...(19): siRNA sense strand
gcucaagcuucucccaaca

SEQ ID NO: 1727956 - RNA, 19 nt, Homo sapiens
  misc_RNA (1)...(19): siRNA sense strand
gacgauauuugggaagaug

SEQ ID NO: 1727957 - RNA, 19 nt, Homo sapiens
  misc_RNA (1)...(19): siRNA sense strand
gagauggccagguucaaug

SEQ ID NO: 1727958 - RNA, 19 nt, Homo sapiens
  misc_RNA (1)...(19): siRNA sense strand
gcaaagccugucugaagga

SEQ ID NO: 1727959 - RNA, 19 nt, Homo sapiens
  misc_RNA (1)...(19): siRNA sense strand
gcaauauuucuguuggauu

SEQ ID NO: 1727960 - RNA, 19 nt, Homo sapiens
  misc_RNA (1)...(19): siRNA sense strand
uggcagaugugguguacug

SEQ ID NO: 1727961 - RNA, 19 nt, Homo sapiens
  misc_RNA (1)...(19): siRNA sense strand
ggauguugacgacgauauu

SEQ ID NO: 1727962 - RNA, 19 nt, Homo sapiens
  misc_RNA (1)...(19): siRNA sense strand
uaauggacuuacgaaauga

SEQ ID NO: 1727963 - RNA, 19 nt, Homo sapiens
  misc_RNA (1)...(19): siRNA sense strand
cagagaaauuaauggacuu

SEQ ID NO: 1727964 - RNA, 19 nt, Homo sapiens
  misc_RNA (1)...(19): siRNA sense strand
guaaggugacugcagagaa

SEQ ID NO: 1727965 - RNA, 19 nt, Homo sapiens
  misc_RNA (1)...(19): siRNA sense strand
ggaaaucuuggacuuugau

SEQ ID NO: 1727966 - RNA, 19 nt, Homo sapiens
  misc_RNA (1)...(19): siRNA sense strand
gauguugacgacgauauuu

SEQ ID NO: 1727967 - RNA, 19 nt, Homo sapiens
  misc_RNA (1)...(19): siRNA sense strand
aagcggaugaggcuaauaa

SEQ ID NO: 1727968 - RNA, 19 nt, Homo sapiens
  misc_RNA (1)...(19): siRNA sense strand
agaguuauuugcccguuau

SEQ ID NO: 1727969 - RNA, 19 nt, Homo sapiens
  misc_RNA (1)...(19): siRNA sense strand
aagccugucugaaggacua

SEQ ID NO: 1727970 - RNA, 19 nt, Homo sapiens
  misc_RNA (1)...(19): siRNA sense strand
gagaagcuggguagugaau

SEQ ID NO: 1727971 - RNA, 19 nt, Homo sapiens
  misc_RNA (1)...(19): siRNA sense strand
agagagcagugcaggaugu

SEQ ID NO: 1727972 - RNA, 19 nt, Homo sapiens
  misc_RNA (1)...(19): siRNA sense strand
ucaaaucugauccaggaaa

SEQ ID NO: 1727973 - RNA, 19 nt, Homo sapiens
  misc_RNA (1)...(19): siRNA sense strand
aagagacccuagcauacuu

SEQ ID NO: 1727974 - RNA, 19 nt, Homo sapiens
  misc_RNA (1)...(19): siRNA sense strand
ugauguagaccaagaggaa

SEQ ID NO: 1727975 - RNA, 19 nt, Homo sapiens
  misc_RNA (1)...(19): siRNA sense strand
guggaacucccauagagaa
